United States Patent Application Publication US 2011/0177960 A1 - sequence listing, part 19

SEQ ID NO: 328905 - DNA, 25 bp, Artificial
  probe
  misc_feature (1)..(25): SEQ ID NO: 2536; WAN024GMC; Start 44; Stop 68
tatggacatttcgtggcagaataat

SEQ ID NO: 328906 - DNA, 25 bp, Artificial
  probe
  misc_feature (1)..(25): SEQ ID NO: 2536; WAN024GMC; Start 48; Stop 72
gacatttcgtggcagaataatctta

SEQ ID NO: 328907 - DNA, 25 bp, Artificial
  probe
  misc_feature (1)..(25): SEQ ID NO: 2536; WAN024GMC; Start 42; Stop 66
tttatggacatttcgtggcagaata

SEQ ID NO: 328908 - DNA, 25 bp, Artificial
  probe
  misc_feature (1)..(25): SEQ ID NO: 2536; WAN024GMC; Start 35; Stop 59
tagcagatttatggacatttcgtgg

SEQ ID NO: 328909 - DNA, 25 bp, Artificial
  probe
  misc_feature (1)..(25): SEQ ID NO: 2536; WAN024GMC; Start 25; Stop 49
aacgcattgatagcagatttatgga

SEQ ID NO: 328910 - DNA, 25 bp, Artificial
  probe
  misc_feature (1)..(25): SEQ ID NO: 2536; WAN024GMC; Start 15; Stop 39
acatagaaccaacgcattgatagca

SEQ ID NO: 328911 - DNA, 25 bp, Artificial
  probe
  misc_feature (1)..(25): SEQ ID NO: 2536; WAN024GMC; Start 118; Stop 142
gttgttccaccaatcattagaaagg

SEQ ID NO: 328912 - DNA, 25 bp, Artificial
  probe
  misc_feature (1)..(25): SEQ ID NO: 2536; WAN024GMC; Start 258; Stop 282
ttctcctaagagttcgacaagttct

SEQ ID NO: 328913 - DNA, 25 bp, Artificial
  probe
  misc_feature (1)..(25): SEQ ID NO: 2536; WAN024GMC; Start 43; Stop 67
ttatggacatttcgtggcagaataa

SEQ ID NO: 328914 - DNA, 25 bp, Artificial
  probe
  misc_feature (1)..(25): SEQ ID NO: 2536; WAN024GMC; Start 117; Stop 141
agttgttccaccaatcattagaaag

SEQ ID NO: 328915 - DNA, 25 bp, Artificial
  probe
  misc_feature (1)..(25): SEQ ID NO: 2536; WAN024GMC; Start 52; Stop 76
tttcgtggcagaataatcttatctc

SEQ ID NO: 328916 - DNA, 25 bp, Artificial
  probe
  misc_feature (1)..(25): SEQ ID NO: 2536; WAN024GMC; Start 49; Stop 73
acatttcgtggcagaataatcttat

SEQ ID NO: 328917 - DNA, 25 bp, Artificial
  probe
  misc_feature (1)..(25): SEQ ID NO: 2536; WAN024GMC; Start 116; Stop 140
aagttgttccaccaatcattagaaa

SEQ ID NO: 328918 - DNA, 25 bp, Artificial
  probe
  misc_feature (1)..(25): SEQ ID NO: 2536; WAN024GMC; Start 41; Stop 65
atttatggacatttcgtggcagaat

SEQ ID NO: 328919 - DNA, 25 bp, Artificial
  probe
  misc_feature (1)..(25): SEQ ID NO: 2536; WAN024GMC; Start 24; Stop 48
caacgcattgatagcagatttatgg

SEQ ID NO: 328920 - DNA, 25 bp, Artificial
  probe
  misc_feature (1)..(25): SEQ ID NO: 2537; WAN024FMK; Start 659; Stop 683
ttgaagaattgccagagaatgttaa

SEQ ID NO: 328921 - DNA, 25 bp, Artificial
  probe
  misc_feature (1)..(25): SEQ ID NO: 2537; WAN024FMK; Start 658; Stop 682
attgaagaattgccagagaatgtta

SEQ ID NO: 328922 - DNA, 25 bp, Artificial
  probe
  misc_feature (1)..(25): SEQ ID NO: 2537; WAN024FMK; Start 657; Stop 681
tattgaagaattgccagagaatgtt

SEQ ID NO: 328923 - DNA, 25 bp, Artificial
  probe
  misc_feature (1)..(25): SEQ ID NO: 2537; WAN024FMK; Start 656; Stop 680
atattgaagaattgccagagaatgt

SEQ ID NO: 328924 - DNA, 25 bp, Artificial
  probe
  misc_feature (1)..(25): SEQ ID NO: 2537; WAN024FMK; Start 542; Stop 566
ctgaagatggagtagttatagctgg

SEQ ID NO: 328925 - DNA, 25 bp, Artificial
  probe
  misc_feature (1)..(25): SEQ ID NO: 2537; WAN024FMK; Start 550; Stop 574
ggagtagttatagctggcaatctag

SEQ ID NO: 328926 - DNA, 25 bp, Artificial
  probe
  misc_feature (1)..(25): SEQ ID NO: 2537; WAN024FMK; Start 549; Stop 573
tggagtagttatagctggcaatcta

SEQ ID NO: 328927 - DNA, 25 bp, Artificial
  probe
  misc_feature (1)..(25): SEQ ID NO: 2537; WAN024FMK; Start 547; Stop 571
gatggagtagttatagctggcaatc

SEQ ID NO: 328928 - DNA, 25 bp, Artificial
  probe
  misc_feature (1)..(25): SEQ ID NO: 2537; WAN024FMK; Start 825; Stop 849
cctatatcttgcttctggaatacca

SEQ ID NO: 328929 - DNA, 25 bp, Artificial
  probe
  misc_feature (1)..(25): SEQ ID NO: 2537; WAN024FMK; Start 548; Stop 572
atggagtagttatagctggcaatct

SEQ ID NO: 328930 - DNA, 25 bp, Artificial
  probe
  misc_feature (1)..(25): SEQ ID NO: 2537; WAN024FMK; Start 546; Stop 570
agatggagtagttatagctggcaat

SEQ ID NO: 328931 - DNA, 25 bp, Artificial
  probe
  misc_feature (1)..(25): SEQ ID NO: 2537; WAN024FMK; Start 167; Stop 191
ttagtgtcataggctacaagtggac

SEQ ID NO: 328932 - DNA, 25 bp, Artificial
  probe
  misc_feature (1)..(25): SEQ ID NO: 2537; WAN024FMK; Start 545; Stop 569
aagatggagtagttatagctggcaa

SEQ ID NO: 328933 - DNA, 25 bp, Artificial
  probe
  misc_feature (1)..(25): SEQ ID NO: 2537; WAN024FMK; Start 344; Stop 368
aaggtattcaaggagttatcgaaga

SEQ ID NO: 328934 - DNA, 25 bp, Artificial
  probe
  misc_feature (1)..(25): SEQ ID NO: 2537; WAN024FMK; Start 741; Stop 765
attggtttgggatggtgatagttta

SEQ ID NO: 328935 - DNA, 25 bp, Artificial
  probe
  misc_feature (1)..(25): SEQ ID NO: 2537; WAN024FMK; Start 983; Stop 1007
caaatacaatggaagtgggaaagaa

SEQ ID NO: 328936 - DNA, 25 bp, Artificial
  probe
  misc_feature (1)..(25): SEQ ID NO: 2537; WAN024FMK; Start 976; Stop 1000
atgaaagcaaatacaatggaagtgg

SEQ ID NO: 328937 - DNA, 25 bp, Artificial
  probe
  misc_feature (1)..(25): SEQ ID NO: 2537; WAN024FMK; Start 744; Stop 768
ggtttgggatggtgatagtttagat

SEQ ID NO: 328938 - DNA, 25 bp, Artificial
  probe
  misc_feature (1)..(25): SEQ ID NO: 2537; WAN024FMK; Start 345; Stop 369
aggtattcaaggagttatcgaagat

SEQ ID NO: 328939 - DNA, 25 bp, Artificial
  probe
  misc_feature (1)..(25): SEQ ID NO: 2537; WAN024FMK; Start 818; Stop 842
aaacatccctatatcttgcttctgg

SEQ ID NO: 328940 - DNA, 25 bp, Artificial
  probe
  misc_feature (1)..(25): SEQ ID NO: 2537; WAN024FMK; Start 541; Stop 565
actgaagatggagtagttatagctg

SEQ ID NO: 328941 - DNA, 25 bp, Artificial
  probe
  misc_feature (1)..(25): SEQ ID NO: 2537; WAN024FMK; Start 824; Stop 848
ccctatatcttgcttctggaatacc

SEQ ID NO: 328942 - DNA, 25 bp, Artificial
  probe
  misc_feature (1)..(25): SEQ ID NO: 2537; WAN024FMK; Start 974; Stop 998
tgatgaaagcaaatacaatggaagt

SEQ ID NO: 328943 - DNA, 25 bp, Artificial
  probe
  misc_feature (1)..(25): SEQ ID NO: 2537; WAN024FMK; Start 742; Stop 766
ttggtttgggatggtgatagtttag

SEQ ID NO: 328944 - DNA, 25 bp, Artificial
  probe
  misc_feature (1)..(25): SEQ ID NO: 2537; WAN024FMK; Start 975; Stop 999
gatgaaagcaaatacaatggaagtg

SEQ ID NO: 328945 - DNA, 25 bp, Artificial
  probe
  misc_feature (1)..(25): SEQ ID NO: 2537; WAN024FMK; Start 992; Stop 1016
tggaagtgggaaagaaattaagaga

SEQ ID NO: 328946 - DNA, 25 bp, Artificial
  probe
  misc_feature (1)..(25): SEQ ID NO: 2537; WAN024FMK; Start 726; Stop 750
agtaggtaagtttggattggtttgg

SEQ ID NO: 328947 - DNA, 25 bp, Artificial
  probe
  misc_feature (1)..(25): SEQ ID NO: 2537; WAN024FMK; Start 995; Stop 1019
aagtgggaaagaaattaagagaggg

SEQ ID NO: 328948 - DNA, 25 bp, Artificial
  probe
  misc_feature (1)..(25): SEQ ID NO: 2537; WAN024FMK; Start 544; Stop 568
gaagatggagtagttatagctggca

SEQ ID NO: 328949 - DNA, 25 bp, Artificial
  probe
  misc_feature (1)..(25): SEQ ID NO: 2537; WAN024FMK; Start 543; Stop 567
tgaagatggagtagttatagctggc

SEQ ID NO: 328950 - DNA, 25 bp, Artificial
  probe
  misc_feature (1)..(25): SEQ ID NO: 2537; WAN024FMK; Start 997; Stop 1021
gtgggaaagaaattaagagagggtt

SEQ ID NO: 328951 - DNA, 25 bp, Artificial
  probe
  misc_feature (1)..(25): SEQ ID NO: 2537; WAN024FMK; Start 984; Stop 1008
aaatacaatggaagtgggaaagaaa

SEQ ID NO: 328952 - DNA, 25 bp, Artificial
  probe
  misc_feature (1)..(25): SEQ ID NO: 2537; WAN024FMK; Start 998; Stop 1022
tgggaaagaaattaagagagggtta

SEQ ID NO: 328953 - DNA, 25 bp, Artificial
  probe
  misc_feature (1)..(25): SEQ ID NO: 2539; WAN024DG4; Start 52; Stop 76
agtaatgagaatgcgaatggacttc

SEQ ID NO: 328954 - DNA, 25 bp, Artificial
  probe
  misc_feature (1)..(25): SEQ ID NO: 2539; WAN024DG4; Start 50; Stop 74
gaagtaatgagaatgcgaatggact

SEQ ID NO: 328955 - DNA, 25 bp, Artificial
  probe
  misc_feature (1)..(25): SEQ ID NO: 2539; WAN024DG4; Start 49; Stop 73
ggaagtaatgagaatgcgaatggac

SEQ ID NO: 328956 - DNA, 25 bp, Artificial
  probe
  misc_feature (1)..(25): SEQ ID NO: 2539; WAN024DG4; Start 88; Stop 112
tttcttaaaccgatttggcaacaat

SEQ ID NO: 328957 - DNA, 25 bp, Artificial
  probe
  misc_feature (1)..(25): SEQ ID NO: 2539; WAN024DG4; Start 91; Stop 115
cttaaaccgatttggcaacaattac

SEQ ID NO: 328958 - DNA, 25 bp, Artificial
  probe
  misc_feature (1)..(25): SEQ ID NO: 2539; WAN024DG4; Start 90; Stop 114
tcttaaaccgatttggcaacaatta

SEQ ID NO: 328959 - DNA, 25 bp, Artificial
  probe
  misc_feature (1)..(25): SEQ ID NO: 2539; WAN024DG4; Start 89; Stop 113
ttcttaaaccgatttggcaacaatt

SEQ ID NO: 328960 - DNA, 25 bp, Artificial
  probe
  misc_feature (1)..(25): SEQ ID NO: 2539; WAN024DG4; Start 54; Stop 78
taatgagaatgcgaatggacttctt

SEQ ID NO: 328961 - DNA, 25 bp, Artificial
  probe
  misc_feature (1)..(25): SEQ ID NO: 2539; WAN024DG4; Start 92; Stop 116
ttaaaccgatttggcaacaattacc

SEQ ID NO: 328962 - DNA, 25 bp, Artificial
  probe
  misc_feature (1)..(25): SEQ ID NO: 2539; WAN024DG4; Start 53; Stop 77
gtaatgagaatgcgaatggacttct

SEQ ID NO: 328963 - DNA, 25 bp, Artificial
  probe
  misc_feature (1)..(25): SEQ ID NO: 2539; WAN024DG4; Start 55; Stop 79
aatgagaatgcgaatggacttcttc

SEQ ID NO: 328964 - DNA, 25 bp, Artificial
  probe
  misc_feature (1)..(25): SEQ ID NO: 2539; WAN024DG4; Start 51; Stop 75
aagtaatgagaatgcgaatggactt

SEQ ID NO: 328965 - DNA, 25 bp, Artificial
  probe
  misc_feature (1)..(25): SEQ ID NO: 2539; WAN024DG4; Start 48; Stop 72
gggaagtaatgagaatgcgaatgga

SEQ ID NO: 328966 - DNA, 25 bp, Artificial
  probe
  misc_feature (1)..(25): SEQ ID NO: 2539; WAN024DG4; Start 93; Stop 117
taaaccgatttggcaacaattaccg

SEQ ID NO: 328967 - DNA, 25 bp, Artificial
  probe
  misc_feature (1)..(25): SEQ ID NO: 2539; WAN024DG4; Start 12; Stop 36
gttttattttgcggatgcctattca

SEQ ID NO: 328968 - DNA, 25 bp, Artificial
  probe
  misc_feature (1)..(25): SEQ ID NO: 2539; WAN024DG4; Start 11; Stop 35
tgttttattttgcggatgcctattc

SEQ ID NO: 328969 - DNA, 25 bp, Artificial
  probe
  misc_feature (1)..(25): SEQ ID NO: 2539; WAN024DG4; Start 10; Stop 34
ctgttttattttgcggatgcctatt

SEQ ID NO: 328970 - DNA, 25 bp, Artificial
  probe
  misc_feature (1)..(25): SEQ ID NO: 2539; WAN024DG4; Start 86; Stop 110
attttcttaaaccgatttggcaaca

SEQ ID NO: 328971 - DNA, 25 bp, Artificial
  probe
  misc_feature (1)..(25): SEQ ID NO: 2539; WAN024DG4; Start 83; Stop 107
agtattttcttaaaccgatttggca

SEQ ID NO: 328972 - DNA, 25 bp, Artificial
  probe
  misc_feature (1)..(25): SEQ ID NO: 2539; WAN024DG4; Start 75; Stop 99
tcttcgtgagtattttcttaaaccg

SEQ ID NO: 328973 - DNA, 25 bp, Artificial
  probe
  misc_feature (1)..(25): SEQ ID NO: 2539; WAN024DG4; Start 13; Stop 37
ttttattttgcggatgcctattcat

SEQ ID NO: 328974 - DNA, 25 bp, Artificial
  probe
  misc_feature (1)..(25): SEQ ID NO: 2539; WAN024DG4; Start 82; Stop 106
gagtattttcttaaaccgatttggc

SEQ ID NO: 328975 - DNA, 25 bp, Artificial
  probe
  misc_feature (1)..(25): SEQ ID NO: 2539; WAN024DG4; Start 85; Stop 109
tattttcttaaaccgatttggcaac

SEQ ID NO: 328976 - DNA, 25 bp, Artificial
  probe
  misc_feature (1)..(25): SEQ ID NO: 2539; WAN024DG4; Start 84; Stop 108
gtattttcttaaaccgatttggcaa

SEQ ID NO: 328977 - DNA, 25 bp, Artificial
  probe
  misc_feature (1)..(25): SEQ ID NO: 2539; WAN024DG4; Start 9; Stop 33
tctgttttattttgcggatgcctat

SEQ ID NO: 328978 - DNA, 25 bp, Artificial
  probe
  misc_feature (1)..(25): SEQ ID NO: 2539; WAN024DG4; Start 87; Stop 111
ttttcttaaaccgatttggcaacaa

SEQ ID NO: 328979 - DNA, 25 bp, Artificial
  probe
  misc_feature (1)..(25): SEQ ID NO: 2539; WAN024DG4; Start 68; Stop 92
atggacttcttcgtgagtattttct

SEQ ID NO: 328980 - DNA, 25 bp, Artificial
  probe
  misc_feature (1)..(25): SEQ ID NO: 2539; WAN024DG4; Start 8; Stop 32
ttctgttttattttgcggatgccta

SEQ ID NO: 328981 - DNA, 25 bp, Artificial
  probe
  misc_feature (1)..(25): SEQ ID NO: 2539; WAN024DG4; Start 69; Stop 93
tggacttcttcgtgagtattttctt

SEQ ID NO: 328982 - DNA, 25 bp, Artificial
  probe
  misc_feature (1)..(25): SEQ ID NO: 2539; WAN024DG4; Start 67; Stop 91
aatggacttcttcgtgagtattttc

SEQ ID NO: 328983 - DNA, 25 bp, Artificial
  probe
  misc_feature (1)..(25): SEQ ID NO: 2539; WAN024DG4; Start 66; Stop 90
gaatggacttcttcgtgagtatttt

SEQ ID NO: 328984 - DNA, 25 bp, Artificial
  probe
  misc_feature (1)..(25): SEQ ID NO: 2539; WAN024DG4; Start 6; Stop 30
aattctgttttattttgcggatgcc

SEQ ID NO: 328985 - DNA, 25 bp, Artificial
  probe
  misc_feature (1)..(25): SEQ ID NO: 2539; WAN024DG4; Start 79; Stop 103
cgtgagtattttcttaaaccgattt

SEQ ID NO: 328986 - DNA, 25 bp, Artificial
  probe
  misc_feature (1)..(25): SEQ ID NO: 2540; WAN024F3O; Start 284; Stop 308
atgtagaactcgctgctatcaatat

SEQ ID NO: 328987 - DNA, 25 bp, Artificial
  probe
  misc_feature (1)..(25): SEQ ID NO: 2540; WAN024F3O; Start 283; Stop 307
gatgtagaactcgctgctatcaata

SEQ ID NO: 328988 - DNA, 25 bp, Artificial
  probe
  misc_feature (1)..(25): SEQ ID NO: 2540; WAN024F3O; Start 270; Stop 294
ccgtaatatggctgatgtagaactc

SEQ ID NO: 328989 - DNA, 25 bp, Artificial
  probe
  misc_feature (1)..(25): SEQ ID NO: 2540; WAN024F3O; Start 269; Stop 293
tccgtaatatggctgatgtagaact

SEQ ID NO: 328990 - DNA, 25 bp, Artificial
  probe
  misc_feature (1)..(25): SEQ ID NO: 2540; WAN024F3O; Start 268; Stop 292
gtccgtaatatggctgatgtagaac

SEQ ID NO: 328991 - DNA, 25 bp, Artificial
  probe
  misc_feature (1)..(25): SEQ ID NO: 2540; WAN024F3O; Start 271; Stop 295
cgtaatatggctgatgtagaactcg

SEQ ID NO: 328992 - DNA, 25 bp, Artificial
  probe
  misc_feature (1)..(25): SEQ ID NO: 2540; WAN024F3O; Start 273; Stop 297
taatatggctgatgtagaactcgct

SEQ ID NO: 328993 - DNA, 25 bp, Artificial
  probe
  misc_feature (1)..(25): SEQ ID NO: 2540; WAN024F3O; Start 272; Stop 296
gtaatatggctgatgtagaactcgc

SEQ ID NO: 328994 - DNA, 25 bp, Artificial
  probe
  misc_feature (1)..(25): SEQ ID NO: 2540; WAN024F3O; Start 285; Stop 309
tgtagaactcgctgctatcaatatt

SEQ ID NO: 328995 - DNA, 25 bp, Artificial
  probe
  misc_feature (1)..(25): SEQ ID NO: 2540; WAN024F3O; Start 195; Stop 219
ctatctctaccttgagtacggagta

SEQ ID NO: 328996 - DNA, 25 bp, Artificial
  probe
  misc_feature (1)..(25): SEQ ID NO: 2540; WAN024F3O; Start 193; Stop 217
atctatctctaccttgagtacggag

SEQ ID NO: 328997 - DNA, 25 bp, Artificial
  probe
  misc_feature (1)..(25): SEQ ID NO: 2540; WAN024F3O; Start 196; Stop 220
tatctctaccttgagtacggagtaa

SEQ ID NO: 328998 - DNA, 25 bp, Artificial
  probe
  misc_feature (1)..(25): SEQ ID NO: 2540; WAN024F3O; Start 267; Stop 291
cgtccgtaatatggctgatgtagaa

SEQ ID NO: 328999 - DNA, 25 bp, Artificial
  probe
  misc_feature (1)..(25): SEQ ID NO: 2540; WAN024F3O; Start 287; Stop 311
tagaactcgctgctatcaatattca

SEQ ID NO: 329000 - DNA, 25 bp, Artificial
  probe
  misc_feature (1)..(25): SEQ ID NO: 2540; WAN024F3O; Start 192; Stop 216
tatctatctctaccttgagtacgga

SEQ ID NO: 329001 - DNA, 25 bp, Artificial
  probe
  misc_feature (1)..(25): SEQ ID NO: 2540; WAN024F3O; Start 286; Stop 310
gtagaactcgctgctatcaatattc

SEQ ID NO: 329002 - DNA, 25 bp, Artificial
  probe
  misc_feature (1)..(25): SEQ ID NO: 2540; WAN024F3O; Start 288; Stop 312
agaactcgctgctatcaatattcac

SEQ ID NO: 329003 - DNA, 25 bp, Artificial
  probe
  misc_feature (1)..(25): SEQ ID NO: 2540; WAN024F3O; Start 194; Stop 218
tctatctctaccttgagtacggagt

SEQ ID NO: 329004 - DNA, 25 bp, Artificial
  probe
  misc_feature (1)..(25): SEQ ID NO: 2540; WAN024F3O; Start 274; Stop 298
aatatggctgatgtagaactcgctg

SEQ ID NO: 329005 - DNA, 25 bp, Artificial
  probe
  misc_feature (1)..(25): SEQ ID NO: 2540; WAN024F3O; Start 191; Stop 215
atatctatctctaccttgagtacgg

SEQ ID NO: 329006 - DNA, 25 bp, Artificial
  probe
  misc_feature (1)..(25): SEQ ID NO: 2540; WAN024F3O; Start 300; Stop 324
tatcaatattcacgttgcaggtatc

SEQ ID NO: 329007 - DNA, 25 bp, Artificial
  probe
  misc_feature (1)..(25): SEQ ID NO: 2540; WAN024F3O; Start 299; Stop 323
ctatcaatattcacgttgcaggtat

SEQ ID NO: 329008 - DNA, 25 bp, Artificial
  probe
  misc_feature (1)..(25): SEQ ID NO: 2540; WAN024F3O; Start 289; Stop 313
gaactcgctgctatcaatattcacg

SEQ ID NO: 329009 - DNA, 25 bp, Artificial
  probe
  misc_feature (1)..(25): SEQ ID NO: 2540; WAN024F3O; Start 298; Stop 322
gctatcaatattcacgttgcaggta

SEQ ID NO: 329010 - DNA, 25 bp, Artificial
  probe
  misc_feature (1)..(25): SEQ ID NO: 2540; WAN024F3O; Start 6; Stop 30
aattgaagaacaacttggcgaaatc

SEQ ID NO: 329011 - DNA, 25 bp, Artificial
  probe
  misc_feature (1)..(25): SEQ ID NO: 2540; WAN024F3O; Start 5; Stop 29
gaattgaagaacaacttggcgaaat

SEQ ID NO: 329012 - DNA, 25 bp, Artificial
  probe
  misc_feature (1)..(25): SEQ ID NO: 2540; WAN024F3O; Start 301; Stop 325
atcaatattcacgttgcaggtatcg

SEQ ID NO: 329013 - DNA, 25 bp, Artificial
  probe
  misc_feature (1)..(25): SEQ ID NO: 2540; WAN024F3O; Start 170; Stop 194
tggacgaagaactcacagcagatat

SEQ ID NO: 329014 - DNA, 25 bp, Artificial
  probe
  misc_feature (1)..(25): SEQ ID NO: 2540; WAN024F3O; Start 197; Stop 221
atctctaccttgagtacggagtaaa

SEQ ID NO: 329015 - DNA, 25 bp, Artificial
  probe
  misc_feature (1)..(25): SEQ ID NO: 2540; WAN024F3O; Start 266; Stop 290
ccgtccgtaatatggctgatgtaga

SEQ ID NO: 329016 - DNA, 25 bp, Artificial
  probe
  misc_feature (1)..(25): SEQ ID NO: 2540; WAN024F3O; Start 11; Stop 35
aagaacaacttggcgaaatcgttat

SEQ ID NO: 329017 - DNA, 25 bp, Artificial
  probe
  misc_feature (1)..(25): SEQ ID NO: 2540; WAN024F3O; Start 292; Stop 316
ctcgctgctatcaatattcacgttg

SEQ ID NO: 329018 - DNA, 25 bp, Artificial
  probe
  misc_feature (1)..(25): SEQ ID NO: 2540; WAN024F3O; Start 291; Stop 315
actcgctgctatcaatattcacgtt

SEQ ID NO: 329019 - DNA, 25 bp, Artificial
  probe
  misc_feature (1)..(25): SEQ ID NO: 2541; WAN024DU6; Start 610; Stop 634
ttgatggatgatgttgctgaatatg

SEQ ID NO: 329020 - DNA, 25 bp, Artificial
  probe
  misc_feature (1)..(25): SEQ ID NO: 2541; WAN024DU6; Start 497; Stop 521
tattagtcttagatgagccaacagc

SEQ ID NO: 329021 - DNA, 25 bp, Artificial
  probe
  misc_feature (1)..(25): SEQ ID NO: 2541; WAN024DU6; Start 804; Stop 828
taagatagaggagttcaaggagtcg

SEQ ID NO: 329022 - DNA, 25 bp, Artificial
  probe
  misc_feature (1)..(25): SEQ ID NO: 2541; WAN024DU6; Start 803; Stop 827
ttaagatagaggagttcaaggagtc

SEQ ID NO: 329023 - DNA, 25 bp, Artificial
  probe
  misc_feature (1)..(25): SEQ ID NO: 2541; WAN024DU6; Start 611; Stop 635
tgatggatgatgttgctgaatatgc

SEQ ID NO: 329024 - DNA, 25 bp, Artificial
  probe
  misc_feature (1)..(25): SEQ ID NO: 2541; WAN024DU6; Start 390; Stop 414
tctggttggaattgatgaatcactt

SEQ ID NO: 329025 - DNA, 25 bp, Artificial
  probe
  misc_feature (1)..(25): SEQ ID NO: 2541; WAN024DU6; Start 496; Stop 520
atattagtcttagatgagccaacag

SEQ ID NO: 329026 - DNA, 25 bp, Artificial
  probe
  misc_feature (1)..(25): SEQ ID NO: 2541; WAN024DU6; Start 389; Stop 413
ctctggttggaattgatgaatcact

SEQ ID NO: 329027 - DNA, 25 bp, Artificial
  probe
  misc_feature (1)..(25): SEQ ID NO: 2541; WAN024DU6; Start 808; Stop 832
atagaggagttcaaggagtcgctaa

SEQ ID NO: 329028 - DNA, 25 bp, Artificial
  probe
  misc_feature (1)..(25): SEQ ID NO: 2541; WAN024DU6; Start 348; Stop 372
ttctgaagaagatgctgtgaagact

SEQ ID NO: 329029 - DNA, 25 bp, Artificial
  probe
  misc_feature (1)..(25): SEQ ID NO: 2541; WAN024DU6; Start 202; Stop 226
gataccttaatcacctcgacttcta

SEQ ID NO: 329030 - DNA, 25 bp, Artificial
  probe
  misc_feature (1)..(25): SEQ ID NO: 2541; WAN024DU6; Start 349; Stop 373
tctgaagaagatgctgtgaagactg

SEQ ID NO: 329031 - DNA, 25 bp, Artificial
  probe
  misc_feature (1)..(25): SEQ ID NO: 2541; WAN024DU6; Start 203; Stop 227
ataccttaatcacctcgacttctaa

SEQ ID NO: 329032 - DNA, 25 bp, Artificial
  probe
  misc_feature (1)..(25): SEQ ID NO: 2541; WAN024DU6; Start 807; Stop 831
gatagaggagttcaaggagtcgcta

SEQ ID NO: 329033 - DNA, 25 bp, Artificial
  probe
  misc_feature (1)..(25): SEQ ID NO: 2541; WAN024DU6; Start 608; Stop 632
atttgatggatgatgttgctgaata

SEQ ID NO: 329034 - DNA, 25 bp, Artificial
  probe
  misc_feature (1)..(25): SEQ ID NO: 2541; WAN024DU6; Start 609; Stop 633
tttgatggatgatgttgctgaatat

SEQ ID NO: 329035 - DNA, 25 bp, Artificial
  probe
  misc_feature (1)..(25): SEQ ID NO: 2541; WAN024DU6; Start 607; Stop 631
catttgatggatgatgttgctgaat

SEQ ID NO: 329036 - DNA, 25 bp, Artificial
  probe
  misc_feature (1)..(25): SEQ ID NO: 2541; WAN024DU6; Start 755; Stop 779
tttgtaaacgattggctgatagagg

SEQ ID NO: 329037 - DNA, 25 bp, Artificial
  probe
  misc_feature (1)..(25): SEQ ID NO: 2541; WAN024DU6; Start 712; Stop 736
tttatggaagaagttcagttgggag

SEQ ID NO: 329038 - DNA, 25 bp, Artificial
  probe
  misc_feature (1)..(25): SEQ ID NO: 2541; WAN024DU6; Start 714; Stop 738
tatggaagaagttcagttgggagta

SEQ ID NO: 329039 - DNA, 25 bp, Artificial
  probe
  misc_feature (1)..(25): SEQ ID NO: 2541; WAN024DU6; Start 152; Stop 176
aactcttaaatggtttattggtgcc

SEQ ID NO: 329040 - DNA, 25 bp, Artificial
  probe
  misc_feature (1)..(25): SEQ ID NO: 2541; WAN024DU6; Start 388; Stop 412
gctctggttggaattgatgaatcac

SEQ ID NO: 329041 - DNA, 25 bp, Artificial
  probe
  misc_feature (1)..(25): SEQ ID NO: 2541; WAN024DU6; Start 815; Stop 839
agttcaaggagtcgctaaatggata

SEQ ID NO: 329042 - DNA, 25 bp, Artificial
  probe
  misc_feature (1)..(25): SEQ ID NO: 2541; WAN024DU6; Start 82; Stop 106
ttgacgattgaagatggctcttata

SEQ ID NO: 329043 - DNA, 25 bp, Artificial
  probe
  misc_feature (1)..(25): SEQ ID NO: 2541; WAN024DU6; Start 151; Stop 175
caactcttaaatggtttattggtgc

SEQ ID NO: 329044 - DNA, 25 bp, Artificial
  probe
  misc_feature (1)..(25): SEQ ID NO: 2541; WAN024DU6; Start 85; Stop 109
acgattgaagatggctcttatacag

SEQ ID NO: 329045 - DNA, 25 bp, Artificial
  probe
  misc_feature (1)..(25): SEQ ID NO: 2541; WAN024DU6; Start 84; Stop 108
gacgattgaagatggctcttataca

SEQ ID NO: 329046 - DNA, 25 bp, Artificial
  probe
  misc_feature (1)..(25): SEQ ID NO: 2541; WAN024DU6; Start 83; Stop 107
tgacgattgaagatggctcttatac

SEQ ID NO: 329047 - DNA, 25 bp, Artificial
  probe
  misc_feature (1)..(25): SEQ ID NO: 2541; WAN024DU6; Start 495; Stop 519
tatattagtcttagatgagccaaca

SEQ ID NO: 329048 - DNA, 25 bp, Artificial
  probe
  misc_feature (1)..(25): SEQ ID NO: 2541; WAN024DU6; Start 601; Stop 625
gtaacgcatttgatggatgatgttg

SEQ ID NO: 329049 - DNA, 25 bp, Artificial
  probe
  misc_feature (1)..(25): SEQ ID NO: 2541; WAN024DU6; Start 713; Stop 737
ttatggaagaagttcagttgggagt

SEQ ID NO: 329050 - DNA, 25 bp, Artificial
  probe
  misc_feature (1)..(25): SEQ ID NO: 2541; WAN024DU6; Start 720; Stop 744
agaagttcagttgggagtacctaaa

SEQ ID NO: 329051 - DNA, 25 bp, Artificial
  probe
  misc_feature (1)..(25): SEQ ID NO: 2541; WAN024DU6; Start 719; Stop 743
aagaagttcagttgggagtacctaa

SEQ ID NO: 329052 - DNA, 25 bp, Artificial
  probe
  misc_feature (1)..(25): SEQ ID NO: 2542; WAN024C6J; Start 1; Stop 25
atgggaattgggattgattgtattt

SEQ ID NO: 329053 - DNA, 25 bp, Artificial
  probe
  misc_feature (1)..(25): SEQ ID NO: 2542; WAN024C6J; Start 2; Stop 26
tgggaattgggattgattgtattta

SEQ ID NO: 329054 - DNA, 25 bp, Artificial
  probe
  misc_feature (1)..(25): SEQ ID NO: 2542; WAN024C6J; Start 3; Stop 27
gggaattgggattgattgtatttat

SEQ ID NO: 329055 - DNA, 25 bp, Artificial
  probe
  misc_feature (1)..(25): SEQ ID NO: 2542; WAN024C6J; Start 4; Stop 28
ggaattgggattgattgtatttata

SEQ ID NO: 329056 - DNA, 25 bp, Artificial
  probe
  misc_feature (1)..(25): SEQ ID NO: 2543; WAN024GOL; Start 1534; Stop 1558
gaggatgaggacttgattgaagaat

SEQ ID NO: 329057 - DNA, 25 bp, Artificial
  probe
  misc_feature (1)..(25): SEQ ID NO: 2543; WAN024GOL; Start 1182; Stop 1206
tatcttagaaggtctcttgattgcg

SEQ ID NO: 329058 - DNA, 25 bp, Artificial
  probe
  misc_feature (1)..(25): SEQ ID NO: 2543; WAN024GOL; Start 1176; Stop 1200
cgctcatatcttagaaggtctcttg

SEQ ID NO: 329059 - DNA, 25 bp, Artificial
  probe
  misc_feature (1)..(25): SEQ ID NO: 2543; WAN024GOL; Start 1177; Stop 1201
gctcatatcttagaaggtctcttga

SEQ ID NO: 329060 - DNA, 25 bp, Artificial
  probe
  misc_feature (1)..(25): SEQ ID NO: 2543; WAN024GOL; Start 1368; Stop 1392
tcaatctgagtatgatgacctcttg

SEQ ID NO: 329061 - DNA, 25 bp, Artificial
  probe
  misc_feature (1)..(25): SEQ ID NO: 2543; WAN024GOL; Start 1369; Stop 1393
caatctgagtatgatgacctcttgg

SEQ ID NO: 329062 - DNA, 25 bp, Artificial
  probe
  misc_feature (1)..(25): SEQ ID NO: 2543; WAN024GOL; Start 1367; Stop 1391
ttcaatctgagtatgatgacctctt

SEQ ID NO: 329063 - DNA, 25 bp, Artificial
  probe
  misc_feature (1)..(25): SEQ ID NO: 2543; WAN024GOL; Start 1366; Stop 1390
attcaatctgagtatgatgacctct

SEQ ID NO: 329064 - DNA, 25 bp, Artificial
  probe
  misc_feature (1)..(25): SEQ ID NO: 2543; WAN024GOL; Start 2434; Stop 2458
gatcaagatgctcagatagtgactt

SEQ ID NO: 329065 - DNA, 25 bp, Artificial
  probe
  misc_feature (1)..(25): SEQ ID NO: 2543; WAN024GOL; Start 1378; Stop 1402
tatgatgacctcttggctctgattg

SEQ ID NO: 329066 - DNA, 25 bp, Artificial
  probe
  misc_feature (1)..(25): SEQ ID NO: 2543; WAN024GOL; Start 1377; Stop 1401
gtatgatgacctcttggctctgatt

SEQ ID NO: 329067 - DNA, 25 bp, Artificial
  probe
  misc_feature (1)..(25): SEQ ID NO: 2543; WAN024GOL; Start 1181; Stop 1205
atatcttagaaggtctcttgattgc

SEQ ID NO: 329068 - DNA, 25 bp, Artificial
  probe
  misc_feature (1)..(25): SEQ ID NO: 2543; WAN024GOL; Start 1840; Stop 1864
attcagacggttatcaatgttgagt

SEQ ID NO: 329069 - DNA, 25 bp, Artificial
  probe
  misc_feature (1)..(25): SEQ ID NO: 2543; WAN024GOL; Start 1365; Stop 1389
gattcaatctgagtatgatgacctc

SEQ ID NO: 329070 - DNA, 25 bp, Artificial
  probe
  misc_feature (1)..(25): SEQ ID NO: 2543; WAN024GOL; Start 1839; Stop 1863
tattcagacggttatcaatgttgag

SEQ ID NO: 329071 - DNA, 25 bp, Artificial
  probe
  misc_feature (1)..(25): SEQ ID NO: 2543; WAN024GOL; Start 1533; Stop 1557
cgaggatgaggacttgattgaagaa

SEQ ID NO: 329072 - DNA, 25 bp, Artificial
  probe
  misc_feature (1)..(25): SEQ ID NO: 2543; WAN024GOL; Start 1982; Stop 2006
aggatgaagatgagttaatcaatgt

SEQ ID NO: 329073 - DNA, 25 bp, Artificial
  probe
  misc_feature (1)..(25): SEQ ID NO: 2543; WAN024GOL; Start 1535; Stop 1559
aggatgaggacttgattgaagaatc

SEQ ID NO: 329074 - DNA, 25 bp, Artificial
  probe
  misc_feature (1)..(25): SEQ ID NO: 2543; WAN024GOL; Start 1983; Stop 2007
ggatgaagatgagttaatcaatgtc

SEQ ID NO: 329075 - DNA, 25 bp, Artificial
  probe
  misc_feature (1)..(25): SEQ ID NO: 2543; WAN024GOL; Start 1841; Stop 1865
ttcagacggttatcaatgttgagtc

SEQ ID NO: 329076 - DNA, 25 bp, Artificial
  probe
  misc_feature (1)..(25): SEQ ID NO: 2543; WAN024GOL; Start 2433; Stop 2457
ggatcaagatgctcagatagtgact

SEQ ID NO: 329077 - DNA, 25 bp, Artificial
  probe
  misc_feature (1)..(25): SEQ ID NO: 2543; WAN024GOL; Start 1370; Stop 1394
aatctgagtatgatgacctcttggc

SEQ ID NO: 329078 - DNA, 25 bp, Artificial
  probe
  misc_feature (1)..(25): SEQ ID NO: 2543; WAN024GOL; Start 1207; Stop 1231
ctagaccatatcgacgaagtgattc

SEQ ID NO: 329079 - DNA, 25 bp, Artificial
  probe
  misc_feature (1)..(25): SEQ ID NO: 2543; WAN024GOL; Start 1543; Stop 1567
gacttgattgaagaatcggatgtct

SEQ ID NO: 329080 - DNA, 25 bp, Artificial
  probe
  misc_feature (1)..(25): SEQ ID NO: 2543; WAN024GOL; Start 1376; Stop 1400
agtatgatgacctcttggctctgat

SEQ ID NO: 329081 - DNA, 25 bp, Artificial
  probe
  misc_feature (1)..(25): SEQ ID NO: 2543; WAN024GOL; Start 2432; Stop 2456
tggatcaagatgctcagatagtgac

SEQ ID NO: 329082 - DNA, 25 bp, Artificial
  probe
  misc_feature (1)..(25): SEQ ID NO: 2543; WAN024GOL; Start 1883; Stop 1907
cttatctcttctttacaacccgtca

SEQ ID NO: 329083 - DNA, 25 bp, Artificial
  probe
  misc_feature (1)..(25): SEQ ID NO: 2543; WAN024GOL; Start 1989; Stop 2013
agatgagttaatcaatgtcttgttg

SEQ ID NO: 329084 - DNA, 25 bp, Artificial
  probe
  misc_feature (1)..(25): SEQ ID NO: 2543; WAN024GOL; Start 1884; Stop 1908
ttatctcttctttacaacccgtcac

SEQ ID NO: 329085 - DNA, 25 bp, Artificial
  probe
  misc_feature (1)..(25): SEQ ID NO: 2543; WAN024GOL; Start 1879; Stop 1903
gatgcttatctcttctttacaaccc

SEQ ID NO: 329086 - DNA, 25 bp, Artificial
  probe
  misc_feature (1)..(25): SEQ ID NO: 2543; WAN024GOL; Start 1454; Stop 1478
aagacgaattggatgaagttaaacg

SEQ ID NO: 329087 - DNA, 25 bp, Artificial
  probe
  misc_feature (1)..(25): SEQ ID NO: 2543; WAN024GOL; Start 1880; Stop 1904
atgcttatctcttctttacaacccg

SEQ ID NO: 329088 - DNA, 25 bp, Artificial
  probe
  misc_feature (1)..(25): SEQ ID NO: 2543; WAN024GOL; Start 2431; Stop 2455
ctggatcaagatgctcagatagtga

SEQ ID NO: 329089 - DNA, 25 bp, Artificial
  probe
  misc_feature (1)..(25): SEQ ID NO: 2544; WAN024DBJ; Start 207; Stop 231
agatgtgtatgaagttctggttgtc

SEQ ID NO: 329090 - DNA, 25 bp, Artificial
  probe
  misc_feature (1)..(25): SEQ ID NO: 2544; WAN024DBJ; Start 206; Stop 230
gagatgtgtatgaagttctggttgt

SEQ ID NO: 329091 - DNA, 25 bp, Artificial
  probe
  misc_feature (1)..(25): SEQ ID NO: 2544; WAN024DBJ; Start 208; Stop 232
gatgtgtatgaagttctggttgtcg

SEQ ID NO: 329092 - DNA, 25 bp, Artificial
  probe
  misc_feature (1)..(25): SEQ ID NO: 2544; WAN024DBJ; Start 205; Stop 229
cgagatgtgtatgaagttctggttg

SEQ ID NO: 329093 - DNA, 25 bp, Artificial
  probe
  misc_feature (1)..(25): SEQ ID NO: 2544; WAN024DBJ; Start 197; Stop 221
agattagtcgagatgtgtatgaagt

SEQ ID NO: 329094 - DNA, 25 bp, Artificial
  probe
  misc_feature (1)..(25): SEQ ID NO: 2544; WAN024DBJ; Start 201; Stop 225
tagtcgagatgtgtatgaagttctg

SEQ ID NO: 329095 - DNA, 25 bp, Artificial
  probe
  misc_feature (1)..(25): SEQ ID NO: 2544; WAN024DBJ; Start 196; Stop 220
cagattagtcgagatgtgtatgaag

SEQ ID NO: 329096 - DNA, 25 bp, Artificial
  probe
  misc_feature (1)..(25): SEQ ID NO: 2544; WAN024DBJ; Start 200; Stop 224
ttagtcgagatgtgtatgaagttct

SEQ ID NO: 329097 - DNA, 25 bp, Artificial
  probe
  misc_feature (1)..(25): SEQ ID NO: 2544; WAN024DBJ; Start 199; Stop 223
attagtcgagatgtgtatgaagttc

SEQ ID NO: 329098 - DNA, 25 bp, Artificial
  probe
  misc_feature (1)..(25): SEQ ID NO: 2544; WAN024DBJ; Start 198; Stop 222
gattagtcgagatgtgtatgaagtt

SEQ ID NO: 329099 - DNA, 25 bp, Artificial
  probe
  misc_feature (1)..(25): SEQ ID NO: 2544; WAN024DBJ; Start 30; Stop 54
gcaatttagaatcacgagacaagaa

SEQ ID NO: 329100 - DNA, 25 bp, Artificial
  probe
  misc_feature (1)..(25): SEQ ID NO: 2544; WAN024DBJ; Start 28; Stop 52
aagcaatttagaatcacgagacaag

SEQ ID NO: 329101 - DNA, 25 bp, Artificial
  probe
  misc_feature (1)..(25): SEQ ID NO: 2544; WAN024DBJ; Start 29; Stop 53
agcaatttagaatcacgagacaaga

SEQ ID NO: 329102 - DNA, 25 bp, Artificial
  probe
  misc_feature (1)..(25): SEQ ID NO: 2544; WAN024DBJ; Start 26; Stop 50
gtaagcaatttagaatcacgagaca

SEQ ID NO: 329103 - DNA, 25 bp, Artificial
  probe
  misc_feature (1)..(25): SEQ ID NO: 2544; WAN024DBJ; Start 191; Stop 215
ttgaacagattagtcgagatgtgta

SEQ ID NO: 329104 - DNA, 25 bp, Artificial
  probe
  misc_feature (1)..(25): SEQ ID NO: 2544; WAN024DBJ; Start 195; Stop 219
acagattagtcgagatgtgtatgaa

SEQ ID NO: 329105 - DNA, 25 bp, Artificial
  probe
  misc_feature (1)..(25): SEQ ID NO: 2544; WAN024DBJ; Start 194; Stop 218
aacagattagtcgagatgtgtatga

SEQ ID NO: 329106 - DNA, 25 bp, Artificial
  probe
  misc_feature (1)..(25): SEQ ID NO: 2544; WAN024DBJ; Start 192; Stop 216
tgaacagattagtcgagatgtgtat

SEQ ID NO: 329107 - DNA, 25 bp, Artificial
  probe
  misc_feature (1)..(25): SEQ ID NO: 2544; WAN024DBJ; Start 193; Stop 217
gaacagattagtcgagatgtgtatg

SEQ ID NO: 329108 - DNA, 25 bp, Artificial
  probe
  misc_feature (1)..(25): SEQ ID NO: 2544; WAN024DBJ; Start 27; Stop 51
taagcaatttagaatcacgagacaa

SEQ ID NO: 329109 - DNA, 25 bp, Artificial
  probe
  misc_feature (1)..(25): SEQ ID NO: 2544; WAN024DBJ; Start 204; Stop 228
tcgagatgtgtatgaagttctggtt

SEQ ID NO: 329110 - DNA, 25 bp, Artificial
  probe
  misc_feature (1)..(25): SEQ ID NO: 2544; WAN024DBJ; Start 34; Stop 58
tttagaatcacgagacaagaagaaa

SEQ ID NO: 329111 - DNA, 25 bp, Artificial
  probe
  misc_feature (1)..(25): SEQ ID NO: 2544; WAN024DBJ; Start 214; Stop 238
tatgaagttctggttgtcgcaagag

SEQ ID NO: 329112 - DNA, 25 bp, Artificial
  probe
  misc_feature (1)..(25): SEQ ID NO: 2544; WAN024DBJ; Start 33; Stop 57
atttagaatcacgagacaagaagaa

SEQ ID NO: 329113 - DNA, 25 bp, Artificial
  probe
  misc_feature (1)..(25): SEQ ID NO: 2544; WAN024DBJ; Start 97; Stop 121
agtttctcagaatttcttcgtcaaa

SEQ ID NO: 329114 - DNA, 25 bp, Artificial
  probe
  misc_feature (1)..(25): SEQ ID NO: 2544; WAN024DBJ; Start 32; Stop 56
aatttagaatcacgagacaagaaga

SEQ ID NO: 329115 - DNA, 25 bp, Artificial
  probe
  misc_feature (1)..(25): SEQ ID NO: 2544; WAN024DBJ; Start 31; Stop 55
caatttagaatcacgagacaagaag

SEQ ID NO: 329116 - DNA, 25 bp, Artificial
  probe
  misc_feature (1)..(25): SEQ ID NO: 2544; WAN024DBJ; Start 202; Stop 226
agtcgagatgtgtatgaagttctgg

SEQ ID NO: 329117 - DNA, 25 bp, Artificial
  probe
  misc_feature (1)..(25): SEQ ID NO: 2544; WAN024DBJ; Start 213; Stop 237
gtatgaagttctggttgtcgcaaga

SEQ ID NO: 329118 - DNA, 25 bp, Artificial
  probe
  misc_feature (1)..(25): SEQ ID NO: 2544; WAN024DBJ; Start 93; Stop 117
ggatagtttctcagaatttcttcgt

SEQ ID NO: 329119 - DNA, 25 bp, Artificial
  probe
  misc_feature (1)..(25): SEQ ID NO: 2544; WAN024DBJ; Start 92; Stop 116
tggatagtttctcagaatttcttcg

SEQ ID NO: 329120 - DNA, 25 bp, Artificial
  probe
  misc_feature (1)..(25): SEQ ID NO: 2544; WAN024DBJ; Start 298; Stop 322
attgcagaagtgaatcaagtacagc

SEQ ID NO: 329121 - DNA, 25 bp, Artificial
  probe
  misc_feature (1)..(25): SEQ ID NO: 2544; WAN024DBJ; Start 209; Stop 233
atgtgtatgaagttctggttgtcgc

SEQ ID NO: 329122 - DNA, 25 bp, Artificial
  probe
  misc_feature (1)..(25): SEQ ID NO: 2545; WAN024DV2; Start 163; Stop 187
ttagttgctgcttatgtcgttaatt

SEQ ID NO: 329123 - DNA, 25 bp, Artificial
  probe
  misc_feature (1)..(25): SEQ ID NO: 2545; WAN024DV2; Start 127; Stop 151
caatatctaggcacaggcttacttg

SEQ ID NO: 329124 - DNA, 25 bp, Artificial
  probe
  misc_feature (1)..(25): SEQ ID NO: 2545; WAN024DV2; Start 129; Stop 153
atatctaggcacaggcttacttgta

SEQ ID NO: 329125 - DNA, 25 bp, Artificial
  probe
  misc_feature (1)..(25): SEQ ID NO: 2545; WAN024DV2; Start 130; Stop 154
tatctaggcacaggcttacttgtag

SEQ ID NO: 329126 - DNA, 25 bp, Artificial
  probe
  misc_feature (1)..(25): SEQ ID NO: 2545; WAN024DV2; Start 128; Stop 152
aatatctaggcacaggcttacttgt

SEQ ID NO: 329127 - DNA, 25 bp, Artificial
  probe
  misc_feature (1)..(25): SEQ ID NO: 2545; WAN024DV2; Start 480; Stop 504
ggtgttatcctctattccgttaata

SEQ ID NO: 329128 - DNA, 25 bp, Artificial
  probe
  misc_feature (1)..(25): SEQ ID NO: 2545; WAN024DV2; Start 196; Stop 220
gaagaatggatggttggattgcttg

SEQ ID NO: 329129 - DNA, 25 bp, Artificial
  probe
  misc_feature (1)..(25): SEQ ID NO: 2545; WAN024DV2; Start 533; Stop 557
tcattgtgcccttagtattcattct

SEQ ID NO: 329130 - DNA, 25 bp, Artificial
  probe
  misc_feature (1)..(25): SEQ ID NO: 2545; WAN024DV2; Start 303; Stop 327
attagaacaaagcaaggcaaatcaa

SEQ ID NO: 329131 - DNA, 25 bp, Artificial
  probe
  misc_feature (1)..(25): SEQ ID NO: 2545; WAN024DV2; Start 300; Stop 324
aagattagaacaaagcaaggcaaat

SEQ ID NO: 329132 - DNA, 25 bp, Artificial
  probe
  misc_feature (1)..(25): SEQ ID NO: 2545; WAN024DV2; Start 299; Stop 323
aaagattagaacaaagcaaggcaaa

SEQ ID NO: 329133 - DNA, 25 bp, Artificial
  probe
  misc_feature (1)..(25): SEQ ID NO: 2545; WAN024DV2; Start 298; Stop 322
gaaagattagaacaaagcaaggcaa

SEQ ID NO: 329134 - DNA, 25 bp, Artificial
  probe
  misc_feature (1)..(25): SEQ ID NO: 2545; WAN024DV2; Start 479; Stop 503
gggtgttatcctctattccgttaat

SEQ ID NO: 329135 - DNA, 25 bp, Artificial
  probe
  misc_feature (1)..(25): SEQ ID NO: 2545; WAN024DV2; Start 472; Stop 496
attagtcgggtgttatcctctattc

SEQ ID NO: 329136 - DNA, 25 bp, Artificial
  probe
  misc_feature (1)..(25): SEQ ID NO: 2545; WAN024DV2; Start 230; Stop 254
ctatctatttagggattcgctttgc

SEQ ID NO: 329137 - DNA, 25 bp, Artificial
  probe
  misc_feature (1)..(25): SEQ ID NO: 2545; WAN024DV2; Start 161; Stop 185
gtttagttgctgcttatgtcgttaa

SEQ ID NO: 329138 - DNA, 25 bp, Artificial
  probe
  misc_feature (1)..(25): SEQ ID NO: 2545; WAN024DV2; Start 126; Stop 150
gcaatatctaggcacaggcttactt

SEQ ID NO: 329139 - DNA, 25 bp, Artificial
  probe
  misc_feature (1)..(25): SEQ ID NO: 2545; WAN024DV2; Start 532; Stop 556
atcattgtgcccttagtattcattc

SEQ ID NO: 329140 - DNA, 25 bp, Artificial
  probe
  misc_feature (1)..(25): SEQ ID NO: 2545; WAN024DV2; Start 471; Stop 495
gattagtcgggtgttatcctctatt

SEQ ID NO: 329141 - DNA, 25 bp, Artificial
  probe
  misc_feature (1)..(25): SEQ ID NO: 2545; WAN024DV2; Start 160; Stop 184
agtttagttgctgcttatgtcgtta

SEQ ID NO: 329142 - DNA, 25 bp, Artificial
  probe
  misc_feature (1)..(25): SEQ ID NO: 2545; WAN024DV2; Start 90; Stop 114
atcacagaataaacagaaatggcat

SEQ ID NO: 329143 - DNA, 25 bp, Artificial
  probe
  misc_feature (1)..(25): SEQ ID NO: 2545; WAN024DV2; Start 165; Stop 189
agttgctgcttatgtcgttaatttc

SEQ ID NO: 329144 - DNA, 25 bp, Artificial
  probe
  misc_feature (1)..(25): SEQ ID NO: 2545; WAN024DV2; Start 162; Stop 186
tttagttgctgcttatgtcgttaat

SEQ ID NO: 329145 - DNA, 25 bp, Artificial
  probe
  misc_feature (1)..(25): SEQ ID NO: 2545; WAN024DV2; Start 304; Stop 328
ttagaacaaagcaaggcaaatcaac

SEQ ID NO: 329146 - DNA, 25 bp, Artificial
  probe
  misc_feature (1)..(25): SEQ ID NO: 2545; WAN024DV2; Start 8; Stop 32
agacaatcatatctgctattggtgt

SEQ ID NO: 329147 - DNA, 25 bp, Artificial
  probe
  misc_feature (1)..(25): SEQ ID NO: 2545; WAN024DV2; Start 550; Stop 574
ttcattctacttggactatacatca

SEQ ID NO: 329148 - DNA, 25 bp, Artificial
  probe
  misc_feature (1)..(25): SEQ ID NO: 2545; WAN024DV2; Start 473; Stop 497
ttagtcgggtgttatcctctattcc

SEQ ID NO: 329149 - DNA, 25 bp, Artificial
  probe
  misc_feature (1)..(25): SEQ ID NO: 2545; WAN024DV2; Start 164; Stop 188
tagttgctgcttatgtcgttaattt

SEQ ID NO: 329150 - DNA, 25 bp, Artificial
  probe
  misc_feature (1)..(25): SEQ ID NO: 2545; WAN024DV2; Start 470; Stop 494
agattagtcgggtgttatcctctat

SEQ ID NO: 329151 - DNA, 25 bp, Artificial
  probe
  misc_feature (1)..(25): SEQ ID NO: 2545; WAN024DV2; Start 255; Stop 279
aattgttggagaagatgcggaagaa

SEQ ID NO: 329152 - DNA, 25 bp, Artificial
  probe
  misc_feature (1)..(25): SEQ ID NO: 2545; WAN024DV2; Start 271; Stop 295
gcggaagaagaagaggaagaaatta

SEQ ID NO: 329153 - DNA, 25 bp, Artificial
  probe
  misc_feature (1)..(25): SEQ ID NO: 2545; WAN024DV2; Start 435; Stop 459
gcttgtgtttgtaatcggcataatt

SEQ ID NO: 329154 - DNA, 25 bp, Artificial
  probe
  misc_feature (1)..(25): SEQ ID NO: 2545; WAN024DV2; Start 195; Stop 219
tgaagaatggatggttggattgctt

SEQ ID NO: 329155 - DNA, 25 bp, Artificial
  probe
  misc_feature (1)..(25): SEQ ID NO: 2546; WAN024GNQ; Start 151; Stop 175
actcctatgatatttcctgttccaa

SEQ ID NO: 329156 - DNA, 25 bp, Artificial
  probe
  misc_feature (1)..(25): SEQ ID NO: 2546; WAN024GNQ; Start 152; Stop 176
ctcctatgatatttcctgttccaac

SEQ ID NO: 329157 - DNA, 25 bp, Artificial
  probe
  misc_feature (1)..(25): SEQ ID NO: 2546; WAN024GNQ; Start 148; Stop 172
gcaactcctatgatatttcctgttc

SEQ ID NO: 329158 - DNA, 25 bp, Artificial
  probe
  misc_feature (1)..(25): SEQ ID NO: 2546; WAN024GNQ; Start 145; Stop 169
gtcgcaactcctatgatatttcctg

SEQ ID NO: 329159 - DNA, 25 bp, Artificial
  probe
  misc_feature (1)..(25): SEQ ID NO: 2546; WAN024GNQ; Start 150; Stop 174
aactcctatgatatttcctgttcca

SEQ ID NO: 329160 - DNA, 25 bp, Artificial
  probe
  misc_feature (1)..(25): SEQ ID NO: 2546; WAN024GNQ; Start 147; Stop 171
cgcaactcctatgatatttcctgtt

SEQ ID NO: 329161 - DNA, 25 bp, Artificial
  probe
  misc_feature (1)..(25): SEQ ID NO: 2546; WAN024GNQ; Start 149; Stop 173
caactcctatgatatttcctgttcc

SEQ ID NO: 329162 - DNA, 25 bp, Artificial
  probe
  misc_feature (1)..(25): SEQ ID NO: 2546; WAN024GNQ; Start 146; Stop 170
tcgcaactcctatgatatttcctgt

SEQ ID NO: 329163 - DNA, 25 bp, Artificial
  probe
  misc_feature (1)..(25): SEQ ID NO: 2546; WAN024GNQ; Start 153; Stop 177
tcctatgatatttcctgttccaaca

SEQ ID NO: 329164 - DNA, 25 bp, Artificial
  probe
  misc_feature (1)..(25): SEQ ID NO: 2546; WAN024GNQ; Start 144; Stop 168
cgtcgcaactcctatgatatttcct

SEQ ID NO: 329165 - DNA, 25 bp, Artificial
  probe
  misc_feature (1)..(25): SEQ ID NO: 2546; WAN024GNQ; Start 55; Stop 79
aagagtccttccgcatacttggtag

SEQ ID NO: 329166 - DNA, 25 bp, Artificial
  probe
  misc_feature (1)..(25): SEQ ID NO: 2546; WAN024GNQ; Start 143; Stop 167
ccgtcgcaactcctatgatatttcc

SEQ ID NO: 329167 - DNA, 25 bp, Artificial
  probe
  misc_feature (1)..(25): SEQ ID NO: 2546; WAN024GNQ; Start 142; Stop 166
gccgtcgcaactcctatgatatttc

SEQ ID NO: 329168 - DNA, 25 bp, Artificial
  probe
  misc_feature (1)..(25): SEQ ID NO: 2546; WAN024GNQ; Start 214; Stop 238
gatacatcaccatgtcccttatcct

SEQ ID NO: 329169 - DNA, 25 bp, Artificial
  probe
  misc_feature (1)..(25): SEQ ID NO: 2546; WAN024GNQ; Start 215; Stop 239
atacatcaccatgtcccttatcctg

SEQ ID NO: 329170 - DNA, 25 bp, Artificial
  probe
  misc_feature (1)..(25): SEQ ID NO: 2546; WAN024GNQ; Start 212; Stop 236
tggatacatcaccatgtcccttatc

SEQ ID NO: 329171 - DNA, 25 bp, Artificial
  probe
  misc_feature (1)..(25): SEQ ID NO: 2546; WAN024GNQ; Start 211; Stop 235
ctggatacatcaccatgtcccttat

SEQ ID NO: 329172 - DNA, 25 bp, Artificial
  probe
  misc_feature (1)..(25): SEQ ID NO: 2546; WAN024GNQ; Start 219; Stop 243
atcaccatgtcccttatcctggata

SEQ ID NO: 329173 - DNA, 25 bp, Artificial
  probe
  misc_feature (1)..(25): SEQ ID NO: 2546; WAN024GNQ; Start 210; Stop 234
actggatacatcaccatgtccctta

SEQ ID NO: 329174 - DNA, 25 bp, Artificial
  probe
  misc_feature (1)..(25): SEQ ID NO: 2546; WAN024GNQ; Start 218; Stop 242
catcaccatgtcccttatcctggat

SEQ ID NO: 329175 - DNA, 25 bp, Artificial
  probe
  misc_feature (1)..(25): SEQ ID NO: 2546; WAN024GNQ; Start 69; Stop 93
atacttggtagccattccaaagaaa

SEQ ID NO: 329176 - DNA, 25 bp, Artificial
  probe
  misc_feature (1)..(25): SEQ ID NO: 2546; WAN024GNQ; Start 70; Stop 94
tacttggtagccattccaaagaaag

SEQ ID NO: 329177 - DNA, 25 bp, Artificial
  probe
  misc_feature (1)..(25): SEQ ID NO: 2546; WAN024GNQ; Start 68; Stop 92
catacttggtagccattccaaagaa

SEQ ID NO: 329178 - DNA, 25 bp, Artificial
  probe
  misc_feature (1)..(25): SEQ ID NO: 2546; WAN024GNQ; Start 216; Stop 240
tacatcaccatgtcccttatcctgg

SEQ ID NO: 329179 - DNA, 25 bp, Artificial
  probe
  misc_feature (1)..(25): SEQ ID NO: 2546; WAN024GNQ; Start 209; Stop 233
aactggatacatcaccatgtccctt

SEQ ID NO: 329180 - DNA, 25 bp, Artificial
  probe
  misc_feature (1)..(25): SEQ ID NO: 2546; WAN024GNQ; Start 208; Stop 232
aaactggatacatcaccatgtccct

SEQ ID NO: 329181 - DNA, 25 bp, Artificial
  probe
  misc_feature (1)..(25): SEQ ID NO: 2546; WAN024GNQ; Start 54; Stop 78
caagagtccttccgcatacttggta

SEQ ID NO: 329182 - DNA, 25 bp, Artificial
  probe
  misc_feature (1)..(25): SEQ ID NO: 2546; WAN024GNQ; Start 158; Stop 182
tgatatttcctgttccaacagttga

SEQ ID NO: 329183 - DNA, 25 bp, Artificial
  probe
  misc_feature (1)..(25): SEQ ID NO: 2546; WAN024GNQ; Start 221; Stop 245
caccatgtcccttatcctggataaa

SEQ ID NO: 329184 - DNA, 25 bp, Artificial
  probe
  misc_feature (1)..(25): SEQ ID NO: 2546; WAN024GNQ; Start 160; Stop 184
atatttcctgttccaacagttgatg

SEQ ID NO: 329185 - DNA, 25 bp, Artificial
  probe
  misc_feature (1)..(25): SEQ ID NO: 2546; WAN024GNQ; Start 157; Stop 181
atgatatttcctgttccaacagttg

SEQ ID NO: 329186 - DNA, 25 bp, Artificial
  probe
  misc_feature (1)..(25): SEQ ID NO: 2546; WAN024GNQ; Start 159; Stop 183
gatatttcctgttccaacagttgat

SEQ ID NO: 329187 - DNA, 25 bp, Artificial
  probe
  misc_feature (1)..(25): SEQ ID NO: 2546; WAN024GNQ; Start 154; Stop 178
cctatgatatttcctgttccaacag

SEQ ID NO: 329188 - DNA, 25 bp, Artificial
  probe
  misc_feature (1)..(25): SEQ ID NO: 2547; WAN024C9B; Start 125; Stop 149
caagtttcattggttacactattgc

SEQ ID NO: 329189 - DNA, 25 bp, Artificial
  probe
  misc_feature (1)..(25): SEQ ID NO: 2547; WAN024C9B; Start 173; Stop 197
tacctgtttacatccaagaagacat

SEQ ID NO: 329190 - DNA, 25 bp, Artificial
  probe
  misc_feature (1)..(25): SEQ ID NO: 2547; WAN024C9B; Start 171; Stop 195
cgtacctgtttacatccaagaagac

SEQ ID NO: 329191 - DNA, 25 bp, Artificial
  probe
  misc_feature (1)..(25): SEQ ID NO: 2547; WAN024C9B; Start 172; Stop 196
gtacctgtttacatccaagaagaca

SEQ ID NO: 329192 - DNA, 25 bp, Artificial
  probe
  misc_feature (1)..(25): SEQ ID NO: 2547; WAN024C9B; Start 180; Stop 204
ttacatccaagaagacatggtaggc

SEQ ID NO: 329193 - DNA, 25 bp, Artificial
  probe
  misc_feature (1)..(25): SEQ ID NO: 2547; WAN024C9B; Start 174; Stop 198
acctgtttacatccaagaagacatg

SEQ ID NO: 329194 - DNA, 25 bp, Artificial
  probe
  misc_feature (1)..(25): SEQ ID NO: 2547; WAN024C9B; Start 112; Stop 136
tcaacgatcttcccaagtttcattg

SEQ ID NO: 329195 - DNA, 25 bp, Artificial
  probe
  misc_feature (1)..(25): SEQ ID NO: 2547; WAN024C9B; Start 179; Stop 203
tttacatccaagaagacatggtagg

SEQ ID NO: 329196 - DNA, 25 bp, Artificial
  probe
  misc_feature (1)..(25): SEQ ID NO: 2547; WAN024C9B; Start 177; Stop 201
tgtttacatccaagaagacatggta

SEQ ID NO: 329197 - DNA, 25 bp, Artificial
  probe
  misc_feature (1)..(25): SEQ ID NO: 2547; WAN024C9B; Start 143; Stop 167
ctattgcagtttatgacggacgtaa

SEQ ID NO: 329198 - DNA, 25 bp, Artificial
  probe
  misc_feature (1)..(25): SEQ ID NO: 2547; WAN024C9B; Start 178; Stop 202
gtttacatccaagaagacatggtag

SEQ ID NO: 329199 - DNA, 25 bp, Artificial
  probe
  misc_feature (1)..(25): SEQ ID NO: 2547; WAN024C9B; Start 128; Stop 152
gtttcattggttacactattgcagt

SEQ ID NO: 329200 - DNA, 25 bp, Artificial
  probe
  misc_feature (1)..(25): SEQ ID NO: 2547; WAN024C9B; Start 138; Stop 162
ttacactattgcagtttatgacgga

SEQ ID NO: 329201 - DNA, 25 bp, Artificial
  probe
  misc_feature (1)..(25): SEQ ID NO: 2547; WAN024C9B; Start 137; Stop 161
gttacactattgcagtttatgacgg

SEQ ID NO: 329202 - DNA, 25 bp, Artificial
  probe
  misc_feature (1)..(25): SEQ ID NO: 2547; WAN024C9B; Start 136; Stop 160
ggttacactattgcagtttatgacg

SEQ ID NO: 329203 - DNA, 25 bp, Artificial
  probe
  misc_feature (1)..(25): SEQ ID NO: 2547; WAN024C9B; Start 127; Stop 151
agtttcattggttacactattgcag

SEQ ID NO: 329204 - DNA, 25 bp, Artificial
  probe
  misc_feature (1)..(25): SEQ ID NO: 2547; WAN024C9B; Start 144; Stop 168
tattgcagtttatgacggacgtaaa

SEQ ID NO: 329205 - DNA, 25 bp, Artificial
  probe
  misc_feature (1)..(25): SEQ ID NO: 2547; WAN024C9B; Start 130; Stop 154
ttcattggttacactattgcagttt

SEQ ID NO: 329206 - DNA, 25 bp, Artificial
  probe
  misc_feature (1)..(25): SEQ ID NO: 2547; WAN024C9B; Start 129; Stop 153
tttcattggttacactattgcagtt

SEQ ID NO: 329207 - DNA, 25 bp, Artificial
  probe
  misc_feature (1)..(25): SEQ ID NO: 2547; WAN024C9B; Start 126; Stop 150
aagtttcattggttacactattgca

SEQ ID NO: 329208 - DNA, 25 bp, Artificial
  probe
  misc_feature (1)..(25): SEQ ID NO: 2547; WAN024C9B; Start 176; Stop 200
ctgtttacatccaagaagacatggt

SEQ ID NO: 329209 - DNA, 25 bp, Artificial
  probe
  misc_feature (1)..(25): SEQ ID NO: 2547; WAN024C9B; Start 135; Stop 159
tggttacactattgcagtttatgac

SEQ ID NO: 329210 - DNA, 25 bp, Artificial
  probe
  misc_feature (1)..(25): SEQ ID NO: 2547; WAN024C9B; Start 170; Stop 194
acgtacctgtttacatccaagaaga

SEQ ID NO: 329211 - DNA, 25 bp, Artificial
  probe
  misc_feature (1)..(25): SEQ ID NO: 2547; WAN024C9B; Start 169; Stop 193
cacgtacctgtttacatccaagaag

SEQ ID NO: 329212 - DNA, 25 bp, Artificial
  probe
  misc_feature (1)..(25): SEQ ID NO: 2547; WAN024C9B; Start 139; Stop 163
tacactattgcagtttatgacggac

SEQ ID NO: 329213 - DNA, 25 bp, Artificial
  probe
  misc_feature (1)..(25): SEQ ID NO: 2547; WAN024C9B; Start 218; Stop 242
aatttgcaccaactcgtacttacaa

SEQ ID NO: 329214 - DNA, 25 bp, Artificial
  probe
  misc_feature (1)..(25): SEQ ID NO: 2547; WAN024C9B; Start 134; Stop 158
ttggttacactattgcagtttatga

SEQ ID NO: 329215 - DNA, 25 bp, Artificial
  probe
  misc_feature (1)..(25): SEQ ID NO: 2547; WAN024C9B; Start 131; Stop 155
tcattggttacactattgcagttta

SEQ ID NO: 329216 - DNA, 25 bp, Artificial
  probe
  misc_feature (1)..(25): SEQ ID NO: 2547; WAN024C9B; Start 175; Stop 199
cctgtttacatccaagaagacatgg

SEQ ID NO: 329217 - DNA, 25 bp, Artificial
  probe
  misc_feature (1)..(25): SEQ ID NO: 2547; WAN024C9B; Start 26; Stop 50
ctttcgtcgatgagcatttgatgaa

SEQ ID NO: 329218 - DNA, 25 bp, Artificial
  probe
  misc_feature (1)..(25): SEQ ID NO: 2547; WAN024C9B; Start 217; Stop 241
gaatttgcaccaactcgtacttaca

SEQ ID NO: 329219 - DNA, 25 bp, Artificial
  probe
  misc_feature (1)..(25): SEQ ID NO: 2547; WAN024C9B; Start 216; Stop 240
tgaatttgcaccaactcgtacttac

SEQ ID NO: 329220 - DNA, 25 bp, Artificial
  probe
  misc_feature (1)..(25): SEQ ID NO: 2547; WAN024C9B; Start 142; Stop 166
actattgcagtttatgacggacgta

SEQ ID NO: 329221 - DNA, 25 bp, Artificial
  probe
  misc_feature (1)..(25): SEQ ID NO: 2548; WAN024D3C; Start 268; Stop 292
aatggctctatgctaattgtggata

SEQ ID NO: 329222 - DNA, 25 bp, Artificial
  probe
  misc_feature (1)..(25): SEQ ID NO: 2548; WAN024D3C; Start 271; Stop 295
ggctctatgctaattgtggatactt

SEQ ID NO: 329223 - DNA, 25 bp, Artificial
  probe
  misc_feature (1)..(25): SEQ ID NO: 2548; WAN024D3C; Start 269; Stop 293
atggctctatgctaattgtggatac

SEQ ID NO: 329224 - DNA, 25 bp, Artificial
  probe
  misc_feature (1)..(25): SEQ ID NO: 2548; WAN024D3C; Start 270; Stop 294
tggctctatgctaattgtggatact

SEQ ID NO: 329225 - DNA, 25 bp, Artificial
  probe
  misc_feature (1)..(25): SEQ ID NO: 2548; WAN024D3C; Start 482; Stop 506
tagaagcacaagaaggtacaatcac

SEQ ID NO: 329226 - DNA, 25 bp, Artificial
  probe
  misc_feature (1)..(25): SEQ ID NO: 2548; WAN024D3C; Start 481; Stop 505
gtagaagcacaagaaggtacaatca

SEQ ID NO: 329227 - DNA, 25 bp, Artificial
  probe
  misc_feature (1)..(25): SEQ ID NO: 2548; WAN024D3C; Start 551; Stop 575
tccgtgagtctggtattgaagaatt

SEQ ID NO: 329228 - DNA, 25 bp, Artificial
  probe
  misc_feature (1)..(25): SEQ ID NO: 2548; WAN024D3C; Start 480; Stop 504
cgtagaagcacaagaaggtacaatc

SEQ ID NO: 329229 - DNA, 25 bp, Artificial
  probe
  misc_feature (1)..(25): SEQ ID NO: 2548; WAN024D3C; Start 484; Stop 508
gaagcacaagaaggtacaatcacag

SEQ ID NO: 329230 - DNA, 25 bp, Artificial
  probe
  misc_feature (1)..(25): SEQ ID NO: 2548; WAN024D3C; Start 550; Stop 574
ctccgtgagtctggtattgaagaat

SEQ ID NO: 329231 - DNA, 25 bp, Artificial
  probe
  misc_feature (1)..(25): SEQ ID NO: 2548; WAN024D3C; Start 483; Stop 507
agaagcacaagaaggtacaatcaca

SEQ ID NO: 329232 - DNA, 25 bp, Artificial
  probe
  misc_feature (1)..(25): SEQ ID NO: 2548; WAN024D3C; Start 403; Stop 427
ggtgttattgtatttggaggtgaag

SEQ ID NO: 329233 - DNA, 25 bp, Artificial
  probe
  misc_feature (1)..(25): SEQ ID NO: 2548; WAN024D3C; Start 402; Stop 426
aggtgttattgtatttggaggtgaa

SEQ ID NO: 329234 - DNA, 25 bp, Artificial
  probe
  misc_feature (1)..(25): SEQ ID NO: 2548; WAN024D3C; Start 401; Stop 425
aaggtgttattgtatttggaggtga

SEQ ID NO: 329235 - DNA, 25 bp, Artificial
  probe
  misc_feature (1)..(25): SEQ ID NO: 2548; WAN024D3C; Start 400; Stop 424
aaaggtgttattgtatttggaggtg

SEQ ID NO: 329236 - DNA, 25 bp, Artificial
  probe
  misc_feature (1)..(25): SEQ ID NO: 2548; WAN024D3C; Start 407; Stop 431
ttattgtatttggaggtgaagatgc

SEQ ID NO: 329237 - DNA, 25 bp, Artificial
  probe
  misc_feature (1)..(25): SEQ ID NO: 2548; WAN024D3C; Start 283; Stop 307
attgtggatactttgacttctaacg

SEQ ID NO: 329238 - DNA, 25 bp, Artificial
  probe
  misc_feature (1)..(25): SEQ ID NO: 2548; WAN024D3C; Start 404; Stop 428
gtgttattgtatttggaggtgaaga

SEQ ID NO: 329239 - DNA, 25 bp, Artificial
  probe
  misc_feature (1)..(25): SEQ ID NO: 2548; WAN024D3C; Start 267; Stop 291
aaatggctctatgctaattgtggat

SEQ ID NO: 329240 - DNA, 25 bp, Artificial
  probe
  misc_feature (1)..(25): SEQ ID NO: 2548; WAN024D3C; Start 278; Stop 302
tgctaattgtggatactttgacttc

SEQ ID NO: 329241 - DNA, 25 bp, Artificial
  probe
  misc_feature (1)..(25): SEQ ID NO: 2548; WAN024D3C; Start 219; Stop 243
aaacacagacgaaacctttacagaa

SEQ ID NO: 329242 - DNA, 25 bp, Artificial
  probe
  misc_feature (1)..(25): SEQ ID NO: 2548; WAN024D3C; Start 408; Stop 432
tattgtatttggaggtgaagatgcg

SEQ ID NO: 329243 - DNA, 25 bp, Artificial
  probe
  misc_feature (1)..(25): SEQ ID NO: 2548; WAN024D3C; Start 486; Stop 510
agcacaagaaggtacaatcacagtt

SEQ ID NO: 329244 - DNA, 25 bp, Artificial
  probe
  misc_feature (1)..(25): SEQ ID NO: 2548; WAN024D3C; Start 485; Stop 509
aagcacaagaaggtacaatcacagt

SEQ ID NO: 329245 - DNA, 25 bp, Artificial
  probe
  misc_feature (1)..(25): SEQ ID NO: 2548; WAN024D3C; Start 279; Stop 303
gctaattgtggatactttgacttct

SEQ ID NO: 329246 - DNA, 25 bp, Artificial
  probe
  misc_feature (1)..(25): SEQ ID NO: 2548; WAN024D3C; Start 77; Stop 101
ttggtgtagaaatctatgtagcagc

SEQ ID NO: 329247 - DNA, 25 bp, Artificial
  probe
  misc_feature (1)..(25): SEQ ID NO: 2548; WAN024D3C; Start 272; Stop 296
gctctatgctaattgtggatacttt

SEQ ID NO: 329248 - DNA, 25 bp, Artificial
  probe
  misc_feature (1)..(25): SEQ ID NO: 2548; WAN024D3C; Start 202; Stop 226
attgataaagccaaaggaaacacag

SEQ ID NO: 329249 - DNA, 25 bp, Artificial
  probe
  misc_feature (1)..(25): SEQ ID NO: 2548; WAN024D3C; Start 201; Stop 225
gattgataaagccaaaggaaacaca

SEQ ID NO: 329250 - DNA, 25 bp, Artificial
  probe
  misc_feature (1)..(25): SEQ ID NO: 2548; WAN024D3C; Start 194; Stop 218
ataaagcgattgataaagccaaagg

SEQ ID NO: 329251 - DNA, 25 bp, Artificial
  probe
  misc_feature (1)..(25): SEQ ID NO: 2548; WAN024D3C; Start 218; Stop 242
gaaacacagacgaaacctttacaga

SEQ ID NO: 329252 - DNA, 25 bp, Artificial
  probe
  misc_feature (1)..(25): SEQ ID NO: 2548; WAN024D3C; Start 192; Stop 216
cgataaagcgattgataaagccaaa

SEQ ID NO: 329253 - DNA, 25 bp, Artificial
  probe
  misc_feature (1)..(25): SEQ ID NO: 2548; WAN024D3C; Start 277; Stop 301
atgctaattgtggatactttgactt

SEQ ID NO: 329254 - DNA, 25 bp, Artificial
  probe
  misc_feature (1)..(25): SEQ ID NO: 2549; WAN024B2D; Start 26; Stop 50
ctgaagagaggacagaattagaacg

SEQ ID NO: 329255 - DNA, 25 bp, Artificial
  probe
  misc_feature (1)..(25): SEQ ID NO: 2549; WAN024B2D; Start 25; Stop 49
cctgaagagaggacagaattagaac

SEQ ID NO: 329256 - DNA, 25 bp, Artificial
  probe
  misc_feature (1)..(25): SEQ ID NO: 2549; WAN024B2D; Start 24; Stop 48
acctgaagagaggacagaattagaa

SEQ ID NO: 329257 - DNA, 25 bp, Artificial
  probe
  misc_feature (1)..(25): SEQ ID NO: 2549; WAN024B2D; Start 23; Stop 47
gacctgaagagaggacagaattaga

SEQ ID NO: 329258 - DNA, 25 bp, Artificial
  probe
  misc_feature (1)..(25): SEQ ID NO: 2549; WAN024B2D; Start 22; Stop 46
agacctgaagagaggacagaattag

SEQ ID NO: 329259 - DNA, 25 bp, Artificial
  probe
  misc_feature (1)..(25): SEQ ID NO: 2549; WAN024B2D; Start 21; Stop 45
gagacctgaagagaggacagaatta

SEQ ID NO: 329260 - DNA, 25 bp, Artificial
  probe
  misc_feature (1)..(25): SEQ ID NO: 2549; WAN024B2D; Start 39; Stop 63
agaattagaacgtcttcaagcagaa

SEQ ID NO: 329261 - DNA, 25 bp, Artificial
  probe
  misc_feature (1)..(25): SEQ ID NO: 2549; WAN024B2D; Start 27; Stop 51
tgaagagaggacagaattagaacgt

SEQ ID NO: 329262 - DNA, 25 bp, Artificial
  probe
  misc_feature (1)..(25): SEQ ID NO: 2549; WAN024B2D; Start 38; Stop 62
cagaattagaacgtcttcaagcaga

SEQ ID NO: 329263 - DNA, 25 bp, Artificial
  probe
  misc_feature (1)..(25): SEQ ID NO: 2549; WAN024B2D; Start 37; Stop 61
acagaattagaacgtcttcaagcag

SEQ ID NO: 329264 - DNA, 25 bp, Artificial
  probe
  misc_feature (1)..(25): SEQ ID NO: 2549; WAN024B2D; Start 34; Stop 58
aggacagaattagaacgtcttcaag

SEQ ID NO: 329265 - DNA, 25 bp, Artificial
  probe
  misc_feature (1)..(25): SEQ ID NO: 2549; WAN024B2D; Start 33; Stop 57
gaggacagaattagaacgtcttcaa

SEQ ID NO: 329266 - DNA, 25 bp, Artificial
  probe
  misc_feature (1)..(25): SEQ ID NO: 2549; WAN024B2D; Start 31; Stop 55
gagaggacagaattagaacgtcttc

SEQ ID NO: 329267 - DNA, 25 bp, Artificial
  probe
  misc_feature (1)..(25): SEQ ID NO: 2549; WAN024B2D; Start 28; Stop 52
gaagagaggacagaattagaacgtc

SEQ ID NO: 329268 - DNA, 25 bp, Artificial
  probe
  misc_feature (1)..(25): SEQ ID NO: 2549; WAN024B2D; Start 30; Stop 54
agagaggacagaattagaacgtctt

SEQ ID NO: 329269 - DNA, 25 bp, Artificial
  probe
  misc_feature (1)..(25): SEQ ID NO: 2549; WAN024B2D; Start 29; Stop 53
aagagaggacagaattagaacgtct

SEQ ID NO: 329270 - DNA, 25 bp, Artificial
  probe
  misc_feature (1)..(25): SEQ ID NO: 2549; WAN024B2D; Start 32; Stop 56
agaggacagaattagaacgtcttca

SEQ ID NO: 329271 - DNA, 25 bp, Artificial
  probe
  misc_feature (1)..(25): SEQ ID NO: 2549; WAN024B2D; Start 36; Stop 60
gacagaattagaacgtcttcaagca

SEQ ID NO: 329272 - DNA, 25 bp, Artificial
  probe
  misc_feature (1)..(25): SEQ ID NO: 2549; WAN024B2D; Start 35; Stop 59
ggacagaattagaacgtcttcaagc

SEQ ID NO: 329273 - DNA, 25 bp, Artificial
  probe
  misc_feature (1)..(25): SEQ ID NO: 2549; WAN024B2D; Start 40; Stop 64
gaattagaacgtcttcaagcagaaa

SEQ ID NO: 329274 - DNA, 25 bp, Artificial
  probe
  misc_feature (1)..(25): SEQ ID NO: 2549; WAN024B2D; Start 64; Stop 88
aatgagtacctgagagcggagaatg

SEQ ID NO: 329275 - DNA, 25 bp, Artificial
  probe
  misc_feature (1)..(25): SEQ ID NO: 2549; WAN024B2D; Start 63; Stop 87
aaatgagtacctgagagcggagaat

SEQ ID NO: 329276 - DNA, 25 bp, Artificial
  probe
  misc_feature (1)..(25): SEQ ID NO: 2549; WAN024B2D; Start 50; Stop 74
gtcttcaagcagaaaatgagtacct

SEQ ID NO: 329277 - DNA, 25 bp, Artificial
  probe
  misc_feature (1)..(25): SEQ ID NO: 2549; WAN024B2D; Start 43; Stop 67
ttagaacgtcttcaagcagaaaatg

SEQ ID NO: 329278 - DNA, 25 bp, Artificial
  probe
  misc_feature (1)..(25): SEQ ID NO: 2549; WAN024B2D; Start 49; Stop 73
cgtcttcaagcagaaaatgagtacc

SEQ ID NO: 329279 - DNA, 25 bp, Artificial
  probe
  misc_feature (1)..(25): SEQ ID NO: 2549; WAN024B2D; Start 41; Stop 65
aattagaacgtcttcaagcagaaaa

SEQ ID NO: 329280 - DNA, 25 bp, Artificial
  probe
  misc_feature (1)..(25): SEQ ID NO: 2549; WAN024B2D; Start 42; Stop 66
attagaacgtcttcaagcagaaaat

SEQ ID NO: 329281 - DNA, 25 bp, Artificial
  probe
  misc_feature (1)..(25): SEQ ID NO: 2549; WAN024B2D; Start 44; Stop 68
tagaacgtcttcaagcagaaaatga

SEQ ID NO: 329282 - DNA, 25 bp, Artificial
  probe
  misc_feature (1)..(25): SEQ ID NO: 2549; WAN024B2D; Start 47; Stop 71
aacgtcttcaagcagaaaatgagta

SEQ ID NO: 329283 - DNA, 25 bp, Artificial
  probe
  misc_feature (1)..(25): SEQ ID NO: 2549; WAN024B2D; Start 48; Stop 72
acgtcttcaagcagaaaatgagtac

SEQ ID NO: 329284 - DNA, 25 bp, Artificial
  probe
  misc_feature (1)..(25): SEQ ID NO: 2549; WAN024B2D; Start 45; Stop 69
agaacgtcttcaagcagaaaatgag

SEQ ID NO: 329285 - DNA, 25 bp, Artificial
  probe
  misc_feature (1)..(25): SEQ ID NO: 2549; WAN024B2D; Start 46; Stop 70
gaacgtcttcaagcagaaaatgagt

SEQ ID NO: 329286 - DNA, 25 bp, Artificial
  probe
  misc_feature (1)..(25): SEQ ID NO: 2550; WAN024FQM; Start 623; Stop 647
tgagacaatttacaagacttacgga

SEQ ID NO: 329287 - DNA, 25 bp, Artificial
  probe
  misc_feature (1)..(25): SEQ ID NO: 2550; WAN024FQM; Start 624; Stop 648
gagacaatttacaagacttacggaa

SEQ ID NO: 329288 - DNA, 25 bp, Artificial
  probe
  misc_feature (1)..(25): SEQ ID NO: 2550; WAN024FQM; Start 625; Stop 649
agacaatttacaagacttacggaaa

SEQ ID NO: 329289 - DNA, 25 bp, Artificial
  probe
  misc_feature (1)..(25): SEQ ID NO: 2550; WAN024FQM; Start 622; Stop 646
ttgagacaatttacaagacttacgg

SEQ ID NO: 329290 - DNA, 25 bp, Artificial
  probe
  misc_feature (1)..(25): SEQ ID NO: 2550; WAN024FQM; Start 626; Stop 650
gacaatttacaagacttacggaaag

SEQ ID NO: 329291 - DNA, 25 bp, Artificial
  probe
  misc_feature (1)..(25): SEQ ID NO: 2550; WAN024FQM; Start 299; Stop 323
ggatacataattcacaaacaccaaa

SEQ ID NO: 329292 - DNA, 25 bp, Artificial
  probe
  misc_feature (1)..(25): SEQ ID NO: 2550; WAN024FQM; Start 621; Stop 645
tttgagacaatttacaagacttacg

SEQ ID NO: 329293 - DNA, 25 bp, Artificial
  probe
  misc_feature (1)..(25): SEQ ID NO: 2550; WAN024FQM; Start 296; Stop 320
attggatacataattcacaaacacc

SEQ ID NO: 329294 - DNA, 25 bp, Artificial
  probe
  misc_feature (1)..(25): SEQ ID NO: 2550; WAN024FQM; Start 853; Stop 877
gttgaagatagggaatcacatatca

SEQ ID NO: 329295 - DNA, 25 bp, Artificial
  probe
  misc_feature (1)..(25): SEQ ID NO: 2550; WAN024FQM; Start 770; Stop 794
ttgaaggacataagtggaatgttcc

SEQ ID NO: 329296 - DNA, 25 bp, Artificial
  probe
  misc_feature (1)..(25): SEQ ID NO: 2550; WAN024FQM; Start 303; Stop 327
acataattcacaaacaccaaactat

SEQ ID NO: 329297 - DNA, 25 bp, Artificial
  probe
  misc_feature (1)..(25): SEQ ID NO: 2550; WAN024FQM; Start 301; Stop 325
atacataattcacaaacaccaaact

SEQ ID NO: 329298 - DNA, 25 bp, Artificial
  probe
  misc_feature (1)..(25): SEQ ID NO: 2550; WAN024FQM; Start 852; Stop 876
agttgaagatagggaatcacatatc

SEQ ID NO: 329299 - DNA, 25 bp, Artificial
  probe
  misc_feature (1)..(25): SEQ ID NO: 2550; WAN024FQM; Start 300; Stop 324
gatacataattcacaaacaccaaac

SEQ ID NO: 329300 - DNA, 25 bp, Artificial
  probe
  misc_feature (1)..(25): SEQ ID NO: 2550; WAN024FQM; Start 298; Stop 322
tggatacataattcacaaacaccaa

SEQ ID NO: 329301 - DNA, 25 bp, Artificial
  probe
  misc_feature (1)..(25): SEQ ID NO: 2550; WAN024FQM; Start 297; Stop 321
ttggatacataattcacaaacacca

SEQ ID NO: 329302 - DNA, 25 bp, Artificial
  probe
  misc_feature (1)..(25): SEQ ID NO: 2550; WAN024FQM; Start 302; Stop 326
tacataattcacaaacaccaaacta

SEQ ID NO: 329303 - DNA, 25 bp, Artificial
  probe
  misc_feature (1)..(25): SEQ ID NO: 2550; WAN024FQM; Start 855; Stop 879
tgaagatagggaatcacatatcatt

SEQ ID NO: 329304 - DNA, 25 bp, Artificial
  probe
  misc_feature (1)..(25): SEQ ID NO: 2550; WAN024FQM; Start 854; Stop 878
ttgaagatagggaatcacatatcat

SEQ ID NO: 329305 - DNA, 25 bp, Artificial
  probe
  misc_feature (1)..(25): SEQ ID NO: 2550; WAN024FQM; Start 305; Stop 329
ataattcacaaacaccaaactatgg

SEQ ID NO: 329306 - DNA, 25 bp, Artificial
  probe
  misc_feature (1)..(25): SEQ ID NO: 2550; WAN024FQM; Start 769; Stop 793
tttgaaggacataagtggaatgttc

SEQ ID NO: 329307 - DNA, 25 bp, Artificial
  probe
  misc_feature (1)..(25): SEQ ID NO: 2550; WAN024FQM; Start 304; Stop 328
cataattcacaaacaccaaactatg

SEQ ID NO: 329308 - DNA, 25 bp, Artificial
  probe
  misc_feature (1)..(25): SEQ ID NO: 2550; WAN024FQM; Start 422; Stop 446
tttggcttgaaaatgttcctaattc

SEQ ID NO: 329309 - DNA, 25 bp, Artificial
  probe
  misc_feature (1)..(25): SEQ ID NO: 2550; WAN024FQM; Start 620; Stop 644
ctttgagacaatttacaagacttac

SEQ ID NO: 329310 - DNA, 25 bp, Artificial
  probe
  misc_feature (1)..(25): SEQ ID NO: 2550; WAN024FQM; Start 107; Stop 131
aaatcatggaagatattgtaacagt

SEQ ID NO: 329311 - DNA, 25 bp, Artificial
  probe
  misc_feature (1)..(25): SEQ ID NO: 2550; WAN024FQM; Start 856; Stop 880
gaagatagggaatcacatatcattt

SEQ ID NO: 329312 - DNA, 25 bp, Artificial
  probe
  misc_feature (1)..(25): SEQ ID NO: 2550; WAN024FQM; Start 421; Stop 445
ttttggcttgaaaatgttcctaatt

SEQ ID NO: 329313 - DNA, 25 bp, Artificial
  probe
  misc_feature (1)..(25): SEQ ID NO: 2550; WAN024FQM; Start 295; Stop 319
tattggatacataattcacaaacac

SEQ ID NO: 329314 - DNA, 25 bp, Artificial
  probe
  misc_feature (1)..(25): SEQ ID NO: 2550; WAN024FQM; Start 619; Stop 643
tctttgagacaatttacaagactta

SEQ ID NO: 329315 - DNA, 25 bp, Artificial
  probe
  misc_feature (1)..(25): SEQ ID NO: 2550; WAN024FQM; Start 772; Stop 796
gaaggacataagtggaatgttccaa

SEQ ID NO: 329316 - DNA, 25 bp, Artificial
  probe
  misc_feature (1)..(25): SEQ ID NO: 2550; WAN024FQM; Start 423; Stop 447
ttggcttgaaaatgttcctaattca

SEQ ID NO: 329317 - DNA, 25 bp, Artificial
  probe
  misc_feature (1)..(25): SEQ ID NO: 2550; WAN024FQM; Start 768; Stop 792
ttttgaaggacataagtggaatgtt

SEQ ID NO: 329318 - DNA, 25 bp, Artificial
  probe
  misc_feature (1)..(25): SEQ ID NO: 2550; WAN024FQM; Start 862; Stop 886
agggaatcacatatcattttagaaa

SEQ ID NO: 329319 - DNA, 25 bp, Artificial
  probe
  misc_feature (1)..(25): SEQ ID NO: 2551; WAN024DIO; Start 5; Stop 29
gacttcatctaaaatctccactggt

SEQ ID NO: 329320 - DNA, 25 bp, Artificial
  probe
  misc_feature (1)..(25): SEQ ID NO: 2551; WAN024DIO; Start 6; Stop 30
acttcatctaaaatctccactggta

SEQ ID NO: 329321 - DNA, 25 bp, Artificial
  probe
  misc_feature (1)..(25): SEQ ID NO: 2551; WAN024DIO; Start 23; Stop 47
cactggtatggttttacgaacgaat

SEQ ID NO: 329322 - DNA, 25 bp, Artificial
  probe
  misc_feature (1)..(25): SEQ ID NO: 2551; WAN024DIO; Start 61; Stop 85
ggttacgtagaaacatatgatggga

SEQ ID NO: 329323 - DNA, 25 bp, Artificial
  probe
  misc_feature (1)..(25): SEQ ID NO: 2551; WAN024DIO; Start 60; Stop 84
tggttacgtagaaacatatgatggg

SEQ ID NO: 329324 - DNA, 25 bp, Artificial
  probe
  misc_feature (1)..(25): SEQ ID NO: 2551; WAN024DIO; Start 8; Stop 32
ttcatctaaaatctccactggtatg

SEQ ID NO: 329325 - DNA, 25 bp, Artificial
  probe
  misc_feature (1)..(25): SEQ ID NO: 2551; WAN024DIO; Start 7; Stop 31
cttcatctaaaatctccactggtat

SEQ ID NO: 329326 - DNA, 25 bp, Artificial
  probe
  misc_feature (1)..(25): SEQ ID NO: 2551; WAN024DIO; Start 62; Stop 86
gttacgtagaaacatatgatgggaa

SEQ ID NO: 329327 - DNA, 25 bp, Artificial
  probe
  misc_feature (1)..(25): SEQ ID NO: 2551; WAN024DIO; Start 59; Stop 83
atggttacgtagaaacatatgatgg

SEQ ID NO: 329328 - DNA, 25 bp, Artificial
  probe
  misc_feature (1)..(25): SEQ ID NO: 2551; WAN024DIO; Start 3; Stop 27
gggacttcatctaaaatctccactg

SEQ ID NO: 329329 - DNA, 25 bp, Artificial
  probe
  misc_feature (1)..(25): SEQ ID NO: 2551; WAN024DIO; Start 10; Stop 34
catctaaaatctccactggtatggt

SEQ ID NO: 329330 - DNA, 25 bp, Artificial
  probe
  misc_feature (1)..(25): SEQ ID NO: 2551; WAN024DIO; Start 9; Stop 33
tcatctaaaatctccactggtatgg

SEQ ID NO: 329331 - DNA, 25 bp, Artificial
  probe
  misc_feature (1)..(25): SEQ ID NO: 2551; WAN024DIO; Start 4; Stop 28
ggacttcatctaaaatctccactgg

SEQ ID NO: 329332 - DNA, 25 bp, Artificial
  probe
  misc_feature (1)..(25): SEQ ID NO: 2551; WAN024DIO; Start 1; Stop 25
atgggacttcatctaaaatctccac

SEQ ID NO: 329333 - DNA, 25 bp, Artificial
  probe
  misc_feature (1)..(25): SEQ ID NO: 2551; WAN024DIO; Start 12; Stop 36
tctaaaatctccactggtatggttt

SEQ ID NO: 329334 - DNA, 25 bp, Artificial
  probe
  misc_feature (1)..(25): SEQ ID NO: 2551; WAN024DIO; Start 11; Stop 35
atctaaaatctccactggtatggtt

SEQ ID NO: 329335 - DNA, 25 bp, Artificial
  probe
  misc_feature (1)..(25): SEQ ID NO: 2551; WAN024DIO; Start 15; Stop 39
aaaatctccactggtatggttttac

SEQ ID NO: 329336 - DNA, 25 bp, Artificial
  probe
  misc_feature (1)..(25): SEQ ID NO: 2551; WAN024DIO; Start 16; Stop 40
aaatctccactggtatggttttacg

SEQ ID NO: 329337 - DNA, 25 bp, Artificial
  probe
  misc_feature (1)..(25): SEQ ID NO: 2551; WAN024DIO; Start 13; Stop 37
ctaaaatctccactggtatggtttt

SEQ ID NO: 329338 - DNA, 25 bp, Artificial
  probe
  misc_feature (1)..(25): SEQ ID NO: 2551; WAN024DIO; Start 2; Stop 26
tgggacttcatctaaaatctccact

SEQ ID NO: 329339 - DNA, 25 bp, Artificial
  probe
  misc_feature (1)..(25): SEQ ID NO: 2551; WAN024DIO; Start 18; Stop 42
atctccactggtatggttttacgaa

SEQ ID NO: 329340 - DNA, 25 bp, Artificial
  probe
  misc_feature (1)..(25): SEQ ID NO: 2551; WAN024DIO; Start 17; Stop 41
aatctccactggtatggttttacga

SEQ ID NO: 329341 - DNA, 25 bp, Artificial
  probe
  misc_feature (1)..(25): SEQ ID NO: 2551; WAN024DIO; Start 58; Stop 82
aatggttacgtagaaacatatgatg

SEQ ID NO: 329342 - DNA, 25 bp, Artificial
  probe
  misc_feature (1)..(25): SEQ ID NO: 2551; WAN024DIO; Start 19; Stop 43
tctccactggtatggttttacgaac

SEQ ID NO: 329343 - DNA, 25 bp, Artificial
  probe
  misc_feature (1)..(25): SEQ ID NO: 2551; WAN024DIO; Start 49; Stop 73
ggcgaaaataatggttacgtagaaa

SEQ ID NO: 329344 - DNA, 25 bp, Artificial
  probe
  misc_feature (1)..(25): SEQ ID NO: 2551; WAN024DIO; Start 14; Stop 38
taaaatctccactggtatggtttta

SEQ ID NO: 329345 - DNA, 25 bp, Artificial
  probe
  misc_feature (1)..(25): SEQ ID NO: 2551; WAN024DIO; Start 50; Stop 74
gcgaaaataatggttacgtagaaac

SEQ ID NO: 329346 - DNA, 25 bp, Artificial
  probe
  misc_feature (1)..(25): SEQ ID NO: 2551; WAN024DIO; Start 22; Stop 46
ccactggtatggttttacgaacgaa

SEQ ID NO: 329347 - DNA, 25 bp, Artificial
  probe
  misc_feature (1)..(25): SEQ ID NO: 2551; WAN024DIO; Start 51; Stop 75
cgaaaataatggttacgtagaaaca

SEQ ID NO: 329348 - DNA, 25 bp, Artificial
  probe
  misc_feature (1)..(25): SEQ ID NO: 2551; WAN024DIO; Start 20; Stop 44
ctccactggtatggttttacgaacg

SEQ ID NO: 329349 - DNA, 25 bp, Artificial
  probe
  misc_feature (1)..(25): SEQ ID NO: 2551; WAN024DIO; Start 57; Stop 81
taatggttacgtagaaacatatgat

SEQ ID NO: 329350 - DNA, 25 bp, Artificial
  probe
  misc_feature (1)..(25): SEQ ID NO: 2551; WAN024DIO; Start 56; Stop 80
ataatggttacgtagaaacatatga

SEQ ID NO: 329351 - DNA, 25 bp, Artificial
  probe
  misc_feature (1)..(25): SEQ ID NO: 2551; WAN024DIO; Start 21; Stop 45
tccactggtatggttttacgaacga

SEQ ID NO: 329352 - DNA, 25 bp, Artificial
  probe
  misc_feature (1)..(25): SEQ ID NO: 2552; WAN024DB9; Start 91; Stop 115
tttaatcgtctcaatccaaatcgtg

SEQ ID NO: 329353 - DNA, 25 bp, Artificial
  probe
  misc_feature (1)..(25): SEQ ID NO: 2552; WAN024DB9; Start 90; Stop 114
atttaatcgtctcaatccaaatcgt

SEQ ID NO: 329354 - DNA, 25 bp, Artificial
  probe
  misc_feature (1)..(25): SEQ ID NO: 2552; WAN024DB9; Start 92; Stop 116
ttaatcgtctcaatccaaatcgtgc

SEQ ID NO: 329355 - DNA, 25 bp, Artificial
  probe
  misc_feature (1)..(25): SEQ ID NO: 2552; WAN024DB9; Start 80; Stop 104
tggaagaactatttaatcgtctcaa

SEQ ID NO: 329356 - DNA, 25 bp, Artificial
  probe
  misc_feature (1)..(25): SEQ ID NO: 2552; WAN024DB9; Start 79; Stop 103
ttggaagaactatttaatcgtctca

SEQ ID NO: 329357 - DNA, 25 bp, Artificial
  probe
  misc_feature (1)..(25): SEQ ID NO: 2552; WAN024DB9; Start 84; Stop 108
agaactatttaatcgtctcaatcca

SEQ ID NO: 329358 - DNA, 25 bp, Artificial
  probe
  misc_feature (1)..(25): SEQ ID NO: 2552; WAN024DB9; Start 85; Stop 109
gaactatttaatcgtctcaatccaa

SEQ ID NO: 329359 - DNA, 25 bp, Artificial
  probe
  misc_feature (1)..(25): SEQ ID NO: 2552; WAN024DB9; Start 89; Stop 113
tatttaatcgtctcaatccaaatcg

SEQ ID NO: 329360 - DNA, 25 bp, Artificial
  probe
  misc_feature (1)..(25): SEQ ID NO: 2552; WAN024DB9; Start 83; Stop 107
aagaactatttaatcgtctcaatcc

SEQ ID NO: 329361 - DNA, 25 bp, Artificial
  probe
  misc_feature (1)..(25): SEQ ID NO: 2552; WAN024DB9; Start 81; Stop 105
ggaagaactatttaatcgtctcaat

SEQ ID NO: 329362 - DNA, 25 bp, Artificial
  probe
  misc_feature (1)..(25): SEQ ID NO: 2552; WAN024DB9; Start 78; Stop 102
attggaagaactatttaatcgtctc

SEQ ID NO: 329363 - DNA, 25 bp, Artificial
  probe
  misc_feature (1)..(25): SEQ ID NO: 2552; WAN024DB9; Start 86; Stop 110
aactatttaatcgtctcaatccaaa

SEQ ID NO: 329364 - DNA, 25 bp, Artificial
  probe
  misc_feature (1)..(25): SEQ ID NO: 2552; WAN024DB9; Start 93; Stop 117
taatcgtctcaatccaaatcgtgcc

SEQ ID NO: 329365 - DNA, 25 bp, Artificial
  probe
  misc_feature (1)..(25): SEQ ID NO: 2552; WAN024DB9; Start 60; Stop 84
cgtttggaatgaaaagaaattggaa

SEQ ID NO: 329366 - DNA, 25 bp, Artificial
  probe
  misc_feature (1)..(25): SEQ ID NO: 2552; WAN024DB9; Start 26; Stop 50
gagatgcggatggtaattttgtttc

SEQ ID NO: 329367 - DNA, 25 bp, Artificial
  probe
  misc_feature (1)..(25): SEQ ID NO: 2552; WAN024DB9; Start 77; Stop 101
aattggaagaactatttaatcgtct

SEQ ID NO: 329368 - DNA, 25 bp, Artificial
  probe
  misc_feature (1)..(25): SEQ ID NO: 2552; WAN024DB9; Start 64; Stop 88
tggaatgaaaagaaattggaagaac

SEQ ID NO: 329369 - DNA, 25 bp, Artificial
  probe
  misc_feature (1)..(25): SEQ ID NO: 2552; WAN024DB9; Start 65; Stop 89
ggaatgaaaagaaattggaagaact

SEQ ID NO: 329370 - DNA, 25 bp, Artificial
  probe
  misc_feature (1)..(25): SEQ ID NO: 2552; WAN024DB9; Start 87; Stop 111
actatttaatcgtctcaatccaaat

SEQ ID NO: 329371 - DNA, 25 bp, Artificial
  probe
  misc_feature (1)..(25): SEQ ID NO: 2552; WAN024DB9; Start 8; Stop 32
ataaaccgatatctttccgagatgc

SEQ ID NO: 329372 - DNA, 25 bp, Artificial
  probe
  misc_feature (1)..(25): SEQ ID NO: 2552; WAN024DB9; Start 7; Stop 31
gataaaccgatatctttccgagatg

SEQ ID NO: 329373 - DNA, 25 bp, Artificial
  probe
  misc_feature (1)..(25): SEQ ID NO: 2552; WAN024DB9; Start 63; Stop 87
ttggaatgaaaagaaattggaagaa

SEQ ID NO: 329374 - DNA, 25 bp, Artificial
  probe
  misc_feature (1)..(25): SEQ ID NO: 2552; WAN024DB9; Start 62; Stop 86
tttggaatgaaaagaaattggaaga

SEQ ID NO: 329375 - DNA, 25 bp, Artificial
  probe
  misc_feature (1)..(25): SEQ ID NO: 2552; WAN024DB9; Start 61; Stop 85
gtttggaatgaaaagaaattggaag

SEQ ID NO: 329376 - DNA, 25 bp, Artificial
  probe
  misc_feature (1)..(25): SEQ ID NO: 2552; WAN024DB9; Start 82; Stop 106
gaagaactatttaatcgtctcaatc

SEQ ID NO: 329377 - DNA, 25 bp, Artificial
  probe
  misc_feature (1)..(25): SEQ ID NO: 2552; WAN024DB9; Start 25; Stop 49
cgagatgcggatggtaattttgttt

SEQ ID NO: 329378 - DNA, 25 bp, Artificial
  probe
  misc_feature (1)..(25): SEQ ID NO: 2552; WAN024DB9; Start 88; Stop 112
ctatttaatcgtctcaatccaaatc

SEQ ID NO: 329379 - DNA, 25 bp, Artificial
  probe
  misc_feature (1)..(25): SEQ ID NO: 2552; WAN024DB9; Start 59; Stop 83
acgtttggaatgaaaagaaattgga

SEQ ID NO: 329380 - DNA, 25 bp, Artificial
  probe
  misc_feature (1)..(25): SEQ ID NO: 2552; WAN024DB9; Start 58; Stop 82
gacgtttggaatgaaaagaaattgg

SEQ ID NO: 329381 - DNA, 25 bp, Artificial
  probe
  misc_feature (1)..(25): SEQ ID NO: 2552; WAN024DB9; Start 76; Stop 100
aaattggaagaactatttaatcgtc

SEQ ID NO: 329382 - DNA, 25 bp, Artificial
  probe
  misc_feature (1)..(25): SEQ ID NO: 2552; WAN024DB9; Start 75; Stop 99
gaaattggaagaactatttaatcgt

SEQ ID NO: 329383 - DNA, 25 bp, Artificial
  probe
  misc_feature (1)..(25): SEQ ID NO: 2552; WAN024DB9; Start 57; Stop 81
agacgtttggaatgaaaagaaattg

SEQ ID NO: 329384 - DNA, 25 bp, Artificial
  probe
  misc_feature (1)..(25): SEQ ID NO: 2552; WAN024DB9; Start 56; Stop 80
cagacgtttggaatgaaaagaaatt

SEQ ID NO: 329385 - DNA, 25 bp, Artificial
  probe
  misc_feature (1)..(25): SEQ ID NO: 2553; WAN024GDA; Start 159; Stop 183
atacttgatggttatctacgacagg

SEQ ID NO: 329386 - DNA, 25 bp, Artificial
  probe
  misc_feature (1)..(25): SEQ ID NO: 2553; WAN024GDA; Start 51; Stop 75
gaacaccaacttcatcttctgtaac

SEQ ID NO: 329387 - DNA, 25 bp, Artificial
  probe
  misc_feature (1)..(25): SEQ ID NO: 2553; WAN024GDA; Start 53; Stop 77
acaccaacttcatcttctgtaacaa

SEQ ID NO: 329388 - DNA, 25 bp, Artificial
  probe
  misc_feature (1)..(25): SEQ ID NO: 2553; WAN024GDA; Start 52; Stop 76
aacaccaacttcatcttctgtaaca

SEQ ID NO: 329389 - DNA, 25 bp, Artificial
  probe
  misc_feature (1)..(25): SEQ ID NO: 2553; WAN024GDA; Start 158; Stop 182
tatacttgatggttatctacgacag

SEQ ID NO: 329390 - DNA, 25 bp, Artificial
  probe
  misc_feature (1)..(25): SEQ ID NO: 2553; WAN024GDA; Start 54; Stop 78
caccaacttcatcttctgtaacaaa

SEQ ID NO: 329391 - DNA, 25 bp, Artificial
  probe
  misc_feature (1)..(25): SEQ ID NO: 2553; WAN024GDA; Start 166; Stop 190
atggttatctacgacagggagaata

SEQ ID NO: 329392 - DNA, 25 bp, Artificial
  probe
  misc_feature (1)..(25): SEQ ID NO: 2553; WAN024GDA; Start 59; Stop 83
acttcatcttctgtaacaaagcgta

SEQ ID NO: 329393 - DNA, 25 bp, Artificial
  probe
  misc_feature (1)..(25): SEQ ID NO: 2553; WAN024GDA; Start 56; Stop 80
ccaacttcatcttctgtaacaaagc

SEQ ID NO: 329394 - DNA, 25 bp, Artificial
  probe
  misc_feature (1)..(25): SEQ ID NO: 2553; WAN024GDA; Start 55; Stop 79
accaacttcatcttctgtaacaaag

SEQ ID NO: 329395 - DNA, 25 bp, Artificial
  probe
  misc_feature (1)..(25): SEQ ID NO: 2553; WAN024GDA; Start 57; Stop 81
caacttcatcttctgtaacaaagcg

SEQ ID NO: 329396 - DNA, 25 bp, Artificial
  probe
  misc_feature (1)..(25): SEQ ID NO: 2553; WAN024GDA; Start 50; Stop 74
agaacaccaacttcatcttctgtaa

SEQ ID NO: 329397 - DNA, 25 bp, Artificial
  probe
  misc_feature (1)..(25): SEQ ID NO: 2553; WAN024GDA; Start 49; Stop 73
aagaacaccaacttcatcttctgta

SEQ ID NO: 329398 - DNA, 25 bp, Artificial
  probe
  misc_feature (1)..(25): SEQ ID NO: 2553; WAN024GDA; Start 160; Stop 184
tacttgatggttatctacgacaggg

SEQ ID NO: 329399 - DNA, 25 bp, Artificial
  probe
  misc_feature (1)..(25): SEQ ID NO: 2553; WAN024GDA; Start 167; Stop 191
tggttatctacgacagggagaatac

SEQ ID NO: 329400 - DNA, 25 bp, Artificial
  probe
  misc_feature (1)..(25): SEQ ID NO: 2553; WAN024GDA; Start 151; Stop 175
aactccgtatacttgatggttatct

SEQ ID NO: 329401 - DNA, 25 bp, Artificial
  probe
  misc_feature (1)..(25): SEQ ID NO: 2553; WAN024GDA; Start 58; Stop 82
aacttcatcttctgtaacaaagcgt

SEQ ID NO: 329402 - DNA, 25 bp, Artificial
  probe
  misc_feature (1)..(25): SEQ ID NO: 2553; WAN024GDA; Start 165; Stop 189
gatggttatctacgacagggagaat

SEQ ID NO: 329403 - DNA, 25 bp, Artificial
  probe
  misc_feature (1)..(25): SEQ ID NO: 2553; WAN024GDA; Start 60; Stop 84
cttcatcttctgtaacaaagcgtac

SEQ ID NO: 329404 - DNA, 25 bp, Artificial
  probe
  misc_feature (1)..(25): SEQ ID NO: 2553; WAN024GDA; Start 152; Stop 176
actccgtatacttgatggttatcta

SEQ ID NO: 329405 - DNA, 25 bp, Artificial
  probe
  misc_feature (1)..(25): SEQ ID NO: 2553; WAN024GDA; Start 153; Stop 177
ctccgtatacttgatggttatctac

SEQ ID NO: 329406 - DNA, 25 bp, Artificial
  probe
  misc_feature (1)..(25): SEQ ID NO: 2553; WAN024GDA; Start 48; Stop 72
caagaacaccaacttcatcttctgt

SEQ ID NO: 329407 - DNA, 25 bp, Artificial
  probe
  misc_feature (1)..(25): SEQ ID NO: 2553; WAN024GDA; Start 45; Stop 69
ttccaagaacaccaacttcatcttc

SEQ ID NO: 329408 - DNA, 25 bp, Artificial
  probe
  misc_feature (1)..(25): SEQ ID NO: 2553; WAN024GDA; Start 146; Stop 170
gtaataactccgtatacttgatggt

SEQ ID NO: 329409 - DNA, 25 bp, Artificial
  probe
  misc_feature (1)..(25): SEQ ID NO: 2553; WAN024GDA; Start 162; Stop 186
cttgatggttatctacgacagggag

SEQ ID NO: 329410 - DNA, 25 bp, Artificial
  probe
  misc_feature (1)..(25): SEQ ID NO: 2553; WAN024GDA; Start 157; Stop 181
gtatacttgatggttatctacgaca

SEQ ID NO: 329411 - DNA, 25 bp, Artificial
  probe
  misc_feature (1)..(25): SEQ ID NO: 2553; WAN024GDA; Start 47; Stop 71
ccaagaacaccaacttcatcttctg

SEQ ID NO: 329412 - DNA, 25 bp, Artificial
  probe
  misc_feature (1)..(25): SEQ ID NO: 2553; WAN024GDA; Start 46; Stop 70
tccaagaacaccaacttcatcttct

SEQ ID NO: 329413 - DNA, 25 bp, Artificial
  probe
  misc_feature (1)..(25): SEQ ID NO: 2553; WAN024GDA; Start 164; Stop 188
tgatggttatctacgacagggagaa

SEQ ID NO: 329414 - DNA, 25 bp, Artificial
  probe
  misc_feature (1)..(25): SEQ ID NO: 2553; WAN024GDA; Start 163; Stop 187
ttgatggttatctacgacagggaga

SEQ ID NO: 329415 - DNA, 25 bp, Artificial
  probe
  misc_feature (1)..(25): SEQ ID NO: 2553; WAN024GDA; Start 161; Stop 185
acttgatggttatctacgacaggga

SEQ ID NO: 329416 - DNA, 25 bp, Artificial
  probe
  misc_feature (1)..(25): SEQ ID NO: 2553; WAN024GDA; Start 141; Stop 165
ggtcagtaataactccgtatacttg

SEQ ID NO: 329417 - DNA, 25 bp, Artificial
  probe
  misc_feature (1)..(25): SEQ ID NO: 2553; WAN024GDA; Start 147; Stop 171
taataactccgtatacttgatggtt

SEQ ID NO: 329418 - DNA, 25 bp, Artificial
  probe
  misc_feature (1)..(25): SEQ ID NO: 2554; WAN024CYG; Start 4; Stop 28
ggagcattaggttactatgaaggat

SEQ ID NO: 329419 - DNA, 25 bp, Artificial
  probe
  misc_feature (1)..(25): SEQ ID NO: 2554; WAN024CYG; Start 5; Stop 29
gagcattaggttactatgaaggatt

SEQ ID NO: 329420 - DNA, 25 bp, Artificial
  probe
  misc_feature (1)..(25): SEQ ID NO: 2554; WAN024CYG; Start 265; Stop 289
gttaaagacgaagtggctcaaatat

SEQ ID NO: 329421 - DNA, 25 bp, Artificial
  probe
  misc_feature (1)..(25): SEQ ID NO: 2554; WAN024CYG; Start 75; Stop 99
aggcaaaccgctatctgataaatat

SEQ ID NO: 329422 - DNA, 25 bp, Artificial
  probe
  misc_feature (1)..(25): SEQ ID NO: 2554; WAN024CYG; Start 74; Stop 98
aaggcaaaccgctatctgataaata

SEQ ID NO: 329423 - DNA, 25 bp, Artificial
  probe
  misc_feature (1)..(25): SEQ ID NO: 2554; WAN024CYG; Start 1; Stop 25
atgggagcattaggttactatgaag

SEQ ID NO: 329424 - DNA, 25 bp, Artificial
  probe
  misc_feature (1)..(25): SEQ ID NO: 2554; WAN024CYG; Start 267; Stop 291
taaagacgaagtggctcaaatatag

SEQ ID NO: 329425 - DNA, 25 bp, Artificial
  probe
  misc_feature (1)..(25): SEQ ID NO: 2554; WAN024CYG; Start 76; Stop 100
ggcaaaccgctatctgataaatata

SEQ ID NO: 329426 - DNA, 25 bp, Artificial
  probe
  misc_feature (1)..(25): SEQ ID NO: 2554; WAN024CYG; Start 3; Stop 27
gggagcattaggttactatgaagga

SEQ ID NO: 329427 - DNA, 25 bp, Artificial
  probe
  misc_feature (1)..(25): SEQ ID NO: 2554; WAN024CYG; Start 73; Stop 97
gaaggcaaaccgctatctgataaat

SEQ ID NO: 329428 - DNA, 25 bp, Artificial
  probe
  misc_feature (1)..(25): SEQ ID NO: 2554; WAN024CYG; Start 266; Stop 290
ttaaagacgaagtggctcaaatata

SEQ ID NO: 329429 - DNA, 25 bp, Artificial
  probe
  misc_feature (1)..(25): SEQ ID NO: 2554; WAN024CYG; Start 2; Stop 26
tgggagcattaggttactatgaagg

SEQ ID NO: 329430 - DNA, 25 bp, Artificial
  probe
  misc_feature (1)..(25): SEQ ID NO: 2554; WAN024CYG; Start 7; Stop 31
gcattaggttactatgaaggatttg

SEQ ID NO: 329431 - DNA, 25 bp, Artificial
  probe
  misc_feature (1)..(25): SEQ ID NO: 2554; WAN024CYG; Start 6; Stop 30
agcattaggttactatgaaggattt

SEQ ID NO: 329432 - DNA, 25 bp, Artificial
  probe
  misc_feature (1)..(25): SEQ ID NO: 2554; WAN024CYG; Start 148; Stop 172
caaattaatgagcgtgtcgagaaat

SEQ ID NO: 329433 - DNA, 25 bp, Artificial
  probe
  misc_feature (1)..(25): SEQ ID NO: 2554; WAN024CYG; Start 142; Stop 166
aaagatcaaattaatgagcgtgtcg

SEQ ID NO: 329434 - DNA, 25 bp, Artificial
  probe
  misc_feature (1)..(25): SEQ ID NO: 2554; WAN024CYG; Start 72; Stop 96
agaaggcaaaccgctatctgataaa

SEQ ID NO: 329435 - DNA, 25 bp, Artificial
  probe
  misc_feature (1)..(25): SEQ ID NO: 2554; WAN024CYG; Start 71; Stop 95
aagaaggcaaaccgctatctgataa

SEQ ID NO: 329436 - DNA, 25 bp, Artificial
  probe
  misc_feature (1)..(25): SEQ ID NO: 2554; WAN024CYG; Start 159; Stop 183
gcgtgtcgagaaattaggtaagtta

SEQ ID NO: 329437 - DNA, 25 bp, Artificial
  probe
  misc_feature (1)..(25): SEQ ID NO: 2554; WAN024CYG; Start 160; Stop 184
cgtgtcgagaaattaggtaagttaa

SEQ ID NO: 329438 - DNA, 25 bp, Artificial
  probe
  misc_feature (1)..(25): SEQ ID NO: 2554; WAN024CYG; Start 151; Stop 175
attaatgagcgtgtcgagaaattag

SEQ ID NO: 329439 - DNA, 25 bp, Artificial
  probe
  misc_feature (1)..(25): SEQ ID NO: 2554; WAN024CYG; Start 152; Stop 176
ttaatgagcgtgtcgagaaattagg

SEQ ID NO: 329440 - DNA, 25 bp, Artificial
  probe
  misc_feature (1)..(25): SEQ ID NO: 2554; WAN024CYG; Start 149; Stop 173
aaattaatgagcgtgtcgagaaatt

SEQ ID NO: 329441 - DNA, 25 bp, Artificial
  probe
  misc_feature (1)..(25): SEQ ID NO: 2554; WAN024CYG; Start 70; Stop 94
gaagaaggcaaaccgctatctgata

SEQ ID NO: 329442 - DNA, 25 bp, Artificial
  probe
  misc_feature (1)..(25): SEQ ID NO: 2554; WAN024CYG; Start 146; Stop 170
atcaaattaatgagcgtgtcgagaa

SEQ ID NO: 329443 - DNA, 25 bp, Artificial
  probe
  misc_feature (1)..(25): SEQ ID NO: 2554; WAN024CYG; Start 143; Stop 167
aagatcaaattaatgagcgtgtcga

SEQ ID NO: 329444 - DNA, 25 bp, Artificial
  probe
  misc_feature (1)..(25): SEQ ID NO: 2554; WAN024CYG; Start 150; Stop 174
aattaatgagcgtgtcgagaaatta

SEQ ID NO: 329445 - DNA, 25 bp, Artificial
  probe
  misc_feature (1)..(25): SEQ ID NO: 2554; WAN024CYG; Start 147; Stop 171
tcaaattaatgagcgtgtcgagaaa

SEQ ID NO: 329446 - DNA, 25 bp, Artificial
  probe
  misc_feature (1)..(25): SEQ ID NO: 2554; WAN024CYG; Start 11; Stop 35
taggttactatgaaggatttgttcc

SEQ ID NO: 329447 - DNA, 25 bp, Artificial
  probe
  misc_feature (1)..(25): SEQ ID NO: 2554; WAN024CYG; Start 145; Stop 169
gatcaaattaatgagcgtgtcgaga

SEQ ID NO: 329448 - DNA, 25 bp, Artificial
  probe
  misc_feature (1)..(25): SEQ ID NO: 2554; WAN024CYG; Start 144; Stop 168
agatcaaattaatgagcgtgtcgag

SEQ ID NO: 329449 - DNA, 25 bp, Artificial
  probe
  misc_feature (1)..(25): SEQ ID NO: 2554; WAN024CYG; Start 77; Stop 101
gcaaaccgctatctgataaatatat

SEQ ID NO: 329450 - DNA, 25 bp, Artificial
  probe
  misc_feature (1)..(25): SEQ ID NO: 2554; WAN024CYG; Start 155; Stop 179
atgagcgtgtcgagaaattaggtaa

SEQ ID NO: 329451 - DNA, 25 bp, Artificial
  probe
  misc_feature (1)..(25): SEQ ID NO: 2555; WAN024DAZ; Start 615; Stop 639
tcttggtgttcctattatgatgagc

SEQ ID NO: 329452 - DNA, 25 bp, Artificial
  probe
  misc_feature (1)..(25): SEQ ID NO: 2555; WAN024DAZ; Start 616; Stop 640
cttggtgttcctattatgatgagcg

SEQ ID NO: 329453 - DNA, 25 bp, Artificial
  probe
  misc_feature (1)..(25): SEQ ID NO: 2555; WAN024DAZ; Start 614; Stop 638
ttcttggtgttcctattatgatgag

SEQ ID NO: 329454 - DNA, 25 bp, Artificial
  probe
  misc_feature (1)..(25): SEQ ID NO: 2555; WAN024DAZ; Start 618; Stop 642
tggtgttcctattatgatgagcgtt

SEQ ID NO: 329455 - DNA, 25 bp, Artificial
  probe
  misc_feature (1)..(25): SEQ ID NO: 2555; WAN024DAZ; Start 617; Stop 641
ttggtgttcctattatgatgagcgt

SEQ ID NO: 329456 - DNA, 25 bp, Artificial
  probe
  misc_feature (1)..(25): SEQ ID NO: 2555; WAN024DAZ; Start 349; Stop 373
gtggataatatctatctagtgccgc

SEQ ID NO: 329457 - DNA, 25 bp, Artificial
  probe
  misc_feature (1)..(25): SEQ ID NO: 2555; WAN024DAZ; Start 348; Stop 372
tgtggataatatctatctagtgccg

SEQ ID NO: 329458 - DNA, 25 bp, Artificial
  probe
  misc_feature (1)..(25): SEQ ID NO: 2555; WAN024DAZ; Start 613; Stop 637
attcttggtgttcctattatgatga

SEQ ID NO: 329459 - DNA, 25 bp, Artificial
  probe
  misc_feature (1)..(25): SEQ ID NO: 2555; WAN024DAZ; Start 612; Stop 636
cattcttggtgttcctattatgatg

SEQ ID NO: 329460 - DNA, 25 bp, Artificial
  probe
  misc_feature (1)..(25): SEQ ID NO: 2555; WAN024DAZ; Start 350; Stop 374
tggataatatctatctagtgccgcc

SEQ ID NO: 329461 - DNA, 25 bp, Artificial
  probe
  misc_feature (1)..(25): SEQ ID NO: 2555; WAN024DAZ; Start 305; Stop 329
ccttggcaatcttatcaatcattat

SEQ ID NO: 329462 - DNA, 25 bp, Artificial
  probe
  misc_feature (1)..(25): SEQ ID NO: 2555; WAN024DAZ; Start 180; Stop 204
aaataatgtttcggatgttagggac

SEQ ID NO: 329463 - DNA, 25 bp, Artificial
  probe
  misc_feature (1)..(25): SEQ ID NO: 2555; WAN024DAZ; Start 611; Stop 635
ccattcttggtgttcctattatgat

SEQ ID NO: 329464 - DNA, 25 bp, Artificial
  probe
  misc_feature (1)..(25): SEQ ID NO: 2555; WAN024DAZ; Start 347; Stop 371
ctgtggataatatctatctagtgcc

SEQ ID NO: 329465 - DNA, 25 bp, Artificial
  probe
  misc_feature (1)..(25): SEQ ID NO: 2555; WAN024DAZ; Start 417; Stop 441
agtgtcgggtattgcctataataac

SEQ ID NO: 329466 - DNA, 25 bp, Artificial
  probe
  misc_feature (1)..(25): SEQ ID NO: 2555; WAN024DAZ; Start 415; Stop 439
gaagtgtcgggtattgcctataata

SEQ ID NO: 329467 - DNA, 25 bp, Artificial
  probe
  misc_feature (1)..(25): SEQ ID NO: 2555; WAN024DAZ; Start 619; Stop 643
ggtgttcctattatgatgagcgttt

SEQ ID NO: 329468 - DNA, 25 bp, Artificial
  probe
  misc_feature (1)..(25): SEQ ID NO: 2555; WAN024DAZ; Start 416; Stop 440
aagtgtcgggtattgcctataataa

SEQ ID NO: 329469 - DNA, 25 bp, Artificial
  probe
  misc_feature (1)..(25): SEQ ID NO: 2555; WAN024DAZ; Start 284; Stop 308
aacctattctgtccttgattccctt

SEQ ID NO: 329470 - DNA, 25 bp, Artificial
  probe
  misc_feature (1)..(25): SEQ ID NO: 2555; WAN024DAZ; Start 283; Stop 307
aaacctattctgtccttgattccct

SEQ ID NO: 329471 - DNA, 25 bp, Artificial
  probe
  misc_feature (1)..(25): SEQ ID NO: 2555; WAN024DAZ; Start 414; Stop 438
agaagtgtcgggtattgcctataat

SEQ ID NO: 329472 - DNA, 25 bp, Artificial
  probe
  misc_feature (1)..(25): SEQ ID NO: 2555; WAN024DAZ; Start 78; Stop 102
ttgtgctggatatgtggatgcttac

SEQ ID NO: 329473 - DNA, 25 bp, Artificial
  probe
  misc_feature (1)..(25): SEQ ID NO: 2555; WAN024DAZ; Start 303; Stop 327
tcccttggcaatcttatcaatcatt

SEQ ID NO: 329474 - DNA, 25 bp, Artificial
  probe
  misc_feature (1)..(25): SEQ ID NO: 2555; WAN024DAZ; Start 302; Stop 326
ttcccttggcaatcttatcaatcat

SEQ ID NO: 329475 - DNA, 25 bp, Artificial
  probe
  misc_feature (1)..(25): SEQ ID NO: 2555; WAN024DAZ; Start 301; Stop 325
attcccttggcaatcttatcaatca

SEQ ID NO: 329476 - DNA, 25 bp, Artificial
  probe
  misc_feature (1)..(25): SEQ ID NO: 2555; WAN024DAZ; Start 353; Stop 377
ataatatctatctagtgccgccctt

SEQ ID NO: 329477 - DNA, 25 bp, Artificial
  probe
  misc_feature (1)..(25): SEQ ID NO: 2555; WAN024DAZ; Start 339; Stop 363
gccgcaaactgtggataatatctat

SEQ ID NO: 329478 - DNA, 25 bp, Artificial
  probe
  misc_feature (1)..(25): SEQ ID NO: 2555; WAN024DAZ; Start 445; Stop 469
tttatgacagggaatatcaaacgga

SEQ ID NO: 329479 - DNA, 25 bp, Artificial
  probe
  misc_feature (1)..(25): SEQ ID NO: 2555; WAN024DAZ; Start 304; Stop 328
cccttggcaatcttatcaatcatta

SEQ ID NO: 329480 - DNA, 25 bp, Artificial
  probe
  misc_feature (1)..(25): SEQ ID NO: 2555; WAN024DAZ; Start 526; Stop 550
ggattcatatttgttagcctgctta

SEQ ID NO: 329481 - DNA, 25 bp, Artificial
  probe
  misc_feature (1)..(25): SEQ ID NO: 2555; WAN024DAZ; Start 446; Stop 470
ttatgacagggaatatcaaacggac

SEQ ID NO: 329482 - DNA, 25 bp, Artificial
  probe
  misc_feature (1)..(25): SEQ ID NO: 2555; WAN024DAZ; Start 422; Stop 446
cgggtattgcctataataacgcttt

SEQ ID NO: 329483 - DNA, 25 bp, Artificial
  probe
  misc_feature (1)..(25): SEQ ID NO: 2555; WAN024DAZ; Start 418; Stop 442
gtgtcgggtattgcctataataacg

SEQ ID NO: 329484 - DNA, 25 bp, Artificial
  probe
  misc_feature (1)..(25): SEQ ID NO: 2556; WAN024EW5; Start 484; Stop 508
ttatggattaaccttggtagtgtgg

SEQ ID NO: 329485 - DNA, 25 bp, Artificial
  probe
  misc_feature (1)..(25): SEQ ID NO: 2556; WAN024EW5; Start 682; Stop 706
acagtgtctaatgcttatcaagtct

SEQ ID NO: 329486 - DNA, 25 bp, Artificial
  probe
  misc_feature (1)..(25): SEQ ID NO: 2556; WAN024EW5; Start 488; Stop 512
ggattaaccttggtagtgtggatac

SEQ ID NO: 329487 - DNA, 25 bp, Artificial
  probe
  misc_feature (1)..(25): SEQ ID NO: 2556; WAN024EW5; Start 83; Stop 107
taactagcgatattacagccgaatc

SEQ ID NO: 329488 - DNA, 25 bp, Artificial
  probe
  misc_feature (1)..(25): SEQ ID NO: 2556; WAN024EW5; Start 483; Stop 507
cttatggattaaccttggtagtgtg

SEQ ID NO: 329489 - DNA, 25 bp, Artificial
  probe
  misc_feature (1)..(25): SEQ ID NO: 2556; WAN024EW5; Start 683; Stop 707
cagtgtctaatgcttatcaagtctt

SEQ ID NO: 329490 - DNA, 25 bp, Artificial
  probe
  misc_feature (1)..(25): SEQ ID NO: 2556; WAN024EW5; Start 487; Stop 511
tggattaaccttggtagtgtggata

SEQ ID NO: 329491 - DNA, 25 bp, Artificial
  probe
  misc_feature (1)..(25): SEQ ID NO: 2556; WAN024EW5; Start 485; Stop 509
tatggattaaccttggtagtgtgga

SEQ ID NO: 329492 - DNA, 25 bp, Artificial
  probe
  misc_feature (1)..(25): SEQ ID NO: 2556; WAN024EW5; Start 482; Stop 506
tcttatggattaaccttggtagtgt

SEQ ID NO: 329493 - DNA, 25 bp, Artificial
  probe
  misc_feature (1)..(25): SEQ ID NO: 2556; WAN024EW5; Start 35; Stop 59
tgctaggactgtctctgttaatcat

SEQ ID NO: 329494 - DNA, 25 bp, Artificial
  probe
  misc_feature (1)..(25): SEQ ID NO: 2556; WAN024EW5; Start 34; Stop 58
ttgctaggactgtctctgttaatca

SEQ ID NO: 329495 - DNA, 25 bp, Artificial
  probe
  misc_feature (1)..(25): SEQ ID NO: 2556; WAN024EW5; Start 486; Stop 510
atggattaaccttggtagtgtggat

SEQ ID NO: 329496 - DNA, 25 bp, Artificial
  probe
  misc_feature (1)..(25): SEQ ID NO: 2556; WAN024EW5; Start 36; Stop 60
gctaggactgtctctgttaatcatg

SEQ ID NO: 329497 - DNA, 25 bp, Artificial
  probe
  misc_feature (1)..(25): SEQ ID NO: 2556; WAN024EW5; Start 489; Stop 513
gattaaccttggtagtgtggataca

SEQ ID NO: 329498 - DNA, 25 bp, Artificial
  probe
  misc_feature (1)..(25): SEQ ID NO: 2556; WAN024EW5; Start 491; Stop 515
ttaaccttggtagtgtggatacaac

SEQ ID NO: 329499 - DNA, 25 bp, Artificial
  probe
  misc_feature (1)..(25): SEQ ID NO: 2556; WAN024EW5; Start 490; Stop 514
attaaccttggtagtgtggatacaa

SEQ ID NO: 329500 - DNA, 25 bp, Artificial
  probe
  misc_feature (1)..(25): SEQ ID NO: 2556; WAN024EW5; Start 481; Stop 505
ttcttatggattaaccttggtagtg

SEQ ID NO: 329501 - DNA, 25 bp, Artificial
  probe
  misc_feature (1)..(25): SEQ ID NO: 2556; WAN024EW5; Start 685; Stop 709
gtgtctaatgcttatcaagtcttgc

SEQ ID NO: 329502 - DNA, 25 bp, Artificial
  probe
  misc_feature (1)..(25): SEQ ID NO: 2556; WAN024EW5; Start 684; Stop 708
agtgtctaatgcttatcaagtcttg

SEQ ID NO: 329503 - DNA, 25 bp, Artificial
  probe
  misc_feature (1)..(25): SEQ ID NO: 2556; WAN024EW5; Start 82; Stop 106
gtaactagcgatattacagccgaat

SEQ ID NO: 329504 - DNA, 25 bp, Artificial
  probe
  misc_feature (1)..(25): SEQ ID NO: 2556; WAN024EW5; Start 676; Stop 700
tactggacagtgtctaatgcttatc

SEQ ID NO: 329505 - DNA, 25 bp, Artificial
  probe
  misc_feature (1)..(25): SEQ ID NO: 2556; WAN024EW5; Start 673; Stop 697
ctatactggacagtgtctaatgctt

SEQ ID NO: 329506 - DNA, 25 bp, Artificial
  probe
  misc_feature (1)..(25): SEQ ID NO: 2556; WAN024EW5; Start 187; Stop 211
gggattattctctttacggtcttga

SEQ ID NO: 329507 - DNA, 25 bp, Artificial
  probe
  misc_feature (1)..(25): SEQ ID NO: 2556; WAN024EW5; Start 681; Stop 705
gacagtgtctaatgcttatcaagtc

SEQ ID NO: 329508 - DNA, 25 bp, Artificial
  probe
  misc_feature (1)..(25): SEQ ID NO: 2556; WAN024EW5; Start 680; Stop 704
ggacagtgtctaatgcttatcaagt

SEQ ID NO: 329509 - DNA, 25 bp, Artificial
  probe
  misc_feature (1)..(25): SEQ ID NO: 2556; WAN024EW5; Start 679; Stop 703
tggacagtgtctaatgcttatcaag

SEQ ID NO: 329510 - DNA, 25 bp, Artificial
  probe
  misc_feature (1)..(25): SEQ ID NO: 2556; WAN024EW5; Start 678; Stop 702
ctggacagtgtctaatgcttatcaa

SEQ ID NO: 329511 - DNA, 25 bp, Artificial
  probe
  misc_feature (1)..(25): SEQ ID NO: 2556; WAN024EW5; Start 675; Stop 699
atactggacagtgtctaatgcttat

SEQ ID NO: 329512 - DNA, 25 bp, Artificial
  probe
  misc_feature (1)..(25): SEQ ID NO: 2556; WAN024EW5; Start 191; Stop 215
ttattctctttacggtcttgattcg

SEQ ID NO: 329513 - DNA, 25 bp, Artificial
  probe
  misc_feature (1)..(25): SEQ ID NO: 2556; WAN024EW5; Start 727; Stop 751
aatccattcaagattatcgcagagc

SEQ ID NO: 329514 - DNA, 25 bp, Artificial
  probe
  misc_feature (1)..(25): SEQ ID NO: 2556; WAN024EW5; Start 674; Stop 698
tatactggacagtgtctaatgctta

SEQ ID NO: 329515 - DNA, 25 bp, Artificial
  probe
  misc_feature (1)..(25): SEQ ID NO: 2556; WAN024EW5; Start 125; Stop 149
aattggtttacttctttgcggaaat

SEQ ID NO: 329516 - DNA, 25 bp, Artificial
  probe
  misc_feature (1)..(25): SEQ ID NO: 2556; WAN024EW5; Start 124; Stop 148
aaattggtttacttctttgcggaaa

SEQ ID NO: 329517 - DNA, 25 bp, Artificial
  probe
  misc_feature (1)..(25): SEQ ID NO: 2557; WAN024CIN; Start 1860; Stop 1884
attacgaccagtagttcagttagga

SEQ ID NO: 329518 - DNA, 25 bp, Artificial
  probe
  misc_feature (1)..(25): SEQ ID NO: 2557; WAN024CIN; Start 1859; Stop 1883
aattacgaccagtagttcagttagg

SEQ ID NO: 329519 - DNA, 25 bp, Artificial
  probe
  misc_feature (1)..(25): SEQ ID NO: 2557; WAN024CIN; Start 1856; Stop 1880
aagaattacgaccagtagttcagtt

SEQ ID NO: 329520 - DNA, 25 bp, Artificial
  probe
  misc_feature (1)..(25): SEQ ID NO: 2557; WAN024CIN; Start 1331; Stop 1355
ttgccaatcctcaggtagtagaata

SEQ ID NO: 329521 - DNA, 25 bp, Artificial
  probe
  misc_feature (1)..(25): SEQ ID NO: 2557; WAN024CIN; Start 1326; Stop 1350
taatcttgccaatcctcaggtagta

SEQ ID NO: 329522 - DNA, 25 bp, Artificial
  probe
  misc_feature (1)..(25): SEQ ID NO: 2557; WAN024CIN; Start 1661; Stop 1685
gttcatcctatctctatccaaccat

SEQ ID NO: 329523 - DNA, 25 bp, Artificial
  probe
  misc_feature (1)..(25): SEQ ID NO: 2557; WAN024CIN; Start 1662; Stop 1686
ttcatcctatctctatccaaccatt

SEQ ID NO: 329524 - DNA, 25 bp, Artificial
  probe
  misc_feature (1)..(25): SEQ ID NO: 2557; WAN024CIN; Start 602; Stop 626
gtcaacaggtagaacaaggaatctt

SEQ ID NO: 329525 - DNA, 25 bp, Artificial
  probe
  misc_feature (1)..(25): SEQ ID NO: 2557; WAN024CIN; Start 1324; Stop 1348
cttaatcttgccaatcctcaggtag

SEQ ID NO: 329526 - DNA, 25 bp, Artificial
  probe
  misc_feature (1)..(25): SEQ ID NO: 2557; WAN024CIN; Start 1857; Stop 1881
agaattacgaccagtagttcagtta

SEQ ID NO: 329527 - DNA, 25 bp, Artificial
  probe
  misc_feature (1)..(25): SEQ ID NO: 2557; WAN024CIN; Start 1861; Stop 1885
ttacgaccagtagttcagttaggac

SEQ ID NO: 329528 - DNA, 25 bp, Artificial
  probe
  misc_feature (1)..(25): SEQ ID NO: 2557; WAN024CIN; Start 1858; Stop 1882
gaattacgaccagtagttcagttag

SEQ ID NO: 329529 - DNA, 25 bp, Artificial
  probe
  misc_feature (1)..(25): SEQ ID NO: 2557; WAN024CIN; Start 1332; Stop 1356
tgccaatcctcaggtagtagaatac

SEQ ID NO: 329530 - DNA, 25 bp, Artificial
  probe
  misc_feature (1)..(25): SEQ ID NO: 2557; WAN024CIN; Start 1325; Stop 1349
ttaatcttgccaatcctcaggtagt

SEQ ID NO: 329531 - DNA, 25 bp, Artificial
  probe
  misc_feature (1)..(25): SEQ ID NO: 2557; WAN024CIN; Start 1323; Stop 1347
acttaatcttgccaatcctcaggta

SEQ ID NO: 329532 - DNA, 25 bp, Artificial
  probe
  misc_feature (1)..(25): SEQ ID NO: 2557; WAN024CIN; Start 1322; Stop 1346
tacttaatcttgccaatcctcaggt

SEQ ID NO: 329533 - DNA, 25 bp, Artificial
  probe
  misc_feature (1)..(25): SEQ ID NO: 2557; WAN024CIN; Start 1658; Stop 1682
acggttcatcctatctctatccaac

SEQ ID NO: 329534 - DNA, 25 bp, Artificial
  probe
  misc_feature (1)..(25): SEQ ID NO: 2557; WAN024CIN; Start 1832; Stop 1856
ttgctaatcaggtgaacttgtataa

SEQ ID NO: 329535 - DNA, 25 bp, Artificial
  probe
  misc_feature (1)..(25): SEQ ID NO: 2557; WAN024CIN; Start 1321; Stop 1345
gtacttaatcttgccaatcctcagg

SEQ ID NO: 329536 - DNA, 25 bp, Artificial
  probe
  misc_feature (1)..(25): SEQ ID NO: 2557; WAN024CIN; Start 1330; Stop 1354
cttgccaatcctcaggtagtagaat

SEQ ID NO: 329537 - DNA, 25 bp, Artificial
  probe
  misc_feature (1)..(25): SEQ ID NO: 2557; WAN024CIN; Start 1327; Stop 1351
aatcttgccaatcctcaggtagtag

SEQ ID NO: 329538 - DNA, 25 bp, Artificial
  probe
  misc_feature (1)..(25): SEQ ID NO: 2557; WAN024CIN; Start 1831; Stop 1855
attgctaatcaggtgaacttgtata

SEQ ID NO: 329539 - DNA, 25 bp, Artificial
  probe
  misc_feature (1)..(25): SEQ ID NO: 2557; WAN024CIN; Start 675; Stop 699
tcttctactatgcgaacaaggagtc

SEQ ID NO: 329540 - DNA, 25 bp, Artificial
  probe
  misc_feature (1)..(25): SEQ ID NO: 2557; WAN024CIN; Start 1862; Stop 1886
tacgaccagtagttcagttaggaca

SEQ ID NO: 329541 - DNA, 25 bp, Artificial
  probe
  misc_feature (1)..(25): SEQ ID NO: 2557; WAN024CIN; Start 674; Stop 698
ctcttctactatgcgaacaaggagt

SEQ ID NO: 329542 - DNA, 25 bp, Artificial
  probe
  misc_feature (1)..(25): SEQ ID NO: 2557; WAN024CIN; Start 487; Stop 511
agtaatcaggaagttgtcatccata

SEQ ID NO: 329543 - DNA, 25 bp, Artificial
  probe
  misc_feature (1)..(25): SEQ ID NO: 2557; WAN024CIN; Start 486; Stop 510
tagtaatcaggaagttgtcatccat

SEQ ID NO: 329544 - DNA, 25 bp, Artificial
  probe
  misc_feature (1)..(25): SEQ ID NO: 2557; WAN024CIN; Start 485; Stop 509
atagtaatcaggaagttgtcatcca

SEQ ID NO: 329545 - DNA, 25 bp, Artificial
  probe
  misc_feature (1)..(25): SEQ ID NO: 2557; WAN024CIN; Start 676; Stop 700
cttctactatgcgaacaaggagtca

SEQ ID NO: 329546 - DNA, 25 bp, Artificial
  probe
  misc_feature (1)..(25): SEQ ID NO: 2557; WAN024CIN; Start 1293; Stop 1317
tgagcatacttattctcggaatcaa

SEQ ID NO: 329547 - DNA, 25 bp, Artificial
  probe
  misc_feature (1)..(25): SEQ ID NO: 2557; WAN024CIN; Start 1292; Stop 1316
atgagcatacttattctcggaatca

SEQ ID NO: 329548 - DNA, 25 bp, Artificial
  probe
  misc_feature (1)..(25): SEQ ID NO: 2557; WAN024CIN; Start 601; Stop 625
cgtcaacaggtagaacaaggaatct

SEQ ID NO: 329549 - DNA, 25 bp, Artificial
  probe
  misc_feature (1)..(25): SEQ ID NO: 2557; WAN024CIN; Start 677; Stop 701
ttctactatgcgaacaaggagtcac

SEQ ID NO: 329550 - DNA, 25 bp, Artificial
  probe
  misc_feature (1)..(25): SEQ ID NO: 2558; WAN024BIO; Start 88; Stop 112
tcagggagtttaggaaattcttcaa

SEQ ID NO: 329551 - DNA, 25 bp, Artificial
  probe
  misc_feature (1)..(25): SEQ ID NO: 2558; WAN024BIO; Start 87; Stop 111
atcagggagtttaggaaattcttca

SEQ ID NO: 329552 - DNA, 25 bp, Artificial
  probe
  misc_feature (1)..(25): SEQ ID NO: 2558; WAN024BIO; Start 84; Stop 108
caaatcagggagtttaggaaattct

SEQ ID NO: 329553 - DNA, 25 bp, Artificial
  probe
  misc_feature (1)..(25): SEQ ID NO: 2558; WAN024BIO; Start 83; Stop 107
tcaaatcagggagtttaggaaattc

SEQ ID NO: 329554 - DNA, 25 bp, Artificial
  probe
  misc_feature (1)..(25): SEQ ID NO: 2558; WAN024BIO; Start 81; Stop 105
cttcaaatcagggagtttaggaaat

SEQ ID NO: 329555 - DNA, 25 bp, Artificial
  probe
  misc_feature (1)..(25): SEQ ID NO: 2558; WAN024BIO; Start 98; Stop 122
taggaaattcttcaaacatcttgcc

SEQ ID NO: 329556 - DNA, 25 bp, Artificial
  probe
  misc_feature (1)..(25): SEQ ID NO: 2558; WAN024BIO; Start 89; Stop 113
cagggagtttaggaaattcttcaaa

SEQ ID NO: 329557 - DNA, 25 bp, Artificial
  probe
  misc_feature (1)..(25): SEQ ID NO: 2558; WAN024BIO; Start 8; Stop 32
ttgttggaaagcagtcatctagttt

SEQ ID NO: 329558 - DNA, 25 bp, Artificial
  probe
  misc_feature (1)..(25): SEQ ID NO: 2558; WAN024BIO; Start 80; Stop 104
gcttcaaatcagggagtttaggaaa

SEQ ID NO: 329559 - DNA, 25 bp, Artificial
  probe
  misc_feature (1)..(25): SEQ ID NO: 2558; WAN024BIO; Start 101; Stop 125
gaaattcttcaaacatcttgcccaa

SEQ ID NO: 329560 - DNA, 25 bp, Artificial
  probe
  misc_feature (1)..(25): SEQ ID NO: 2558; WAN024BIO; Start 86; Stop 110
aatcagggagtttaggaaattcttc

SEQ ID NO: 329561 - DNA, 25 bp, Artificial
  probe
  misc_feature (1)..(25): SEQ ID NO: 2558; WAN024BIO; Start 85; Stop 109
aaatcagggagtttaggaaattctt

SEQ ID NO: 329562 - DNA, 25 bp, Artificial
  probe
  misc_feature (1)..(25): SEQ ID NO: 2558; WAN024BIO; Start 82; Stop 106
ttcaaatcagggagtttaggaaatt

SEQ ID NO: 329563 - DNA, 25 bp, Artificial
  probe
  misc_feature (1)..(25): SEQ ID NO: 2558; WAN024BIO; Start 76; Stop 100
acttgcttcaaatcagggagtttag

SEQ ID NO: 329564 - DNA, 25 bp, Artificial
  probe
  misc_feature (1)..(25): SEQ ID NO: 2558; WAN024BIO; Start 75; Stop 99
gacttgcttcaaatcagggagttta

SEQ ID NO: 329565 - DNA, 25 bp, Artificial
  probe
  misc_feature (1)..(25): SEQ ID NO: 2558; WAN024BIO; Start 7; Stop 31
gttgttggaaagcagtcatctagtt

SEQ ID NO: 329566 - DNA, 25 bp, Artificial
  probe
  misc_feature (1)..(25): SEQ ID NO: 2558; WAN024BIO; Start 5; Stop 29
gagttgttggaaagcagtcatctag

SEQ ID NO: 329567 - DNA, 25 bp, Artificial
  probe
  misc_feature (1)..(25): SEQ ID NO: 2558; WAN024BIO; Start 77; Stop 101
cttgcttcaaatcagggagtttagg

SEQ ID NO: 329568 - DNA, 25 bp, Artificial
  probe
  misc_feature (1)..(25): SEQ ID NO: 2558; WAN024BIO; Start 97; Stop 121
ttaggaaattcttcaaacatcttgc

SEQ ID NO: 329569 - DNA, 25 bp, Artificial
  probe
  misc_feature (1)..(25): SEQ ID NO: 2558; WAN024BIO; Start 102; Stop 126
aaattcttcaaacatcttgcccaag

SEQ ID NO: 329570 - DNA, 25 bp, Artificial
  probe
  misc_feature (1)..(25): SEQ ID NO: 2558; WAN024BIO; Start 79; Stop 103
tgcttcaaatcagggagtttaggaa

SEQ ID NO: 329571 - DNA, 25 bp, Artificial
  probe
  misc_feature (1)..(25): SEQ ID NO: 2558; WAN024BIO; Start 99; Stop 123
aggaaattcttcaaacatcttgccc

SEQ ID NO: 329572 - DNA, 25 bp, Artificial
  probe
  misc_feature (1)..(25): SEQ ID NO: 2558; WAN024BIO; Start 6; Stop 30
agttgttggaaagcagtcatctagt

SEQ ID NO: 329573 - DNA, 25 bp, Artificial
  probe
  misc_feature (1)..(25): SEQ ID NO: 2558; WAN024BIO; Start 78; Stop 102
ttgcttcaaatcagggagtttagga

SEQ ID NO: 329574 - DNA, 25 bp, Artificial
  probe
  misc_feature (1)..(25): SEQ ID NO: 2558; WAN024BIO; Start 100; Stop 124
ggaaattcttcaaacatcttgccca

SEQ ID NO: 329575 - DNA, 25 bp, Artificial
  probe
  misc_feature (1)..(25): SEQ ID NO: 2558; WAN024BIO; Start 104; Stop 128
attcttcaaacatcttgcccaagtt

SEQ ID NO: 329576 - DNA, 25 bp, Artificial
  probe
  misc_feature (1)..(25): SEQ ID NO: 2558; WAN024BIO; Start 103; Stop 127
aattcttcaaacatcttgcccaagt

SEQ ID NO: 329577 - DNA, 25 bp, Artificial
  probe
  misc_feature (1)..(25): SEQ ID NO: 2558; WAN024BIO; Start 4; Stop 28
ggagttgttggaaagcagtcatcta

SEQ ID NO: 329578 - DNA, 25 bp, Artificial
  probe
  misc_feature (1)..(25): SEQ ID NO: 2558; WAN024BIO; Start 150; Stop 174
agccataggtgtacctcgattctaa

SEQ ID NO: 329579 - DNA, 25 bp, Artificial
  probe
  misc_feature (1)..(25): SEQ ID NO: 2558; WAN024BIO; Start 74; Stop 98
tgacttgcttcaaatcagggagttt

SEQ ID NO: 329580 - DNA, 25 bp, Artificial
  probe
  misc_feature (1)..(25): SEQ ID NO: 2558; WAN024BIO; Start 91; Stop 115
gggagtttaggaaattcttcaaaca

SEQ ID NO: 329581 - DNA, 25 bp, Artificial
  probe
  misc_feature (1)..(25): SEQ ID NO: 2558; WAN024BIO; Start 105; Stop 129
ttcttcaaacatcttgcccaagttg

SEQ ID NO: 329582 - DNA, 25 bp, Artificial
  probe
  misc_feature (1)..(25): SEQ ID NO: 2558; WAN024BIO; Start 69; Stop 93
gaaagtgacttgcttcaaatcaggg

SEQ ID NO: 329583 - DNA, 25 bp, Artificial
  probe
  misc_feature (1)..(25): SEQ ID NO: 2559; WAN024DC8; Start 185; Stop 209
ttgaaggagttgatattgctctctt

SEQ ID NO: 329584 - DNA, 25 bp, Artificial
  probe
  misc_feature (1)..(25): SEQ ID NO: 2559; WAN024DC8; Start 655; Stop 679
tacgaagagatgaagatgaccaagg

SEQ ID NO: 329585 - DNA, 25 bp, Artificial
  probe
  misc_feature (1)..(25): SEQ ID NO: 2559; WAN024DC8; Start 657; Stop 681
cgaagagatgaagatgaccaaggaa

SEQ ID NO: 329586 - DNA, 25 bp, Artificial
  probe
  misc_feature (1)..(25): SEQ ID NO: 2559; WAN024DC8; Start 832; Stop 856
ggtgctgttcttgaagatgatgtag

SEQ ID NO: 329587 - DNA, 25 bp, Artificial
  probe
  misc_feature (1)..(25): SEQ ID NO: 2559; WAN024DC8; Start 831; Stop 855
aggtgctgttcttgaagatgatgta

SEQ ID NO: 329588 - DNA, 25 bp, Artificial
  probe
  misc_feature (1)..(25): SEQ ID NO: 2559; WAN024DC8; Start 665; Stop 689
tgaagatgaccaaggaaactaagaa

SEQ ID NO: 329589 - DNA, 25 bp, Artificial
  probe
  misc_feature (1)..(25): SEQ ID NO: 2559; WAN024DC8; Start 661; Stop 685
gagatgaagatgaccaaggaaacta

SEQ ID NO: 329590 - DNA, 25 bp, Artificial
  probe
  misc_feature (1)..(25): SEQ ID NO: 2559; WAN024DC8; Start 581; Stop 605
gtgacaagaaacattatcctatcgc

SEQ ID NO: 329591 - DNA, 25 bp, Artificial
  probe
  misc_feature (1)..(25): SEQ ID NO: 2559; WAN024DC8; Start 664; Stop 688
atgaagatgaccaaggaaactaaga

SEQ ID NO: 329592 - DNA, 25 bp, Artificial
  probe
  misc_feature (1)..(25): SEQ ID NO: 2559; WAN024DC8; Start 662; Stop 686
agatgaagatgaccaaggaaactaa

SEQ ID NO: 329593 - DNA, 25 bp, Artificial
  probe
  misc_feature (1)..(25): SEQ ID NO: 2559; WAN024DC8; Start 580; Stop 604
ggtgacaagaaacattatcctatcg

SEQ ID NO: 329594 - DNA, 25 bp, Artificial
  probe
  misc_feature (1)..(25): SEQ ID NO: 2559; WAN024DC8; Start 658; Stop 682
gaagagatgaagatgaccaaggaaa

SEQ ID NO: 329595 - DNA, 25 bp, Artificial
  probe
  misc_feature (1)..(25): SEQ ID NO: 2559; WAN024DC8; Start 663; Stop 687
gatgaagatgaccaaggaaactaag

SEQ ID NO: 329596 - DNA, 25 bp, Artificial
  probe
  misc_feature (1)..(25): SEQ ID NO: 2559; WAN024DC8; Start 694; Stop 718
atggaagatgatagcattgcagtat

SEQ ID NO: 329597 - DNA, 25 bp, Artificial
  probe
  misc_feature (1)..(25): SEQ ID NO: 2559; WAN024DC8; Start 659; Stop 683
aagagatgaagatgaccaaggaaac

SEQ ID NO: 329598 - DNA, 25 bp, Artificial
  probe
  misc_feature (1)..(25): SEQ ID NO: 2559; WAN024DC8; Start 583; Stop 607
gacaagaaacattatcctatcgcct

SEQ ID NO: 329599 - DNA, 25 bp, Artificial
  probe
  misc_feature (1)..(25): SEQ ID NO: 2559; WAN024DC8; Start 693; Stop 717
tatggaagatgatagcattgcagta

SEQ ID NO: 329600 - DNA, 25 bp, Artificial
  probe
  misc_feature (1)..(25): SEQ ID NO: 2559; WAN024DC8; Start 692; Stop 716
ttatggaagatgatagcattgcagt

SEQ ID NO: 329601 - DNA, 25 bp, Artificial
  probe
  misc_feature (1)..(25): SEQ ID NO: 2559; WAN024DC8; Start 582; Stop 606
tgacaagaaacattatcctatcgcc

SEQ ID NO: 329602 - DNA, 25 bp, Artificial
  probe
  misc_feature (1)..(25): SEQ ID NO: 2559; WAN024DC8; Start 691; Stop 715
attatggaagatgatagcattgcag

SEQ ID NO: 329603 - DNA, 25 bp, Artificial
  probe
  misc_feature (1)..(25): SEQ ID NO: 2559; WAN024DC8; Start 584; Stop 608
acaagaaacattatcctatcgcctt

SEQ ID NO: 329604 - DNA, 25 bp, Artificial
  probe
  misc_feature (1)..(25): SEQ ID NO: 2559; WAN024DC8; Start 666; Stop 690
gaagatgaccaaggaaactaagaaa

SEQ ID NO: 329605 - DNA, 25 bp, Artificial
  probe
  misc_feature (1)..(25): SEQ ID NO: 2559; WAN024DC8; Start 690; Stop 714
aattatggaagatgatagcattgca

SEQ ID NO: 329606 - DNA, 25 bp, Artificial
  probe
  misc_feature (1)..(25): SEQ ID NO: 2559; WAN024DC8; Start 448; Stop 472
attgtttcaacttatcaagccgttt

SEQ ID NO: 329607 - DNA, 25 bp, Artificial
  probe
  misc_feature (1)..(25): SEQ ID NO: 2559; WAN024DC8; Start 445; Stop 469
atcattgtttcaacttatcaagccg

SEQ ID NO: 329608 - DNA, 25 bp, Artificial
  probe
  misc_feature (1)..(25): SEQ ID NO: 2559; WAN024DC8; Start 437; Stop 461
tggaccgtatcattgtttcaactta

SEQ ID NO: 329609 - DNA, 25 bp, Artificial
  probe
  misc_feature (1)..(25): SEQ ID NO: 2559; WAN024DC8; Start 660; Stop 684
agagatgaagatgaccaaggaaact

SEQ ID NO: 329610 - DNA, 25 bp, Artificial
  probe
  misc_feature (1)..(25): SEQ ID NO: 2559; WAN024DC8; Start 438; Stop 462
ggaccgtatcattgtttcaacttat

SEQ ID NO: 329611 - DNA, 25 bp, Artificial
  probe
  misc_feature (1)..(25): SEQ ID NO: 2559; WAN024DC8; Start 449; Stop 473
ttgtttcaacttatcaagccgtttc

SEQ ID NO: 329612 - DNA, 25 bp, Artificial
  probe
  misc_feature (1)..(25): SEQ ID NO: 2559; WAN024DC8; Start 447; Stop 471
cattgtttcaacttatcaagccgtt

SEQ ID NO: 329613 - DNA, 25 bp, Artificial
  probe
  misc_feature (1)..(25): SEQ ID NO: 2559; WAN024DC8; Start 656; Stop 680
acgaagagatgaagatgaccaagga

SEQ ID NO: 329614 - DNA, 25 bp, Artificial
  probe
  misc_feature (1)..(25): SEQ ID NO: 2559; WAN024DC8; Start 451; Stop 475
gtttcaacttatcaagccgtttcag

SEQ ID NO: 329615 - DNA, 25 bp, Artificial
  probe
  misc_feature (1)..(25): SEQ ID NO: 2559; WAN024DC8; Start 186; Stop 210
tgaaggagttgatattgctctcttt

SEQ ID NO: 329616 - DNA, 25 bp, Artificial
  probe
  misc_feature (1)..(25): SEQ ID NO: 2560; WAN024FUB; Start 92; Stop 116
aaataataacgccttctcgcaaatc

SEQ ID NO: 329617 - DNA, 25 bp, Artificial
  probe
  misc_feature (1)..(25): SEQ ID NO: 2560; WAN024FUB; Start 86; Stop 110
catctgaaataataacgccttctcg

SEQ ID NO: 329618 - DNA, 25 bp, Artificial
  probe
  misc_feature (1)..(25): SEQ ID NO: 2560; WAN024FUB; Start 85; Stop 109
gcatctgaaataataacgccttctc

SEQ ID NO: 329619 - DNA, 25 bp, Artificial
  probe
  misc_feature (1)..(25): SEQ ID NO: 2560; WAN024FUB; Start 124; Stop 148
gccaactccttaatgaaagcaatag

SEQ ID NO: 329620 - DNA, 25 bp, Artificial
  probe
  misc_feature (1)..(25): SEQ ID NO: 2560; WAN024FUB; Start 91; Stop 115
gaaataataacgccttctcgcaaat

SEQ ID NO: 329621 - DNA, 25 bp, Artificial
  probe
  misc_feature (1)..(25): SEQ ID NO: 2560; WAN024FUB; Start 84; Stop 108
agcatctgaaataataacgccttct

SEQ ID NO: 329622 - DNA, 25 bp, Artificial
  probe
  misc_feature (1)..(25): SEQ ID NO: 2560; WAN024FUB; Start 166; Stop 190
ctgaggataatgacatctgccaaag

SEQ ID NO: 329623 - DNA, 25 bp, Artificial
  probe
  misc_feature (1)..(25): SEQ ID NO: 2560; WAN024FUB; Start 125; Stop 149
ccaactccttaatgaaagcaatagt

SEQ ID NO: 329624 - DNA, 25 bp, Artificial
  probe
  misc_feature (1)..(25): SEQ ID NO: 2560; WAN024FUB; Start 90; Stop 114
tgaaataataacgccttctcgcaaa

SEQ ID NO: 329625 - DNA, 25 bp, Artificial
  probe
  misc_feature (1)..(25): SEQ ID NO: 2560; WAN024FUB; Start 87; Stop 111
atctgaaataataacgccttctcgc

SEQ ID NO: 329626 - DNA, 25 bp, Artificial
  probe
  misc_feature (1)..(25): SEQ ID NO: 2560; WAN024FUB; Start 93; Stop 117
aataataacgccttctcgcaaatcc

SEQ ID NO: 329627 - DNA, 25 bp, Artificial
  probe
  misc_feature (1)..(25): SEQ ID NO: 2560; WAN024FUB; Start 157; Stop 181
attggcaagctgaggataatgacat

SEQ ID NO: 329628 - DNA, 25 bp, Artificial
  probe
  misc_feature (1)..(25): SEQ ID NO: 2560; WAN024FUB; Start 83; Stop 107
cagcatctgaaataataacgccttc

SEQ ID NO: 329629 - DNA, 25 bp, Artificial
  probe
  misc_feature (1)..(25): SEQ ID NO: 2560; WAN024FUB; Start 78; Stop 102
cgaaccagcatctgaaataataacg

SEQ ID NO: 329630 - DNA, 25 bp, Artificial
  probe
  misc_feature (1)..(25): SEQ ID NO: 2560; WAN024FUB; Start 89; Stop 113
ctgaaataataacgccttctcgcaa

SEQ ID NO: 329631 - DNA, 25 bp, Artificial
  probe
  misc_feature (1)..(25): SEQ ID NO: 2560; WAN024FUB; Start 79; Stop 103
gaaccagcatctgaaataataacgc

SEQ ID NO: 329632 - DNA, 25 bp, Artificial
  probe
  misc_feature (1)..(25): SEQ ID NO: 2560; WAN024FUB; Start 154; Stop 178
ttgattggcaagctgaggataatga

SEQ ID NO: 329633 - DNA, 25 bp, Artificial
  probe
  misc_feature (1)..(25): SEQ ID NO: 2560; WAN024FUB; Start 169; Stop 193
aggataatgacatctgccaaaggag

SEQ ID NO: 329634 - DNA, 25 bp, Artificial
  probe
  misc_feature (1)..(25): SEQ ID NO: 2560; WAN024FUB; Start 168; Stop 192
gaggataatgacatctgccaaagga

SEQ ID NO: 329635 - DNA, 25 bp, Artificial
  probe
  misc_feature (1)..(25): SEQ ID NO: 2560; WAN024FUB; Start 129; Stop 153
ctccttaatgaaagcaatagtttgt

SEQ ID NO: 329636 - DNA, 25 bp, Artificial
  probe
  misc_feature (1)..(25): SEQ ID NO: 2560; WAN024FUB; Start 128; Stop 152
actccttaatgaaagcaatagtttg

SEQ ID NO: 329637 - DNA, 25 bp, Artificial
  probe
  misc_feature (1)..(25): SEQ ID NO: 2560; WAN024FUB; Start 82; Stop 106
ccagcatctgaaataataacgcctt

SEQ ID NO: 329638 - DNA, 25 bp, Artificial
  probe
  misc_feature (1)..(25): SEQ ID NO: 2560; WAN024FUB; Start 167; Stop 191
tgaggataatgacatctgccaaagg

SEQ ID NO: 329639 - DNA, 25 bp, Artificial
  probe
  misc_feature (1)..(25): SEQ ID NO: 2560; WAN024FUB; Start 156; Stop 180
gattggcaagctgaggataatgaca

SEQ ID NO: 329640 - DNA, 25 bp, Artificial
  probe
  misc_feature (1)..(25): SEQ ID NO: 2560; WAN024FUB; Start 155; Stop 179
tgattggcaagctgaggataatgac

SEQ ID NO: 329641 - DNA, 25 bp, Artificial
  probe
  misc_feature (1)..(25): SEQ ID NO: 2560; WAN024FUB; Start 88; Stop 112
tctgaaataataacgccttctcgca

SEQ ID NO: 329642 - DNA, 25 bp, Artificial
  probe
  misc_feature (1)..(25): SEQ ID NO: 2560; WAN024FUB; Start 80; Stop 104
aaccagcatctgaaataataacgcc

SEQ ID NO: 329643 - DNA, 25 bp, Artificial
  probe
  misc_feature (1)..(25): SEQ ID NO: 2560; WAN024FUB; Start 158; Stop 182
ttggcaagctgaggataatgacatc

SEQ ID NO: 329644 - DNA, 25 bp, Artificial
  probe
  misc_feature (1)..(25): SEQ ID NO: 2560; WAN024FUB; Start 219; Stop 243
acggtcaatcataccttctttcaag

SEQ ID NO: 329645 - DNA, 25 bp, Artificial
  probe
  misc_feature (1)..(25): SEQ ID NO: 2560; WAN024FUB; Start 144; Stop 168
aatagtttgtttgattggcaagctg

SEQ ID NO: 329646 - DNA, 25 bp, Artificial
  probe
  misc_feature (1)..(25): SEQ ID NO: 2560; WAN024FUB; Start 218; Stop 242
cacggtcaatcataccttctttcaa

SEQ ID NO: 329647 - DNA, 25 bp, Artificial
  probe
  misc_feature (1)..(25): SEQ ID NO: 2560; WAN024FUB; Start 130; Stop 154
tccttaatgaaagcaatagtttgtt

SEQ ID NO: 329648 - DNA, 25 bp, Artificial
  probe
  misc_feature (1)..(25): SEQ ID NO: 2560; WAN024FUB; Start 94; Stop 118
ataataacgccttctcgcaaatcca

SEQ ID NO: 329649 - DNA, 25 bp, Artificial
  probe
  misc_feature (1)..(25): SEQ ID NO: 2561; WAN024G3X; Start 1476; Stop 1500
tatgcttatgaactactggaccttg

SEQ ID NO: 329650 - DNA, 25 bp, Artificial
  probe
  misc_feature (1)..(25): SEQ ID NO: 2561; WAN024G3X; Start 1875; Stop 1899
ttactacacttctgcctacgatatg

SEQ ID NO: 329651 - DNA, 25 bp, Artificial
  probe
  misc_feature (1)..(25): SEQ ID NO: 2561; WAN024G3X; Start 1879; Stop 1903
tacacttctgcctacgatatggata

SEQ ID NO: 329652 - DNA, 25 bp, Artificial
  probe
  misc_feature (1)..(25): SEQ ID NO: 2561; WAN024G3X; Start 1062; Stop 1086
gtctggctatccttatgtagtcaac

SEQ ID NO: 329653 - DNA, 25 bp, Artificial
  probe
  misc_feature (1)..(25): SEQ ID NO: 2561; WAN024G3X; Start 1061; Stop 1085
agtctggctatccttatgtagtcaa

SEQ ID NO: 329654 - DNA, 25 bp, Artificial
  probe
  misc_feature (1)..(25): SEQ ID NO: 2561; WAN024G3X; Start 1874; Stop 1898
cttactacacttctgcctacgatat

SEQ ID NO: 329655 - DNA, 25 bp, Artificial
  probe
  misc_feature (1)..(25): SEQ ID NO: 2561; WAN024G3X; Start 1475; Stop 1499
ttatgcttatgaactactggacctt

SEQ ID NO: 329656 - DNA, 25 bp, Artificial
  probe
  misc_feature (1)..(25): SEQ ID NO: 2561; WAN024G3X; Start 1869; Stop 1893
cattccttactacacttctgcctac

SEQ ID NO: 329657 - DNA, 25 bp, Artificial
  probe
  misc_feature (1)..(25): SEQ ID NO: 2561; WAN024G3X; Start 1881; Stop 1905
cacttctgcctacgatatggatatg

SEQ ID NO: 329658 - DNA, 25 bp, Artificial
  probe
  misc_feature (1)..(25): SEQ ID NO: 2561; WAN024G3X; Start 1059; Stop 1083
agagtctggctatccttatgtagtc

SEQ ID NO: 329659 - DNA, 25 bp, Artificial
  probe
  misc_feature (1)..(25): SEQ ID NO: 2561; WAN024G3X; Start 1060; Stop 1084
gagtctggctatccttatgtagtca

SEQ ID NO: 329660 - DNA, 25 bp, Artificial
  probe
  misc_feature (1)..(25): SEQ ID NO: 2561; WAN024G3X; Start 1880; Stop 1904
acacttctgcctacgatatggatat

SEQ ID NO: 329661 - DNA, 25 bp, Artificial
  probe
  misc_feature (1)..(25): SEQ ID NO: 2561; WAN024G3X; Start 1057; Stop 1081
caagagtctggctatccttatgtag

SEQ ID NO: 329662 - DNA, 25 bp, Artificial
  probe
  misc_feature (1)..(25): SEQ ID NO: 2561; WAN024G3X; Start 1058; Stop 1082
aagagtctggctatccttatgtagt

SEQ ID NO: 329663 - DNA, 25 bp, Artificial
  probe
  misc_feature (1)..(25): SEQ ID NO: 2561; WAN024G3X; Start 1873; Stop 1897
ccttactacacttctgcctacgata

SEQ ID NO: 329664 - DNA, 25 bp, Artificial
  probe
  misc_feature (1)..(25): SEQ ID NO: 2561; WAN024G3X; Start 1876; Stop 1900
tactacacttctgcctacgatatgg

SEQ ID NO: 329665 - DNA, 25 bp, Artificial
  probe
  misc_feature (1)..(25): SEQ ID NO: 2561; WAN024G3X; Start 1133; Stop 1157
tgagtaacttgtgttctgagattct

SEQ ID NO: 329666 - DNA, 25 bp, Artificial
  probe
  misc_feature (1)..(25): SEQ ID NO: 2561; WAN024G3X; Start 1054; Stop 1078
caacaagagtctggctatccttatg

SEQ ID NO: 329667 - DNA, 25 bp, Artificial
  probe
  misc_feature (1)..(25): SEQ ID NO: 2561; WAN024G3X; Start 1868; Stop 1892
ccattccttactacacttctgccta

SEQ ID NO: 329668 - DNA, 25 bp, Artificial
  probe
  misc_feature (1)..(25): SEQ ID NO: 2561; WAN024G3X; Start 526; Stop 550
caagtgacggatgatatgaactcta

SEQ ID NO: 329669 - DNA, 25 bp, Artificial
  probe
  misc_feature (1)..(25): SEQ ID NO: 2561; WAN024G3X; Start 1142; Stop 1166
tgtgttctgagattcttcaagttca

SEQ ID NO: 329670 - DNA, 25 bp, Artificial
  probe
  misc_feature (1)..(25): SEQ ID NO: 2561; WAN024G3X; Start 1878; Stop 1902
ctacacttctgcctacgatatggat

SEQ ID NO: 329671 - DNA, 25 bp, Artificial
  probe
  misc_feature (1)..(25): SEQ ID NO: 2561; WAN024G3X; Start 1143; Stop 1167
gtgttctgagattcttcaagttcaa

SEQ ID NO: 329672 - DNA, 25 bp, Artificial
  probe
  misc_feature (1)..(25): SEQ ID NO: 2561; WAN024G3X; Start 1141; Stop 1165
ttgtgttctgagattcttcaagttc

SEQ ID NO: 329673 - DNA, 25 bp, Artificial
  probe
  misc_feature (1)..(25): SEQ ID NO: 2561; WAN024G3X; Start 175; Stop 199
tacctcattgaacacaactacatcg

SEQ ID NO: 329674 - DNA, 25 bp, Artificial
  probe
  misc_feature (1)..(25): SEQ ID NO: 2561; WAN024G3X; Start 174; Stop 198
ttacctcattgaacacaactacatc

SEQ ID NO: 329675 - DNA, 25 bp, Artificial
  probe
  misc_feature (1)..(25): SEQ ID NO: 2561; WAN024G3X; Start 1144; Stop 1168
tgttctgagattcttcaagttcaag

SEQ ID NO: 329676 - DNA, 25 bp, Artificial
  probe
  misc_feature (1)..(25): SEQ ID NO: 2561; WAN024G3X; Start 1135; Stop 1159
agtaacttgtgttctgagattcttc

SEQ ID NO: 329677 - DNA, 25 bp, Artificial
  probe
  misc_feature (1)..(25): SEQ ID NO: 2561; WAN024G3X; Start 1134; Stop 1158
gagtaacttgtgttctgagattctt

SEQ ID NO: 329678 - DNA, 25 bp, Artificial
  probe
  misc_feature (1)..(25): SEQ ID NO: 2561; WAN024G3X; Start 1132; Stop 1156
atgagtaacttgtgttctgagattc

SEQ ID NO: 329679 - DNA, 25 bp, Artificial
  probe
  misc_feature (1)..(25): SEQ ID NO: 2561; WAN024G3X; Start 527; Stop 551
aagtgacggatgatatgaactctat

SEQ ID NO: 329680 - DNA, 25 bp, Artificial
  probe
  misc_feature (1)..(25): SEQ ID NO: 2561; WAN024G3X; Start 1136; Stop 1160
gtaacttgtgttctgagattcttca

SEQ ID NO: 329681 - DNA, 25 bp, Artificial
  probe
  misc_feature (1)..(25): SEQ ID NO: 2561; WAN024G3X; Start 326; Stop 350
agactaatgacggtgaatactatct

SEQ ID NO: 329682 - DNA, 25 bp, Artificial
  probe
  misc_feature (1)..(25): SEQ ID NO: 2562; WAN024ET2; Start 1129; Stop 1153
ttgactaagattgatggaactgctc

SEQ ID NO: 329683 - DNA, 25 bp, Artificial
  probe
  misc_feature (1)..(25): SEQ ID NO: 2562; WAN024ET2; Start 830; Stop 854
gacgagtagatgttccagtagtaac

SEQ ID NO: 329684 - DNA, 25 bp, Artificial
  probe
  misc_feature (1)..(25): SEQ ID NO: 2562; WAN024ET2; Start 524; Stop 548
cttctaacttaacggaggaactacg

SEQ ID NO: 329685 - DNA, 25 bp, Artificial
  probe
  misc_feature (1)..(25): SEQ ID NO: 2562; WAN024ET2; Start 523; Stop 547
gcttctaacttaacggaggaactac

SEQ ID NO: 329686 - DNA, 25 bp, Artificial
  probe
  misc_feature (1)..(25): SEQ ID NO: 2562; WAN024ET2; Start 829; Stop 853
cgacgagtagatgttccagtagtaa

SEQ ID NO: 329687 - DNA, 25 bp, Artificial
  probe
  misc_feature (1)..(25): SEQ ID NO: 2562; WAN024ET2; Start 1169; Stop 1193
tagccattcgtgaagaactcaatat

SEQ ID NO: 329688 - DNA, 25 bp, Artificial
  probe
  misc_feature (1)..(25): SEQ ID NO: 2562; WAN024ET2; Start 831; Stop 855
acgagtagatgttccagtagtaact

SEQ ID NO: 329689 - DNA, 25 bp, Artificial
  probe
  misc_feature (1)..(25): SEQ ID NO: 2562; WAN024ET2; Start 1168; Stop 1192
ctagccattcgtgaagaactcaata

SEQ ID NO: 329690 - DNA, 25 bp, Artificial
  probe
  misc_feature (1)..(25): SEQ ID NO: 2562; WAN024ET2; Start 522; Stop 546
cgcttctaacttaacggaggaacta

SEQ ID NO: 329691 - DNA, 25 bp, Artificial
  probe
  misc_feature (1)..(25): SEQ ID NO: 2562; WAN024ET2; Start 1172; Stop 1196
ccattcgtgaagaactcaatattcc

SEQ ID NO: 329692 - DNA, 25 bp, Artificial
  probe
  misc_feature (1)..(25): SEQ ID NO: 2562; WAN024ET2; Start 1175; Stop 1199
ttcgtgaagaactcaatattcctgt

SEQ ID NO: 329693 - DNA, 25 bp, Artificial
  probe
  misc_feature (1)..(25): SEQ ID NO: 2562; WAN024ET2; Start 966; Stop 990
ggataaccttatggctgagttggaa

SEQ ID NO: 329694 - DNA, 25 bp, Artificial
  probe
  misc_feature (1)..(25): SEQ ID NO: 2562; WAN024ET2; Start 1176; Stop 1200
tcgtgaagaactcaatattcctgta

SEQ ID NO: 329695 - DNA, 25 bp, Artificial
  probe
  misc_feature (1)..(25): SEQ ID NO: 2562; WAN024ET2; Start 1130; Stop 1154
tgactaagattgatggaactgctcg

SEQ ID NO: 329696 - DNA, 25 bp, Artificial
  probe
  misc_feature (1)..(25): SEQ ID NO: 2562; WAN024ET2; Start 1171; Stop 1195
gccattcgtgaagaactcaatattc

SEQ ID NO: 329697 - DNA, 25 bp, Artificial
  probe
  misc_feature (1)..(25): SEQ ID NO: 2562; WAN024ET2; Start 1174; Stop 1198
attcgtgaagaactcaatattcctg

SEQ ID NO: 329698 - DNA, 25 bp, Artificial
  probe
  misc_feature (1)..(25): SEQ ID NO: 2562; WAN024ET2; Start 1173; Stop 1197
cattcgtgaagaactcaatattcct

SEQ ID NO: 329699 - DNA, 25 bp, Artificial
  probe
  misc_feature (1)..(25): SEQ ID NO: 2562; WAN024ET2; Start 1170; Stop 1194
agccattcgtgaagaactcaatatt

SEQ ID NO: 329700 - DNA, 25 bp, Artificial
  probe
  misc_feature (1)..(25): SEQ ID NO: 2562; WAN024ET2; Start 1167; Stop 1191
tctagccattcgtgaagaactcaat

SEQ ID NO: 329701 - DNA, 25 bp, Artificial
  probe
  misc_feature (1)..(25): SEQ ID NO: 2562; WAN024ET2; Start 1177; Stop 1201
cgtgaagaactcaatattcctgtaa

SEQ ID NO: 329702 - DNA, 25 bp, Artificial
  probe
  misc_feature (1)..(25): SEQ ID NO: 2562; WAN024ET2; Start 1128; Stop 1152
tttgactaagattgatggaactgct

SEQ ID NO: 329703 - DNA, 25 bp, Artificial
  probe
  misc_feature (1)..(25): SEQ ID NO: 2562; WAN024ET2; Start 828; Stop 852
ccgacgagtagatgttccagtagta

SEQ ID NO: 329704 - DNA, 25 bp, Artificial
  probe
  misc_feature (1)..(25): SEQ ID NO: 2562; WAN024ET2; Start 647; Stop 671
atgaaagcatccacttccaagataa

SEQ ID NO: 329705 - DNA, 25 bp, Artificial
  probe
  misc_feature (1)..(25): SEQ ID NO: 2562; WAN024ET2; Start 679; Stop 703
gttatgctctttgttggtgtgaatg

SEQ ID NO: 329706 - DNA, 25 bp, Artificial
  probe
  misc_feature (1)..(25): SEQ ID NO: 2562; WAN024ET2; Start 678; Stop 702
agttatgctctttgttggtgtgaat

SEQ ID NO: 329707 - DNA, 25 bp, Artificial
  probe
  misc_feature (1)..(25): SEQ ID NO: 2562; WAN024ET2; Start 650; Stop 674
aaagcatccacttccaagataactt

SEQ ID NO: 329708 - DNA, 25 bp, Artificial
  probe
  misc_feature (1)..(25): SEQ ID NO: 2562; WAN024ET2; Start 967; Stop 991
gataaccttatggctgagttggaaa

SEQ ID NO: 329709 - DNA, 25 bp, Artificial
  probe
  misc_feature (1)..(25): SEQ ID NO: 2562; WAN024ET2; Start 649; Stop 673
gaaagcatccacttccaagataact

SEQ ID NO: 329710 - DNA, 25 bp, Artificial
  probe
  misc_feature (1)..(25): SEQ ID NO: 2562; WAN024ET2; Start 596; Stop 620
gtgtcatcattgagaaattggttga

SEQ ID NO: 329711 - DNA, 25 bp, Artificial
  probe
  misc_feature (1)..(25): SEQ ID NO: 2562; WAN024ET2; Start 648; Stop 672
tgaaagcatccacttccaagataac

SEQ ID NO: 329712 - DNA, 25 bp, Artificial
  probe
  misc_feature (1)..(25): SEQ ID NO: 2562; WAN024ET2; Start 597; Stop 621
tgtcatcattgagaaattggttgag

SEQ ID NO: 329713 - DNA, 25 bp, Artificial
  probe
  misc_feature (1)..(25): SEQ ID NO: 2562; WAN024ET2; Start 494; Stop 518
tgattatgagtgatgttggtgtcca

SEQ ID NO: 329714 - DNA, 25 bp, Artificial
  probe
  misc_feature (1)..(25): SEQ ID NO: 2562; WAN024ET2; Start 598; Stop 622
gtcatcattgagaaattggttgagc

SEQ ID NO: 329715 - DNA, 25 bp, Artificial
  probe
  misc_feature (1)..(25): SEQ ID NO: 2563; WAN024F4Y; Start 189; Stop 213
aatccgtaagtatgagcgtgatgaa

SEQ ID NO: 329716 - DNA, 25 bp, Artificial
  probe
  misc_feature (1)..(25): SEQ ID NO: 2563; WAN024F4Y; Start 195; Stop 219
taagtatgagcgtgatgaaatcgtt

SEQ ID NO: 329717 - DNA, 25 bp, Artificial
  probe
  misc_feature (1)..(25): SEQ ID NO: 2563; WAN024F4Y; Start 56; Stop 80
aaattagcgaaactttgacagatgt

SEQ ID NO: 329718 - DNA, 25 bp, Artificial
  probe
  misc_feature (1)..(25): SEQ ID NO: 2563; WAN024F4Y; Start 68; Stop 92
ctttgacagatgtttatgcttcgtt

SEQ ID NO: 329719 - DNA, 25 bp, Artificial
  probe
  misc_feature (1)..(25): SEQ ID NO: 2563; WAN024F4Y; Start 69; Stop 93
tttgacagatgtttatgcttcgttg

SEQ ID NO: 329720 - DNA, 25 bp, Artificial
  probe
  misc_feature (1)..(25): SEQ ID NO: 2563; WAN024F4Y; Start 55; Stop 79
gaaattagcgaaactttgacagatg

SEQ ID NO: 329721 - DNA, 25 bp, Artificial
  probe
  misc_feature (1)..(25): SEQ ID NO: 2563; WAN024F4Y; Start 54; Stop 78
agaaattagcgaaactttgacagat

SEQ ID NO: 329722 - DNA, 25 bp, Artificial
  probe
  misc_feature (1)..(25): SEQ ID NO: 2563; WAN024F4Y; Start 53; Stop 77
aagaaattagcgaaactttgacaga

SEQ ID NO: 329723 - DNA, 25 bp, Artificial
  probe
  misc_feature (1)..(25): SEQ ID NO: 2563; WAN024F4Y; Start 246; Stop 270
aggacaaggagtcgatctataacta

SEQ ID NO: 329724 - DNA, 25 bp, Artificial
  probe
  misc_feature (1)..(25): SEQ ID NO: 2563; WAN024F4Y; Start 57; Stop 81
aattagcgaaactttgacagatgtt

SEQ ID NO: 329725 - DNA, 25 bp, Artificial
  probe
  misc_feature (1)..(25): SEQ ID NO: 2563; WAN024F4Y; Start 208; Stop 232
gatgaaatcgttgaggaattggttc

SEQ ID NO: 329726 - DNA, 25 bp, Artificial
  probe
  misc_feature (1)..(25): SEQ ID NO: 2563; WAN024F4Y; Start 66; Stop 90
aactttgacagatgtttatgcttcg

SEQ ID NO: 329727 - DNA, 25 bp, Artificial
  probe
  misc_feature (1)..(25): SEQ ID NO: 2563; WAN024F4Y; Start 194; Stop 218
gtaagtatgagcgtgatgaaatcgt

SEQ ID NO: 329728 - DNA, 25 bp, Artificial
  probe
  misc_feature (1)..(25): SEQ ID NO: 2563; WAN024F4Y; Start 245; Stop 269
aaggacaaggagtcgatctataact

SEQ ID NO: 329729 - DNA, 25 bp, Artificial
  probe
  misc_feature (1)..(25): SEQ ID NO: 2563; WAN024F4Y; Start 70; Stop 94
ttgacagatgtttatgcttcgttga

SEQ ID NO: 329730 - DNA, 25 bp, Artificial
  probe
  misc_feature (1)..(25): SEQ ID NO: 2563; WAN024F4Y; Start 67; Stop 91
actttgacagatgtttatgcttcgt

SEQ ID NO: 329731 - DNA, 25 bp, Artificial
  probe
  misc_feature (1)..(25): SEQ ID NO: 2563; WAN024F4Y; Start 207; Stop 231
tgatgaaatcgttgaggaattggtt

SEQ ID NO: 329732 - DNA, 25 bp, Artificial
  probe
  misc_feature (1)..(25): SEQ ID NO: 2563; WAN024F4Y; Start 182; Stop 206
gaaatcaaatccgtaagtatgagcg

SEQ ID NO: 329733 - DNA, 25 bp, Artificial
  probe
  misc_feature (1)..(25): SEQ ID NO: 2563; WAN024F4Y; Start 181; Stop 205
cgaaatcaaatccgtaagtatgagc

SEQ ID NO: 329734 - DNA, 25 bp, Artificial
  probe
  misc_feature (1)..(25): SEQ ID NO: 2563; WAN024F4Y; Start 247; Stop 271
ggacaaggagtcgatctataactaa

SEQ ID NO: 329735 - DNA, 25 bp, Artificial
  probe
  misc_feature (1)..(25): SEQ ID NO: 2563; WAN024F4Y; Start 72; Stop 96
gacagatgtttatgcttcgttgaac

SEQ ID NO: 329736 - DNA, 25 bp, Artificial
  probe
  misc_feature (1)..(25): SEQ ID NO: 2563; WAN024F4Y; Start 71; Stop 95
tgacagatgtttatgcttcgttgaa

SEQ ID NO: 329737 - DNA, 25 bp, Artificial
  probe
  misc_feature (1)..(25): SEQ ID NO: 2563; WAN024F4Y; Start 183; Stop 207
aaatcaaatccgtaagtatgagcgt

SEQ ID NO: 329738 - DNA, 25 bp, Artificial
  probe
  misc_feature (1)..(25): SEQ ID NO: 2563; WAN024F4Y; Start 192; Stop 216
ccgtaagtatgagcgtgatgaaatc

SEQ ID NO: 329739 - DNA, 25 bp, Artificial
  probe
  misc_feature (1)..(25): SEQ ID NO: 2563; WAN024F4Y; Start 206; Stop 230
gtgatgaaatcgttgaggaattggt

SEQ ID NO: 329740 - DNA, 25 bp, Artificial
  probe
  misc_feature (1)..(25): SEQ ID NO: 2563; WAN024F4Y; Start 196; Stop 220
aagtatgagcgtgatgaaatcgttg

SEQ ID NO: 329741 - DNA, 25 bp, Artificial
  probe
  misc_feature (1)..(25): SEQ ID NO: 2563; WAN024F4Y; Start 191; Stop 215
tccgtaagtatgagcgtgatgaaat

SEQ ID NO: 329742 - DNA, 25 bp, Artificial
  probe
  misc_feature (1)..(25): SEQ ID NO: 2563; WAN024F4Y; Start 184; Stop 208
aatcaaatccgtaagtatgagcgtg

SEQ ID NO: 329743 - DNA, 25 bp, Artificial
  probe
  misc_feature (1)..(25): SEQ ID NO: 2563; WAN024F4Y; Start 190; Stop 214
atccgtaagtatgagcgtgatgaaa

SEQ ID NO: 329744 - DNA, 25 bp, Artificial
  probe
  misc_feature (1)..(25): SEQ ID NO: 2563; WAN024F4Y; Start 188; Stop 212
aaatccgtaagtatgagcgtgatga

SEQ ID NO: 329745 - DNA, 25 bp, Artificial
  probe
  misc_feature (1)..(25): SEQ ID NO: 2563; WAN024F4Y; Start 187; Stop 211
caaatccgtaagtatgagcgtgatg

SEQ ID NO: 329746 - DNA, 25 bp, Artificial
  probe
  misc_feature (1)..(25): SEQ ID NO: 2563; WAN024F4Y; Start 193; Stop 217
cgtaagtatgagcgtgatgaaatcg

SEQ ID NO: 329747 - DNA, 25 bp, Artificial
  probe
  misc_feature (1)..(25): SEQ ID NO: 2563; WAN024F4Y; Start 198; Stop 222
gtatgagcgtgatgaaatcgttgag

SEQ ID NO: 329748 - DNA, 25 bp, Artificial
  probe
  misc_feature (1)..(25): SEQ ID NO: 2564; WAN024CF7; Start 464; Stop 488
ccattacagcagttaggagtgaatt

SEQ ID NO: 329749 - DNA, 25 bp, Artificial
  probe
  misc_feature (1)..(25): SEQ ID NO: 2564; WAN024CF7; Start 455; Stop 479
cacaagaagccattacagcagttag

SEQ ID NO: 329750 - DNA, 25 bp, Artificial
  probe
  misc_feature (1)..(25): SEQ ID NO: 2564; WAN024CF7; Start 458; Stop 482
aagaagccattacagcagttaggag

SEQ ID NO: 329751 - DNA, 25 bp, Artificial
  probe
  misc_feature (1)..(25): SEQ ID NO: 2564; WAN024CF7; Start 31; Stop 55
gtcggtacattactactggcagatt

SEQ ID NO: 329752 - DNA, 25 bp, Artificial
  probe
  misc_feature (1)..(25): SEQ ID NO: 2564; WAN024CF7; Start 463; Stop 487
gccattacagcagttaggagtgaat

SEQ ID NO: 329753 - DNA, 25 bp, Artificial
  probe
  misc_feature (1)..(25): SEQ ID NO: 2564; WAN024CF7; Start 457; Stop 481
caagaagccattacagcagttagga

SEQ ID NO: 329754 - DNA, 25 bp, Artificial
  probe
  misc_feature (1)..(25): SEQ ID NO: 2564; WAN024CF7; Start 465; Stop 489
cattacagcagttaggagtgaattt

SEQ ID NO: 329755 - DNA, 25 bp, Artificial
  probe
  misc_feature (1)..(25): SEQ ID NO: 2564; WAN024CF7; Start 456; Stop 480
acaagaagccattacagcagttagg

SEQ ID NO: 329756 - DNA, 25 bp, Artificial
  probe
  misc_feature (1)..(25): SEQ ID NO: 2564; WAN024CF7; Start 11; Stop 35
tgaaatcgtctattaaatctgtcgg

SEQ ID NO: 329757 - DNA, 25 bp, Artificial
  probe
  misc_feature (1)..(25): SEQ ID NO: 2564; WAN024CF7; Start 12; Stop 36
gaaatcgtctattaaatctgtcggt

SEQ ID NO: 329758 - DNA, 25 bp, Artificial
  probe
  misc_feature (1)..(25): SEQ ID NO: 2564; WAN024CF7; Start 26; Stop 50
aatctgtcggtacattactactggc

SEQ ID NO: 329759 - DNA, 25 bp, Artificial
  probe
  misc_feature (1)..(25): SEQ ID NO: 2564; WAN024CF7; Start 193; Stop 217
tttcccataacctttacgcaaatga

SEQ ID NO: 329760 - DNA, 25 bp, Artificial
  probe
  misc_feature (1)..(25): SEQ ID NO: 2564; WAN024CF7; Start 454; Stop 478
ccacaagaagccattacagcagtta

SEQ ID NO: 329761 - DNA, 25 bp, Artificial
  probe
  misc_feature (1)..(25): SEQ ID NO: 2564; WAN024CF7; Start 192; Stop 216
gtttcccataacctttacgcaaatg

SEQ ID NO: 329762 - DNA, 25 bp, Artificial
  probe
  misc_feature (1)..(25): SEQ ID NO: 2564; WAN024CF7; Start 282; Stop 306
agagggagcatttctcaaatacttt

SEQ ID NO: 329763 - DNA, 25 bp, Artificial
  probe
  misc_feature (1)..(25): SEQ ID NO: 2564; WAN024CF7; Start 277; Stop 301
atgatagagggagcatttctcaaat

SEQ ID NO: 329764 - DNA, 25 bp, Artificial
  probe
  misc_feature (1)..(25): SEQ ID NO: 2564; WAN024CF7; Start 460; Stop 484
gaagccattacagcagttaggagtg

SEQ ID NO: 329765 - DNA, 25 bp, Artificial
  probe
  misc_feature (1)..(25): SEQ ID NO: 2564; WAN024CF7; Start 459; Stop 483
agaagccattacagcagttaggagt

SEQ ID NO: 329766 - DNA, 25 bp, Artificial
  probe
  misc_feature (1)..(25): SEQ ID NO: 2564; WAN024CF7; Start 185; Stop 209
gacttccgtttcccataacctttac

SEQ ID NO: 329767 - DNA, 25 bp, Artificial
  probe
  misc_feature (1)..(25): SEQ ID NO: 2564; WAN024CF7; Start 184; Stop 208
agacttccgtttcccataaccttta

SEQ ID NO: 329768 - DNA, 25 bp, Artificial
  probe
  misc_feature (1)..(25): SEQ ID NO: 2564; WAN024CF7; Start 183; Stop 207
tagacttccgtttcccataaccttt

SEQ ID NO: 329769 - DNA, 25 bp, Artificial
  probe
  misc_feature (1)..(25): SEQ ID NO: 2564; WAN024CF7; Start 182; Stop 206
ttagacttccgtttcccataacctt

SEQ ID NO: 329770 - DNA, 25 bp, Artificial
  probe
  misc_feature (1)..(25): SEQ ID NO: 2564; WAN024CF7; Start 181; Stop 205
tttagacttccgtttcccataacct

SEQ ID NO: 329771 - DNA, 25 bp, Artificial
  probe
  misc_feature (1)..(25): SEQ ID NO: 2564; WAN024CF7; Start 281; Stop 305
tagagggagcatttctcaaatactt

SEQ ID NO: 329772 - DNA, 25 bp, Artificial
  probe
  misc_feature (1)..(25): SEQ ID NO: 2564; WAN024CF7; Start 278; Stop 302
tgatagagggagcatttctcaaata

SEQ ID NO: 329773 - DNA, 25 bp, Artificial
  probe
  misc_feature (1)..(25): SEQ ID NO: 2564; WAN024CF7; Start 280; Stop 304
atagagggagcatttctcaaatact

SEQ ID NO: 329774 - DNA, 25 bp, Artificial
  probe
  misc_feature (1)..(25): SEQ ID NO: 2564; WAN024CF7; Start 194; Stop 218
ttcccataacctttacgcaaatgac

SEQ ID NO: 329775 - DNA, 25 bp, Artificial
  probe
  misc_feature (1)..(25): SEQ ID NO: 2564; WAN024CF7; Start 279; Stop 303
gatagagggagcatttctcaaatac

SEQ ID NO: 329776 - DNA, 25 bp, Artificial
  probe
  misc_feature (1)..(25): SEQ ID NO: 2564; WAN024CF7; Start 196; Stop 220
cccataacctttacgcaaatgacat

SEQ ID NO: 329777 - DNA, 25 bp, Artificial
  probe
  misc_feature (1)..(25): SEQ ID NO: 2564; WAN024CF7; Start 14; Stop 38
aatcgtctattaaatctgtcggtac

SEQ ID NO: 329778 - DNA, 25 bp, Artificial
  probe
  misc_feature (1)..(25): SEQ ID NO: 2564; WAN024CF7; Start 13; Stop 37
aaatcgtctattaaatctgtcggta

SEQ ID NO: 329779 - DNA, 25 bp, Artificial
  probe
  misc_feature (1)..(25): SEQ ID NO: 2564; WAN024CF7; Start 32; Stop 56
tcggtacattactactggcagattt

SEQ ID NO: 329780 - DNA, 25 bp, Artificial
  probe
  misc_feature (1)..(25): SEQ ID NO: 2564; WAN024CF7; Start 198; Stop 222
cataacctttacgcaaatgacatgg

SEQ ID NO: 329781 - DNA, 25 bp, Artificial
  probe
  misc_feature (1)..(25): SEQ ID NO: 2565; WAN024CO2; Start 8; Stop 32
aacatggaagattgacgaagactca

SEQ ID NO: 329782 - DNA, 25 bp, Artificial
  probe
  misc_feature (1)..(25): SEQ ID NO: 2565; WAN024CO2; Start 10; Stop 34
catggaagattgacgaagactcagt

SEQ ID NO: 329783 - DNA, 25 bp, Artificial
  probe
  misc_feature (1)..(25): SEQ ID NO: 2565; WAN024CO2; Start 9; Stop 33
acatggaagattgacgaagactcag

SEQ ID NO: 329784 - DNA, 25 bp, Artificial
  probe
  misc_feature (1)..(25): SEQ ID NO: 2565; WAN024CO2; Start 11; Stop 35
atggaagattgacgaagactcagtc

SEQ ID NO: 329785 - DNA, 25 bp, Artificial
  probe
  misc_feature (1)..(25): SEQ ID NO: 2565; WAN024CO2; Start 7; Stop 31
aaacatggaagattgacgaagactc

SEQ ID NO: 329786 - DNA, 25 bp, Artificial
  probe
  misc_feature (1)..(25): SEQ ID NO: 2565; WAN024CO2; Start 6; Stop 30
caaacatggaagattgacgaagact

SEQ ID NO: 329787 - DNA, 25 bp, Artificial
  probe
  misc_feature (1)..(25): SEQ ID NO: 2565; WAN024CO2; Start 5; Stop 29
gcaaacatggaagattgacgaagac

SEQ ID NO: 329788 - DNA, 25 bp, Artificial
  probe
  misc_feature (1)..(25): SEQ ID NO: 2565; WAN024CO2; Start 4; Stop 28
ggcaaacatggaagattgacgaaga

SEQ ID NO: 329789 - DNA, 25 bp, Artificial
  probe
  misc_feature (1)..(25): SEQ ID NO: 2565; WAN024CO2; Start 12; Stop 36
tggaagattgacgaagactcagtcg

SEQ ID NO: 329790 - DNA, 25 bp, Artificial
  probe
  misc_feature (1)..(25): SEQ ID NO: 2565; WAN024CO2; Start 13; Stop 37
ggaagattgacgaagactcagtcga

SEQ ID NO: 329791 - DNA, 25 bp, Artificial
  probe
  misc_feature (1)..(25): SEQ ID NO: 2565; WAN024CO2; Start 3; Stop 27
gggcaaacatggaagattgacgaag

SEQ ID NO: 329792 - DNA, 25 bp, Artificial
  probe
  misc_feature (1)..(25): SEQ ID NO: 2565; WAN024CO2; Start 1; Stop 25
atgggcaaacatggaagattgacga

SEQ ID NO: 329793 - DNA, 25 bp, Artificial
  probe
  misc_feature (1)..(25): SEQ ID NO: 2565; WAN024CO2; Start 61; Stop 85
gaaactatattcgacaacttatcaa

SEQ ID NO: 329794 - DNA, 25 bp, Artificial
  probe
  misc_feature (1)..(25): SEQ ID NO: 2565; WAN024CO2; Start 36; Stop 60
gactataaacctactcgagaaattc

SEQ ID NO: 329795 - DNA, 25 bp, Artificial
  probe
  misc_feature (1)..(25): SEQ ID NO: 2565; WAN024CO2; Start 60; Stop 84
cgaaactatattcgacaacttatca

SEQ ID NO: 329796 - DNA, 25 bp, Artificial
  probe
  misc_feature (1)..(25): SEQ ID NO: 2565; WAN024CO2; Start 37; Stop 61
actataaacctactcgagaaattcg

SEQ ID NO: 329797 - DNA, 25 bp, Artificial
  probe
  misc_feature (1)..(25): SEQ ID NO: 2565; WAN024CO2; Start 35; Stop 59
cgactataaacctactcgagaaatt

SEQ ID NO: 329798 - DNA, 25 bp, Artificial
  probe
  misc_feature (1)..(25): SEQ ID NO: 2565; WAN024CO2; Start 43; Stop 67
aacctactcgagaaattcgaaacta

SEQ ID NO: 329799 - DNA, 25 bp, Artificial
  probe
  misc_feature (1)..(25): SEQ ID NO: 2565; WAN024CO2; Start 44; Stop 68
acctactcgagaaattcgaaactat

SEQ ID NO: 329800 - DNA, 25 bp, Artificial
  probe
  misc_feature (1)..(25): SEQ ID NO: 2565; WAN024CO2; Start 42; Stop 66
aaacctactcgagaaattcgaaact

SEQ ID NO: 329801 - DNA, 25 bp, Artificial
  probe
  misc_feature (1)..(25): SEQ ID NO: 2565; WAN024CO2; Start 41; Stop 65
taaacctactcgagaaattcgaaac

SEQ ID NO: 329802 - DNA, 25 bp, Artificial
  probe
  misc_feature (1)..(25): SEQ ID NO: 2565; WAN024CO2; Start 34; Stop 58
tcgactataaacctactcgagaaat

SEQ ID NO: 329803 - DNA, 25 bp, Artificial
  probe
  misc_feature (1)..(25): SEQ ID NO: 2565; WAN024CO2; Start 40; Stop 64
ataaacctactcgagaaattcgaaa

SEQ ID NO: 329804 - DNA, 25 bp, Artificial
  probe
  misc_feature (1)..(25): SEQ ID NO: 2565; WAN024CO2; Start 49; Stop 73
ctcgagaaattcgaaactatattcg

SEQ ID NO: 329805 - DNA, 25 bp, Artificial
  probe
  misc_feature (1)..(25): SEQ ID NO: 2565; WAN024CO2; Start 45; Stop 69
cctactcgagaaattcgaaactata

SEQ ID NO: 329806 - DNA, 25 bp, Artificial
  probe
  misc_feature (1)..(25): SEQ ID NO: 2565; WAN024CO2; Start 38; Stop 62
ctataaacctactcgagaaattcga

SEQ ID NO: 329807 - DNA, 25 bp, Artificial
  probe
  misc_feature (1)..(25): SEQ ID NO: 2565; WAN024CO2; Start 39; Stop 63
tataaacctactcgagaaattcgaa

SEQ ID NO: 329808 - DNA, 25 bp, Artificial
  probe
  misc_feature (1)..(25): SEQ ID NO: 2565; WAN024CO2; Start 48; Stop 72
actcgagaaattcgaaactatattc

SEQ ID NO: 329809 - DNA, 25 bp, Artificial
  probe
  misc_feature (1)..(25): SEQ ID NO: 2565; WAN024CO2; Start 46; Stop 70
ctactcgagaaattcgaaactatat

SEQ ID NO: 329810 - DNA, 25 bp, Artificial
  probe
  misc_feature (1)..(25): SEQ ID NO: 2565; WAN024CO2; Start 47; Stop 71
tactcgagaaattcgaaactatatt

SEQ ID NO: 329811 - DNA, 25 bp, Artificial
  probe
  misc_feature (1)..(25): SEQ ID NO: 2566; WAN024FKN; Start 237; Stop 261
ctgctgtgtaaagaagaccaataac

SEQ ID NO: 329812 - DNA, 25 bp, Artificial
  probe
  misc_feature (1)..(25): SEQ ID NO: 2566; WAN024FKN; Start 228; Stop 252
aatcaaatcctgctgtgtaaagaag

SEQ ID NO: 329813 - DNA, 25 bp, Artificial
  probe
  misc_feature (1)..(25): SEQ ID NO: 2566; WAN024FKN; Start 226; Stop 250
caaatcaaatcctgctgtgtaaaga

SEQ ID NO: 329814 - DNA, 25 bp, Artificial
  probe
  misc_feature (1)..(25): SEQ ID NO: 2566; WAN024FKN; Start 225; Stop 249
tcaaatcaaatcctgctgtgtaaag

SEQ ID NO: 329815 - DNA, 25 bp, Artificial
  probe
  misc_feature (1)..(25): SEQ ID NO: 2566; WAN024FKN; Start 223; Stop 247
gttcaaatcaaatcctgctgtgtaa

SEQ ID NO: 329816 - DNA, 25 bp, Artificial
  probe
  misc_feature (1)..(25): SEQ ID NO: 2566; WAN024FKN; Start 229; Stop 253
atcaaatcctgctgtgtaaagaaga

SEQ ID NO: 329817 - DNA, 25 bp, Artificial
  probe
  misc_feature (1)..(25): SEQ ID NO: 2566; WAN024FKN; Start 224; Stop 248
ttcaaatcaaatcctgctgtgtaaa

SEQ ID NO: 329818 - DNA, 25 bp, Artificial
  probe
  misc_feature (1)..(25): SEQ ID NO: 2566; WAN024FKN; Start 227; Stop 251
aaatcaaatcctgctgtgtaaagaa

SEQ ID NO: 329819 - DNA, 25 bp, Artificial
  probe
  misc_feature (1)..(25): SEQ ID NO: 2566; WAN024FKN; Start 222; Stop 246
agttcaaatcaaatcctgctgtgta

SEQ ID NO: 329820 - DNA, 25 bp, Artificial
  probe
  misc_feature (1)..(25): SEQ ID NO: 2566; WAN024FKN; Start 236; Stop 260
cctgctgtgtaaagaagaccaataa

SEQ ID NO: 329821 - DNA, 25 bp, Artificial
  probe
  misc_feature (1)..(25): SEQ ID NO: 2566; WAN024FKN; Start 64; Stop 88
aatttccttgcttgggtatttctga

SEQ ID NO: 329822 - DNA, 25 bp, Artificial
  probe
  misc_feature (1)..(25): SEQ ID NO: 2566; WAN024FKN; Start 230; Stop 254
tcaaatcctgctgtgtaaagaagac

SEQ ID NO: 329823 - DNA, 25 bp, Artificial
  probe
  misc_feature (1)..(25): SEQ ID NO: 2566; WAN024FKN; Start 220; Stop 244
caagttcaaatcaaatcctgctgtg

SEQ ID NO: 329824 - DNA, 25 bp, Artificial
  probe
  misc_feature (1)..(25): SEQ ID NO: 2566; WAN024FKN; Start 20; Stop 44
aaggcaatggttcttgtaaaggtat

SEQ ID NO: 329825 - DNA, 25 bp, Artificial
  probe
  misc_feature (1)..(25): SEQ ID NO: 2566; WAN024FKN; Start 97; Stop 121
atccaaggtcgcaataatttctgtt

SEQ ID NO: 329826 - DNA, 25 bp, Artificial
  probe
  misc_feature (1)..(25): SEQ ID NO: 2566; WAN024FKN; Start 61; Stop 85
tacaatttccttgcttgggtatttc

SEQ ID NO: 329827 - DNA, 25 bp, Artificial
  probe
  misc_feature (1)..(25): SEQ ID NO: 2566; WAN024FKN; Start 60; Stop 84
ctacaatttccttgcttgggtattt

SEQ ID NO: 329828 - DNA, 25 bp, Artificial
  probe
  misc_feature (1)..(25): SEQ ID NO: 2566; WAN024FKN; Start 238; Stop 262
tgctgtgtaaagaagaccaataacg

SEQ ID NO: 329829 - DNA, 25 bp, Artificial
  probe
  misc_feature (1)..(25): SEQ ID NO: 2566; WAN024FKN; Start 65; Stop 89
atttccttgcttgggtatttctgac

SEQ ID NO: 329830 - DNA, 25 bp, Artificial
  probe
  misc_feature (1)..(25): SEQ ID NO: 2566; WAN024FKN; Start 30; Stop 54
ttcttgtaaaggtatgcggttgaaa

SEQ ID NO: 329831 - DNA, 25 bp, Artificial
  probe
  misc_feature (1)..(25): SEQ ID NO: 2566; WAN024FKN; Start 235; Stop 259
tcctgctgtgtaaagaagaccaata

SEQ ID NO: 329832 - DNA, 25 bp, Artificial
  probe
  misc_feature (1)..(25): SEQ ID NO: 2566; WAN024FKN; Start 221; Stop 245
aagttcaaatcaaatcctgctgtgt

SEQ ID NO: 329833 - DNA, 25 bp, Artificial
  probe
  misc_feature (1)..(25): SEQ ID NO: 2566; WAN024FKN; Start 63; Stop 87
caatttccttgcttgggtatttctg

SEQ ID NO: 329834 - DNA, 25 bp, Artificial
  probe
  misc_feature (1)..(25): SEQ ID NO: 2566; WAN024FKN; Start 32; Stop 56
cttgtaaaggtatgcggttgaaaga

SEQ ID NO: 329835 - DNA, 25 bp, Artificial
  probe
  misc_feature (1)..(25): SEQ ID NO: 2566; WAN024FKN; Start 31; Stop 55
tcttgtaaaggtatgcggttgaaag

SEQ ID NO: 329836 - DNA, 25 bp, Artificial
  probe
  misc_feature (1)..(25): SEQ ID NO: 2566; WAN024FKN; Start 21; Stop 45
aggcaatggttcttgtaaaggtatg

SEQ ID NO: 329837 - DNA, 25 bp, Artificial
  probe
  misc_feature (1)..(25): SEQ ID NO: 2566; WAN024FKN; Start 62; Stop 86
acaatttccttgcttgggtatttct

SEQ ID NO: 329838 - DNA, 25 bp, Artificial
  probe
  misc_feature (1)..(25): SEQ ID NO: 2566; WAN024FKN; Start 33; Stop 57
ttgtaaaggtatgcggttgaaagac

SEQ ID NO: 329839 - DNA, 25 bp, Artificial
  probe
  misc_feature (1)..(25): SEQ ID NO: 2566; WAN024FKN; Start 101; Stop 125
aaggtcgcaataatttctgttggat

SEQ ID NO: 329840 - DNA, 25 bp, Artificial
  probe
  misc_feature (1)..(25): SEQ ID NO: 2566; WAN024FKN; Start 52; Stop 76
aaagactgctacaatttccttgctt

SEQ ID NO: 329841 - DNA, 25 bp, Artificial
  probe
  misc_feature (1)..(25): SEQ ID NO: 2566; WAN024FKN; Start 29; Stop 53
gttcttgtaaaggtatgcggttgaa

SEQ ID NO: 329842 - DNA, 25 bp, Artificial
  probe
  misc_feature (1)..(25): SEQ ID NO: 2566; WAN024FKN; Start 96; Stop 120
catccaaggtcgcaataatttctgt

SEQ ID NO: 329843 - DNA, 25 bp, Artificial
  probe
  misc_feature (1)..(25): SEQ ID NO: 2566; WAN024FKN; Start 242; Stop 266
gtgtaaagaagaccaataacggctg

SEQ ID NO: 329844 - DNA, 25 bp, Artificial
  probe
  misc_feature (1)..(25): SEQ ID NO: 2567; WAN024FGL; Start 54; Stop 78
tattgaccttattcatctctgtcgg

SEQ ID NO: 329845 - DNA, 25 bp, Artificial
  probe
  misc_feature (1)..(25): SEQ ID NO: 2567; WAN024FGL; Start 42; Stop 66
cggagtcggatatattgaccttatt

SEQ ID NO: 329846 - DNA, 25 bp, Artificial
  probe
  misc_feature (1)..(25): SEQ ID NO: 2567; WAN024FGL; Start 41; Stop 65
tcggagtcggatatattgaccttat

SEQ ID NO: 329847 - DNA, 25 bp, Artificial
  probe
  misc_feature (1)..(25): SEQ ID NO: 2567; WAN024FGL; Start 40; Stop 64
atcggagtcggatatattgacctta

SEQ ID NO: 329848 - DNA, 25 bp, Artificial
  probe
  misc_feature (1)..(25): SEQ ID NO: 2567; WAN024FGL; Start 39; Stop 63
tatcggagtcggatatattgacctt

SEQ ID NO: 329849 - DNA, 25 bp, Artificial
  probe
  misc_feature (1)..(25): SEQ ID NO: 2567; WAN024FGL; Start 53; Stop 77
atattgaccttattcatctctgtcg

SEQ ID NO: 329850 - DNA, 25 bp, Artificial
  probe
  misc_feature (1)..(25): SEQ ID NO: 2567; WAN024FGL; Start 102; Stop 126
ccagtcctcccttatcattattacc

SEQ ID NO: 329851 - DNA, 25 bp, Artificial
  probe
  misc_feature (1)..(25): SEQ ID NO: 2567; WAN024FGL; Start 101; Stop 125
cccagtcctcccttatcattattac

SEQ ID NO: 329852 - DNA, 25 bp, Artificial
  probe
  misc_feature (1)..(25): SEQ ID NO: 2567; WAN024FGL; Start 100; Stop 124
acccagtcctcccttatcattatta

SEQ ID NO: 329853 - DNA, 25 bp, Artificial
  probe
  misc_feature (1)..(25): SEQ ID NO: 2567; WAN024FGL; Start 123; Stop 147
taccataaatgccttcaacaatacg

SEQ ID NO: 329854 - DNA, 25 bp, Artificial
  probe
  misc_feature (1)..(25): SEQ ID NO: 2567; WAN024FGL; Start 125; Stop 149
ccataaatgccttcaacaatacgag

SEQ ID NO: 329855 - DNA, 25 bp, Artificial
  probe
  misc_feature (1)..(25): SEQ ID NO: 2567; WAN024FGL; Start 103; Stop 127
cagtcctcccttatcattattacca

SEQ ID NO: 329856 - DNA, 25 bp, Artificial
  probe
  misc_feature (1)..(25): SEQ ID NO: 2567; WAN024FGL; Start 43; Stop 67
ggagtcggatatattgaccttattc

SEQ ID NO: 329857 - DNA, 25 bp, Artificial
  probe
  misc_feature (1)..(25): SEQ ID NO: 2567; WAN024FGL; Start 124; Stop 148
accataaatgccttcaacaatacga

SEQ ID NO: 329858 - DNA, 25 bp, Artificial
  probe
  misc_feature (1)..(25): SEQ ID NO: 2567; WAN024FGL; Start 55; Stop 79
attgaccttattcatctctgtcggt

SEQ ID NO: 329859 - DNA, 25 bp, Artificial
  probe
  misc_feature (1)..(25): SEQ ID NO: 2567; WAN024FGL; Start 56; Stop 80
ttgaccttattcatctctgtcggtt

SEQ ID NO: 329860 - DNA, 25 bp, Artificial
  probe
  misc_feature (1)..(25): SEQ ID NO: 2567; WAN024FGL; Start 104; Stop 128
agtcctcccttatcattattaccat

SEQ ID NO: 329861 - DNA, 25 bp, Artificial
  probe
  misc_feature (1)..(25): SEQ ID NO: 2567; WAN024FGL; Start 99; Stop 123
cacccagtcctcccttatcattatt

SEQ ID NO: 329862 - DNA, 25 bp, Artificial
  probe
  misc_feature (1)..(25): SEQ ID NO: 2567; WAN024FGL; Start 29; Stop 53
aagatgctcatatcggagtcggata

SEQ ID NO: 329863 - DNA, 25 bp, Artificial
  probe
  misc_feature (1)..(25): SEQ ID NO: 2567; WAN024FGL; Start 174; Stop 198
caatagttgctacatactgagccaa

SEQ ID NO: 329864 - DNA, 25 bp, Artificial
  probe
  misc_feature (1)..(25): SEQ ID NO: 2567; WAN024FGL; Start 44; Stop 68
gagtcggatatattgaccttattca

SEQ ID NO: 329865 - DNA, 25 bp, Artificial
  probe
  misc_feature (1)..(25): SEQ ID NO: 2567; WAN024FGL; Start 57; Stop 81
tgaccttattcatctctgtcggttg

SEQ ID NO: 329866 - DNA, 25 bp, Artificial
  probe
  misc_feature (1)..(25): SEQ ID NO: 2567; WAN024FGL; Start 122; Stop 146
ttaccataaatgccttcaacaatac

SEQ ID NO: 329867 - DNA, 25 bp, Artificial
  probe
  misc_feature (1)..(25): SEQ ID NO: 2567; WAN024FGL; Start 98; Stop 122
tcacccagtcctcccttatcattat

SEQ ID NO: 329868 - DNA, 25 bp, Artificial
  probe
  misc_feature (1)..(25): SEQ ID NO: 2567; WAN024FGL; Start 127; Stop 151
ataaatgccttcaacaatacgagga

SEQ ID NO: 329869 - DNA, 25 bp, Artificial
  probe
  misc_feature (1)..(25): SEQ ID NO: 2567; WAN024FGL; Start 126; Stop 150
cataaatgccttcaacaatacgagg

SEQ ID NO: 329870 - DNA, 25 bp, Artificial
  probe
  misc_feature (1)..(25): SEQ ID NO: 2567; WAN024FGL; Start 45; Stop 69
agtcggatatattgaccttattcat

SEQ ID NO: 329871 - DNA, 25 bp, Artificial
  probe
  misc_feature (1)..(25): SEQ ID NO: 2567; WAN024FGL; Start 38; Stop 62
atatcggagtcggatatattgacct

SEQ ID NO: 329872 - DNA, 25 bp, Artificial
  probe
  misc_feature (1)..(25): SEQ ID NO: 2567; WAN024FGL; Start 37; Stop 61
catatcggagtcggatatattgacc

SEQ ID NO: 329873 - DNA, 25 bp, Artificial
  probe
  misc_feature (1)..(25): SEQ ID NO: 2567; WAN024FGL; Start 128; Stop 152
taaatgccttcaacaatacgaggag

SEQ ID NO: 329874 - DNA, 25 bp, Artificial
  probe
  misc_feature (1)..(25): SEQ ID NO: 2567; WAN024FGL; Start 47; Stop 71
tcggatatattgaccttattcatct

SEQ ID NO: 329875 - DNA, 25 bp, Artificial
  probe
  misc_feature (1)..(25): SEQ ID NO: 2567; WAN024FGL; Start 36; Stop 60
tcatatcggagtcggatatattgac

SEQ ID NO: 329876 - DNA, 25 bp, Artificial
  probe
  misc_feature (1)..(25): SEQ ID NO: 2567; WAN024FGL; Start 34; Stop 58
gctcatatcggagtcggatatattg

SEQ ID NO: 329877 - DNA, 25 bp, Artificial
  probe
  misc_feature (1)..(25): SEQ ID NO: 2568; WAN024CHN; Start 152; Stop 176
tcaatgatagaagaagacagaaccg

SEQ ID NO: 329878 - DNA, 25 bp, Artificial
  probe
  misc_feature (1)..(25): SEQ ID NO: 2568; WAN024CHN; Start 233; Stop 257
ataatcactgtgtagataggaagcg

SEQ ID NO: 329879 - DNA, 25 bp, Artificial
  probe
  misc_feature (1)..(25): SEQ ID NO: 2568; WAN024CHN; Start 151; Stop 175
ctcaatgatagaagaagacagaacc

SEQ ID NO: 329880 - DNA, 25 bp, Artificial
  probe
  misc_feature (1)..(25): SEQ ID NO: 2568; WAN024CHN; Start 150; Stop 174
cctcaatgatagaagaagacagaac

SEQ ID NO: 329881 - DNA, 25 bp, Artificial
  probe
  misc_feature (1)..(25): SEQ ID NO: 2568; WAN024CHN; Start 149; Stop 173
tcctcaatgatagaagaagacagaa

SEQ ID NO: 329882 - DNA, 25 bp, Artificial
  probe
  misc_feature (1)..(25): SEQ ID NO: 2568; WAN024CHN; Start 157; Stop 181
gatagaagaagacagaaccgcattg

SEQ ID NO: 329883 - DNA, 25 bp, Artificial
  probe
  misc_feature (1)..(25): SEQ ID NO: 2568; WAN024CHN; Start 153; Stop 177
caatgatagaagaagacagaaccgc

SEQ ID NO: 329884 - DNA, 25 bp, Artificial
  probe
  misc_feature (1)..(25): SEQ ID NO: 2568; WAN024CHN; Start 232; Stop 256
gataatcactgtgtagataggaagc

SEQ ID NO: 329885 - DNA, 25 bp, Artificial
  probe
  misc_feature (1)..(25): SEQ ID NO: 2568; WAN024CHN; Start 144; Stop 168
tgatgtcctcaatgatagaagaaga

SEQ ID NO: 329886 - DNA, 25 bp, Artificial
  probe
  misc_feature (1)..(25): SEQ ID NO: 2568; WAN024CHN; Start 156; Stop 180
tgatagaagaagacagaaccgcatt

SEQ ID NO: 329887 - DNA, 25 bp, Artificial
  probe
  misc_feature (1)..(25): SEQ ID NO: 2568; WAN024CHN; Start 154; Stop 178
aatgatagaagaagacagaaccgca

SEQ ID NO: 329888 - DNA, 25 bp, Artificial
  probe
  misc_feature (1)..(25): SEQ ID NO: 2568; WAN024CHN; Start 155; Stop 179
atgatagaagaagacagaaccgcat

SEQ ID NO: 329889 - DNA, 25 bp, Artificial
  probe
  misc_feature (1)..(25): SEQ ID NO: 2568; WAN024CHN; Start 148; Stop 172
gtcctcaatgatagaagaagacaga

SEQ ID NO: 329890 - DNA, 25 bp, Artificial
  probe
  misc_feature (1)..(25): SEQ ID NO: 2568; WAN024CHN; Start 145; Stop 169
gatgtcctcaatgatagaagaagac

SEQ ID NO: 329891 - DNA, 25 bp, Artificial
  probe
  misc_feature (1)..(25): SEQ ID NO: 2568; WAN024CHN; Start 158; Stop 182
atagaagaagacagaaccgcattgg

SEQ ID NO: 329892 - DNA, 25 bp, Artificial
  probe
  misc_feature (1)..(25): SEQ ID NO: 2568; WAN024CHN; Start 224; Stop 248
aaggcaaagataatcactgtgtaga

SEQ ID NO: 329893 - DNA, 25 bp, Artificial
  probe
  misc_feature (1)..(25): SEQ ID NO: 2568; WAN024CHN; Start 215; Stop 239
ggcttcataaaggcaaagataatca

SEQ ID NO: 329894 - DNA, 25 bp, Artificial
  probe
  misc_feature (1)..(25): SEQ ID NO: 2568; WAN024CHN; Start 231; Stop 255
agataatcactgtgtagataggaag

SEQ ID NO: 329895 - DNA, 25 bp, Artificial
  probe
  misc_feature (1)..(25): SEQ ID NO: 2568; WAN024CHN; Start 225; Stop 249
aggcaaagataatcactgtgtagat

SEQ ID NO: 329896 - DNA, 25 bp, Artificial
  probe
  misc_feature (1)..(25): SEQ ID NO: 2568; WAN024CHN; Start 214; Stop 238
cggcttcataaaggcaaagataatc

SEQ ID NO: 329897 - DNA, 25 bp, Artificial
  probe
  misc_feature (1)..(25): SEQ ID NO: 2568; WAN024CHN; Start 223; Stop 247
aaaggcaaagataatcactgtgtag

SEQ ID NO: 329898 - DNA, 25 bp, Artificial
  probe
  misc_feature (1)..(25): SEQ ID NO: 2568; WAN024CHN; Start 213; Stop 237
acggcttcataaaggcaaagataat

SEQ ID NO: 329899 - DNA, 25 bp, Artificial
  probe
  misc_feature (1)..(25): SEQ ID NO: 2568; WAN024CHN; Start 219; Stop 243
tcataaaggcaaagataatcactgt

SEQ ID NO: 329900 - DNA, 25 bp, Artificial
  probe
  misc_feature (1)..(25): SEQ ID NO: 2568; WAN024CHN; Start 216; Stop 240
gcttcataaaggcaaagataatcac

SEQ ID NO: 329901 - DNA, 25 bp, Artificial
  probe
  misc_feature (1)..(25): SEQ ID NO: 2568; WAN024CHN; Start 212; Stop 236
aacggcttcataaaggcaaagataa

SEQ ID NO: 329902 - DNA, 25 bp, Artificial
  probe
  misc_feature (1)..(25): SEQ ID NO: 2568; WAN024CHN; Start 211; Stop 235
aaacggcttcataaaggcaaagata

SEQ ID NO: 329903 - DNA, 25 bp, Artificial
  probe
  misc_feature (1)..(25): SEQ ID NO: 2568; WAN024CHN; Start 29; Stop 53
tgactctctgctcgactataggtaa

SEQ ID NO: 329904 - DNA, 25 bp, Artificial
  probe
  misc_feature (1)..(25): SEQ ID NO: 2568; WAN024CHN; Start 221; Stop 245
ataaaggcaaagataatcactgtgt

SEQ ID NO: 329905 - DNA, 25 bp, Artificial
  probe
  misc_feature (1)..(25): SEQ ID NO: 2568; WAN024CHN; Start 220; Stop 244
cataaaggcaaagataatcactgtg

SEQ ID NO: 329906 - DNA, 25 bp, Artificial
  probe
  misc_feature (1)..(25): SEQ ID NO: 2568; WAN024CHN; Start 226; Stop 250
ggcaaagataatcactgtgtagata

SEQ ID NO: 329907 - DNA, 25 bp, Artificial
  probe
  misc_feature (1)..(25): SEQ ID NO: 2568; WAN024CHN; Start 28; Stop 52
ctgactctctgctcgactataggta

SEQ ID NO: 329908 - DNA, 25 bp, Artificial
  probe
  misc_feature (1)..(25): SEQ ID NO: 2568; WAN024CHN; Start 222; Stop 246
taaaggcaaagataatcactgtgta

SEQ ID NO: 329909 - DNA, 25 bp, Artificial
  probe
  misc_feature (1)..(25): SEQ ID NO: 2568; WAN024CHN; Start 230; Stop 254
aagataatcactgtgtagataggaa

SEQ ID NO: 329910 - DNA, 25 bp, Artificial
  probe
  misc_feature (1)..(25): SEQ ID NO: 2569; WAN024FS7; Start 177; Stop 201
aatcattcatatagtcgatggttgc

SEQ ID NO: 329911 - DNA, 25 bp, Artificial
  probe
  misc_feature (1)..(25): SEQ ID NO: 2569; WAN024FS7; Start 178; Stop 202
atcattcatatagtcgatggttgcc

SEQ ID NO: 329912 - DNA, 25 bp, Artificial
  probe
  misc_feature (1)..(25): SEQ ID NO: 2569; WAN024FS7; Start 180; Stop 204
cattcatatagtcgatggttgccaa

SEQ ID NO: 329913 - DNA, 25 bp, Artificial
  probe
  misc_feature (1)..(25): SEQ ID NO: 2569; WAN024FS7; Start 179; Stop 203
tcattcatatagtcgatggttgcca

SEQ ID NO: 329914 - DNA, 25 bp, Artificial
  probe
  misc_feature (1)..(25): SEQ ID NO: 2569; WAN024FS7; Start 168; Stop 192
caagccccaaatcattcatatagtc

SEQ ID NO: 329915 - DNA, 25 bp, Artificial
  probe
  misc_feature (1)..(25): SEQ ID NO: 2569; WAN024FS7; Start 167; Stop 191
tcaagccccaaatcattcatatagt

SEQ ID NO: 329916 - DNA, 25 bp, Artificial
  probe
  misc_feature (1)..(25): SEQ ID NO: 2569; WAN024FS7; Start 164; Stop 188
ttttcaagccccaaatcattcatat

SEQ ID NO: 329917 - DNA, 25 bp, Artificial
  probe
  misc_feature (1)..(25): SEQ ID NO: 2569; WAN024FS7; Start 163; Stop 187
cttttcaagccccaaatcattcata

SEQ ID NO: 329918 - DNA, 25 bp, Artificial
  probe
  misc_feature (1)..(25): SEQ ID NO: 2569; WAN024FS7; Start 166; Stop 190
ttcaagccccaaatcattcatatag

SEQ ID NO: 329919 - DNA, 25 bp, Artificial
  probe
  misc_feature (1)..(25): SEQ ID NO: 2569; WAN024FS7; Start 169; Stop 193
aagccccaaatcattcatatagtcg

SEQ ID NO: 329920 - DNA, 25 bp, Artificial
  probe
  misc_feature (1)..(25): SEQ ID NO: 2569; WAN024FS7; Start 181; Stop 205
attcatatagtcgatggttgccaaa

SEQ ID NO: 329921 - DNA, 25 bp, Artificial
  probe
  misc_feature (1)..(25): SEQ ID NO: 2569; WAN024FS7; Start 173; Stop 197
cccaaatcattcatatagtcgatgg

SEQ ID NO: 329922 - DNA, 25 bp, Artificial
  probe
  misc_feature (1)..(25): SEQ ID NO: 2569; WAN024FS7; Start 165; Stop 189
tttcaagccccaaatcattcatata

SEQ ID NO: 329923 - DNA, 25 bp, Artificial
  probe
  misc_feature (1)..(25): SEQ ID NO: 2569; WAN024FS7; Start 182; Stop 206
ttcatatagtcgatggttgccaaag

SEQ ID NO: 329924 - DNA, 25 bp, Artificial
  probe
  misc_feature (1)..(25): SEQ ID NO: 2569; WAN024FS7; Start 174; Stop 198
ccaaatcattcatatagtcgatggt

SEQ ID NO: 329925 - DNA, 25 bp, Artificial
  probe
  misc_feature (1)..(25): SEQ ID NO: 2569; WAN024FS7; Start 90; Stop 114
tttccttgtcttccacataaccagc

SEQ ID NO: 329926 - DNA, 25 bp, Artificial
  probe
  misc_feature (1)..(25): SEQ ID NO: 2569; WAN024FS7; Start 162; Stop 186
tcttttcaagccccaaatcattcat

SEQ ID NO: 329927 - DNA, 25 bp, Artificial
  probe
  misc_feature (1)..(25): SEQ ID NO: 2569; WAN024FS7; Start 176; Stop 200
aaatcattcatatagtcgatggttg

SEQ ID NO: 329928 - DNA, 25 bp, Artificial
  probe
  misc_feature (1)..(25): SEQ ID NO: 2569; WAN024FS7; Start 175; Stop 199
caaatcattcatatagtcgatggtt

SEQ ID NO: 329929 - DNA, 25 bp, Artificial
  probe
  misc_feature (1)..(25): SEQ ID NO: 2569; WAN024FS7; Start 184; Stop 208
catatagtcgatggttgccaaagtc

SEQ ID NO: 329930 - DNA, 25 bp, Artificial
  probe
  misc_feature (1)..(25): SEQ ID NO: 2569; WAN024FS7; Start 89; Stop 113
ttttccttgtcttccacataaccag

SEQ ID NO: 329931 - DNA, 25 bp, Artificial
  probe
  misc_feature (1)..(25): SEQ ID NO: 2569; WAN024FS7; Start 183; Stop 207
tcatatagtcgatggttgccaaagt

SEQ ID NO: 329932 - DNA, 25 bp, Artificial
  probe
  misc_feature (1)..(25): SEQ ID NO: 2569; WAN024FS7; Start 161; Stop 185
gtcttttcaagccccaaatcattca

SEQ ID NO: 329933 - DNA, 25 bp, Artificial
  probe
  misc_feature (1)..(25): SEQ ID NO: 2569; WAN024FS7; Start 91; Stop 115
ttccttgtcttccacataaccagcc

SEQ ID NO: 329934 - DNA, 25 bp, Artificial
  probe
  misc_feature (1)..(25): SEQ ID NO: 2569; WAN024FS7; Start 171; Stop 195
gccccaaatcattcatatagtcgat

SEQ ID NO: 329935 - DNA, 25 bp, Artificial
  probe
  misc_feature (1)..(25): SEQ ID NO: 2569; WAN024FS7; Start 172; Stop 196
ccccaaatcattcatatagtcgatg

SEQ ID NO: 329936 - DNA, 25 bp, Artificial
  probe
  misc_feature (1)..(25): SEQ ID NO: 2569; WAN024FS7; Start 160; Stop 184
ggtcttttcaagccccaaatcattc

SEQ ID NO: 329937 - DNA, 25 bp, Artificial
  probe
  misc_feature (1)..(25): SEQ ID NO: 2569; WAN024FS7; Start 170; Stop 194
agccccaaatcattcatatagtcga

SEQ ID NO: 329938 - DNA, 25 bp, Artificial
  probe
  misc_feature (1)..(25): SEQ ID NO: 2569; WAN024FS7; Start 5; Stop 29
gcacccttttgaatagcaagagttg

SEQ ID NO: 329939 - DNA, 25 bp, Artificial
  probe
  misc_feature (1)..(25): SEQ ID NO: 2569; WAN024FS7; Start 185; Stop 209
atatagtcgatggttgccaaagtcg

SEQ ID NO: 329940 - DNA, 25 bp, Artificial
  probe
  misc_feature (1)..(25): SEQ ID NO: 2569; WAN024FS7; Start 4; Stop 28
ggcacccttttgaatagcaagagtt

SEQ ID NO: 329941 - DNA, 25 bp, Artificial
  probe
  misc_feature (1)..(25): SEQ ID NO: 2569; WAN024FS7; Start 59; Stop 83
caatccagaccaactaccacgtagg

SEQ ID NO: 329942 - DNA, 25 bp, Artificial
  probe
  misc_feature (1)..(25): SEQ ID NO: 2569; WAN024FS7; Start 58; Stop 82
ccaatccagaccaactaccacgtag

SEQ ID NO: 329943 - DNA, 25 bp, Artificial
  probe
  misc_feature (1)..(25): SEQ ID NO: 2570; WAN024EXH; Start 83; Stop 107
agttaatctctgtcatcttgcctac

SEQ ID NO: 329944 - DNA, 25 bp, Artificial
  probe
  misc_feature (1)..(25): SEQ ID NO: 2570; WAN024EXH; Start 85; Stop 109
ttaatctctgtcatcttgcctacct

SEQ ID NO: 329945 - DNA, 25 bp, Artificial
  probe
  misc_feature (1)..(25): SEQ ID NO: 2570; WAN024EXH; Start 84; Stop 108
gttaatctctgtcatcttgcctacc

SEQ ID NO: 329946 - DNA, 25 bp, Artificial
  probe
  misc_feature (1)..(25): SEQ ID NO: 2570; WAN024EXH; Start 86; Stop 110
taatctctgtcatcttgcctacctc

SEQ ID NO: 329947 - DNA, 25 bp, Artificial
  probe
  misc_feature (1)..(25): SEQ ID NO: 2570; WAN024EXH; Start 156; Stop 180
cattattatcaagaacctggctggc

SEQ ID NO: 329948 - DNA, 25 bp, Artificial
  probe
  misc_feature (1)..(25): SEQ ID NO: 2570; WAN024EXH; Start 82; Stop 106
cagttaatctctgtcatcttgccta

SEQ ID NO: 329949 - DNA, 25 bp, Artificial
  probe
  misc_feature (1)..(25): SEQ ID NO: 2570; WAN024EXH; Start 77; Stop 101
ccttccagttaatctctgtcatctt

SEQ ID NO: 329950 - DNA, 25 bp, Artificial
  probe
  misc_feature (1)..(25): SEQ ID NO: 2570; WAN024EXH; Start 75; Stop 99
atccttccagttaatctctgtcatc

SEQ ID NO: 329951 - DNA, 25 bp, Artificial
  probe
  misc_feature (1)..(25): SEQ ID NO: 2570; WAN024EXH; Start 150; Stop 174
gattgccattattatcaagaacctg

SEQ ID NO: 329952 - DNA, 25 bp, Artificial
  probe
  misc_feature (1)..(25): SEQ ID NO: 2570; WAN024EXH; Start 76; Stop 100
tccttccagttaatctctgtcatct

SEQ ID NO: 329953 - DNA, 25 bp, Artificial
  probe
  misc_feature (1)..(25): SEQ ID NO: 2570; WAN024EXH; Start 79; Stop 103
ttccagttaatctctgtcatcttgc

SEQ ID NO: 329954 - DNA, 25 bp, Artificial
  probe
  misc_feature (1)..(25): SEQ ID NO: 2570; WAN024EXH; Start 78; Stop 102
cttccagttaatctctgtcatcttg

SEQ ID NO: 329955 - DNA, 25 bp, Artificial
  probe
  misc_feature (1)..(25): SEQ ID NO: 2570; WAN024EXH; Start 73; Stop 97
ttatccttccagttaatctctgtca

SEQ ID NO: 329956 - DNA, 25 bp, Artificial
  probe
  misc_feature (1)..(25): SEQ ID NO: 2570; WAN024EXH; Start 74; Stop 98
tatccttccagttaatctctgtcat

SEQ ID NO: 329957 - DNA, 25 bp, Artificial
  probe
  misc_feature (1)..(25): SEQ ID NO: 2570; WAN024EXH; Start 141; Stop 165
gctggttctgattgccattattatc

SEQ ID NO: 329958 - DNA, 25 bp, Artificial
  probe
  misc_feature (1)..(25): SEQ ID NO: 2570; WAN024EXH; Start 151; Stop 175
attgccattattatcaagaacctgg

SEQ ID NO: 329959 - DNA, 25 bp, Artificial
  probe
  misc_feature (1)..(25): SEQ ID NO: 2570; WAN024EXH; Start 119; Stop 143
aggatatgcacttgattaagaagct

SEQ ID NO: 329960 - DNA, 25 bp, Artificial
  probe
  misc_feature (1)..(25): SEQ ID NO: 2570; WAN024EXH; Start 121; Stop 145
gatatgcacttgattaagaagctgg

SEQ ID NO: 329961 - DNA, 25 bp, Artificial
  probe
  misc_feature (1)..(25): SEQ ID NO: 2570; WAN024EXH; Start 120; Stop 144
ggatatgcacttgattaagaagctg

SEQ ID NO: 329962 - DNA, 25 bp, Artificial
  probe
  misc_feature (1)..(25): SEQ ID NO: 2570; WAN024EXH; Start 122; Stop 146
atatgcacttgattaagaagctggt

SEQ ID NO: 329963 - DNA, 25 bp, Artificial
  probe
  misc_feature (1)..(25): SEQ ID NO: 2570; WAN024EXH; Start 118; Stop 142
aaggatatgcacttgattaagaagc

SEQ ID NO: 329964 - DNA, 25 bp, Artificial
  probe
  misc_feature (1)..(25): SEQ ID NO: 2570; WAN024EXH; Start 72; Stop 96
attatccttccagttaatctctgtc

SEQ ID NO: 329965 - DNA, 25 bp, Artificial
  probe
  misc_feature (1)..(25): SEQ ID NO: 2570; WAN024EXH; Start 155; Stop 179
ccattattatcaagaacctggctgg

SEQ ID NO: 329966 - DNA, 25 bp, Artificial
  probe
  misc_feature (1)..(25): SEQ ID NO: 2570; WAN024EXH; Start 123; Stop 147
tatgcacttgattaagaagctggtt

SEQ ID NO: 329967 - DNA, 25 bp, Artificial
  probe
  misc_feature (1)..(25): SEQ ID NO: 2570; WAN024EXH; Start 81; Stop 105
ccagttaatctctgtcatcttgcct

SEQ ID NO: 329968 - DNA, 25 bp, Artificial
  probe
  misc_feature (1)..(25): SEQ ID NO: 2570; WAN024EXH; Start 80; Stop 104
tccagttaatctctgtcatcttgcc

SEQ ID NO: 329969 - DNA, 25 bp, Artificial
  probe
  misc_feature (1)..(25): SEQ ID NO: 2570; WAN024EXH; Start 124; Stop 148
atgcacttgattaagaagctggttc

SEQ ID NO: 329970 - DNA, 25 bp, Artificial
  probe
  misc_feature (1)..(25): SEQ ID NO: 2570; WAN024EXH; Start 140; Stop 164
agctggttctgattgccattattat

SEQ ID NO: 329971 - DNA, 25 bp, Artificial
  probe
  misc_feature (1)..(25): SEQ ID NO: 2570; WAN024EXH; Start 139; Stop 163
aagctggttctgattgccattatta

SEQ ID NO: 329972 - DNA, 25 bp, Artificial
  probe
  misc_feature (1)..(25): SEQ ID NO: 2570; WAN024EXH; Start 142; Stop 166
ctggttctgattgccattattatca

SEQ ID NO: 329973 - DNA, 25 bp, Artificial
  probe
  misc_feature (1)..(25): SEQ ID NO: 2570; WAN024EXH; Start 116; Stop 140
agaaggatatgcacttgattaagaa

SEQ ID NO: 329974 - DNA, 25 bp, Artificial
  probe
  misc_feature (1)..(25): SEQ ID NO: 2570; WAN024EXH; Start 115; Stop 139
aagaaggatatgcacttgattaaga

SEQ ID NO: 329975 - DNA, 25 bp, Artificial
  probe
  misc_feature (1)..(25): SEQ ID NO: 2570; WAN024EXH; Start 87; Stop 111
aatctctgtcatcttgcctacctcc

SEQ ID NO: 329976 - DNA, 25 bp, Artificial
  probe
  misc_feature (1)..(25): SEQ ID NO: 2571; WAN024GFC; Start 175; Stop 199
aagagtaggatggacactgacaatt

SEQ ID NO: 329977 - DNA, 25 bp, Artificial
  probe
  misc_feature (1)..(25): SEQ ID NO: 2571; WAN024GFC; Start 174; Stop 198
gaagagtaggatggacactgacaat

SEQ ID NO: 329978 - DNA, 25 bp, Artificial
  probe
  misc_feature (1)..(25): SEQ ID NO: 2571; WAN024GFC; Start 172; Stop 196
atgaagagtaggatggacactgaca

SEQ ID NO: 329979 - DNA, 25 bp, Artificial
  probe
  misc_feature (1)..(25): SEQ ID NO: 2571; WAN024GFC; Start 173; Stop 197
tgaagagtaggatggacactgacaa

SEQ ID NO: 329980 - DNA, 25 bp, Artificial
  probe
  misc_feature (1)..(25): SEQ ID NO: 2571; WAN024GFC; Start 171; Stop 195
catgaagagtaggatggacactgac

SEQ ID NO: 329981 - DNA, 25 bp, Artificial
  probe
  misc_feature (1)..(25): SEQ ID NO: 2571; WAN024GFC; Start 177; Stop 201
gagtaggatggacactgacaatttc

SEQ ID NO: 329982 - DNA, 25 bp, Artificial
  probe
  misc_feature (1)..(25): SEQ ID NO: 2571; WAN024GFC; Start 176; Stop 200
agagtaggatggacactgacaattt

SEQ ID NO: 329983 - DNA, 25 bp, Artificial
  probe
  misc_feature (1)..(25): SEQ ID NO: 2571; WAN024GFC; Start 89; Stop 113
aatccagcatgagccttgataaatt

SEQ ID NO: 329984 - DNA, 25 bp, Artificial
  probe
  misc_feature (1)..(25): SEQ ID NO: 2571; WAN024GFC; Start 105; Stop 129
tgataaattcaacctcaactggatc

SEQ ID NO: 329985 - DNA, 25 bp, Artificial
  probe
  misc_feature (1)..(25): SEQ ID NO: 2571; WAN024GFC; Start 246; Stop 270
gattgacatgctcacaaccttgaac

SEQ ID NO: 329986 - DNA, 25 bp, Artificial
  probe
  misc_feature (1)..(25): SEQ ID NO: 2571; WAN024GFC; Start 90; Stop 114
atccagcatgagccttgataaattc

SEQ ID NO: 329987 - DNA, 25 bp, Artificial
  probe
  misc_feature (1)..(25): SEQ ID NO: 2571; WAN024GFC; Start 247; Stop 271
attgacatgctcacaaccttgaact

SEQ ID NO: 329988 - DNA, 25 bp, Artificial
  probe
  misc_feature (1)..(25): SEQ ID NO: 2571; WAN024GFC; Start 88; Stop 112
caatccagcatgagccttgataaat

SEQ ID NO: 329989 - DNA, 25 bp, Artificial
  probe
  misc_feature (1)..(25): SEQ ID NO: 2571; WAN024GFC; Start 189; Stop 213
cactgacaatttccagaccaaactg

SEQ ID NO: 329990 - DNA, 25 bp, Artificial
  probe
  misc_feature (1)..(25): SEQ ID NO: 2571; WAN024GFC; Start 187; Stop 211
gacactgacaatttccagaccaaac

SEQ ID NO: 329991 - DNA, 25 bp, Artificial
  probe
  misc_feature (1)..(25): SEQ ID NO: 2571; WAN024GFC; Start 178; Stop 202
agtaggatggacactgacaatttcc

SEQ ID NO: 329992 - DNA, 25 bp, Artificial
  probe
  misc_feature (1)..(25): SEQ ID NO: 2571; WAN024GFC; Start 252; Stop 276
catgctcacaaccttgaactgctaa

SEQ ID NO: 329993 - DNA, 25 bp, Artificial
  probe
  misc_feature (1)..(25): SEQ ID NO: 2571; WAN024GFC; Start 91; Stop 115
tccagcatgagccttgataaattca

SEQ ID NO: 329994 - DNA, 25 bp, Artificial
  probe
  misc_feature (1)..(25): SEQ ID NO: 2571; WAN024GFC; Start 85; Stop 109
atccaatccagcatgagccttgata

SEQ ID NO: 329995 - DNA, 25 bp, Artificial
  probe
  misc_feature (1)..(25): SEQ ID NO: 2571; WAN024GFC; Start 84; Stop 108
tatccaatccagcatgagccttgat

SEQ ID NO: 329996 - DNA, 25 bp, Artificial
  probe
  misc_feature (1)..(25): SEQ ID NO: 2571; WAN024GFC; Start 83; Stop 107
atatccaatccagcatgagccttga

SEQ ID NO: 329997 - DNA, 25 bp, Artificial
  probe
  misc_feature (1)..(25): SEQ ID NO: 2571; WAN024GFC; Start 13; Stop 37
aatctctctcaaaatagggcgaatc

SEQ ID NO: 329998 - DNA, 25 bp, Artificial
  probe
  misc_feature (1)..(25): SEQ ID NO: 2571; WAN024GFC; Start 188; Stop 212
acactgacaatttccagaccaaact

SEQ ID NO: 329999 - DNA, 25 bp, Artificial
  probe
  misc_feature (1)..(25): SEQ ID NO: 2571; WAN024GFC; Start 170; Stop 194
gcatgaagagtaggatggacactga

SEQ ID NO: 330000 - DNA, 25 bp, Artificial
  probe
  misc_feature (1)..(25): SEQ ID NO: 2571; WAN024GFC; Start 12; Stop 36
caatctctctcaaaatagggcgaat

SEQ ID NO: 330001 - DNA, 25 bp, Artificial
  probe
  misc_feature (1)..(25): SEQ ID NO: 2571; WAN024GFC; Start 248; Stop 272
ttgacatgctcacaaccttgaactg

SEQ ID NO: 330002 - DNA, 25 bp, Artificial
  probe
  misc_feature (1)..(25): SEQ ID NO: 2571; WAN024GFC; Start 102; Stop 126
ccttgataaattcaacctcaactgg

SEQ ID NO: 330003 - DNA, 25 bp, Artificial
  probe
  misc_feature (1)..(25): SEQ ID NO: 2571; WAN024GFC; Start 99; Stop 123
gagccttgataaattcaacctcaac

SEQ ID NO: 330004 - DNA, 25 bp, Artificial
  probe
  misc_feature (1)..(25): SEQ ID NO: 2571; WAN024GFC; Start 101; Stop 125
gccttgataaattcaacctcaactg

SEQ ID NO: 330005 - DNA, 25 bp, Artificial
  probe
  misc_feature (1)..(25): SEQ ID NO: 2571; WAN024GFC; Start 100; Stop 124
agccttgataaattcaacctcaact

SEQ ID NO: 330006 - DNA, 25 bp, Artificial
  probe
  misc_feature (1)..(25): SEQ ID NO: 2571; WAN024GFC; Start 86; Stop 110
tccaatccagcatgagccttgataa

SEQ ID NO: 330007 - DNA, 25 bp, Artificial
  probe
  misc_feature (1)..(25): SEQ ID NO: 2571; WAN024GFC; Start 103; Stop 127
cttgataaattcaacctcaactgga

SEQ ID NO: 330008 - DNA, 25 bp, Artificial
  probe
  misc_feature (1)..(25): SEQ ID NO: 2571; WAN024GFC; Start 67; Stop 91
aattgcagtgtctccgatatccaat

SEQ ID NO: 330009 - DNA, 25 bp, Artificial
  probe
  misc_feature (1)..(25): SEQ ID NO: 2572; WAN024G9J; Start 210; Stop 234
taatatcgtaatcatcttcgcagtt

SEQ ID NO: 330010 - DNA, 25 bp, Artificial
  probe
  misc_feature (1)..(25): SEQ ID NO: 2572; WAN024G9J; Start 209; Stop 233
ataatatcgtaatcatcttcgcagt

SEQ ID NO: 330011 - DNA, 25 bp, Artificial
  probe
  misc_feature (1)..(25): SEQ ID NO: 2572; WAN024G9J; Start 208; Stop 232
gataatatcgtaatcatcttcgcag

SEQ ID NO: 330012 - DNA, 25 bp, Artificial
  probe
  misc_feature (1)..(25): SEQ ID NO: 2572; WAN024G9J; Start 131; Stop 155
gctcgataactattgccgtagaatt

SEQ ID NO: 330013 - DNA, 25 bp, Artificial
  probe
  misc_feature (1)..(25): SEQ ID NO: 2572; WAN024G9J; Start 212; Stop 236
atatcgtaatcatcttcgcagtttc

SEQ ID NO: 330014 - DNA, 25 bp, Artificial
  probe
  misc_feature (1)..(25): SEQ ID NO: 2572; WAN024G9J; Start 211; Stop 235
aatatcgtaatcatcttcgcagttt

SEQ ID NO: 330015 - DNA, 25 bp, Artificial
  probe
  misc_feature (1)..(25): SEQ ID NO: 2572; WAN024G9J; Start 130; Stop 154
agctcgataactattgccgtagaat

SEQ ID NO: 330016 - DNA, 25 bp, Artificial
  probe
  misc_feature (1)..(25): SEQ ID NO: 2572; WAN024G9J; Start 213; Stop 237
tatcgtaatcatcttcgcagtttcg

SEQ ID NO: 330017 - DNA, 25 bp, Artificial
  probe
  misc_feature (1)..(25): SEQ ID NO: 2572; WAN024G9J; Start 7; Stop 31
ctgataaacccgactgattggaaag

SEQ ID NO: 330018 - DNA, 25 bp, Artificial
  probe
  misc_feature (1)..(25): SEQ ID NO: 2572; WAN024G9J; Start 132; Stop 156
ctcgataactattgccgtagaattc

SEQ ID NO: 330019 - DNA, 25 bp, Artificial
  probe
  misc_feature (1)..(25): SEQ ID NO: 2572; WAN024G9J; Start 140; Stop 164
ctattgccgtagaattccttggtaa

SEQ ID NO: 330020 - DNA, 25 bp, Artificial
  probe
  misc_feature (1)..(25): SEQ ID NO: 2572; WAN024G9J; Start 137; Stop 161
taactattgccgtagaattccttgg

SEQ ID NO: 330021 - DNA, 25 bp, Artificial
  probe
  misc_feature (1)..(25): SEQ ID NO: 2572; WAN024G9J; Start 134; Stop 158
cgataactattgccgtagaattcct

SEQ ID NO: 330022 - DNA, 25 bp, Artificial
  probe
  misc_feature (1)..(25): SEQ ID NO: 2572; WAN024G9J; Start 133; Stop 157
tcgataactattgccgtagaattcc

SEQ ID NO: 330023 - DNA, 25 bp, Artificial
  probe
  misc_feature (1)..(25): SEQ ID NO: 2572; WAN024G9J; Start 136; Stop 160
ataactattgccgtagaattccttg

SEQ ID NO: 330024 - DNA, 25 bp, Artificial
  probe
  misc_feature (1)..(25): SEQ ID NO: 2572; WAN024G9J; Start 18; Stop 42
gactgattggaaaggcttgattgac

SEQ ID NO: 330025 - DNA, 25 bp, Artificial
  probe
  misc_feature (1)..(25): SEQ ID NO: 2572; WAN024G9J; Start 135; Stop 159
gataactattgccgtagaattcctt

SEQ ID NO: 330026 - DNA, 25 bp, Artificial
  probe
  misc_feature (1)..(25): SEQ ID NO: 2572; WAN024G9J; Start 192; Stop 216
ctgtcgcatcgttgatgataatatc

SEQ ID NO: 330027 - DNA, 25 bp, Artificial
  probe
  misc_feature (1)..(25): SEQ ID NO: 2572; WAN024G9J; Start 195; Stop 219
tcgcatcgttgatgataatatcgta

SEQ ID NO: 330028 - DNA, 25 bp, Artificial
  probe
  misc_feature (1)..(25): SEQ ID NO: 2572; WAN024G9J; Start 191; Stop 215
tctgtcgcatcgttgatgataatat

SEQ ID NO: 330029 - DNA, 25 bp, Artificial
  probe
  misc_feature (1)..(25): SEQ ID NO: 2572; WAN024G9J; Start 190; Stop 214
atctgtcgcatcgttgatgataata

SEQ ID NO: 330030 - DNA, 25 bp, Artificial
  probe
  misc_feature (1)..(25): SEQ ID NO: 2572; WAN024G9J; Start 139; Stop 163
actattgccgtagaattccttggta

SEQ ID NO: 330031 - DNA, 25 bp, Artificial
  probe
  misc_feature (1)..(25): SEQ ID NO: 2572; WAN024G9J; Start 196; Stop 220
cgcatcgttgatgataatatcgtaa

SEQ ID NO: 330032 - DNA, 25 bp, Artificial
  probe
  misc_feature (1)..(25): SEQ ID NO: 2572; WAN024G9J; Start 207; Stop 231
tgataatatcgtaatcatcttcgca

SEQ ID NO: 330033 - DNA, 25 bp, Artificial
  probe
  misc_feature (1)..(25): SEQ ID NO: 2572; WAN024G9J; Start 217; Stop 241
gtaatcatcttcgcagtttcgcaaa

SEQ ID NO: 330034 - DNA, 25 bp, Artificial
  probe
  misc_feature (1)..(25): SEQ ID NO: 2572; WAN024G9J; Start 157; Stop 181
cttggtaaagagtccttccgtatgg

SEQ ID NO: 330035 - DNA, 25 bp, Artificial
  probe
  misc_feature (1)..(25): SEQ ID NO: 2572; WAN024G9J; Start 156; Stop 180
ccttggtaaagagtccttccgtatg

SEQ ID NO: 330036 - DNA, 25 bp, Artificial
  probe
  misc_feature (1)..(25): SEQ ID NO: 2572; WAN024G9J; Start 152; Stop 176
aattccttggtaaagagtccttccg

SEQ ID NO: 330037 - DNA, 25 bp, Artificial
  probe
  misc_feature (1)..(25): SEQ ID NO: 2572; WAN024G9J; Start 8; Stop 32
tgataaacccgactgattggaaagg

SEQ ID NO: 330038 - DNA, 25 bp, Artificial
  probe
  misc_feature (1)..(25): SEQ ID NO: 2572; WAN024G9J; Start 6; Stop 30
cctgataaacccgactgattggaaa

SEQ ID NO: 330039 - DNA, 25 bp, Artificial
  probe
  misc_feature (1)..(25): SEQ ID NO: 2572; WAN024G9J; Start 189; Stop 213
gatctgtcgcatcgttgatgataat

SEQ ID NO: 330040 - DNA, 25 bp, Artificial
  probe
  misc_feature (1)..(25): SEQ ID NO: 2572; WAN024G9J; Start 155; Stop 179
tccttggtaaagagtccttccgtat

SEQ ID NO: 330041 - DNA, 25 bp, Artificial
  probe
  misc_feature (1)..(25): SEQ ID NO: 2572; WAN024G9J; Start 194; Stop 218
gtcgcatcgttgatgataatatcgt

SEQ ID NO: 330042 - DNA, 25 bp, Artificial
  probe
  misc_feature (1)..(25): SEQ ID NO: 2573; WAN024CHM; Start 131; Stop 155
gtcttgtccaaagcaatgagattat

SEQ ID NO: 330043 - DNA, 25 bp, Artificial
  probe
  misc_feature (1)..(25): SEQ ID NO: 2573; WAN024CHM; Start 133; Stop 157
cttgtccaaagcaatgagattatcg

SEQ ID NO: 330044 - DNA, 25 bp, Artificial
  probe
  misc_feature (1)..(25): SEQ ID NO: 2573; WAN024CHM; Start 132; Stop 156
tcttgtccaaagcaatgagattatc

SEQ ID NO: 330045 - DNA, 25 bp, Artificial
  probe
  misc_feature (1)..(25): SEQ ID NO: 2573; WAN024CHM; Start 130; Stop 154
ggtcttgtccaaagcaatgagatta

SEQ ID NO: 330046 - DNA, 25 bp, Artificial
  probe
  misc_feature (1)..(25): SEQ ID NO: 2573; WAN024CHM; Start 145; Stop 169
aatgagattatcgacaatccgcttc

SEQ ID NO: 330047 - DNA, 25 bp, Artificial
  probe
  misc_feature (1)..(25): SEQ ID NO: 2573; WAN024CHM; Start 138; Stop 162
ccaaagcaatgagattatcgacaat

SEQ ID NO: 330048 - DNA, 25 bp, Artificial
  probe
  misc_feature (1)..(25): SEQ ID NO: 2573; WAN024CHM; Start 144; Stop 168
caatgagattatcgacaatccgctt

SEQ ID NO: 330049 - DNA, 25 bp, Artificial
  probe
  misc_feature (1)..(25): SEQ ID NO: 2573; WAN024CHM; Start 141; Stop 165
aagcaatgagattatcgacaatccg

SEQ ID NO: 330050 - DNA, 25 bp, Artificial
  probe
  misc_feature (1)..(25): SEQ ID NO: 2573; WAN024CHM; Start 137; Stop 161
tccaaagcaatgagattatcgacaa

SEQ ID NO: 330051 - DNA, 25 bp, Artificial
  probe
  misc_feature (1)..(25): SEQ ID NO: 2573; WAN024CHM; Start 123; Stop 147
aaatcaaggtcttgtccaaagcaat

SEQ ID NO: 330052 - DNA, 25 bp, Artificial
  probe
  misc_feature (1)..(25): SEQ ID NO: 2573; WAN024CHM; Start 146; Stop 170
atgagattatcgacaatccgcttct

SEQ ID NO: 330053 - DNA, 25 bp, Artificial
  probe
  misc_feature (1)..(25): SEQ ID NO: 2573; WAN024CHM; Start 134; Stop 158
ttgtccaaagcaatgagattatcga

SEQ ID NO: 330054 - DNA, 25 bp, Artificial
  probe
  misc_feature (1)..(25): SEQ ID NO: 2573; WAN024CHM; Start 129; Stop 153
aggtcttgtccaaagcaatgagatt

SEQ ID NO: 330055 - DNA, 25 bp, Artificial
  probe
  misc_feature (1)..(25): SEQ ID NO: 2573; WAN024CHM; Start 128; Stop 152
aaggtcttgtccaaagcaatgagat

SEQ ID NO: 330056 - DNA, 25 bp, Artificial
  probe
  misc_feature (1)..(25): SEQ ID NO: 2573; WAN024CHM; Start 99; Stop 123
caatagtcaagcggtgagcaatgaa

SEQ ID NO: 330057 - DNA, 25 bp, Artificial
  probe
  misc_feature (1)..(25): SEQ ID NO: 2573; WAN024CHM; Start 37; Stop 61
atgctttccttcttcgacaatcttg

SEQ ID NO: 330058 - DNA, 25 bp, Artificial
  probe
  misc_feature (1)..(25): SEQ ID NO: 2573; WAN024CHM; Start 36; Stop 60
catgctttccttcttcgacaatctt

SEQ ID NO: 330059 - DNA, 25 bp, Artificial
  probe
  misc_feature (1)..(25): SEQ ID NO: 2573; WAN024CHM; Start 124; Stop 148
aatcaaggtcttgtccaaagcaatg

SEQ ID NO: 330060 - DNA, 25 bp, Artificial
  probe
  misc_feature (1)..(25): SEQ ID NO: 2573; WAN024CHM; Start 149; Stop 173
agattatcgacaatccgcttctctg

SEQ ID NO: 330061 - DNA, 25 bp, Artificial
  probe
  misc_feature (1)..(25): SEQ ID NO: 2573; WAN024CHM; Start 167; Stop 191
ttctctgtcaaaatatccaaactgc

SEQ ID NO: 330062 - DNA, 25 bp, Artificial
  probe
  misc_feature (1)..(25): SEQ ID NO: 2573; WAN024CHM; Start 168; Stop 192
tctctgtcaaaatatccaaactgct

SEQ ID NO: 330063 - DNA, 25 bp, Artificial
  probe
  misc_feature (1)..(25): SEQ ID NO: 2573; WAN024CHM; Start 165; Stop 189
gcttctctgtcaaaatatccaaact

SEQ ID NO: 330064 - DNA, 25 bp, Artificial
  probe
  misc_feature (1)..(25): SEQ ID NO: 2573; WAN024CHM; Start 159; Stop 183
caatccgcttctctgtcaaaatatc

SEQ ID NO: 330065 - DNA, 25 bp, Artificial
  probe
  misc_feature (1)..(25): SEQ ID NO: 2573; WAN024CHM; Start 150; Stop 174
gattatcgacaatccgcttctctgt

SEQ ID NO: 330066 - DNA, 25 bp, Artificial
  probe
  misc_feature (1)..(25): SEQ ID NO: 2573; WAN024CHM; Start 164; Stop 188
cgcttctctgtcaaaatatccaaac

SEQ ID NO: 330067 - DNA, 25 bp, Artificial
  probe
  misc_feature (1)..(25): SEQ ID NO: 2573; WAN024CHM; Start 136; Stop 160
gtccaaagcaatgagattatcgaca

SEQ ID NO: 330068 - DNA, 25 bp, Artificial
  probe
  misc_feature (1)..(25): SEQ ID NO: 2573; WAN024CHM; Start 135; Stop 159
tgtccaaagcaatgagattatcgac

SEQ ID NO: 330069 - DNA, 25 bp, Artificial
  probe
  misc_feature (1)..(25): SEQ ID NO: 2573; WAN024CHM; Start 140; Stop 164
aaagcaatgagattatcgacaatcc

SEQ ID NO: 330070 - DNA, 25 bp, Artificial
  probe
  misc_feature (1)..(25): SEQ ID NO: 2573; WAN024CHM; Start 177; Stop 201
aaatatccaaactgctagtcgcctc

SEQ ID NO: 330071 - DNA, 25 bp, Artificial
  probe
  misc_feature (1)..(25): SEQ ID NO: 2573; WAN024CHM; Start 169; Stop 193
ctctgtcaaaatatccaaactgcta

SEQ ID NO: 330072 - DNA, 25 bp, Artificial
  probe
  misc_feature (1)..(25): SEQ ID NO: 2573; WAN024CHM; Start 160; Stop 184
aatccgcttctctgtcaaaatatcc

SEQ ID NO: 330073 - DNA, 25 bp, Artificial
  probe
  misc_feature (1)..(25): SEQ ID NO: 2573; WAN024CHM; Start 100; Stop 124
aatagtcaagcggtgagcaatgaaa

SEQ ID NO: 330074 - DNA, 25 bp, Artificial
  probe
  misc_feature (1)..(25): SEQ ID NO: 2573; WAN024CHM; Start 139; Stop 163
caaagcaatgagattatcgacaatc

SEQ ID NO: 330075 - DNA, 25 bp, Artificial
  probe
  misc_feature (1)..(25): SEQ ID NO: 2574; WAN024EYH; Start 164; Stop 188
aattcatattctgtacgatccatgc

SEQ ID NO: 330076 - DNA, 25 bp, Artificial
  probe
  misc_feature (1)..(25): SEQ ID NO: 2574; WAN024EYH; Start 165; Stop 189
attcatattctgtacgatccatgcc

SEQ ID NO: 330077 - DNA, 25 bp, Artificial
  probe
  misc_feature (1)..(25): SEQ ID NO: 2574; WAN024EYH; Start 189; Stop 213
caagttcatccatcttagcgacaag

SEQ ID NO: 330078 - DNA, 25 bp, Artificial
  probe
  misc_feature (1)..(25): SEQ ID NO: 2574; WAN024EYH; Start 168; Stop 192
catattctgtacgatccatgccaag

SEQ ID NO: 330079 - DNA, 25 bp, Artificial
  probe
  misc_feature (1)..(25): SEQ ID NO: 2574; WAN024EYH; Start 50; Stop 74
aatggaatagcttcacggatatgtt

SEQ ID NO: 330080 - DNA, 25 bp, Artificial
  probe
  misc_feature (1)..(25): SEQ ID NO: 2574; WAN024EYH; Start 169; Stop 193
atattctgtacgatccatgccaagt

SEQ ID NO: 330081 - DNA, 25 bp, Artificial
  probe
  misc_feature (1)..(25): SEQ ID NO: 2574; WAN024EYH; Start 49; Stop 73
gaatggaatagcttcacggatatgt

SEQ ID NO: 330082 - DNA, 25 bp, Artificial
  probe
  misc_feature (1)..(25): SEQ ID NO: 2574; WAN024EYH; Start 167; Stop 191
tcatattctgtacgatccatgccaa

SEQ ID NO: 330083 - DNA, 25 bp, Artificial
  probe
  misc_feature (1)..(25): SEQ ID NO: 2574; WAN024EYH; Start 166; Stop 190
ttcatattctgtacgatccatgcca

SEQ ID NO: 330084 - DNA, 25 bp, Artificial
  probe
  misc_feature (1)..(25): SEQ ID NO: 2574; WAN024EYH; Start 170; Stop 194
tattctgtacgatccatgccaagtt

SEQ ID NO: 330085 - DNA, 25 bp, Artificial
  probe
  misc_feature (1)..(25): SEQ ID NO: 2574; WAN024EYH; Start 181; Stop 205
atccatgccaagttcatccatctta

SEQ ID NO: 330086 - DNA, 25 bp, Artificial
  probe
  misc_feature (1)..(25): SEQ ID NO: 2574; WAN024EYH; Start 9; Stop 33
tttcctgttcttatggtttgatacg

SEQ ID NO: 330087 - DNA, 25 bp, Artificial
  probe
  misc_feature (1)..(25): SEQ ID NO: 2574; WAN024EYH; Start 10; Stop 34
ttcctgttcttatggtttgatacgg

SEQ ID NO: 330088 - DNA, 25 bp, Artificial
  probe
  misc_feature (1)..(25): SEQ ID NO: 2574; WAN024EYH; Start 48; Stop 72
ggaatggaatagcttcacggatatg

SEQ ID NO: 330089 - DNA, 25 bp, Artificial
  probe
  misc_feature (1)..(25): SEQ ID NO: 2574; WAN024EYH; Start 190; Stop 214
aagttcatccatcttagcgacaagg

SEQ ID NO: 330090 - DNA, 25 bp, Artificial
  probe
  misc_feature (1)..(25): SEQ ID NO: 2574; WAN024EYH; Start 245; Stop 269
ccgataatttctccatagccttctg

SEQ ID NO: 330091 - DNA, 25 bp, Artificial
  probe
  misc_feature (1)..(25): SEQ ID NO: 2574; WAN024EYH; Start 237; Stop 261
tagacccaccgataatttctccata

SEQ ID NO: 330092 - DNA, 25 bp, Artificial
  probe
  misc_feature (1)..(25): SEQ ID NO: 2574; WAN024EYH; Start 244; Stop 268
accgataatttctccatagccttct

SEQ ID NO: 330093 - DNA, 25 bp, Artificial
  probe
  misc_feature (1)..(25): SEQ ID NO: 2574; WAN024EYH; Start 243; Stop 267
caccgataatttctccatagccttc

SEQ ID NO: 330094 - DNA, 25 bp, Artificial
  probe
  misc_feature (1)..(25): SEQ ID NO: 2574; WAN024EYH; Start 188; Stop 212
ccaagttcatccatcttagcgacaa

SEQ ID NO: 330095 - DNA, 25 bp, Artificial
  probe
  misc_feature (1)..(25): SEQ ID NO: 2574; WAN024EYH; Start 142; Stop 166
gtatttacgaaggtcaaggtagaat

SEQ ID NO: 330096 - DNA, 25 bp, Artificial
  probe
  misc_feature (1)..(25): SEQ ID NO: 2574; WAN024EYH; Start 236; Stop 260
atagacccaccgataatttctccat

SEQ ID NO: 330097 - DNA, 25 bp, Artificial
  probe
  misc_feature (1)..(25): SEQ ID NO: 2574; WAN024EYH; Start 12; Stop 36
cctgttcttatggtttgatacggtg

SEQ ID NO: 330098 - DNA, 25 bp, Artificial
  probe
  misc_feature (1)..(25): SEQ ID NO: 2574; WAN024EYH; Start 11; Stop 35
tcctgttcttatggtttgatacggt

SEQ ID NO: 330099 - DNA, 25 bp, Artificial
  probe
  misc_feature (1)..(25): SEQ ID NO: 2574; WAN024EYH; Start 182; Stop 206
tccatgccaagttcatccatcttag

SEQ ID NO: 330100 - DNA, 25 bp, Artificial
  probe
  misc_feature (1)..(25): SEQ ID NO: 2574; WAN024EYH; Start 238; Stop 262
agacccaccgataatttctccatag

SEQ ID NO: 330101 - DNA, 25 bp, Artificial
  probe
  misc_feature (1)..(25): SEQ ID NO: 2574; WAN024EYH; Start 146; Stop 170
ttacgaaggtcaaggtagaattcat

SEQ ID NO: 330102 - DNA, 25 bp, Artificial
  probe
  misc_feature (1)..(25): SEQ ID NO: 2574; WAN024EYH; Start 148; Stop 172
acgaaggtcaaggtagaattcatat

SEQ ID NO: 330103 - DNA, 25 bp, Artificial
  probe
  misc_feature (1)..(25): SEQ ID NO: 2574; WAN024EYH; Start 13; Stop 37
ctgttcttatggtttgatacggtgc

SEQ ID NO: 330104 - DNA, 25 bp, Artificial
  probe
  misc_feature (1)..(25): SEQ ID NO: 2574; WAN024EYH; Start 171; Stop 195
attctgtacgatccatgccaagttc

SEQ ID NO: 330105 - DNA, 25 bp, Artificial
  probe
  misc_feature (1)..(25): SEQ ID NO: 2574; WAN024EYH; Start 235; Stop 259
catagacccaccgataatttctcca

SEQ ID NO: 330106 - DNA, 25 bp, Artificial
  probe
  misc_feature (1)..(25): SEQ ID NO: 2574; WAN024EYH; Start 147; Stop 171
tacgaaggtcaaggtagaattcata

SEQ ID NO: 330107 - DNA, 25 bp, Artificial
  probe
  misc_feature (1)..(25): SEQ ID NO: 2574; WAN024EYH; Start 180; Stop 204
gatccatgccaagttcatccatctt

SEQ ID NO: 330108 - DNA, 25 bp, Artificial
  probe
  misc_feature (1)..(25): SEQ ID NO: 2575; WAN024GC9; Start 135; Stop 159
gattgacatccgtcgtatagtgatc

SEQ ID NO: 330109 - DNA, 25 bp, Artificial
  probe
  misc_feature (1)..(25): SEQ ID NO: 2575; WAN024GC9; Start 100; Stop 124
cagttctttgatatgagcatccaag

SEQ ID NO: 330110 - DNA, 25 bp, Artificial
  probe
  misc_feature (1)..(25): SEQ ID NO: 2575; WAN024GC9; Start 99; Stop 123
tcagttctttgatatgagcatccaa

SEQ ID NO: 330111 - DNA, 25 bp, Artificial
  probe
  misc_feature (1)..(25): SEQ ID NO: 2575; WAN024GC9; Start 101; Stop 125
agttctttgatatgagcatccaagg

SEQ ID NO: 330112 - DNA, 25 bp, Artificial
  probe
  misc_feature (1)..(25): SEQ ID NO: 2575; WAN024GC9; Start 96; Stop 120
ctgtcagttctttgatatgagcatc

SEQ ID NO: 330113 - DNA, 25 bp, Artificial
  probe
  misc_feature (1)..(25): SEQ ID NO: 2575; WAN024GC9; Start 93; Stop 117
atcctgtcagttctttgatatgagc

SEQ ID NO: 330114 - DNA, 25 bp, Artificial
  probe
  misc_feature (1)..(25): SEQ ID NO: 2575; WAN024GC9; Start 98; Stop 122
gtcagttctttgatatgagcatcca

SEQ ID NO: 330115 - DNA, 25 bp, Artificial
  probe
  misc_feature (1)..(25): SEQ ID NO: 2575; WAN024GC9; Start 97; Stop 121
tgtcagttctttgatatgagcatcc

SEQ ID NO: 330116 - DNA, 25 bp, Artificial
  probe
  misc_feature (1)..(25): SEQ ID NO: 2575; WAN024GC9; Start 95; Stop 119
cctgtcagttctttgatatgagcat

SEQ ID NO: 330117 - DNA, 25 bp, Artificial
  probe
  misc_feature (1)..(25): SEQ ID NO: 2575; WAN024GC9; Start 136; Stop 160
attgacatccgtcgtatagtgatcg

SEQ ID NO: 330118 - DNA, 25 bp, Artificial
  probe
  misc_feature (1)..(25): SEQ ID NO: 2575; WAN024GC9; Start 91; Stop 115
caatcctgtcagttctttgatatga

SEQ ID NO: 330119 - DNA, 25 bp, Artificial
  probe
  misc_feature (1)..(25): SEQ ID NO: 2575; WAN024GC9; Start 105; Stop 129
ctttgatatgagcatccaagggttc

SEQ ID NO: 330120 - DNA, 25 bp, Artificial
  probe
  misc_feature (1)..(25): SEQ ID NO: 2575; WAN024GC9; Start 102; Stop 126
gttctttgatatgagcatccaaggg

SEQ ID NO: 330121 - DNA, 25 bp, Artificial
  probe
  misc_feature (1)..(25): SEQ ID NO: 2575; WAN024GC9; Start 92; Stop 116
aatcctgtcagttctttgatatgag

SEQ ID NO: 330122 - DNA, 25 bp, Artificial
  probe
  misc_feature (1)..(25): SEQ ID NO: 2575; WAN024GC9; Start 213; Stop 237
tactacctgtgctagttgcctctaa

SEQ ID NO: 330123 - DNA, 25 bp, Artificial
  probe
  misc_feature (1)..(25): SEQ ID NO: 2575; WAN024GC9; Start 212; Stop 236
ttactacctgtgctagttgcctcta

SEQ ID NO: 330124 - DNA, 25 bp, Artificial
  probe
  misc_feature (1)..(25): SEQ ID NO: 2575; WAN024GC9; Start 104; Stop 128
tctttgatatgagcatccaagggtt

SEQ ID NO: 330125 - DNA, 25 bp, Artificial
  probe
  misc_feature (1)..(25): SEQ ID NO: 2575; WAN024GC9; Start 103; Stop 127
ttctttgatatgagcatccaagggt

SEQ ID NO: 330126 - DNA, 25 bp, Artificial
  probe
  misc_feature (1)..(25): SEQ ID NO: 2575; WAN024GC9; Start 94; Stop 118
tcctgtcagttctttgatatgagca

SEQ ID NO: 330127 - DNA, 25 bp, Artificial
  probe
  misc_feature (1)..(25): SEQ ID NO: 2575; WAN024GC9; Start 182; Stop 206
acgacaattcccacttggataattt

SEQ ID NO: 330128 - DNA, 25 bp, Artificial
  probe
  misc_feature (1)..(25): SEQ ID NO: 2575; WAN024GC9; Start 106; Stop 130
tttgatatgagcatccaagggttca

SEQ ID NO: 330129 - DNA, 25 bp, Artificial
  probe
  misc_feature (1)..(25): SEQ ID NO: 2575; WAN024GC9; Start 85; Stop 109
gtctgtcaatcctgtcagttctttg

SEQ ID NO: 330130 - DNA, 25 bp, Artificial
  probe
  misc_feature (1)..(25): SEQ ID NO: 2575; WAN024GC9; Start 181; Stop 205
cacgacaattcccacttggataatt

SEQ ID NO: 330131 - DNA, 25 bp, Artificial
  probe
  misc_feature (1)..(25): SEQ ID NO: 2575; WAN024GC9; Start 83; Stop 107
tggtctgtcaatcctgtcagttctt

SEQ ID NO: 330132 - DNA, 25 bp, Artificial
  probe
  misc_feature (1)..(25): SEQ ID NO: 2575; WAN024GC9; Start 82; Stop 106
ttggtctgtcaatcctgtcagttct

SEQ ID NO: 330133 - DNA, 25 bp, Artificial
  probe
  misc_feature (1)..(25): SEQ ID NO: 2575; WAN024GC9; Start 81; Stop 105
gttggtctgtcaatcctgtcagttc

SEQ ID NO: 330134 - DNA, 25 bp, Artificial
  probe
  misc_feature (1)..(25): SEQ ID NO: 2575; WAN024GC9; Start 180; Stop 204
tcacgacaattcccacttggataat

SEQ ID NO: 330135 - DNA, 25 bp, Artificial
  probe
  misc_feature (1)..(25): SEQ ID NO: 2575; WAN024GC9; Start 179; Stop 203
atcacgacaattcccacttggataa

SEQ ID NO: 330136 - DNA, 25 bp, Artificial
  probe
  misc_feature (1)..(25): SEQ ID NO: 2575; WAN024GC9; Start 178; Stop 202
aatcacgacaattcccacttggata

SEQ ID NO: 330137 - DNA, 25 bp, Artificial
  probe
  misc_feature (1)..(25): SEQ ID NO: 2575; WAN024GC9; Start 84; Stop 108
ggtctgtcaatcctgtcagttcttt

SEQ ID NO: 330138 - DNA, 25 bp, Artificial
  probe
  misc_feature (1)..(25): SEQ ID NO: 2575; WAN024GC9; Start 211; Stop 235
cttactacctgtgctagttgcctct

SEQ ID NO: 330139 - DNA, 25 bp, Artificial
  probe
  misc_feature (1)..(25): SEQ ID NO: 2575; WAN024GC9; Start 191; Stop 215
cccacttggataattttagccttac

SEQ ID NO: 330140 - DNA, 25 bp, Artificial
  probe
  misc_feature (1)..(25): SEQ ID NO: 2575; WAN024GC9; Start 88; Stop 112
tgtcaatcctgtcagttctttgata

SEQ ID NO: 330141 - DNA, 25 bp, Artificial
  probe
  misc_feature (1)..(25): SEQ ID NO: 2576; WAN024B7F; Start 90; Stop 114
gactatatatcacggatacagttgg

SEQ ID NO: 330142 - DNA, 25 bp, Artificial
  probe
  misc_feature (1)..(25): SEQ ID NO: 2576; WAN024B7F; Start 95; Stop 119
tatatcacggatacagttgggaaag

SEQ ID NO: 330143 - DNA, 25 bp, Artificial
  probe
  misc_feature (1)..(25): SEQ ID NO: 2576; WAN024B7F; Start 89; Stop 113
tgactatatatcacggatacagttg

SEQ ID NO: 330144 - DNA, 25 bp, Artificial
  probe
  misc_feature (1)..(25): SEQ ID NO: 2576; WAN024B7F; Start 96; Stop 120
atatcacggatacagttgggaaaga

SEQ ID NO: 330145 - DNA, 25 bp, Artificial
  probe
  misc_feature (1)..(25): SEQ ID NO: 2576; WAN024B7F; Start 97; Stop 121
tatcacggatacagttgggaaagaa

SEQ ID NO: 330146 - DNA, 25 bp, Artificial
  probe
  misc_feature (1)..(25): SEQ ID NO: 2576; WAN024B7F; Start 94; Stop 118
atatatcacggatacagttgggaaa

SEQ ID NO: 330147 - DNA, 25 bp, Artificial
  probe
  misc_feature (1)..(25): SEQ ID NO: 2576; WAN024B7F; Start 91; Stop 115
actatatatcacggatacagttggg

SEQ ID NO: 330148 - DNA, 25 bp, Artificial
  probe
  misc_feature (1)..(25): SEQ ID NO: 2576; WAN024B7F; Start 98; Stop 122
atcacggatacagttgggaaagaag

SEQ ID NO: 330149 - DNA, 25 bp, Artificial
  probe
  misc_feature (1)..(25): SEQ ID NO: 2576; WAN024B7F; Start 92; Stop 116
ctatatatcacggatacagttggga

SEQ ID NO: 330150 - DNA, 25 bp, Artificial
  probe
  misc_feature (1)..(25): SEQ ID NO: 2576; WAN024B7F; Start 107; Stop 131
acagttgggaaagaagctatctaac

SEQ ID NO: 330151 - DNA, 25 bp, Artificial
  probe
  misc_feature (1)..(25): SEQ ID NO: 2576; WAN024B7F; Start 88; Stop 112
ttgactatatatcacggatacagtt

SEQ ID NO: 330152 - DNA, 25 bp, Artificial
  probe
  misc_feature (1)..(25): SEQ ID NO: 2576; WAN024B7F; Start 106; Stop 130
tacagttgggaaagaagctatctaa

SEQ ID NO: 330153 - DNA, 25 bp, Artificial
  probe
  misc_feature (1)..(25): SEQ ID NO: 2576; WAN024B7F; Start 93; Stop 117
tatatatcacggatacagttgggaa

SEQ ID NO: 330154 - DNA, 25 bp, Artificial
  probe
  misc_feature (1)..(25): SEQ ID NO: 2576; WAN024B7F; Start 105; Stop 129
atacagttgggaaagaagctatcta

SEQ ID NO: 330155 - DNA, 25 bp, Artificial
  probe
  misc_feature (1)..(25): SEQ ID NO: 2576; WAN024B7F; Start 104; Stop 128
gatacagttgggaaagaagctatct

SEQ ID NO: 330156 - DNA, 25 bp, Artificial
  probe
  misc_feature (1)..(25): SEQ ID NO: 2576; WAN024B7F; Start 87; Stop 111
attgactatatatcacggatacagt

SEQ ID NO: 330157 - DNA, 25 bp, Artificial
  probe
  misc_feature (1)..(25): SEQ ID NO: 2576; WAN024B7F; Start 103; Stop 127
ggatacagttgggaaagaagctatc

SEQ ID NO: 330158 - DNA, 25 bp, Artificial
  probe
  misc_feature (1)..(25): SEQ ID NO: 2576; WAN024B7F; Start 110; Stop 134
gttgggaaagaagctatctaactaa

SEQ ID NO: 330159 - DNA, 25 bp, Artificial
  probe
  misc_feature (1)..(25): SEQ ID NO: 2576; WAN024B7F; Start 102; Stop 126
cggatacagttgggaaagaagctat

SEQ ID NO: 330160 - DNA, 25 bp, Artificial
  probe
  misc_feature (1)..(25): SEQ ID NO: 2576; WAN024B7F; Start 111; Stop 135
ttgggaaagaagctatctaactaat

SEQ ID NO: 330161 - DNA, 25 bp, Artificial
  probe
  misc_feature (1)..(25): SEQ ID NO: 2576; WAN024B7F; Start 86; Stop 110
aattgactatatatcacggatacag

SEQ ID NO: 330162 - DNA, 25 bp, Artificial
  probe
  misc_feature (1)..(25): SEQ ID NO: 2576; WAN024B7F; Start 108; Stop 132
cagttgggaaagaagctatctaact

SEQ ID NO: 330163 - DNA, 25 bp, Artificial
  probe
  misc_feature (1)..(25): SEQ ID NO: 2576; WAN024B7F; Start 109; Stop 133
agttgggaaagaagctatctaacta

SEQ ID NO: 330164 - DNA, 25 bp, Artificial
  probe
  misc_feature (1)..(25): SEQ ID NO: 2576; WAN024B7F; Start 101; Stop 125
acggatacagttgggaaagaagcta

SEQ ID NO: 330165 - DNA, 25 bp, Artificial
  probe
  misc_feature (1)..(25): SEQ ID NO: 2576; WAN024B7F; Start 99; Stop 123
tcacggatacagttgggaaagaagc

SEQ ID NO: 330166 - DNA, 25 bp, Artificial
  probe
  misc_feature (1)..(25): SEQ ID NO: 2576; WAN024B7F; Start 85; Stop 109
caattgactatatatcacggataca

SEQ ID NO: 330167 - DNA, 25 bp, Artificial
  probe
  misc_feature (1)..(25): SEQ ID NO: 2576; WAN024B7F; Start 100; Stop 124
cacggatacagttgggaaagaagct

SEQ ID NO: 330168 - DNA, 25 bp, Artificial
  probe
  misc_feature (1)..(25): SEQ ID NO: 2577; WAN024B7J; Start 88; Stop 112
ttgactatattagaggcgagacatt

SEQ ID NO: 330169 - DNA, 25 bp, Artificial
  probe
  misc_feature (1)..(25): SEQ ID NO: 2577; WAN024B7J; Start 87; Stop 111
attgactatattagaggcgagacat

SEQ ID NO: 330170 - DNA, 25 bp, Artificial
  probe
  misc_feature (1)..(25): SEQ ID NO: 2577; WAN024B7J; Start 86; Stop 110
aattgactatattagaggcgagaca

SEQ ID NO: 330171 - DNA, 25 bp, Artificial
  probe
  misc_feature (1)..(25): SEQ ID NO: 2577; WAN024B7J; Start 89; Stop 113
tgactatattagaggcgagacattt

SEQ ID NO: 330172 - DNA, 25 bp, Artificial
  probe
  misc_feature (1)..(25): SEQ ID NO: 2577; WAN024B7J; Start 117; Stop 141
ggttctttgtcaactgctaactaat

SEQ ID NO: 330173 - DNA, 25 bp, Artificial
  probe
  misc_feature (1)..(25): SEQ ID NO: 2577; WAN024B7J; Start 116; Stop 140
cggttctttgtcaactgctaactaa

SEQ ID NO: 330174 - DNA, 25 bp, Artificial
  probe
  misc_feature (1)..(25): SEQ ID NO: 2577; WAN024B7J; Start 115; Stop 139
tcggttctttgtcaactgctaacta

SEQ ID NO: 330175 - DNA, 25 bp, Artificial
  probe
  misc_feature (1)..(25): SEQ ID NO: 2577; WAN024B7J; Start 113; Stop 137
tttcggttctttgtcaactgctaac

SEQ ID NO: 330176 - DNA, 25 bp, Artificial
  probe
  misc_feature (1)..(25): SEQ ID NO: 2577; WAN024B7J; Start 85; Stop 109
caattgactatattagaggcgagac

SEQ ID NO: 330177 - DNA, 25 bp, Artificial
  probe
  misc_feature (1)..(25): SEQ ID NO: 2577; WAN024B7J; Start 114; Stop 138
ttcggttctttgtcaactgctaact

SEQ ID NO: 330178 - DNA, 25 bp, Artificial
  probe
  misc_feature (1)..(25): SEQ ID NO: 2577; WAN024B7J; Start 90; Stop 114
gactatattagaggcgagacatttt

SEQ ID NO: 330179 - DNA, 25 bp, Artificial
  probe
  misc_feature (1)..(25): SEQ ID NO: 2577; WAN024B7J; Start 112; Stop 136
ttttcggttctttgtcaactgctaa

SEQ ID NO: 330180 - DNA, 25 bp, Artificial
  probe
  misc_feature (1)..(25): SEQ ID NO: 2578; WAN024FVS; Start 86; Stop 110
aagcagactatcagcaagaactatc

SEQ ID NO: 330181 - DNA, 25 bp, Artificial
  probe
  misc_feature (1)..(25): SEQ ID NO: 2578; WAN024FVS; Start 85; Stop 109
gaagcagactatcagcaagaactat

SEQ ID NO: 330182 - DNA, 25 bp, Artificial
  probe
  misc_feature (1)..(25): SEQ ID NO: 2578; WAN024FVS; Start 88; Stop 112
gcagactatcagcaagaactatcta

SEQ ID NO: 330183 - DNA, 25 bp, Artificial
  probe
  misc_feature (1)..(25): SEQ ID NO: 2578; WAN024FVS; Start 84; Stop 108
agaagcagactatcagcaagaacta

SEQ ID NO: 330184 - DNA, 25 bp, Artificial
  probe
  misc_feature (1)..(25): SEQ ID NO: 2578; WAN024FVS; Start 87; Stop 111
agcagactatcagcaagaactatct

SEQ ID NO: 330185 - DNA, 25 bp, Artificial
  probe
  misc_feature (1)..(25): SEQ ID NO: 2578; WAN024FVS; Start 149; Stop 173
ttggtatctcggtgactatgattcg

SEQ ID NO: 330186 - DNA, 25 bp, Artificial
  probe
  misc_feature (1)..(25): SEQ ID NO: 2578; WAN024FVS; Start 499; Stop 523
gattattacatggagacagagaacc

SEQ ID NO: 330187 - DNA, 25 bp, Artificial
  probe
  misc_feature (1)..(25): SEQ ID NO: 2578; WAN024FVS; Start 83; Stop 107
gagaagcagactatcagcaagaact

SEQ ID NO: 330188 - DNA, 25 bp, Artificial
  probe
  misc_feature (1)..(25): SEQ ID NO: 2578; WAN024FVS; Start 79; Stop 103
gtaggagaagcagactatcagcaag

SEQ ID NO: 330189 - DNA, 25 bp, Artificial
  probe
  misc_feature (1)..(25): SEQ ID NO: 2578; WAN024FVS; Start 512; Stop 536
agacagagaaccaagtggacttatc

SEQ ID NO: 330190 - DNA, 25 bp, Artificial
  probe
  misc_feature (1)..(25): SEQ ID NO: 2578; WAN024FVS; Start 511; Stop 535
gagacagagaaccaagtggacttat

SEQ ID NO: 330191 - DNA, 25 bp, Artificial
  probe
  misc_feature (1)..(25): SEQ ID NO: 2578; WAN024FVS; Start 80; Stop 104
taggagaagcagactatcagcaaga

SEQ ID NO: 330192 - DNA, 25 bp, Artificial
  probe
  misc_feature (1)..(25): SEQ ID NO: 2578; WAN024FVS; Start 89; Stop 113
cagactatcagcaagaactatctaa

SEQ ID NO: 330193 - DNA, 25 bp, Artificial
  probe
  misc_feature (1)..(25): SEQ ID NO: 2578; WAN024FVS; Start 519; Stop 543
gaaccaagtggacttatcaggagaa

SEQ ID NO: 330194 - DNA, 25 bp, Artificial
  probe
  misc_feature (1)..(25): SEQ ID NO: 2578; WAN024FVS; Start 514; Stop 538
acagagaaccaagtggacttatcag

SEQ ID NO: 330195 - DNA, 25 bp, Artificial
  probe
  misc_feature (1)..(25): SEQ ID NO: 2578; WAN024FVS; Start 513; Stop 537
gacagagaaccaagtggacttatca

SEQ ID NO: 330196 - DNA, 25 bp, Artificial
  probe
  misc_feature (1)..(25): SEQ ID NO: 2578; WAN024FVS; Start 498; Stop 522
tgattattacatggagacagagaac

SEQ ID NO: 330197 - DNA, 25 bp, Artificial
  probe
  misc_feature (1)..(25): SEQ ID NO: 2578; WAN024FVS; Start 148; Stop 172
tttggtatctcggtgactatgattc

SEQ ID NO: 330198 - DNA, 25 bp, Artificial
  probe
  misc_feature (1)..(25): SEQ ID NO: 2578; WAN024FVS; Start 147; Stop 171
gtttggtatctcggtgactatgatt

SEQ ID NO: 330199 - DNA, 25 bp, Artificial
  probe
  misc_feature (1)..(25): SEQ ID NO: 2578; WAN024FVS; Start 218; Stop 242
gtcgtcagtttaccaagaaagtatt

SEQ ID NO: 330200 - DNA, 25 bp, Artificial
  probe
  misc_feature (1)..(25): SEQ ID NO: 2578; WAN024FVS; Start 517; Stop 541
gagaaccaagtggacttatcaggag

SEQ ID NO: 330201 - DNA, 25 bp, Artificial
  probe
  misc_feature (1)..(25): SEQ ID NO: 2578; WAN024FVS; Start 502; Stop 526
tattacatggagacagagaaccaag

SEQ ID NO: 330202 - DNA, 25 bp, Artificial
  probe
  misc_feature (1)..(25): SEQ ID NO: 2578; WAN024FVS; Start 484; Stop 508
accaagggctactatgattattaca

SEQ ID NO: 330203 - DNA, 25 bp, Artificial
  probe
  misc_feature (1)..(25): SEQ ID NO: 2578; WAN024FVS; Start 75; Stop 99
ctttgtaggagaagcagactatcag

SEQ ID NO: 330204 - DNA, 25 bp, Artificial
  probe
  misc_feature (1)..(25): SEQ ID NO: 2578; WAN024FVS; Start 78; Stop 102
tgtaggagaagcagactatcagcaa

SEQ ID NO: 330205 - DNA, 25 bp, Artificial
  probe
  misc_feature (1)..(25): SEQ ID NO: 2578; WAN024FVS; Start 77; Stop 101
ttgtaggagaagcagactatcagca

SEQ ID NO: 330206 - DNA, 25 bp, Artificial
  probe
  misc_feature (1)..(25): SEQ ID NO: 2578; WAN024FVS; Start 501; Stop 525
ttattacatggagacagagaaccaa

SEQ ID NO: 330207 - DNA, 25 bp, Artificial
  probe
  misc_feature (1)..(25): SEQ ID NO: 2578; WAN024FVS; Start 217; Stop 241
cgtcgtcagtttaccaagaaagtat

SEQ ID NO: 330208 - DNA, 25 bp, Artificial
  probe
  misc_feature (1)..(25): SEQ ID NO: 2578; WAN024FVS; Start 515; Stop 539
cagagaaccaagtggacttatcagg

SEQ ID NO: 330209 - DNA, 25 bp, Artificial
  probe
  misc_feature (1)..(25): SEQ ID NO: 2578; WAN024FVS; Start 500; Stop 524
attattacatggagacagagaacca

SEQ ID NO: 330210 - DNA, 25 bp, Artificial
  probe
  misc_feature (1)..(25): SEQ ID NO: 2578; WAN024FVS; Start 480; Stop 504
ggtaaccaagggctactatgattat

SEQ ID NO: 330211 - DNA, 25 bp, Artificial
  probe
  misc_feature (1)..(25): SEQ ID NO: 2578; WAN024FVS; Start 283; Stop 307
aaggatttggctaggtattacgatg

SEQ ID NO: 330212 - DNA, 25 bp, Artificial
  probe
  misc_feature (1)..(25): SEQ ID NO: 2578; WAN024FVS; Start 74; Stop 98
tctttgtaggagaagcagactatca

SEQ ID NO: 330213 - DNA, 25 bp, Artificial
  probe
  misc_feature (1)..(25): SEQ ID NO: 2579; WAN024FS6; Start 585; Stop 609
aatcaacctcaagtatgtcaaggaa

SEQ ID NO: 330214 - DNA, 25 bp, Artificial
  probe
  misc_feature (1)..(25): SEQ ID NO: 2579; WAN024FS6; Start 586; Stop 610
atcaacctcaagtatgtcaaggaag

SEQ ID NO: 330215 - DNA, 25 bp, Artificial
  probe
  misc_feature (1)..(25): SEQ ID NO: 2579; WAN024FS6; Start 589; Stop 613
aacctcaagtatgtcaaggaagttc

SEQ ID NO: 330216 - DNA, 25 bp, Artificial
  probe
  misc_feature (1)..(25): SEQ ID NO: 2579; WAN024FS6; Start 588; Stop 612
caacctcaagtatgtcaaggaagtt

SEQ ID NO: 330217 - DNA, 25 bp, Artificial
  probe
  misc_feature (1)..(25): SEQ ID NO: 2579; WAN024FS6; Start 38; Stop 62
ttgatatggctgatatgaacggtca

SEQ ID NO: 330218 - DNA, 25 bp, Artificial
  probe
  misc_feature (1)..(25): SEQ ID NO: 2579; WAN024FS6; Start 587; Stop 611
tcaacctcaagtatgtcaaggaagt

SEQ ID NO: 330219 - DNA, 25 bp, Artificial
  probe
  misc_feature (1)..(25): SEQ ID NO: 2579; WAN024FS6; Start 497; Stop 521
tgaatggtcatgtcaataacagtaa

SEQ ID NO: 330220 - DNA, 25 bp, Artificial
  probe
  misc_feature (1)..(25): SEQ ID NO: 2579; WAN024FS6; Start 37; Stop 61
tttgatatggctgatatgaacggtc

SEQ ID NO: 330221 - DNA, 25 bp, Artificial
  probe
  misc_feature (1)..(25): SEQ ID NO: 2579; WAN024FS6; Start 54; Stop 78
gaacggtcatatcaaacttccagat

SEQ ID NO: 330222 - DNA, 25 bp, Artificial
  probe
  misc_feature (1)..(25): SEQ ID NO: 2579; WAN024FS6; Start 561; Stop 585
tttgacccactatattcccaagaaa

SEQ ID NO: 330223 - DNA, 25 bp, Artificial
  probe
  misc_feature (1)..(25): SEQ ID NO: 2579; WAN024FS6; Start 55; Stop 79
aacggtcatatcaaacttccagatg

SEQ ID NO: 330224 - DNA, 25 bp, Artificial
  probe
  misc_feature (1)..(25): SEQ ID NO: 2579; WAN024FS6; Start 58; Stop 82
ggtcatatcaaacttccagatgtga

SEQ ID NO: 330225 - DNA, 25 bp, Artificial
  probe
  misc_feature (1)..(25): SEQ ID NO: 2579; WAN024FS6; Start 457; Stop 481
atcagcaaggattaccatgttcgtt

SEQ ID NO: 330226 - DNA, 25 bp, Artificial
  probe
  misc_feature (1)..(25): SEQ ID NO: 2579; WAN024FS6; Start 660; Stop 684
aagcaagcatgaaattacaagtgat

SEQ ID NO: 330227 - DNA, 25 bp, Artificial
  probe
  misc_feature (1)..(25): SEQ ID NO: 2579; WAN024FS6; Start 659; Stop 683
aaagcaagcatgaaattacaagtga

SEQ ID NO: 330228 - DNA, 25 bp, Artificial
  probe
  misc_feature (1)..(25): SEQ ID NO: 2579; WAN024FS6; Start 658; Stop 682
gaaagcaagcatgaaattacaagtg

SEQ ID NO: 330229 - DNA, 25 bp, Artificial
  probe
  misc_feature (1)..(25): SEQ ID NO: 2579; WAN024FS6; Start 590; Stop 614
acctcaagtatgtcaaggaagttcg

SEQ ID NO: 330230 - DNA, 25 bp, Artificial
  probe
  misc_feature (1)..(25): SEQ ID NO: 2579; WAN024FS6; Start 483; Stop 507
ttacgacttggatatgaatggtcat

SEQ ID NO: 330231 - DNA, 25 bp, Artificial
  probe
  misc_feature (1)..(25): SEQ ID NO: 2579; WAN024FS6; Start 592; Stop 616
ctcaagtatgtcaaggaagttcgac

SEQ ID NO: 330232 - DNA, 25 bp, Artificial
  probe
  misc_feature (1)..(25): SEQ ID NO: 2579; WAN024FS6; Start 57; Stop 81
cggtcatatcaaacttccagatgtg

SEQ ID NO: 330233 - DNA, 25 bp, Artificial
  probe
  misc_feature (1)..(25): SEQ ID NO: 2579; WAN024FS6; Start 657; Stop 681
ggaaagcaagcatgaaattacaagt

SEQ ID NO: 330234 - DNA, 25 bp, Artificial
  probe
  misc_feature (1)..(25): SEQ ID NO: 2579; WAN024FS6; Start 656; Stop 680
tggaaagcaagcatgaaattacaag

SEQ ID NO: 330235 - DNA, 25 bp, Artificial
  probe
  misc_feature (1)..(25): SEQ ID NO: 2579; WAN024FS6; Start 655; Stop 679
ctggaaagcaagcatgaaattacaa

SEQ ID NO: 330236 - DNA, 25 bp, Artificial
  probe
  misc_feature (1)..(25): SEQ ID NO: 2579; WAN024FS6; Start 482; Stop 506
tttacgacttggatatgaatggtca

SEQ ID NO: 330237 - DNA, 25 bp, Artificial
  probe
  misc_feature (1)..(25): SEQ ID NO: 2579; WAN024FS6; Start 661; Stop 685
agcaagcatgaaattacaagtgatg

SEQ ID NO: 330238 - DNA, 25 bp, Artificial
  probe
  misc_feature (1)..(25): SEQ ID NO: 2579; WAN024FS6; Start 488; Stop 512
acttggatatgaatggtcatgtcaa

SEQ ID NO: 330239 - DNA, 25 bp, Artificial
  probe
  misc_feature (1)..(25): SEQ ID NO: 2579; WAN024FS6; Start 701; Stop 725
aagcaatcattacttggcaagaaat

SEQ ID NO: 330240 - DNA, 25 bp, Artificial
  probe
  misc_feature (1)..(25): SEQ ID NO: 2579; WAN024FS6; Start 653; Stop 677
gactggaaagcaagcatgaaattac

SEQ ID NO: 330241 - DNA, 25 bp, Artificial
  probe
  misc_feature (1)..(25): SEQ ID NO: 2579; WAN024FS6; Start 484; Stop 508
tacgacttggatatgaatggtcatg

SEQ ID NO: 330242 - DNA, 25 bp, Artificial
  probe
  misc_feature (1)..(25): SEQ ID NO: 2579; WAN024FS6; Start 663; Stop 687
caagcatgaaattacaagtgatggg

SEQ ID NO: 330243 - DNA, 25 bp, Artificial
  probe
  misc_feature (1)..(25): SEQ ID NO: 2579; WAN024FS6; Start 487; Stop 511
gacttggatatgaatggtcatgtca

SEQ ID NO: 330244 - DNA, 25 bp, Artificial
  probe
  misc_feature (1)..(25): SEQ ID NO: 2579; WAN024FS6; Start 56; Stop 80
acggtcatatcaaacttccagatgt

SEQ ID NO: 330245 - DNA, 25 bp, Artificial
  probe
  misc_feature (1)..(25): SEQ ID NO: 2579; WAN024FS6; Start 584; Stop 608
aaatcaacctcaagtatgtcaagga

SEQ ID NO: 330246 - DNA, 25 bp, Artificial
  probe
  misc_feature (1)..(25): SEQ ID NO: 2580; WAN024G5W; Start 76; Stop 100
tcttccgacaatacagtagatgatt

SEQ ID NO: 330247 - DNA, 25 bp, Artificial
  probe
  misc_feature (1)..(25): SEQ ID NO: 2580; WAN024G5W; Start 75; Stop 99
ttcttccgacaatacagtagatgat

SEQ ID NO: 330248 - DNA, 25 bp, Artificial
  probe
  misc_feature (1)..(25): SEQ ID NO: 2580; WAN024G5W; Start 162; Stop 186
catcattaatcgccttagcaagttg

SEQ ID NO: 330249 - DNA, 25 bp, Artificial
  probe
  misc_feature (1)..(25): SEQ ID NO: 2580; WAN024G5W; Start 161; Stop 185
tcatcattaatcgccttagcaagtt

SEQ ID NO: 330250 - DNA, 25 bp, Artificial
  probe
  misc_feature (1)..(25): SEQ ID NO: 2580; WAN024G5W; Start 160; Stop 184
gtcatcattaatcgccttagcaagt

SEQ ID NO: 330251 - DNA, 25 bp, Artificial
  probe
  misc_feature (1)..(25): SEQ ID NO: 2580; WAN024G5W; Start 237; Stop 261
caccaatcaaatcaataacacgaga

SEQ ID NO: 330252 - DNA, 25 bp, Artificial
  probe
  misc_feature (1)..(25): SEQ ID NO: 2580; WAN024G5W; Start 236; Stop 260
tcaccaatcaaatcaataacacgag

SEQ ID NO: 330253 - DNA, 25 bp, Artificial
  probe
  misc_feature (1)..(25): SEQ ID NO: 2580; WAN024G5W; Start 229; Stop 253
tcctccttcaccaatcaaatcaata

SEQ ID NO: 330254 - DNA, 25 bp, Artificial
  probe
  misc_feature (1)..(25): SEQ ID NO: 2580; WAN024G5W; Start 227; Stop 251
tatcctccttcaccaatcaaatcaa

SEQ ID NO: 330255 - DNA, 25 bp, Artificial
  probe
  misc_feature (1)..(25): SEQ ID NO: 2580; WAN024G5W; Start 228; Stop 252
atcctccttcaccaatcaaatcaat

SEQ ID NO: 330256 - DNA, 25 bp, Artificial
  probe
  misc_feature (1)..(25): SEQ ID NO: 2580; WAN024G5W; Start 226; Stop 250
atatcctccttcaccaatcaaatca

SEQ ID NO: 330257 - DNA, 25 bp, Artificial
  probe
  misc_feature (1)..(25): SEQ ID NO: 2580; WAN024G5W; Start 235; Stop 259
ttcaccaatcaaatcaataacacga

SEQ ID NO: 330258 - DNA, 25 bp, Artificial
  probe
  misc_feature (1)..(25): SEQ ID NO: 2580; WAN024G5W; Start 225; Stop 249
catatcctccttcaccaatcaaatc

SEQ ID NO: 330259 - DNA, 25 bp, Artificial
  probe
  misc_feature (1)..(25): SEQ ID NO: 2580; WAN024G5W; Start 234; Stop 258
cttcaccaatcaaatcaataacacg

SEQ ID NO: 330260 - DNA, 25 bp, Artificial
  probe
  misc_feature (1)..(25): SEQ ID NO: 2580; WAN024G5W; Start 230; Stop 254
cctccttcaccaatcaaatcaataa

SEQ ID NO: 330261 - DNA, 25 bp, Artificial
  probe
  misc_feature (1)..(25): SEQ ID NO: 2580; WAN024G5W; Start 163; Stop 187
atcattaatcgccttagcaagttgg

SEQ ID NO: 330262 - DNA, 25 bp, Artificial
  probe
  misc_feature (1)..(25): SEQ ID NO: 2580; WAN024G5W; Start 238; Stop 262
accaatcaaatcaataacacgagaa

SEQ ID NO: 330263 - DNA, 25 bp, Artificial
  probe
  misc_feature (1)..(25): SEQ ID NO: 2580; WAN024G5W; Start 62; Stop 86
ttcacaatttcatttcttccgacaa

SEQ ID NO: 330264 - DNA, 25 bp, Artificial
  probe
  misc_feature (1)..(25): SEQ ID NO: 2580; WAN024G5W; Start 61; Stop 85
tttcacaatttcatttcttccgaca

SEQ ID NO: 330265 - DNA, 25 bp, Artificial
  probe
  misc_feature (1)..(25): SEQ ID NO: 2580; WAN024G5W; Start 63; Stop 87
tcacaatttcatttcttccgacaat

SEQ ID NO: 330266 - DNA, 25 bp, Artificial
  probe
  misc_feature (1)..(25): SEQ ID NO: 2580; WAN024G5W; Start 68; Stop 92
atttcatttcttccgacaatacagt

SEQ ID NO: 330267 - DNA, 25 bp, Artificial
  probe
  misc_feature (1)..(25): SEQ ID NO: 2580; WAN024G5W; Start 233; Stop 257
ccttcaccaatcaaatcaataacac

SEQ ID NO: 330268 - DNA, 25 bp, Artificial
  probe
  misc_feature (1)..(25): SEQ ID NO: 2580; WAN024G5W; Start 232; Stop 256
tccttcaccaatcaaatcaataaca

SEQ ID NO: 330269 - DNA, 25 bp, Artificial
  probe
  misc_feature (1)..(25): SEQ ID NO: 2580; WAN024G5W; Start 70; Stop 94
ttcatttcttccgacaatacagtag

SEQ ID NO: 330270 - DNA, 25 bp, Artificial
  probe
  misc_feature (1)..(25): SEQ ID NO: 2580; WAN024G5W; Start 224; Stop 248
gcatatcctccttcaccaatcaaat

SEQ ID NO: 330271 - DNA, 25 bp, Artificial
  probe
  misc_feature (1)..(25): SEQ ID NO: 2580; WAN024G5W; Start 74; Stop 98
tttcttccgacaatacagtagatga

SEQ ID NO: 330272 - DNA, 25 bp, Artificial
  probe
  misc_feature (1)..(25): SEQ ID NO: 2580; WAN024G5W; Start 71; Stop 95
tcatttcttccgacaatacagtaga

SEQ ID NO: 330273 - DNA, 25 bp, Artificial
  probe
  misc_feature (1)..(25): SEQ ID NO: 2580; WAN024G5W; Start 77; Stop 101
cttccgacaatacagtagatgattt

SEQ ID NO: 330274 - DNA, 25 bp, Artificial
  probe
  misc_feature (1)..(25): SEQ ID NO: 2580; WAN024G5W; Start 159; Stop 183
ggtcatcattaatcgccttagcaag

SEQ ID NO: 330275 - DNA, 25 bp, Artificial
  probe
  misc_feature (1)..(25): SEQ ID NO: 2580; WAN024G5W; Start 69; Stop 93
tttcatttcttccgacaatacagta

SEQ ID NO: 330276 - DNA, 25 bp, Artificial
  probe
  misc_feature (1)..(25): SEQ ID NO: 2580; WAN024G5W; Start 239; Stop 263
ccaatcaaatcaataacacgagaaa

SEQ ID NO: 330277 - DNA, 25 bp, Artificial
  probe
  misc_feature (1)..(25): SEQ ID NO: 2580; WAN024G5W; Start 231; Stop 255
ctccttcaccaatcaaatcaataac

SEQ ID NO: 330278 - DNA, 25 bp, Artificial
  probe
  misc_feature (1)..(25): SEQ ID NO: 2580; WAN024G5W; Start 73; Stop 97
atttcttccgacaatacagtagatg

SEQ ID NO: 330279 - DNA, 25 bp, Artificial
  probe
  misc_feature (1)..(25): SEQ ID NO: 2581; WAN024DNQ; Start 67; Stop 91
caacttatctggtttgaaacatggt

SEQ ID NO: 330280 - DNA, 25 bp, Artificial
  probe
  misc_feature (1)..(25): SEQ ID NO: 2581; WAN024DNQ; Start 68; Stop 92
aacttatctggtttgaaacatggtt

SEQ ID NO: 330281 - DNA, 25 bp, Artificial
  probe
  misc_feature (1)..(25): SEQ ID NO: 2581; WAN024DNQ; Start 69; Stop 93
acttatctggtttgaaacatggttt

SEQ ID NO: 330282 - DNA, 25 bp, Artificial
  probe
  misc_feature (1)..(25): SEQ ID NO: 2581; WAN024DNQ; Start 66; Stop 90
tcaacttatctggtttgaaacatgg

SEQ ID NO: 330283 - DNA, 25 bp, Artificial
  probe
  misc_feature (1)..(25): SEQ ID NO: 2581; WAN024DNQ; Start 59; Stop 83
gttggattcaacttatctggtttga

SEQ ID NO: 330284 - DNA, 25 bp, Artificial
  probe
  misc_feature (1)..(25): SEQ ID NO: 2581; WAN024DNQ; Start 72; Stop 96
tatctggtttgaaacatggttttgg

SEQ ID NO: 330285 - DNA, 25 bp, Artificial
  probe
  misc_feature (1)..(25): SEQ ID NO: 2581; WAN024DNQ; Start 71; Stop 95
ttatctggtttgaaacatggttttg

SEQ ID NO: 330286 - DNA, 25 bp, Artificial
  probe
  misc_feature (1)..(25): SEQ ID NO: 2581; WAN024DNQ; Start 70; Stop 94
cttatctggtttgaaacatggtttt

SEQ ID NO: 330287 - DNA, 25 bp, Artificial
  probe
  misc_feature (1)..(25): SEQ ID NO: 2581; WAN024DNQ; Start 73; Stop 97
atctggtttgaaacatggttttggg

SEQ ID NO: 330288 - DNA, 25 bp, Artificial
  probe
  misc_feature (1)..(25): SEQ ID NO: 2581; WAN024DNQ; Start 61; Stop 85
tggattcaacttatctggtttgaaa

SEQ ID NO: 330289 - DNA, 25 bp, Artificial
  probe
  misc_feature (1)..(25): SEQ ID NO: 2581; WAN024DNQ; Start 60; Stop 84
ttggattcaacttatctggtttgaa

SEQ ID NO: 330290 - DNA, 25 bp, Artificial
  probe
  misc_feature (1)..(25): SEQ ID NO: 2581; WAN024DNQ; Start 62; Stop 86
ggattcaacttatctggtttgaaac

SEQ ID NO: 330291 - DNA, 25 bp, Artificial
  probe
  misc_feature (1)..(25): SEQ ID NO: 2581; WAN024DNQ; Start 65; Stop 89
ttcaacttatctggtttgaaacatg

SEQ ID NO: 330292 - DNA, 25 bp, Artificial
  probe
  misc_feature (1)..(25): SEQ ID NO: 2581; WAN024DNQ; Start 63; Stop 87
gattcaacttatctggtttgaaaca

SEQ ID NO: 330293 - DNA, 25 bp, Artificial
  probe
  misc_feature (1)..(25): SEQ ID NO: 2581; WAN024DNQ; Start 64; Stop 88
attcaacttatctggtttgaaacat

SEQ ID NO: 330294 - DNA, 25 bp, Artificial
  probe
  misc_feature (1)..(25): SEQ ID NO: 2581; WAN024DNQ; Start 75; Stop 99
ctggtttgaaacatggttttgggga

SEQ ID NO: 330295 - DNA, 25 bp, Artificial
  probe
  misc_feature (1)..(25): SEQ ID NO: 2581; WAN024DNQ; Start 74; Stop 98
tctggtttgaaacatggttttgggg

SEQ ID NO: 330296 - DNA, 25 bp, Artificial
  probe
  misc_feature (1)..(25): SEQ ID NO: 2582; WAN024CMA; Start 139; Stop 163
gaggtgtctgtaatagatatggagc

SEQ ID NO: 330297 - DNA, 25 bp, Artificial
  probe
  misc_feature (1)..(25): SEQ ID NO: 2582; WAN024CMA; Start 136; Stop 160
cctgaggtgtctgtaatagatatgg

SEQ ID NO: 330298 - DNA, 25 bp, Artificial
  probe
  misc_feature (1)..(25): SEQ ID NO: 2582; WAN024CMA; Start 138; Stop 162
tgaggtgtctgtaatagatatggag

SEQ ID NO: 330299 - DNA, 25 bp, Artificial
  probe
  misc_feature (1)..(25): SEQ ID NO: 2582; WAN024CMA; Start 137; Stop 161
ctgaggtgtctgtaatagatatgga

SEQ ID NO: 330300 - DNA, 25 bp, Artificial
  probe
  misc_feature (1)..(25): SEQ ID NO: 2582; WAN024CMA; Start 135; Stop 159
tcctgaggtgtctgtaatagatatg

SEQ ID NO: 330301 - DNA, 25 bp, Artificial
  probe
  misc_feature (1)..(25): SEQ ID NO: 2582; WAN024CMA; Start 133; Stop 157
aatcctgaggtgtctgtaatagata

SEQ ID NO: 330302 - DNA, 25 bp, Artificial
  probe
  misc_feature (1)..(25): SEQ ID NO: 2582; WAN024CMA; Start 132; Stop 156
taatcctgaggtgtctgtaatagat

SEQ ID NO: 330303 - DNA, 25 bp, Artificial
  probe
  misc_feature (1)..(25): SEQ ID NO: 2582; WAN024CMA; Start 131; Stop 155
ataatcctgaggtgtctgtaataga

SEQ ID NO: 330304 - DNA, 25 bp, Artificial
  probe
  misc_feature (1)..(25): SEQ ID NO: 2582; WAN024CMA; Start 134; Stop 158
atcctgaggtgtctgtaatagatat

SEQ ID NO: 330305 - DNA, 25 bp, Artificial
  probe
  misc_feature (1)..(25): SEQ ID NO: 2582; WAN024CMA; Start 130; Stop 154
aataatcctgaggtgtctgtaatag

SEQ ID NO: 330306 - DNA, 25 bp, Artificial
  probe
  misc_feature (1)..(25): SEQ ID NO: 2582; WAN024CMA; Start 140; Stop 164
aggtgtctgtaatagatatggagct

SEQ ID NO: 330307 - DNA, 25 bp, Artificial
  probe
  misc_feature (1)..(25): SEQ ID NO: 2582; WAN024CMA; Start 141; Stop 165
ggtgtctgtaatagatatggagcta

SEQ ID NO: 330308 - DNA, 25 bp, Artificial
  probe
  misc_feature (1)..(25): SEQ ID NO: 2582; WAN024CMA; Start 64; Stop 88
aaatcaggcatagatgttcaagttg

SEQ ID NO: 330309 - DNA, 25 bp, Artificial
  probe
  misc_feature (1)..(25): SEQ ID NO: 2582; WAN024CMA; Start 125; Stop 149
agttaaataatcctgaggtgtctgt

SEQ ID NO: 330310 - DNA, 25 bp, Artificial
  probe
  misc_feature (1)..(25): SEQ ID NO: 2582; WAN024CMA; Start 14; Stop 38
ttgctattgatttatttaacggtgc

SEQ ID NO: 330311 - DNA, 25 bp, Artificial
  probe
  misc_feature (1)..(25): SEQ ID NO: 2582; WAN024CMA; Start 85; Stop 109
gttgctgttgaaattgattccgtag

SEQ ID NO: 330312 - DNA, 25 bp, Artificial
  probe
  misc_feature (1)..(25): SEQ ID NO: 2582; WAN024CMA; Start 124; Stop 148
aagttaaataatcctgaggtgtctg

SEQ ID NO: 330313 - DNA, 25 bp, Artificial
  probe
  misc_feature (1)..(25): SEQ ID NO: 2582; WAN024CMA; Start 84; Stop 108
agttgctgttgaaattgattccgta

SEQ ID NO: 330314 - DNA, 25 bp, Artificial
  probe
  misc_feature (1)..(25): SEQ ID NO: 2582; WAN024CMA; Start 126; Stop 150
gttaaataatcctgaggtgtctgta

SEQ ID NO: 330315 - DNA, 25 bp, Artificial
  probe
  misc_feature (1)..(25): SEQ ID NO: 2582; WAN024CMA; Start 143; Stop 167
tgtctgtaatagatatggagctaac

SEQ ID NO: 330316 - DNA, 25 bp, Artificial
  probe
  misc_feature (1)..(25): SEQ ID NO: 2582; WAN024CMA; Start 142; Stop 166
gtgtctgtaatagatatggagctaa

SEQ ID NO: 330317 - DNA, 25 bp, Artificial
  probe
  misc_feature (1)..(25): SEQ ID NO: 2582; WAN024CMA; Start 82; Stop 106
caagttgctgttgaaattgattccg

SEQ ID NO: 330318 - DNA, 25 bp, Artificial
  probe
  misc_feature (1)..(25): SEQ ID NO: 2582; WAN024CMA; Start 83; Stop 107
aagttgctgttgaaattgattccgt

SEQ ID NO: 330319 - DNA, 25 bp, Artificial
  probe
  misc_feature (1)..(25): SEQ ID NO: 2582; WAN024CMA; Start 91; Stop 115
gttgaaattgattccgtagctgtta

SEQ ID NO: 330320 - DNA, 25 bp, Artificial
  probe
  misc_feature (1)..(25): SEQ ID NO: 2582; WAN024CMA; Start 144; Stop 168
gtctgtaatagatatggagctaact

SEQ ID NO: 330321 - DNA, 25 bp, Artificial
  probe
  misc_feature (1)..(25): SEQ ID NO: 2582; WAN024CMA; Start 93; Stop 117
tgaaattgattccgtagctgttaaa

SEQ ID NO: 330322 - DNA, 25 bp, Artificial
  probe
  misc_feature (1)..(25): SEQ ID NO: 2582; WAN024CMA; Start 92; Stop 116
ttgaaattgattccgtagctgttaa

SEQ ID NO: 330323 - DNA, 25 bp, Artificial
  probe
  misc_feature (1)..(25): SEQ ID NO: 2582; WAN024CMA; Start 12; Stop 36
tgttgctattgatttatttaacggt

SEQ ID NO: 330324 - DNA, 25 bp, Artificial
  probe
  misc_feature (1)..(25): SEQ ID NO: 2582; WAN024CMA; Start 19; Stop 43
attgatttatttaacggtgcaggtg

SEQ ID NO: 330325 - DNA, 25 bp, Artificial
  probe
  misc_feature (1)..(25): SEQ ID NO: 2582; WAN024CMA; Start 127; Stop 151
ttaaataatcctgaggtgtctgtaa

SEQ ID NO: 330326 - DNA, 25 bp, Artificial
  probe
  misc_feature (1)..(25): SEQ ID NO: 2582; WAN024CMA; Start 13; Stop 37
gttgctattgatttatttaacggtg

SEQ ID NO: 330327 - DNA, 25 bp, Artificial
  probe
  misc_feature (1)..(25): SEQ ID NO: 2582; WAN024CMA; Start 16; Stop 40
gctattgatttatttaacggtgcag

SEQ ID NO: 330328 - DNA, 25 bp, Artificial
  probe
  misc_feature (1)..(25): SEQ ID NO: 2582; WAN024CMA; Start 65; Stop 89
aatcaggcatagatgttcaagttgc

SEQ ID NO: 330329 - DNA, 25 bp, Artificial
  probe
  misc_feature (1)..(25): SEQ ID NO: 2583; WAN024C3Z; Start 586; Stop 610
atcgtagatgtctatatccgctatc

SEQ ID NO: 330330 - DNA, 25 bp, Artificial
  probe
  misc_feature (1)..(25): SEQ ID NO: 2583; WAN024C3Z; Start 583; Stop 607
aatatcgtagatgtctatatccgct

SEQ ID NO: 330331 - DNA, 25 bp, Artificial
  probe
  misc_feature (1)..(25): SEQ ID NO: 2583; WAN024C3Z; Start 121; Stop 145
atggctcttcagacagactatgatt

SEQ ID NO: 330332 - DNA, 25 bp, Artificial
  probe
  misc_feature (1)..(25): SEQ ID NO: 2583; WAN024C3Z; Start 447; Stop 471
ttatcgtggtgaagagatgattgct

SEQ ID NO: 330333 - DNA, 25 bp, Artificial
  probe
  misc_feature (1)..(25): SEQ ID NO: 2583; WAN024C3Z; Start 585; Stop 609
tatcgtagatgtctatatccgctat

SEQ ID NO: 330334 - DNA, 25 bp, Artificial
  probe
  misc_feature (1)..(25): SEQ ID NO: 2583; WAN024C3Z; Start 584; Stop 608
atatcgtagatgtctatatccgcta

SEQ ID NO: 330335 - DNA, 25 bp, Artificial
  probe
  misc_feature (1)..(25): SEQ ID NO: 2583; WAN024C3Z; Start 543; Stop 567
gttggaaagtgtttggaagtatgaa

SEQ ID NO: 330336 - DNA, 25 bp, Artificial
  probe
  misc_feature (1)..(25): SEQ ID NO: 2583; WAN024C3Z; Start 546; Stop 570
ggaaagtgtttggaagtatgaaagt

SEQ ID NO: 330337 - DNA, 25 bp, Artificial
  probe
  misc_feature (1)..(25): SEQ ID NO: 2583; WAN024C3Z; Start 545; Stop 569
tggaaagtgtttggaagtatgaaag

SEQ ID NO: 330338 - DNA, 25 bp, Artificial
  probe
  misc_feature (1)..(25): SEQ ID NO: 2583; WAN024C3Z; Start 548; Stop 572
aaagtgtttggaagtatgaaagtgc

SEQ ID NO: 330339 - DNA, 25 bp, Artificial
  probe
  misc_feature (1)..(25): SEQ ID NO: 2583; WAN024C3Z; Start 289; Stop 313
gcagtttcatacatctataagccag

SEQ ID NO: 330340 - DNA, 25 bp, Artificial
  probe
  misc_feature (1)..(25): SEQ ID NO: 2583; WAN024C3Z; Start 445; Stop 469
gtttatcgtggtgaagagatgattg

SEQ ID NO: 330341 - DNA, 25 bp, Artificial
  probe
  misc_feature (1)..(25): SEQ ID NO: 2583; WAN024C3Z; Start 544; Stop 568
ttggaaagtgtttggaagtatgaaa

SEQ ID NO: 330342 - DNA, 25 bp, Artificial
  probe
  misc_feature (1)..(25): SEQ ID NO: 2583; WAN024C3Z; Start 542; Stop 566
tgttggaaagtgtttggaagtatga

SEQ ID NO: 330343 - DNA, 25 bp, Artificial
  probe
  misc_feature (1)..(25): SEQ ID NO: 2583; WAN024C3Z; Start 448; Stop 472
tatcgtggtgaagagatgattgctc

SEQ ID NO: 330344 - DNA, 25 bp, Artificial
  probe
  misc_feature (1)..(25): SEQ ID NO: 2583; WAN024C3Z; Start 120; Stop 144
catggctcttcagacagactatgat

SEQ ID NO: 330345 - DNA, 25 bp, Artificial
  probe
  misc_feature (1)..(25): SEQ ID NO: 2583; WAN024C3Z; Start 587; Stop 611
tcgtagatgtctatatccgctatct

SEQ ID NO: 330346 - DNA, 25 bp, Artificial
  probe
  misc_feature (1)..(25): SEQ ID NO: 2583; WAN024C3Z; Start 444; Stop 468
ggtttatcgtggtgaagagatgatt

SEQ ID NO: 330347 - DNA, 25 bp, Artificial
  probe
  misc_feature (1)..(25): SEQ ID NO: 2583; WAN024C3Z; Start 412; Stop 436
cgcaatcttaggatagatgttgaac

SEQ ID NO: 330348 - DNA, 25 bp, Artificial
  probe
  misc_feature (1)..(25): SEQ ID NO: 2583; WAN024C3Z; Start 409; Stop 433
taccgcaatcttaggatagatgttg

SEQ ID NO: 330349 - DNA, 25 bp, Artificial
  probe
  misc_feature (1)..(25): SEQ ID NO: 2583; WAN024C3Z; Start 408; Stop 432
ctaccgcaatcttaggatagatgtt

SEQ ID NO: 330350 - DNA, 25 bp, Artificial
  probe
  misc_feature (1)..(25): SEQ ID NO: 2583; WAN024C3Z; Start 547; Stop 571
gaaagtgtttggaagtatgaaagtg

SEQ ID NO: 330351 - DNA, 25 bp, Artificial
  probe
  misc_feature (1)..(25): SEQ ID NO: 2583; WAN024C3Z; Start 411; Stop 435
ccgcaatcttaggatagatgttgaa

SEQ ID NO: 330352 - DNA, 25 bp, Artificial
  probe
  misc_feature (1)..(25): SEQ ID NO: 2583; WAN024C3Z; Start 507; Stop 531
tatgggaagcaagaaagtattgact

SEQ ID NO: 330353 - DNA, 25 bp, Artificial
  probe
  misc_feature (1)..(25): SEQ ID NO: 2583; WAN024C3Z; Start 506; Stop 530
ttatgggaagcaagaaagtattgac

SEQ ID NO: 330354 - DNA, 25 bp, Artificial
  probe
  misc_feature (1)..(25): SEQ ID NO: 2583; WAN024C3Z; Start 446; Stop 470
tttatcgtggtgaagagatgattgc

SEQ ID NO: 330355 - DNA, 25 bp, Artificial
  probe
  misc_feature (1)..(25): SEQ ID NO: 2583; WAN024C3Z; Start 124; Stop 148
gctcttcagacagactatgatttga

SEQ ID NO: 330356 - DNA, 25 bp, Artificial
  probe
  misc_feature (1)..(25): SEQ ID NO: 2583; WAN024C3Z; Start 505; Stop 529
cttatgggaagcaagaaagtattga

SEQ ID NO: 330357 - DNA, 25 bp, Artificial
  probe
  misc_feature (1)..(25): SEQ ID NO: 2583; WAN024C3Z; Start 290; Stop 314
cagtttcatacatctataagccagt

SEQ ID NO: 330358 - DNA, 25 bp, Artificial
  probe
  misc_feature (1)..(25): SEQ ID NO: 2583; WAN024C3Z; Start 508; Stop 532
atgggaagcaagaaagtattgactc

SEQ ID NO: 330359 - DNA, 25 bp, Artificial
  probe
  misc_feature (1)..(25): SEQ ID NO: 2583; WAN024C3Z; Start 291; Stop 315
agtttcatacatctataagccagtc

SEQ ID NO: 330360 - DNA, 25 bp, Artificial
  probe
  misc_feature (1)..(25): SEQ ID NO: 2583; WAN024C3Z; Start 413; Stop 437
gcaatcttaggatagatgttgaaca

SEQ ID NO: 330361 - DNA, 25 bp, Artificial
  probe
  misc_feature (1)..(25): SEQ ID NO: 2583; WAN024C3Z; Start 410; Stop 434
accgcaatcttaggatagatgttga

SEQ ID NO: 330362 - DNA, 25 bp, Artificial
  probe
  misc_feature (1)..(25): SEQ ID NO: 2584; WAN024FOS; Start 752; Stop 776
atgctcgttattattacaatgtgac

SEQ ID NO: 330363 - DNA, 25 bp, Artificial
  probe
  misc_feature (1)..(25): SEQ ID NO: 2584; WAN024FOS; Start 751; Stop 775
aatgctcgttattattacaatgtga

SEQ ID NO: 330364 - DNA, 25 bp, Artificial
  probe
  misc_feature (1)..(25): SEQ ID NO: 2584; WAN024FOS; Start 753; Stop 777
tgctcgttattattacaatgtgacg

SEQ ID NO: 330365 - DNA, 25 bp, Artificial
  probe
  misc_feature (1)..(25): SEQ ID NO: 2584; WAN024FOS; Start 202; Stop 226
ggtggatattctgttggaaataatg

SEQ ID NO: 330366 - DNA, 25 bp, Artificial
  probe
  misc_feature (1)..(25): SEQ ID NO: 2584; WAN024FOS; Start 203; Stop 227
gtggatattctgttggaaataatgt

SEQ ID NO: 330367 - DNA, 25 bp, Artificial
  probe
  misc_feature (1)..(25): SEQ ID NO: 2584; WAN024FOS; Start 606; Stop 630
ttgtgaagagagaatattagccaaa

SEQ ID NO: 330368 - DNA, 25 bp, Artificial
  probe
  misc_feature (1)..(25): SEQ ID NO: 2584; WAN024FOS; Start 605; Stop 629
tttgtgaagagagaatattagccaa

SEQ ID NO: 330369 - DNA, 25 bp, Artificial
  probe
  misc_feature (1)..(25): SEQ ID NO: 2584; WAN024FOS; Start 685; Stop 709
cacaatcattcaacttctataaacg

SEQ ID NO: 330370 - DNA, 25 bp, Artificial
  probe
  misc_feature (1)..(25): SEQ ID NO: 2584; WAN024FOS; Start 206; Stop 230
gatattctgttggaaataatgttgc

SEQ ID NO: 330371 - DNA, 25 bp, Artificial
  probe
  misc_feature (1)..(25): SEQ ID NO: 2584; WAN024FOS; Start 754; Stop 778
gctcgttattattacaatgtgacgt

SEQ ID NO: 330372 - DNA, 25 bp, Artificial
  probe
  misc_feature (1)..(25): SEQ ID NO: 2584; WAN024FOS; Start 686; Stop 710
acaatcattcaacttctataaacga

SEQ ID NO: 330373 - DNA, 25 bp, Artificial
  probe
  misc_feature (1)..(25): SEQ ID NO: 2584; WAN024FOS; Start 750; Stop 774
taatgctcgttattattacaatgtg

SEQ ID NO: 330374 - DNA, 25 bp, Artificial
  probe
  misc_feature (1)..(25): SEQ ID NO: 2584; WAN024FOS; Start 209; Stop 233
attctgttggaaataatgttgcagc

SEQ ID NO: 330375 - DNA, 25 bp, Artificial
  probe
  misc_feature (1)..(25): SEQ ID NO: 2584; WAN024FOS; Start 204; Stop 228
tggatattctgttggaaataatgtt

SEQ ID NO: 330376 - DNA, 25 bp, Artificial
  probe
  misc_feature (1)..(25): SEQ ID NO: 2584; WAN024FOS; Start 684; Stop 708
ccacaatcattcaacttctataaac

SEQ ID NO: 330377 - DNA, 25 bp, Artificial
  probe
  misc_feature (1)..(25): SEQ ID NO: 2584; WAN024FOS; Start 687; Stop 711
caatcattcaacttctataaacgag

SEQ ID NO: 330378 - DNA, 25 bp, Artificial
  probe
  misc_feature (1)..(25): SEQ ID NO: 2584; WAN024FOS; Start 450; Stop 474
tttaaccagaaaattgcgaagaaaa

SEQ ID NO: 330379 - DNA, 25 bp, Artificial
  probe
  misc_feature (1)..(25): SEQ ID NO: 2584; WAN024FOS; Start 215; Stop 239
ttggaaataatgttgcagcacgaaa

SEQ ID NO: 330380 - DNA, 25 bp, Artificial
  probe
  misc_feature (1)..(25): SEQ ID NO: 2584; WAN024FOS; Start 543; Stop 567
ttttgctgtaaggctgtctgatttt

SEQ ID NO: 330381 - DNA, 25 bp, Artificial
  probe
  misc_feature (1)..(25): SEQ ID NO: 2584; WAN024FOS; Start 205; Stop 229
ggatattctgttggaaataatgttg

SEQ ID NO: 330382 - DNA, 25 bp, Artificial
  probe
  misc_feature (1)..(25): SEQ ID NO: 2584; WAN024FOS; Start 518; Stop 542
atgtagatcttgttaaaggctcgtt

SEQ ID NO: 330383 - DNA, 25 bp, Artificial
  probe
  misc_feature (1)..(25): SEQ ID NO: 2584; WAN024FOS; Start 519; Stop 543
tgtagatcttgttaaaggctcgttt

SEQ ID NO: 330384 - DNA, 25 bp, Artificial
  probe
  misc_feature (1)..(25): SEQ ID NO: 2584; WAN024FOS; Start 517; Stop 541
gatgtagatcttgttaaaggctcgt

SEQ ID NO: 330385 - DNA, 25 bp, Artificial
  probe
  misc_feature (1)..(25): SEQ ID NO: 2584; WAN024FOS; Start 210; Stop 234
ttctgttggaaataatgttgcagca

SEQ ID NO: 330386 - DNA, 25 bp, Artificial
  probe
  misc_feature (1)..(25): SEQ ID NO: 2584; WAN024FOS; Start 208; Stop 232
tattctgttggaaataatgttgcag

SEQ ID NO: 330387 - DNA, 25 bp, Artificial
  probe
  misc_feature (1)..(25): SEQ ID NO: 2584; WAN024FOS; Start 207; Stop 231
atattctgttggaaataatgttgca

SEQ ID NO: 330388 - DNA, 25 bp, Artificial
  probe
  misc_feature (1)..(25): SEQ ID NO: 2584; WAN024FOS; Start 688; Stop 712
aatcattcaacttctataaacgaga

SEQ ID NO: 330389 - DNA, 25 bp, Artificial
  probe
  misc_feature (1)..(25): SEQ ID NO: 2584; WAN024FOS; Start 544; Stop 568
tttgctgtaaggctgtctgattttc

SEQ ID NO: 330390 - DNA, 25 bp, Artificial
  probe
  misc_feature (1)..(25): SEQ ID NO: 2584; WAN024FOS; Start 4; Stop 28
gggaaagaaattaaagctgtttatg

SEQ ID NO: 330391 - DNA, 25 bp, Artificial
  probe
  misc_feature (1)..(25): SEQ ID NO: 2584; WAN024FOS; Start 214; Stop 238
gttggaaataatgttgcagcacgaa

SEQ ID NO: 330392 - DNA, 25 bp, Artificial
  probe
  misc_feature (1)..(25): SEQ ID NO: 2584; WAN024FOS; Start 1; Stop 25
atggggaaagaaattaaagctgttt

SEQ ID NO: 330393 - DNA, 25 bp, Artificial
  probe
  misc_feature (1)..(25): SEQ ID NO: 2584; WAN024FOS; Start 211; Stop 235
tctgttggaaataatgttgcagcac

SEQ ID NO: 330394 - DNA, 25 bp, Artificial
  probe
  misc_feature (1)..(25): SEQ ID NO: 2584; WAN024FOS; Start 755; Stop 779
ctcgttattattacaatgtgacgta

SEQ ID NO: 330395 - DNA, 25 bp, Artificial
  probe
  misc_feature (1)..(25): SEQ ID NO: 2585; WAN024CTY-5; Start 1762; Stop 1786
gttgataagactcgctatgttacca

SEQ ID NO: 330396 - DNA, 25 bp, Artificial
  probe
  misc_feature (1)..(25): SEQ ID NO: 2585; WAN024CTY-5; Start 1761; Stop 1785
tgttgataagactcgctatgttacc

SEQ ID NO: 330397 - DNA, 25 bp, Artificial
  probe
  misc_feature (1)..(25): SEQ ID NO: 2585; WAN024CTY-5; Start 866; Stop 890
ggtattcaggaagtggtatctatcg

SEQ ID NO: 330398 - DNA, 25 bp, Artificial
  probe
  misc_feature (1)..(25): SEQ ID NO: 2585; WAN024CTY-5; Start 1756; Stop 1780
aaggatgttgataagactcgctatg

SEQ ID NO: 330399 - DNA, 25 bp, Artificial
  probe
  misc_feature (1)..(25): SEQ ID NO: 2585; WAN024CTY-5; Start 868; Stop 892
tattcaggaagtggtatctatcgtg

SEQ ID NO: 330400 - DNA, 25 bp, Artificial
  probe
  misc_feature (1)..(25): SEQ ID NO: 2585; WAN024CTY-5; Start 867; Stop 891
gtattcaggaagtggtatctatcgt

SEQ ID NO: 330401 - DNA, 25 bp, Artificial
  probe
  misc_feature (1)..(25): SEQ ID NO: 2585; WAN024CTY-5; Start 863; Stop 887
gttggtattcaggaagtggtatcta

SEQ ID NO: 330402 - DNA, 25 bp, Artificial
  probe
  misc_feature (1)..(25): SEQ ID NO: 2585; WAN024CTY-5; Start 1758; Stop 1782
ggatgttgataagactcgctatgtt

SEQ ID NO: 330403 - DNA, 25 bp, Artificial
  probe
  misc_feature (1)..(25): SEQ ID NO: 2585; WAN024CTY-5; Start 875; Stop 899
gaagtggtatctatcgtgatgtgac

SEQ ID NO: 330404 - DNA, 25 bp, Artificial
  probe
  misc_feature (1)..(25): SEQ ID NO: 2585; WAN024CTY-5; Start 865; Stop 889
tggtattcaggaagtggtatctatc

SEQ ID NO: 330405 - DNA, 25 bp, Artificial
  probe
  misc_feature (1)..(25): SEQ ID NO: 2585; WAN024CTY-5; Start 1763; Stop 1787
ttgataagactcgctatgttaccat

SEQ ID NO: 330406 - DNA, 25 bp, Artificial
  probe
  misc_feature (1)..(25): SEQ ID NO: 2585; WAN024CTY-5; Start 1760; Stop 1784
atgttgataagactcgctatgttac

SEQ ID NO: 330407 - DNA, 25 bp, Artificial
  probe
  misc_feature (1)..(25): SEQ ID NO: 2585; WAN024CTY-5; Start 2130; Stop 2154
tacggactatattggtgaacctaca

SEQ ID NO: 330408 - DNA, 25 bp, Artificial
  probe
  misc_feature (1)..(25): SEQ ID NO: 2585; WAN024CTY-5; Start 864; Stop 888
ttggtattcaggaagtggtatctat

SEQ ID NO: 330409 - DNA, 25 bp, Artificial
  probe
  misc_feature (1)..(25): SEQ ID NO: 2585; WAN024CTY-5; Start 1759; Stop 1783
gatgttgataagactcgctatgtta

SEQ ID NO: 330410 - DNA, 25 bp, Artificial
  probe
  misc_feature (1)..(25): SEQ ID NO: 2585; WAN024CTY-5; Start 1757; Stop 1781
aggatgttgataagactcgctatgt

SEQ ID NO: 330411 - DNA, 25 bp, Artificial
  probe
  misc_feature (1)..(25): SEQ ID NO: 2585; WAN024CTY-5; Start 1755; Stop 1779
caaggatgttgataagactcgctat

SEQ ID NO: 330412 - DNA, 25 bp, Artificial
  probe
  misc_feature (1)..(25): SEQ ID NO: 2585; WAN024CTY-5; Start 2118; Stop 2142
tatctggacaggtacggactatatt

SEQ ID NO: 330413 - DNA, 25 bp, Artificial
  probe
  misc_feature (1)..(25): SEQ ID NO: 2585; WAN024CTY-5; Start 2117; Stop 2141
ttatctggacaggtacggactatat

SEQ ID NO: 330414 - DNA, 25 bp, Artificial
  probe
  misc_feature (1)..(25): SEQ ID NO: 2585; WAN024CTY-5; Start 2129; Stop 2153
gtacggactatattggtgaacctac

SEQ ID NO: 330415 - DNA, 25 bp, Artificial
  probe
  misc_feature (1)..(25): SEQ ID NO: 2585; WAN024CTY-5; Start 870; Stop 894
ttcaggaagtggtatctatcgtgat

SEQ ID NO: 330416 - DNA, 25 bp, Artificial
  probe
  misc_feature (1)..(25): SEQ ID NO: 2585; WAN024CTY-5; Start 869; Stop 893
attcaggaagtggtatctatcgtga

SEQ ID NO: 330417 - DNA, 25 bp, Artificial
  probe
  misc_feature (1)..(25): SEQ ID NO: 2585; WAN024CTY-5; Start 874; Stop 898
ggaagtggtatctatcgtgatgtga

SEQ ID NO: 330418 - DNA, 25 bp, Artificial
  probe
  misc_feature (1)..(25): SEQ ID NO: 2585; WAN024CTY-5; Start 873; Stop 897
aggaagtggtatctatcgtgatgtg

SEQ ID NO: 330419 - DNA, 25 bp, Artificial
  probe
  misc_feature (1)..(25): SEQ ID NO: 2585; WAN024CTY-5; Start 872; Stop 896
caggaagtggtatctatcgtgatgt

SEQ ID NO: 330420 - DNA, 25 bp, Artificial
  probe
  misc_feature (1)..(25): SEQ ID NO: 2585; WAN024CTY-5; Start 877; Stop 901
agtggtatctatcgtgatgtgactt

SEQ ID NO: 330421 - DNA, 25 bp, Artificial
  probe
  misc_feature (1)..(25): SEQ ID NO: 2585; WAN024CTY-5; Start 876; Stop 900
aagtggtatctatcgtgatgtgact

SEQ ID NO: 330422 - DNA, 25 bp, Artificial
  probe
  misc_feature (1)..(25): SEQ ID NO: 2585; WAN024CTY-5; Start 2119; Stop 2143
atctggacaggtacggactatattg

SEQ ID NO: 330423 - DNA, 25 bp, Artificial
  probe
  misc_feature (1)..(25): SEQ ID NO: 2585; WAN024CTY-5; Start 1764; Stop 1788
tgataagactcgctatgttaccatg

SEQ ID NO: 330424 - DNA, 25 bp, Artificial
  probe
  misc_feature (1)..(25): SEQ ID NO: 2585; WAN024CTY-5; Start 871; Stop 895
tcaggaagtggtatctatcgtgatg

SEQ ID NO: 330425 - DNA, 25 bp, Artificial
  probe
  misc_feature (1)..(25): SEQ ID NO: 2585; WAN024CTY-5; Start 862; Stop 886
cgttggtattcaggaagtggtatct

SEQ ID NO: 330426 - DNA, 25 bp, Artificial
  probe
  misc_feature (1)..(25): SEQ ID NO: 2585; WAN024CTY-5; Start 2124; Stop 2148
gacaggtacggactatattggtgaa

SEQ ID NO: 330427 - DNA, 25 bp, Artificial
  probe
  misc_feature (1)..(25): SEQ ID NO: 2585; WAN024CTY-5; Start 1193; Stop 1217
aacctgccttgtacgaattgattac

SEQ ID NO: 330428 - DNA, 25 bp, Artificial
  probe
  misc_feature (1)..(25): SEQ ID NO: 2586; WAN024D78; Start 41; Stop 65
gagatgaagagaatgctaagtggac

SEQ ID NO: 330429 - DNA, 25 bp, Artificial
  probe
  misc_feature (1)..(25): SEQ ID NO: 2586; WAN024D78; Start 43; Stop 67
gatgaagagaatgctaagtggactg

SEQ ID NO: 330430 - DNA, 25 bp, Artificial
  probe
  misc_feature (1)..(25): SEQ ID NO: 2586; WAN024D78; Start 42; Stop 66
agatgaagagaatgctaagtggact

SEQ ID NO: 330431 - DNA, 25 bp, Artificial
  probe
  misc_feature (1)..(25): SEQ ID NO: 2586; WAN024D78; Start 46; Stop 70
gaagagaatgctaagtggactgaac

SEQ ID NO: 330432 - DNA, 25 bp, Artificial
  probe
  misc_feature (1)..(25): SEQ ID NO: 2586; WAN024D78; Start 44; Stop 68
atgaagagaatgctaagtggactga

SEQ ID NO: 330433 - DNA, 25 bp, Artificial
  probe
  misc_feature (1)..(25): SEQ ID NO: 2586; WAN024D78; Start 45; Stop 69
tgaagagaatgctaagtggactgaa

SEQ ID NO: 330434 - DNA, 25 bp, Artificial
  probe
  misc_feature (1)..(25): SEQ ID NO: 2586; WAN024D78; Start 40; Stop 64
ggagatgaagagaatgctaagtgga

SEQ ID NO: 330435 - DNA, 25 bp, Artificial
  probe
  misc_feature (1)..(25): SEQ ID NO: 2586; WAN024D78; Start 36; Stop 60
tatgggagatgaagagaatgctaag

SEQ ID NO: 330436 - DNA, 25 bp, Artificial
  probe
  misc_feature (1)..(25): SEQ ID NO: 2586; WAN024D78; Start 35; Stop 59
ctatgggagatgaagagaatgctaa

SEQ ID NO: 330437 - DNA, 25 bp, Artificial
  probe
  misc_feature (1)..(25): SEQ ID NO: 2586; WAN024D78; Start 47; Stop 71
aagagaatgctaagtggactgaacg

SEQ ID NO: 330438 - DNA, 25 bp, Artificial
  probe
  misc_feature (1)..(25): SEQ ID NO: 2586; WAN024D78; Start 34; Stop 58
tctatgggagatgaagagaatgcta

SEQ ID NO: 330439 - DNA, 25 bp, Artificial
  probe
  misc_feature (1)..(25): SEQ ID NO: 2586; WAN024D78; Start 37; Stop 61
atgggagatgaagagaatgctaagt

SEQ ID NO: 330440 - DNA, 25 bp, Artificial
  probe
  misc_feature (1)..(25): SEQ ID NO: 2586; WAN024D78; Start 276; Stop 300
ggaacgaattgatacagcctataaa

SEQ ID NO: 330441 - DNA, 25 bp, Artificial
  probe
  misc_feature (1)..(25): SEQ ID NO: 2586; WAN024D78; Start 279; Stop 303
acgaattgatacagcctataaagaa

SEQ ID NO: 330442 - DNA, 25 bp, Artificial
  probe
  misc_feature (1)..(25): SEQ ID NO: 2586; WAN024D78; Start 278; Stop 302
aacgaattgatacagcctataaaga

SEQ ID NO: 330443 - DNA, 25 bp, Artificial
  probe
  misc_feature (1)..(25): SEQ ID NO: 2586; WAN024D78; Start 38; Stop 62
tgggagatgaagagaatgctaagtg

SEQ ID NO: 330444 - DNA, 25 bp, Artificial
  probe
  misc_feature (1)..(25): SEQ ID NO: 2586; WAN024D78; Start 277; Stop 301
gaacgaattgatacagcctataaag

SEQ ID NO: 330445 - DNA, 25 bp, Artificial
  probe
  misc_feature (1)..(25): SEQ ID NO: 2586; WAN024D78; Start 290; Stop 314
cagcctataaagaaatgaatgaaca

SEQ ID NO: 330446 - DNA, 25 bp, Artificial
  probe
  misc_feature (1)..(25): SEQ ID NO: 2586; WAN024D78; Start 289; Stop 313
acagcctataaagaaatgaatgaac

SEQ ID NO: 330447 - DNA, 25 bp, Artificial
  probe
  misc_feature (1)..(25): SEQ ID NO: 2586; WAN024D78; Start 39; Stop 63
gggagatgaagagaatgctaagtgg

SEQ ID NO: 330448 - DNA, 25 bp, Artificial
  probe
  misc_feature (1)..(25): SEQ ID NO: 2586; WAN024D78; Start 192; Stop 216
tcccttgtatcattaccaaacttat

SEQ ID NO: 330449 - DNA, 25 bp, Artificial
  probe
  misc_feature (1)..(25): SEQ ID NO: 2586; WAN024D78; Start 191; Stop 215
atcccttgtatcattaccaaactta

SEQ ID NO: 330450 - DNA, 25 bp, Artificial
  probe
  misc_feature (1)..(25): SEQ ID NO: 2586; WAN024D78; Start 190; Stop 214
tatcccttgtatcattaccaaactt

SEQ ID NO: 330451 - DNA, 25 bp, Artificial
  probe
  misc_feature (1)..(25): SEQ ID NO: 2586; WAN024D78; Start 280; Stop 304
cgaattgatacagcctataaagaaa

SEQ ID NO: 330452 - DNA, 25 bp, Artificial
  probe
  misc_feature (1)..(25): SEQ ID NO: 2586; WAN024D78; Start 189; Stop 213
atatcccttgtatcattaccaaact

SEQ ID NO: 330453 - DNA, 25 bp, Artificial
  probe
  misc_feature (1)..(25): SEQ ID NO: 2586; WAN024D78; Start 32; Stop 56
aatctatgggagatgaagagaatgc

SEQ ID NO: 330454 - DNA, 25 bp, Artificial
  probe
  misc_feature (1)..(25): SEQ ID NO: 2586; WAN024D78; Start 33; Stop 57
atctatgggagatgaagagaatgct

SEQ ID NO: 330455 - DNA, 25 bp, Artificial
  probe
  misc_feature (1)..(25): SEQ ID NO: 2586; WAN024D78; Start 29; Stop 53
ttgaatctatgggagatgaagagaa

SEQ ID NO: 330456 - DNA, 25 bp, Artificial
  probe
  misc_feature (1)..(25): SEQ ID NO: 2586; WAN024D78; Start 30; Stop 54
tgaatctatgggagatgaagagaat

SEQ ID NO: 330457 - DNA, 25 bp, Artificial
  probe
  misc_feature (1)..(25): SEQ ID NO: 2586; WAN024D78; Start 28; Stop 52
attgaatctatgggagatgaagaga

SEQ ID NO: 330458 - DNA, 25 bp, Artificial
  probe
  misc_feature (1)..(25): SEQ ID NO: 2586; WAN024D78; Start 31; Stop 55
gaatctatgggagatgaagagaatg

SEQ ID NO: 330459 - DNA, 25 bp, Artificial
  probe
  misc_feature (1)..(25): SEQ ID NO: 2586; WAN024D78; Start 291; Stop 315
agcctataaagaaatgaatgaacat

SEQ ID NO: 330460 - DNA, 25 bp, Artificial
  probe
  misc_feature (1)..(25): SEQ ID NO: 2586; WAN024D78; Start 250; Stop 274
cgtgaccagttagatgaagcgacta

SEQ ID NO: 330461 - DNA, 25 bp, Artificial
  probe
  misc_feature (1)..(25): SEQ ID NO: 2587; WAN024FTH; Start 399; Stop 423
ttggttgtatagtggaatggaagaa

SEQ ID NO: 330462 - DNA, 25 bp, Artificial
  probe
  misc_feature (1)..(25): SEQ ID NO: 2587; WAN024FTH; Start 202; Stop 226
gcagtagcaagtgttagagatgata

SEQ ID NO: 330463 - DNA, 25 bp, Artificial
  probe
  misc_feature (1)..(25): SEQ ID NO: 2587; WAN024FTH; Start 400; Stop 424
tggttgtatagtggaatggaagaat

SEQ ID NO: 330464 - DNA, 25 bp, Artificial
  probe
  misc_feature (1)..(25): SEQ ID NO: 2587; WAN024FTH; Start 398; Stop 422
attggttgtatagtggaatggaaga

SEQ ID NO: 330465 - DNA, 25 bp, Artificial
  probe
  misc_feature (1)..(25): SEQ ID NO: 2587; WAN024FTH; Start 207; Stop 231
agcaagtgttagagatgatagagat

SEQ ID NO: 330466 - DNA, 25 bp, Artificial
  probe
  misc_feature (1)..(25): SEQ ID NO: 2587; WAN024FTH; Start 397; Stop 421
aattggttgtatagtggaatggaag

SEQ ID NO: 330467 - DNA, 25 bp, Artificial
  probe
  misc_feature (1)..(25): SEQ ID NO: 2587; WAN024FTH; Start 203; Stop 227
cagtagcaagtgttagagatgatag

SEQ ID NO: 330468 - DNA, 25 bp, Artificial
  probe
  misc_feature (1)..(25): SEQ ID NO: 2587; WAN024FTH; Start 204; Stop 228
agtagcaagtgttagagatgataga

SEQ ID NO: 330469 - DNA, 25 bp, Artificial
  probe
  misc_feature (1)..(25): SEQ ID NO: 2587; WAN024FTH; Start 201; Stop 225
agcagtagcaagtgttagagatgat

SEQ ID NO: 330470 - DNA, 25 bp, Artificial
  probe
  misc_feature (1)..(25): SEQ ID NO: 2587; WAN024FTH; Start 1397; Stop 1421
aggaggaagtgacgattcaattatt

SEQ ID NO: 330471 - DNA, 25 bp, Artificial
  probe
  misc_feature (1)..(25): SEQ ID NO: 2587; WAN024FTH; Start 1396; Stop 1420
aaggaggaagtgacgattcaattat

SEQ ID NO: 330472 - DNA, 25 bp, Artificial
  probe
  misc_feature (1)..(25): SEQ ID NO: 2587; WAN024FTH; Start 205; Stop 229
gtagcaagtgttagagatgatagag

SEQ ID NO: 330473 - DNA, 25 bp, Artificial
  probe
  misc_feature (1)..(25): SEQ ID NO: 2587; WAN024FTH; Start 206; Stop 230
tagcaagtgttagagatgatagaga

SEQ ID NO: 330474 - DNA, 25 bp, Artificial
  probe
  misc_feature (1)..(25): SEQ ID NO: 2587; WAN024FTH; Start 200; Stop 224
aagcagtagcaagtgttagagatga

SEQ ID NO: 330475 - DNA, 25 bp, Artificial
  probe
  misc_feature (1)..(25): SEQ ID NO: 2587; WAN024FTH; Start 401; Stop 425
ggttgtatagtggaatggaagaata

SEQ ID NO: 330476 - DNA, 25 bp, Artificial
  probe
  misc_feature (1)..(25): SEQ ID NO: 2587; WAN024FTH; Start 1083; Stop 1107
agtaacgattggtgctgtgattaat

SEQ ID NO: 330477 - DNA, 25 bp, Artificial
  probe
  misc_feature (1)..(25): SEQ ID NO: 2587; WAN024FTH; Start 1115; Stop 1139
tgaatctactgttaatgcctaagtt

SEQ ID NO: 330478 - DNA, 25 bp, Artificial
  probe
  misc_feature (1)..(25): SEQ ID NO: 2587; WAN024FTH; Start 1114; Stop 1138
ttgaatctactgttaatgcctaagt

SEQ ID NO: 330479 - DNA, 25 bp, Artificial
  probe
  misc_feature (1)..(25): SEQ ID NO: 2587; WAN024FTH; Start 208; Stop 232
gcaagtgttagagatgatagagata

SEQ ID NO: 330480 - DNA, 25 bp, Artificial
  probe
  misc_feature (1)..(25): SEQ ID NO: 2587; WAN024FTH; Start 1082; Stop 1106
cagtaacgattggtgctgtgattaa

SEQ ID NO: 330481 - DNA, 25 bp, Artificial
  probe
  misc_feature (1)..(25): SEQ ID NO: 2587; WAN024FTH; Start 937; Stop 961
atcttattactaggaggaagtcagt

SEQ ID NO: 330482 - DNA, 25 bp, Artificial
  probe
  misc_feature (1)..(25): SEQ ID NO: 2587; WAN024FTH; Start 732; Stop 756
atactattctgtggcatcaaaggtt

SEQ ID NO: 330483 - DNA, 25 bp, Artificial
  probe
  misc_feature (1)..(25): SEQ ID NO: 2587; WAN024FTH; Start 195; Stop 219
tatcaaagcagtagcaagtgttaga

SEQ ID NO: 330484 - DNA, 25 bp, Artificial
  probe
  misc_feature (1)..(25): SEQ ID NO: 2587; WAN024FTH; Start 194; Stop 218
gtatcaaagcagtagcaagtgttag

SEQ ID NO: 330485 - DNA, 25 bp, Artificial
  probe
  misc_feature (1)..(25): SEQ ID NO: 2587; WAN024FTH; Start 733; Stop 757
tactattctgtggcatcaaaggtta

SEQ ID NO: 330486 - DNA, 25 bp, Artificial
  probe
  misc_feature (1)..(25): SEQ ID NO: 2587; WAN024FTH; Start 683; Stop 707
atttagatacagtgatgctcggttt

SEQ ID NO: 330487 - DNA, 25 bp, Artificial
  probe
  misc_feature (1)..(25): SEQ ID NO: 2587; WAN024FTH; Start 861; Stop 885
aaaggagtcatctgcggttatattt

SEQ ID NO: 330488 - DNA, 25 bp, Artificial
  probe
  misc_feature (1)..(25): SEQ ID NO: 2587; WAN024FTH; Start 860; Stop 884
taaaggagtcatctgcggttatatt

SEQ ID NO: 330489 - DNA, 25 bp, Artificial
  probe
  misc_feature (1)..(25): SEQ ID NO: 2587; WAN024FTH; Start 717; Stop 741
taatgaggctgtgggatactattct

SEQ ID NO: 330490 - DNA, 25 bp, Artificial
  probe
  misc_feature (1)..(25): SEQ ID NO: 2587; WAN024FTH; Start 735; Stop 759
ctattctgtggcatcaaaggttaag

SEQ ID NO: 330491 - DNA, 25 bp, Artificial
  probe
  misc_feature (1)..(25): SEQ ID NO: 2587; WAN024FTH; Start 716; Stop 740
gtaatgaggctgtgggatactattc

SEQ ID NO: 330492 - DNA, 25 bp, Artificial
  probe
  misc_feature (1)..(25): SEQ ID NO: 2587; WAN024FTH; Start 859; Stop 883
ttaaaggagtcatctgcggttatat

SEQ ID NO: 330493 - DNA, 25 bp, Artificial
  probe
  misc_feature (1)..(25): SEQ ID NO: 2587; WAN024FTH; Start 858; Stop 882
gttaaaggagtcatctgcggttata

SEQ ID NO: 330494 - DNA, 25 bp, Artificial
  probe
  misc_feature (1)..(25): SEQ ID NO: 2588; WAN024CAS; Start 137; Stop 161
gcattcttactatacgattcaacca

SEQ ID NO: 330495 - DNA, 25 bp, Artificial
  probe
  misc_feature (1)..(25): SEQ ID NO: 2588; WAN024CAS; Start 136; Stop 160
agcattcttactatacgattcaacc

SEQ ID NO: 330496 - DNA, 25 bp, Artificial
  probe
  misc_feature (1)..(25): SEQ ID NO: 2588; WAN024CAS; Start 123; Stop 147
gcatgttatggttagcattcttact

SEQ ID NO: 330497 - DNA, 25 bp, Artificial
  probe
  misc_feature (1)..(25): SEQ ID NO: 2588; WAN024CAS; Start 122; Stop 146
cgcatgttatggttagcattcttac

SEQ ID NO: 330498 - DNA, 25 bp, Artificial
  probe
  misc_feature (1)..(25): SEQ ID NO: 2588; WAN024CAS; Start 121; Stop 145
acgcatgttatggttagcattctta

SEQ ID NO: 330499 - DNA, 25 bp, Artificial
  probe
  misc_feature (1)..(25): SEQ ID NO: 2588; WAN024CAS; Start 131; Stop 155
tggttagcattcttactatacgatt

SEQ ID NO: 330500 - DNA, 25 bp, Artificial
  probe
  misc_feature (1)..(25): SEQ ID NO: 2588; WAN024CAS; Start 132; Stop 156
ggttagcattcttactatacgattc

SEQ ID NO: 330501 - DNA, 25 bp, Artificial
  probe
  misc_feature (1)..(25): SEQ ID NO: 2588; WAN024CAS; Start 130; Stop 154
atggttagcattcttactatacgat

SEQ ID NO: 330502 - DNA, 25 bp, Artificial
  probe
  misc_feature (1)..(25): SEQ ID NO: 2588; WAN024CAS; Start 120; Stop 144
gacgcatgttatggttagcattctt

SEQ ID NO: 330503 - DNA, 25 bp, Artificial
  probe
  misc_feature (1)..(25): SEQ ID NO: 2588; WAN024CAS; Start 184; Stop 208
caacaagggcttcaaactcatttaa

SEQ ID NO: 330504 - DNA, 25 bp, Artificial
  probe
  misc_feature (1)..(25): SEQ ID NO: 2588; WAN024CAS; Start 183; Stop 207
tcaacaagggcttcaaactcattta

SEQ ID NO: 330505 - DNA, 25 bp, Artificial
  probe
  misc_feature (1)..(25): SEQ ID NO: 2588; WAN024CAS; Start 83; Stop 107
cgcatcaagtctacaatttcttctt

SEQ ID NO: 330506 - DNA, 25 bp, Artificial
  probe
  misc_feature (1)..(25): SEQ ID NO: 2588; WAN024CAS; Start 82; Stop 106
acgcatcaagtctacaatttcttct

SEQ ID NO: 330507 - DNA, 25 bp, Artificial
  probe
  misc_feature (1)..(25): SEQ ID NO: 2588; WAN024CAS; Start 93; Stop 117
ctacaatttcttctttgacgacagg

SEQ ID NO: 330508 - DNA, 25 bp, Artificial
  probe
  misc_feature (1)..(25): SEQ ID NO: 2588; WAN024CAS; Start 94; Stop 118
tacaatttcttctttgacgacagga

SEQ ID NO: 330509 - DNA, 25 bp, Artificial
  probe
  misc_feature (1)..(25): SEQ ID NO: 2588; WAN024CAS; Start 138; Stop 162
cattcttactatacgattcaaccat

SEQ ID NO: 330510 - DNA, 25 bp, Artificial
  probe
  misc_feature (1)..(25): SEQ ID NO: 2588; WAN024CAS; Start 92; Stop 116
tctacaatttcttctttgacgacag

SEQ ID NO: 330511 - DNA, 25 bp, Artificial
  probe
  misc_feature (1)..(25): SEQ ID NO: 2588; WAN024CAS; Start 129; Stop 153
tatggttagcattcttactatacga

SEQ ID NO: 330512 - DNA, 25 bp, Artificial
  probe
  misc_feature (1)..(25): SEQ ID NO: 2588; WAN024CAS; Start 182; Stop 206
ttcaacaagggcttcaaactcattt

SEQ ID NO: 330513 - DNA, 25 bp, Artificial
  probe
  misc_feature (1)..(25): SEQ ID NO: 2588; WAN024CAS; Start 181; Stop 205
tttcaacaagggcttcaaactcatt

SEQ ID NO: 330514 - DNA, 25 bp, Artificial
  probe
  misc_feature (1)..(25): SEQ ID NO: 2588; WAN024CAS; Start 135; Stop 159
tagcattcttactatacgattcaac

SEQ ID NO: 330515 - DNA, 25 bp, Artificial
  probe
  misc_feature (1)..(25): SEQ ID NO: 2588; WAN024CAS; Start 133; Stop 157
gttagcattcttactatacgattca

SEQ ID NO: 330516 - DNA, 25 bp, Artificial
  probe
  misc_feature (1)..(25): SEQ ID NO: 2588; WAN024CAS; Start 91; Stop 115
gtctacaatttcttctttgacgaca

SEQ ID NO: 330517 - DNA, 25 bp, Artificial
  probe
  misc_feature (1)..(25): SEQ ID NO: 2588; WAN024CAS; Start 81; Stop 105
gacgcatcaagtctacaatttcttc

SEQ ID NO: 330518 - DNA, 25 bp, Artificial
  probe
  misc_feature (1)..(25): SEQ ID NO: 2588; WAN024CAS; Start 90; Stop 114
agtctacaatttcttctttgacgac

SEQ ID NO: 330519 - DNA, 25 bp, Artificial
  probe
  misc_feature (1)..(25): SEQ ID NO: 2588; WAN024CAS; Start 95; Stop 119
acaatttcttctttgacgacaggac

SEQ ID NO: 330520 - DNA, 25 bp, Artificial
  probe
  misc_feature (1)..(25): SEQ ID NO: 2588; WAN024CAS; Start 84; Stop 108
gcatcaagtctacaatttcttcttt

SEQ ID NO: 330521 - DNA, 25 bp, Artificial
  probe
  misc_feature (1)..(25): SEQ ID NO: 2588; WAN024CAS; Start 80; Stop 104
tgacgcatcaagtctacaatttctt

SEQ ID NO: 330522 - DNA, 25 bp, Artificial
  probe
  misc_feature (1)..(25): SEQ ID NO: 2588; WAN024CAS; Start 185; Stop 209
aacaagggcttcaaactcatttaaa

SEQ ID NO: 330523 - DNA, 25 bp, Artificial
  probe
  misc_feature (1)..(25): SEQ ID NO: 2588; WAN024CAS; Start 89; Stop 113
aagtctacaatttcttctttgacga

SEQ ID NO: 330524 - DNA, 25 bp, Artificial
  probe
  misc_feature (1)..(25): SEQ ID NO: 2588; WAN024CAS; Start 88; Stop 112
caagtctacaatttcttctttgacg

SEQ ID NO: 330525 - DNA, 25 bp, Artificial
  probe
  misc_feature (1)..(25): SEQ ID NO: 2588; WAN024CAS; Start 186; Stop 210
acaagggcttcaaactcatttaaac

SEQ ID NO: 330526 - DNA, 25 bp, Artificial
  probe
  misc_feature (1)..(25): SEQ ID NO: 2588; WAN024CAS; Start 128; Stop 152
ttatggttagcattcttactatacg

SEQ ID NO: 330527 - DNA, 25 bp, Artificial
  probe
  misc_feature (1)..(25): SEQ ID NO: 2589; WAN024GO9; Start 211; Stop 235
atctccgtccatagaaccgttatta

SEQ ID NO: 330528 - DNA, 25 bp, Artificial
  probe
  misc_feature (1)..(25): SEQ ID NO: 2589; WAN024GO9; Start 212; Stop 236
tctccgtccatagaaccgttattac

SEQ ID NO: 330529 - DNA, 25 bp, Artificial
  probe
  misc_feature (1)..(25): SEQ ID NO: 2589; WAN024GO9; Start 213; Stop 237
ctccgtccatagaaccgttattacc

SEQ ID NO: 330530 - DNA, 25 bp, Artificial
  probe
  misc_feature (1)..(25): SEQ ID NO: 2589; WAN024GO9; Start 210; Stop 234
gatctccgtccatagaaccgttatt

SEQ ID NO: 330531 - DNA, 25 bp, Artificial
  probe
  misc_feature (1)..(25): SEQ ID NO: 2589; WAN024GO9; Start 220; Stop 244
catagaaccgttattaccgtgcatt

SEQ ID NO: 330532 - DNA, 25 bp, Artificial
  probe
  misc_feature (1)..(25): SEQ ID NO: 2589; WAN024GO9; Start 216; Stop 240
cgtccatagaaccgttattaccgtg

SEQ ID NO: 330533 - DNA, 25 bp, Artificial
  probe
  misc_feature (1)..(25): SEQ ID NO: 2589; WAN024GO9; Start 217; Stop 241
gtccatagaaccgttattaccgtgc

SEQ ID NO: 330534 - DNA, 25 bp, Artificial
  probe
  misc_feature (1)..(25): SEQ ID NO: 2589; WAN024GO9; Start 94; Stop 118
tttctccgtatcgtcaaagttccat

SEQ ID NO: 330535 - DNA, 25 bp, Artificial
  probe
  misc_feature (1)..(25): SEQ ID NO: 2589; WAN024GO9; Start 87; Stop 111
ttggttctttctccgtatcgtcaaa

SEQ ID NO: 330536 - DNA, 25 bp, Artificial
  probe
  misc_feature (1)..(25): SEQ ID NO: 2589; WAN024GO9; Start 214; Stop 238
tccgtccatagaaccgttattaccg

SEQ ID NO: 330537 - DNA, 25 bp, Artificial
  probe
  misc_feature (1)..(25): SEQ ID NO: 2589; WAN024GO9; Start 221; Stop 245
atagaaccgttattaccgtgcattt

SEQ ID NO: 330538 - DNA, 25 bp, Artificial
  probe
  misc_feature (1)..(25): SEQ ID NO: 2589; WAN024GO9; Start 219; Stop 243
ccatagaaccgttattaccgtgcat

SEQ ID NO: 330539 - DNA, 25 bp, Artificial
  probe
  misc_feature (1)..(25): SEQ ID NO: 2589; WAN024GO9; Start 228; Stop 252
cgttattaccgtgcatttcaactag

SEQ ID NO: 330540 - DNA, 25 bp, Artificial
  probe
  misc_feature (1)..(25): SEQ ID NO: 2589; WAN024GO9; Start 215; Stop 239
ccgtccatagaaccgttattaccgt

SEQ ID NO: 330541 - DNA, 25 bp, Artificial
  probe
  misc_feature (1)..(25): SEQ ID NO: 2589; WAN024GO9; Start 91; Stop 115
ttctttctccgtatcgtcaaagttc

SEQ ID NO: 330542 - DNA, 25 bp, Artificial
  probe
  misc_feature (1)..(25): SEQ ID NO: 2589; WAN024GO9; Start 222; Stop 246
tagaaccgttattaccgtgcatttc

SEQ ID NO: 330543 - DNA, 25 bp, Artificial
  probe
  misc_feature (1)..(25): SEQ ID NO: 2589; WAN024GO9; Start 90; Stop 114
gttctttctccgtatcgtcaaagtt

SEQ ID NO: 330544 - DNA, 25 bp, Artificial
  probe
  misc_feature (1)..(25): SEQ ID NO: 2589; WAN024GO9; Start 137; Stop 161
ttctcgatatcctgaagaaggtagc

SEQ ID NO: 330545 - DNA, 25 bp, Artificial
  probe
  misc_feature (1)..(25): SEQ ID NO: 2589; WAN024GO9; Start 86; Stop 110
gttggttctttctccgtatcgtcaa

SEQ ID NO: 330546 - DNA, 25 bp, Artificial
  probe
  misc_feature (1)..(25): SEQ ID NO: 2589; WAN024GO9; Start 209; Stop 233
ggatctccgtccatagaaccgttat

SEQ ID NO: 330547 - DNA, 25 bp, Artificial
  probe
  misc_feature (1)..(25): SEQ ID NO: 2589; WAN024GO9; Start 95; Stop 119
ttctccgtatcgtcaaagttccatg

SEQ ID NO: 330548 - DNA, 25 bp, Artificial
  probe
  misc_feature (1)..(25): SEQ ID NO: 2589; WAN024GO9; Start 227; Stop 251
ccgttattaccgtgcatttcaacta

SEQ ID NO: 330549 - DNA, 25 bp, Artificial
  probe
  misc_feature (1)..(25): SEQ ID NO: 2589; WAN024GO9; Start 169; Stop 193
ttcagacaaacgtgcctcagtataa

SEQ ID NO: 330550 - DNA, 25 bp, Artificial
  probe
  misc_feature (1)..(25): SEQ ID NO: 2589; WAN024GO9; Start 168; Stop 192
tttcagacaaacgtgcctcagtata

SEQ ID NO: 330551 - DNA, 25 bp, Artificial
  probe
  misc_feature (1)..(25): SEQ ID NO: 2589; WAN024GO9; Start 139; Stop 163
ctcgatatcctgaagaaggtagcct

SEQ ID NO: 330552 - DNA, 25 bp, Artificial
  probe
  misc_feature (1)..(25): SEQ ID NO: 2589; WAN024GO9; Start 138; Stop 162
tctcgatatcctgaagaaggtagcc

SEQ ID NO: 330553 - DNA, 25 bp, Artificial
  probe
  misc_feature (1)..(25): SEQ ID NO: 2589; WAN024GO9; Start 224; Stop 248
gaaccgttattaccgtgcatttcaa

SEQ ID NO: 330554 - DNA, 25 bp, Artificial
  probe
  misc_feature (1)..(25): SEQ ID NO: 2589; WAN024GO9; Start 144; Stop 168
tatcctgaagaaggtagcctgcaat

SEQ ID NO: 330555 - DNA, 25 bp, Artificial
  probe
  misc_feature (1)..(25): SEQ ID NO: 2589; WAN024GO9; Start 143; Stop 167
atatcctgaagaaggtagcctgcaa

SEQ ID NO: 330556 - DNA, 25 bp, Artificial
  probe
  misc_feature (1)..(25): SEQ ID NO: 2589; WAN024GO9; Start 218; Stop 242
tccatagaaccgttattaccgtgca

SEQ ID NO: 330557 - DNA, 25 bp, Artificial
  probe
  misc_feature (1)..(25): SEQ ID NO: 2589; WAN024GO9; Start 167; Stop 191
atttcagacaaacgtgcctcagtat

SEQ ID NO: 330558 - DNA, 25 bp, Artificial
  probe
  misc_feature (1)..(25): SEQ ID NO: 2589; WAN024GO9; Start 140; Stop 164
tcgatatcctgaagaaggtagcctg

SEQ ID NO: 330559 - DNA, 25 bp, Artificial
  probe
  misc_feature (1)..(25): SEQ ID NO: 2589; WAN024GO9; Start 225; Stop 249
aaccgttattaccgtgcatttcaac

SEQ ID NO: 330560 - DNA, 25 bp, Artificial
  probe
  misc_feature (1)..(25): SEQ ID NO: 2590; WAN024FV8; Start 309; Stop 333
tcctgaatatgtcattacggttatt

SEQ ID NO: 330561 - DNA, 25 bp, Artificial
  probe
  misc_feature (1)..(25): SEQ ID NO: 2590; WAN024FV8; Start 308; Stop 332
ttcctgaatatgtcattacggttat

SEQ ID NO: 330562 - DNA, 25 bp, Artificial
  probe
  misc_feature (1)..(25): SEQ ID NO: 2590; WAN024FV8; Start 317; Stop 341
atgtcattacggttatttcttcaga

SEQ ID NO: 330563 - DNA, 25 bp, Artificial
  probe
  misc_feature (1)..(25): SEQ ID NO: 2590; WAN024FV8; Start 306; Stop 330
atttcctgaatatgtcattacggtt

SEQ ID NO: 330564 - DNA, 25 bp, Artificial
  probe
  misc_feature (1)..(25): SEQ ID NO: 2590; WAN024FV8; Start 305; Stop 329
aatttcctgaatatgtcattacggt

SEQ ID NO: 330565 - DNA, 25 bp, Artificial
  probe
  misc_feature (1)..(25): SEQ ID NO: 2590; WAN024FV8; Start 304; Stop 328
caatttcctgaatatgtcattacgg

SEQ ID NO: 330566 - DNA, 25 bp, Artificial
  probe
  misc_feature (1)..(25): SEQ ID NO: 2590; WAN024FV8; Start 307; Stop 331
tttcctgaatatgtcattacggtta

SEQ ID NO: 330567 - DNA, 25 bp, Artificial
  probe
  misc_feature (1)..(25): SEQ ID NO: 2590; WAN024FV8; Start 573; Stop 597
ctcttccaactggatgattgcttct

SEQ ID NO: 330568 - DNA, 25 bp, Artificial
  probe
  misc_feature (1)..(25): SEQ ID NO: 2590; WAN024FV8; Start 316; Stop 340
tatgtcattacggttatttcttcag

SEQ ID NO: 330569 - DNA, 25 bp, Artificial
  probe
  misc_feature (1)..(25): SEQ ID NO: 2590; WAN024FV8; Start 576; Stop 600
ttccaactggatgattgcttctgtt

SEQ ID NO: 330570 - DNA, 25 bp, Artificial
  probe
  misc_feature (1)..(25): SEQ ID NO: 2590; WAN024FV8; Start 310; Stop 334
cctgaatatgtcattacggttattt

SEQ ID NO: 330571 - DNA, 25 bp, Artificial
  probe
  misc_feature (1)..(25): SEQ ID NO: 2590; WAN024FV8; Start 574; Stop 598
tcttccaactggatgattgcttctg

SEQ ID NO: 330572 - DNA, 25 bp, Artificial
  probe
  misc_feature (1)..(25): SEQ ID NO: 2590; WAN024FV8; Start 577; Stop 601
tccaactggatgattgcttctgttc

SEQ ID NO: 330573 - DNA, 25 bp, Artificial
  probe
  misc_feature (1)..(25): SEQ ID NO: 2590; WAN024FV8; Start 575; Stop 599
cttccaactggatgattgcttctgt

SEQ ID NO: 330574 - DNA, 25 bp, Artificial
  probe
  misc_feature (1)..(25): SEQ ID NO: 2590; WAN024FV8; Start 132; Stop 156
tgaagatagggcctacagaatacta

SEQ ID NO: 330575 - DNA, 25 bp, Artificial
  probe
  misc_feature (1)..(25): SEQ ID NO: 2590; WAN024FV8; Start 130; Stop 154
cttgaagatagggcctacagaatac

SEQ ID NO: 330576 - DNA, 25 bp, Artificial
  probe
  misc_feature (1)..(25): SEQ ID NO: 2590; WAN024FV8; Start 315; Stop 339
atatgtcattacggttatttcttca

SEQ ID NO: 330577 - DNA, 25 bp, Artificial
  probe
  misc_feature (1)..(25): SEQ ID NO: 2590; WAN024FV8; Start 131; Stop 155
ttgaagatagggcctacagaatact

SEQ ID NO: 330578 - DNA, 25 bp, Artificial
  probe
  misc_feature (1)..(25): SEQ ID NO: 2590; WAN024FV8; Start 129; Stop 153
acttgaagatagggcctacagaata

SEQ ID NO: 330579 - DNA, 25 bp, Artificial
  probe
  misc_feature (1)..(25): SEQ ID NO: 2590; WAN024FV8; Start 133; Stop 157
gaagatagggcctacagaatactaa

SEQ ID NO: 330580 - DNA, 25 bp, Artificial
  probe
  misc_feature (1)..(25): SEQ ID NO: 2590; WAN024FV8; Start 578; Stop 602
ccaactggatgattgcttctgttcc

SEQ ID NO: 330581 - DNA, 25 bp, Artificial
  probe
  misc_feature (1)..(25): SEQ ID NO: 2590; WAN024FV8; Start 128; Stop 152
aacttgaagatagggcctacagaat

SEQ ID NO: 330582 - DNA, 25 bp, Artificial
  probe
  misc_feature (1)..(25): SEQ ID NO: 2590; WAN024FV8; Start 572; Stop 596
cctcttccaactggatgattgcttc

SEQ ID NO: 330583 - DNA, 25 bp, Artificial
  probe
  misc_feature (1)..(25): SEQ ID NO: 2590; WAN024FV8; Start 312; Stop 336
tgaatatgtcattacggttatttct

SEQ ID NO: 330584 - DNA, 25 bp, Artificial
  probe
  misc_feature (1)..(25): SEQ ID NO: 2590; WAN024FV8; Start 134; Stop 158
aagatagggcctacagaatactaaa

SEQ ID NO: 330585 - DNA, 25 bp, Artificial
  probe
  misc_feature (1)..(25): SEQ ID NO: 2590; WAN024FV8; Start 814; Stop 838
cagcaattgtgtcaaatttcagatt

SEQ ID NO: 330586 - DNA, 25 bp, Artificial
  probe
  misc_feature (1)..(25): SEQ ID NO: 2590; WAN024FV8; Start 311; Stop 335
ctgaatatgtcattacggttatttc

SEQ ID NO: 330587 - DNA, 25 bp, Artificial
  probe
  misc_feature (1)..(25): SEQ ID NO: 2590; WAN024FV8; Start 127; Stop 151
caacttgaagatagggcctacagaa

SEQ ID NO: 330588 - DNA, 25 bp, Artificial
  probe
  misc_feature (1)..(25): SEQ ID NO: 2590; WAN024FV8; Start 650; Stop 674
ggtcaaaagaagttatagcaattca

SEQ ID NO: 330589 - DNA, 25 bp, Artificial
  probe
  misc_feature (1)..(25): SEQ ID NO: 2590; WAN024FV8; Start 649; Stop 673
tggtcaaaagaagttatagcaattc

SEQ ID NO: 330590 - DNA, 25 bp, Artificial
  probe
  misc_feature (1)..(25): SEQ ID NO: 2590; WAN024FV8; Start 571; Stop 595
tcctcttccaactggatgattgctt

SEQ ID NO: 330591 - DNA, 25 bp, Artificial
  probe
  misc_feature (1)..(25): SEQ ID NO: 2590; WAN024FV8; Start 815; Stop 839
agcaattgtgtcaaatttcagattt

SEQ ID NO: 330592 - DNA, 25 bp, Artificial
  probe
  misc_feature (1)..(25): SEQ ID NO: 2590; WAN024FV8; Start 481; Stop 505
gtgtattgtacaggaattactacca

SEQ ID NO: 330593 - DNA, 25 bp, Artificial
  probe
  misc_feature (1)..(25): SEQ ID NO: 2591; WAN024CHS-5; Start 262; Stop 286
gattactcgcagacagagattaaga

SEQ ID NO: 330594 - DNA, 25 bp, Artificial
  probe
  misc_feature (1)..(25): SEQ ID NO: 2591; WAN024CHS-5; Start 263; Stop 287
attactcgcagacagagattaagaa

SEQ ID NO: 330595 - DNA, 25 bp, Artificial
  probe
  misc_feature (1)..(25): SEQ ID NO: 2591; WAN024CHS-5; Start 261; Stop 285
ggattactcgcagacagagattaag

SEQ ID NO: 330596 - DNA, 25 bp, Artificial
  probe
  misc_feature (1)..(25): SEQ ID NO: 2591; WAN024CHS-5; Start 260; Stop 284
tggattactcgcagacagagattaa

SEQ ID NO: 330597 - DNA, 25 bp, Artificial
  probe
  misc_feature (1)..(25): SEQ ID NO: 2591; WAN024CHS-5; Start 259; Stop 283
ttggattactcgcagacagagatta

SEQ ID NO: 330598 - DNA, 25 bp, Artificial
  probe
  misc_feature (1)..(25): SEQ ID NO: 2591; WAN024CHS-5; Start 313; Stop 337
cgtactaccaatgacattactcaag

SEQ ID NO: 330599 - DNA, 25 bp, Artificial
  probe
  misc_feature (1)..(25): SEQ ID NO: 2591; WAN024CHS-5; Start 317; Stop 341
ctaccaatgacattactcaagttca

SEQ ID NO: 330600 - DNA, 25 bp, Artificial
  probe
  misc_feature (1)..(25): SEQ ID NO: 2591; WAN024CHS-5; Start 316; Stop 340
actaccaatgacattactcaagttc

SEQ ID NO: 330601 - DNA, 25 bp, Artificial
  probe
  misc_feature (1)..(25): SEQ ID NO: 2591; WAN024CHS-5; Start 312; Stop 336
gcgtactaccaatgacattactcaa

SEQ ID NO: 330602 - DNA, 25 bp, Artificial
  probe
  misc_feature (1)..(25): SEQ ID NO: 2591; WAN024CHS-5; Start 318; Stop 342
taccaatgacattactcaagttcaa

SEQ ID NO: 330603 - DNA, 25 bp, Artificial
  probe
  misc_feature (1)..(25): SEQ ID NO: 2591; WAN024CHS-5; Start 50; Stop 74
tagagttggaagtgccgacctatat

SEQ ID NO: 330604 - DNA, 25 bp, Artificial
  probe
  misc_feature (1)..(25): SEQ ID NO: 2591; WAN024CHS-5; Start 314; Stop 338
gtactaccaatgacattactcaagt

SEQ ID NO: 330605 - DNA, 25 bp, Artificial
  probe
  misc_feature (1)..(25): SEQ ID NO: 2591; WAN024CHS-5; Start 315; Stop 339
tactaccaatgacattactcaagtt

SEQ ID NO: 330606 - DNA, 25 bp, Artificial
  probe
  misc_feature (1)..(25): SEQ ID NO: 2591; WAN024CHS-5; Start 661; Stop 685
tttgtcaaccgtcttatggctattt

SEQ ID NO: 330607 - DNA, 25 bp, Artificial
  probe
  misc_feature (1)..(25): SEQ ID NO: 2591; WAN024CHS-5; Start 655; Stop 679
aatttgtttgtcaaccgtcttatgg

SEQ ID NO: 330608 - DNA, 25 bp, Artificial
  probe
  misc_feature (1)..(25): SEQ ID NO: 2591; WAN024CHS-5; Start 12; Stop 36
tttactagccattctctttacttgc

SEQ ID NO: 330609 - DNA, 25 bp, Artificial
  probe
  misc_feature (1)..(25): SEQ ID NO: 2591; WAN024CHS-5; Start 264; Stop 288
ttactcgcagacagagattaagaaa

SEQ ID NO: 330610 - DNA, 25 bp, Artificial
  probe
  misc_feature (1)..(25): SEQ ID NO: 2591; WAN024CHS-5; Start 265; Stop 289
tactcgcagacagagattaagaaat

SEQ ID NO: 330611 - DNA, 25 bp, Artificial
  probe
  misc_feature (1)..(25): SEQ ID NO: 2591; WAN024CHS-5; Start 266; Stop 290
actcgcagacagagattaagaaatt

SEQ ID NO: 330612 - DNA, 25 bp, Artificial
  probe
  misc_feature (1)..(25): SEQ ID NO: 2591; WAN024CHS-5; Start 556; Stop 580
cgtgagagtttaacaggtattcgtg

SEQ ID NO: 330613 - DNA, 25 bp, Artificial
  probe
  misc_feature (1)..(25): SEQ ID NO: 2591; WAN024CHS-5; Start 555; Stop 579
tcgtgagagtttaacaggtattcgt

SEQ ID NO: 330614 - DNA, 25 bp, Artificial
  probe
  misc_feature (1)..(25): SEQ ID NO: 2591; WAN024CHS-5; Start 539; Stop 563
aactgaacagtatcactcgtgagag

SEQ ID NO: 330615 - DNA, 25 bp, Artificial
  probe
  misc_feature (1)..(25): SEQ ID NO: 2591; WAN024CHS-5; Start 49; Stop 73
ctagagttggaagtgccgacctata

SEQ ID NO: 330616 - DNA, 25 bp, Artificial
  probe
  misc_feature (1)..(25): SEQ ID NO: 2591; WAN024CHS-5; Start 660; Stop 684
gtttgtcaaccgtcttatggctatt

SEQ ID NO: 330617 - DNA, 25 bp, Artificial
  probe
  misc_feature (1)..(25): SEQ ID NO: 2591; WAN024CHS-5; Start 558; Stop 582
tgagagtttaacaggtattcgtgtc

SEQ ID NO: 330618 - DNA, 25 bp, Artificial
  probe
  misc_feature (1)..(25): SEQ ID NO: 2591; WAN024CHS-5; Start 557; Stop 581
gtgagagtttaacaggtattcgtgt

SEQ ID NO: 330619 - DNA, 25 bp, Artificial
  probe
  misc_feature (1)..(25): SEQ ID NO: 2591; WAN024CHS-5; Start 319; Stop 343
accaatgacattactcaagttcaaa

SEQ ID NO: 330620 - DNA, 25 bp, Artificial
  probe
  misc_feature (1)..(25): SEQ ID NO: 2591; WAN024CHS-5; Start 554; Stop 578
ctcgtgagagtttaacaggtattcg

SEQ ID NO: 330621 - DNA, 25 bp, Artificial
  probe
  misc_feature (1)..(25): SEQ ID NO: 2591; WAN024CHS-5; Start 628; Stop 652
gcagtaaatgatgaattgacccgtt

SEQ ID NO: 330622 - DNA, 25 bp, Artificial
  probe
  misc_feature (1)..(25): SEQ ID NO: 2591; WAN024CHS-5; Start 562; Stop 586
agtttaacaggtattcgtgtcgttc

SEQ ID NO: 330623 - DNA, 25 bp, Artificial
  probe
  misc_feature (1)..(25): SEQ ID NO: 2591; WAN024CHS-5; Start 561; Stop 585
gagtttaacaggtattcgtgtcgtt

SEQ ID NO: 330624 - DNA, 25 bp, Artificial
  probe
  misc_feature (1)..(25): SEQ ID NO: 2591; WAN024CHS-5; Start 53; Stop 77
agttggaagtgccgacctatatctc

SEQ ID NO: 330625 - DNA, 25 bp, Artificial
  probe
  misc_feature (1)..(25): SEQ ID NO: 2591; WAN024CHS-5; Start 52; Stop 76
gagttggaagtgccgacctatatct

SEQ ID NO: 330626 - DNA, 25 bp, Artificial
  probe
  misc_feature (1)..(25): SEQ ID NO: 2592; WAN024CL3; Start 253; Stop 277
ttctatgagtctggtgatgtgaaga

SEQ ID NO: 330627 - DNA, 25 bp, Artificial
  probe
  misc_feature (1)..(25): SEQ ID NO: 2592; WAN024CL3; Start 88; Stop 112
gaattggctggtagatatggttctg

SEQ ID NO: 330628 - DNA, 25 bp, Artificial
  probe
  misc_feature (1)..(25): SEQ ID NO: 2592; WAN024CL3; Start 364; Stop 388
tggtattacttgagcaattcaggtg

SEQ ID NO: 330629 - DNA, 25 bp, Artificial
  probe
  misc_feature (1)..(25): SEQ ID NO: 2592; WAN024CL3; Start 69; Stop 93
tgatgatgcttcttcagaggaattg

SEQ ID NO: 330630 - DNA, 25 bp, Artificial
  probe
  misc_feature (1)..(25): SEQ ID NO: 2592; WAN024CL3; Start 68; Stop 92
gtgatgatgcttcttcagaggaatt

SEQ ID NO: 330631 - DNA, 25 bp, Artificial
  probe
  misc_feature (1)..(25): SEQ ID NO: 2592; WAN024CL3; Start 363; Stop 387
ctggtattacttgagcaattcaggt

SEQ ID NO: 330632 - DNA, 25 bp, Artificial
  probe
  misc_feature (1)..(25): SEQ ID NO: 2592; WAN024CL3; Start 85; Stop 109
gaggaattggctggtagatatggtt

SEQ ID NO: 330633 - DNA, 25 bp, Artificial
  probe
  misc_feature (1)..(25): SEQ ID NO: 2592; WAN024CL3; Start 81; Stop 105
ttcagaggaattggctggtagatat

SEQ ID NO: 330634 - DNA, 25 bp, Artificial
  probe
  misc_feature (1)..(25): SEQ ID NO: 2592; WAN024CL3; Start 70; Stop 94
gatgatgcttcttcagaggaattgg

SEQ ID NO: 330635 - DNA, 25 bp, Artificial
  probe
  misc_feature (1)..(25): SEQ ID NO: 2592; WAN024CL3; Start 98; Stop 122
gtagatatggttctgctgttcagtg

SEQ ID NO: 330636 - DNA, 25 bp, Artificial
  probe
  misc_feature (1)..(25): SEQ ID NO: 2592; WAN024CL3; Start 60; Stop 84
aactctaggtgatgatgcttcttca

SEQ ID NO: 330637 - DNA, 25 bp, Artificial
  probe
  misc_feature (1)..(25): SEQ ID NO: 2592; WAN024CL3; Start 95; Stop 119
ctggtagatatggttctgctgttca

SEQ ID NO: 330638 - DNA, 25 bp, Artificial
  probe
  misc_feature (1)..(25): SEQ ID NO: 2592; WAN024CL3; Start 86; Stop 110
aggaattggctggtagatatggttc

SEQ ID NO: 330639 - DNA, 25 bp, Artificial
  probe
  misc_feature (1)..(25): SEQ ID NO: 2592; WAN024CL3; Start 63; Stop 87
tctaggtgatgatgcttcttcagag

SEQ ID NO: 330640 - DNA, 25 bp, Artificial
  probe
  misc_feature (1)..(25): SEQ ID NO: 2592; WAN024CL3; Start 62; Stop 86
ctctaggtgatgatgcttcttcaga

SEQ ID NO: 330641 - DNA, 25 bp, Artificial
  probe
  misc_feature (1)..(25): SEQ ID NO: 2592; WAN024CL3; Start 87; Stop 111
ggaattggctggtagatatggttct

SEQ ID NO: 330642 - DNA, 25 bp, Artificial
  probe
  misc_feature (1)..(25): SEQ ID NO: 2592; WAN024CL3; Start 100; Stop 124
agatatggttctgctgttcagtgta

SEQ ID NO: 330643 - DNA, 25 bp, Artificial
  probe
  misc_feature (1)..(25): SEQ ID NO: 2592; WAN024CL3; Start 99; Stop 123
tagatatggttctgctgttcagtgt

SEQ ID NO: 330644 - DNA, 25 bp, Artificial
  probe
  misc_feature (1)..(25): SEQ ID NO: 2592; WAN024CL3; Start 61; Stop 85
actctaggtgatgatgcttcttcag

SEQ ID NO: 330645 - DNA, 25 bp, Artificial
  probe
  misc_feature (1)..(25): SEQ ID NO: 2592; WAN024CL3; Start 82; Stop 106
tcagaggaattggctggtagatatg

SEQ ID NO: 330646 - DNA, 25 bp, Artificial
  probe
  misc_feature (1)..(25): SEQ ID NO: 2592; WAN024CL3; Start 80; Stop 104
cttcagaggaattggctggtagata

SEQ ID NO: 330647 - DNA, 25 bp, Artificial
  probe
  misc_feature (1)..(25): SEQ ID NO: 2592; WAN024CL3; Start 606; Stop 630
tgtaaatggtaatggtgaatgggta

SEQ ID NO: 330648 - DNA, 25 bp, Artificial
  probe
  misc_feature (1)..(25): SEQ ID NO: 2592; WAN024CL3; Start 248; Stop 272
ggtatttctatgagtctggtgatgt

SEQ ID NO: 330649 - DNA, 25 bp, Artificial
  probe
  misc_feature (1)..(25): SEQ ID NO: 2592; WAN024CL3; Start 247; Stop 271
tggtatttctatgagtctggtgatg

SEQ ID NO: 330650 - DNA, 25 bp, Artificial
  probe
  misc_feature (1)..(25): SEQ ID NO: 2592; WAN024CL3; Start 227; Stop 251
gggtggaatctaatggtaaatggta

SEQ ID NO: 330651 - DNA, 25 bp, Artificial
  probe
  misc_feature (1)..(25): SEQ ID NO: 2592; WAN024CL3; Start 224; Stop 248
gttgggtggaatctaatggtaaatg

SEQ ID NO: 330652 - DNA, 25 bp, Artificial
  probe
  misc_feature (1)..(25): SEQ ID NO: 2592; WAN024CL3; Start 101; Stop 125
gatatggttctgctgttcagtgtac

SEQ ID NO: 330653 - DNA, 25 bp, Artificial
  probe
  misc_feature (1)..(25): SEQ ID NO: 2592; WAN024CL3; Start 609; Stop 633
aaatggtaatggtgaatgggtaaac

SEQ ID NO: 330654 - DNA, 25 bp, Artificial
  probe
  misc_feature (1)..(25): SEQ ID NO: 2592; WAN024CL3; Start 84; Stop 108
agaggaattggctggtagatatggt

SEQ ID NO: 330655 - DNA, 25 bp, Artificial
  probe
  misc_feature (1)..(25): SEQ ID NO: 2592; WAN024CL3; Start 225; Stop 249
ttgggtggaatctaatggtaaatgg

SEQ ID NO: 330656 - DNA, 25 bp, Artificial
  probe
  misc_feature (1)..(25): SEQ ID NO: 2592; WAN024CL3; Start 223; Stop 247
ggttgggtggaatctaatggtaaat

SEQ ID NO: 330657 - DNA, 25 bp, Artificial
  probe
  misc_feature (1)..(25): SEQ ID NO: 2592; WAN024CL3; Start 245; Stop 269
aatggtatttctatgagtctggtga

SEQ ID NO: 330658 - DNA, 25 bp, Artificial
  probe
  misc_feature (1)..(25): SEQ ID NO: 2592; WAN024CL3; Start 97; Stop 121
ggtagatatggttctgctgttcagt

SEQ ID NO: 330659 - DNA, 25 bp, Artificial
  probe
  misc_feature (1)..(25): SEQ ID NO: 2593; WAN024G85; Start 23; Stop 47
atacactgttcaattccgtctgctt

SEQ ID NO: 330660 - DNA, 25 bp, Artificial
  probe
  misc_feature (1)..(25): SEQ ID NO: 2593; WAN024G85; Start 22; Stop 46
aatacactgttcaattccgtctgct

SEQ ID NO: 330661 - DNA, 25 bp, Artificial
  probe
  misc_feature (1)..(25): SEQ ID NO: 2593; WAN024G85; Start 172; Stop 196
cgtgcctccaattcgtacataatta

SEQ ID NO: 330662 - DNA, 25 bp, Artificial
  probe
  misc_feature (1)..(25): SEQ ID NO: 2593; WAN024G85; Start 15; Stop 39
tcaagcaaatacactgttcaattcc

SEQ ID NO: 330663 - DNA, 25 bp, Artificial
  probe
  misc_feature (1)..(25): SEQ ID NO: 2593; WAN024G85; Start 20; Stop 44
caaatacactgttcaattccgtctg

SEQ ID NO: 330664 - DNA, 25 bp, Artificial
  probe
  misc_feature (1)..(25): SEQ ID NO: 2593; WAN024G85; Start 62; Stop 86
acatctggaataaagggactggaaa

SEQ ID NO: 330665 - DNA, 25 bp, Artificial
  probe
  misc_feature (1)..(25): SEQ ID NO: 2593; WAN024G85; Start 16; Stop 40
caagcaaatacactgttcaattccg

SEQ ID NO: 330666 - DNA, 25 bp, Artificial
  probe
  misc_feature (1)..(25): SEQ ID NO: 2593; WAN024G85; Start 14; Stop 38
atcaagcaaatacactgttcaattc

SEQ ID NO: 330667 - DNA, 25 bp, Artificial
  probe
  misc_feature (1)..(25): SEQ ID NO: 2593; WAN024G85; Start 24; Stop 48
tacactgttcaattccgtctgcttc

SEQ ID NO: 330668 - DNA, 25 bp, Artificial
  probe
  misc_feature (1)..(25): SEQ ID NO: 2593; WAN024G85; Start 58; Stop 82
gatcacatctggaataaagggactg

SEQ ID NO: 330669 - DNA, 25 bp, Artificial
  probe
  misc_feature (1)..(25): SEQ ID NO: 2593; WAN024G85; Start 17; Stop 41
aagcaaatacactgttcaattccgt

SEQ ID NO: 330670 - DNA, 25 bp, Artificial
  probe
  misc_feature (1)..(25): SEQ ID NO: 2593; WAN024G85; Start 13; Stop 37
aatcaagcaaatacactgttcaatt

SEQ ID NO: 330671 - DNA, 25 bp, Artificial
  probe
  misc_feature (1)..(25): SEQ ID NO: 2593; WAN024G85; Start 12; Stop 36
aaatcaagcaaatacactgttcaat

SEQ ID NO: 330672 - DNA, 25 bp, Artificial
  probe
  misc_feature (1)..(25): SEQ ID NO: 2593; WAN024G85; Start 59; Stop 83
atcacatctggaataaagggactgg

SEQ ID NO: 330673 - DNA, 25 bp, Artificial
  probe
  misc_feature (1)..(25): SEQ ID NO: 2593; WAN024G85; Start 50; Stop 74
atttgaccgatcacatctggaataa

SEQ ID NO: 330674 - DNA, 25 bp, Artificial
  probe
  misc_feature (1)..(25): SEQ ID NO: 2593; WAN024G85; Start 51; Stop 75
tttgaccgatcacatctggaataaa

SEQ ID NO: 330675 - DNA, 25 bp, Artificial
  probe
  misc_feature (1)..(25): SEQ ID NO: 2593; WAN024G85; Start 61; Stop 85
cacatctggaataaagggactggaa

SEQ ID NO: 330676 - DNA, 25 bp, Artificial
  probe
  misc_feature (1)..(25): SEQ ID NO: 2593; WAN024G85; Start 52; Stop 76
ttgaccgatcacatctggaataaag

SEQ ID NO: 330677 - DNA, 25 bp, Artificial
  probe
  misc_feature (1)..(25): SEQ ID NO: 2593; WAN024G85; Start 49; Stop 73
catttgaccgatcacatctggaata

SEQ ID NO: 330678 - DNA, 25 bp, Artificial
  probe
  misc_feature (1)..(25): SEQ ID NO: 2593; WAN024G85; Start 21; Stop 45
aaatacactgttcaattccgtctgc

SEQ ID NO: 330679 - DNA, 25 bp, Artificial
  probe
  misc_feature (1)..(25): SEQ ID NO: 2593; WAN024G85; Start 19; Stop 43
gcaaatacactgttcaattccgtct

SEQ ID NO: 330680 - DNA, 25 bp, Artificial
  probe
  misc_feature (1)..(25): SEQ ID NO: 2593; WAN024G85; Start 18; Stop 42
agcaaatacactgttcaattccgtc

SEQ ID NO: 330681 - DNA, 25 bp, Artificial
  probe
  misc_feature (1)..(25): SEQ ID NO: 2593; WAN024G85; Start 91; Stop 115
attagcaaagtagacactgtattca

SEQ ID NO: 330682 - DNA, 25 bp, Artificial
  probe
  misc_feature (1)..(25): SEQ ID NO: 2593; WAN024G85; Start 28; Stop 52
ctgttcaattccgtctgcttccatt

SEQ ID NO: 330683 - DNA, 25 bp, Artificial
  probe
  misc_feature (1)..(25): SEQ ID NO: 2593; WAN024G85; Start 57; Stop 81
cgatcacatctggaataaagggact

SEQ ID NO: 330684 - DNA, 25 bp, Artificial
  probe
  misc_feature (1)..(25): SEQ ID NO: 2593; WAN024G85; Start 173; Stop 197
gtgcctccaattcgtacataattat

SEQ ID NO: 330685 - DNA, 25 bp, Artificial
  probe
  misc_feature (1)..(25): SEQ ID NO: 2593; WAN024G85; Start 175; Stop 199
gcctccaattcgtacataattatca

SEQ ID NO: 330686 - DNA, 25 bp, Artificial
  probe
  misc_feature (1)..(25): SEQ ID NO: 2593; WAN024G85; Start 174; Stop 198
tgcctccaattcgtacataattatc

SEQ ID NO: 330687 - DNA, 25 bp, Artificial
  probe
  misc_feature (1)..(25): SEQ ID NO: 2593; WAN024G85; Start 60; Stop 84
tcacatctggaataaagggactgga

SEQ ID NO: 330688 - DNA, 25 bp, Artificial
  probe
  misc_feature (1)..(25): SEQ ID NO: 2593; WAN024G85; Start 53; Stop 77
tgaccgatcacatctggaataaagg

SEQ ID NO: 330689 - DNA, 25 bp, Artificial
  probe
  misc_feature (1)..(25): SEQ ID NO: 2593; WAN024G85; Start 75; Stop 99
agggactggaaaacttattagcaaa

SEQ ID NO: 330690 - DNA, 25 bp, Artificial
  probe
  misc_feature (1)..(25): SEQ ID NO: 2593; WAN024G85; Start 56; Stop 80
ccgatcacatctggaataaagggac

SEQ ID NO: 330691 - DNA, 25 bp, Artificial
  probe
  misc_feature (1)..(25): SEQ ID NO: 2593; WAN024G85; Start 54; Stop 78
gaccgatcacatctggaataaaggg

SEQ ID NO: 330692 - DNA, 25 bp, Artificial
  probe
  misc_feature (1)..(25): SEQ ID NO: 2594; WAN024D24; Start 46; Stop 70
ttagtagtagcaggagttatgacct

SEQ ID NO: 330693 - DNA, 25 bp, Artificial
  probe
  misc_feature (1)..(25): SEQ ID NO: 2594; WAN024D24; Start 48; Stop 72
agtagtagcaggagttatgacctat

SEQ ID NO: 330694 - DNA, 25 bp, Artificial
  probe
  misc_feature (1)..(25): SEQ ID NO: 2594; WAN024D24; Start 49; Stop 73
gtagtagcaggagttatgacctatc

SEQ ID NO: 330695 - DNA, 25 bp, Artificial
  probe
  misc_feature (1)..(25): SEQ ID NO: 2594; WAN024D24; Start 50; Stop 74
tagtagcaggagttatgacctatct

SEQ ID NO: 330696 - DNA, 25 bp, Artificial
  probe
  misc_feature (1)..(25): SEQ ID NO: 2594; WAN024D24; Start 51; Stop 75
agtagcaggagttatgacctatctc

SEQ ID NO: 330697 - DNA, 25 bp, Artificial
  probe
  misc_feature (1)..(25): SEQ ID NO: 2594; WAN024D24; Start 47; Stop 71
tagtagtagcaggagttatgaccta

SEQ ID NO: 330698 - DNA, 25 bp, Artificial
  probe
  misc_feature (1)..(25): SEQ ID NO: 2594; WAN024D24; Start 142; Stop 166
atgtcttggcttgttagagaaggtt

SEQ ID NO: 330699 - DNA, 25 bp, Artificial
  probe
  misc_feature (1)..(25): SEQ ID NO: 2594; WAN024D24; Start 52; Stop 76
gtagcaggagttatgacctatctca

SEQ ID NO: 330700 - DNA, 25 bp, Artificial
  probe
  misc_feature (1)..(25): SEQ ID NO: 2594; WAN024D24; Start 38; Stop 62
caatgagtttagtagtagcaggagt

SEQ ID NO: 330701 - DNA, 25 bp, Artificial
  probe
  misc_feature (1)..(25): SEQ ID NO: 2594; WAN024D24; Start 45; Stop 69
tttagtagtagcaggagttatgacc

SEQ ID NO: 330702 - DNA, 25 bp, Artificial
  probe
  misc_feature (1)..(25): SEQ ID NO: 2594; WAN024D24; Start 39; Stop 63
aatgagtttagtagtagcaggagtt

SEQ ID NO: 330703 - DNA, 25 bp, Artificial
  probe
  misc_feature (1)..(25): SEQ ID NO: 2594; WAN024D24; Start 37; Stop 61
gcaatgagtttagtagtagcaggag

SEQ ID NO: 330704 - DNA, 25 bp, Artificial
  probe
  misc_feature (1)..(25): SEQ ID NO: 2594; WAN024D24; Start 149; Stop 173
ggcttgttagagaaggtttgaaatt

SEQ ID NO: 330705 - DNA, 25 bp, Artificial
  probe
  misc_feature (1)..(25): SEQ ID NO: 2594; WAN024D24; Start 148; Stop 172
tggcttgttagagaaggtttgaaat

SEQ ID NO: 330706 - DNA, 25 bp, Artificial
  probe
  misc_feature (1)..(25): SEQ ID NO: 2594; WAN024D24; Start 147; Stop 171
ttggcttgttagagaaggtttgaaa

SEQ ID NO: 330707 - DNA, 25 bp, Artificial
  probe
  misc_feature (1)..(25): SEQ ID NO: 2594; WAN024D24; Start 44; Stop 68
gtttagtagtagcaggagttatgac

SEQ ID NO: 330708 - DNA, 25 bp, Artificial
  probe
  misc_feature (1)..(25): SEQ ID NO: 2594; WAN024D24; Start 43; Stop 67
agtttagtagtagcaggagttatga

SEQ ID NO: 330709 - DNA, 25 bp, Artificial
  probe
  misc_feature (1)..(25): SEQ ID NO: 2594; WAN024D24; Start 41; Stop 65
tgagtttagtagtagcaggagttat

SEQ ID NO: 330710 - DNA, 25 bp, Artificial
  probe
  misc_feature (1)..(25): SEQ ID NO: 2594; WAN024D24; Start 40; Stop 64
atgagtttagtagtagcaggagtta

SEQ ID NO: 330711 - DNA, 25 bp, Artificial
  probe
  misc_feature (1)..(25): SEQ ID NO: 2594; WAN024D24; Start 146; Stop 170
cttggcttgttagagaaggtttgaa

SEQ ID NO: 330712 - DNA, 25 bp, Artificial
  probe
  misc_feature (1)..(25): SEQ ID NO: 2594; WAN024D24; Start 42; Stop 66
gagtttagtagtagcaggagttatg

SEQ ID NO: 330713 - DNA, 25 bp, Artificial
  probe
  misc_feature (1)..(25): SEQ ID NO: 2594; WAN024D24; Start 53; Stop 77
tagcaggagttatgacctatctcat

SEQ ID NO: 330714 - DNA, 25 bp, Artificial
  probe
  misc_feature (1)..(25): SEQ ID NO: 2594; WAN024D24; Start 56; Stop 80
caggagttatgacctatctcatgtt

SEQ ID NO: 330715 - DNA, 25 bp, Artificial
  probe
  misc_feature (1)..(25): SEQ ID NO: 2594; WAN024D24; Start 145; Stop 169
tcttggcttgttagagaaggtttga

SEQ ID NO: 330716 - DNA, 25 bp, Artificial
  probe
  misc_feature (1)..(25): SEQ ID NO: 2594; WAN024D24; Start 144; Stop 168
gtcttggcttgttagagaaggtttg

SEQ ID NO: 330717 - DNA, 25 bp, Artificial
  probe
  misc_feature (1)..(25): SEQ ID NO: 2594; WAN024D24; Start 150; Stop 174
gcttgttagagaaggtttgaaatta

SEQ ID NO: 330718 - DNA, 25 bp, Artificial
  probe
  misc_feature (1)..(25): SEQ ID NO: 2594; WAN024D24; Start 143; Stop 167
tgtcttggcttgttagagaaggttt

SEQ ID NO: 330719 - DNA, 25 bp, Artificial
  probe
  misc_feature (1)..(25): SEQ ID NO: 2594; WAN024D24; Start 54; Stop 78
agcaggagttatgacctatctcatg

SEQ ID NO: 330720 - DNA, 25 bp, Artificial
  probe
  misc_feature (1)..(25): SEQ ID NO: 2594; WAN024D24; Start 55; Stop 79
gcaggagttatgacctatctcatgt

SEQ ID NO: 330721 - DNA, 25 bp, Artificial
  probe
  misc_feature (1)..(25): SEQ ID NO: 2594; WAN024D24; Start 153; Stop 177
tgttagagaaggtttgaaattagtc

SEQ ID NO: 330722 - DNA, 25 bp, Artificial
  probe
  misc_feature (1)..(25): SEQ ID NO: 2594; WAN024D24; Start 152; Stop 176
ttgttagagaaggtttgaaattagt

SEQ ID NO: 330723 - DNA, 25 bp, Artificial
  probe
  misc_feature (1)..(25): SEQ ID NO: 2594; WAN024D24; Start 4; Stop 28
ggggaagaagagatgagaaataaaa

SEQ ID NO: 330724 - DNA, 25 bp, Artificial
  probe
  misc_feature (1)..(25): SEQ ID NO: 2594; WAN024D24; Start 57; Stop 81
aggagttatgacctatctcatgttt

SEQ ID NO: 330725 - DNA, 25 bp, Artificial
  probe
  misc_feature (1)..(25): SEQ ID NO: 2595; WAN024FR8; Start 734; Stop 758
agaatgcggataaggtgattagaat

SEQ ID NO: 330726 - DNA, 25 bp, Artificial
  probe
  misc_feature (1)..(25): SEQ ID NO: 2595; WAN024FR8; Start 820; Stop 844
aggagtggtgatatgaagagagtat

SEQ ID NO: 330727 - DNA, 25 bp, Artificial
  probe
  misc_feature (1)..(25): SEQ ID NO: 2595; WAN024FR8; Start 818; Stop 842
ataggagtggtgatatgaagagagt

SEQ ID NO: 330728 - DNA, 25 bp, Artificial
  probe
  misc_feature (1)..(25): SEQ ID NO: 2595; WAN024FR8; Start 815; Stop 839
cgtataggagtggtgatatgaagag

SEQ ID NO: 330729 - DNA, 25 bp, Artificial
  probe
  misc_feature (1)..(25): SEQ ID NO: 2595; WAN024FR8; Start 733; Stop 757
gagaatgcggataaggtgattagaa

SEQ ID NO: 330730 - DNA, 25 bp, Artificial
  probe
  misc_feature (1)..(25): SEQ ID NO: 2595; WAN024FR8; Start 819; Stop 843
taggagtggtgatatgaagagagta

SEQ ID NO: 330731 - DNA, 25 bp, Artificial
  probe
  misc_feature (1)..(25): SEQ ID NO: 2595; WAN024FR8; Start 821; Stop 845
ggagtggtgatatgaagagagtatt

SEQ ID NO: 330732 - DNA, 25 bp, Artificial
  probe
  misc_feature (1)..(25): SEQ ID NO: 2595; WAN024FR8; Start 731; Stop 755
ttgagaatgcggataaggtgattag

SEQ ID NO: 330733 - DNA, 25 bp, Artificial
  probe
  misc_feature (1)..(25): SEQ ID NO: 2595; WAN024FR8; Start 735; Stop 759
gaatgcggataaggtgattagaatt

SEQ ID NO: 330734 - DNA, 25 bp, Artificial
  probe
  misc_feature (1)..(25): SEQ ID NO: 2595; WAN024FR8; Start 1167; Stop 1191
tggagaagcatctattatgattggt

SEQ ID NO: 330735 - DNA, 25 bp, Artificial
  probe
  misc_feature (1)..(25): SEQ ID NO: 2595; WAN024FR8; Start 957; Stop 981
ccaaggaatagataaggttctgtct

SEQ ID NO: 330736 - DNA, 25 bp, Artificial
  probe
  misc_feature (1)..(25): SEQ ID NO: 2595; WAN024FR8; Start 970; Stop 994
aaggttctgtctgttctagtattgg

SEQ ID NO: 330737 - DNA, 25 bp, Artificial
  probe
  misc_feature (1)..(25): SEQ ID NO: 2595; WAN024FR8; Start 812; Stop 836
atgcgtataggagtggtgatatgaa

SEQ ID NO: 330738 - DNA, 25 bp, Artificial
  probe
  misc_feature (1)..(25): SEQ ID NO: 2595; WAN024FR8; Start 973; Stop 997
gttctgtctgttctagtattggagt

SEQ ID NO: 330739 - DNA, 25 bp, Artificial
  probe
  misc_feature (1)..(25): SEQ ID NO: 2595; WAN024FR8; Start 732; Stop 756
tgagaatgcggataaggtgattaga

SEQ ID NO: 330740 - DNA, 25 bp, Artificial
  probe
  misc_feature (1)..(25): SEQ ID NO: 2595; WAN024FR8; Start 1168; Stop 1192
ggagaagcatctattatgattggtg

SEQ ID NO: 330741 - DNA, 25 bp, Artificial
  probe
  misc_feature (1)..(25): SEQ ID NO: 2595; WAN024FR8; Start 1155; Stop 1179
ttcatctgtaattggagaagcatct

SEQ ID NO: 330742 - DNA, 25 bp, Artificial
  probe
  misc_feature (1)..(25): SEQ ID NO: 2595; WAN024FR8; Start 972; Stop 996
ggttctgtctgttctagtattggag

SEQ ID NO: 330743 - DNA, 25 bp, Artificial
  probe
  misc_feature (1)..(25): SEQ ID NO: 2595; WAN024FR8; Start 816; Stop 840
gtataggagtggtgatatgaagaga

SEQ ID NO: 330744 - DNA, 25 bp, Artificial
  probe
  misc_feature (1)..(25): SEQ ID NO: 2595; WAN024FR8; Start 971; Stop 995
aggttctgtctgttctagtattgga

SEQ ID NO: 330745 - DNA, 25 bp, Artificial
  probe
  misc_feature (1)..(25): SEQ ID NO: 2595; WAN024FR8; Start 1156; Stop 1180
tcatctgtaattggagaagcatcta

SEQ ID NO: 330746 - DNA, 25 bp, Artificial
  probe
  misc_feature (1)..(25): SEQ ID NO: 2595; WAN024FR8; Start 974; Stop 998
ttctgtctgttctagtattggagtt

SEQ ID NO: 330747 - DNA, 25 bp, Artificial
  probe
  misc_feature (1)..(25): SEQ ID NO: 2595; WAN024FR8; Start 814; Stop 838
gcgtataggagtggtgatatgaaga

SEQ ID NO: 330748 - DNA, 25 bp, Artificial
  probe
  misc_feature (1)..(25): SEQ ID NO: 2595; WAN024FR8; Start 956; Stop 980
tccaaggaatagataaggttctgtc

SEQ ID NO: 330749 - DNA, 25 bp, Artificial
  probe
  misc_feature (1)..(25): SEQ ID NO: 2595; WAN024FR8; Start 960; Stop 984
aggaatagataaggttctgtctgtt

SEQ ID NO: 330750 - DNA, 25 bp, Artificial
  probe
  misc_feature (1)..(25): SEQ ID NO: 2595; WAN024FR8; Start 959; Stop 983
aaggaatagataaggttctgtctgt

SEQ ID NO: 330751 - DNA, 25 bp, Artificial
  probe
  misc_feature (1)..(25): SEQ ID NO: 2595; WAN024FR8; Start 817; Stop 841
tataggagtggtgatatgaagagag

SEQ ID NO: 330752 - DNA, 25 bp, Artificial
  probe
  misc_feature (1)..(25): SEQ ID NO: 2595; WAN024FR8; Start 1166; Stop 1190
ttggagaagcatctattatgattgg

SEQ ID NO: 330753 - DNA, 25 bp, Artificial
  probe
  misc_feature (1)..(25): SEQ ID NO: 2595; WAN024FR8; Start 961; Stop 985
ggaatagataaggttctgtctgttc

SEQ ID NO: 330754 - DNA, 25 bp, Artificial
  probe
  misc_feature (1)..(25): SEQ ID NO: 2595; WAN024FR8; Start 958; Stop 982
caaggaatagataaggttctgtctg

SEQ ID NO: 330755 - DNA, 25 bp, Artificial
  probe
  misc_feature (1)..(25): SEQ ID NO: 2595; WAN024FR8; Start 813; Stop 837
tgcgtataggagtggtgatatgaag

SEQ ID NO: 330756 - DNA, 25 bp, Artificial
  probe
  misc_feature (1)..(25): SEQ ID NO: 2595; WAN024FR8; Start 1169; Stop 1193
gagaagcatctattatgattggtga

SEQ ID NO: 330757 - DNA, 25 bp, Artificial
  probe
  misc_feature (1)..(25): SEQ ID NO: 2595; WAN024FR8; Start 824; Stop 848
gtggtgatatgaagagagtattagg

SEQ ID NO: 330758 - DNA, 25 bp, Artificial
  probe
  misc_feature (1)..(25): SEQ ID NO: 2596; WAN024CBJ; Start 141; Stop 165
gagtagagagtcacaaaggtcattt

SEQ ID NO: 330759 - DNA, 25 bp, Artificial
  probe
  misc_feature (1)..(25): SEQ ID NO: 2596; WAN024CBJ; Start 14; Stop 38
ttcgtgtcgtaaatctactatctct

SEQ ID NO: 330760 - DNA, 25 bp, Artificial
  probe
  misc_feature (1)..(25): SEQ ID NO: 2596; WAN024CBJ; Start 27; Stop 51
tctactatctctacattcccaaaca

SEQ ID NO: 330761 - DNA, 25 bp, Artificial
  probe
  misc_feature (1)..(25): SEQ ID NO: 2596; WAN024CBJ; Start 16; Stop 40
cgtgtcgtaaatctactatctctac

SEQ ID NO: 330762 - DNA, 25 bp, Artificial
  probe
  misc_feature (1)..(25): SEQ ID NO: 2596; WAN024CBJ; Start 13; Stop 37
tttcgtgtcgtaaatctactatctc

SEQ ID NO: 330763 - DNA, 25 bp, Artificial
  probe
  misc_feature (1)..(25): SEQ ID NO: 2596; WAN024CBJ; Start 15; Stop 39
tcgtgtcgtaaatctactatctcta

SEQ ID NO: 330764 - DNA, 25 bp, Artificial
  probe
  misc_feature (1)..(25): SEQ ID NO: 2596; WAN024CBJ; Start 140; Stop 164
cgagtagagagtcacaaaggtcatt

SEQ ID NO: 330765 - DNA, 25 bp, Artificial
  probe
  misc_feature (1)..(25): SEQ ID NO: 2596; WAN024CBJ; Start 28; Stop 52
ctactatctctacattcccaaacaa

SEQ ID NO: 330766 - DNA, 25 bp, Artificial
  probe
  misc_feature (1)..(25): SEQ ID NO: 2596; WAN024CBJ; Start 29; Stop 53
tactatctctacattcccaaacaaa

SEQ ID NO: 330767 - DNA, 25 bp, Artificial
  probe
  misc_feature (1)..(25): SEQ ID NO: 2596; WAN024CBJ; Start 26; Stop 50
atctactatctctacattcccaaac

SEQ ID NO: 330768 - DNA, 25 bp, Artificial
  probe
  misc_feature (1)..(25): SEQ ID NO: 2596; WAN024CBJ; Start 98; Stop 122
aaatacaaaccaaacgacataggtc

SEQ ID NO: 330769 - DNA, 25 bp, Artificial
  probe
  misc_feature (1)..(25): SEQ ID NO: 2596; WAN024CBJ; Start 99; Stop 123
aatacaaaccaaacgacataggtca

SEQ ID NO: 330770 - DNA, 25 bp, Artificial
  probe
  misc_feature (1)..(25): SEQ ID NO: 2596; WAN024CBJ; Start 190; Stop 214
gttccagtttggcaaatagaagatt

SEQ ID NO: 330771 - DNA, 25 bp, Artificial
  probe
  misc_feature (1)..(25): SEQ ID NO: 2596; WAN024CBJ; Start 100; Stop 124
atacaaaccaaacgacataggtcac

SEQ ID NO: 330772 - DNA, 25 bp, Artificial
  probe
  misc_feature (1)..(25): SEQ ID NO: 2596; WAN024CBJ; Start 17; Stop 41
gtgtcgtaaatctactatctctaca

SEQ ID NO: 330773 - DNA, 25 bp, Artificial
  probe
  misc_feature (1)..(25): SEQ ID NO: 2596; WAN024CBJ; Start 189; Stop 213
cgttccagtttggcaaatagaagat

SEQ ID NO: 330774 - DNA, 25 bp, Artificial
  probe
  misc_feature (1)..(25): SEQ ID NO: 2596; WAN024CBJ; Start 25; Stop 49
aatctactatctctacattcccaaa

SEQ ID NO: 330775 - DNA, 25 bp, Artificial
  probe
  misc_feature (1)..(25): SEQ ID NO: 2596; WAN024CBJ; Start 24; Stop 48
aaatctactatctctacattcccaa

SEQ ID NO: 330776 - DNA, 25 bp, Artificial
  probe
  misc_feature (1)..(25): SEQ ID NO: 2596; WAN024CBJ; Start 142; Stop 166
agtagagagtcacaaaggtcatttt

SEQ ID NO: 330777 - DNA, 25 bp, Artificial
  probe
  misc_feature (1)..(25): SEQ ID NO: 2596; WAN024CBJ; Start 144; Stop 168
tagagagtcacaaaggtcattttcc

SEQ ID NO: 330778 - DNA, 25 bp, Artificial
  probe
  misc_feature (1)..(25): SEQ ID NO: 2596; WAN024CBJ; Start 143; Stop 167
gtagagagtcacaaaggtcattttc

SEQ ID NO: 330779 - DNA, 25 bp, Artificial
  probe
  misc_feature (1)..(25): SEQ ID NO: 2596; WAN024CBJ; Start 154; Stop 178
caaaggtcattttccacaagaactt

SEQ ID NO: 330780 - DNA, 25 bp, Artificial
  probe
  misc_feature (1)..(25): SEQ ID NO: 2596; WAN024CBJ; Start 136; Stop 160
aaagcgagtagagagtcacaaaggt

SEQ ID NO: 330781 - DNA, 25 bp, Artificial
  probe
  misc_feature (1)..(25): SEQ ID NO: 2596; WAN024CBJ; Start 153; Stop 177
acaaaggtcattttccacaagaact

SEQ ID NO: 330782 - DNA, 25 bp, Artificial
  probe
  misc_feature (1)..(25): SEQ ID NO: 2596; WAN024CBJ; Start 152; Stop 176
cacaaaggtcattttccacaagaac

SEQ ID NO: 330783 - DNA, 25 bp, Artificial
  probe
  misc_feature (1)..(25): SEQ ID NO: 2596; WAN024CBJ; Start 151; Stop 175
tcacaaaggtcattttccacaagaa

SEQ ID NO: 330784 - DNA, 25 bp, Artificial
  probe
  misc_feature (1)..(25): SEQ ID NO: 2596; WAN024CBJ; Start 149; Stop 173
agtcacaaaggtcattttccacaag

SEQ ID NO: 330785 - DNA, 25 bp, Artificial
  probe
  misc_feature (1)..(25): SEQ ID NO: 2596; WAN024CBJ; Start 188; Stop 212
tcgttccagtttggcaaatagaaga

SEQ ID NO: 330786 - DNA, 25 bp, Artificial
  probe
  misc_feature (1)..(25): SEQ ID NO: 2596; WAN024CBJ; Start 30; Stop 54
actatctctacattcccaaacaaaa

SEQ ID NO: 330787 - DNA, 25 bp, Artificial
  probe
  misc_feature (1)..(25): SEQ ID NO: 2596; WAN024CBJ; Start 7; Stop 31
tggaattttcgtgtcgtaaatctac

SEQ ID NO: 330788 - DNA, 25 bp, Artificial
  probe
  misc_feature (1)..(25): SEQ ID NO: 2596; WAN024CBJ; Start 6; Stop 30
gtggaattttcgtgtcgtaaatcta

SEQ ID NO: 330789 - DNA, 25 bp, Artificial
  probe
  misc_feature (1)..(25): SEQ ID NO: 2596; WAN024CBJ; Start 150; Stop 174
gtcacaaaggtcattttccacaaga

SEQ ID NO: 330790 - DNA, 25 bp, Artificial
  probe
  misc_feature (1)..(25): SEQ ID NO: 2596; WAN024CBJ; Start 148; Stop 172
gagtcacaaaggtcattttccacaa

SEQ ID NO: 330791 - DNA, 25 bp, Artificial
  probe
  misc_feature (1)..(25): SEQ ID NO: 2597; WAN024GHG; Start 440; Stop 464
cagttgtcgtagcagatgtacctag

SEQ ID NO: 330792 - DNA, 25 bp, Artificial
  probe
  misc_feature (1)..(25): SEQ ID NO: 2597; WAN024GHG; Start 442; Stop 466
gttgtcgtagcagatgtacctagtg

SEQ ID NO: 330793 - DNA, 25 bp, Artificial
  probe
  misc_feature (1)..(25): SEQ ID NO: 2597; WAN024GHG; Start 441; Stop 465
agttgtcgtagcagatgtacctagt

SEQ ID NO: 330794 - DNA, 25 bp, Artificial
  probe
  misc_feature (1)..(25): SEQ ID NO: 2597; WAN024GHG; Start 443; Stop 467
ttgtcgtagcagatgtacctagtga

SEQ ID NO: 330795 - DNA, 25 bp, Artificial
  probe
  misc_feature (1)..(25): SEQ ID NO: 2597; WAN024GHG; Start 494; Stop 518
agattgtccgtcttcatggtaagaa

SEQ ID NO: 330796 - DNA, 25 bp, Artificial
  probe
  misc_feature (1)..(25): SEQ ID NO: 2597; WAN024GHG; Start 493; Stop 517
aagattgtccgtcttcatggtaaga

SEQ ID NO: 330797 - DNA, 25 bp, Artificial
  probe
  misc_feature (1)..(25): SEQ ID NO: 2597; WAN024GHG; Start 492; Stop 516
caagattgtccgtcttcatggtaag

SEQ ID NO: 330798 - DNA, 25 bp, Artificial
  probe
  misc_feature (1)..(25): SEQ ID NO: 2597; WAN024GHG; Start 258; Stop 282
gattggagagacagcgattgttgaa

SEQ ID NO: 330799 - DNA, 25 bp, Artificial
  probe
  misc_feature (1)..(25): SEQ ID NO: 2597; WAN024GHG; Start 189; Stop 213
tcagattgagattcatccaggagcc

SEQ ID NO: 330800 - DNA, 25 bp, Artificial
  probe
  misc_feature (1)..(25): SEQ ID NO: 2597; WAN024GHG; Start 491; Stop 515
ccaagattgtccgtcttcatggtaa

SEQ ID NO: 330801 - DNA, 25 bp, Artificial
  probe
  misc_feature (1)..(25): SEQ ID NO: 2597; WAN024GHG; Start 439; Stop 463
gcagttgtcgtagcagatgtaccta

SEQ ID NO: 330802 - DNA, 25 bp, Artificial
  probe
  misc_feature (1)..(25): SEQ ID NO: 2597; WAN024GHG; Start 259; Stop 283
attggagagacagcgattgttgaaa

SEQ ID NO: 330803 - DNA, 25 bp, Artificial
  probe
  misc_feature (1)..(25): SEQ ID NO: 2597; WAN024GHG; Start 256; Stop 280
gtgattggagagacagcgattgttg

SEQ ID NO: 330804 - DNA, 25 bp, Artificial
  probe
  misc_feature (1)..(25): SEQ ID NO: 2597; WAN024GHG; Start 496; Stop 520
attgtccgtcttcatggtaagaaag

SEQ ID NO: 330805 - DNA, 25 bp, Artificial
  probe
  misc_feature (1)..(25): SEQ ID NO: 2597; WAN024GHG; Start 495; Stop 519
gattgtccgtcttcatggtaagaaa

SEQ ID NO: 330806 - DNA, 25 bp, Artificial
  probe
  misc_feature (1)..(25): SEQ ID NO: 2597; WAN024GHG; Start 61; Stop 85
actttggaggttttgctgacttatc

SEQ ID NO: 330807 - DNA, 25 bp, Artificial
  probe
  misc_feature (1)..(25): SEQ ID NO: 2597; WAN024GHG; Start 584; Stop 608
ctaaagatgccagtcacagatcgtc

SEQ ID NO: 330808 - DNA, 25 bp, Artificial
  probe
  misc_feature (1)..(25): SEQ ID NO: 2597; WAN024GHG; Start 187; Stop 211
actcagattgagattcatccaggag

SEQ ID NO: 330809 - DNA, 25 bp, Artificial
  probe
  misc_feature (1)..(25): SEQ ID NO: 2597; WAN024GHG; Start 186; Stop 210
gactcagattgagattcatccagga

SEQ ID NO: 330810 - DNA, 25 bp, Artificial
  probe
  misc_feature (1)..(25): SEQ ID NO: 2597; WAN024GHG; Start 499; Stop 523
gtccgtcttcatggtaagaaagatg

SEQ ID NO: 330811 - DNA, 25 bp, Artificial
  probe
  misc_feature (1)..(25): SEQ ID NO: 2597; WAN024GHG; Start 257; Stop 281
tgattggagagacagcgattgttga

SEQ ID NO: 330812 - DNA, 25 bp, Artificial
  probe
  misc_feature (1)..(25): SEQ ID NO: 2597; WAN024GHG; Start 501; Stop 525
ccgtcttcatggtaagaaagatgag

SEQ ID NO: 330813 - DNA, 25 bp, Artificial
  probe
  misc_feature (1)..(25): SEQ ID NO: 2597; WAN024GHG; Start 60; Stop 84
cactttggaggttttgctgacttat

SEQ ID NO: 330814 - DNA, 25 bp, Artificial
  probe
  misc_feature (1)..(25): SEQ ID NO: 2597; WAN024GHG; Start 505; Stop 529
cttcatggtaagaaagatgagcctg

SEQ ID NO: 330815 - DNA, 25 bp, Artificial
  probe
  misc_feature (1)..(25): SEQ ID NO: 2597; WAN024GHG; Start 504; Stop 528
tcttcatggtaagaaagatgagcct

SEQ ID NO: 330816 - DNA, 25 bp, Artificial
  probe
  misc_feature (1)..(25): SEQ ID NO: 2597; WAN024GHG; Start 503; Stop 527
gtcttcatggtaagaaagatgagcc

SEQ ID NO: 330817 - DNA, 25 bp, Artificial
  probe
  misc_feature (1)..(25): SEQ ID NO: 2597; WAN024GHG; Start 498; Stop 522
tgtccgtcttcatggtaagaaagat

SEQ ID NO: 330818 - DNA, 25 bp, Artificial
  probe
  misc_feature (1)..(25): SEQ ID NO: 2597; WAN024GHG; Start 500; Stop 524
tccgtcttcatggtaagaaagatga

SEQ ID NO: 330819 - DNA, 25 bp, Artificial
  probe
  misc_feature (1)..(25): SEQ ID NO: 2597; WAN024GHG; Start 497; Stop 521
ttgtccgtcttcatggtaagaaaga

SEQ ID NO: 330820 - DNA, 25 bp, Artificial
  probe
  misc_feature (1)..(25): SEQ ID NO: 2597; WAN024GHG; Start 502; Stop 526
cgtcttcatggtaagaaagatgagc

SEQ ID NO: 330821 - DNA, 25 bp, Artificial
  probe
  misc_feature (1)..(25): SEQ ID NO: 2597; WAN024GHG; Start 585; Stop 609
taaagatgccagtcacagatcgtct

SEQ ID NO: 330822 - DNA, 25 bp, Artificial
  probe
  misc_feature (1)..(25): SEQ ID NO: 2597; WAN024GHG; Start 506; Stop 530
ttcatggtaagaaagatgagcctgt

SEQ ID NO: 330823 - DNA, 25 bp, Artificial
  probe
  misc_feature (1)..(25): SEQ ID NO: 2597; WAN024GHG; Start 372; Stop 396
catatcagcccatgcccaagttatc

SEQ ID NO: 330824 - DNA, 25 bp, Artificial
  probe
  misc_feature (1)..(25): SEQ ID NO: 2598; WAN024DPM; Start 37; Stop 61
gaccaatccactactaatcctaaga

SEQ ID NO: 330825 - DNA, 25 bp, Artificial
  probe
  misc_feature (1)..(25): SEQ ID NO: 2598; WAN024DPM; Start 38; Stop 62
accaatccactactaatcctaagaa

SEQ ID NO: 330826 - DNA, 25 bp, Artificial
  probe
  misc_feature (1)..(25): SEQ ID NO: 2598; WAN024DPM; Start 39; Stop 63
ccaatccactactaatcctaagaac

SEQ ID NO: 330827 - DNA, 25 bp, Artificial
  probe
  misc_feature (1)..(25): SEQ ID NO: 2598; WAN024DPM; Start 40; Stop 64
caatccactactaatcctaagaaca

SEQ ID NO: 330828 - DNA, 25 bp, Artificial
  probe
  misc_feature (1)..(25): SEQ ID NO: 2598; WAN024DPM; Start 36; Stop 60
ggaccaatccactactaatcctaag

SEQ ID NO: 330829 - DNA, 25 bp, Artificial
  probe
  misc_feature (1)..(25): SEQ ID NO: 2598; WAN024DPM; Start 176; Stop 200
caaagaaagcgataatgaggcaaat

SEQ ID NO: 330830 - DNA, 25 bp, Artificial
  probe
  misc_feature (1)..(25): SEQ ID NO: 2598; WAN024DPM; Start 177; Stop 201
aaagaaagcgataatgaggcaaatc

SEQ ID NO: 330831 - DNA, 25 bp, Artificial
  probe
  misc_feature (1)..(25): SEQ ID NO: 2598; WAN024DPM; Start 41; Stop 65
aatccactactaatcctaagaacaa

SEQ ID NO: 330832 - DNA, 25 bp, Artificial
  probe
  misc_feature (1)..(25): SEQ ID NO: 2598; WAN024DPM; Start 184; Stop 208
gcgataatgaggcaaatcaagatac

SEQ ID NO: 330833 - DNA, 25 bp, Artificial
  probe
  misc_feature (1)..(25): SEQ ID NO: 2598; WAN024DPM; Start 183; Stop 207
agcgataatgaggcaaatcaagata

SEQ ID NO: 330834 - DNA, 25 bp, Artificial
  probe
  misc_feature (1)..(25): SEQ ID NO: 2598; WAN024DPM; Start 188; Stop 212
taatgaggcaaatcaagatactcca

SEQ ID NO: 330835 - DNA, 25 bp, Artificial
  probe
  misc_feature (1)..(25): SEQ ID NO: 2598; WAN024DPM; Start 191; Stop 215
tgaggcaaatcaagatactccaaat

SEQ ID NO: 330836 - DNA, 25 bp, Artificial
  probe
  misc_feature (1)..(25): SEQ ID NO: 2598; WAN024DPM; Start 190; Stop 214
atgaggcaaatcaagatactccaaa

SEQ ID NO: 330837 - DNA, 25 bp, Artificial
  probe
  misc_feature (1)..(25): SEQ ID NO: 2598; WAN024DPM; Start 189; Stop 213
aatgaggcaaatcaagatactccaa

SEQ ID NO: 330838 - DNA, 25 bp, Artificial
  probe
  misc_feature (1)..(25): SEQ ID NO: 2598; WAN024DPM; Start 193; Stop 217
aggcaaatcaagatactccaaatat

SEQ ID NO: 330839 - DNA, 25 bp, Artificial
  probe
  misc_feature (1)..(25): SEQ ID NO: 2598; WAN024DPM; Start 185; Stop 209
cgataatgaggcaaatcaagatact

SEQ ID NO: 330840 - DNA, 25 bp, Artificial
  probe
  misc_feature (1)..(25): SEQ ID NO: 2598; WAN024DPM; Start 71; Stop 95
tcaagagagcagaagagagaggttc

SEQ ID NO: 330841 - DNA, 25 bp, Artificial
  probe
  misc_feature (1)..(25): SEQ ID NO: 2598; WAN024DPM; Start 210; Stop 234
ccaaatatcaagagtaaaggaaagc

SEQ ID NO: 330842 - DNA, 25 bp, Artificial
  probe
  misc_feature (1)..(25): SEQ ID NO: 2598; WAN024DPM; Start 182; Stop 206
aagcgataatgaggcaaatcaagat

SEQ ID NO: 330843 - DNA, 25 bp, Artificial
  probe
  misc_feature (1)..(25): SEQ ID NO: 2598; WAN024DPM; Start 180; Stop 204
gaaagcgataatgaggcaaatcaag

SEQ ID NO: 330844 - DNA, 25 bp, Artificial
  probe
  misc_feature (1)..(25): SEQ ID NO: 2598; WAN024DPM; Start 66; Stop 90
aacactcaagagagcagaagagaga

SEQ ID NO: 330845 - DNA, 25 bp, Artificial
  probe
  misc_feature (1)..(25): SEQ ID NO: 2598; WAN024DPM; Start 181; Stop 205
aaagcgataatgaggcaaatcaaga

SEQ ID NO: 330846 - DNA, 25 bp, Artificial
  probe
  misc_feature (1)..(25): SEQ ID NO: 2598; WAN024DPM; Start 179; Stop 203
agaaagcgataatgaggcaaatcaa

SEQ ID NO: 330847 - DNA, 25 bp, Artificial
  probe
  misc_feature (1)..(25): SEQ ID NO: 2598; WAN024DPM; Start 178; Stop 202
aagaaagcgataatgaggcaaatca

SEQ ID NO: 330848 - DNA, 25 bp, Artificial
  probe
  misc_feature (1)..(25): SEQ ID NO: 2598; WAN024DPM; Start 192; Stop 216
gaggcaaatcaagatactccaaata

SEQ ID NO: 330849 - DNA, 25 bp, Artificial
  probe
  misc_feature (1)..(25): SEQ ID NO: 2598; WAN024DPM; Start 187; Stop 211
ataatgaggcaaatcaagatactcc

SEQ ID NO: 330850 - DNA, 25 bp, Artificial
  probe
  misc_feature (1)..(25): SEQ ID NO: 2598; WAN024DPM; Start 73; Stop 97
aagagagcagaagagagaggttcac

SEQ ID NO: 330851 - DNA, 25 bp, Artificial
  probe
  misc_feature (1)..(25): SEQ ID NO: 2598; WAN024DPM; Start 72; Stop 96
caagagagcagaagagagaggttca

SEQ ID NO: 330852 - DNA, 25 bp, Artificial
  probe
  misc_feature (1)..(25): SEQ ID NO: 2598; WAN024DPM; Start 175; Stop 199
ccaaagaaagcgataatgaggcaaa

SEQ ID NO: 330853 - DNA, 25 bp, Artificial
  probe
  misc_feature (1)..(25): SEQ ID NO: 2598; WAN024DPM; Start 70; Stop 94
ctcaagagagcagaagagagaggtt

SEQ ID NO: 330854 - DNA, 25 bp, Artificial
  probe
  misc_feature (1)..(25): SEQ ID NO: 2598; WAN024DPM; Start 67; Stop 91
acactcaagagagcagaagagagag

SEQ ID NO: 330855 - DNA, 25 bp, Artificial
  probe
  misc_feature (1)..(25): SEQ ID NO: 2598; WAN024DPM; Start 35; Stop 59
gggaccaatccactactaatcctaa

SEQ ID NO: 330856 - DNA, 25 bp, Artificial
  probe
  misc_feature (1)..(25): SEQ ID NO: 2598; WAN024DPM; Start 194; Stop 218
ggcaaatcaagatactccaaatatc

SEQ ID NO: 330857 - DNA, 25 bp, Artificial
  probe
  misc_feature (1)..(25): SEQ ID NO: 2599; WAN024GMY; Start 150; Stop 174
tgtttcaaggtttcagtcaatgttt

SEQ ID NO: 330858 - DNA, 25 bp, Artificial
  probe
  misc_feature (1)..(25): SEQ ID NO: 2599; WAN024GMY; Start 149; Stop 173
atgtttcaaggtttcagtcaatgtt

SEQ ID NO: 330859 - DNA, 25 bp, Artificial
  probe
  misc_feature (1)..(25): SEQ ID NO: 2599; WAN024GMY; Start 55; Stop 79
cttctacgatttcttgagcgatttc

SEQ ID NO: 330860 - DNA, 25 bp, Artificial
  probe
  misc_feature (1)..(25): SEQ ID NO: 2599; WAN024GMY; Start 52; Stop 76
attcttctacgatttcttgagcgat

SEQ ID NO: 330861 - DNA, 25 bp, Artificial
  probe
  misc_feature (1)..(25): SEQ ID NO: 2599; WAN024GMY; Start 54; Stop 78
tcttctacgatttcttgagcgattt

SEQ ID NO: 330862 - DNA, 25 bp, Artificial
  probe
  misc_feature (1)..(25): SEQ ID NO: 2599; WAN024GMY; Start 53; Stop 77
ttcttctacgatttcttgagcgatt

SEQ ID NO: 330863 - DNA, 25 bp, Artificial
  probe
  misc_feature (1)..(25): SEQ ID NO: 2599; WAN024GMY; Start 121; Stop 145
ttacgatttcactgtcttcatccaa

SEQ ID NO: 330864 - DNA, 25 bp, Artificial
  probe
  misc_feature (1)..(25): SEQ ID NO: 2599; WAN024GMY; Start 148; Stop 172
tatgtttcaaggtttcagtcaatgt

SEQ ID NO: 330865 - DNA, 25 bp, Artificial
  probe
  misc_feature (1)..(25): SEQ ID NO: 2599; WAN024GMY; Start 118; Stop 142
aggttacgatttcactgtcttcatc

SEQ ID NO: 330866 - DNA, 25 bp, Artificial
  probe
  misc_feature (1)..(25): SEQ ID NO: 2599; WAN024GMY; Start 117; Stop 141
aaggttacgatttcactgtcttcat

SEQ ID NO: 330867 - DNA, 25 bp, Artificial
  probe
  misc_feature (1)..(25): SEQ ID NO: 2599; WAN024GMY; Start 51; Stop 75
aattcttctacgatttcttgagcga

SEQ ID NO: 330868 - DNA, 25 bp, Artificial
  probe
  misc_feature (1)..(25): SEQ ID NO: 2599; WAN024GMY; Start 112; Stop 136
catagaaggttacgatttcactgtc

SEQ ID NO: 330869 - DNA, 25 bp, Artificial
  probe
  misc_feature (1)..(25): SEQ ID NO: 2599; WAN024GMY; Start 114; Stop 138
tagaaggttacgatttcactgtctt

SEQ ID NO: 330870 - DNA, 25 bp, Artificial
  probe
  misc_feature (1)..(25): SEQ ID NO: 2599; WAN024GMY; Start 122; Stop 146
tacgatttcactgtcttcatccaac

SEQ ID NO: 330871 - DNA, 25 bp, Artificial
  probe
  misc_feature (1)..(25): SEQ ID NO: 2599; WAN024GMY; Start 120; Stop 144
gttacgatttcactgtcttcatcca

SEQ ID NO: 330872 - DNA, 25 bp, Artificial
  probe
  misc_feature (1)..(25): SEQ ID NO: 2599; WAN024GMY; Start 113; Stop 137
atagaaggttacgatttcactgtct

SEQ ID NO: 330873 - DNA, 25 bp, Artificial
  probe
  misc_feature (1)..(25): SEQ ID NO: 2599; WAN024GMY; Start 151; Stop 175
gtttcaaggtttcagtcaatgtttg

SEQ ID NO: 330874 - DNA, 25 bp, Artificial
  probe
  misc_feature (1)..(25): SEQ ID NO: 2599; WAN024GMY; Start 152; Stop 176
tttcaaggtttcagtcaatgtttgg

SEQ ID NO: 330875 - DNA, 25 bp, Artificial
  probe
  misc_feature (1)..(25): SEQ ID NO: 2599; WAN024GMY; Start 58; Stop 82
ctacgatttcttgagcgatttcatt

SEQ ID NO: 330876 - DNA, 25 bp, Artificial
  probe
  misc_feature (1)..(25): SEQ ID NO: 2599; WAN024GMY; Start 59; Stop 83
tacgatttcttgagcgatttcattg

SEQ ID NO: 330877 - DNA, 25 bp, Artificial
  probe
  misc_feature (1)..(25): SEQ ID NO: 2599; WAN024GMY; Start 179; Stop 203
catatcagggtttgacacaagaatt

SEQ ID NO: 330878 - DNA, 25 bp, Artificial
  probe
  misc_feature (1)..(25): SEQ ID NO: 2599; WAN024GMY; Start 57; Stop 81
tctacgatttcttgagcgatttcat

SEQ ID NO: 330879 - DNA, 25 bp, Artificial
  probe
  misc_feature (1)..(25): SEQ ID NO: 2599; WAN024GMY; Start 56; Stop 80
ttctacgatttcttgagcgatttca

SEQ ID NO: 330880 - DNA, 25 bp, Artificial
  probe
  misc_feature (1)..(25): SEQ ID NO: 2599; WAN024GMY; Start 119; Stop 143
ggttacgatttcactgtcttcatcc

SEQ ID NO: 330881 - DNA, 25 bp, Artificial
  probe
  misc_feature (1)..(25): SEQ ID NO: 2599; WAN024GMY; Start 111; Stop 135
acatagaaggttacgatttcactgt

SEQ ID NO: 330882 - DNA, 25 bp, Artificial
  probe
  misc_feature (1)..(25): SEQ ID NO: 2599; WAN024GMY; Start 180; Stop 204
atatcagggtttgacacaagaattt

SEQ ID NO: 330883 - DNA, 25 bp, Artificial
  probe
  misc_feature (1)..(25): SEQ ID NO: 2599; WAN024GMY; Start 147; Stop 171
atatgtttcaaggtttcagtcaatg

SEQ ID NO: 330884 - DNA, 25 bp, Artificial
  probe
  misc_feature (1)..(25): SEQ ID NO: 2599; WAN024GMY; Start 153; Stop 177
ttcaaggtttcagtcaatgtttggt

SEQ ID NO: 330885 - DNA, 25 bp, Artificial
  probe
  misc_feature (1)..(25): SEQ ID NO: 2599; WAN024GMY; Start 125; Stop 149
gatttcactgtcttcatccaacata

SEQ ID NO: 330886 - DNA, 25 bp, Artificial
  probe
  misc_feature (1)..(25): SEQ ID NO: 2599; WAN024GMY; Start 178; Stop 202
gcatatcagggtttgacacaagaat

SEQ ID NO: 330887 - DNA, 25 bp, Artificial
  probe
  misc_feature (1)..(25): SEQ ID NO: 2599; WAN024GMY; Start 126; Stop 150
atttcactgtcttcatccaacatat

SEQ ID NO: 330888 - DNA, 25 bp, Artificial
  probe
  misc_feature (1)..(25): SEQ ID NO: 2599; WAN024GMY; Start 124; Stop 148
cgatttcactgtcttcatccaacat

SEQ ID NO: 330889 - DNA, 25 bp, Artificial
  probe
  misc_feature (1)..(25): SEQ ID NO: 2599; WAN024GMY; Start 154; Stop 178
tcaaggtttcagtcaatgtttggtg

SEQ ID NO: 330890 - DNA, 25 bp, Artificial
  probe
  misc_feature (1)..(25): SEQ ID NO: 2600; WAN024FJI; Start 1018; Stop 1042
gatggtcaattatcagcagttcaat

SEQ ID NO: 330891 - DNA, 25 bp, Artificial
  probe
  misc_feature (1)..(25): SEQ ID NO: 2600; WAN024FJI; Start 735; Stop 759
cttgattgctgttgatgagaatggt

SEQ ID NO: 330892 - DNA, 25 bp, Artificial
  probe
  misc_feature (1)..(25): SEQ ID NO: 2600; WAN024FJI; Start 1019; Stop 1043
atggtcaattatcagcagttcaatt

SEQ ID NO: 330893 - DNA, 25 bp, Artificial
  probe
  misc_feature (1)..(25): SEQ ID NO: 2600; WAN024FJI; Start 888; Stop 912
cgaaggtattaacaaggcagttact

SEQ ID NO: 330894 - DNA, 25 bp, Artificial
  probe
  misc_feature (1)..(25): SEQ ID NO: 2600; WAN024FJI; Start 622; Stop 646
gacggtcttaacatcaaccttaatg

SEQ ID NO: 330895 - DNA, 25 bp, Artificial
  probe
  misc_feature (1)..(25): SEQ ID NO: 2600; WAN024FJI; Start 992; Stop 1016
tcttgatggattacaataccacagg

SEQ ID NO: 330896 - DNA, 25 bp, Artificial
  probe
  misc_feature (1)..(25): SEQ ID NO: 2600; WAN024FJI; Start 996; Stop 1020
gatggattacaataccacaggtgat

SEQ ID NO: 330897 - DNA, 25 bp, Artificial
  probe
  misc_feature (1)..(25): SEQ ID NO: 2600; WAN024FJI; Start 993; Stop 1017
cttgatggattacaataccacaggt

SEQ ID NO: 330898 - DNA, 25 bp, Artificial
  probe
  misc_feature (1)..(25): SEQ ID NO: 2600; WAN024FJI; Start 987; Stop 1011
cgttatcttgatggattacaatacc

SEQ ID NO: 330899 - DNA, 25 bp, Artificial
  probe
  misc_feature (1)..(25): SEQ ID NO: 2600; WAN024FJI; Start 997; Stop 1021
atggattacaataccacaggtgatg

SEQ ID NO: 330900 - DNA, 25 bp, Artificial
  probe
  misc_feature (1)..(25): SEQ ID NO: 2600; WAN024FJI; Start 994; Stop 1018
ttgatggattacaataccacaggtg

SEQ ID NO: 330901 - DNA, 25 bp, Artificial
  probe
  misc_feature (1)..(25): SEQ ID NO: 2600; WAN024FJI; Start 1090; Stop 1114
gcagaagtaacgatttatccacaaa

SEQ ID NO: 330902 - DNA, 25 bp, Artificial
  probe
  misc_feature (1)..(25): SEQ ID NO: 2600; WAN024FJI; Start 734; Stop 758
gcttgattgctgttgatgagaatgg

SEQ ID NO: 330903 - DNA, 25 bp, Artificial
  probe
  misc_feature (1)..(25): SEQ ID NO: 2600; WAN024FJI; Start 995; Stop 1019
tgatggattacaataccacaggtga

SEQ ID NO: 330904 - DNA, 25 bp, Artificial
  probe
  misc_feature (1)..(25): SEQ ID NO: 2600; WAN024FJI; Start 991; Stop 1015
atcttgatggattacaataccacag

SEQ ID NO: 330905 - DNA, 25 bp, Artificial
  probe
  misc_feature (1)..(25): SEQ ID NO: 2600; WAN024FJI; Start 889; Stop 913
gaaggtattaacaaggcagttactg

SEQ ID NO: 330906 - DNA, 25 bp, Artificial
  probe
  misc_feature (1)..(25): SEQ ID NO: 2600; WAN024FJI; Start 621; Stop 645
agacggtcttaacatcaaccttaat

SEQ ID NO: 330907 - DNA, 25 bp, Artificial
  probe
  misc_feature (1)..(25): SEQ ID NO: 2600; WAN024FJI; Start 504; Stop 528
aactcctcttgatggaatgaaggtt

SEQ ID NO: 330908 - DNA, 25 bp, Artificial
  probe
  misc_feature (1)..(25): SEQ ID NO: 2600; WAN024FJI; Start 980; Stop 1004
ctggtcacgttatcttgatggatta

SEQ ID NO: 330909 - DNA, 25 bp, Artificial
  probe
  misc_feature (1)..(25): SEQ ID NO: 2600; WAN024FJI; Start 620; Stop 644
cagacggtcttaacatcaaccttaa

SEQ ID NO: 330910 - DNA, 25 bp, Artificial
  probe
  misc_feature (1)..(25): SEQ ID NO: 2600; WAN024FJI; Start 1089; Stop 1113
ggcagaagtaacgatttatccacaa

SEQ ID NO: 330911 - DNA, 25 bp, Artificial
  probe
  misc_feature (1)..(25): SEQ ID NO: 2600; WAN024FJI; Start 982; Stop 1006
ggtcacgttatcttgatggattaca

SEQ ID NO: 330912 - DNA, 25 bp, Artificial
  probe
  misc_feature (1)..(25): SEQ ID NO: 2600; WAN024FJI; Start 981; Stop 1005
tggtcacgttatcttgatggattac

SEQ ID NO: 330913 - DNA, 25 bp, Artificial
  probe
  misc_feature (1)..(25): SEQ ID NO: 2600; WAN024FJI; Start 983; Stop 1007
gtcacgttatcttgatggattacaa

SEQ ID NO: 330914 - DNA, 25 bp, Artificial
  probe
  misc_feature (1)..(25): SEQ ID NO: 2600; WAN024FJI; Start 85; Stop 109
tttggaggctatgttcttagtcaac

SEQ ID NO: 330915 - DNA, 25 bp, Artificial
  probe
  misc_feature (1)..(25): SEQ ID NO: 2600; WAN024FJI; Start 733; Stop 757
cgcttgattgctgttgatgagaatg

SEQ ID NO: 330916 - DNA, 25 bp, Artificial
  probe
  misc_feature (1)..(25): SEQ ID NO: 2600; WAN024FJI; Start 887; Stop 911
gcgaaggtattaacaaggcagttac

SEQ ID NO: 330917 - DNA, 25 bp, Artificial
  probe
  misc_feature (1)..(25): SEQ ID NO: 2600; WAN024FJI; Start 503; Stop 527
gaactcctcttgatggaatgaaggt

SEQ ID NO: 330918 - DNA, 25 bp, Artificial
  probe
  misc_feature (1)..(25): SEQ ID NO: 2600; WAN024FJI; Start 501; Stop 525
tggaactcctcttgatggaatgaag

SEQ ID NO: 330919 - DNA, 25 bp, Artificial
  probe
  misc_feature (1)..(25): SEQ ID NO: 2600; WAN024FJI; Start 500; Stop 524
ctggaactcctcttgatggaatgaa

SEQ ID NO: 330920 - DNA, 25 bp, Artificial
  probe
  misc_feature (1)..(25): SEQ ID NO: 2600; WAN024FJI; Start 505; Stop 529
actcctcttgatggaatgaaggttg

SEQ ID NO: 330921 - DNA, 25 bp, Artificial
  probe
  misc_feature (1)..(25): SEQ ID NO: 2600; WAN024FJI; Start 498; Stop 522
aactggaactcctcttgatggaatg

SEQ ID NO: 330922 - DNA, 25 bp, Artificial
  probe
  misc_feature (1)..(25): SEQ ID NO: 2600; WAN024FJI; Start 497; Stop 521
caactggaactcctcttgatggaat

SEQ ID NO: 330923 - DNA, 25 bp, Artificial
  probe
  misc_feature (1)..(25): SEQ ID NO: 2601; WAN024FRZ; Start 348; Stop 372
tgatgactcagaagagattgtgatt

SEQ ID NO: 330924 - DNA, 25 bp, Artificial
  probe
  misc_feature (1)..(25): SEQ ID NO: 2601; WAN024FRZ; Start 347; Stop 371
ttgatgactcagaagagattgtgat

SEQ ID NO: 330925 - DNA, 25 bp, Artificial
  probe
  misc_feature (1)..(25): SEQ ID NO: 2601; WAN024FRZ; Start 346; Stop 370
cttgatgactcagaagagattgtga

SEQ ID NO: 330926 - DNA, 25 bp, Artificial
  probe
  misc_feature (1)..(25): SEQ ID NO: 2601; WAN024FRZ; Start 169; Stop 193
gaagttaaggagcaggctacagatt

SEQ ID NO: 330927 - DNA, 25 bp, Artificial
  probe
  misc_feature (1)..(25): SEQ ID NO: 2601; WAN024FRZ; Start 61; Stop 85
ttaacaagtgataagggcaaacaag

SEQ ID NO: 330928 - DNA, 25 bp, Artificial
  probe
  misc_feature (1)..(25): SEQ ID NO: 2601; WAN024FRZ; Start 60; Stop 84
tttaacaagtgataagggcaaacaa

SEQ ID NO: 330929 - DNA, 25 bp, Artificial
  probe
  misc_feature (1)..(25): SEQ ID NO: 2601; WAN024FRZ; Start 62; Stop 86
taacaagtgataagggcaaacaagt

SEQ ID NO: 330930 - DNA, 25 bp, Artificial
  probe
  misc_feature (1)..(25): SEQ ID NO: 2601; WAN024FRZ; Start 345; Stop 369
tcttgatgactcagaagagattgtg

SEQ ID NO: 330931 - DNA, 25 bp, Artificial
  probe
  misc_feature (1)..(25): SEQ ID NO: 2601; WAN024FRZ; Start 168; Stop 192
agaagttaaggagcaggctacagat

SEQ ID NO: 330932 - DNA, 25 bp, Artificial
  probe
  misc_feature (1)..(25): SEQ ID NO: 2601; WAN024FRZ; Start 63; Stop 87
aacaagtgataagggcaaacaagtt

SEQ ID NO: 330933 - DNA, 25 bp, Artificial
  probe
  misc_feature (1)..(25): SEQ ID NO: 2601; WAN024FRZ; Start 64; Stop 88
acaagtgataagggcaaacaagttt

SEQ ID NO: 330934 - DNA, 25 bp, Artificial
  probe
  misc_feature (1)..(25): SEQ ID NO: 2601; WAN024FRZ; Start 1; Stop 25
atgggtaaattatcctcaatccttt

SEQ ID NO: 330935 - DNA, 25 bp, Artificial
  probe
  misc_feature (1)..(25): SEQ ID NO: 2601; WAN024FRZ; Start 170; Stop 194
aagttaaggagcaggctacagattt

SEQ ID NO: 330936 - DNA, 25 bp, Artificial
  probe
  misc_feature (1)..(25): SEQ ID NO: 2601; WAN024FRZ; Start 209; Stop 233
aagaacaggttgagtcaggtgaaat

SEQ ID NO: 330937 - DNA, 25 bp, Artificial
  probe
  misc_feature (1)..(25): SEQ ID NO: 2601; WAN024FRZ; Start 208; Stop 232
aaagaacaggttgagtcaggtgaaa

SEQ ID NO: 330938 - DNA, 25 bp, Artificial
  probe
  misc_feature (1)..(25): SEQ ID NO: 2601; WAN024FRZ; Start 210; Stop 234
agaacaggttgagtcaggtgaaatc

SEQ ID NO: 330939 - DNA, 25 bp, Artificial
  probe
  misc_feature (1)..(25): SEQ ID NO: 2601; WAN024FRZ; Start 167; Stop 191
cagaagttaaggagcaggctacaga

SEQ ID NO: 330940 - DNA, 25 bp, Artificial
  probe
  misc_feature (1)..(25): SEQ ID NO: 2601; WAN024FRZ; Start 166; Stop 190
acagaagttaaggagcaggctacag

SEQ ID NO: 330941 - DNA, 25 bp, Artificial
  probe
  misc_feature (1)..(25): SEQ ID NO: 2601; WAN024FRZ; Start 165; Stop 189
gacagaagttaaggagcaggctaca

SEQ ID NO: 330942 - DNA, 25 bp, Artificial
  probe
  misc_feature (1)..(25): SEQ ID NO: 2601; WAN024FRZ; Start 164; Stop 188
tgacagaagttaaggagcaggctac

SEQ ID NO: 330943 - DNA, 25 bp, Artificial
  probe
  misc_feature (1)..(25): SEQ ID NO: 2601; WAN024FRZ; Start 211; Stop 235
gaacaggttgagtcaggtgaaatca

SEQ ID NO: 330944 - DNA, 25 bp, Artificial
  probe
  misc_feature (1)..(25): SEQ ID NO: 2601; WAN024FRZ; Start 163; Stop 187
ctgacagaagttaaggagcaggcta

SEQ ID NO: 330945 - DNA, 25 bp, Artificial
  probe
  misc_feature (1)..(25): SEQ ID NO: 2601; WAN024FRZ; Start 59; Stop 83
ttttaacaagtgataagggcaaaca

SEQ ID NO: 330946 - DNA, 25 bp, Artificial
  probe
  misc_feature (1)..(25): SEQ ID NO: 2601; WAN024FRZ; Start 109; Stop 133
ctagatgatttgagagaagatccgg

SEQ ID NO: 330947 - DNA, 25 bp, Artificial
  probe
  misc_feature (1)..(25): SEQ ID NO: 2601; WAN024FRZ; Start 200; Stop 224
tgaaaacaaaagaacaggttgagtc

SEQ ID NO: 330948 - DNA, 25 bp, Artificial
  probe
  misc_feature (1)..(25): SEQ ID NO: 2601; WAN024FRZ; Start 202; Stop 226
aaaacaaaagaacaggttgagtcag

SEQ ID NO: 330949 - DNA, 25 bp, Artificial
  probe
  misc_feature (1)..(25): SEQ ID NO: 2601; WAN024FRZ; Start 201; Stop 225
gaaaacaaaagaacaggttgagtca

SEQ ID NO: 330950 - DNA, 25 bp, Artificial
  probe
  misc_feature (1)..(25): SEQ ID NO: 2601; WAN024FRZ; Start 108; Stop 132
tctagatgatttgagagaagatccg

SEQ ID NO: 330951 - DNA, 25 bp, Artificial
  probe
  misc_feature (1)..(25): SEQ ID NO: 2601; WAN024FRZ; Start 198; Stop 222
tctgaaaacaaaagaacaggttgag

SEQ ID NO: 330952 - DNA, 25 bp, Artificial
  probe
  misc_feature (1)..(25): SEQ ID NO: 2601; WAN024FRZ; Start 199; Stop 223
ctgaaaacaaaagaacaggttgagt

SEQ ID NO: 330953 - DNA, 25 bp, Artificial
  probe
  misc_feature (1)..(25): SEQ ID NO: 2601; WAN024FRZ; Start 2; Stop 26
tgggtaaattatcctcaatcctttt

SEQ ID NO: 330954 - DNA, 25 bp, Artificial
  probe
  misc_feature (1)..(25): SEQ ID NO: 2601; WAN024FRZ; Start 203; Stop 227
aaacaaaagaacaggttgagtcagg

SEQ ID NO: 330955 - DNA, 25 bp, Artificial
  probe
  misc_feature (1)..(25): SEQ ID NO: 2601; WAN024FRZ; Start 172; Stop 196
gttaaggagcaggctacagattttg

SEQ ID NO: 330956 - DNA, 25 bp, Artificial
  probe
  misc_feature (1)..(25): SEQ ID NO: 2602; WAN024CB5; Start 559; Stop 583
agtgatatgttggaacctgtctatg

SEQ ID NO: 330957 - DNA, 25 bp, Artificial
  probe
  misc_feature (1)..(25): SEQ ID NO: 2602; WAN024CB5; Start 558; Stop 582
cagtgatatgttggaacctgtctat

SEQ ID NO: 330958 - DNA, 25 bp, Artificial
  probe
  misc_feature (1)..(25): SEQ ID NO: 2602; WAN024CB5; Start 557; Stop 581
tcagtgatatgttggaacctgtcta

SEQ ID NO: 330959 - DNA, 25 bp, Artificial
  probe
  misc_feature (1)..(25): SEQ ID NO: 2602; WAN024CB5; Start 285; Stop 309
attgcctcatcagaccattgttcat

SEQ ID NO: 330960 - DNA, 25 bp, Artificial
  probe
  misc_feature (1)..(25): SEQ ID NO: 2602; WAN024CB5; Start 555; Stop 579
tatcagtgatatgttggaacctgtc

SEQ ID NO: 330961 - DNA, 25 bp, Artificial
  probe
  misc_feature (1)..(25): SEQ ID NO: 2602; WAN024CB5; Start 554; Stop 578
ttatcagtgatatgttggaacctgt

SEQ ID NO: 330962 - DNA, 25 bp, Artificial
  probe
  misc_feature (1)..(25): SEQ ID NO: 2602; WAN024CB5; Start 556; Stop 580
atcagtgatatgttggaacctgtct

SEQ ID NO: 330963 - DNA, 25 bp, Artificial
  probe
  misc_feature (1)..(25): SEQ ID NO: 2602; WAN024CB5; Start 114; Stop 138
tagtgccaccttgatgagcttatat

SEQ ID NO: 330964 - DNA, 25 bp, Artificial
  probe
  misc_feature (1)..(25): SEQ ID NO: 2602; WAN024CB5; Start 122; Stop 146
ccttgatgagcttatatgcagaaca

SEQ ID NO: 330965 - DNA, 25 bp, Artificial
  probe
  misc_feature (1)..(25): SEQ ID NO: 2602; WAN024CB5; Start 121; Stop 145
accttgatgagcttatatgcagaac

SEQ ID NO: 330966 - DNA, 25 bp, Artificial
  probe
  misc_feature (1)..(25): SEQ ID NO: 2602; WAN024CB5; Start 120; Stop 144
caccttgatgagcttatatgcagaa

SEQ ID NO: 330967 - DNA, 25 bp, Artificial
  probe
  misc_feature (1)..(25): SEQ ID NO: 2602; WAN024CB5; Start 286; Stop 310
ttgcctcatcagaccattgttcatt

SEQ ID NO: 330968 - DNA, 25 bp, Artificial
  probe
  misc_feature (1)..(25): SEQ ID NO: 2602; WAN024CB5; Start 124; Stop 148
ttgatgagcttatatgcagaacatg

SEQ ID NO: 330969 - DNA, 25 bp, Artificial
  probe
  misc_feature (1)..(25): SEQ ID NO: 2602; WAN024CB5; Start 128; Stop 152
tgagcttatatgcagaacatggtta

SEQ ID NO: 330970 - DNA, 25 bp, Artificial
  probe
  misc_feature (1)..(25): SEQ ID NO: 2602; WAN024CB5; Start 423; Stop 447
atccttgattggcatctttatgagt

SEQ ID NO: 330971 - DNA, 25 bp, Artificial
  probe
  misc_feature (1)..(25): SEQ ID NO: 2602; WAN024CB5; Start 123; Stop 147
cttgatgagcttatatgcagaacat

SEQ ID NO: 330972 - DNA, 25 bp, Artificial
  probe
  misc_feature (1)..(25): SEQ ID NO: 2602; WAN024CB5; Start 127; Stop 151
atgagcttatatgcagaacatggtt

SEQ ID NO: 330973 - DNA, 25 bp, Artificial
  probe
  misc_feature (1)..(25): SEQ ID NO: 2602; WAN024CB5; Start 284; Stop 308
aattgcctcatcagaccattgttca

SEQ ID NO: 330974 - DNA, 25 bp, Artificial
  probe
  misc_feature (1)..(25): SEQ ID NO: 2602; WAN024CB5; Start 534; Stop 558
aattgggatgtggcatttctttatc

SEQ ID NO: 330975 - DNA, 25 bp, Artificial
  probe
  misc_feature (1)..(25): SEQ ID NO: 2602; WAN024CB5; Start 533; Stop 557
gaattgggatgtggcatttctttat

SEQ ID NO: 330976 - DNA, 25 bp, Artificial
  probe
  misc_feature (1)..(25): SEQ ID NO: 2602; WAN024CB5; Start 126; Stop 150
gatgagcttatatgcagaacatggt

SEQ ID NO: 330977 - DNA, 25 bp, Artificial
  probe
  misc_feature (1)..(25): SEQ ID NO: 2602; WAN024CB5; Start 125; Stop 149
tgatgagcttatatgcagaacatgg

SEQ ID NO: 330978 - DNA, 25 bp, Artificial
  probe
  misc_feature (1)..(25): SEQ ID NO: 2602; WAN024CB5; Start 425; Stop 449
ccttgattggcatctttatgagtct

SEQ ID NO: 330979 - DNA, 25 bp, Artificial
  probe
  misc_feature (1)..(25): SEQ ID NO: 2602; WAN024CB5; Start 424; Stop 448
tccttgattggcatctttatgagtc

SEQ ID NO: 330980 - DNA, 25 bp, Artificial
  probe
  misc_feature (1)..(25): SEQ ID NO: 2602; WAN024CB5; Start 113; Stop 137
ctagtgccaccttgatgagcttata

SEQ ID NO: 330981 - DNA, 25 bp, Artificial
  probe
  misc_feature (1)..(25): SEQ ID NO: 2602; WAN024CB5; Start 129; Stop 153
gagcttatatgcagaacatggttat

SEQ ID NO: 330982 - DNA, 25 bp, Artificial
  probe
  misc_feature (1)..(25): SEQ ID NO: 2602; WAN024CB5; Start 535; Stop 559
attgggatgtggcatttctttatca

SEQ ID NO: 330983 - DNA, 25 bp, Artificial
  probe
  misc_feature (1)..(25): SEQ ID NO: 2602; WAN024CB5; Start 426; Stop 450
cttgattggcatctttatgagtcta

SEQ ID NO: 330984 - DNA, 25 bp, Artificial
  probe
  misc_feature (1)..(25): SEQ ID NO: 2602; WAN024CB5; Start 422; Stop 446
tatccttgattggcatctttatgag

SEQ ID NO: 330985 - DNA, 25 bp, Artificial
  probe
  misc_feature (1)..(25): SEQ ID NO: 2602; WAN024CB5; Start 430; Stop 454
attggcatctttatgagtctagcag

SEQ ID NO: 330986 - DNA, 25 bp, Artificial
  probe
  misc_feature (1)..(25): SEQ ID NO: 2602; WAN024CB5; Start 429; Stop 453
gattggcatctttatgagtctagca

SEQ ID NO: 330987 - DNA, 25 bp, Artificial
  probe
  misc_feature (1)..(25): SEQ ID NO: 2602; WAN024CB5; Start 428; Stop 452
tgattggcatctttatgagtctagc

SEQ ID NO: 330988 - DNA, 25 bp, Artificial
  probe
  misc_feature (1)..(25): SEQ ID NO: 2602; WAN024CB5; Start 539; Stop 563
ggatgtggcatttctttatcagtga

SEQ ID NO: 330989 - DNA, 25 bp, Artificial
  probe
  misc_feature (1)..(25): SEQ ID NO: 2603; WAN024GFO; Start 38; Stop 62
tattgatactgaccttagtcgtctg

SEQ ID NO: 330990 - DNA, 25 bp, Artificial
  probe
  misc_feature (1)..(25): SEQ ID NO: 2603; WAN024GFO; Start 37; Stop 61
ttattgatactgaccttagtcgtct

SEQ ID NO: 330991 - DNA, 25 bp, Artificial
  probe
  misc_feature (1)..(25): SEQ ID NO: 2603; WAN024GFO; Start 36; Stop 60
attattgatactgaccttagtcgtc

SEQ ID NO: 330992 - DNA, 25 bp, Artificial
  probe
  misc_feature (1)..(25): SEQ ID NO: 2603; WAN024GFO; Start 166; Stop 190
acctttacccataatttcctcccta

SEQ ID NO: 330993 - DNA, 25 bp, Artificial
  probe
  misc_feature (1)..(25): SEQ ID NO: 2603; WAN024GFO; Start 164; Stop 188
aaacctttacccataatttcctccc

SEQ ID NO: 330994 - DNA, 25 bp, Artificial
  probe
  misc_feature (1)..(25): SEQ ID NO: 2603; WAN024GFO; Start 39; Stop 63
attgatactgaccttagtcgtctgc

SEQ ID NO: 330995 - DNA, 25 bp, Artificial
  probe
  misc_feature (1)..(25): SEQ ID NO: 2603; WAN024GFO; Start 53; Stop 77
tagtcgtctgcattatcctaaccaa

SEQ ID NO: 330996 - DNA, 25 bp, Artificial
  probe
  misc_feature (1)..(25): SEQ ID NO: 2603; WAN024GFO; Start 170; Stop 194
ttacccataatttcctccctagact

SEQ ID NO: 330997 - DNA, 25 bp, Artificial
  probe
  misc_feature (1)..(25): SEQ ID NO: 2603; WAN024GFO; Start 167; Stop 191
cctttacccataatttcctccctag

SEQ ID NO: 330998 - DNA, 25 bp, Artificial
  probe
  misc_feature (1)..(25): SEQ ID NO: 2603; WAN024GFO; Start 169; Stop 193
tttacccataatttcctccctagac

SEQ ID NO: 330999 - DNA, 25 bp, Artificial
  probe
  misc_feature (1)..(25): SEQ ID NO: 2603; WAN024GFO; Start 171; Stop 195
tacccataatttcctccctagactg

SEQ ID NO: 331000 - DNA, 25 bp, Artificial
  probe
  misc_feature (1)..(25): SEQ ID NO: 2603; WAN024GFO; Start 168; Stop 192
ctttacccataatttcctccctaga

SEQ ID NO: 331001 - DNA, 25 bp, Artificial
  probe
  misc_feature (1)..(25): SEQ ID NO: 2603; WAN024GFO; Start 165; Stop 189
aacctttacccataatttcctccct

SEQ ID NO: 331002 - DNA, 25 bp, Artificial
  probe
  misc_feature (1)..(25): SEQ ID NO: 2603; WAN024GFO; Start 51; Stop 75
cttagtcgtctgcattatcctaacc

SEQ ID NO: 331003 - DNA, 25 bp, Artificial
  probe
  misc_feature (1)..(25): SEQ ID NO: 2603; WAN024GFO; Start 50; Stop 74
ccttagtcgtctgcattatcctaac

SEQ ID NO: 331004 - DNA, 25 bp, Artificial
  probe
  misc_feature (1)..(25): SEQ ID NO: 2603; WAN024GFO; Start 49; Stop 73
accttagtcgtctgcattatcctaa

SEQ ID NO: 331005 - DNA, 25 bp, Artificial
  probe
  misc_feature (1)..(25): SEQ ID NO: 2603; WAN024GFO; Start 44; Stop 68
tactgaccttagtcgtctgcattat

SEQ ID NO: 331006 - DNA, 25 bp, Artificial
  probe
  misc_feature (1)..(25): SEQ ID NO: 2603; WAN024GFO; Start 43; Stop 67
atactgaccttagtcgtctgcatta

SEQ ID NO: 331007 - DNA, 25 bp, Artificial
  probe
  misc_feature (1)..(25): SEQ ID NO: 2603; WAN024GFO; Start 52; Stop 76
ttagtcgtctgcattatcctaacca

SEQ ID NO: 331008 - DNA, 25 bp, Artificial
  probe
  misc_feature (1)..(25): SEQ ID NO: 2603; WAN024GFO; Start 48; Stop 72
gaccttagtcgtctgcattatccta

SEQ ID NO: 331009 - DNA, 25 bp, Artificial
  probe
  misc_feature (1)..(25): SEQ ID NO: 2603; WAN024GFO; Start 35; Stop 59
tattattgatactgaccttagtcgt

SEQ ID NO: 331010 - DNA, 25 bp, Artificial
  probe
  misc_feature (1)..(25): SEQ ID NO: 2603; WAN024GFO; Start 295; Stop 319
gcaggattcttattaacccttatca

SEQ ID NO: 331011 - DNA, 25 bp, Artificial
  probe
  misc_feature (1)..(25): SEQ ID NO: 2603; WAN024GFO; Start 58; Stop 82
gtctgcattatcctaaccaaacttt

SEQ ID NO: 331012 - DNA, 25 bp, Artificial
  probe
  misc_feature (1)..(25): SEQ ID NO: 2603; WAN024GFO; Start 45; Stop 69
actgaccttagtcgtctgcattatc

SEQ ID NO: 331013 - DNA, 25 bp, Artificial
  probe
  misc_feature (1)..(25): SEQ ID NO: 2603; WAN024GFO; Start 42; Stop 66
gatactgaccttagtcgtctgcatt

SEQ ID NO: 331014 - DNA, 25 bp, Artificial
  probe
  misc_feature (1)..(25): SEQ ID NO: 2603; WAN024GFO; Start 57; Stop 81
cgtctgcattatcctaaccaaactt

SEQ ID NO: 331015 - DNA, 25 bp, Artificial
  probe
  misc_feature (1)..(25): SEQ ID NO: 2603; WAN024GFO; Start 286; Stop 310
ttctggcgtgcaggattcttattaa

SEQ ID NO: 331016 - DNA, 25 bp, Artificial
  probe
  misc_feature (1)..(25): SEQ ID NO: 2603; WAN024GFO; Start 332; Stop 356
tgattgttgaattgttcttaatgaa

SEQ ID NO: 331017 - DNA, 25 bp, Artificial
  probe
  misc_feature (1)..(25): SEQ ID NO: 2603; WAN024GFO; Start 46; Stop 70
ctgaccttagtcgtctgcattatcc

SEQ ID NO: 331018 - DNA, 25 bp, Artificial
  probe
  misc_feature (1)..(25): SEQ ID NO: 2603; WAN024GFO; Start 285; Stop 309
cttctggcgtgcaggattcttatta

SEQ ID NO: 331019 - DNA, 25 bp, Artificial
  probe
  misc_feature (1)..(25): SEQ ID NO: 2603; WAN024GFO; Start 56; Stop 80
tcgtctgcattatcctaaccaaact

SEQ ID NO: 331020 - DNA, 25 bp, Artificial
  probe
  misc_feature (1)..(25): SEQ ID NO: 2603; WAN024GFO; Start 55; Stop 79
gtcgtctgcattatcctaaccaaac

SEQ ID NO: 331021 - DNA, 25 bp, Artificial
  probe
  misc_feature (1)..(25): SEQ ID NO: 2603; WAN024GFO; Start 54; Stop 78
agtcgtctgcattatcctaaccaaa

SEQ ID NO: 331022 - DNA, 25 bp, Artificial
  probe
  misc_feature (1)..(25): SEQ ID NO: 2604; WAN024GDK; Start 49; Stop 73
gtccattcggtactggttgatataa

SEQ ID NO: 331023 - DNA, 25 bp, Artificial
  probe
  misc_feature (1)..(25): SEQ ID NO: 2604; WAN024GDK; Start 21; Stop 45
tttcttgataaaggtattgggcgta

SEQ ID NO: 331024 - DNA, 25 bp, Artificial
  probe
  misc_feature (1)..(25): SEQ ID NO: 2604; WAN024GDK; Start 22; Stop 46
ttcttgataaaggtattgggcgtag

SEQ ID NO: 331025 - DNA, 25 bp, Artificial
  probe
  misc_feature (1)..(25): SEQ ID NO: 2604; WAN024GDK; Start 24; Stop 48
cttgataaaggtattgggcgtagtc

SEQ ID NO: 331026 - DNA, 25 bp, Artificial
  probe
  misc_feature (1)..(25): SEQ ID NO: 2604; WAN024GDK; Start 23; Stop 47
tcttgataaaggtattgggcgtagt

SEQ ID NO: 331027 - DNA, 25 bp, Artificial
  probe
  misc_feature (1)..(25): SEQ ID NO: 2604; WAN024GDK; Start 48; Stop 72
cgtccattcggtactggttgatata

SEQ ID NO: 331028 - DNA, 25 bp, Artificial
  probe
  misc_feature (1)..(25): SEQ ID NO: 2604; WAN024GDK; Start 25; Stop 49
ttgataaaggtattgggcgtagtcg

SEQ ID NO: 331029 - DNA, 25 bp, Artificial
  probe
  misc_feature (1)..(25): SEQ ID NO: 2604; WAN024GDK; Start 51; Stop 75
ccattcggtactggttgatataaac

SEQ ID NO: 331030 - DNA, 25 bp, Artificial
  probe
  misc_feature (1)..(25): SEQ ID NO: 2604; WAN024GDK; Start 50; Stop 74
tccattcggtactggttgatataaa

SEQ ID NO: 331031 - DNA, 25 bp, Artificial
  probe
  misc_feature (1)..(25): SEQ ID NO: 2604; WAN024GDK; Start 176; Stop 200
ccttgaaggatagcattgacctcag

SEQ ID NO: 331032 - DNA, 25 bp, Artificial
  probe
  misc_feature (1)..(25): SEQ ID NO: 2604; WAN024GDK; Start 177; Stop 201
cttgaaggatagcattgacctcagc

SEQ ID NO: 331033 - DNA, 25 bp, Artificial
  probe
  misc_feature (1)..(25): SEQ ID NO: 2604; WAN024GDK; Start 27; Stop 51
gataaaggtattgggcgtagtcgtc

SEQ ID NO: 331034 - DNA, 25 bp, Artificial
  probe
  misc_feature (1)..(25): SEQ ID NO: 2604; WAN024GDK; Start 174; Stop 198
caccttgaaggatagcattgacctc

SEQ ID NO: 331035 - DNA, 25 bp, Artificial
  probe
  misc_feature (1)..(25): SEQ ID NO: 2604; WAN024GDK; Start 240; Stop 264
attcgtgatcaatacaatgctcagt

SEQ ID NO: 331036 - DNA, 25 bp, Artificial
  probe
  misc_feature (1)..(25): SEQ ID NO: 2604; WAN024GDK; Start 225; Stop 249
cttcaatgaccaaacattcgtgatc

SEQ ID NO: 331037 - DNA, 25 bp, Artificial
  probe
  misc_feature (1)..(25): SEQ ID NO: 2604; WAN024GDK; Start 47; Stop 71
tcgtccattcggtactggttgatat

SEQ ID NO: 331038 - DNA, 25 bp, Artificial
  probe
  misc_feature (1)..(25): SEQ ID NO: 2604; WAN024GDK; Start 241; Stop 265
ttcgtgatcaatacaatgctcagtc

SEQ ID NO: 331039 - DNA, 25 bp, Artificial
  probe
  misc_feature (1)..(25): SEQ ID NO: 2604; WAN024GDK; Start 175; Stop 199
accttgaaggatagcattgacctca

SEQ ID NO: 331040 - DNA, 25 bp, Artificial
  probe
  misc_feature (1)..(25): SEQ ID NO: 2604; WAN024GDK; Start 117; Stop 141
tgagacaaggaaaatgggttacata

SEQ ID NO: 331041 - DNA, 25 bp, Artificial
  probe
  misc_feature (1)..(25): SEQ ID NO: 2604; WAN024GDK; Start 119; Stop 143
agacaaggaaaatgggttacatagg

SEQ ID NO: 331042 - DNA, 25 bp, Artificial
  probe
  misc_feature (1)..(25): SEQ ID NO: 2604; WAN024GDK; Start 118; Stop 142
gagacaaggaaaatgggttacatag

SEQ ID NO: 331043 - DNA, 25 bp, Artificial
  probe
  misc_feature (1)..(25): SEQ ID NO: 2604; WAN024GDK; Start 20; Stop 44
ttttcttgataaaggtattgggcgt

SEQ ID NO: 331044 - DNA, 25 bp, Artificial
  probe
  misc_feature (1)..(25): SEQ ID NO: 2604; WAN024GDK; Start 224; Stop 248
ccttcaatgaccaaacattcgtgat

SEQ ID NO: 331045 - DNA, 25 bp, Artificial
  probe
  misc_feature (1)..(25): SEQ ID NO: 2604; WAN024GDK; Start 26; Stop 50
tgataaaggtattgggcgtagtcgt

SEQ ID NO: 331046 - DNA, 25 bp, Artificial
  probe
  misc_feature (1)..(25): SEQ ID NO: 2604; WAN024GDK; Start 116; Stop 140
ttgagacaaggaaaatgggttacat

SEQ ID NO: 331047 - DNA, 25 bp, Artificial
  probe
  misc_feature (1)..(25): SEQ ID NO: 2604; WAN024GDK; Start 169; Stop 193
ctcagcaccttgaaggatagcattg

SEQ ID NO: 331048 - DNA, 25 bp, Artificial
  probe
  misc_feature (1)..(25): SEQ ID NO: 2604; WAN024GDK; Start 114; Stop 138
agttgagacaaggaaaatgggttac

SEQ ID NO: 331049 - DNA, 25 bp, Artificial
  probe
  misc_feature (1)..(25): SEQ ID NO: 2604; WAN024GDK; Start 113; Stop 137
cagttgagacaaggaaaatgggtta

SEQ ID NO: 331050 - DNA, 25 bp, Artificial
  probe
  misc_feature (1)..(25): SEQ ID NO: 2604; WAN024GDK; Start 115; Stop 139
gttgagacaaggaaaatgggttaca

SEQ ID NO: 331051 - DNA, 25 bp, Artificial
  probe
  misc_feature (1)..(25): SEQ ID NO: 2604; WAN024GDK; Start 237; Stop 261
aacattcgtgatcaatacaatgctc

SEQ ID NO: 331052 - DNA, 25 bp, Artificial
  probe
  misc_feature (1)..(25): SEQ ID NO: 2604; WAN024GDK; Start 239; Stop 263
cattcgtgatcaatacaatgctcag

SEQ ID NO: 331053 - DNA, 25 bp, Artificial
  probe
  misc_feature (1)..(25): SEQ ID NO: 2604; WAN024GDK; Start 122; Stop 146
caaggaaaatgggttacataggctg

SEQ ID NO: 331054 - DNA, 25 bp, Artificial
  probe
  misc_feature (1)..(25): SEQ ID NO: 2604; WAN024GDK; Start 232; Stop 256
gaccaaacattcgtgatcaatacaa

SEQ ID NO: 331055 - DNA, 25 bp, Artificial
  probe
  misc_feature (1)..(25): SEQ ID NO: 2605; WAN024ES7; Start 273; Stop 297
gaacaaactccaccaattcttctat

SEQ ID NO: 331056 - DNA, 25 bp, Artificial
  probe
  misc_feature (1)..(25): SEQ ID NO: 2605; WAN024ES7; Start 275; Stop 299
acaaactccaccaattcttctattt

SEQ ID NO: 331057 - DNA, 25 bp, Artificial
  probe
  misc_feature (1)..(25): SEQ ID NO: 2605; WAN024ES7; Start 274; Stop 298
aacaaactccaccaattcttctatt

SEQ ID NO: 331058 - DNA, 25 bp, Artificial
  probe
  misc_feature (1)..(25): SEQ ID NO: 2605; WAN024ES7; Start 272; Stop 296
cgaacaaactccaccaattcttcta

SEQ ID NO: 331059 - DNA, 25 bp, Artificial
  probe
  misc_feature (1)..(25): SEQ ID NO: 2605; WAN024ES7; Start 144; Stop 168
catccacttgccctatcaaatcttg

SEQ ID NO: 331060 - DNA, 25 bp, Artificial
  probe
  misc_feature (1)..(25): SEQ ID NO: 2605; WAN024ES7; Start 115; Stop 139
gtaggtgaagtaaagcgtgtcaatc

SEQ ID NO: 331061 - DNA, 25 bp, Artificial
  probe
  misc_feature (1)..(25): SEQ ID NO: 2605; WAN024ES7; Start 116; Stop 140
taggtgaagtaaagcgtgtcaatca

SEQ ID NO: 331062 - DNA, 25 bp, Artificial
  probe
  misc_feature (1)..(25): SEQ ID NO: 2605; WAN024ES7; Start 119; Stop 143
gtgaagtaaagcgtgtcaatcaagg

SEQ ID NO: 331063 - DNA, 25 bp, Artificial
  probe
  misc_feature (1)..(25): SEQ ID NO: 2605; WAN024ES7; Start 118; Stop 142
ggtgaagtaaagcgtgtcaatcaag

SEQ ID NO: 331064 - DNA, 25 bp, Artificial
  probe
  misc_feature (1)..(25): SEQ ID NO: 2605; WAN024ES7; Start 117; Stop 141
aggtgaagtaaagcgtgtcaatcaa

SEQ ID NO: 331065 - DNA, 25 bp, Artificial
  probe
  misc_feature (1)..(25): SEQ ID NO: 2605; WAN024ES7; Start 149; Stop 173
acttgccctatcaaatcttgctgag

SEQ ID NO: 331066 - DNA, 25 bp, Artificial
  probe
  misc_feature (1)..(25): SEQ ID NO: 2605; WAN024ES7; Start 218; Stop 242
tgatgaagttgcgatacagcttgac

SEQ ID NO: 331067 - DNA, 25 bp, Artificial
  probe
  misc_feature (1)..(25): SEQ ID NO: 2605; WAN024ES7; Start 270; Stop 294
ctcgaacaaactccaccaattcttc

SEQ ID NO: 331068 - DNA, 25 bp, Artificial
  probe
  misc_feature (1)..(25): SEQ ID NO: 2605; WAN024ES7; Start 122; Stop 146
aagtaaagcgtgtcaatcaaggcat

SEQ ID NO: 331069 - DNA, 25 bp, Artificial
  probe
  misc_feature (1)..(25): SEQ ID NO: 2605; WAN024ES7; Start 145; Stop 169
atccacttgccctatcaaatcttgc

SEQ ID NO: 331070 - DNA, 25 bp, Artificial
  probe
  misc_feature (1)..(25): SEQ ID NO: 2605; WAN024ES7; Start 217; Stop 241
ctgatgaagttgcgatacagcttga

SEQ ID NO: 331071 - DNA, 25 bp, Artificial
  probe
  misc_feature (1)..(25): SEQ ID NO: 2605; WAN024ES7; Start 148; Stop 172
cacttgccctatcaaatcttgctga

SEQ ID NO: 331072 - DNA, 25 bp, Artificial
  probe
  misc_feature (1)..(25): SEQ ID NO: 2605; WAN024ES7; Start 114; Stop 138
cgtaggtgaagtaaagcgtgtcaat

SEQ ID NO: 331073 - DNA, 25 bp, Artificial
  probe
  misc_feature (1)..(25): SEQ ID NO: 2605; WAN024ES7; Start 271; Stop 295
tcgaacaaactccaccaattcttct

SEQ ID NO: 331074 - DNA, 25 bp, Artificial
  probe
  misc_feature (1)..(25): SEQ ID NO: 2605; WAN024ES7; Start 123; Stop 147
agtaaagcgtgtcaatcaaggcatc

SEQ ID NO: 331075 - DNA, 25 bp, Artificial
  probe
  misc_feature (1)..(25): SEQ ID NO: 2605; WAN024ES7; Start 276; Stop 300
caaactccaccaattcttctatttt

SEQ ID NO: 331076 - DNA, 25 bp, Artificial
  probe
  misc_feature (1)..(25): SEQ ID NO: 2605; WAN024ES7; Start 121; Stop 145
gaagtaaagcgtgtcaatcaaggca

SEQ ID NO: 331077 - DNA, 25 bp, Artificial
  probe
  misc_feature (1)..(25): SEQ ID NO: 2605; WAN024ES7; Start 219; Stop 243
gatgaagttgcgatacagcttgacc

SEQ ID NO: 331078 - DNA, 25 bp, Artificial
  probe
  misc_feature (1)..(25): SEQ ID NO: 2605; WAN024ES7; Start 231; Stop 255
atacagcttgaccaaaatcttcttc

SEQ ID NO: 331079 - DNA, 25 bp, Artificial
  probe
  misc_feature (1)..(25): SEQ ID NO: 2605; WAN024ES7; Start 230; Stop 254
gatacagcttgaccaaaatcttctt

SEQ ID NO: 331080 - DNA, 25 bp, Artificial
  probe
  misc_feature (1)..(25): SEQ ID NO: 2605; WAN024ES7; Start 120; Stop 144
tgaagtaaagcgtgtcaatcaaggc

SEQ ID NO: 331081 - DNA, 25 bp, Artificial
  probe
  misc_feature (1)..(25): SEQ ID NO: 2605; WAN024ES7; Start 147; Stop 171
ccacttgccctatcaaatcttgctg

SEQ ID NO: 331082 - DNA, 25 bp, Artificial
  probe
  misc_feature (1)..(25): SEQ ID NO: 2605; WAN024ES7; Start 105; Stop 129
caaaactgccgtaggtgaagtaaag

SEQ ID NO: 331083 - DNA, 25 bp, Artificial
  probe
  misc_feature (1)..(25): SEQ ID NO: 2605; WAN024ES7; Start 232; Stop 256
tacagcttgaccaaaatcttcttca

SEQ ID NO: 331084 - DNA, 25 bp, Artificial
  probe
  misc_feature (1)..(25): SEQ ID NO: 2605; WAN024ES7; Start 229; Stop 253
cgatacagcttgaccaaaatcttct

SEQ ID NO: 331085 - DNA, 25 bp, Artificial
  probe
  misc_feature (1)..(25): SEQ ID NO: 2605; WAN024ES7; Start 216; Stop 240
cctgatgaagttgcgatacagcttg

SEQ ID NO: 331086 - DNA, 25 bp, Artificial
  probe
  misc_feature (1)..(25): SEQ ID NO: 2605; WAN024ES7; Start 235; Stop 259
agcttgaccaaaatcttcttcagaa

SEQ ID NO: 331087 - DNA, 25 bp, Artificial
  probe
  misc_feature (1)..(25): SEQ ID NO: 2605; WAN024ES7; Start 146; Stop 170
tccacttgccctatcaaatcttgct

SEQ ID NO: 331088 - DNA, 25 bp, Artificial
  probe
  misc_feature (1)..(25): SEQ ID NO: 2606; WAN024DGL; Start 98; Stop 122
tgttactagatgataaggatggtgc

SEQ ID NO: 331089 - DNA, 25 bp, Artificial
  probe
  misc_feature (1)..(25): SEQ ID NO: 2606; WAN024DGL; Start 99; Stop 123
gttactagatgataaggatggtgct

SEQ ID NO: 331090 - DNA, 25 bp, Artificial
  probe
  misc_feature (1)..(25): SEQ ID NO: 2606; WAN024DGL; Start 100; Stop 124
ttactagatgataaggatggtgctc

SEQ ID NO: 331091 - DNA, 25 bp, Artificial
  probe
  misc_feature (1)..(25): SEQ ID NO: 2606; WAN024DGL; Start 101; Stop 125
tactagatgataaggatggtgctca

SEQ ID NO: 331092 - DNA, 25 bp, Artificial
  probe
  misc_feature (1)..(25): SEQ ID NO: 2606; WAN024DGL; Start 97; Stop 121
gtgttactagatgataaggatggtg

SEQ ID NO: 331093 - DNA, 25 bp, Artificial
  probe
  misc_feature (1)..(25): SEQ ID NO: 2606; WAN024DGL; Start 92; Stop 116
caggagtgttactagatgataagga

SEQ ID NO: 331094 - DNA, 25 bp, Artificial
  probe
  misc_feature (1)..(25): SEQ ID NO: 2606; WAN024DGL; Start 91; Stop 115
acaggagtgttactagatgataagg

SEQ ID NO: 331095 - DNA, 25 bp, Artificial
  probe
  misc_feature (1)..(25): SEQ ID NO: 2606; WAN024DGL; Start 102; Stop 126
actagatgataaggatggtgctcag

SEQ ID NO: 331096 - DNA, 25 bp, Artificial
  probe
  misc_feature (1)..(25): SEQ ID NO: 2606; WAN024DGL; Start 96; Stop 120
agtgttactagatgataaggatggt

SEQ ID NO: 331097 - DNA, 25 bp, Artificial
  probe
  misc_feature (1)..(25): SEQ ID NO: 2606; WAN024DGL; Start 252; Stop 276
tgcttcttggttccaatatcttact

SEQ ID NO: 331098 - DNA, 25 bp, Artificial
  probe
  misc_feature (1)..(25): SEQ ID NO: 2606; WAN024DGL; Start 253; Stop 277
gcttcttggttccaatatcttactg

SEQ ID NO: 331099 - DNA, 25 bp, Artificial
  probe
  misc_feature (1)..(25): SEQ ID NO: 2606; WAN024DGL; Start 83; Stop 107
cggtctatacaggagtgttactaga

SEQ ID NO: 331100 - DNA, 25 bp, Artificial
  probe
  misc_feature (1)..(25): SEQ ID NO: 2606; WAN024DGL; Start 251; Stop 275
atgcttcttggttccaatatcttac

SEQ ID NO: 331101 - DNA, 25 bp, Artificial
  probe
  misc_feature (1)..(25): SEQ ID NO: 2606; WAN024DGL; Start 95; Stop 119
gagtgttactagatgataaggatgg

SEQ ID NO: 331102 - DNA, 25 bp, Artificial
  probe
  misc_feature (1)..(25): SEQ ID NO: 2606; WAN024DGL; Start 94; Stop 118
ggagtgttactagatgataaggatg

SEQ ID NO: 331103 - DNA, 25 bp, Artificial
  probe
  misc_feature (1)..(25): SEQ ID NO: 2606; WAN024DGL; Start 103; Stop 127
ctagatgataaggatggtgctcagg

SEQ ID NO: 331104 - DNA, 25 bp, Artificial
  probe
  misc_feature (1)..(25): SEQ ID NO: 2606; WAN024DGL; Start 93; Stop 117
aggagtgttactagatgataaggat

SEQ ID NO: 331105 - DNA, 25 bp, Artificial
  probe
  misc_feature (1)..(25): SEQ ID NO: 2606; WAN024DGL; Start 249; Stop 273
ttatgcttcttggttccaatatctt

SEQ ID NO: 331106 - DNA, 25 bp, Artificial
  probe
  misc_feature (1)..(25): SEQ ID NO: 2606; WAN024DGL; Start 60; Stop 84
tccttgtatcttacctttgttaccg

SEQ ID NO: 331107 - DNA, 25 bp, Artificial
  probe
  misc_feature (1)..(25): SEQ ID NO: 2606; WAN024DGL; Start 84; Stop 108
ggtctatacaggagtgttactagat

SEQ ID NO: 331108 - DNA, 25 bp, Artificial
  probe
  misc_feature (1)..(25): SEQ ID NO: 2606; WAN024DGL; Start 59; Stop 83
ctccttgtatcttacctttgttacc

SEQ ID NO: 331109 - DNA, 25 bp, Artificial
  probe
  misc_feature (1)..(25): SEQ ID NO: 2606; WAN024DGL; Start 241; Stop 265
gatttgctttatgcttcttggttcc

SEQ ID NO: 331110 - DNA, 25 bp, Artificial
  probe
  misc_feature (1)..(25): SEQ ID NO: 2606; WAN024DGL; Start 240; Stop 264
cgatttgctttatgcttcttggttc

SEQ ID NO: 331111 - DNA, 25 bp, Artificial
  probe
  misc_feature (1)..(25): SEQ ID NO: 2606; WAN024DGL; Start 278; Stop 302
gggcaattattatccttcttggttt

SEQ ID NO: 331112 - DNA, 25 bp, Artificial
  probe
  misc_feature (1)..(25): SEQ ID NO: 2606; WAN024DGL; Start 235; Stop 259
ttaggcgatttgctttatgcttctt

SEQ ID NO: 331113 - DNA, 25 bp, Artificial
  probe
  misc_feature (1)..(25): SEQ ID NO: 2606; WAN024DGL; Start 234; Stop 258
tttaggcgatttgctttatgcttct

SEQ ID NO: 331114 - DNA, 25 bp, Artificial
  probe
  misc_feature (1)..(25): SEQ ID NO: 2606; WAN024DGL; Start 308; Stop 332
aaatggagattctacactttaaggg

SEQ ID NO: 331115 - DNA, 25 bp, Artificial
  probe
  misc_feature (1)..(25): SEQ ID NO: 2606; WAN024DGL; Start 254; Stop 278
cttcttggttccaatatcttactgg

SEQ ID NO: 331116 - DNA, 25 bp, Artificial
  probe
  misc_feature (1)..(25): SEQ ID NO: 2606; WAN024DGL; Start 666; Stop 690
ggttctgtttggaaatgcttcaatt

SEQ ID NO: 331117 - DNA, 25 bp, Artificial
  probe
  misc_feature (1)..(25): SEQ ID NO: 2606; WAN024DGL; Start 304; Stop 328
caccaaatggagattctacacttta

SEQ ID NO: 331118 - DNA, 25 bp, Artificial
  probe
  misc_feature (1)..(25): SEQ ID NO: 2606; WAN024DGL; Start 250; Stop 274
tatgcttcttggttccaatatctta

SEQ ID NO: 331119 - DNA, 25 bp, Artificial
  probe
  misc_feature (1)..(25): SEQ ID NO: 2606; WAN024DGL; Start 303; Stop 327
gcaccaaatggagattctacacttt

SEQ ID NO: 331120 - DNA, 25 bp, Artificial
  probe
  misc_feature (1)..(25): SEQ ID NO: 2606; WAN024DGL; Start 667; Stop 691
gttctgtttggaaatgcttcaattt

SEQ ID NO: 331121 - DNA, 25 bp, Artificial
  probe
  misc_feature (1)..(25): SEQ ID NO: 2607; WAN024GDX; Start 1272; Stop 1296
tgtggttgattattggattgagatg

SEQ ID NO: 331122 - DNA, 25 bp, Artificial
  probe
  misc_feature (1)..(25): SEQ ID NO: 2607; WAN024GDX; Start 1269; Stop 1293
ttctgtggttgattattggattgag

SEQ ID NO: 331123 - DNA, 25 bp, Artificial
  probe
  misc_feature (1)..(25): SEQ ID NO: 2607; WAN024GDX; Start 1274; Stop 1298
tggttgattattggattgagatgac

SEQ ID NO: 331124 - DNA, 25 bp, Artificial
  probe
  misc_feature (1)..(25): SEQ ID NO: 2607; WAN024GDX; Start 1273; Stop 1297
gtggttgattattggattgagatga

SEQ ID NO: 331125 - DNA, 25 bp, Artificial
  probe
  misc_feature (1)..(25): SEQ ID NO: 2607; WAN024GDX; Start 1271; Stop 1295
ctgtggttgattattggattgagat

SEQ ID NO: 331126 - DNA, 25 bp, Artificial
  probe
  misc_feature (1)..(25): SEQ ID NO: 2607; WAN024GDX; Start 1275; Stop 1299
ggttgattattggattgagatgact

SEQ ID NO: 331127 - DNA, 25 bp, Artificial
  probe
  misc_feature (1)..(25): SEQ ID NO: 2607; WAN024GDX; Start 1270; Stop 1294
tctgtggttgattattggattgaga

SEQ ID NO: 331128 - DNA, 25 bp, Artificial
  probe
  misc_feature (1)..(25): SEQ ID NO: 2607; WAN024GDX; Start 1071; Stop 1095
ctatcaattaagtggtggtcagcaa

SEQ ID NO: 331129 - DNA, 25 bp, Artificial
  probe
  misc_feature (1)..(25): SEQ ID NO: 2607; WAN024GDX; Start 1344; Stop 1368
acttacatctcagagtagcaatacc

SEQ ID NO: 331130 - DNA, 25 bp, Artificial
  probe
  misc_feature (1)..(25): SEQ ID NO: 2607; WAN024GDX; Start 1342; Stop 1366
ccacttacatctcagagtagcaata

SEQ ID NO: 331131 - DNA, 25 bp, Artificial
  probe
  misc_feature (1)..(25): SEQ ID NO: 2607; WAN024GDX; Start 981; Stop 1005
tcaattagatggacctgattctgaa

SEQ ID NO: 331132 - DNA, 25 bp, Artificial
  probe
  misc_feature (1)..(25): SEQ ID NO: 2607; WAN024GDX; Start 980; Stop 1004
ttcaattagatggacctgattctga

SEQ ID NO: 331133 - DNA, 25 bp, Artificial
  probe
  misc_feature (1)..(25): SEQ ID NO: 2607; WAN024GDX; Start 978; Stop 1002
gcttcaattagatggacctgattct

SEQ ID NO: 331134 - DNA, 25 bp, Artificial
  probe
  misc_feature (1)..(25): SEQ ID NO: 2607; WAN024GDX; Start 979; Stop 1003
cttcaattagatggacctgattctg

SEQ ID NO: 331135 - DNA, 25 bp, Artificial
  probe
  misc_feature (1)..(25): SEQ ID NO: 2607; WAN024GDX; Start 1343; Stop 1367
cacttacatctcagagtagcaatac

SEQ ID NO: 331136 - DNA, 25 bp, Artificial
  probe
  misc_feature (1)..(25): SEQ ID NO: 2607; WAN024GDX; Start 1341; Stop 1365
accacttacatctcagagtagcaat

SEQ ID NO: 331137 - DNA, 25 bp, Artificial
  probe
  misc_feature (1)..(25): SEQ ID NO: 2607; WAN024GDX; Start 1340; Stop 1364
aaccacttacatctcagagtagcaa

SEQ ID NO: 331138 - DNA, 25 bp, Artificial
  probe
  misc_feature (1)..(25): SEQ ID NO: 2607; WAN024GDX; Start 1070; Stop 1094
cctatcaattaagtggtggtcagca

SEQ ID NO: 331139 - DNA, 25 bp, Artificial
  probe
  misc_feature (1)..(25): SEQ ID NO: 2607; WAN024GDX; Start 655; Stop 679
tatgagatgacacaggttgcttcaa

SEQ ID NO: 331140 - DNA, 25 bp, Artificial
  probe
  misc_feature (1)..(25): SEQ ID NO: 2607; WAN024GDX; Start 1332; Stop 1356
cattaccaaaccacttacatctcag

SEQ ID NO: 331141 - DNA, 25 bp, Artificial
  probe
  misc_feature (1)..(25): SEQ ID NO: 2607; WAN024GDX; Start 977; Stop 1001
agcttcaattagatggacctgattc

SEQ ID NO: 331142 - DNA, 25 bp, Artificial
  probe
  misc_feature (1)..(25): SEQ ID NO: 2607; WAN024GDX; Start 976; Stop 1000
gagcttcaattagatggacctgatt

SEQ ID NO: 331143 - DNA, 25 bp, Artificial
  probe
  misc_feature (1)..(25): SEQ ID NO: 2607; WAN024GDX; Start 1318; Stop 1342
gtgaaagaagtgaccattaccaaac

SEQ ID NO: 331144 - DNA, 25 bp, Artificial
  probe
  misc_feature (1)..(25): SEQ ID NO: 2607; WAN024GDX; Start 1260; Stop 1284
ccctttgatttctgtggttgattat

SEQ ID NO: 331145 - DNA, 25 bp, Artificial
  probe
  misc_feature (1)..(25): SEQ ID NO: 2607; WAN024GDX; Start 1333; Stop 1357
attaccaaaccacttacatctcaga

SEQ ID NO: 331146 - DNA, 25 bp, Artificial
  probe
  misc_feature (1)..(25): SEQ ID NO: 2607; WAN024GDX; Start 1331; Stop 1355
ccattaccaaaccacttacatctca

SEQ ID NO: 331147 - DNA, 25 bp, Artificial
  probe
  misc_feature (1)..(25): SEQ ID NO: 2607; WAN024GDX; Start 1330; Stop 1354
accattaccaaaccacttacatctc

SEQ ID NO: 331148 - DNA, 25 bp, Artificial
  probe
  misc_feature (1)..(25): SEQ ID NO: 2607; WAN024GDX; Start 1329; Stop 1353
gaccattaccaaaccacttacatct

SEQ ID NO: 331149 - DNA, 25 bp, Artificial
  probe
  misc_feature (1)..(25): SEQ ID NO: 2607; WAN024GDX; Start 1334; Stop 1358
ttaccaaaccacttacatctcagag

SEQ ID NO: 331150 - DNA, 25 bp, Artificial
  probe
  misc_feature (1)..(25): SEQ ID NO: 2607; WAN024GDX; Start 1317; Stop 1341
tgtgaaagaagtgaccattaccaaa

SEQ ID NO: 331151 - DNA, 25 bp, Artificial
  probe
  misc_feature (1)..(25): SEQ ID NO: 2607; WAN024GDX; Start 1234; Stop 1258
tttctgctcattagtcatcgtttag

SEQ ID NO: 331152 - DNA, 25 bp, Artificial
  probe
  misc_feature (1)..(25): SEQ ID NO: 2607; WAN024GDX; Start 654; Stop 678
ctatgagatgacacaggttgcttca

SEQ ID NO: 331153 - DNA, 25 bp, Artificial
  probe
  misc_feature (1)..(25): SEQ ID NO: 2607; WAN024GDX; Start 1063; Stop 1087
aagagtccctatcaattaagtggtg

SEQ ID NO: 331154 - DNA, 25 bp, Artificial
  probe
  misc_feature (1)..(25): SEQ ID NO: 2608; WAN024FX2; Start 786; Stop 810
tgagaagatgattgagtatgctgag

SEQ ID NO: 331155 - DNA, 25 bp, Artificial
  probe
  misc_feature (1)..(25): SEQ ID NO: 2608; WAN024FX2; Start 785; Stop 809
ctgagaagatgattgagtatgctga

SEQ ID NO: 331156 - DNA, 25 bp, Artificial
  probe
  misc_feature (1)..(25): SEQ ID NO: 2608; WAN024FX2; Start 789; Stop 813
gaagatgattgagtatgctgaggaa

SEQ ID NO: 331157 - DNA, 25 bp, Artificial
  probe
  misc_feature (1)..(25): SEQ ID NO: 2608; WAN024FX2; Start 787; Stop 811
gagaagatgattgagtatgctgagg

SEQ ID NO: 331158 - DNA, 25 bp, Artificial
  probe
  misc_feature (1)..(25): SEQ ID NO: 2608; WAN024FX2; Start 788; Stop 812
agaagatgattgagtatgctgagga

SEQ ID NO: 331159 - DNA, 25 bp, Artificial
  probe
  misc_feature (1)..(25): SEQ ID NO: 2608; WAN024FX2; Start 781; Stop 805
gtggctgagaagatgattgagtatg

SEQ ID NO: 331160 - DNA, 25 bp, Artificial
  probe
  misc_feature (1)..(25): SEQ ID NO: 2608; WAN024FX2; Start 780; Stop 804
agtggctgagaagatgattgagtat

SEQ ID NO: 331161 - DNA, 25 bp, Artificial
  probe
  misc_feature (1)..(25): SEQ ID NO: 2608; WAN024FX2; Start 779; Stop 803
aagtggctgagaagatgattgagta

SEQ ID NO: 331162 - DNA, 25 bp, Artificial
  probe
  misc_feature (1)..(25): SEQ ID NO: 2608; WAN024FX2; Start 784; Stop 808
gctgagaagatgattgagtatgctg

SEQ ID NO: 331163 - DNA, 25 bp, Artificial
  probe
  misc_feature (1)..(25): SEQ ID NO: 2608; WAN024FX2; Start 776; Stop 800
aagaagtggctgagaagatgattga

SEQ ID NO: 331164 - DNA, 25 bp, Artificial
  probe
  misc_feature (1)..(25): SEQ ID NO: 2608; WAN024FX2; Start 777; Stop 801
agaagtggctgagaagatgattgag

SEQ ID NO: 331165 - DNA, 25 bp, Artificial
  probe
  misc_feature (1)..(25): SEQ ID NO: 2608; WAN024FX2; Start 783; Stop 807
ggctgagaagatgattgagtatgct

SEQ ID NO: 331166 - DNA, 25 bp, Artificial
  probe
  misc_feature (1)..(25): SEQ ID NO: 2608; WAN024FX2; Start 139; Stop 163
gatgtggtctatgtcgtggatgatt

SEQ ID NO: 331167 - DNA, 25 bp, Artificial
  probe
  misc_feature (1)..(25): SEQ ID NO: 2608; WAN024FX2; Start 778; Stop 802
gaagtggctgagaagatgattgagt

SEQ ID NO: 331168 - DNA, 25 bp, Artificial
  probe
  misc_feature (1)..(25): SEQ ID NO: 2608; WAN024FX2; Start 782; Stop 806
tggctgagaagatgattgagtatgc

SEQ ID NO: 331169 - DNA, 25 bp, Artificial
  probe
  misc_feature (1)..(25): SEQ ID NO: 2608; WAN024FX2; Start 790; Stop 814
aagatgattgagtatgctgaggaaa

SEQ ID NO: 331170 - DNA, 25 bp, Artificial
  probe
  misc_feature (1)..(25): SEQ ID NO: 2608; WAN024FX2; Start 774; Stop 798
taaagaagtggctgagaagatgatt

SEQ ID NO: 331171 - DNA, 25 bp, Artificial
  probe
  misc_feature (1)..(25): SEQ ID NO: 2608; WAN024FX2; Start 773; Stop 797
ataaagaagtggctgagaagatgat

SEQ ID NO: 331172 - DNA, 25 bp, Artificial
  probe
  misc_feature (1)..(25): SEQ ID NO: 2608; WAN024FX2; Start 772; Stop 796
gataaagaagtggctgagaagatga

SEQ ID NO: 331173 - DNA, 25 bp, Artificial
  probe
  misc_feature (1)..(25): SEQ ID NO: 2608; WAN024FX2; Start 163; Stop 187
tttgataatctgacgagtgaccttt

SEQ ID NO: 331174 - DNA, 25 bp, Artificial
  probe
  misc_feature (1)..(25): SEQ ID NO: 2608; WAN024FX2; Start 793; Stop 817
atgattgagtatgctgaggaaagag

SEQ ID NO: 331175 - DNA, 25 bp, Artificial
  probe
  misc_feature (1)..(25): SEQ ID NO: 2608; WAN024FX2; Start 792; Stop 816
gatgattgagtatgctgaggaaaga

SEQ ID NO: 331176 - DNA, 25 bp, Artificial
  probe
  misc_feature (1)..(25): SEQ ID NO: 2608; WAN024FX2; Start 791; Stop 815
agatgattgagtatgctgaggaaag

SEQ ID NO: 331177 - DNA, 25 bp, Artificial
  probe
  misc_feature (1)..(25): SEQ ID NO: 2608; WAN024FX2; Start 168; Stop 192
taatctgacgagtgacctttattgg

SEQ ID NO: 331178 - DNA, 25 bp, Artificial
  probe
  misc_feature (1)..(25): SEQ ID NO: 2608; WAN024FX2; Start 164; Stop 188
ttgataatctgacgagtgaccttta

SEQ ID NO: 331179 - DNA, 25 bp, Artificial
  probe
  misc_feature (1)..(25): SEQ ID NO: 2608; WAN024FX2; Start 595; Stop 619
gatgttggcaagaactacaagtacc

SEQ ID NO: 331180 - DNA, 25 bp, Artificial
  probe
  misc_feature (1)..(25): SEQ ID NO: 2608; WAN024FX2; Start 768; Stop 792
ctacgataaagaagtggctgagaag

SEQ ID NO: 331181 - DNA, 25 bp, Artificial
  probe
  misc_feature (1)..(25): SEQ ID NO: 2608; WAN024FX2; Start 241; Stop 265
catcgtcgtctaaatcttatgcttt

SEQ ID NO: 331182 - DNA, 25 bp, Artificial
  probe
  misc_feature (1)..(25): SEQ ID NO: 2608; WAN024FX2; Start 801; Stop 825
gtatgctgaggaaagagtgaagaag

SEQ ID NO: 331183 - DNA, 25 bp, Artificial
  probe
  misc_feature (1)..(25): SEQ ID NO: 2608; WAN024FX2; Start 360; Stop 384
taagaagggcttgtttgagtcatat

SEQ ID NO: 331184 - DNA, 25 bp, Artificial
  probe
  misc_feature (1)..(25): SEQ ID NO: 2608; WAN024FX2; Start 359; Stop 383
ataagaagggcttgtttgagtcata

SEQ ID NO: 331185 - DNA, 25 bp, Artificial
  probe
  misc_feature (1)..(25): SEQ ID NO: 2608; WAN024FX2; Start 811; Stop 835
gaaagagtgaagaagtttgggaata

SEQ ID NO: 331186 - DNA, 25 bp, Artificial
  probe
  misc_feature (1)..(25): SEQ ID NO: 2608; WAN024FX2; Start 810; Stop 834
ggaaagagtgaagaagtttgggaat

SEQ ID NO: 331187 - DNA, 25 bp, Artificial
  probe
  misc_feature (1)..(25): SEQ ID NO: 2609; WAN024CRG; Start 387; Stop 411
ccgcaccaattacaataatatcgta

SEQ ID NO: 331188 - DNA, 25 bp, Artificial
  probe
  misc_feature (1)..(25): SEQ ID NO: 2609; WAN024CRG; Start 185; Stop 209
ttcatctggatgtaagtcttgtcaa

SEQ ID NO: 331189 - DNA, 25 bp, Artificial
  probe
  misc_feature (1)..(25): SEQ ID NO: 2609; WAN024CRG; Start 183; Stop 207
tcttcatctggatgtaagtcttgtc

SEQ ID NO: 331190 - DNA, 25 bp, Artificial
  probe
  misc_feature (1)..(25): SEQ ID NO: 2609; WAN024CRG; Start 186; Stop 210
tcatctggatgtaagtcttgtcaat

SEQ ID NO: 331191 - DNA, 25 bp, Artificial
  probe
  misc_feature (1)..(25): SEQ ID NO: 2609; WAN024CRG; Start 184; Stop 208
cttcatctggatgtaagtcttgtca

SEQ ID NO: 331192 - DNA, 25 bp, Artificial
  probe
  misc_feature (1)..(25): SEQ ID NO: 2609; WAN024CRG; Start 182; Stop 206
atcttcatctggatgtaagtcttgt

SEQ ID NO: 331193 - DNA, 25 bp, Artificial
  probe
  misc_feature (1)..(25): SEQ ID NO: 2609; WAN024CRG; Start 444; Stop 468
cctattcctcaagatgaatgtgtct

SEQ ID NO: 331194 - DNA, 25 bp, Artificial
  probe
  misc_feature (1)..(25): SEQ ID NO: 2609; WAN024CRG; Start 443; Stop 467
tcctattcctcaagatgaatgtgtc

SEQ ID NO: 331195 - DNA, 25 bp, Artificial
  probe
  misc_feature (1)..(25): SEQ ID NO: 2609; WAN024CRG; Start 442; Stop 466
ctcctattcctcaagatgaatgtgt

SEQ ID NO: 331196 - DNA, 25 bp, Artificial
  probe
  misc_feature (1)..(25): SEQ ID NO: 2609; WAN024CRG; Start 441; Stop 465
tctcctattcctcaagatgaatgtg

SEQ ID NO: 331197 - DNA, 25 bp, Artificial
  probe
  misc_feature (1)..(25): SEQ ID NO: 2609; WAN024CRG; Start 440; Stop 464
ctctcctattcctcaagatgaatgt

SEQ ID NO: 331198 - DNA, 25 bp, Artificial
  probe
  misc_feature (1)..(25): SEQ ID NO: 2609; WAN024CRG; Start 388; Stop 412
cgcaccaattacaataatatcgtat

SEQ ID NO: 331199 - DNA, 25 bp, Artificial
  probe
  misc_feature (1)..(25): SEQ ID NO: 2609; WAN024CRG; Start 439; Stop 463
tctctcctattcctcaagatgaatg

SEQ ID NO: 331200 - DNA, 25 bp, Artificial
  probe
  misc_feature (1)..(25): SEQ ID NO: 2609; WAN024CRG; Start 438; Stop 462
ttctctcctattcctcaagatgaat

SEQ ID NO: 331201 - DNA, 25 bp, Artificial
  probe
  misc_feature (1)..(25): SEQ ID NO: 2609; WAN024CRG; Start 110; Stop 134
tccttagagtaaagttccttgtcag

SEQ ID NO: 331202 - DNA, 25 bp, Artificial
  probe
  misc_feature (1)..(25): SEQ ID NO: 2609; WAN024CRG; Start 435; Stop 459
tgtttctctcctattcctcaagatg

SEQ ID NO: 331203 - DNA, 25 bp, Artificial
  probe
  misc_feature (1)..(25): SEQ ID NO: 2609; WAN024CRG; Start 384; Stop 408
gtcccgcaccaattacaataatatc

SEQ ID NO: 331204 - DNA, 25 bp, Artificial
  probe
  misc_feature (1)..(25): SEQ ID NO: 2609; WAN024CRG; Start 112; Stop 136
cttagagtaaagttccttgtcagcc

SEQ ID NO: 331205 - DNA, 25 bp, Artificial
  probe
  misc_feature (1)..(25): SEQ ID NO: 2609; WAN024CRG; Start 111; Stop 135
ccttagagtaaagttccttgtcagc

SEQ ID NO: 331206 - DNA, 25 bp, Artificial
  probe
  misc_feature (1)..(25): SEQ ID NO: 2609; WAN024CRG; Start 171; Stop 195
ctgtgttgagcatcttcatctggat

SEQ ID NO: 331207 - DNA, 25 bp, Artificial
  probe
  misc_feature (1)..(25): SEQ ID NO: 2609; WAN024CRG; Start 436; Stop 460
gtttctctcctattcctcaagatga

SEQ ID NO: 331208 - DNA, 25 bp, Artificial
  probe
  misc_feature (1)..(25): SEQ ID NO: 2609; WAN024CRG; Start 434; Stop 458
atgtttctctcctattcctcaagat

SEQ ID NO: 331209 - DNA, 25 bp, Artificial
  probe
  misc_feature (1)..(25): SEQ ID NO: 2609; WAN024CRG; Start 113; Stop 137
ttagagtaaagttccttgtcagcct

SEQ ID NO: 331210 - DNA, 25 bp, Artificial
  probe
  misc_feature (1)..(25): SEQ ID NO: 2609; WAN024CRG; Start 105; Stop 129
gcatctccttagagtaaagttcctt

SEQ ID NO: 331211 - DNA, 25 bp, Artificial
  probe
  misc_feature (1)..(25): SEQ ID NO: 2609; WAN024CRG; Start 109; Stop 133
ctccttagagtaaagttccttgtca

SEQ ID NO: 331212 - DNA, 25 bp, Artificial
  probe
  misc_feature (1)..(25): SEQ ID NO: 2609; WAN024CRG; Start 108; Stop 132
tctccttagagtaaagttccttgtc

SEQ ID NO: 331213 - DNA, 25 bp, Artificial
  probe
  misc_feature (1)..(25): SEQ ID NO: 2609; WAN024CRG; Start 432; Stop 456
tcatgtttctctcctattcctcaag

SEQ ID NO: 331214 - DNA, 25 bp, Artificial
  probe
  misc_feature (1)..(25): SEQ ID NO: 2609; WAN024CRG; Start 385; Stop 409
tcccgcaccaattacaataatatcg

SEQ ID NO: 331215 - DNA, 25 bp, Artificial
  probe
  misc_feature (1)..(25): SEQ ID NO: 2609; WAN024CRG; Start 437; Stop 461
tttctctcctattcctcaagatgaa

SEQ ID NO: 331216 - DNA, 25 bp, Artificial
  probe
  misc_feature (1)..(25): SEQ ID NO: 2609; WAN024CRG; Start 278; Stop 302
atagagggattacaaggcatgaaag

SEQ ID NO: 331217 - DNA, 25 bp, Artificial
  probe
  misc_feature (1)..(25): SEQ ID NO: 2609; WAN024CRG; Start 277; Stop 301
gatagagggattacaaggcatgaaa

SEQ ID NO: 331218 - DNA, 25 bp, Artificial
  probe
  misc_feature (1)..(25): SEQ ID NO: 2609; WAN024CRG; Start 383; Stop 407
tgtcccgcaccaattacaataatat

SEQ ID NO: 331219 - DNA, 25 bp, Artificial
  probe
  misc_feature (1)..(25): SEQ ID NO: 2609; WAN024CRG; Start 386; Stop 410
cccgcaccaattacaataatatcgt

SEQ ID NO: 331220 - DNA, 25 bp, Artificial
  probe
  misc_feature (1)..(25): SEQ ID NO: 2610; WAN024C8A; Start 534; Stop 558
aatggaagatcaaggtggaggtaac

SEQ ID NO: 331221 - DNA, 25 bp, Artificial
  probe
  misc_feature (1)..(25): SEQ ID NO: 2610; WAN024C8A; Start 416; Stop 440
aattgtcttatgctgaactggctga

SEQ ID NO: 331222 - DNA, 25 bp, Artificial
  probe
  misc_feature (1)..(25): SEQ ID NO: 2610; WAN024C8A; Start 373; Stop 397
atgggcattattcctcgtatcttta

SEQ ID NO: 331223 - DNA, 25 bp, Artificial
  probe
  misc_feature (1)..(25): SEQ ID NO: 2610; WAN024C8A; Start 374; Stop 398
tgggcattattcctcgtatctttaa

SEQ ID NO: 331224 - DNA, 25 bp, Artificial
  probe
  misc_feature (1)..(25): SEQ ID NO: 2610; WAN024C8A; Start 29; Stop 53
atataatagaagcaaacggaggacg

SEQ ID NO: 331225 - DNA, 25 bp, Artificial
  probe
  misc_feature (1)..(25): SEQ ID NO: 2610; WAN024C8A; Start 27; Stop 51
tgatataatagaagcaaacggagga

SEQ ID NO: 331226 - DNA, 25 bp, Artificial
  probe
  misc_feature (1)..(25): SEQ ID NO: 2610; WAN024C8A; Start 28; Stop 52
gatataatagaagcaaacggaggac

SEQ ID NO: 331227 - DNA, 25 bp, Artificial
  probe
  misc_feature (1)..(25): SEQ ID NO: 2610; WAN024C8A; Start 576; Stop 600
tggaatgactattggaaccattgtt

SEQ ID NO: 331228 - DNA, 25 bp, Artificial
  probe
  misc_feature (1)..(25): SEQ ID NO: 2610; WAN024C8A; Start 417; Stop 441
attgtcttatgctgaactggctgag

SEQ ID NO: 331229 - DNA, 25 bp, Artificial
  probe
  misc_feature (1)..(25): SEQ ID NO: 2610; WAN024C8A; Start 317; Stop 341
gtatcagagaatggtgtttcggtag

SEQ ID NO: 331230 - DNA, 25 bp, Artificial
  probe
  misc_feature (1)..(25): SEQ ID NO: 2610; WAN024C8A; Start 26; Stop 50
atgatataatagaagcaaacggagg

SEQ ID NO: 331231 - DNA, 25 bp, Artificial
  probe
  misc_feature (1)..(25): SEQ ID NO: 2610; WAN024C8A; Start 318; Stop 342
tatcagagaatggtgtttcggtagt

SEQ ID NO: 331232 - DNA, 25 bp, Artificial
  probe
  misc_feature (1)..(25): SEQ ID NO: 2610; WAN024C8A; Start 375; Stop 399
gggcattattcctcgtatctttaat

SEQ ID NO: 331233 - DNA, 25 bp, Artificial
  probe
  misc_feature (1)..(25): SEQ ID NO: 2610; WAN024C8A; Start 529; Stop 553
aaagaaatggaagatcaaggtggag

SEQ ID NO: 331234 - DNA, 25 bp, Artificial
  probe
  misc_feature (1)..(25): SEQ ID NO: 2610; WAN024C8A; Start 372; Stop 396
catgggcattattcctcgtatcttt

SEQ ID NO: 331235 - DNA, 25 bp, Artificial
  probe
  misc_feature (1)..(25): SEQ ID NO: 2610; WAN024C8A; Start 369; Stop 393
tttcatgggcattattcctcgtatc

SEQ ID NO: 331236 - DNA, 25 bp, Artificial
  probe
  misc_feature (1)..(25): SEQ ID NO: 2610; WAN024C8A; Start 319; Stop 343
atcagagaatggtgtttcggtagtt

SEQ ID NO: 331237 - DNA, 25 bp, Artificial
  probe
  misc_feature (1)..(25): SEQ ID NO: 2610; WAN024C8A; Start 715; Stop 739
ctaggacgtgagaagatggaagaag

SEQ ID NO: 331238 - DNA, 25 bp, Artificial
  probe
  misc_feature (1)..(25): SEQ ID NO: 2610; WAN024C8A; Start 30; Stop 54
tataatagaagcaaacggaggacgg

SEQ ID NO: 331239 - DNA, 25 bp, Artificial
  probe
  misc_feature (1)..(25): SEQ ID NO: 2610; WAN024C8A; Start 533; Stop 557
aaatggaagatcaaggtggaggtaa

SEQ ID NO: 331240 - DNA, 25 bp, Artificial
  probe
  misc_feature (1)..(25): SEQ ID NO: 2610; WAN024C8A; Start 320; Stop 344
tcagagaatggtgtttcggtagttt

SEQ ID NO: 331241 - DNA, 25 bp, Artificial
  probe
  misc_feature (1)..(25): SEQ ID NO: 2610; WAN024C8A; Start 310; Stop 334
gacaagcgtatcagagaatggtgtt

SEQ ID NO: 331242 - DNA, 25 bp, Artificial
  probe
  misc_feature (1)..(25): SEQ ID NO: 2610; WAN024C8A; Start 160; Stop 184
gaacgagggattcaagagttaggaa

SEQ ID NO: 331243 - DNA, 25 bp, Artificial
  probe
  misc_feature (1)..(25): SEQ ID NO: 2610; WAN024C8A; Start 583; Stop 607
actattggaaccattgtttatctga

SEQ ID NO: 331244 - DNA, 25 bp, Artificial
  probe
  misc_feature (1)..(25): SEQ ID NO: 2610; WAN024C8A; Start 581; Stop 605
tgactattggaaccattgtttatct

SEQ ID NO: 331245 - DNA, 25 bp, Artificial
  probe
  misc_feature (1)..(25): SEQ ID NO: 2610; WAN024C8A; Start 312; Stop 336
caagcgtatcagagaatggtgtttc

SEQ ID NO: 331246 - DNA, 25 bp, Artificial
  probe
  misc_feature (1)..(25): SEQ ID NO: 2610; WAN024C8A; Start 371; Stop 395
tcatgggcattattcctcgtatctt

SEQ ID NO: 331247 - DNA, 25 bp, Artificial
  probe
  misc_feature (1)..(25): SEQ ID NO: 2610; WAN024C8A; Start 370; Stop 394
ttcatgggcattattcctcgtatct

SEQ ID NO: 331248 - DNA, 25 bp, Artificial
  probe
  misc_feature (1)..(25): SEQ ID NO: 2610; WAN024C8A; Start 382; Stop 406
attcctcgtatctttaatgtggacc

SEQ ID NO: 331249 - DNA, 25 bp, Artificial
  probe
  misc_feature (1)..(25): SEQ ID NO: 2610; WAN024C8A; Start 189; Stop 213
tttgcgagaatctgatctacagttt

SEQ ID NO: 331250 - DNA, 25 bp, Artificial
  probe
  misc_feature (1)..(25): SEQ ID NO: 2610; WAN024C8A; Start 582; Stop 606
gactattggaaccattgtttatctg

SEQ ID NO: 331251 - DNA, 25 bp, Artificial
  probe
  misc_feature (1)..(25): SEQ ID NO: 2610; WAN024C8A; Start 532; Stop 556
gaaatggaagatcaaggtggaggta

SEQ ID NO: 331252 - DNA, 25 bp, Artificial
  probe
  misc_feature (1)..(25): SEQ ID NO: 2610; WAN024C8A; Start 316; Stop 340
cgtatcagagaatggtgtttcggta

SEQ ID NO: 331253 - DNA, 25 bp, Artificial
  probe
  misc_feature (1)..(25): SEQ ID NO: 2611; WAN024DQ5; Start 744; Stop 768
gcattatccactacagttctattcc

SEQ ID NO: 331254 - DNA, 25 bp, Artificial
  probe
  misc_feature (1)..(25): SEQ ID NO: 2611; WAN024DQ5; Start 750; Stop 774
tccactacagttctattccagagat

SEQ ID NO: 331255 - DNA, 25 bp, Artificial
  probe
  misc_feature (1)..(25): SEQ ID NO: 2611; WAN024DQ5; Start 749; Stop 773
atccactacagttctattccagaga

SEQ ID NO: 331256 - DNA, 25 bp, Artificial
  probe
  misc_feature (1)..(25): SEQ ID NO: 2611; WAN024DQ5; Start 217; Stop 241
tgaattaacgaatacagaagccaat

SEQ ID NO: 331257 - DNA, 25 bp, Artificial
  probe
  misc_feature (1)..(25): SEQ ID NO: 2611; WAN024DQ5; Start 751; Stop 775
ccactacagttctattccagagatt

SEQ ID NO: 331258 - DNA, 25 bp, Artificial
  probe
  misc_feature (1)..(25): SEQ ID NO: 2611; WAN024DQ5; Start 748; Stop 772
tatccactacagttctattccagag

SEQ ID NO: 331259 - DNA, 25 bp, Artificial
  probe
  misc_feature (1)..(25): SEQ ID NO: 2611; WAN024DQ5; Start 479; Stop 503
atgattgaattaccgtcagcgtatt

SEQ ID NO: 331260 - DNA, 25 bp, Artificial
  probe
  misc_feature (1)..(25): SEQ ID NO: 2611; WAN024DQ5; Start 747; Stop 771
ttatccactacagttctattccaga

SEQ ID NO: 331261 - DNA, 25 bp, Artificial
  probe
  misc_feature (1)..(25): SEQ ID NO: 2611; WAN024DQ5; Start 478; Stop 502
gatgattgaattaccgtcagcgtat

SEQ ID NO: 331262 - DNA, 25 bp, Artificial
  probe
  misc_feature (1)..(25): SEQ ID NO: 2611; WAN024DQ5; Start 216; Stop 240
ctgaattaacgaatacagaagccaa

SEQ ID NO: 331263 - DNA, 25 bp, Artificial
  probe
  misc_feature (1)..(25): SEQ ID NO: 2611; WAN024DQ5; Start 782; Stop 806
ttagagattgaccatccagatcatc

SEQ ID NO: 331264 - DNA, 25 bp, Artificial
  probe
  misc_feature (1)..(25): SEQ ID NO: 2611; WAN024DQ5; Start 745; Stop 769
cattatccactacagttctattcca

SEQ ID NO: 331265 - DNA, 25 bp, Artificial
  probe
  misc_feature (1)..(25): SEQ ID NO: 2611; WAN024DQ5; Start 746; Stop 770
attatccactacagttctattccag

SEQ ID NO: 331266 - DNA, 25 bp, Artificial
  probe
  misc_feature (1)..(25): SEQ ID NO: 2611; WAN024DQ5; Start 218; Stop 242
gaattaacgaatacagaagccaatt

SEQ ID NO: 331267 - DNA, 25 bp, Artificial
  probe
  misc_feature (1)..(25): SEQ ID NO: 2611; WAN024DQ5; Start 686; Stop 710
gtagcaggctatctgaatacttctt

SEQ ID NO: 331268 - DNA, 25 bp, Artificial
  probe
  misc_feature (1)..(25): SEQ ID NO: 2611; WAN024DQ5; Start 684; Stop 708
ctgtagcaggctatctgaatacttc

SEQ ID NO: 331269 - DNA, 25 bp, Artificial
  probe
  misc_feature (1)..(25): SEQ ID NO: 2611; WAN024DQ5; Start 858; Stop 882
ccgcaagaaatgtggaataactaat

SEQ ID NO: 331270 - DNA, 25 bp, Artificial
  probe
  misc_feature (1)..(25): SEQ ID NO: 2611; WAN024DQ5; Start 685; Stop 709
tgtagcaggctatctgaatacttct

SEQ ID NO: 331271 - DNA, 25 bp, Artificial
  probe
  misc_feature (1)..(25): SEQ ID NO: 2611; WAN024DQ5; Start 650; Stop 674
caggataaagcaagaaagaacaaga

SEQ ID NO: 331272 - DNA, 25 bp, Artificial
  probe
  misc_feature (1)..(25): SEQ ID NO: 2611; WAN024DQ5; Start 777; Stop 801
ttgatttagagattgaccatccaga

SEQ ID NO: 331273 - DNA, 25 bp, Artificial
  probe
  misc_feature (1)..(25): SEQ ID NO: 2611; WAN024DQ5; Start 649; Stop 673
gcaggataaagcaagaaagaacaag

SEQ ID NO: 331274 - DNA, 25 bp, Artificial
  probe
  misc_feature (1)..(25): SEQ ID NO: 2611; WAN024DQ5; Start 778; Stop 802
tgatttagagattgaccatccagat

SEQ ID NO: 331275 - DNA, 25 bp, Artificial
  probe
  misc_feature (1)..(25): SEQ ID NO: 2611; WAN024DQ5; Start 857; Stop 881
accgcaagaaatgtggaataactaa

SEQ ID NO: 331276 - DNA, 25 bp, Artificial
  probe
  misc_feature (1)..(25): SEQ ID NO: 2611; WAN024DQ5; Start 539; Stop 563
aagattgtagttggaatgaatgatt

SEQ ID NO: 331277 - DNA, 25 bp, Artificial
  probe
  misc_feature (1)..(25): SEQ ID NO: 2611; WAN024DQ5; Start 651; Stop 675
aggataaagcaagaaagaacaagat

SEQ ID NO: 331278 - DNA, 25 bp, Artificial
  probe
  misc_feature (1)..(25): SEQ ID NO: 2611; WAN024DQ5; Start 776; Stop 800
tttgatttagagattgaccatccag

SEQ ID NO: 331279 - DNA, 25 bp, Artificial
  probe
  misc_feature (1)..(25): SEQ ID NO: 2611; WAN024DQ5; Start 530; Stop 554
ggcatttcaaagattgtagttggaa

SEQ ID NO: 331280 - DNA, 25 bp, Artificial
  probe
  misc_feature (1)..(25): SEQ ID NO: 2611; WAN024DQ5; Start 785; Stop 809
gagattgaccatccagatcatctta

SEQ ID NO: 331281 - DNA, 25 bp, Artificial
  probe
  misc_feature (1)..(25): SEQ ID NO: 2611; WAN024DQ5; Start 783; Stop 807
tagagattgaccatccagatcatct

SEQ ID NO: 331282 - DNA, 25 bp, Artificial
  probe
  misc_feature (1)..(25): SEQ ID NO: 2611; WAN024DQ5; Start 743; Stop 767
tgcattatccactacagttctattc

SEQ ID NO: 331283 - DNA, 25 bp, Artificial
  probe
  misc_feature (1)..(25): SEQ ID NO: 2611; WAN024DQ5; Start 786; Stop 810
agattgaccatccagatcatcttaa

SEQ ID NO: 331284 - DNA, 25 bp, Artificial
  probe
  misc_feature (1)..(25): SEQ ID NO: 2611; WAN024DQ5; Start 720; Stop 744
aaatgaatcagttgggtatcaagtg

SEQ ID NO: 331285 - DNA, 25 bp, Artificial
  probe
  misc_feature (1)..(25): SEQ ID NO: 2611; WAN024DQ5; Start 784; Stop 808
agagattgaccatccagatcatctt

SEQ ID NO: 331286 - DNA, 25 bp, Artificial
  probe
  misc_feature (1)..(25): SEQ ID NO: 2612; WAN024CFK; Start 85; Stop 109
gtctatgaacatcctgaacacgatt

SEQ ID NO: 331287 - DNA, 25 bp, Artificial
  probe
  misc_feature (1)..(25): SEQ ID NO: 2612; WAN024CFK; Start 86; Stop 110
tctatgaacatcctgaacacgattc

SEQ ID NO: 331288 - DNA, 25 bp, Artificial
  probe
  misc_feature (1)..(25): SEQ ID NO: 2612; WAN024CFK; Start 151; Stop 175
tcaagagatattcaaggtgatgtca

SEQ ID NO: 331289 - DNA, 25 bp, Artificial
  probe
  misc_feature (1)..(25): SEQ ID NO: 2612; WAN024CFK; Start 154; Stop 178
agagatattcaaggtgatgtcattg

SEQ ID NO: 331290 - DNA, 25 bp, Artificial
  probe
  misc_feature (1)..(25): SEQ ID NO: 2612; WAN024CFK; Start 152; Stop 176
caagagatattcaaggtgatgtcat

SEQ ID NO: 331291 - DNA, 25 bp, Artificial
  probe
  misc_feature (1)..(25): SEQ ID NO: 2612; WAN024CFK; Start 150; Stop 174
ttcaagagatattcaaggtgatgtc

SEQ ID NO: 331292 - DNA, 25 bp, Artificial
  probe
  misc_feature (1)..(25): SEQ ID NO: 2612; WAN024CFK; Start 636; Stop 660
gagctattacgaacttcatcaacaa

SEQ ID NO: 331293 - DNA, 25 bp, Artificial
  probe
  misc_feature (1)..(25): SEQ ID NO: 2612; WAN024CFK; Start 153; Stop 177
aagagatattcaaggtgatgtcatt

SEQ ID NO: 331294 - DNA, 25 bp, Artificial
  probe
  misc_feature (1)..(25): SEQ ID NO: 2612; WAN024CFK; Start 84; Stop 108
tgtctatgaacatcctgaacacgat

SEQ ID NO: 331295 - DNA, 25 bp, Artificial
  probe
  misc_feature (1)..(25): SEQ ID NO: 2612; WAN024CFK; Start 635; Stop 659
tgagctattacgaacttcatcaaca

SEQ ID NO: 331296 - DNA, 25 bp, Artificial
  probe
  misc_feature (1)..(25): SEQ ID NO: 2612; WAN024CFK; Start 78; Stop 102
gagcagtgtctatgaacatcctgaa

SEQ ID NO: 331297 - DNA, 25 bp, Artificial
  probe
  misc_feature (1)..(25): SEQ ID NO: 2612; WAN024CFK; Start 708; Stop 732
tgttgttgcttatcaaactttacga

SEQ ID NO: 331298 - DNA, 25 bp, Artificial
  probe
  misc_feature (1)..(25): SEQ ID NO: 2612; WAN024CFK; Start 704; Stop 728
ggtctgttgttgcttatcaaacttt

SEQ ID NO: 331299 - DNA, 25 bp, Artificial
  probe
  misc_feature (1)..(25): SEQ ID NO: 2612; WAN024CFK; Start 701; Stop 725
aaaggtctgttgttgcttatcaaac

SEQ ID NO: 331300 - DNA, 25 bp, Artificial
  probe
  misc_feature (1)..(25): SEQ ID NO: 2612; WAN024CFK; Start 710; Stop 734
ttgttgcttatcaaactttacgact

SEQ ID NO: 331301 - DNA, 25 bp, Artificial
  probe
  misc_feature (1)..(25): SEQ ID NO: 2612; WAN024CFK; Start 709; Stop 733
gttgttgcttatcaaactttacgac

SEQ ID NO: 331302 - DNA, 25 bp, Artificial
  probe
  misc_feature (1)..(25): SEQ ID NO: 2612; WAN024CFK; Start 707; Stop 731
ctgttgttgcttatcaaactttacg

SEQ ID NO: 331303 - DNA, 25 bp, Artificial
  probe
  misc_feature (1)..(25): SEQ ID NO: 2612; WAN024CFK; Start 79; Stop 103
agcagtgtctatgaacatcctgaac

SEQ ID NO: 331304 - DNA, 25 bp, Artificial
  probe
  misc_feature (1)..(25): SEQ ID NO: 2612; WAN024CFK; Start 703; Stop 727
aggtctgttgttgcttatcaaactt

SEQ ID NO: 331305 - DNA, 25 bp, Artificial
  probe
  misc_feature (1)..(25): SEQ ID NO: 2612; WAN024CFK; Start 702; Stop 726
aaggtctgttgttgcttatcaaact

SEQ ID NO: 331306 - DNA, 25 bp, Artificial
  probe
  misc_feature (1)..(25): SEQ ID NO: 2612; WAN024CFK; Start 80; Stop 104
gcagtgtctatgaacatcctgaaca

SEQ ID NO: 331307 - DNA, 25 bp, Artificial
  probe
  misc_feature (1)..(25): SEQ ID NO: 2612; WAN024CFK; Start 706; Stop 730
tctgttgttgcttatcaaactttac

SEQ ID NO: 331308 - DNA, 25 bp, Artificial
  probe
  misc_feature (1)..(25): SEQ ID NO: 2612; WAN024CFK; Start 705; Stop 729
gtctgttgttgcttatcaaacttta

SEQ ID NO: 331309 - DNA, 25 bp, Artificial
  probe
  misc_feature (1)..(25): SEQ ID NO: 2612; WAN024CFK; Start 149; Stop 173
tttcaagagatattcaaggtgatgt

SEQ ID NO: 331310 - DNA, 25 bp, Artificial
  probe
  misc_feature (1)..(25): SEQ ID NO: 2612; WAN024CFK; Start 87; Stop 111
ctatgaacatcctgaacacgattca

SEQ ID NO: 331311 - DNA, 25 bp, Artificial
  probe
  misc_feature (1)..(25): SEQ ID NO: 2612; WAN024CFK; Start 155; Stop 179
gagatattcaaggtgatgtcattga

SEQ ID NO: 331312 - DNA, 25 bp, Artificial
  probe
  misc_feature (1)..(25): SEQ ID NO: 2612; WAN024CFK; Start 637; Stop 661
agctattacgaacttcatcaacaaa

SEQ ID NO: 331313 - DNA, 25 bp, Artificial
  probe
  misc_feature (1)..(25): SEQ ID NO: 2612; WAN024CFK; Start 634; Stop 658
atgagctattacgaacttcatcaac

SEQ ID NO: 331314 - DNA, 25 bp, Artificial
  probe
  misc_feature (1)..(25): SEQ ID NO: 2612; WAN024CFK; Start 156; Stop 180
agatattcaaggtgatgtcattgat

SEQ ID NO: 331315 - DNA, 25 bp, Artificial
  probe
  misc_feature (1)..(25): SEQ ID NO: 2612; WAN024CFK; Start 66; Stop 90
taaacaagtttcgagcagtgtctat

SEQ ID NO: 331316 - DNA, 25 bp, Artificial
  probe
  misc_feature (1)..(25): SEQ ID NO: 2612; WAN024CFK; Start 58; Stop 82
atctcctttaaacaagtttcgagca

SEQ ID NO: 331317 - DNA, 25 bp, Artificial
  probe
  misc_feature (1)..(25): SEQ ID NO: 2612; WAN024CFK; Start 65; Stop 89
ttaaacaagtttcgagcagtgtcta

SEQ ID NO: 331318 - DNA, 25 bp, Artificial
  probe
  misc_feature (1)..(25): SEQ ID NO: 2612; WAN024CFK; Start 63; Stop 87
ctttaaacaagtttcgagcagtgtc

SEQ ID NO: 331319 - DNA, 25 bp, Artificial
  probe
  misc_feature (1)..(25): SEQ ID NO: 2613; WAN024G7A; Start 129; Stop 153
cggtaagactacaattcatcgtatt

SEQ ID NO: 331320 - DNA, 25 bp, Artificial
  probe
  misc_feature (1)..(25): SEQ ID NO: 2613; WAN024G7A; Start 209; Stop 233
ctcagcatccacactatttagaact

SEQ ID NO: 331321 - DNA, 25 bp, Artificial
  probe
  misc_feature (1)..(25): SEQ ID NO: 2613; WAN024G7A; Start 208; Stop 232
tctcagcatccacactatttagaac

SEQ ID NO: 331322 - DNA, 25 bp, Artificial
  probe
  misc_feature (1)..(25): SEQ ID NO: 2613; WAN024G7A; Start 206; Stop 230
gttctcagcatccacactatttaga

SEQ ID NO: 331323 - DNA, 25 bp, Artificial
  probe
  misc_feature (1)..(25): SEQ ID NO: 2613; WAN024G7A; Start 205; Stop 229
cgttctcagcatccacactatttag

SEQ ID NO: 331324 - DNA, 25 bp, Artificial
  probe
  misc_feature (1)..(25): SEQ ID NO: 2613; WAN024G7A; Start 204; Stop 228
tcgttctcagcatccacactattta

SEQ ID NO: 331325 - DNA, 25 bp, Artificial
  probe
  misc_feature (1)..(25): SEQ ID NO: 2613; WAN024G7A; Start 128; Stop 152
ccggtaagactacaattcatcgtat

SEQ ID NO: 331326 - DNA, 25 bp, Artificial
  probe
  misc_feature (1)..(25): SEQ ID NO: 2613; WAN024G7A; Start 203; Stop 227
ttcgttctcagcatccacactattt

SEQ ID NO: 331327 - DNA, 25 bp, Artificial
  probe
  misc_feature (1)..(25): SEQ ID NO: 2613; WAN024G7A; Start 202; Stop 226
tttcgttctcagcatccacactatt

SEQ ID NO: 331328 - DNA, 25 bp, Artificial
  probe
  misc_feature (1)..(25): SEQ ID NO: 2613; WAN024G7A; Start 130; Stop 154
ggtaagactacaattcatcgtatta

SEQ ID NO: 331329 - DNA, 25 bp, Artificial
  probe
  misc_feature (1)..(25): SEQ ID NO: 2613; WAN024G7A; Start 207; Stop 231
ttctcagcatccacactatttagaa

SEQ ID NO: 331330 - DNA, 25 bp, Artificial
  probe
  misc_feature (1)..(25): SEQ ID NO: 2613; WAN024G7A; Start 127; Stop 151
gccggtaagactacaattcatcgta

SEQ ID NO: 331331 - DNA, 25 bp, Artificial
  probe
  misc_feature (1)..(25): SEQ ID NO: 2613; WAN024G7A; Start 136; Stop 160
actacaattcatcgtattaaacaga

SEQ ID NO: 331332 - DNA, 25 bp, Artificial
  probe
  misc_feature (1)..(25): SEQ ID NO: 2613; WAN024G7A; Start 134; Stop 158
agactacaattcatcgtattaaaca

SEQ ID NO: 331333 - DNA, 25 bp, Artificial
  probe
  misc_feature (1)..(25): SEQ ID NO: 2613; WAN024G7A; Start 196; Stop 220
gatagttttcgttctcagcatccac

SEQ ID NO: 331334 - DNA, 25 bp, Artificial
  probe
  misc_feature (1)..(25): SEQ ID NO: 2613; WAN024G7A; Start 135; Stop 159
gactacaattcatcgtattaaacag

SEQ ID NO: 331335 - DNA, 25 bp, Artificial
  probe
  misc_feature (1)..(25): SEQ ID NO: 2613; WAN024G7A; Start 139; Stop 163
acaattcatcgtattaaacagaaag

SEQ ID NO: 331336 - DNA, 25 bp, Artificial
  probe
  misc_feature (1)..(25): SEQ ID NO: 2613; WAN024G7A; Start 124; Stop 148
ggtgccggtaagactacaattcatc

SEQ ID NO: 331337 - DNA, 25 bp, Artificial
  probe
  misc_feature (1)..(25): SEQ ID NO: 2613; WAN024G7A; Start 201; Stop 225
ttttcgttctcagcatccacactat

SEQ ID NO: 331338 - DNA, 25 bp, Artificial
  probe
  misc_feature (1)..(25): SEQ ID NO: 2613; WAN024G7A; Start 197; Stop 221
atagttttcgttctcagcatccaca

SEQ ID NO: 331339 - DNA, 25 bp, Artificial
  probe
  misc_feature (1)..(25): SEQ ID NO: 2613; WAN024G7A; Start 140; Stop 164
caattcatcgtattaaacagaaaga

SEQ ID NO: 331340 - DNA, 25 bp, Artificial
  probe
  misc_feature (1)..(25): SEQ ID NO: 2613; WAN024G7A; Start 125; Stop 149
gtgccggtaagactacaattcatcg

SEQ ID NO: 331341 - DNA, 25 bp, Artificial
  probe
  misc_feature (1)..(25): SEQ ID NO: 2613; WAN024G7A; Start 126; Stop 150
tgccggtaagactacaattcatcgt

SEQ ID NO: 331342 - DNA, 25 bp, Artificial
  probe
  misc_feature (1)..(25): SEQ ID NO: 2613; WAN024G7A; Start 123; Stop 147
tggtgccggtaagactacaattcat

SEQ ID NO: 331343 - DNA, 25 bp, Artificial
  probe
  misc_feature (1)..(25): SEQ ID NO: 2613; WAN024G7A; Start 137; Stop 161
ctacaattcatcgtattaaacagaa

SEQ ID NO: 331344 - DNA, 25 bp, Artificial
  probe
  misc_feature (1)..(25): SEQ ID NO: 2613; WAN024G7A; Start 133; Stop 157
aagactacaattcatcgtattaaac

SEQ ID NO: 331345 - DNA, 25 bp, Artificial
  probe
  misc_feature (1)..(25): SEQ ID NO: 2613; WAN024G7A; Start 200; Stop 224
gttttcgttctcagcatccacacta

SEQ ID NO: 331346 - DNA, 25 bp, Artificial
  probe
  misc_feature (1)..(25): SEQ ID NO: 2613; WAN024G7A; Start 198; Stop 222
tagttttcgttctcagcatccacac

SEQ ID NO: 331347 - DNA, 25 bp, Artificial
  probe
  misc_feature (1)..(25): SEQ ID NO: 2613; WAN024G7A; Start 144; Stop 168
tcatcgtattaaacagaaagaattt

SEQ ID NO: 331348 - DNA, 25 bp, Artificial
  probe
  misc_feature (1)..(25): SEQ ID NO: 2613; WAN024G7A; Start 120; Stop 144
aagtggtgccggtaagactacaatt

SEQ ID NO: 331349 - DNA, 25 bp, Artificial
  probe
  misc_feature (1)..(25): SEQ ID NO: 2613; WAN024G7A; Start 143; Stop 167
ttcatcgtattaaacagaaagaatt

SEQ ID NO: 331350 - DNA, 25 bp, Artificial
  probe
  misc_feature (1)..(25): SEQ ID NO: 2613; WAN024G7A; Start 141; Stop 165
aattcatcgtattaaacagaaagaa

SEQ ID NO: 331351 - DNA, 25 bp, Artificial
  probe
  misc_feature (1)..(25): SEQ ID NO: 2613; WAN024G7A; Start 138; Stop 162
tacaattcatcgtattaaacagaaa

SEQ ID NO: 331352 - DNA, 25 bp, Artificial
  probe
  misc_feature (1)..(25): SEQ ID NO: 2614; WAN024F9D; Start 205; Stop 229
agtaatctggttaagcgtatagtgc

SEQ ID NO: 331353 - DNA, 25 bp, Artificial
  probe
  misc_feature (1)..(25): SEQ ID NO: 2614; WAN024F9D; Start 356; Stop 380
tgatggaagacattgatgaagatga

SEQ ID NO: 331354 - DNA, 25 bp, Artificial
  probe
  misc_feature (1)..(25): SEQ ID NO: 2614; WAN024F9D; Start 353; Stop 377
agttgatggaagacattgatgaaga

SEQ ID NO: 331355 - DNA, 25 bp, Artificial
  probe
  misc_feature (1)..(25): SEQ ID NO: 2614; WAN024F9D; Start 352; Stop 376
cagttgatggaagacattgatgaag

SEQ ID NO: 331356 - DNA, 25 bp, Artificial
  probe
  misc_feature (1)..(25): SEQ ID NO: 2614; WAN024F9D; Start 355; Stop 379
ttgatggaagacattgatgaagatg

SEQ ID NO: 331357 - DNA, 25 bp, Artificial
  probe
  misc_feature (1)..(25): SEQ ID NO: 2614; WAN024F9D; Start 354; Stop 378
gttgatggaagacattgatgaagat

SEQ ID NO: 331358 - DNA, 25 bp, Artificial
  probe
  misc_feature (1)..(25): SEQ ID NO: 2614; WAN024F9D; Start 357; Stop 381
gatggaagacattgatgaagatgaa

SEQ ID NO: 331359 - DNA, 25 bp, Artificial
  probe
  misc_feature (1)..(25): SEQ ID NO: 2614; WAN024F9D; Start 359; Stop 383
tggaagacattgatgaagatgaatt

SEQ ID NO: 331360 - DNA, 25 bp, Artificial
  probe
  misc_feature (1)..(25): SEQ ID NO: 2614; WAN024F9D; Start 358; Stop 382
atggaagacattgatgaagatgaat

SEQ ID NO: 331361 - DNA, 25 bp, Artificial
  probe
  misc_feature (1)..(25): SEQ ID NO: 2614; WAN024F9D; Start 351; Stop 375
gcagttgatggaagacattgatgaa

SEQ ID NO: 331362 - DNA, 25 bp, Artificial
  probe
  misc_feature (1)..(25): SEQ ID NO: 2614; WAN024F9D; Start 349; Stop 373
aagcagttgatggaagacattgatg

SEQ ID NO: 331363 - DNA, 25 bp, Artificial
  probe
  misc_feature (1)..(25): SEQ ID NO: 2614; WAN024F9D; Start 342; Stop 366
catagacaagcagttgatggaagac

SEQ ID NO: 331364 - DNA, 25 bp, Artificial
  probe
  misc_feature (1)..(25): SEQ ID NO: 2614; WAN024F9D; Start 348; Stop 372
caagcagttgatggaagacattgat

SEQ ID NO: 331365 - DNA, 25 bp, Artificial
  probe
  misc_feature (1)..(25): SEQ ID NO: 2614; WAN024F9D; Start 204; Stop 228
tagtaatctggttaagcgtatagtg

SEQ ID NO: 331366 - DNA, 25 bp, Artificial
  probe
  misc_feature (1)..(25): SEQ ID NO: 2614; WAN024F9D; Start 344; Stop 368
tagacaagcagttgatggaagacat

SEQ ID NO: 331367 - DNA, 25 bp, Artificial
  probe
  misc_feature (1)..(25): SEQ ID NO: 2614; WAN024F9D; Start 343; Stop 367
atagacaagcagttgatggaagaca

SEQ ID NO: 331368 - DNA, 25 bp, Artificial
  probe
  misc_feature (1)..(25): SEQ ID NO: 2614; WAN024F9D; Start 350; Stop 374
agcagttgatggaagacattgatga

SEQ ID NO: 331369 - DNA, 25 bp, Artificial
  probe
  misc_feature (1)..(25): SEQ ID NO: 2614; WAN024F9D; Start 207; Stop 231
taatctggttaagcgtatagtgcaa

SEQ ID NO: 331370 - DNA, 25 bp, Artificial
  probe
  misc_feature (1)..(25): SEQ ID NO: 2614; WAN024F9D; Start 203; Stop 227
ctagtaatctggttaagcgtatagt

SEQ ID NO: 331371 - DNA, 25 bp, Artificial
  probe
  misc_feature (1)..(25): SEQ ID NO: 2614; WAN024F9D; Start 423; Stop 447
atatcaagggaataggaggagagaa

SEQ ID NO: 331372 - DNA, 25 bp, Artificial
  probe
  misc_feature (1)..(25): SEQ ID NO: 2614; WAN024F9D; Start 422; Stop 446
aatatcaagggaataggaggagaga

SEQ ID NO: 331373 - DNA, 25 bp, Artificial
  probe
  misc_feature (1)..(25): SEQ ID NO: 2614; WAN024F9D; Start 206; Stop 230
gtaatctggttaagcgtatagtgca

SEQ ID NO: 331374 - DNA, 25 bp, Artificial
  probe
  misc_feature (1)..(25): SEQ ID NO: 2614; WAN024F9D; Start 346; Stop 370
gacaagcagttgatggaagacattg

SEQ ID NO: 331375 - DNA, 25 bp, Artificial
  probe
  misc_feature (1)..(25): SEQ ID NO: 2614; WAN024F9D; Start 345; Stop 369
agacaagcagttgatggaagacatt

SEQ ID NO: 331376 - DNA, 25 bp, Artificial
  probe
  misc_feature (1)..(25): SEQ ID NO: 2614; WAN024F9D; Start 421; Stop 445
aaatatcaagggaataggaggagag

SEQ ID NO: 331377 - DNA, 25 bp, Artificial
  probe
  misc_feature (1)..(25): SEQ ID NO: 2614; WAN024F9D; Start 364; Stop 388
gacattgatgaagatgaattactga

SEQ ID NO: 331378 - DNA, 25 bp, Artificial
  probe
  misc_feature (1)..(25): SEQ ID NO: 2614; WAN024F9D; Start 363; Stop 387
agacattgatgaagatgaattactg

SEQ ID NO: 331379 - DNA, 25 bp, Artificial
  probe
  misc_feature (1)..(25): SEQ ID NO: 2614; WAN024F9D; Start 360; Stop 384
ggaagacattgatgaagatgaatta

SEQ ID NO: 331380 - DNA, 25 bp, Artificial
  probe
  misc_feature (1)..(25): SEQ ID NO: 2614; WAN024F9D; Start 6; Stop 30
taaaccgatgttagtctttaagcgt

SEQ ID NO: 331381 - DNA, 25 bp, Artificial
  probe
  misc_feature (1)..(25): SEQ ID NO: 2614; WAN024F9D; Start 200; Stop 224
ttgctagtaatctggttaagcgtat

SEQ ID NO: 331382 - DNA, 25 bp, Artificial
  probe
  misc_feature (1)..(25): SEQ ID NO: 2614; WAN024F9D; Start 347; Stop 371
acaagcagttgatggaagacattga

SEQ ID NO: 331383 - DNA, 25 bp, Artificial
  probe
  misc_feature (1)..(25): SEQ ID NO: 2614; WAN024F9D; Start 199; Stop 223
gttgctagtaatctggttaagcgta

SEQ ID NO: 331384 - DNA, 25 bp, Artificial
  probe
  misc_feature (1)..(25): SEQ ID NO: 2614; WAN024F9D; Start 8; Stop 32
aaccgatgttagtctttaagcgttt

SEQ ID NO: 331385 - DNA, 25 bp, Artificial
  probe
  misc_feature (1)..(25): SEQ ID NO: 2615; WAN024CB6; Start 402; Stop 426
tacaacaggaccaatcttgcttatg

SEQ ID NO: 331386 - DNA, 25 bp, Artificial
  probe
  misc_feature (1)..(25): SEQ ID NO: 2615; WAN024CB6; Start 184; Stop 208
ggtagcgtctatatgatcctagtcg

SEQ ID NO: 331387 - DNA, 25 bp, Artificial
  probe
  misc_feature (1)..(25): SEQ ID NO: 2615; WAN024CB6; Start 183; Stop 207
cggtagcgtctatatgatcctagtc

SEQ ID NO: 331388 - DNA, 25 bp, Artificial
  probe
  misc_feature (1)..(25): SEQ ID NO: 2615; WAN024CB6; Start 401; Stop 425
gtacaacaggaccaatcttgcttat

SEQ ID NO: 331389 - DNA, 25 bp, Artificial
  probe
  misc_feature (1)..(25): SEQ ID NO: 2615; WAN024CB6; Start 443; Stop 467
cctatatggctactcttctggcaag

SEQ ID NO: 331390 - DNA, 25 bp, Artificial
  probe
  misc_feature (1)..(25): SEQ ID NO: 2615; WAN024CB6; Start 478; Stop 502
caagaatatatcgaccgtatcatgg

SEQ ID NO: 331391 - DNA, 25 bp, Artificial
  probe
  misc_feature (1)..(25): SEQ ID NO: 2615; WAN024CB6; Start 477; Stop 501
ccaagaatatatcgaccgtatcatg

SEQ ID NO: 331392 - DNA, 25 bp, Artificial
  probe
  misc_feature (1)..(25): SEQ ID NO: 2615; WAN024CB6; Start 400; Stop 424
agtacaacaggaccaatcttgctta

SEQ ID NO: 331393 - DNA, 25 bp, Artificial
  probe
  misc_feature (1)..(25): SEQ ID NO: 2615; WAN024CB6; Start 399; Stop 423
tagtacaacaggaccaatcttgctt

SEQ ID NO: 331394 - DNA, 25 bp, Artificial
  probe
  misc_feature (1)..(25): SEQ ID NO: 2615; WAN024CB6; Start 398; Stop 422
ttagtacaacaggaccaatcttgct

SEQ ID NO: 331395 - DNA, 25 bp, Artificial
  probe
  misc_feature (1)..(25): SEQ ID NO: 2615; WAN024CB6; Start 518; Stop 542
gaactgtccttctatttatcgcaag

SEQ ID NO: 331396 - DNA, 25 bp, Artificial
  probe
  misc_feature (1)..(25): SEQ ID NO: 2615; WAN024CB6; Start 404; Stop 428
caacaggaccaatcttgcttatgtg

SEQ ID NO: 331397 - DNA, 25 bp, Artificial
  probe
  misc_feature (1)..(25): SEQ ID NO: 2615; WAN024CB6; Start 530; Stop 554
tatttatcgcaagtattgtcatcgg

SEQ ID NO: 331398 - DNA, 25 bp, Artificial
  probe
  misc_feature (1)..(25): SEQ ID NO: 2615; WAN024CB6; Start 531; Stop 555
atttatcgcaagtattgtcatcgga

SEQ ID NO: 331399 - DNA, 25 bp, Artificial
  probe
  misc_feature (1)..(25): SEQ ID NO: 2615; WAN024CB6; Start 519; Stop 543
aactgtccttctatttatcgcaagt

SEQ ID NO: 331400 - DNA, 25 bp, Artificial
  probe
  misc_feature (1)..(25): SEQ ID NO: 2615; WAN024CB6; Start 520; Stop 544
actgtccttctatttatcgcaagta

SEQ ID NO: 331401 - DNA, 25 bp, Artificial
  probe
  misc_feature (1)..(25): SEQ ID NO: 2615; WAN024CB6; Start 403; Stop 427
acaacaggaccaatcttgcttatgt

SEQ ID NO: 331402 - DNA, 25 bp, Artificial
  probe
  misc_feature (1)..(25): SEQ ID NO: 2615; WAN024CB6; Start 521; Stop 545
ctgtccttctatttatcgcaagtat

SEQ ID NO: 331403 - DNA, 25 bp, Artificial
  probe
  misc_feature (1)..(25): SEQ ID NO: 2615; WAN024CB6; Start 532; Stop 556
tttatcgcaagtattgtcatcggag

SEQ ID NO: 331404 - DNA, 25 bp, Artificial
  probe
  misc_feature (1)..(25): SEQ ID NO: 2615; WAN024CB6; Start 408; Stop 432
aggaccaatcttgcttatgtggatt

SEQ ID NO: 331405 - DNA, 25 bp, Artificial
  probe
  misc_feature (1)..(25): SEQ ID NO: 2615; WAN024CB6; Start 396; Stop 420
ctttagtacaacaggaccaatcttg

SEQ ID NO: 331406 - DNA, 25 bp, Artificial
  probe
  misc_feature (1)..(25): SEQ ID NO: 2615; WAN024CB6; Start 444; Stop 468
ctatatggctactcttctggcaaga

SEQ ID NO: 331407 - DNA, 25 bp, Artificial
  probe
  misc_feature (1)..(25): SEQ ID NO: 2615; WAN024CB6; Start 529; Stop 553
ctatttatcgcaagtattgtcatcg

SEQ ID NO: 331408 - DNA, 25 bp, Artificial
  probe
  misc_feature (1)..(25): SEQ ID NO: 2615; WAN024CB6; Start 182; Stop 206
gcggtagcgtctatatgatcctagt

SEQ ID NO: 331409 - DNA, 25 bp, Artificial
  probe
  misc_feature (1)..(25): SEQ ID NO: 2615; WAN024CB6; Start 479; Stop 503
aagaatatatcgaccgtatcatggt

SEQ ID NO: 331410 - DNA, 25 bp, Artificial
  probe
  misc_feature (1)..(25): SEQ ID NO: 2615; WAN024CB6; Start 522; Stop 546
tgtccttctatttatcgcaagtatt

SEQ ID NO: 331411 - DNA, 25 bp, Artificial
  probe
  misc_feature (1)..(25): SEQ ID NO: 2615; WAN024CB6; Start 533; Stop 557
ttatcgcaagtattgtcatcggagc

SEQ ID NO: 331412 - DNA, 25 bp, Artificial
  probe
  misc_feature (1)..(25): SEQ ID NO: 2615; WAN024CB6; Start 524; Stop 548
tccttctatttatcgcaagtattgt

SEQ ID NO: 331413 - DNA, 25 bp, Artificial
  probe
  misc_feature (1)..(25): SEQ ID NO: 2615; WAN024CB6; Start 397; Stop 421
tttagtacaacaggaccaatcttgc

SEQ ID NO: 331414 - DNA, 25 bp, Artificial
  probe
  misc_feature (1)..(25): SEQ ID NO: 2615; WAN024CB6; Start 513; Stop 537
ccctggaactgtccttctatttatc

SEQ ID NO: 331415 - DNA, 25 bp, Artificial
  probe
  misc_feature (1)..(25): SEQ ID NO: 2615; WAN024CB6; Start 525; Stop 549
ccttctatttatcgcaagtattgtc

SEQ ID NO: 331416 - DNA, 25 bp, Artificial
  probe
  misc_feature (1)..(25): SEQ ID NO: 2615; WAN024CB6; Start 523; Stop 547
gtccttctatttatcgcaagtattg

SEQ ID NO: 331417 - DNA, 25 bp, Artificial
  probe
  misc_feature (1)..(25): SEQ ID NO: 2615; WAN024CB6; Start 476; Stop 500
cccaagaatatatcgaccgtatcat

SEQ ID NO: 331418 - DNA, 25 bp, Artificial
  probe
  misc_feature (1)..(25): SEQ ID NO: 2616; WAN024EVV; Start 653; Stop 677
aaggcttgctcaatatccagtatct

SEQ ID NO: 331419 - DNA, 25 bp, Artificial
  probe
  misc_feature (1)..(25): SEQ ID NO: 2616; WAN024EVV; Start 491; Stop 515
ttaataactggtcgcaactagcatc

SEQ ID NO: 331420 - DNA, 25 bp, Artificial
  probe
  misc_feature (1)..(25): SEQ ID NO: 2616; WAN024EVV; Start 490; Stop 514
cttaataactggtcgcaactagcat

SEQ ID NO: 331421 - DNA, 25 bp, Artificial
  probe
  misc_feature (1)..(25): SEQ ID NO: 2616; WAN024EVV; Start 488; Stop 512
aacttaataactggtcgcaactagc

SEQ ID NO: 331422 - DNA, 25 bp, Artificial
  probe
  misc_feature (1)..(25): SEQ ID NO: 2616; WAN024EVV; Start 492; Stop 516
taataactggtcgcaactagcatca

SEQ ID NO: 331423 - DNA, 25 bp, Artificial
  probe
  misc_feature (1)..(25): SEQ ID NO: 2616; WAN024EVV; Start 489; Stop 513
acttaataactggtcgcaactagca

SEQ ID NO: 331424 - DNA, 25 bp, Artificial
  probe
  misc_feature (1)..(25): SEQ ID NO: 2616; WAN024EVV; Start 652; Stop 676
caaggcttgctcaatatccagtatc

SEQ ID NO: 331425 - DNA, 25 bp, Artificial
  probe
  misc_feature (1)..(25): SEQ ID NO: 2616; WAN024EVV; Start 88; Stop 112
gataagacaagtatttcaacgcctg

SEQ ID NO: 331426 - DNA, 25 bp, Artificial
  probe
  misc_feature (1)..(25): SEQ ID NO: 2616; WAN024EVV; Start 85; Stop 109
ctggataagacaagtatttcaacgc

SEQ ID NO: 331427 - DNA, 25 bp, Artificial
  probe
  misc_feature (1)..(25): SEQ ID NO: 2616; WAN024EVV; Start 87; Stop 111
ggataagacaagtatttcaacgcct

SEQ ID NO: 331428 - DNA, 25 bp, Artificial
  probe
  misc_feature (1)..(25): SEQ ID NO: 2616; WAN024EVV; Start 493; Stop 517
aataactggtcgcaactagcatcaa

SEQ ID NO: 331429 - DNA, 25 bp, Artificial
  probe
  misc_feature (1)..(25): SEQ ID NO: 2616; WAN024EVV; Start 487; Stop 511
aaacttaataactggtcgcaactag

SEQ ID NO: 331430 - DNA, 25 bp, Artificial
  probe
  misc_feature (1)..(25): SEQ ID NO: 2616; WAN024EVV; Start 143; Stop 167
atcaacgcttgtcagaacaggatta

SEQ ID NO: 331431 - DNA, 25 bp, Artificial
  probe
  misc_feature (1)..(25): SEQ ID NO: 2616; WAN024EVV; Start 86; Stop 110
tggataagacaagtatttcaacgcc

SEQ ID NO: 331432 - DNA, 25 bp, Artificial
  probe
  misc_feature (1)..(25): SEQ ID NO: 2616; WAN024EVV; Start 89; Stop 113
ataagacaagtatttcaacgcctga

SEQ ID NO: 331433 - DNA, 25 bp, Artificial
  probe
  misc_feature (1)..(25): SEQ ID NO: 2616; WAN024EVV; Start 513; Stop 537
atcaactgggaatatggtacgatac

SEQ ID NO: 331434 - DNA, 25 bp, Artificial
  probe
  misc_feature (1)..(25): SEQ ID NO: 2616; WAN024EVV; Start 158; Stop 182
aacaggattacagtgggattgctat

SEQ ID NO: 331435 - DNA, 25 bp, Artificial
  probe
  misc_feature (1)..(25): SEQ ID NO: 2616; WAN024EVV; Start 84; Stop 108
actggataagacaagtatttcaacg

SEQ ID NO: 331436 - DNA, 25 bp, Artificial
  probe
  misc_feature (1)..(25): SEQ ID NO: 2616; WAN024EVV; Start 512; Stop 536
catcaactgggaatatggtacgata

SEQ ID NO: 331437 - DNA, 25 bp, Artificial
  probe
  misc_feature (1)..(25): SEQ ID NO: 2616; WAN024EVV; Start 507; Stop 531
actagcatcaactgggaatatggta

SEQ ID NO: 331438 - DNA, 25 bp, Artificial
  probe
  misc_feature (1)..(25): SEQ ID NO: 2616; WAN024EVV; Start 328; Stop 352
ctcagtgaactactagctcatccag

SEQ ID NO: 331439 - DNA, 25 bp, Artificial
  probe
  misc_feature (1)..(25): SEQ ID NO: 2616; WAN024EVV; Start 326; Stop 350
gactcagtgaactactagctcatcc

SEQ ID NO: 331440 - DNA, 25 bp, Artificial
  probe
  misc_feature (1)..(25): SEQ ID NO: 2616; WAN024EVV; Start 325; Stop 349
ggactcagtgaactactagctcatc

SEQ ID NO: 331441 - DNA, 25 bp, Artificial
  probe
  misc_feature (1)..(25): SEQ ID NO: 2616; WAN024EVV; Start 161; Stop 185
aggattacagtgggattgctatgag

SEQ ID NO: 331442 - DNA, 25 bp, Artificial
  probe
  misc_feature (1)..(25): SEQ ID NO: 2616; WAN024EVV; Start 508; Stop 532
ctagcatcaactgggaatatggtac

SEQ ID NO: 331443 - DNA, 25 bp, Artificial
  probe
  misc_feature (1)..(25): SEQ ID NO: 2616; WAN024EVV; Start 160; Stop 184
caggattacagtgggattgctatga

SEQ ID NO: 331444 - DNA, 25 bp, Artificial
  probe
  misc_feature (1)..(25): SEQ ID NO: 2616; WAN024EVV; Start 505; Stop 529
caactagcatcaactgggaatatgg

SEQ ID NO: 331445 - DNA, 25 bp, Artificial
  probe
  misc_feature (1)..(25): SEQ ID NO: 2616; WAN024EVV; Start 329; Stop 353
tcagtgaactactagctcatccaga

SEQ ID NO: 331446 - DNA, 25 bp, Artificial
  probe
  misc_feature (1)..(25): SEQ ID NO: 2616; WAN024EVV; Start 154; Stop 178
tcagaacaggattacagtgggattg

SEQ ID NO: 331447 - DNA, 25 bp, Artificial
  probe
  misc_feature (1)..(25): SEQ ID NO: 2616; WAN024EVV; Start 153; Stop 177
gtcagaacaggattacagtgggatt

SEQ ID NO: 331448 - DNA, 25 bp, Artificial
  probe
  misc_feature (1)..(25): SEQ ID NO: 2616; WAN024EVV; Start 322; Stop 346
gttggactcagtgaactactagctc

SEQ ID NO: 331449 - DNA, 25 bp, Artificial
  probe
  misc_feature (1)..(25): SEQ ID NO: 2616; WAN024EVV; Start 506; Stop 530
aactagcatcaactgggaatatggt

SEQ ID NO: 331450 - DNA, 25 bp, Artificial
  probe
  misc_feature (1)..(25): SEQ ID NO: 2616; WAN024EVV; Start 159; Stop 183
acaggattacagtgggattgctatg

SEQ ID NO: 331451 - DNA, 25 bp, Artificial
  probe
  misc_feature (1)..(25): SEQ ID NO: 2617; WAN024AWN; Start 301; Stop 325
attgatacttggaagagtcaggtag

SEQ ID NO: 331452 - DNA, 25 bp, Artificial
  probe
  misc_feature (1)..(25): SEQ ID NO: 2617; WAN024AWN; Start 299; Stop 323
ctattgatacttggaagagtcaggt

SEQ ID NO: 331453 - DNA, 25 bp, Artificial
  probe
  misc_feature (1)..(25): SEQ ID NO: 2617; WAN024AWN; Start 288; Stop 312
tgtcctcatctctattgatacttgg

SEQ ID NO: 331454 - DNA, 25 bp, Artificial
  probe
  misc_feature (1)..(25): SEQ ID NO: 2617; WAN024AWN; Start 298; Stop 322
tctattgatacttggaagagtcagg

SEQ ID NO: 331455 - DNA, 25 bp, Artificial
  probe
  misc_feature (1)..(25): SEQ ID NO: 2617; WAN024AWN; Start 300; Stop 324
tattgatacttggaagagtcaggta

SEQ ID NO: 331456 - DNA, 25 bp, Artificial
  probe
  misc_feature (1)..(25): SEQ ID NO: 2617; WAN024AWN; Start 291; Stop 315
cctcatctctattgatacttggaag

SEQ ID NO: 331457 - DNA, 25 bp, Artificial
  probe
  misc_feature (1)..(25): SEQ ID NO: 2617; WAN024AWN; Start 302; Stop 326
ttgatacttggaagagtcaggtagc

SEQ ID NO: 331458 - DNA, 25 bp, Artificial
  probe
  misc_feature (1)..(25): SEQ ID NO: 2617; WAN024AWN; Start 304; Stop 328
gatacttggaagagtcaggtagcag

SEQ ID NO: 331459 - DNA, 25 bp, Artificial
  probe
  misc_feature (1)..(25): SEQ ID NO: 2617; WAN024AWN; Start 289; Stop 313
gtcctcatctctattgatacttgga

SEQ ID NO: 331460 - DNA, 25 bp, Artificial
  probe
  misc_feature (1)..(25): SEQ ID NO: 2617; WAN024AWN; Start 287; Stop 311
atgtcctcatctctattgatacttg

SEQ ID NO: 331461 - DNA, 25 bp, Artificial
  probe
  misc_feature (1)..(25): SEQ ID NO: 2617; WAN024AWN; Start 699; Stop 723
actacatcagaaaggctatccaatc

SEQ ID NO: 331462 - DNA, 25 bp, Artificial
  probe
  misc_feature (1)..(25): SEQ ID NO: 2617; WAN024AWN; Start 697; Stop 721
aaactacatcagaaaggctatccaa

SEQ ID NO: 331463 - DNA, 25 bp, Artificial
  probe
  misc_feature (1)..(25): SEQ ID NO: 2617; WAN024AWN; Start 698; Stop 722
aactacatcagaaaggctatccaat

SEQ ID NO: 331464 - DNA, 25 bp, Artificial
  probe
  misc_feature (1)..(25): SEQ ID NO: 2617; WAN024AWN; Start 305; Stop 329
atacttggaagagtcaggtagcaga

SEQ ID NO: 331465 - DNA, 25 bp, Artificial
  probe
  misc_feature (1)..(25): SEQ ID NO: 2617; WAN024AWN; Start 938; Stop 962
ctgatgaagcggaagatttagattt

SEQ ID NO: 331466 - DNA, 25 bp, Artificial
  probe
  misc_feature (1)..(25): SEQ ID NO: 2617; WAN024AWN; Start 290; Stop 314
tcctcatctctattgatacttggaa

SEQ ID NO: 331467 - DNA, 25 bp, Artificial
  probe
  misc_feature (1)..(25): SEQ ID NO: 2617; WAN024AWN; Start 696; Stop 720
taaactacatcagaaaggctatcca

SEQ ID NO: 331468 - DNA, 25 bp, Artificial
  probe
  misc_feature (1)..(25): SEQ ID NO: 2617; WAN024AWN; Start 692; Stop 716
tggataaactacatcagaaaggcta

SEQ ID NO: 331469 - DNA, 25 bp, Artificial
  probe
  misc_feature (1)..(25): SEQ ID NO: 2617; WAN024AWN; Start 292; Stop 316
ctcatctctattgatacttggaaga

SEQ ID NO: 331470 - DNA, 25 bp, Artificial
  probe
  misc_feature (1)..(25): SEQ ID NO: 2617; WAN024AWN; Start 700; Stop 724
ctacatcagaaaggctatccaatct

SEQ ID NO: 331471 - DNA, 25 bp, Artificial
  probe
  misc_feature (1)..(25): SEQ ID NO: 2617; WAN024AWN; Start 701; Stop 725
tacatcagaaaggctatccaatctt

SEQ ID NO: 331472 - DNA, 25 bp, Artificial
  probe
  misc_feature (1)..(25): SEQ ID NO: 2617; WAN024AWN; Start 303; Stop 327
tgatacttggaagagtcaggtagca

SEQ ID NO: 331473 - DNA, 25 bp, Artificial
  probe
  misc_feature (1)..(25): SEQ ID NO: 2617; WAN024AWN; Start 939; Stop 963
tgatgaagcggaagatttagattta

SEQ ID NO: 331474 - DNA, 25 bp, Artificial
  probe
  misc_feature (1)..(25): SEQ ID NO: 2617; WAN024AWN; Start 695; Stop 719
ataaactacatcagaaaggctatcc

SEQ ID NO: 331475 - DNA, 25 bp, Artificial
  probe
  misc_feature (1)..(25): SEQ ID NO: 2617; WAN024AWN; Start 693; Stop 717
ggataaactacatcagaaaggctat

SEQ ID NO: 331476 - DNA, 25 bp, Artificial
  probe
  misc_feature (1)..(25): SEQ ID NO: 2617; WAN024AWN; Start 940; Stop 964
gatgaagcggaagatttagatttaa

SEQ ID NO: 331477 - DNA, 25 bp, Artificial
  probe
  misc_feature (1)..(25): SEQ ID NO: 2617; WAN024AWN; Start 702; Stop 726
acatcagaaaggctatccaatcttt

SEQ ID NO: 331478 - DNA, 25 bp, Artificial
  probe
  misc_feature (1)..(25): SEQ ID NO: 2617; WAN024AWN; Start 296; Stop 320
tctctattgatacttggaagagtca

SEQ ID NO: 331479 - DNA, 25 bp, Artificial
  probe
  misc_feature (1)..(25): SEQ ID NO: 2617; WAN024AWN; Start 297; Stop 321
ctctattgatacttggaagagtcag

SEQ ID NO: 331480 - DNA, 25 bp, Artificial
  probe
  misc_feature (1)..(25): SEQ ID NO: 2617; WAN024AWN; Start 694; Stop 718
gataaactacatcagaaaggctatc

SEQ ID NO: 331481 - DNA, 25 bp, Artificial
  probe
  misc_feature (1)..(25): SEQ ID NO: 2617; WAN024AWN; Start 937; Stop 961
gctgatgaagcggaagatttagatt

SEQ ID NO: 331482 - DNA, 25 bp, Artificial
  probe
  misc_feature (1)..(25): SEQ ID NO: 2617; WAN024AWN; Start 294; Stop 318
catctctattgatacttggaagagt

SEQ ID NO: 331483 - DNA, 25 bp, Artificial
  probe
  misc_feature (1)..(25): SEQ ID NO: 2617; WAN024AWN; Start 295; Stop 319
atctctattgatacttggaagagtc

SEQ ID NO: 331484 - DNA, 25 bp, Artificial
  probe
  misc_feature (1)..(25): SEQ ID NO: 2618; WAN024GC8; Start 42; Stop 66
aattgaagccttgacagttgtagat

SEQ ID NO: 331485 - DNA, 25 bp, Artificial
  probe
  misc_feature (1)..(25): SEQ ID NO: 2618; WAN024GC8; Start 182; Stop 206
atgatatgattgttcttcctggagg

SEQ ID NO: 331486 - DNA, 25 bp, Artificial
  probe
  misc_feature (1)..(25): SEQ ID NO: 2618; WAN024GC8; Start 186; Stop 210
tatgattgttcttcctggaggtatg

SEQ ID NO: 331487 - DNA, 25 bp, Artificial
  probe
  misc_feature (1)..(25): SEQ ID NO: 2618; WAN024GC8; Start 184; Stop 208
gatatgattgttcttcctggaggta

SEQ ID NO: 331488 - DNA, 25 bp, Artificial
  probe
  misc_feature (1)..(25): SEQ ID NO: 2618; WAN024GC8; Start 340; Stop 364
aataagcgatacacttgttatgacg

SEQ ID NO: 331489 - DNA, 25 bp, Artificial
  probe
  misc_feature (1)..(25): SEQ ID NO: 2618; WAN024GC8; Start 185; Stop 209
atatgattgttcttcctggaggtat

SEQ ID NO: 331490 - DNA, 25 bp, Artificial
  probe
  misc_feature (1)..(25): SEQ ID NO: 2618; WAN024GC8; Start 43; Stop 67
attgaagccttgacagttgtagatg

SEQ ID NO: 331491 - DNA, 25 bp, Artificial
  probe
  misc_feature (1)..(25): SEQ ID NO: 2618; WAN024GC8; Start 183; Stop 207
tgatatgattgttcttcctggaggt

SEQ ID NO: 331492 - DNA, 25 bp, Artificial
  probe
  misc_feature (1)..(25): SEQ ID NO: 2618; WAN024GC8; Start 341; Stop 365
ataagcgatacacttgttatgacgg

SEQ ID NO: 331493 - DNA, 25 bp, Artificial
  probe
  misc_feature (1)..(25): SEQ ID NO: 2618; WAN024GC8; Start 179; Stop 203
actatgatatgattgttcttcctgg

SEQ ID NO: 331494 - DNA, 25 bp, Artificial
  probe
  misc_feature (1)..(25): SEQ ID NO: 2618; WAN024GC8; Start 135; Stop 159
aatccaagtaagagcagatcatgtc

SEQ ID NO: 331495 - DNA, 25 bp, Artificial
  probe
  misc_feature (1)..(25): SEQ ID NO: 2618; WAN024GC8; Start 134; Stop 158
caatccaagtaagagcagatcatgt

SEQ ID NO: 331496 - DNA, 25 bp, Artificial
  probe
  misc_feature (1)..(25): SEQ ID NO: 2618; WAN024GC8; Start 405; Stop 429
aacagtagtggtagatggtcagttg

SEQ ID NO: 331497 - DNA, 25 bp, Artificial
  probe
  misc_feature (1)..(25): SEQ ID NO: 2618; WAN024GC8; Start 181; Stop 205
tatgatatgattgttcttcctggag

SEQ ID NO: 331498 - DNA, 25 bp, Artificial
  probe
  misc_feature (1)..(25): SEQ ID NO: 2618; WAN024GC8; Start 180; Stop 204
ctatgatatgattgttcttcctgga

SEQ ID NO: 331499 - DNA, 25 bp, Artificial
  probe
  misc_feature (1)..(25): SEQ ID NO: 2618; WAN024GC8; Start 136; Stop 160
atccaagtaagagcagatcatgtct

SEQ ID NO: 331500 - DNA, 25 bp, Artificial
  probe
  misc_feature (1)..(25): SEQ ID NO: 2618; WAN024GC8; Start 406; Stop 430
acagtagtggtagatggtcagttga

SEQ ID NO: 331501 - DNA, 25 bp, Artificial
  probe
  misc_feature (1)..(25): SEQ ID NO: 2618; WAN024GC8; Start 133; Stop 157
gcaatccaagtaagagcagatcatg

SEQ ID NO: 331502 - DNA, 25 bp, Artificial
  probe
  misc_feature (1)..(25): SEQ ID NO: 2618; WAN024GC8; Start 187; Stop 211
atgattgttcttcctggaggtatgc

SEQ ID NO: 331503 - DNA, 25 bp, Artificial
  probe
  misc_feature (1)..(25): SEQ ID NO: 2618; WAN024GC8; Start 397; Stop 421
gtcaaggaaacagtagtggtagatg

SEQ ID NO: 331504 - DNA, 25 bp, Artificial
  probe
  misc_feature (1)..(25): SEQ ID NO: 2618; WAN024GC8; Start 178; Stop 202
gactatgatatgattgttcttcctg

SEQ ID NO: 331505 - DNA, 25 bp, Artificial
  probe
  misc_feature (1)..(25): SEQ ID NO: 2618; WAN024GC8; Start 44; Stop 68
ttgaagccttgacagttgtagatgt

SEQ ID NO: 331506 - DNA, 25 bp, Artificial
  probe
  misc_feature (1)..(25): SEQ ID NO: 2618; WAN024GC8; Start 40; Stop 64
gaaattgaagccttgacagttgtag

SEQ ID NO: 331507 - DNA, 25 bp, Artificial
  probe
  misc_feature (1)..(25): SEQ ID NO: 2618; WAN024GC8; Start 41; Stop 65
aaattgaagccttgacagttgtaga

SEQ ID NO: 331508 - DNA, 25 bp, Artificial
  probe
  misc_feature (1)..(25): SEQ ID NO: 2618; WAN024GC8; Start 39; Stop 63
agaaattgaagccttgacagttgta

SEQ ID NO: 331509 - DNA, 25 bp, Artificial
  probe
  misc_feature (1)..(25): SEQ ID NO: 2618; WAN024GC8; Start 34; Stop 58
tttgaagaaattgaagccttgacag

SEQ ID NO: 331510 - DNA, 25 bp, Artificial
  probe
  misc_feature (1)..(25): SEQ ID NO: 2618; WAN024GC8; Start 33; Stop 57
ctttgaagaaattgaagccttgaca

SEQ ID NO: 331511 - DNA, 25 bp, Artificial
  probe
  misc_feature (1)..(25): SEQ ID NO: 2618; WAN024GC8; Start 505; Stop 529
agtttacgaacaggaatgctctatc

SEQ ID NO: 331512 - DNA, 25 bp, Artificial
  probe
  misc_feature (1)..(25): SEQ ID NO: 2618; WAN024GC8; Start 176; Stop 200
cagactatgatatgattgttcttcc

SEQ ID NO: 331513 - DNA, 25 bp, Artificial
  probe
  misc_feature (1)..(25): SEQ ID NO: 2618; WAN024GC8; Start 177; Stop 201
agactatgatatgattgttcttcct

SEQ ID NO: 331514 - DNA, 25 bp, Artificial
  probe
  misc_feature (1)..(25): SEQ ID NO: 2618; WAN024GC8; Start 37; Stop 61
gaagaaattgaagccttgacagttg

SEQ ID NO: 331515 - DNA, 25 bp, Artificial
  probe
  misc_feature (1)..(25): SEQ ID NO: 2618; WAN024GC8; Start 403; Stop 427
gaaacagtagtggtagatggtcagt

SEQ ID NO: 331516 - DNA, 25 bp, Artificial
  probe
  misc_feature (1)..(25): SEQ ID NO: 2618; WAN024GC8; Start 400; Stop 424
aaggaaacagtagtggtagatggtc

SEQ ID NO: 331517 - DNA, 25 bp, Artificial
  probe
  misc_feature (1)..(25): SEQ ID NO: 2619; WAN024FH6; Start 306; Stop 330
tgaacaatttggtgatgagcaagtt

SEQ ID NO: 331518 - DNA, 25 bp, Artificial
  probe
  misc_feature (1)..(25): SEQ ID NO: 2619; WAN024FH6; Start 308; Stop 332
aacaatttggtgatgagcaagttca

SEQ ID NO: 331519 - DNA, 25 bp, Artificial
  probe
  misc_feature (1)..(25): SEQ ID NO: 2619; WAN024FH6; Start 305; Stop 329
ctgaacaatttggtgatgagcaagt

SEQ ID NO: 331520 - DNA, 25 bp, Artificial
  probe
  misc_feature (1)..(25): SEQ ID NO: 2619; WAN024FH6; Start 344; Stop 368
gttcatacgatgtattgcctccaaa

SEQ ID NO: 331521 - DNA, 25 bp, Artificial
  probe
  misc_feature (1)..(25): SEQ ID NO: 2619; WAN024FH6; Start 29; Stop 53
gtgagtctgaatggaacaaagctaa

SEQ ID NO: 331522 - DNA, 25 bp, Artificial
  probe
  misc_feature (1)..(25): SEQ ID NO: 2619; WAN024FH6; Start 67; Stop 91
tgggctgatgttgatttgtctgaaa

SEQ ID NO: 331523 - DNA, 25 bp, Artificial
  probe
  misc_feature (1)..(25): SEQ ID NO: 2619; WAN024FH6; Start 66; Stop 90
ttgggctgatgttgatttgtctgaa

SEQ ID NO: 331524 - DNA, 25 bp, Artificial
  probe
  misc_feature (1)..(25): SEQ ID NO: 2619; WAN024FH6; Start 149; Stop 173
ttgaccaagcttacacttcagtatt

SEQ ID NO: 331525 - DNA, 25 bp, Artificial
  probe
  misc_feature (1)..(25): SEQ ID NO: 2619; WAN024FH6; Start 326; Stop 350
aagttcacatctggcgtcgttcata

SEQ ID NO: 331526 - DNA, 25 bp, Artificial
  probe
  misc_feature (1)..(25): SEQ ID NO: 2619; WAN024FH6; Start 187; Stop 211
aaaacaactaacttggctcttgaag

SEQ ID NO: 331527 - DNA, 25 bp, Artificial
  probe
  misc_feature (1)..(25): SEQ ID NO: 2619; WAN024FH6; Start 151; Stop 175
gaccaagcttacacttcagtattga

SEQ ID NO: 331528 - DNA, 25 bp, Artificial
  probe
  misc_feature (1)..(25): SEQ ID NO: 2619; WAN024FH6; Start 184; Stop 208
atcaaaacaactaacttggctcttg

SEQ ID NO: 331529 - DNA, 25 bp, Artificial
  probe
  misc_feature (1)..(25): SEQ ID NO: 2619; WAN024FH6; Start 186; Stop 210
caaaacaactaacttggctcttgaa

SEQ ID NO: 331530 - DNA, 25 bp, Artificial
  probe
  misc_feature (1)..(25): SEQ ID NO: 2619; WAN024FH6; Start 150; Stop 174
tgaccaagcttacacttcagtattg

SEQ ID NO: 331531 - DNA, 25 bp, Artificial
  probe
  misc_feature (1)..(25): SEQ ID NO: 2619; WAN024FH6; Start 182; Stop 206
ctatcaaaacaactaacttggctct

SEQ ID NO: 331532 - DNA, 25 bp, Artificial
  probe
  misc_feature (1)..(25): SEQ ID NO: 2619; WAN024FH6; Start 181; Stop 205
gctatcaaaacaactaacttggctc

SEQ ID NO: 331533 - DNA, 25 bp, Artificial
  probe
  misc_feature (1)..(25): SEQ ID NO: 2619; WAN024FH6; Start 28; Stop 52
ggtgagtctgaatggaacaaagcta

SEQ ID NO: 331534 - DNA, 25 bp, Artificial
  probe
  misc_feature (1)..(25): SEQ ID NO: 2619; WAN024FH6; Start 178; Stop 202
cgtgctatcaaaacaactaacttgg

SEQ ID NO: 331535 - DNA, 25 bp, Artificial
  probe
  misc_feature (1)..(25): SEQ ID NO: 2619; WAN024FH6; Start 65; Stop 89
gttgggctgatgttgatttgtctga

SEQ ID NO: 331536 - DNA, 25 bp, Artificial
  probe
  misc_feature (1)..(25): SEQ ID NO: 2619; WAN024FH6; Start 189; Stop 213
aacaactaacttggctcttgaagct

SEQ ID NO: 331537 - DNA, 25 bp, Artificial
  probe
  misc_feature (1)..(25): SEQ ID NO: 2619; WAN024FH6; Start 183; Stop 207
tatcaaaacaactaacttggctctt

SEQ ID NO: 331538 - DNA, 25 bp, Artificial
  probe
  misc_feature (1)..(25): SEQ ID NO: 2619; WAN024FH6; Start 180; Stop 204
tgctatcaaaacaactaacttggct

SEQ ID NO: 331539 - DNA, 25 bp, Artificial
  probe
  misc_feature (1)..(25): SEQ ID NO: 2619; WAN024FH6; Start 179; Stop 203
gtgctatcaaaacaactaacttggc

SEQ ID NO: 331540 - DNA, 25 bp, Artificial
  probe
  misc_feature (1)..(25): SEQ ID NO: 2619; WAN024FH6; Start 188; Stop 212
aaacaactaacttggctcttgaagc

SEQ ID NO: 331541 - DNA, 25 bp, Artificial
  probe
  misc_feature (1)..(25): SEQ ID NO: 2619; WAN024FH6; Start 343; Stop 367
cgttcatacgatgtattgcctccaa

SEQ ID NO: 331542 - DNA, 25 bp, Artificial
  probe
  misc_feature (1)..(25): SEQ ID NO: 2619; WAN024FH6; Start 442; Stop 466
gatgctgaaaacttgaaagtgactt

SEQ ID NO: 331543 - DNA, 25 bp, Artificial
  probe
  misc_feature (1)..(25): SEQ ID NO: 2619; WAN024FH6; Start 68; Stop 92
gggctgatgttgatttgtctgaaaa

SEQ ID NO: 331544 - DNA, 25 bp, Artificial
  probe
  misc_feature (1)..(25): SEQ ID NO: 2619; WAN024FH6; Start 441; Stop 465
agatgctgaaaacttgaaagtgact

SEQ ID NO: 331545 - DNA, 25 bp, Artificial
  probe
  misc_feature (1)..(25): SEQ ID NO: 2619; WAN024FH6; Start 298; Stop 322
gaagctgctgaacaatttggtgatg

SEQ ID NO: 331546 - DNA, 25 bp, Artificial
  probe
  misc_feature (1)..(25): SEQ ID NO: 2619; WAN024FH6; Start 620; Stop 644
ctaacttcccaccattggtattcga

SEQ ID NO: 331547 - DNA, 25 bp, Artificial
  probe
  misc_feature (1)..(25): SEQ ID NO: 2619; WAN024FH6; Start 25; Stop 49
cacggtgagtctgaatggaacaaag

SEQ ID NO: 331548 - DNA, 25 bp, Artificial
  probe
  misc_feature (1)..(25): SEQ ID NO: 2619; WAN024FH6; Start 450; Stop 474
aaacttgaaagtgactttggaacgt

SEQ ID NO: 331549 - DNA, 25 bp, Artificial
  probe
  misc_feature (1)..(25): SEQ ID NO: 2619; WAN024FH6; Start 613; Stop 637
gaaatccctaacttcccaccattgg

SEQ ID NO: 331550 - DNA, 25 bp, Artificial
  probe
  misc_feature (1)..(25): SEQ ID NO: 2620; WAN024D4C; Start 132; Stop 156
aggttattcagtctcagaagttgta

SEQ ID NO: 331551 - DNA, 25 bp, Artificial
  probe
  misc_feature (1)..(25): SEQ ID NO: 2620; WAN024D4C; Start 131; Stop 155
taggttattcagtctcagaagttgt

SEQ ID NO: 331552 - DNA, 25 bp, Artificial
  probe
  misc_feature (1)..(25): SEQ ID NO: 2620; WAN024D4C; Start 133; Stop 157
ggttattcagtctcagaagttgtac

SEQ ID NO: 331553 - DNA, 25 bp, Artificial
  probe
  misc_feature (1)..(25): SEQ ID NO: 2620; WAN024D4C; Start 128; Stop 152
agataggttattcagtctcagaagt

SEQ ID NO: 331554 - DNA, 25 bp, Artificial
  probe
  misc_feature (1)..(25): SEQ ID NO: 2620; WAN024D4C; Start 130; Stop 154
ataggttattcagtctcagaagttg

SEQ ID NO: 331555 - DNA, 25 bp, Artificial
  probe
  misc_feature (1)..(25): SEQ ID NO: 2620; WAN024D4C; Start 129; Stop 153
gataggttattcagtctcagaagtt

SEQ ID NO: 331556 - DNA, 25 bp, Artificial
  probe
  misc_feature (1)..(25): SEQ ID NO: 2620; WAN024D4C; Start 121; Stop 145
aaagaggagataggttattcagtct

SEQ ID NO: 331557 - DNA, 25 bp, Artificial
  probe
  misc_feature (1)..(25): SEQ ID NO: 2620; WAN024D4C; Start 24; Stop 48
ttcgatacaaggaagttccgtagaa

SEQ ID NO: 331558 - DNA, 25 bp, Artificial
  probe
  misc_feature (1)..(25): SEQ ID NO: 2620; WAN024D4C; Start 171; Stop 195
aagtttgtcggttaattgtaaagaa

SEQ ID NO: 331559 - DNA, 25 bp, Artificial
  probe
  misc_feature (1)..(25): SEQ ID NO: 2620; WAN024D4C; Start 170; Stop 194
aaagtttgtcggttaattgtaaaga

SEQ ID NO: 331560 - DNA, 25 bp, Artificial
  probe
  misc_feature (1)..(25): SEQ ID NO: 2620; WAN024D4C; Start 174; Stop 198
tttgtcggttaattgtaaagaatca

SEQ ID NO: 331561 - DNA, 25 bp, Artificial
  probe
  misc_feature (1)..(25): SEQ ID NO: 2620; WAN024D4C; Start 172; Stop 196
agtttgtcggttaattgtaaagaat

SEQ ID NO: 331562 - DNA, 25 bp, Artificial
  probe
  misc_feature (1)..(25): SEQ ID NO: 2620; WAN024D4C; Start 23; Stop 47
gttcgatacaaggaagttccgtaga

SEQ ID NO: 331563 - DNA, 25 bp, Artificial
  probe
  misc_feature (1)..(25): SEQ ID NO: 2620; WAN024D4C; Start 173; Stop 197
gtttgtcggttaattgtaaagaatc

SEQ ID NO: 331564 - DNA, 25 bp, Artificial
  probe
  misc_feature (1)..(25): SEQ ID NO: 2620; WAN024D4C; Start 176; Stop 200
tgtcggttaattgtaaagaatcaaa

SEQ ID NO: 331565 - DNA, 25 bp, Artificial
  probe
  misc_feature (1)..(25): SEQ ID NO: 2620; WAN024D4C; Start 175; Stop 199
ttgtcggttaattgtaaagaatcaa

SEQ ID NO: 331566 - DNA, 25 bp, Artificial
  probe
  misc_feature (1)..(25): SEQ ID NO: 2620; WAN024D4C; Start 120; Stop 144
taaagaggagataggttattcagtc

SEQ ID NO: 331567 - DNA, 25 bp, Artificial
  probe
  misc_feature (1)..(25): SEQ ID NO: 2620; WAN024D4C; Start 119; Stop 143
ctaaagaggagataggttattcagt

SEQ ID NO: 331568 - DNA, 25 bp, Artificial
  probe
  misc_feature (1)..(25): SEQ ID NO: 2620; WAN024D4C; Start 22; Stop 46
tgttcgatacaaggaagttccgtag

SEQ ID NO: 331569 - DNA, 25 bp, Artificial
  probe
  misc_feature (1)..(25): SEQ ID NO: 2620; WAN024D4C; Start 125; Stop 149
aggagataggttattcagtctcaga

SEQ ID NO: 331570 - DNA, 25 bp, Artificial
  probe
  misc_feature (1)..(25): SEQ ID NO: 2620; WAN024D4C; Start 123; Stop 147
agaggagataggttattcagtctca

SEQ ID NO: 331571 - DNA, 25 bp, Artificial
  probe
  misc_feature (1)..(25): SEQ ID NO: 2620; WAN024D4C; Start 124; Stop 148
gaggagataggttattcagtctcag

SEQ ID NO: 331572 - DNA, 25 bp, Artificial
  probe
  misc_feature (1)..(25): SEQ ID NO: 2620; WAN024D4C; Start 126; Stop 150
ggagataggttattcagtctcagaa

SEQ ID NO: 331573 - DNA, 25 bp, Artificial
  probe
  misc_feature (1)..(25): SEQ ID NO: 2620; WAN024D4C; Start 234; Stop 258
cgaggttaaagatgaaatcggttta

SEQ ID NO: 331574 - DNA, 25 bp, Artificial
  probe
  misc_feature (1)..(25): SEQ ID NO: 2620; WAN024D4C; Start 122; Stop 146
aagaggagataggttattcagtctc

SEQ ID NO: 331575 - DNA, 25 bp, Artificial
  probe
  misc_feature (1)..(25): SEQ ID NO: 2620; WAN024D4C; Start 134; Stop 158
gttattcagtctcagaagttgtaca

SEQ ID NO: 331576 - DNA, 25 bp, Artificial
  probe
  misc_feature (1)..(25): SEQ ID NO: 2620; WAN024D4C; Start 118; Stop 142
tctaaagaggagataggttattcag

SEQ ID NO: 331577 - DNA, 25 bp, Artificial
  probe
  misc_feature (1)..(25): SEQ ID NO: 2620; WAN024D4C; Start 127; Stop 151
gagataggttattcagtctcagaag

SEQ ID NO: 331578 - DNA, 25 bp, Artificial
  probe
  misc_feature (1)..(25): SEQ ID NO: 2620; WAN024D4C; Start 25; Stop 49
tcgatacaaggaagttccgtagaaa

SEQ ID NO: 331579 - DNA, 25 bp, Artificial
  probe
  misc_feature (1)..(25): SEQ ID NO: 2620; WAN024D4C; Start 138; Stop 162
ttcagtctcagaagttgtacatatt

SEQ ID NO: 331580 - DNA, 25 bp, Artificial
  probe
  misc_feature (1)..(25): SEQ ID NO: 2620; WAN024D4C; Start 135; Stop 159
ttattcagtctcagaagttgtacat

SEQ ID NO: 331581 - DNA, 25 bp, Artificial
  probe
  misc_feature (1)..(25): SEQ ID NO: 2620; WAN024D4C; Start 117; Stop 141
ttctaaagaggagataggttattca

SEQ ID NO: 331582 - DNA, 25 bp, Artificial
  probe
  misc_feature (1)..(25): SEQ ID NO: 2620; WAN024D4C; Start 137; Stop 161
attcagtctcagaagttgtacatat

SEQ ID NO: 331583 - DNA, 25 bp, Artificial
  probe
  misc_feature (1)..(25): SEQ ID NO: 2621; WAN024G4V; Start 136; Stop 160
ggtggattggaggaagtcatagatt

SEQ ID NO: 331584 - DNA, 25 bp, Artificial
  probe
  misc_feature (1)..(25): SEQ ID NO: 2621; WAN024G4V; Start 135; Stop 159
tggtggattggaggaagtcatagat

SEQ ID NO: 331585 - DNA, 25 bp, Artificial
  probe
  misc_feature (1)..(25): SEQ ID NO: 2621; WAN024G4V; Start 137; Stop 161
gtggattggaggaagtcatagattt

SEQ ID NO: 331586 - DNA, 25 bp, Artificial
  probe
  misc_feature (1)..(25): SEQ ID NO: 2621; WAN024G4V; Start 132; Stop 156
tactggtggattggaggaagtcata

SEQ ID NO: 331587 - DNA, 25 bp, Artificial
  probe
  misc_feature (1)..(25): SEQ ID NO: 2621; WAN024G4V; Start 129; Stop 153
gattactggtggattggaggaagtc

SEQ ID NO: 331588 - DNA, 25 bp, Artificial
  probe
  misc_feature (1)..(25): SEQ ID NO: 2621; WAN024G4V; Start 134; Stop 158
ctggtggattggaggaagtcataga

SEQ ID NO: 331589 - DNA, 25 bp, Artificial
  probe
  misc_feature (1)..(25): SEQ ID NO: 2621; WAN024G4V; Start 131; Stop 155
ttactggtggattggaggaagtcat

SEQ ID NO: 331590 - DNA, 25 bp, Artificial
  probe
  misc_feature (1)..(25): SEQ ID NO: 2621; WAN024G4V; Start 130; Stop 154
attactggtggattggaggaagtca

SEQ ID NO: 331591 - DNA, 25 bp, Artificial
  probe
  misc_feature (1)..(25): SEQ ID NO: 2621; WAN024G4V; Start 215; Stop 239
ttcagcaaatgactaaaggtctctt

SEQ ID NO: 331592 - DNA, 25 bp, Artificial
  probe
  misc_feature (1)..(25): SEQ ID NO: 2621; WAN024G4V; Start 214; Stop 238
tttcagcaaatgactaaaggtctct

SEQ ID NO: 331593 - DNA, 25 bp, Artificial
  probe
  misc_feature (1)..(25): SEQ ID NO: 2621; WAN024G4V; Start 127; Stop 151
aggattactggtggattggaggaag

SEQ ID NO: 331594 - DNA, 25 bp, Artificial
  probe
  misc_feature (1)..(25): SEQ ID NO: 2621; WAN024G4V; Start 126; Stop 150
gaggattactggtggattggaggaa

SEQ ID NO: 331595 - DNA, 25 bp, Artificial
  probe
  misc_feature (1)..(25): SEQ ID NO: 2621; WAN024G4V; Start 123; Stop 147
tttgaggattactggtggattggag

SEQ ID NO: 331596 - DNA, 25 bp, Artificial
  probe
  misc_feature (1)..(25): SEQ ID NO: 2621; WAN024G4V; Start 124; Stop 148
ttgaggattactggtggattggagg

SEQ ID NO: 331597 - DNA, 25 bp, Artificial
  probe
  misc_feature (1)..(25): SEQ ID NO: 2621; WAN024G4V; Start 133; Stop 157
actggtggattggaggaagtcatag

SEQ ID NO: 331598 - DNA, 25 bp, Artificial
  probe
  misc_feature (1)..(25): SEQ ID NO: 2621; WAN024G4V; Start 292; Stop 316
gagaataagttgctcgctttggttt

SEQ ID NO: 331599 - DNA, 25 bp, Artificial
  probe
  misc_feature (1)..(25): SEQ ID NO: 2621; WAN024G4V; Start 128; Stop 152
ggattactggtggattggaggaagt

SEQ ID NO: 331600 - DNA, 25 bp, Artificial
  probe
  misc_feature (1)..(25): SEQ ID NO: 2621; WAN024G4V; Start 219; Stop 243
gcaaatgactaaaggtctctttctg

SEQ ID NO: 331601 - DNA, 25 bp, Artificial
  probe
  misc_feature (1)..(25): SEQ ID NO: 2621; WAN024G4V; Start 218; Stop 242
agcaaatgactaaaggtctctttct

SEQ ID NO: 331602 - DNA, 25 bp, Artificial
  probe
  misc_feature (1)..(25): SEQ ID NO: 2621; WAN024G4V; Start 217; Stop 241
cagcaaatgactaaaggtctctttc

SEQ ID NO: 331603 - DNA, 25 bp, Artificial
  probe
  misc_feature (1)..(25): SEQ ID NO: 2621; WAN024G4V; Start 216; Stop 240
tcagcaaatgactaaaggtctcttt

SEQ ID NO: 331604 - DNA, 25 bp, Artificial
  probe
  misc_feature (1)..(25): SEQ ID NO: 2621; WAN024G4V; Start 36; Stop 60
cttgtttgatttgctcggtcagttt

SEQ ID NO: 331605 - DNA, 25 bp, Artificial
  probe
  misc_feature (1)..(25): SEQ ID NO: 2621; WAN024G4V; Start 225; Stop 249
gactaaaggtctctttctgtttacc

SEQ ID NO: 331606 - DNA, 25 bp, Artificial
  probe
  misc_feature (1)..(25): SEQ ID NO: 2621; WAN024G4V; Start 220; Stop 244
caaatgactaaaggtctctttctgt

SEQ ID NO: 331607 - DNA, 25 bp, Artificial
  probe
  misc_feature (1)..(25): SEQ ID NO: 2621; WAN024G4V; Start 152; Stop 176
tcatagattttatagacctgctggc

SEQ ID NO: 331608 - DNA, 25 bp, Artificial
  probe
  misc_feature (1)..(25): SEQ ID NO: 2621; WAN024G4V; Start 138; Stop 162
tggattggaggaagtcatagatttt

SEQ ID NO: 331609 - DNA, 25 bp, Artificial
  probe
  misc_feature (1)..(25): SEQ ID NO: 2621; WAN024G4V; Start 224; Stop 248
tgactaaaggtctctttctgtttac

SEQ ID NO: 331610 - DNA, 25 bp, Artificial
  probe
  misc_feature (1)..(25): SEQ ID NO: 2621; WAN024G4V; Start 125; Stop 149
tgaggattactggtggattggagga

SEQ ID NO: 331611 - DNA, 25 bp, Artificial
  probe
  misc_feature (1)..(25): SEQ ID NO: 2621; WAN024G4V; Start 235; Stop 259
ctctttctgtttaccttggtaatgc

SEQ ID NO: 331612 - DNA, 25 bp, Artificial
  probe
  misc_feature (1)..(25): SEQ ID NO: 2621; WAN024G4V; Start 222; Stop 246
aatgactaaaggtctctttctgttt

SEQ ID NO: 331613 - DNA, 25 bp, Artificial
  probe
  misc_feature (1)..(25): SEQ ID NO: 2621; WAN024G4V; Start 221; Stop 245
aaatgactaaaggtctctttctgtt

SEQ ID NO: 331614 - DNA, 25 bp, Artificial
  probe
  misc_feature (1)..(25): SEQ ID NO: 2621; WAN024G4V; Start 120; Stop 144
acttttgaggattactggtggattg

SEQ ID NO: 331615 - DNA, 25 bp, Artificial
  probe
  misc_feature (1)..(25): SEQ ID NO: 2621; WAN024G4V; Start 232; Stop 256
ggtctctttctgtttaccttggtaa

SEQ ID NO: 331616 - DNA, 25 bp, Artificial
  probe
  misc_feature (1)..(25): SEQ ID NO: 2622; WAN024EVX; Start 1578; Stop 1602
agaattaccagaacttagaagccaa

SEQ ID NO: 331617 - DNA, 25 bp, Artificial
  probe
  misc_feature (1)..(25): SEQ ID NO: 2622; WAN024EVX; Start 918; Stop 942
ggattattatcaggatagcgaggaa

SEQ ID NO: 331618 - DNA, 25 bp, Artificial
  probe
  misc_feature (1)..(25): SEQ ID NO: 2622; WAN024EVX; Start 1577; Stop 1601
aagaattaccagaacttagaagcca

SEQ ID NO: 331619 - DNA, 25 bp, Artificial
  probe
  misc_feature (1)..(25): SEQ ID NO: 2622; WAN024EVX; Start 1576; Stop 1600
caagaattaccagaacttagaagcc

SEQ ID NO: 331620 - DNA, 25 bp, Artificial
  probe
  misc_feature (1)..(25): SEQ ID NO: 2622; WAN024EVX; Start 1570; Stop 1594
gccagacaagaattaccagaactta

SEQ ID NO: 331621 - DNA, 25 bp, Artificial
  probe
  misc_feature (1)..(25): SEQ ID NO: 2622; WAN024EVX; Start 1571; Stop 1595
ccagacaagaattaccagaacttag

SEQ ID NO: 331622 - DNA, 25 bp, Artificial
  probe
  misc_feature (1)..(25): SEQ ID NO: 2622; WAN024EVX; Start 1231; Stop 1255
aatactggtctaacggttgaggatt

SEQ ID NO: 331623 - DNA, 25 bp, Artificial
  probe
  misc_feature (1)..(25): SEQ ID NO: 2622; WAN024EVX; Start 791; Stop 815
agatgtggagtgatatgttcttcaa

SEQ ID NO: 331624 - DNA, 25 bp, Artificial
  probe
  misc_feature (1)..(25): SEQ ID NO: 2622; WAN024EVX; Start 790; Stop 814
cagatgtggagtgatatgttcttca

SEQ ID NO: 331625 - DNA, 25 bp, Artificial
  probe
  misc_feature (1)..(25): SEQ ID NO: 2622; WAN024EVX; Start 1575; Stop 1599
acaagaattaccagaacttagaagc

SEQ ID NO: 331626 - DNA, 25 bp, Artificial
  probe
  misc_feature (1)..(25): SEQ ID NO: 2622; WAN024EVX; Start 1572; Stop 1596
cagacaagaattaccagaacttaga

SEQ ID NO: 331627 - DNA, 25 bp, Artificial
  probe
  misc_feature (1)..(25): SEQ ID NO: 2622; WAN024EVX; Start 1230; Stop 1254
caatactggtctaacggttgaggat

SEQ ID NO: 331628 - DNA, 25 bp, Artificial
  probe
  misc_feature (1)..(25): SEQ ID NO: 2622; WAN024EVX; Start 1566; Stop 1590
aatcgccagacaagaattaccagaa

SEQ ID NO: 331629 - DNA, 25 bp, Artificial
  probe
  misc_feature (1)..(25): SEQ ID NO: 2622; WAN024EVX; Start 1573; Stop 1597
agacaagaattaccagaacttagaa

SEQ ID NO: 331630 - DNA, 25 bp, Artificial
  probe
  misc_feature (1)..(25): SEQ ID NO: 2622; WAN024EVX; Start 789; Stop 813
ccagatgtggagtgatatgttcttc

SEQ ID NO: 331631 - DNA, 25 bp, Artificial
  probe
  misc_feature (1)..(25): SEQ ID NO: 2622; WAN024EVX; Start 901; Stop 925
gtgactctggtttactgggattatt

SEQ ID NO: 331632 - DNA, 25 bp, Artificial
  probe
  misc_feature (1)..(25): SEQ ID NO: 2622; WAN024EVX; Start 1780; Stop 1804
atcctaccatttactgacttctacg

SEQ ID NO: 331633 - DNA, 25 bp, Artificial
  probe
  misc_feature (1)..(25): SEQ ID NO: 2622; WAN024EVX; Start 1049; Stop 1073
gtctagtggctatcgaggctaataa

SEQ ID NO: 331634 - DNA, 25 bp, Artificial
  probe
  misc_feature (1)..(25): SEQ ID NO: 2622; WAN024EVX; Start 1534; Stop 1558
taccaagcggatgataaagaaagtt

SEQ ID NO: 331635 - DNA, 25 bp, Artificial
  probe
  misc_feature (1)..(25): SEQ ID NO: 2622; WAN024EVX; Start 1655; Stop 1679
tctttggtttggatacagttgacat

SEQ ID NO: 331636 - DNA, 25 bp, Artificial
  probe
  misc_feature (1)..(25): SEQ ID NO: 2622; WAN024EVX; Start 1574; Stop 1598
gacaagaattaccagaacttagaag

SEQ ID NO: 331637 - DNA, 25 bp, Artificial
  probe
  misc_feature (1)..(25): SEQ ID NO: 2622; WAN024EVX; Start 1656; Stop 1680
ctttggtttggatacagttgacatc

SEQ ID NO: 331638 - DNA, 25 bp, Artificial
  probe
  misc_feature (1)..(25): SEQ ID NO: 2622; WAN024EVX; Start 1492; Stop 1516
ttaagtagcaaagtagatgtgggac

SEQ ID NO: 331639 - DNA, 25 bp, Artificial
  probe
  misc_feature (1)..(25): SEQ ID NO: 2622; WAN024EVX; Start 1491; Stop 1515
tttaagtagcaaagtagatgtggga

SEQ ID NO: 331640 - DNA, 25 bp, Artificial
  probe
  misc_feature (1)..(25): SEQ ID NO: 2622; WAN024EVX; Start 1583; Stop 1607
taccagaacttagaagccaaattga

SEQ ID NO: 331641 - DNA, 25 bp, Artificial
  probe
  misc_feature (1)..(25): SEQ ID NO: 2622; WAN024EVX; Start 1533; Stop 1557
ctaccaagcggatgataaagaaagt

SEQ ID NO: 331642 - DNA, 25 bp, Artificial
  probe
  misc_feature (1)..(25): SEQ ID NO: 2622; WAN024EVX; Start 1582; Stop 1606
ttaccagaacttagaagccaaattg

SEQ ID NO: 331643 - DNA, 25 bp, Artificial
  probe
  misc_feature (1)..(25): SEQ ID NO: 2622; WAN024EVX; Start 558; Stop 582
tgtagaggacattcttctcattggc

SEQ ID NO: 331644 - DNA, 25 bp, Artificial
  probe
  misc_feature (1)..(25): SEQ ID NO: 2622; WAN024EVX; Start 953; Stop 977
gtaatttccgcaatcatcacaagat

SEQ ID NO: 331645 - DNA, 25 bp, Artificial
  probe
  misc_feature (1)..(25): SEQ ID NO: 2622; WAN024EVX; Start 214; Stop 238
gctgataaagtagagattgaggaac

SEQ ID NO: 331646 - DNA, 25 bp, Artificial
  probe
  misc_feature (1)..(25): SEQ ID NO: 2622; WAN024EVX; Start 902; Stop 926
tgactctggtttactgggattatta

SEQ ID NO: 331647 - DNA, 25 bp, Artificial
  probe
  misc_feature (1)..(25): SEQ ID NO: 2622; WAN024EVX; Start 900; Stop 924
tgtgactctggtttactgggattat

SEQ ID NO: 331648 - DNA, 25 bp, Artificial
  probe
  misc_feature (1)..(25): SEQ ID NO: 2622; WAN024EVX; Start 632; Stop 656
aactgaagactcgcaaggtcaatat

SEQ ID NO: 331649 - DNA, 25 bp, Artificial
  probe
  misc_feature (1)..(25): SEQ ID NO: 2623; WAN024CA4; Start 960; Stop 984
tcctatctcatccaactactatcca

SEQ ID NO: 331650 - DNA, 25 bp, Artificial
  probe
  misc_feature (1)..(25): SEQ ID NO: 2623; WAN024CA4; Start 612; Stop 636
gtctaagagcaagcaacacaatatc

SEQ ID NO: 331651 - DNA, 25 bp, Artificial
  probe
  misc_feature (1)..(25): SEQ ID NO: 2623; WAN024CA4; Start 1042; Stop 1066
gacctgtcagaagaagataagaact

SEQ ID NO: 331652 - DNA, 25 bp, Artificial
  probe
  misc_feature (1)..(25): SEQ ID NO: 2623; WAN024CA4; Start 1041; Stop 1065
ggacctgtcagaagaagataagaac

SEQ ID NO: 331653 - DNA, 25 bp, Artificial
  probe
  misc_feature (1)..(25): SEQ ID NO: 2623; WAN024CA4; Start 961; Stop 985
cctatctcatccaactactatccaa

SEQ ID NO: 331654 - DNA, 25 bp, Artificial
  probe
  misc_feature (1)..(25): SEQ ID NO: 2623; WAN024CA4; Start 1040; Stop 1064
aggacctgtcagaagaagataagaa

SEQ ID NO: 331655 - DNA, 25 bp, Artificial
  probe
  misc_feature (1)..(25): SEQ ID NO: 2623; WAN024CA4; Start 1976; Stop 2000
cgactctaatcaacagcattctcaa

SEQ ID NO: 331656 - DNA, 25 bp, Artificial
  probe
  misc_feature (1)..(25): SEQ ID NO: 2623; WAN024CA4; Start 1043; Stop 1067
acctgtcagaagaagataagaactt

SEQ ID NO: 331657 - DNA, 25 bp, Artificial
  probe
  misc_feature (1)..(25): SEQ ID NO: 2623; WAN024CA4; Start 1039; Stop 1063
gaggacctgtcagaagaagataaga

SEQ ID NO: 331658 - DNA, 25 bp, Artificial
  probe
  misc_feature (1)..(25): SEQ ID NO: 2623; WAN024CA4; Start 613; Stop 637
tctaagagcaagcaacacaatatcg

SEQ ID NO: 331659 - DNA, 25 bp, Artificial
  probe
  misc_feature (1)..(25): SEQ ID NO: 2623; WAN024CA4; Start 1044; Stop 1068
cctgtcagaagaagataagaacttg

SEQ ID NO: 331660 - DNA, 25 bp, Artificial
  probe
  misc_feature (1)..(25): SEQ ID NO: 2623; WAN024CA4; Start 959; Stop 983
atcctatctcatccaactactatcc

SEQ ID NO: 331661 - DNA, 25 bp, Artificial
  probe
  misc_feature (1)..(25): SEQ ID NO: 2623; WAN024CA4; Start 2715; Stop 2739
tatcaagacggcagaccatatcatt

SEQ ID NO: 331662 - DNA, 25 bp, Artificial
  probe
  misc_feature (1)..(25): SEQ ID NO: 2623; WAN024CA4; Start 2714; Stop 2738
ttatcaagacggcagaccatatcat

SEQ ID NO: 331663 - DNA, 25 bp, Artificial
  probe
  misc_feature (1)..(25): SEQ ID NO: 2623; WAN024CA4; Start 2782; Stop 2806
gtaacaggaactccagaagaagtag

SEQ ID NO: 331664 - DNA, 25 bp, Artificial
  probe
  misc_feature (1)..(25): SEQ ID NO: 2623; WAN024CA4; Start 1037; Stop 1061
ttgaggacctgtcagaagaagataa

SEQ ID NO: 331665 - DNA, 25 bp, Artificial
  probe
  misc_feature (1)..(25): SEQ ID NO: 2623; WAN024CA4; Start 611; Stop 635
tgtctaagagcaagcaacacaatat

SEQ ID NO: 331666 - DNA, 25 bp, Artificial
  probe
  misc_feature (1)..(25): SEQ ID NO: 2623; WAN024CA4; Start 1038; Stop 1062
tgaggacctgtcagaagaagataag

SEQ ID NO: 331667 - DNA, 25 bp, Artificial
  probe
  misc_feature (1)..(25): SEQ ID NO: 2623; WAN024CA4; Start 2698; Stop 2722
gagcacaatctggatgttatcaaga

SEQ ID NO: 331668 - DNA, 25 bp, Artificial
  probe
  misc_feature (1)..(25): SEQ ID NO: 2623; WAN024CA4; Start 2711; Stop 2735
atgttatcaagacggcagaccatat

SEQ ID NO: 331669 - DNA, 25 bp, Artificial
  probe
  misc_feature (1)..(25): SEQ ID NO: 2623; WAN024CA4; Start 2699; Stop 2723
agcacaatctggatgttatcaagac

SEQ ID NO: 331670 - DNA, 25 bp, Artificial
  probe
  misc_feature (1)..(25): SEQ ID NO: 2623; WAN024CA4; Start 2779; Stop 2803
atcgtaacaggaactccagaagaag

SEQ ID NO: 331671 - DNA, 25 bp, Artificial
  probe
  misc_feature (1)..(25): SEQ ID NO: 2623; WAN024CA4; Start 1045; Stop 1069
ctgtcagaagaagataagaacttga

SEQ ID NO: 331672 - DNA, 25 bp, Artificial
  probe
  misc_feature (1)..(25): SEQ ID NO: 2623; WAN024CA4; Start 2776; Stop 2800
atcatcgtaacaggaactccagaag

SEQ ID NO: 331673 - DNA, 25 bp, Artificial
  probe
  misc_feature (1)..(25): SEQ ID NO: 2623; WAN024CA4; Start 2783; Stop 2807
taacaggaactccagaagaagtagc

SEQ ID NO: 331674 - DNA, 25 bp, Artificial
  probe
  misc_feature (1)..(25): SEQ ID NO: 2623; WAN024CA4; Start 2781; Stop 2805
cgtaacaggaactccagaagaagta

SEQ ID NO: 331675 - DNA, 25 bp, Artificial
  probe
  misc_feature (1)..(25): SEQ ID NO: 2623; WAN024CA4; Start 2713; Stop 2737
gttatcaagacggcagaccatatca

SEQ ID NO: 331676 - DNA, 25 bp, Artificial
  probe
  misc_feature (1)..(25): SEQ ID NO: 2623; WAN024CA4; Start 2712; Stop 2736
tgttatcaagacggcagaccatatc

SEQ ID NO: 331677 - DNA, 25 bp, Artificial
  probe
  misc_feature (1)..(25): SEQ ID NO: 2623; WAN024CA4; Start 522; Stop 546
taagagtgttatcgagaaggttcag

SEQ ID NO: 331678 - DNA, 25 bp, Artificial
  probe
  misc_feature (1)..(25): SEQ ID NO: 2623; WAN024CA4; Start 1973; Stop 1997
aatcgactctaatcaacagcattct

SEQ ID NO: 331679 - DNA, 25 bp, Artificial
  probe
  misc_feature (1)..(25): SEQ ID NO: 2623; WAN024CA4; Start 2701; Stop 2725
cacaatctggatgttatcaagacgg

SEQ ID NO: 331680 - DNA, 25 bp, Artificial
  probe
  misc_feature (1)..(25): SEQ ID NO: 2623; WAN024CA4; Start 2778; Stop 2802
catcgtaacaggaactccagaagaa

SEQ ID NO: 331681 - DNA, 25 bp, Artificial
  probe
  misc_feature (1)..(25): SEQ ID NO: 2623; WAN024CA4; Start 2775; Stop 2799
catcatcgtaacaggaactccagaa

SEQ ID NO: 331682 - DNA, 25 bp, Artificial
  probe
  misc_feature (1)..(25): SEQ ID NO: 2624; WAN024FMA; Start 502; Stop 526
gtaggaagtaagaatagtgagcagt

SEQ ID NO: 331683 - DNA, 25 bp, Artificial
  probe
  misc_feature (1)..(25): SEQ ID NO: 2624; WAN024FMA; Start 501; Stop 525
tgtaggaagtaagaatagtgagcag

SEQ ID NO: 331684 - DNA, 25 bp, Artificial
  probe
  misc_feature (1)..(25): SEQ ID NO: 2624; WAN024FMA; Start 500; Stop 524
ctgtaggaagtaagaatagtgagca

SEQ ID NO: 331685 - DNA, 25 bp, Artificial
  probe
  misc_feature (1)..(25): SEQ ID NO: 2624; WAN024FMA; Start 499; Stop 523
actgtaggaagtaagaatagtgagc

SEQ ID NO: 331686 - DNA, 25 bp, Artificial
  probe
  misc_feature (1)..(25): SEQ ID NO: 2624; WAN024FMA; Start 505; Stop 529
ggaagtaagaatagtgagcagtaca

SEQ ID NO: 331687 - DNA, 25 bp, Artificial
  probe
  misc_feature (1)..(25): SEQ ID NO: 2624; WAN024FMA; Start 504; Stop 528
aggaagtaagaatagtgagcagtac

SEQ ID NO: 331688 - DNA, 25 bp, Artificial
  probe
  misc_feature (1)..(25): SEQ ID NO: 2624; WAN024FMA; Start 503; Stop 527
taggaagtaagaatagtgagcagta

SEQ ID NO: 331689 - DNA, 25 bp, Artificial
  probe
  misc_feature (1)..(25): SEQ ID NO: 2624; WAN024FMA; Start 506; Stop 530
gaagtaagaatagtgagcagtacaa

SEQ ID NO: 331690 - DNA, 25 bp, Artificial
  probe
  misc_feature (1)..(25): SEQ ID NO: 2624; WAN024FMA; Start 194; Stop 218
tggtaacagtaagttctaatcagtt

SEQ ID NO: 331691 - DNA, 25 bp, Artificial
  probe
  misc_feature (1)..(25): SEQ ID NO: 2624; WAN024FMA; Start 193; Stop 217
ttggtaacagtaagttctaatcagt

SEQ ID NO: 331692 - DNA, 25 bp, Artificial
  probe
  misc_feature (1)..(25): SEQ ID NO: 2624; WAN024FMA; Start 250; Stop 274
ttatggaatttacttgacggtgttg

SEQ ID NO: 331693 - DNA, 25 bp, Artificial
  probe
  misc_feature (1)..(25): SEQ ID NO: 2624; WAN024FMA; Start 248; Stop 272
tcttatggaatttacttgacggtgt

SEQ ID NO: 331694 - DNA, 25 bp, Artificial
  probe
  misc_feature (1)..(25): SEQ ID NO: 2624; WAN024FMA; Start 251; Stop 275
tatggaatttacttgacggtgttga

SEQ ID NO: 331695 - DNA, 25 bp, Artificial
  probe
  misc_feature (1)..(25): SEQ ID NO: 2624; WAN024FMA; Start 249; Stop 273
cttatggaatttacttgacggtgtt

SEQ ID NO: 331696 - DNA, 25 bp, Artificial
  probe
  misc_feature (1)..(25): SEQ ID NO: 2624; WAN024FMA; Start 558; Stop 582
aatgattgcacttaatgtaacctct

SEQ ID NO: 331697 - DNA, 25 bp, Artificial
  probe
  misc_feature (1)..(25): SEQ ID NO: 2624; WAN024FMA; Start 247; Stop 271
ttcttatggaatttacttgacggtg

SEQ ID NO: 331698 - DNA, 25 bp, Artificial
  probe
  misc_feature (1)..(25): SEQ ID NO: 2624; WAN024FMA; Start 513; Stop 537
gaatagtgagcagtacaaaggtaga

SEQ ID NO: 331699 - DNA, 25 bp, Artificial
  probe
  misc_feature (1)..(25): SEQ ID NO: 2624; WAN024FMA; Start 512; Stop 536
agaatagtgagcagtacaaaggtag

SEQ ID NO: 331700 - DNA, 25 bp, Artificial
  probe
  misc_feature (1)..(25): SEQ ID NO: 2624; WAN024FMA; Start 510; Stop 534
taagaatagtgagcagtacaaaggt

SEQ ID NO: 331701 - DNA, 25 bp, Artificial
  probe
  misc_feature (1)..(25): SEQ ID NO: 2624; WAN024FMA; Start 565; Stop 589
gcacttaatgtaacctctataacag

SEQ ID NO: 331702 - DNA, 25 bp, Artificial
  probe
  misc_feature (1)..(25): SEQ ID NO: 2624; WAN024FMA; Start 515; Stop 539
atagtgagcagtacaaaggtagaaa

SEQ ID NO: 331703 - DNA, 25 bp, Artificial
  probe
  misc_feature (1)..(25): SEQ ID NO: 2624; WAN024FMA; Start 514; Stop 538
aatagtgagcagtacaaaggtagaa

SEQ ID NO: 331704 - DNA, 25 bp, Artificial
  probe
  misc_feature (1)..(25): SEQ ID NO: 2624; WAN024FMA; Start 511; Stop 535
aagaatagtgagcagtacaaaggta

SEQ ID NO: 331705 - DNA, 25 bp, Artificial
  probe
  misc_feature (1)..(25): SEQ ID NO: 2624; WAN024FMA; Start 246; Stop 270
tttcttatggaatttacttgacggt

SEQ ID NO: 331706 - DNA, 25 bp, Artificial
  probe
  misc_feature (1)..(25): SEQ ID NO: 2624; WAN024FMA; Start 219; Stop 243
tgtactattgctaaattggctttgt

SEQ ID NO: 331707 - DNA, 25 bp, Artificial
  probe
  misc_feature (1)..(25): SEQ ID NO: 2624; WAN024FMA; Start 509; Stop 533
gtaagaatagtgagcagtacaaagg

SEQ ID NO: 331708 - DNA, 25 bp, Artificial
  probe
  misc_feature (1)..(25): SEQ ID NO: 2624; WAN024FMA; Start 560; Stop 584
tgattgcacttaatgtaacctctat

SEQ ID NO: 331709 - DNA, 25 bp, Artificial
  probe
  misc_feature (1)..(25): SEQ ID NO: 2624; WAN024FMA; Start 559; Stop 583
atgattgcacttaatgtaacctcta

SEQ ID NO: 331710 - DNA, 25 bp, Artificial
  probe
  misc_feature (1)..(25): SEQ ID NO: 2624; WAN024FMA; Start 252; Stop 276
atggaatttacttgacggtgttgac

SEQ ID NO: 331711 - DNA, 25 bp, Artificial
  probe
  misc_feature (1)..(25): SEQ ID NO: 2624; WAN024FMA; Start 280; Stop 304
aatgttgctcgtttcaagggaatta

SEQ ID NO: 331712 - DNA, 25 bp, Artificial
  probe
  misc_feature (1)..(25): SEQ ID NO: 2624; WAN024FMA; Start 91; Stop 115
agacctctatcatacatattgacaa

SEQ ID NO: 331713 - DNA, 25 bp, Artificial
  probe
  misc_feature (1)..(25): SEQ ID NO: 2624; WAN024FMA; Start 576; Stop 600
aacctctataacaggatttgctcaa

SEQ ID NO: 331714 - DNA, 25 bp, Artificial
  probe
  misc_feature (1)..(25): SEQ ID NO: 2624; WAN024FMA; Start 577; Stop 601
acctctataacaggatttgctcaat

SEQ ID NO: 331715 - DNA, 25 bp, Artificial
  probe
  misc_feature (1)..(25): SEQ ID NO: 2625; WAN024D9H; Start 150; Stop 174
tgtagagtctaaggaagtatatgct

SEQ ID NO: 331716 - DNA, 25 bp, Artificial
  probe
  misc_feature (1)..(25): SEQ ID NO: 2625; WAN024D9H; Start 143; Stop 167
acaatcatgtagagtctaaggaagt

SEQ ID NO: 331717 - DNA, 25 bp, Artificial
  probe
  misc_feature (1)..(25): SEQ ID NO: 2625; WAN024D9H; Start 149; Stop 173
atgtagagtctaaggaagtatatgc

SEQ ID NO: 331718 - DNA, 25 bp, Artificial
  probe
  misc_feature (1)..(25): SEQ ID NO: 2625; WAN024D9H; Start 144; Stop 168
caatcatgtagagtctaaggaagta

SEQ ID NO: 331719 - DNA, 25 bp, Artificial
  probe
  misc_feature (1)..(25): SEQ ID NO: 2625; WAN024D9H; Start 151; Stop 175
gtagagtctaaggaagtatatgcta

SEQ ID NO: 331720 - DNA, 25 bp, Artificial
  probe
  misc_feature (1)..(25): SEQ ID NO: 2625; WAN024D9H; Start 153; Stop 177
agagtctaaggaagtatatgctatt

SEQ ID NO: 331721 - DNA, 25 bp, Artificial
  probe
  misc_feature (1)..(25): SEQ ID NO: 2625; WAN024D9H; Start 155; Stop 179
agtctaaggaagtatatgctattct

SEQ ID NO: 331722 - DNA, 25 bp, Artificial
  probe
  misc_feature (1)..(25): SEQ ID NO: 2625; WAN024D9H; Start 154; Stop 178
gagtctaaggaagtatatgctattc

SEQ ID NO: 331723 - DNA, 25 bp, Artificial
  probe
  misc_feature (1)..(25): SEQ ID NO: 2625; WAN024D9H; Start 145; Stop 169
aatcatgtagagtctaaggaagtat

SEQ ID NO: 331724 - DNA, 25 bp, Artificial
  probe
  misc_feature (1)..(25): SEQ ID NO: 2625; WAN024D9H; Start 142; Stop 166
tacaatcatgtagagtctaaggaag

SEQ ID NO: 331725 - DNA, 25 bp, Artificial
  probe
  misc_feature (1)..(25): SEQ ID NO: 2625; WAN024D9H; Start 152; Stop 176
tagagtctaaggaagtatatgctat

SEQ ID NO: 331726 - DNA, 25 bp, Artificial
  probe
  misc_feature (1)..(25): SEQ ID NO: 2625; WAN024D9H; Start 148; Stop 172
catgtagagtctaaggaagtatatg

SEQ ID NO: 331727 - DNA, 25 bp, Artificial
  probe
  misc_feature (1)..(25): SEQ ID NO: 2625; WAN024D9H; Start 147; Stop 171
tcatgtagagtctaaggaagtatat

SEQ ID NO: 331728 - DNA, 25 bp, Artificial
  probe
  misc_feature (1)..(25): SEQ ID NO: 2625; WAN024D9H; Start 146; Stop 170
atcatgtagagtctaaggaagtata

SEQ ID NO: 331729 - DNA, 25 bp, Artificial
  probe
  misc_feature (1)..(25): SEQ ID NO: 2625; WAN024D9H; Start 48; Stop 72
acggtatttcttttctcgctataat

SEQ ID NO: 331730 - DNA, 25 bp, Artificial
  probe
  misc_feature (1)..(25): SEQ ID NO: 2625; WAN024D9H; Start 49; Stop 73
cggtatttcttttctcgctataatc

SEQ ID NO: 331731 - DNA, 25 bp, Artificial
  probe
  misc_feature (1)..(25): SEQ ID NO: 2625; WAN024D9H; Start 173; Stop 197
ctattctagcaacaggattttgtgg

SEQ ID NO: 331732 - DNA, 25 bp, Artificial
  probe
  misc_feature (1)..(25): SEQ ID NO: 2625; WAN024D9H; Start 47; Stop 71
tacggtatttcttttctcgctataa

SEQ ID NO: 331733 - DNA, 25 bp, Artificial
  probe
  misc_feature (1)..(25): SEQ ID NO: 2625; WAN024D9H; Start 46; Stop 70
gtacggtatttcttttctcgctata

SEQ ID NO: 331734 - DNA, 25 bp, Artificial
  probe
  misc_feature (1)..(25): SEQ ID NO: 2625; WAN024D9H; Start 174; Stop 198
tattctagcaacaggattttgtggc

SEQ ID NO: 331735 - DNA, 25 bp, Artificial
  probe
  misc_feature (1)..(25): SEQ ID NO: 2625; WAN024D9H; Start 156; Stop 180
gtctaaggaagtatatgctattcta

SEQ ID NO: 331736 - DNA, 25 bp, Artificial
  probe
  misc_feature (1)..(25): SEQ ID NO: 2625; WAN024D9H; Start 50; Stop 74
ggtatttcttttctcgctataatca

SEQ ID NO: 331737 - DNA, 25 bp, Artificial
  probe
  misc_feature (1)..(25): SEQ ID NO: 2625; WAN024D9H; Start 69; Stop 93
taatcaagcttctaaattgccactc

SEQ ID NO: 331738 - DNA, 25 bp, Artificial
  probe
  misc_feature (1)..(25): SEQ ID NO: 2625; WAN024D9H; Start 68; Stop 92
ataatcaagcttctaaattgccact

SEQ ID NO: 331739 - DNA, 25 bp, Artificial
  probe
  misc_feature (1)..(25): SEQ ID NO: 2625; WAN024D9H; Start 81; Stop 105
taaattgccactcggaacgctcata

SEQ ID NO: 331740 - DNA, 25 bp, Artificial
  probe
  misc_feature (1)..(25): SEQ ID NO: 2625; WAN024D9H; Start 70; Stop 94
aatcaagcttctaaattgccactcg

SEQ ID NO: 331741 - DNA, 25 bp, Artificial
  probe
  misc_feature (1)..(25): SEQ ID NO: 2625; WAN024D9H; Start 53; Stop 77
atttcttttctcgctataatcaagc

SEQ ID NO: 331742 - DNA, 25 bp, Artificial
  probe
  misc_feature (1)..(25): SEQ ID NO: 2625; WAN024D9H; Start 67; Stop 91
tataatcaagcttctaaattgccac

SEQ ID NO: 331743 - DNA, 25 bp, Artificial
  probe
  misc_feature (1)..(25): SEQ ID NO: 2625; WAN024D9H; Start 66; Stop 90
ctataatcaagcttctaaattgcca

SEQ ID NO: 331744 - DNA, 25 bp, Artificial
  probe
  misc_feature (1)..(25): SEQ ID NO: 2625; WAN024D9H; Start 90; Stop 114
actcggaacgctcatagctaatctt

SEQ ID NO: 331745 - DNA, 25 bp, Artificial
  probe
  misc_feature (1)..(25): SEQ ID NO: 2625; WAN024D9H; Start 54; Stop 78
tttcttttctcgctataatcaagct

SEQ ID NO: 331746 - DNA, 25 bp, Artificial
  probe
  misc_feature (1)..(25): SEQ ID NO: 2625; WAN024D9H; Start 158; Stop 182
ctaaggaagtatatgctattctagc

SEQ ID NO: 331747 - DNA, 25 bp, Artificial
  probe
  misc_feature (1)..(25): SEQ ID NO: 2625; WAN024D9H; Start 182; Stop 206
caacaggattttgtggcggtttaac

SEQ ID NO: 331748 - DNA, 25 bp, Artificial
  probe
  misc_feature (1)..(25): SEQ ID NO: 2626; WAN024GFN; Start 48; Stop 72
gcagtttaatcccttgaatatcgtt

SEQ ID NO: 331749 - DNA, 25 bp, Artificial
  probe
  misc_feature (1)..(25): SEQ ID NO: 2626; WAN024GFN; Start 186; Stop 210
ccgtttccacctacaattcataaga

SEQ ID NO: 331750 - DNA, 25 bp, Artificial
  probe
  misc_feature (1)..(25): SEQ ID NO: 2626; WAN024GFN; Start 20; Stop 44
cgagtatttgtcataagatggagca

SEQ ID NO: 331751 - DNA, 25 bp, Artificial
  probe
  misc_feature (1)..(25): SEQ ID NO: 2626; WAN024GFN; Start 19; Stop 43
acgagtatttgtcataagatggagc

SEQ ID NO: 331752 - DNA, 25 bp, Artificial
  probe
  misc_feature (1)..(25): SEQ ID NO: 2626; WAN024GFN; Start 185; Stop 209
accgtttccacctacaattcataag

SEQ ID NO: 331753 - DNA, 25 bp, Artificial
  probe
  misc_feature (1)..(25): SEQ ID NO: 2626; WAN024GFN; Start 187; Stop 211
cgtttccacctacaattcataagaa

SEQ ID NO: 331754 - DNA, 25 bp, Artificial
  probe
  misc_feature (1)..(25): SEQ ID NO: 2626; WAN024GFN; Start 184; Stop 208
gaccgtttccacctacaattcataa

SEQ ID NO: 331755 - DNA, 25 bp, Artificial
  probe
  misc_feature (1)..(25): SEQ ID NO: 2626; WAN024GFN; Start 21; Stop 45
gagtatttgtcataagatggagcaa

SEQ ID NO: 331756 - DNA, 25 bp, Artificial
  probe
  misc_feature (1)..(25): SEQ ID NO: 2626; WAN024GFN; Start 18; Stop 42
tacgagtatttgtcataagatggag

SEQ ID NO: 331757 - DNA, 25 bp, Artificial
  probe
  misc_feature (1)..(25): SEQ ID NO: 2626; WAN024GFN; Start 15; Stop 39
gcatacgagtatttgtcataagatg

SEQ ID NO: 331758 - DNA, 25 bp, Artificial
  probe
  misc_feature (1)..(25): SEQ ID NO: 2626; WAN024GFN; Start 183; Stop 207
tgaccgtttccacctacaattcata

SEQ ID NO: 331759 - DNA, 25 bp, Artificial
  probe
  misc_feature (1)..(25): SEQ ID NO: 2626; WAN024GFN; Start 47; Stop 71
tgcagtttaatcccttgaatatcgt

SEQ ID NO: 331760 - DNA, 25 bp, Artificial
  probe
  misc_feature (1)..(25): SEQ ID NO: 2626; WAN024GFN; Start 46; Stop 70
atgcagtttaatcccttgaatatcg

SEQ ID NO: 331761 - DNA, 25 bp, Artificial
  probe
  misc_feature (1)..(25): SEQ ID NO: 2626; WAN024GFN; Start 34; Stop 58
aagatggagcaaatgcagtttaatc

SEQ ID NO: 331762 - DNA, 25 bp, Artificial
  probe
  misc_feature (1)..(25): SEQ ID NO: 2626; WAN024GFN; Start 16; Stop 40
catacgagtatttgtcataagatgg

SEQ ID NO: 331763 - DNA, 25 bp, Artificial
  probe
  misc_feature (1)..(25): SEQ ID NO: 2626; WAN024GFN; Start 33; Stop 57
taagatggagcaaatgcagtttaat

SEQ ID NO: 331764 - DNA, 25 bp, Artificial
  probe
  misc_feature (1)..(25): SEQ ID NO: 2626; WAN024GFN; Start 32; Stop 56
ataagatggagcaaatgcagtttaa

SEQ ID NO: 331765 - DNA, 25 bp, Artificial
  probe
  misc_feature (1)..(25): SEQ ID NO: 2626; WAN024GFN; Start 31; Stop 55
cataagatggagcaaatgcagttta

SEQ ID NO: 331766 - DNA, 25 bp, Artificial
  probe
  misc_feature (1)..(25): SEQ ID NO: 2626; WAN024GFN; Start 17; Stop 41
atacgagtatttgtcataagatgga

SEQ ID NO: 331767 - DNA, 25 bp, Artificial
  probe
  misc_feature (1)..(25): SEQ ID NO: 2626; WAN024GFN; Start 182; Stop 206
ttgaccgtttccacctacaattcat

SEQ ID NO: 331768 - DNA, 25 bp, Artificial
  probe
  misc_feature (1)..(25): SEQ ID NO: 2626; WAN024GFN; Start 49; Stop 73
cagtttaatcccttgaatatcgtta

SEQ ID NO: 331769 - DNA, 25 bp, Artificial
  probe
  misc_feature (1)..(25): SEQ ID NO: 2626; WAN024GFN; Start 42; Stop 66
gcaaatgcagtttaatcccttgaat

SEQ ID NO: 331770 - DNA, 25 bp, Artificial
  probe
  misc_feature (1)..(25): SEQ ID NO: 2626; WAN024GFN; Start 30; Stop 54
tcataagatggagcaaatgcagttt

SEQ ID NO: 331771 - DNA, 25 bp, Artificial
  probe
  misc_feature (1)..(25): SEQ ID NO: 2626; WAN024GFN; Start 12; Stop 36
gttgcatacgagtatttgtcataag

SEQ ID NO: 331772 - DNA, 25 bp, Artificial
  probe
  misc_feature (1)..(25): SEQ ID NO: 2626; WAN024GFN; Start 13; Stop 37
ttgcatacgagtatttgtcataaga

SEQ ID NO: 331773 - DNA, 25 bp, Artificial
  probe
  misc_feature (1)..(25): SEQ ID NO: 2626; WAN024GFN; Start 14; Stop 38
tgcatacgagtatttgtcataagat

SEQ ID NO: 331774 - DNA, 25 bp, Artificial
  probe
  misc_feature (1)..(25): SEQ ID NO: 2626; WAN024GFN; Start 41; Stop 65
agcaaatgcagtttaatcccttgaa

SEQ ID NO: 331775 - DNA, 25 bp, Artificial
  probe
  misc_feature (1)..(25): SEQ ID NO: 2626; WAN024GFN; Start 29; Stop 53
gtcataagatggagcaaatgcagtt

SEQ ID NO: 331776 - DNA, 25 bp, Artificial
  probe
  misc_feature (1)..(25): SEQ ID NO: 2626; WAN024GFN; Start 43; Stop 67
caaatgcagtttaatcccttgaata

SEQ ID NO: 331777 - DNA, 25 bp, Artificial
  probe
  misc_feature (1)..(25): SEQ ID NO: 2626; WAN024GFN; Start 27; Stop 51
ttgtcataagatggagcaaatgcag

SEQ ID NO: 331778 - DNA, 25 bp, Artificial
  probe
  misc_feature (1)..(25): SEQ ID NO: 2626; WAN024GFN; Start 181; Stop 205
cttgaccgtttccacctacaattca

SEQ ID NO: 331779 - DNA, 25 bp, Artificial
  probe
  misc_feature (1)..(25): SEQ ID NO: 2626; WAN024GFN; Start 45; Stop 69
aatgcagtttaatcccttgaatatc

SEQ ID NO: 331780 - DNA, 25 bp, Artificial
  probe
  misc_feature (1)..(25): SEQ ID NO: 2626; WAN024GFN; Start 40; Stop 64
gagcaaatgcagtttaatcccttga

SEQ ID NO: 331781 - DNA, 25 bp, Artificial
  probe
  misc_feature (1)..(25): SEQ ID NO: 2627; WAN024CP3; Start 74; Stop 98
taaccatcatctgtagtatagcgtc

SEQ ID NO: 331782 - DNA, 25 bp, Artificial
  probe
  misc_feature (1)..(25): SEQ ID NO: 2627; WAN024CP3; Start 78; Stop 102
catcatctgtagtatagcgtccttg

SEQ ID NO: 331783 - DNA, 25 bp, Artificial
  probe
  misc_feature (1)..(25): SEQ ID NO: 2627; WAN024CP3; Start 20; Stop 44
ggaacgatataagcatcaccagtat

SEQ ID NO: 331784 - DNA, 25 bp, Artificial
  probe
  misc_feature (1)..(25): SEQ ID NO: 2627; WAN024CP3; Start 73; Stop 97
ataaccatcatctgtagtatagcgt

SEQ ID NO: 331785 - DNA, 25 bp, Artificial
  probe
  misc_feature (1)..(25): SEQ ID NO: 2627; WAN024CP3; Start 28; Stop 52
ataagcatcaccagtatcctctatg

SEQ ID NO: 331786 - DNA, 25 bp, Artificial
  probe
  misc_feature (1)..(25): SEQ ID NO: 2627; WAN024CP3; Start 19; Stop 43
aggaacgatataagcatcaccagta

SEQ ID NO: 331787 - DNA, 25 bp, Artificial
  probe
  misc_feature (1)..(25): SEQ ID NO: 2627; WAN024CP3; Start 77; Stop 101
ccatcatctgtagtatagcgtcctt

SEQ ID NO: 331788 - DNA, 25 bp, Artificial
  probe
  misc_feature (1)..(25): SEQ ID NO: 2627; WAN024CP3; Start 29; Stop 53
taagcatcaccagtatcctctatga

SEQ ID NO: 331789 - DNA, 25 bp, Artificial
  probe
  misc_feature (1)..(25): SEQ ID NO: 2627; WAN024CP3; Start 273; Stop 297
ccttgacctcattaacaatatcctc

SEQ ID NO: 331790 - DNA, 25 bp, Artificial
  probe
  misc_feature (1)..(25): SEQ ID NO: 2627; WAN024CP3; Start 75; Stop 99
aaccatcatctgtagtatagcgtcc

SEQ ID NO: 331791 - DNA, 25 bp, Artificial
  probe
  misc_feature (1)..(25): SEQ ID NO: 2627; WAN024CP3; Start 22; Stop 46
aacgatataagcatcaccagtatcc

SEQ ID NO: 331792 - DNA, 25 bp, Artificial
  probe
  misc_feature (1)..(25): SEQ ID NO: 2627; WAN024CP3; Start 27; Stop 51
tataagcatcaccagtatcctctat

SEQ ID NO: 331793 - DNA, 25 bp, Artificial
  probe
  misc_feature (1)..(25): SEQ ID NO: 2627; WAN024CP3; Start 26; Stop 50
atataagcatcaccagtatcctcta

SEQ ID NO: 331794 - DNA, 25 bp, Artificial
  probe
  misc_feature (1)..(25): SEQ ID NO: 2627; WAN024CP3; Start 24; Stop 48
cgatataagcatcaccagtatcctc

SEQ ID NO: 331795 - DNA, 25 bp, Artificial
  probe
  misc_feature (1)..(25): SEQ ID NO: 2627; WAN024CP3; Start 79; Stop 103
atcatctgtagtatagcgtccttgc

SEQ ID NO: 331796 - DNA, 25 bp, Artificial
  probe
  misc_feature (1)..(25): SEQ ID NO: 2627; WAN024CP3; Start 25; Stop 49
gatataagcatcaccagtatcctct

SEQ ID NO: 331797 - DNA, 25 bp, Artificial
  probe
  misc_feature (1)..(25): SEQ ID NO: 2627; WAN024CP3; Start 21; Stop 45
gaacgatataagcatcaccagtatc

SEQ ID NO: 331798 - DNA, 25 bp, Artificial
  probe
  misc_feature (1)..(25): SEQ ID NO: 2627; WAN024CP3; Start 23; Stop 47
acgatataagcatcaccagtatcct

SEQ ID NO: 331799 - DNA, 25 bp, Artificial
  probe
  misc_feature (1)..(25): SEQ ID NO: 2627; WAN024CP3; Start 277; Stop 301
gacctcattaacaatatcctcatct

SEQ ID NO: 331800 - DNA, 25 bp, Artificial
  probe
  misc_feature (1)..(25): SEQ ID NO: 2627; WAN024CP3; Start 16; Stop 40
atgaggaacgatataagcatcacca

SEQ ID NO: 331801 - DNA, 25 bp, Artificial
  probe
  misc_feature (1)..(25): SEQ ID NO: 2627; WAN024CP3; Start 274; Stop 298
cttgacctcattaacaatatcctca

SEQ ID NO: 331802 - DNA, 25 bp, Artificial
  probe
  misc_feature (1)..(25): SEQ ID NO: 2627; WAN024CP3; Start 18; Stop 42
gaggaacgatataagcatcaccagt

SEQ ID NO: 331803 - DNA, 25 bp, Artificial
  probe
  misc_feature (1)..(25): SEQ ID NO: 2627; WAN024CP3; Start 249; Stop 273
catctaccttgataacatatccacc

SEQ ID NO: 331804 - DNA, 25 bp, Artificial
  probe
  misc_feature (1)..(25): SEQ ID NO: 2627; WAN024CP3; Start 248; Stop 272
ccatctaccttgataacatatccac

SEQ ID NO: 331805 - DNA, 25 bp, Artificial
  probe
  misc_feature (1)..(25): SEQ ID NO: 2627; WAN024CP3; Start 276; Stop 300
tgacctcattaacaatatcctcatc

SEQ ID NO: 331806 - DNA, 25 bp, Artificial
  probe
  misc_feature (1)..(25): SEQ ID NO: 2627; WAN024CP3; Start 247; Stop 271
tccatctaccttgataacatatcca

SEQ ID NO: 331807 - DNA, 25 bp, Artificial
  probe
  misc_feature (1)..(25): SEQ ID NO: 2627; WAN024CP3; Start 76; Stop 100
accatcatctgtagtatagcgtcct

SEQ ID NO: 331808 - DNA, 25 bp, Artificial
  probe
  misc_feature (1)..(25): SEQ ID NO: 2627; WAN024CP3; Start 278; Stop 302
acctcattaacaatatcctcatctt

SEQ ID NO: 331809 - DNA, 25 bp, Artificial
  probe
  misc_feature (1)..(25): SEQ ID NO: 2627; WAN024CP3; Start 72; Stop 96
tataaccatcatctgtagtatagcg

SEQ ID NO: 331810 - DNA, 25 bp, Artificial
  probe
  misc_feature (1)..(25): SEQ ID NO: 2627; WAN024CP3; Start 17; Stop 41
tgaggaacgatataagcatcaccag

SEQ ID NO: 331811 - DNA, 25 bp, Artificial
  probe
  misc_feature (1)..(25): SEQ ID NO: 2627; WAN024CP3; Start 15; Stop 39
catgaggaacgatataagcatcacc

SEQ ID NO: 331812 - DNA, 25 bp, Artificial
  probe
  misc_feature (1)..(25): SEQ ID NO: 2627; WAN024CP3; Start 14; Stop 38
ccatgaggaacgatataagcatcac

SEQ ID NO: 331813 - DNA, 25 bp, Artificial
  probe
  misc_feature (1)..(25): SEQ ID NO: 2627; WAN024CP3; Start 275; Stop 299
ttgacctcattaacaatatcctcat

SEQ ID NO: 331814 - DNA, 25 bp, Artificial
  probe
  misc_feature (1)..(25): SEQ ID NO: 2628; WAN024FEP; Start 123; Stop 147
acttaggtctgttacacgaatactg

SEQ ID NO: 331815 - DNA, 25 bp, Artificial
  probe
  misc_feature (1)..(25): SEQ ID NO: 2628; WAN024FEP; Start 124; Stop 148
cttaggtctgttacacgaatactgg

SEQ ID NO: 331816 - DNA, 25 bp, Artificial
  probe
  misc_feature (1)..(25): SEQ ID NO: 2628; WAN024FEP; Start 122; Stop 146
gacttaggtctgttacacgaatact

SEQ ID NO: 331817 - DNA, 25 bp, Artificial
  probe
  misc_feature (1)..(25): SEQ ID NO: 2628; WAN024FEP; Start 121; Stop 145
cgacttaggtctgttacacgaatac

SEQ ID NO: 331818 - DNA, 25 bp, Artificial
  probe
  misc_feature (1)..(25): SEQ ID NO: 2628; WAN024FEP; Start 125; Stop 149
ttaggtctgttacacgaatactggc

SEQ ID NO: 331819 - DNA, 25 bp, Artificial
  probe
  misc_feature (1)..(25): SEQ ID NO: 2628; WAN024FEP; Start 188; Stop 212
ctctctcctctccgtattcttcctt

SEQ ID NO: 331820 - DNA, 25 bp, Artificial
  probe
  misc_feature (1)..(25): SEQ ID NO: 2628; WAN024FEP; Start 190; Stop 214
ctctcctctccgtattcttccttga

SEQ ID NO: 331821 - DNA, 25 bp, Artificial
  probe
  misc_feature (1)..(25): SEQ ID NO: 2628; WAN024FEP; Start 189; Stop 213
tctctcctctccgtattcttccttg

SEQ ID NO: 331822 - DNA, 25 bp, Artificial
  probe
  misc_feature (1)..(25): SEQ ID NO: 2628; WAN024FEP; Start 126; Stop 150
taggtctgttacacgaatactggct

SEQ ID NO: 331823 - DNA, 25 bp, Artificial
  probe
  misc_feature (1)..(25): SEQ ID NO: 2628; WAN024FEP; Start 193; Stop 217
tcctctccgtattcttccttgagtt

SEQ ID NO: 331824 - DNA, 25 bp, Artificial
  probe
  misc_feature (1)..(25): SEQ ID NO: 2628; WAN024FEP; Start 191; Stop 215
tctcctctccgtattcttccttgag

SEQ ID NO: 331825 - DNA, 25 bp, Artificial
  probe
  misc_feature (1)..(25): SEQ ID NO: 2628; WAN024FEP; Start 185; Stop 209
ttgctctctcctctccgtattcttc

SEQ ID NO: 331826 - DNA, 25 bp, Artificial
  probe
  misc_feature (1)..(25): SEQ ID NO: 2628; WAN024FEP; Start 192; Stop 216
ctcctctccgtattcttccttgagt

SEQ ID NO: 331827 - DNA, 25 bp, Artificial
  probe
  misc_feature (1)..(25): SEQ ID NO: 2628; WAN024FEP; Start 195; Stop 219
ctctccgtattcttccttgagtttg

SEQ ID NO: 331828 - DNA, 25 bp, Artificial
  probe
  misc_feature (1)..(25): SEQ ID NO: 2628; WAN024FEP; Start 133; Stop 157
gttacacgaatactggctttgtttc

SEQ ID NO: 331829 - DNA, 25 bp, Artificial
  probe
  misc_feature (1)..(25): SEQ ID NO: 2628; WAN024FEP; Start 140; Stop 164
gaatactggctttgtttcgcactaa

SEQ ID NO: 331830 - DNA, 25 bp, Artificial
  probe
  misc_feature (1)..(25): SEQ ID NO: 2628; WAN024FEP; Start 132; Stop 156
tgttacacgaatactggctttgttt

SEQ ID NO: 331831 - DNA, 25 bp, Artificial
  probe
  misc_feature (1)..(25): SEQ ID NO: 2628; WAN024FEP; Start 129; Stop 153
gtctgttacacgaatactggctttg

SEQ ID NO: 331832 - DNA, 25 bp, Artificial
  probe
  misc_feature (1)..(25): SEQ ID NO: 2628; WAN024FEP; Start 141; Stop 165
aatactggctttgtttcgcactaac

SEQ ID NO: 331833 - DNA, 25 bp, Artificial
  probe
  misc_feature (1)..(25): SEQ ID NO: 2628; WAN024FEP; Start 127; Stop 151
aggtctgttacacgaatactggctt

SEQ ID NO: 331834 - DNA, 25 bp, Artificial
  probe
  misc_feature (1)..(25): SEQ ID NO: 2628; WAN024FEP; Start 131; Stop 155
ctgttacacgaatactggctttgtt

SEQ ID NO: 331835 - DNA, 25 bp, Artificial
  probe
  misc_feature (1)..(25): SEQ ID NO: 2628; WAN024FEP; Start 194; Stop 218
cctctccgtattcttccttgagttt

SEQ ID NO: 331836 - DNA, 25 bp, Artificial
  probe
  misc_feature (1)..(25): SEQ ID NO: 2628; WAN024FEP; Start 196; Stop 220
tctccgtattcttccttgagtttgg

SEQ ID NO: 331837 - DNA, 25 bp, Artificial
  probe
  misc_feature (1)..(25): SEQ ID NO: 2628; WAN024FEP; Start 120; Stop 144
tcgacttaggtctgttacacgaata

SEQ ID NO: 331838 - DNA, 25 bp, Artificial
  probe
  misc_feature (1)..(25): SEQ ID NO: 2628; WAN024FEP; Start 200; Stop 224
cgtattcttccttgagtttggcaac

SEQ ID NO: 331839 - DNA, 25 bp, Artificial
  probe
  misc_feature (1)..(25): SEQ ID NO: 2628; WAN024FEP; Start 184; Stop 208
tttgctctctcctctccgtattctt

SEQ ID NO: 331840 - DNA, 25 bp, Artificial
  probe
  misc_feature (1)..(25): SEQ ID NO: 2628; WAN024FEP; Start 130; Stop 154
tctgttacacgaatactggctttgt

SEQ ID NO: 331841 - DNA, 25 bp, Artificial
  probe
  misc_feature (1)..(25): SEQ ID NO: 2628; WAN024FEP; Start 128; Stop 152
ggtctgttacacgaatactggcttt

SEQ ID NO: 331842 - DNA, 25 bp, Artificial
  probe
  misc_feature (1)..(25): SEQ ID NO: 2628; WAN024FEP; Start 222; Stop 246
aactagccaaactgggagagaatag

SEQ ID NO: 331843 - DNA, 25 bp, Artificial
  probe
  misc_feature (1)..(25): SEQ ID NO: 2628; WAN024FEP; Start 160; Stop 184
actaacaggctttcaaagatggctt

SEQ ID NO: 331844 - DNA, 25 bp, Artificial
  probe
  misc_feature (1)..(25): SEQ ID NO: 2628; WAN024FEP; Start 221; Stop 245
caactagccaaactgggagagaata

SEQ ID NO: 331845 - DNA, 25 bp, Artificial
  probe
  misc_feature (1)..(25): SEQ ID NO: 2628; WAN024FEP; Start 65; Stop 89
cagtggttgctaaaagggaattatt

SEQ ID NO: 331846 - DNA, 25 bp, Artificial
  probe
  misc_feature (1)..(25): SEQ ID NO: 2628; WAN024FEP; Start 202; Stop 226
tattcttccttgagtttggcaacta

SEQ ID NO: 331847 - DNA, 25 bp, Artificial
  probe
  misc_feature (1)..(25): SEQ ID NO: 2629; WAN024FLJ; Start 102; Stop 126
tgttgataattgttctcctaatggc

SEQ ID NO: 331848 - DNA, 25 bp, Artificial
  probe
  misc_feature (1)..(25): SEQ ID NO: 2629; WAN024FLJ; Start 801; Stop 825
atcgttcttctcaatcaggtgtcta

SEQ ID NO: 331849 - DNA, 25 bp, Artificial
  probe
  misc_feature (1)..(25): SEQ ID NO: 2629; WAN024FLJ; Start 103; Stop 127
gttgataattgttctcctaatggct

SEQ ID NO: 331850 - DNA, 25 bp, Artificial
  probe
  misc_feature (1)..(25): SEQ ID NO: 2629; WAN024FLJ; Start 111; Stop 135
ttgttctcctaatggctcatatagt

SEQ ID NO: 331851 - DNA, 25 bp, Artificial
  probe
  misc_feature (1)..(25): SEQ ID NO: 2629; WAN024FLJ; Start 104; Stop 128
ttgataattgttctcctaatggctc

SEQ ID NO: 331852 - DNA, 25 bp, Artificial
  probe
  misc_feature (1)..(25): SEQ ID NO: 2629; WAN024FLJ; Start 105; Stop 129
tgataattgttctcctaatggctca

SEQ ID NO: 331853 - DNA, 25 bp, Artificial
  probe
  misc_feature (1)..(25): SEQ ID NO: 2629; WAN024FLJ; Start 106; Stop 130
gataattgttctcctaatggctcat

SEQ ID NO: 331854 - DNA, 25 bp, Artificial
  probe
  misc_feature (1)..(25): SEQ ID NO: 2629; WAN024FLJ; Start 47; Stop 71
aacaatgcgtcaattcaattaagaa

SEQ ID NO: 331855 - DNA, 25 bp, Artificial
  probe
  misc_feature (1)..(25): SEQ ID NO: 2629; WAN024FLJ; Start 800; Stop 824
aatcgttcttctcaatcaggtgtct

SEQ ID NO: 331856 - DNA, 25 bp, Artificial
  probe
  misc_feature (1)..(25): SEQ ID NO: 2629; WAN024FLJ; Start 112; Stop 136
tgttctcctaatggctcatatagta

SEQ ID NO: 331857 - DNA, 25 bp, Artificial
  probe
  misc_feature (1)..(25): SEQ ID NO: 2629; WAN024FLJ; Start 803; Stop 827
cgttcttctcaatcaggtgtctact

SEQ ID NO: 331858 - DNA, 25 bp, Artificial
  probe
  misc_feature (1)..(25): SEQ ID NO: 2629; WAN024FLJ; Start 802; Stop 826
tcgttcttctcaatcaggtgtctac

SEQ ID NO: 331859 - DNA, 25 bp, Artificial
  probe
  misc_feature (1)..(25): SEQ ID NO: 2629; WAN024FLJ; Start 115; Stop 139
tctcctaatggctcatatagtagtt

SEQ ID NO: 331860 - DNA, 25 bp, Artificial
  probe
  misc_feature (1)..(25): SEQ ID NO: 2629; WAN024FLJ; Start 114; Stop 138
ttctcctaatggctcatatagtagt

SEQ ID NO: 331861 - DNA, 25 bp, Artificial
  probe
  misc_feature (1)..(25): SEQ ID NO: 2629; WAN024FLJ; Start 110; Stop 134
attgttctcctaatggctcatatag

SEQ ID NO: 331862 - DNA, 25 bp, Artificial
  probe
  misc_feature (1)..(25): SEQ ID NO: 2629; WAN024FLJ; Start 804; Stop 828
gttcttctcaatcaggtgtctactg

SEQ ID NO: 331863 - DNA, 25 bp, Artificial
  probe
  misc_feature (1)..(25): SEQ ID NO: 2629; WAN024FLJ; Start 113; Stop 137
gttctcctaatggctcatatagtag

SEQ ID NO: 331864 - DNA, 25 bp, Artificial
  probe
  misc_feature (1)..(25): SEQ ID NO: 2629; WAN024FLJ; Start 109; Stop 133
aattgttctcctaatggctcatata

SEQ ID NO: 331865 - DNA, 25 bp, Artificial
  probe
  misc_feature (1)..(25): SEQ ID NO: 2629; WAN024FLJ; Start 108; Stop 132
taattgttctcctaatggctcatat

SEQ ID NO: 331866 - DNA, 25 bp, Artificial
  probe
  misc_feature (1)..(25): SEQ ID NO: 2629; WAN024FLJ; Start 107; Stop 131
ataattgttctcctaatggctcata

SEQ ID NO: 331867 - DNA, 25 bp, Artificial
  probe
  misc_feature (1)..(25): SEQ ID NO: 2629; WAN024FLJ; Start 101; Stop 125
ttgttgataattgttctcctaatgg

SEQ ID NO: 331868 - DNA, 25 bp, Artificial
  probe
  misc_feature (1)..(25): SEQ ID NO: 2629; WAN024FLJ; Start 408; Stop 432
aaaggttctggataggtctgatttg

SEQ ID NO: 331869 - DNA, 25 bp, Artificial
  probe
  misc_feature (1)..(25): SEQ ID NO: 2629; WAN024FLJ; Start 317; Stop 341
tgtatgaaagttacgcaaagtatgg

SEQ ID NO: 331870 - DNA, 25 bp, Artificial
  probe
  misc_feature (1)..(25): SEQ ID NO: 2629; WAN024FLJ; Start 320; Stop 344
atgaaagttacgcaaagtatggcta

SEQ ID NO: 331871 - DNA, 25 bp, Artificial
  probe
  misc_feature (1)..(25): SEQ ID NO: 2629; WAN024FLJ; Start 319; Stop 343
tatgaaagttacgcaaagtatggct

SEQ ID NO: 331872 - DNA, 25 bp, Artificial
  probe
  misc_feature (1)..(25): SEQ ID NO: 2629; WAN024FLJ; Start 318; Stop 342
gtatgaaagttacgcaaagtatggc

SEQ ID NO: 331873 - DNA, 25 bp, Artificial
  probe
  misc_feature (1)..(25): SEQ ID NO: 2629; WAN024FLJ; Start 412; Stop 436
gttctggataggtctgatttgaagt

SEQ ID NO: 331874 - DNA, 25 bp, Artificial
  probe
  misc_feature (1)..(25): SEQ ID NO: 2629; WAN024FLJ; Start 407; Stop 431
gaaaggttctggataggtctgattt

SEQ ID NO: 331875 - DNA, 25 bp, Artificial
  probe
  misc_feature (1)..(25): SEQ ID NO: 2629; WAN024FLJ; Start 413; Stop 437
ttctggataggtctgatttgaagtt

SEQ ID NO: 331876 - DNA, 25 bp, Artificial
  probe
  misc_feature (1)..(25): SEQ ID NO: 2629; WAN024FLJ; Start 662; Stop 686
cgtttatgtatatggaggcagaaat

SEQ ID NO: 331877 - DNA, 25 bp, Artificial
  probe
  misc_feature (1)..(25): SEQ ID NO: 2629; WAN024FLJ; Start 414; Stop 438
tctggataggtctgatttgaagtta

SEQ ID NO: 331878 - DNA, 25 bp, Artificial
  probe
  misc_feature (1)..(25): SEQ ID NO: 2629; WAN024FLJ; Start 409; Stop 433
aaggttctggataggtctgatttga

SEQ ID NO: 331879 - DNA, 25 bp, Artificial
  probe
  misc_feature (1)..(25): SEQ ID NO: 2629; WAN024FLJ; Start 39; Stop 63
agaaactaaacaatgcgtcaattca

SEQ ID NO: 331880 - DNA, 25 bp, Artificial
  probe
  misc_feature (1)..(25): SEQ ID NO: 2630; WAN024GHU; Start 492; Stop 516
tgaagtggagcaagactactataac

SEQ ID NO: 331881 - DNA, 25 bp, Artificial
  probe
  misc_feature (1)..(25): SEQ ID NO: 2630; WAN024GHU; Start 493; Stop 517
gaagtggagcaagactactataact

SEQ ID NO: 331882 - DNA, 25 bp, Artificial
  probe
  misc_feature (1)..(25): SEQ ID NO: 2630; WAN024GHU; Start 491; Stop 515
ttgaagtggagcaagactactataa

SEQ ID NO: 331883 - DNA, 25 bp, Artificial
  probe
  misc_feature (1)..(25): SEQ ID NO: 2630; WAN024GHU; Start 55; Stop 79
tatctacgagagactgatggaggaa

SEQ ID NO: 331884 - DNA, 25 bp, Artificial
  probe
  misc_feature (1)..(25): SEQ ID NO: 2630; WAN024GHU; Start 54; Stop 78
ttatctacgagagactgatggagga

SEQ ID NO: 331885 - DNA, 25 bp, Artificial
  probe
  misc_feature (1)..(25): SEQ ID NO: 2630; WAN024GHU; Start 762; Stop 786
tatctctatggctgatcttcaagga

SEQ ID NO: 331886 - DNA, 25 bp, Artificial
  probe
  misc_feature (1)..(25): SEQ ID NO: 2630; WAN024GHU; Start 761; Stop 785
atatctctatggctgatcttcaagg

SEQ ID NO: 331887 - DNA, 25 bp, Artificial
  probe
  misc_feature (1)..(25): SEQ ID NO: 2630; WAN024GHU; Start 763; Stop 787
atctctatggctgatcttcaaggaa

SEQ ID NO: 331888 - DNA, 25 bp, Artificial
  probe
  misc_feature (1)..(25): SEQ ID NO: 2630; WAN024GHU; Start 764; Stop 788
tctctatggctgatcttcaaggaac

SEQ ID NO: 331889 - DNA, 25 bp, Artificial
  probe
  misc_feature (1)..(25): SEQ ID NO: 2630; WAN024GHU; Start 59; Stop 83
tacgagagactgatggaggaaatat

SEQ ID NO: 331890 - DNA, 25 bp, Artificial
  probe
  misc_feature (1)..(25): SEQ ID NO: 2630; WAN024GHU; Start 760; Stop 784
aatatctctatggctgatcttcaag

SEQ ID NO: 331891 - DNA, 25 bp, Artificial
  probe
  misc_feature (1)..(25): SEQ ID NO: 2630; WAN024GHU; Start 58; Stop 82
ctacgagagactgatggaggaaata

SEQ ID NO: 331892 - DNA, 25 bp, Artificial
  probe
  misc_feature (1)..(25): SEQ ID NO: 2630; WAN024GHU; Start 454; Stop 478
atcttcatcggtatgggttatcaag

SEQ ID NO: 331893 - DNA, 25 bp, Artificial
  probe
  misc_feature (1)..(25): SEQ ID NO: 2630; WAN024GHU; Start 453; Stop 477
tatcttcatcggtatgggttatcaa

SEQ ID NO: 331894 - DNA, 25 bp, Artificial
  probe
  misc_feature (1)..(25): SEQ ID NO: 2630; WAN024GHU; Start 456; Stop 480
cttcatcggtatgggttatcaagtc

SEQ ID NO: 331895 - DNA, 25 bp, Artificial
  probe
  misc_feature (1)..(25): SEQ ID NO: 2630; WAN024GHU; Start 452; Stop 476
atatcttcatcggtatgggttatca

SEQ ID NO: 331896 - DNA, 25 bp, Artificial
  probe
  misc_feature (1)..(25): SEQ ID NO: 2630; WAN024GHU; Start 53; Stop 77
tttatctacgagagactgatggagg

SEQ ID NO: 331897 - DNA, 25 bp, Artificial
  probe
  misc_feature (1)..(25): SEQ ID NO: 2630; WAN024GHU; Start 497; Stop 521
tggagcaagactactataactttga

SEQ ID NO: 331898 - DNA, 25 bp, Artificial
  probe
  misc_feature (1)..(25): SEQ ID NO: 2630; WAN024GHU; Start 496; Stop 520
gtggagcaagactactataactttg

SEQ ID NO: 331899 - DNA, 25 bp, Artificial
  probe
  misc_feature (1)..(25): SEQ ID NO: 2630; WAN024GHU; Start 455; Stop 479
tcttcatcggtatgggttatcaagt

SEQ ID NO: 331900 - DNA, 25 bp, Artificial
  probe
  misc_feature (1)..(25): SEQ ID NO: 2630; WAN024GHU; Start 495; Stop 519
agtggagcaagactactataacttt

SEQ ID NO: 331901 - DNA, 25 bp, Artificial
  probe
  misc_feature (1)..(25): SEQ ID NO: 2630; WAN024GHU; Start 490; Stop 514
tttgaagtggagcaagactactata

SEQ ID NO: 331902 - DNA, 25 bp, Artificial
  probe
  misc_feature (1)..(25): SEQ ID NO: 2630; WAN024GHU; Start 67; Stop 91
actgatggaggaaatatgtcaacta

SEQ ID NO: 331903 - DNA, 25 bp, Artificial
  probe
  misc_feature (1)..(25): SEQ ID NO: 2630; WAN024GHU; Start 500; Stop 524
agcaagactactataactttgaacg

SEQ ID NO: 331904 - DNA, 25 bp, Artificial
  probe
  misc_feature (1)..(25): SEQ ID NO: 2630; WAN024GHU; Start 61; Stop 85
cgagagactgatggaggaaatatgt

SEQ ID NO: 331905 - DNA, 25 bp, Artificial
  probe
  misc_feature (1)..(25): SEQ ID NO: 2630; WAN024GHU; Start 60; Stop 84
acgagagactgatggaggaaatatg

SEQ ID NO: 331906 - DNA, 25 bp, Artificial
  probe
  misc_feature (1)..(25): SEQ ID NO: 2630; WAN024GHU; Start 575; Stop 599
atatcactgaagaaatcttgctccg

SEQ ID NO: 331907 - DNA, 25 bp, Artificial
  probe
  misc_feature (1)..(25): SEQ ID NO: 2630; WAN024GHU; Start 830; Stop 854
aaattcgtttgcgtccatcttactt

SEQ ID NO: 331908 - DNA, 25 bp, Artificial
  probe
  misc_feature (1)..(25): SEQ ID NO: 2630; WAN024GHU; Start 64; Stop 88
gagactgatggaggaaatatgtcaa

SEQ ID NO: 331909 - DNA, 25 bp, Artificial
  probe
  misc_feature (1)..(25): SEQ ID NO: 2630; WAN024GHU; Start 62; Stop 86
gagagactgatggaggaaatatgtc

SEQ ID NO: 331910 - DNA, 25 bp, Artificial
  probe
  misc_feature (1)..(25): SEQ ID NO: 2630; WAN024GHU; Start 66; Stop 90
gactgatggaggaaatatgtcaact

SEQ ID NO: 331911 - DNA, 25 bp, Artificial
  probe
  misc_feature (1)..(25): SEQ ID NO: 2630; WAN024GHU; Start 65; Stop 89
agactgatggaggaaatatgtcaac

SEQ ID NO: 331912 - DNA, 25 bp, Artificial
  probe
  misc_feature (1)..(25): SEQ ID NO: 2630; WAN024GHU; Start 498; Stop 522
ggagcaagactactataactttgaa

SEQ ID NO: 331913 - DNA, 25 bp, Artificial
  probe
  misc_feature (1)..(25): SEQ ID NO: 2631; WAN024GO8; Start 214; Stop 238
ataatctgttcttcccgtctcaaat

SEQ ID NO: 331914 - DNA, 25 bp, Artificial
  probe
  misc_feature (1)..(25): SEQ ID NO: 2631; WAN024GO8; Start 215; Stop 239
taatctgttcttcccgtctcaaatc

SEQ ID NO: 331915 - DNA, 25 bp, Artificial
  probe
  misc_feature (1)..(25): SEQ ID NO: 2631; WAN024GO8; Start 170; Stop 194
atagggagttaagaagggctgatag

SEQ ID NO: 331916 - DNA, 25 bp, Artificial
  probe
  misc_feature (1)..(25): SEQ ID NO: 2631; WAN024GO8; Start 169; Stop 193
gatagggagttaagaagggctgata

SEQ ID NO: 331917 - DNA, 25 bp, Artificial
  probe
  misc_feature (1)..(25): SEQ ID NO: 2631; WAN024GO8; Start 221; Stop 245
gttcttcccgtctcaaatcatcaaa

SEQ ID NO: 331918 - DNA, 25 bp, Artificial
  probe
  misc_feature (1)..(25): SEQ ID NO: 2631; WAN024GO8; Start 222; Stop 246
ttcttcccgtctcaaatcatcaaag

SEQ ID NO: 331919 - DNA, 25 bp, Artificial
  probe
  misc_feature (1)..(25): SEQ ID NO: 2631; WAN024GO8; Start 225; Stop 249
ttcccgtctcaaatcatcaaagaag

SEQ ID NO: 331920 - DNA, 25 bp, Artificial
  probe
  misc_feature (1)..(25): SEQ ID NO: 2631; WAN024GO8; Start 224; Stop 248
cttcccgtctcaaatcatcaaagaa

SEQ ID NO: 331921 - DNA, 25 bp, Artificial
  probe
  misc_feature (1)..(25): SEQ ID NO: 2631; WAN024GO8; Start 3; Stop 27
ggtacgacggtttaataattcatca

SEQ ID NO: 331922 - DNA, 25 bp, Artificial
  probe
  misc_feature (1)..(25): SEQ ID NO: 2631; WAN024GO8; Start 2; Stop 26
tggtacgacggtttaataattcatc

SEQ ID NO: 331923 - DNA, 25 bp, Artificial
  probe
  misc_feature (1)..(25): SEQ ID NO: 2631; WAN024GO8; Start 217; Stop 241
atctgttcttcccgtctcaaatcat

SEQ ID NO: 331924 - DNA, 25 bp, Artificial
  probe
  misc_feature (1)..(25): SEQ ID NO: 2631; WAN024GO8; Start 216; Stop 240
aatctgttcttcccgtctcaaatca

SEQ ID NO: 331925 - DNA, 25 bp, Artificial
  probe
  misc_feature (1)..(25): SEQ ID NO: 2631; WAN024GO8; Start 226; Stop 250
tcccgtctcaaatcatcaaagaaga

SEQ ID NO: 331926 - DNA, 25 bp, Artificial
  probe
  misc_feature (1)..(25): SEQ ID NO: 2631; WAN024GO8; Start 1; Stop 25
atggtacgacggtttaataattcat

SEQ ID NO: 331927 - DNA, 25 bp, Artificial
  probe
  misc_feature (1)..(25): SEQ ID NO: 2631; WAN024GO8; Start 178; Stop 202
ttaagaagggctgatagggtacttg

SEQ ID NO: 331928 - DNA, 25 bp, Artificial
  probe
  misc_feature (1)..(25): SEQ ID NO: 2631; WAN024GO8; Start 177; Stop 201
gttaagaagggctgatagggtactt

SEQ ID NO: 331929 - DNA, 25 bp, Artificial
  probe
  misc_feature (1)..(25): SEQ ID NO: 2631; WAN024GO8; Start 63; Stop 87
cttgaccagaataccaccaaacttg

SEQ ID NO: 331930 - DNA, 25 bp, Artificial
  probe
  misc_feature (1)..(25): SEQ ID NO: 2631; WAN024GO8; Start 220; Stop 244
tgttcttcccgtctcaaatcatcaa

SEQ ID NO: 331931 - DNA, 25 bp, Artificial
  probe
  misc_feature (1)..(25): SEQ ID NO: 2631; WAN024GO8; Start 175; Stop 199
gagttaagaagggctgatagggtac

SEQ ID NO: 331932 - DNA, 25 bp, Artificial
  probe
  misc_feature (1)..(25): SEQ ID NO: 2631; WAN024GO8; Start 218; Stop 242
tctgttcttcccgtctcaaatcatc

SEQ ID NO: 331933 - DNA, 25 bp, Artificial
  probe
  misc_feature (1)..(25): SEQ ID NO: 2631; WAN024GO8; Start 171; Stop 195
tagggagttaagaagggctgatagg

SEQ ID NO: 331934 - DNA, 25 bp, Artificial
  probe
  misc_feature (1)..(25): SEQ ID NO: 2631; WAN024GO8; Start 168; Stop 192
tgatagggagttaagaagggctgat

SEQ ID NO: 331935 - DNA, 25 bp, Artificial
  probe
  misc_feature (1)..(25): SEQ ID NO: 2631; WAN024GO8; Start 149; Stop 173
taagggtcttgaaaccaactgatag

SEQ ID NO: 331936 - DNA, 25 bp, Artificial
  probe
  misc_feature (1)..(25): SEQ ID NO: 2631; WAN024GO8; Start 148; Stop 172
ttaagggtcttgaaaccaactgata

SEQ ID NO: 331937 - DNA, 25 bp, Artificial
  probe
  misc_feature (1)..(25): SEQ ID NO: 2631; WAN024GO8; Start 147; Stop 171
attaagggtcttgaaaccaactgat

SEQ ID NO: 331938 - DNA, 25 bp, Artificial
  probe
  misc_feature (1)..(25): SEQ ID NO: 2631; WAN024GO8; Start 146; Stop 170
tattaagggtcttgaaaccaactga

SEQ ID NO: 331939 - DNA, 25 bp, Artificial
  probe
  misc_feature (1)..(25): SEQ ID NO: 2631; WAN024GO8; Start 142; Stop 166
tggatattaagggtcttgaaaccaa

SEQ ID NO: 331940 - DNA, 25 bp, Artificial
  probe
  misc_feature (1)..(25): SEQ ID NO: 2631; WAN024GO8; Start 141; Stop 165
ttggatattaagggtcttgaaacca

SEQ ID NO: 331941 - DNA, 25 bp, Artificial
  probe
  misc_feature (1)..(25): SEQ ID NO: 2631; WAN024GO8; Start 143; Stop 167
ggatattaagggtcttgaaaccaac

SEQ ID NO: 331942 - DNA, 25 bp, Artificial
  probe
  misc_feature (1)..(25): SEQ ID NO: 2631; WAN024GO8; Start 154; Stop 178
gtcttgaaaccaactgatagggagt

SEQ ID NO: 331943 - DNA, 25 bp, Artificial
  probe
  misc_feature (1)..(25): SEQ ID NO: 2631; WAN024GO8; Start 4; Stop 28
gtacgacggtttaataattcatcaa

SEQ ID NO: 331944 - DNA, 25 bp, Artificial
  probe
  misc_feature (1)..(25): SEQ ID NO: 2631; WAN024GO8; Start 71; Stop 95
gaataccaccaaacttgccaaactc

SEQ ID NO: 331945 - DNA, 25 bp, Artificial
  probe
  misc_feature (1)..(25): SEQ ID NO: 2631; WAN024GO8; Start 145; Stop 169
atattaagggtcttgaaaccaactg

SEQ ID NO: 331946 - DNA, 25 bp, Artificial
  probe
  misc_feature (1)..(25): SEQ ID NO: 2632; WAN024G52; Start 296; Stop 320
ggacattcaaacgctcaagattaaa

SEQ ID NO: 331947 - DNA, 25 bp, Artificial
  probe
  misc_feature (1)..(25): SEQ ID NO: 2632; WAN024G52; Start 295; Stop 319
aggacattcaaacgctcaagattaa

SEQ ID NO: 331948 - DNA, 25 bp, Artificial
  probe
  misc_feature (1)..(25): SEQ ID NO: 2632; WAN024G52; Start 297; Stop 321
gacattcaaacgctcaagattaaat

SEQ ID NO: 331949 - DNA, 25 bp, Artificial
  probe
  misc_feature (1)..(25): SEQ ID NO: 2632; WAN024G52; Start 158; Stop 182
aagtggttgtcaaatcttgtaactg

SEQ ID NO: 331950 - DNA, 25 bp, Artificial
  probe
  misc_feature (1)..(25): SEQ ID NO: 2632; WAN024G52; Start 156; Stop 180
caaagtggttgtcaaatcttgtaac

SEQ ID NO: 331951 - DNA, 25 bp, Artificial
  probe
  misc_feature (1)..(25): SEQ ID NO: 2632; WAN024G52; Start 157; Stop 181
aaagtggttgtcaaatcttgtaact

SEQ ID NO: 331952 - DNA, 25 bp, Artificial
  probe
  misc_feature (1)..(25): SEQ ID NO: 2632; WAN024G52; Start 163; Stop 187
gttgtcaaatcttgtaactgcttgg

SEQ ID NO: 331953 - DNA, 25 bp, Artificial
  probe
  misc_feature (1)..(25): SEQ ID NO: 2632; WAN024G52; Start 162; Stop 186
ggttgtcaaatcttgtaactgcttg

SEQ ID NO: 331954 - DNA, 25 bp, Artificial
  probe
  misc_feature (1)..(25): SEQ ID NO: 2632; WAN024G52; Start 164; Stop 188
ttgtcaaatcttgtaactgcttggt

SEQ ID NO: 331955 - DNA, 25 bp, Artificial
  probe
  misc_feature (1)..(25): SEQ ID NO: 2632; WAN024G52; Start 161; Stop 185
tggttgtcaaatcttgtaactgctt

SEQ ID NO: 331956 - DNA, 25 bp, Artificial
  probe
  misc_feature (1)..(25): SEQ ID NO: 2632; WAN024G52; Start 298; Stop 322
acattcaaacgctcaagattaaatt

SEQ ID NO: 331957 - DNA, 25 bp, Artificial
  probe
  misc_feature (1)..(25): SEQ ID NO: 2632; WAN024G52; Start 167; Stop 191
tcaaatcttgtaactgcttggtcac

SEQ ID NO: 331958 - DNA, 25 bp, Artificial
  probe
  misc_feature (1)..(25): SEQ ID NO: 2632; WAN024G52; Start 166; Stop 190
gtcaaatcttgtaactgcttggtca

SEQ ID NO: 331959 - DNA, 25 bp, Artificial
  probe
  misc_feature (1)..(25): SEQ ID NO: 2632; WAN024G52; Start 165; Stop 189
tgtcaaatcttgtaactgcttggtc

SEQ ID NO: 331960 - DNA, 25 bp, Artificial
  probe
  misc_feature (1)..(25): SEQ ID NO: 2632; WAN024G52; Start 294; Stop 318
gaggacattcaaacgctcaagatta

SEQ ID NO: 331961 - DNA, 25 bp, Artificial
  probe
  misc_feature (1)..(25): SEQ ID NO: 2632; WAN024G52; Start 258; Stop 282
aaagagggtttcaagaggtgctaaa

SEQ ID NO: 331962 - DNA, 25 bp, Artificial
  probe
  misc_feature (1)..(25): SEQ ID NO: 2632; WAN024G52; Start 160; Stop 184
gtggttgtcaaatcttgtaactgct

SEQ ID NO: 331963 - DNA, 25 bp, Artificial
  probe
  misc_feature (1)..(25): SEQ ID NO: 2632; WAN024G52; Start 159; Stop 183
agtggttgtcaaatcttgtaactgc

SEQ ID NO: 331964 - DNA, 25 bp, Artificial
  probe
  misc_feature (1)..(25): SEQ ID NO: 2632; WAN024G52; Start 155; Stop 179
ccaaagtggttgtcaaatcttgtaa

SEQ ID NO: 331965 - DNA, 25 bp, Artificial
  probe
  misc_feature (1)..(25): SEQ ID NO: 2632; WAN024G52; Start 10; Stop 34
tattgggacaaactcattccagaat

SEQ ID NO: 331966 - DNA, 25 bp, Artificial
  probe
  misc_feature (1)..(25): SEQ ID NO: 2632; WAN024G52; Start 4; Stop 28
gtacggtattgggacaaactcattc

SEQ ID NO: 331967 - DNA, 25 bp, Artificial
  probe
  misc_feature (1)..(25): SEQ ID NO: 2632; WAN024G52; Start 169; Stop 193
aaatcttgtaactgcttggtcacag

SEQ ID NO: 331968 - DNA, 25 bp, Artificial
  probe
  misc_feature (1)..(25): SEQ ID NO: 2632; WAN024G52; Start 168; Stop 192
caaatcttgtaactgcttggtcaca

SEQ ID NO: 331969 - DNA, 25 bp, Artificial
  probe
  misc_feature (1)..(25): SEQ ID NO: 2632; WAN024G52; Start 154; Stop 178
tccaaagtggttgtcaaatcttgta

SEQ ID NO: 331970 - DNA, 25 bp, Artificial
  probe
  misc_feature (1)..(25): SEQ ID NO: 2632; WAN024G52; Start 152; Stop 176
cttccaaagtggttgtcaaatcttg

SEQ ID NO: 331971 - DNA, 25 bp, Artificial
  probe
  misc_feature (1)..(25): SEQ ID NO: 2632; WAN024G52; Start 9; Stop 33
gtattgggacaaactcattccagaa

SEQ ID NO: 331972 - DNA, 25 bp, Artificial
  probe
  misc_feature (1)..(25): SEQ ID NO: 2632; WAN024G52; Start 257; Stop 281
caaagagggtttcaagaggtgctaa

SEQ ID NO: 331973 - DNA, 25 bp, Artificial
  probe
  misc_feature (1)..(25): SEQ ID NO: 2632; WAN024G52; Start 153; Stop 177
ttccaaagtggttgtcaaatcttgt

SEQ ID NO: 331974 - DNA, 25 bp, Artificial
  probe
  misc_feature (1)..(25): SEQ ID NO: 2632; WAN024G52; Start 52; Stop 76
tcttccagactaacctgtgaaccag

SEQ ID NO: 331975 - DNA, 25 bp, Artificial
  probe
  misc_feature (1)..(25): SEQ ID NO: 2632; WAN024G52; Start 3; Stop 27
ggtacggtattgggacaaactcatt

SEQ ID NO: 331976 - DNA, 25 bp, Artificial
  probe
  misc_feature (1)..(25): SEQ ID NO: 2632; WAN024G52; Start 5; Stop 29
tacggtattgggacaaactcattcc

SEQ ID NO: 331977 - DNA, 25 bp, Artificial
  probe
  misc_feature (1)..(25): SEQ ID NO: 2632; WAN024G52; Start 125; Stop 149
cttcggcttgtctttcctgttctac

SEQ ID NO: 331978 - DNA, 25 bp, Artificial
  probe
  misc_feature (1)..(25): SEQ ID NO: 2632; WAN024G52; Start 151; Stop 175
gcttccaaagtggttgtcaaatctt

SEQ ID NO: 331979 - DNA, 25 bp, Artificial
  probe
  misc_feature (1)..(25): SEQ ID NO: 2633; WAN024E2H; Start 193; Stop 217
ggtgttcgtattccttctatctgtt

SEQ ID NO: 331980 - DNA, 25 bp, Artificial
  probe
  misc_feature (1)..(25): SEQ ID NO: 2633; WAN024E2H; Start 191; Stop 215
ctggtgttcgtattccttctatctg

SEQ ID NO: 331981 - DNA, 25 bp, Artificial
  probe
  misc_feature (1)..(25): SEQ ID NO: 2633; WAN024E2H; Start 190; Stop 214
actggtgttcgtattccttctatct

SEQ ID NO: 331982 - DNA, 25 bp, Artificial
  probe
  misc_feature (1)..(25): SEQ ID NO: 2633; WAN024E2H; Start 189; Stop 213
aactggtgttcgtattccttctatc

SEQ ID NO: 331983 - DNA, 25 bp, Artificial
  probe
  misc_feature (1)..(25): SEQ ID NO: 2633; WAN024E2H; Start 192; Stop 216
tggtgttcgtattccttctatctgt

SEQ ID NO: 331984 - DNA, 25 bp, Artificial
  probe
  misc_feature (1)..(25): SEQ ID NO: 2633; WAN024E2H; Start 135; Stop 159
aagacttgactggagtaaggaagaa

SEQ ID NO: 331985 - DNA, 25 bp, Artificial
  probe
  misc_feature (1)..(25): SEQ ID NO: 2633; WAN024E2H; Start 136; Stop 160
agacttgactggagtaaggaagaac

SEQ ID NO: 331986 - DNA, 25 bp, Artificial
  probe
  misc_feature (1)..(25): SEQ ID NO: 2633; WAN024E2H; Start 327; Stop 351
tacgattcaattagctggttacgat

SEQ ID NO: 331987 - DNA, 25 bp, Artificial
  probe
  misc_feature (1)..(25): SEQ ID NO: 2633; WAN024E2H; Start 617; Stop 641
ctctccatctcaaggatacttatgc

SEQ ID NO: 331988 - DNA, 25 bp, Artificial
  probe
  misc_feature (1)..(25): SEQ ID NO: 2633; WAN024E2H; Start 616; Stop 640
gctctccatctcaaggatacttatg

SEQ ID NO: 331989 - DNA, 25 bp, Artificial
  probe
  misc_feature (1)..(25): SEQ ID NO: 2633; WAN024E2H; Start 330; Stop 354
gattcaattagctggttacgatgtt

SEQ ID NO: 331990 - DNA, 25 bp, Artificial
  probe
  misc_feature (1)..(25): SEQ ID NO: 2633; WAN024E2H; Start 326; Stop 350
gtacgattcaattagctggttacga

SEQ ID NO: 331991 - DNA, 25 bp, Artificial
  probe
  misc_feature (1)..(25): SEQ ID NO: 2633; WAN024E2H; Start 341; Stop 365
ctggttacgatgtttactatgagga

SEQ ID NO: 331992 - DNA, 25 bp, Artificial
  probe
  misc_feature (1)..(25): SEQ ID NO: 2633; WAN024E2H; Start 515; Stop 539
ttgactctcccttcctctttgtata

SEQ ID NO: 331993 - DNA, 25 bp, Artificial
  probe
  misc_feature (1)..(25): SEQ ID NO: 2633; WAN024E2H; Start 517; Stop 541
gactctcccttcctctttgtatatc

SEQ ID NO: 331994 - DNA, 25 bp, Artificial
  probe
  misc_feature (1)..(25): SEQ ID NO: 2633; WAN024E2H; Start 516; Stop 540
tgactctcccttcctctttgtatat

SEQ ID NO: 331995 - DNA, 25 bp, Artificial
  probe
  misc_feature (1)..(25): SEQ ID NO: 2633; WAN024E2H; Start 134; Stop 158
caagacttgactggagtaaggaaga

SEQ ID NO: 331996 - DNA, 25 bp, Artificial
  probe
  misc_feature (1)..(25): SEQ ID NO: 2633; WAN024E2H; Start 342; Stop 366
tggttacgatgtttactatgaggaa

SEQ ID NO: 331997 - DNA, 25 bp, Artificial
  probe
  misc_feature (1)..(25): SEQ ID NO: 2633; WAN024E2H; Start 329; Stop 353
cgattcaattagctggttacgatgt

SEQ ID NO: 331998 - DNA, 25 bp, Artificial
  probe
  misc_feature (1)..(25): SEQ ID NO: 2633; WAN024E2H; Start 328; Stop 352
acgattcaattagctggttacgatg

SEQ ID NO: 331999 - DNA, 25 bp, Artificial
  probe
  misc_feature (1)..(25): SEQ ID NO: 2633; WAN024E2H; Start 295; Stop 319
tgtatcgaattagctcaagacttgg

SEQ ID NO: 332000 - DNA, 25 bp, Artificial
  probe
  misc_feature (1)..(25): SEQ ID NO: 2633; WAN024E2H; Start 832; Stop 856
tatccactcattaagaaagcaggtt

SEQ ID NO: 332001 - DNA, 25 bp, Artificial
  probe
  misc_feature (1)..(25): SEQ ID NO: 2633; WAN024E2H; Start 831; Stop 855
ctatccactcattaagaaagcaggt

SEQ ID NO: 332002 - DNA, 25 bp, Artificial
  probe
  misc_feature (1)..(25): SEQ ID NO: 2633; WAN024E2H; Start 833; Stop 857
atccactcattaagaaagcaggttt

SEQ ID NO: 332003 - DNA, 25 bp, Artificial
  probe
  misc_feature (1)..(25): SEQ ID NO: 2633; WAN024E2H; Start 520; Stop 544
tctcccttcctctttgtatatccag

SEQ ID NO: 332004 - DNA, 25 bp, Artificial
  probe
  misc_feature (1)..(25): SEQ ID NO: 2633; WAN024E2H; Start 519; Stop 543
ctctcccttcctctttgtatatcca

SEQ ID NO: 332005 - DNA, 25 bp, Artificial
  probe
  misc_feature (1)..(25): SEQ ID NO: 2633; WAN024E2H; Start 518; Stop 542
actctcccttcctctttgtatatcc

SEQ ID NO: 332006 - DNA, 25 bp, Artificial
  probe
  misc_feature (1)..(25): SEQ ID NO: 2633; WAN024E2H; Start 514; Stop 538
attgactctcccttcctctttgtat

SEQ ID NO: 332007 - DNA, 25 bp, Artificial
  probe
  misc_feature (1)..(25): SEQ ID NO: 2633; WAN024E2H; Start 294; Stop 318
atgtatcgaattagctcaagacttg

SEQ ID NO: 332008 - DNA, 25 bp, Artificial
  probe
  misc_feature (1)..(25): SEQ ID NO: 2633; WAN024E2H; Start 130; Stop 154
ttagcaagacttgactggagtaagg

SEQ ID NO: 332009 - DNA, 25 bp, Artificial
  probe
  misc_feature (1)..(25): SEQ ID NO: 2633; WAN024E2H; Start 293; Stop 317
aatgtatcgaattagctcaagactt

SEQ ID NO: 332010 - DNA, 25 bp, Artificial
  probe
  misc_feature (1)..(25): SEQ ID NO: 2633; WAN024E2H; Start 194; Stop 218
gtgttcgtattccttctatctgttt

SEQ ID NO: 332011 - DNA, 25 bp, Artificial
  probe
  misc_feature (1)..(25): SEQ ID NO: 2633; WAN024E2H; Start 522; Stop 546
tcccttcctctttgtatatccagat

SEQ ID NO: 332012 - DNA, 25 bp, Artificial
  probe
  misc_feature (1)..(25): SEQ ID NO: 2634; WAN024CJ4; Start 134; Stop 158
ttcgtgagaataatcaacttcggaa

SEQ ID NO: 332013 - DNA, 25 bp, Artificial
  probe
  misc_feature (1)..(25): SEQ ID NO: 2634; WAN024CJ4; Start 295; Stop 319
atgagtgtaacagttcctagaatgc

SEQ ID NO: 332014 - DNA, 25 bp, Artificial
  probe
  misc_feature (1)..(25): SEQ ID NO: 2634; WAN024CJ4; Start 423; Stop 447
attactaagactggcagaagttgaa

SEQ ID NO: 332015 - DNA, 25 bp, Artificial
  probe
  misc_feature (1)..(25): SEQ ID NO: 2634; WAN024CJ4; Start 422; Stop 446
aattactaagactggcagaagttga

SEQ ID NO: 332016 - DNA, 25 bp, Artificial
  probe
  misc_feature (1)..(25): SEQ ID NO: 2634; WAN024CJ4; Start 294; Stop 318
catgagtgtaacagttcctagaatg

SEQ ID NO: 332017 - DNA, 25 bp, Artificial
  probe
  misc_feature (1)..(25): SEQ ID NO: 2634; WAN024CJ4; Start 132; Stop 156
gattcgtgagaataatcaacttcgg

SEQ ID NO: 332018 - DNA, 25 bp, Artificial
  probe
  misc_feature (1)..(25): SEQ ID NO: 2634; WAN024CJ4; Start 133; Stop 157
attcgtgagaataatcaacttcgga

SEQ ID NO: 332019 - DNA, 25 bp, Artificial
  probe
  misc_feature (1)..(25): SEQ ID NO: 2634; WAN024CJ4; Start 21; Stop 45
accaactcgtatggaattgaataac

SEQ ID NO: 332020 - DNA, 25 bp, Artificial
  probe
  misc_feature (1)..(25): SEQ ID NO: 2634; WAN024CJ4; Start 23; Stop 47
caactcgtatggaattgaataactt

SEQ ID NO: 332021 - DNA, 25 bp, Artificial
  probe
  misc_feature (1)..(25): SEQ ID NO: 2634; WAN024CJ4; Start 22; Stop 46
ccaactcgtatggaattgaataact

SEQ ID NO: 332022 - DNA, 25 bp, Artificial
  probe
  misc_feature (1)..(25): SEQ ID NO: 2634; WAN024CJ4; Start 109; Stop 133
ttgatgaggcgatttatttctttga

SEQ ID NO: 332023 - DNA, 25 bp, Artificial
  probe
  misc_feature (1)..(25): SEQ ID NO: 2634; WAN024CJ4; Start 100; Stop 124
agagatgaattgatgaggcgattta

SEQ ID NO: 332024 - DNA, 25 bp, Artificial
  probe
  misc_feature (1)..(25): SEQ ID NO: 2634; WAN024CJ4; Start 66; Stop 90
agctgaacgtggacataagttatta

SEQ ID NO: 332025 - DNA, 25 bp, Artificial
  probe
  misc_feature (1)..(25): SEQ ID NO: 2634; WAN024CJ4; Start 20; Stop 44
aaccaactcgtatggaattgaataa

SEQ ID NO: 332026 - DNA, 25 bp, Artificial
  probe
  misc_feature (1)..(25): SEQ ID NO: 2634; WAN024CJ4; Start 110; Stop 134
tgatgaggcgatttatttctttgat

SEQ ID NO: 332027 - DNA, 25 bp, Artificial
  probe
  misc_feature (1)..(25): SEQ ID NO: 2634; WAN024CJ4; Start 523; Stop 547
ccaaacttgtcggaaactattcatt

SEQ ID NO: 332028 - DNA, 25 bp, Artificial
  probe
  misc_feature (1)..(25): SEQ ID NO: 2634; WAN024CJ4; Start 67; Stop 91
gctgaacgtggacataagttattaa

SEQ ID NO: 332029 - DNA, 25 bp, Artificial
  probe
  misc_feature (1)..(25): SEQ ID NO: 2634; WAN024CJ4; Start 101; Stop 125
gagatgaattgatgaggcgatttat

SEQ ID NO: 332030 - DNA, 25 bp, Artificial
  probe
  misc_feature (1)..(25): SEQ ID NO: 2634; WAN024CJ4; Start 152; Stop 176
ttcggaaagaagtggaaagttatct

SEQ ID NO: 332031 - DNA, 25 bp, Artificial
  probe
  misc_feature (1)..(25): SEQ ID NO: 2634; WAN024CJ4; Start 99; Stop 123
aagagatgaattgatgaggcgattt

SEQ ID NO: 332032 - DNA, 25 bp, Artificial
  probe
  misc_feature (1)..(25): SEQ ID NO: 2634; WAN024CJ4; Start 98; Stop 122
aaagagatgaattgatgaggcgatt

SEQ ID NO: 332033 - DNA, 25 bp, Artificial
  probe
  misc_feature (1)..(25): SEQ ID NO: 2634; WAN024CJ4; Start 550; Stop 574
atagaattgaaactagaggaggcag

SEQ ID NO: 332034 - DNA, 25 bp, Artificial
  probe
  misc_feature (1)..(25): SEQ ID NO: 2634; WAN024CJ4; Start 153; Stop 177
tcggaaagaagtggaaagttatcta

SEQ ID NO: 332035 - DNA, 25 bp, Artificial
  probe
  misc_feature (1)..(25): SEQ ID NO: 2634; WAN024CJ4; Start 572; Stop 596
cagaaagagccaatttagttcgtat

SEQ ID NO: 332036 - DNA, 25 bp, Artificial
  probe
  misc_feature (1)..(25): SEQ ID NO: 2634; WAN024CJ4; Start 340; Stop 364
aatgagaacagtgaatacagctatt

SEQ ID NO: 332037 - DNA, 25 bp, Artificial
  probe
  misc_feature (1)..(25): SEQ ID NO: 2634; WAN024CJ4; Start 102; Stop 126
agatgaattgatgaggcgatttatt

SEQ ID NO: 332038 - DNA, 25 bp, Artificial
  probe
  misc_feature (1)..(25): SEQ ID NO: 2634; WAN024CJ4; Start 554; Stop 578
aattgaaactagaggaggcagaaag

SEQ ID NO: 332039 - DNA, 25 bp, Artificial
  probe
  misc_feature (1)..(25): SEQ ID NO: 2634; WAN024CJ4; Start 553; Stop 577
gaattgaaactagaggaggcagaaa

SEQ ID NO: 332040 - DNA, 25 bp, Artificial
  probe
  misc_feature (1)..(25): SEQ ID NO: 2634; WAN024CJ4; Start 551; Stop 575
tagaattgaaactagaggaggcaga

SEQ ID NO: 332041 - DNA, 25 bp, Artificial
  probe
  misc_feature (1)..(25): SEQ ID NO: 2634; WAN024CJ4; Start 108; Stop 132
attgatgaggcgatttatttctttg

SEQ ID NO: 332042 - DNA, 25 bp, Artificial
  probe
  misc_feature (1)..(25): SEQ ID NO: 2634; WAN024CJ4; Start 105; Stop 129
tgaattgatgaggcgatttatttct

SEQ ID NO: 332043 - DNA, 25 bp, Artificial
  probe
  misc_feature (1)..(25): SEQ ID NO: 2634; WAN024CJ4; Start 136; Stop 160
cgtgagaataatcaacttcggaaag

SEQ ID NO: 332044 - DNA, 25 bp, Artificial
  probe
  misc_feature (1)..(25): SEQ ID NO: 2634; WAN024CJ4; Start 135; Stop 159
tcgtgagaataatcaacttcggaaa

SEQ ID NO: 332045 - DNA, 25 bp, Artificial
  probe
  misc_feature (1)..(25): SEQ ID NO: 2635; WAN024E2M; Start 1458; Stop 1482
ggttaatcctatccttgaagcagaa

SEQ ID NO: 332046 - DNA, 25 bp, Artificial
  probe
  misc_feature (1)..(25): SEQ ID NO: 2635; WAN024E2M; Start 1179; Stop 1203
gctaacagacgatgatattgcctat

SEQ ID NO: 332047 - DNA, 25 bp, Artificial
  probe
  misc_feature (1)..(25): SEQ ID NO: 2635; WAN024E2M; Start 156; Stop 180
gcttcacatcattagtattccacga

SEQ ID NO: 332048 - DNA, 25 bp, Artificial
  probe
  misc_feature (1)..(25): SEQ ID NO: 2635; WAN024E2M; Start 1599; Stop 1623
tagtaagttccaagaagaggttcaa

SEQ ID NO: 332049 - DNA, 25 bp, Artificial
  probe
  misc_feature (1)..(25): SEQ ID NO: 2635; WAN024E2M; Start 1460; Stop 1484
ttaatcctatccttgaagcagaaga

SEQ ID NO: 332050 - DNA, 25 bp, Artificial
  probe
  misc_feature (1)..(25): SEQ ID NO: 2635; WAN024E2M; Start 1459; Stop 1483
gttaatcctatccttgaagcagaag

SEQ ID NO: 332051 - DNA, 25 bp, Artificial
  probe
  misc_feature (1)..(25): SEQ ID NO: 2635; WAN024E2M; Start 991; Stop 1015
atggagattgagaacaaggatgatt

SEQ ID NO: 332052 - DNA, 25 bp, Artificial
  probe
  misc_feature (1)..(25): SEQ ID NO: 2635; WAN024E2M; Start 990; Stop 1014
aatggagattgagaacaaggatgat

SEQ ID NO: 332053 - DNA, 25 bp, Artificial
  probe
  misc_feature (1)..(25): SEQ ID NO: 2635; WAN024E2M; Start 1461; Stop 1485
taatcctatccttgaagcagaagat

SEQ ID NO: 332054 - DNA, 25 bp, Artificial
  probe
  misc_feature (1)..(25): SEQ ID NO: 2635; WAN024E2M; Start 157; Stop 181
cttcacatcattagtattccacgaa

SEQ ID NO: 332055 - DNA, 25 bp, Artificial
  probe
  misc_feature (1)..(25): SEQ ID NO: 2635; WAN024E2M; Start 1574; Stop 1598
cttatattgtagacagcaagttggc

SEQ ID NO: 332056 - DNA, 25 bp, Artificial
  probe
  misc_feature (1)..(25): SEQ ID NO: 2635; WAN024E2M; Start 1180; Stop 1204
ctaacagacgatgatattgcctatt

SEQ ID NO: 332057 - DNA, 25 bp, Artificial
  probe
  misc_feature (1)..(25): SEQ ID NO: 2635; WAN024E2M; Start 989; Stop 1013
gaatggagattgagaacaaggatga

SEQ ID NO: 332058 - DNA, 25 bp, Artificial
  probe
  misc_feature (1)..(25): SEQ ID NO: 2635; WAN024E2M; Start 180; Stop 204
aattggtattcacttaacggaagag

SEQ ID NO: 332059 - DNA, 25 bp, Artificial
  probe
  misc_feature (1)..(25): SEQ ID NO: 2635; WAN024E2M; Start 181; Stop 205
attggtattcacttaacggaagagc

SEQ ID NO: 332060 - DNA, 25 bp, Artificial
  probe
  misc_feature (1)..(25): SEQ ID NO: 2635; WAN024E2M; Start 1598; Stop 1622
ctagtaagttccaagaagaggttca

SEQ ID NO: 332061 - DNA, 25 bp, Artificial
  probe
  misc_feature (1)..(25): SEQ ID NO: 2635; WAN024E2M; Start 185; Stop 209
gtattcacttaacggaagagcagag

SEQ ID NO: 332062 - DNA, 25 bp, Artificial
  probe
  misc_feature (1)..(25): SEQ ID NO: 2635; WAN024E2M; Start 186; Stop 210
tattcacttaacggaagagcagaga

SEQ ID NO: 332063 - DNA, 25 bp, Artificial
  probe
  misc_feature (1)..(25): SEQ ID NO: 2635; WAN024E2M; Start 1597; Stop 1621
gctagtaagttccaagaagaggttc

SEQ ID NO: 332064 - DNA, 25 bp, Artificial
  probe
  misc_feature (1)..(25): SEQ ID NO: 2635; WAN024E2M; Start 1573; Stop 1597
tcttatattgtagacagcaagttgg

SEQ ID NO: 332065 - DNA, 25 bp, Artificial
  probe
  misc_feature (1)..(25): SEQ ID NO: 2635; WAN024E2M; Start 480; Stop 504
aattcagtatcttcaatcgcttcta

SEQ ID NO: 332066 - DNA, 25 bp, Artificial
  probe
  misc_feature (1)..(25): SEQ ID NO: 2635; WAN024E2M; Start 481; Stop 505
attcagtatcttcaatcgcttctat

SEQ ID NO: 332067 - DNA, 25 bp, Artificial
  probe
  misc_feature (1)..(25): SEQ ID NO: 2635; WAN024E2M; Start 155; Stop 179
cgcttcacatcattagtattccacg

SEQ ID NO: 332068 - DNA, 25 bp, Artificial
  probe
  misc_feature (1)..(25): SEQ ID NO: 2635; WAN024E2M; Start 1464; Stop 1488
tcctatccttgaagcagaagatatt

SEQ ID NO: 332069 - DNA, 25 bp, Artificial
  probe
  misc_feature (1)..(25): SEQ ID NO: 2635; WAN024E2M; Start 1462; Stop 1486
aatcctatccttgaagcagaagata

SEQ ID NO: 332070 - DNA, 25 bp, Artificial
  probe
  misc_feature (1)..(25): SEQ ID NO: 2635; WAN024E2M; Start 988; Stop 1012
cgaatggagattgagaacaaggatg

SEQ ID NO: 332071 - DNA, 25 bp, Artificial
  probe
  misc_feature (1)..(25): SEQ ID NO: 2635; WAN024E2M; Start 1463; Stop 1487
atcctatccttgaagcagaagatat

SEQ ID NO: 332072 - DNA, 25 bp, Artificial
  probe
  misc_feature (1)..(25): SEQ ID NO: 2635; WAN024E2M; Start 875; Stop 899
ctgttctcctcctctcctatcgtaa

SEQ ID NO: 332073 - DNA, 25 bp, Artificial
  probe
  misc_feature (1)..(25): SEQ ID NO: 2635; WAN024E2M; Start 4; Stop 28
gtactggataaggcaagttgtgatt

SEQ ID NO: 332074 - DNA, 25 bp, Artificial
  probe
  misc_feature (1)..(25): SEQ ID NO: 2635; WAN024E2M; Start 1596; Stop 1620
ggctagtaagttccaagaagaggtt

SEQ ID NO: 332075 - DNA, 25 bp, Artificial
  probe
  misc_feature (1)..(25): SEQ ID NO: 2635; WAN024E2M; Start 182; Stop 206
ttggtattcacttaacggaagagca

SEQ ID NO: 332076 - DNA, 25 bp, Artificial
  probe
  misc_feature (1)..(25): SEQ ID NO: 2635; WAN024E2M; Start 187; Stop 211
attcacttaacggaagagcagagag

SEQ ID NO: 332077 - DNA, 25 bp, Artificial
  probe
  misc_feature (1)..(25): SEQ ID NO: 2635; WAN024E2M; Start 184; Stop 208
ggtattcacttaacggaagagcaga

SEQ ID NO: 332078 - DNA, 25 bp, Artificial
  probe
  misc_feature (1)..(25): SEQ ID NO: 2636; WAN024FDD; Start 335; Stop 359
atctggagatgttgcgtcataataa

SEQ ID NO: 332079 - DNA, 25 bp, Artificial
  probe
  misc_feature (1)..(25): SEQ ID NO: 2636; WAN024FDD; Start 334; Stop 358
tatctggagatgttgcgtcataata

SEQ ID NO: 332080 - DNA, 25 bp, Artificial
  probe
  misc_feature (1)..(25): SEQ ID NO: 2636; WAN024FDD; Start 333; Stop 357
ctatctggagatgttgcgtcataat

SEQ ID NO: 332081 - DNA, 25 bp, Artificial
  probe
  misc_feature (1)..(25): SEQ ID NO: 2636; WAN024FDD; Start 854; Stop 878
caactattgaacaaccattggaaga

SEQ ID NO: 332082 - DNA, 25 bp, Artificial
  probe
  misc_feature (1)..(25): SEQ ID NO: 2636; WAN024FDD; Start 321; Stop 345
tagagagcaagactatctggagatg

SEQ ID NO: 332083 - DNA, 25 bp, Artificial
  probe
  misc_feature (1)..(25): SEQ ID NO: 2636; WAN024FDD; Start 319; Stop 343
aatagagagcaagactatctggaga

SEQ ID NO: 332084 - DNA, 25 bp, Artificial
  probe
  misc_feature (1)..(25): SEQ ID NO: 2636; WAN024FDD; Start 855; Stop 879
aactattgaacaaccattggaagaa

SEQ ID NO: 332085 - DNA, 25 bp, Artificial
  probe
  misc_feature (1)..(25): SEQ ID NO: 2636; WAN024FDD; Start 320; Stop 344
atagagagcaagactatctggagat

SEQ ID NO: 332086 - DNA, 25 bp, Artificial
  probe
  misc_feature (1)..(25): SEQ ID NO: 2636; WAN024FDD; Start 332; Stop 356
actatctggagatgttgcgtcataa

SEQ ID NO: 332087 - DNA, 25 bp, Artificial
  probe
  misc_feature (1)..(25): SEQ ID NO: 2636; WAN024FDD; Start 323; Stop 347
gagagcaagactatctggagatgtt

SEQ ID NO: 332088 - DNA, 25 bp, Artificial
  probe
  misc_feature (1)..(25): SEQ ID NO: 2636; WAN024FDD; Start 324; Stop 348
agagcaagactatctggagatgttg

SEQ ID NO: 332089 - DNA, 25 bp, Artificial
  probe
  misc_feature (1)..(25): SEQ ID NO: 2636; WAN024FDD; Start 322; Stop 346
agagagcaagactatctggagatgt

SEQ ID NO: 332090 - DNA, 25 bp, Artificial
  probe
  misc_feature (1)..(25): SEQ ID NO: 2636; WAN024FDD; Start 353; Stop 377
ataataaagttgatggagtggttgc

SEQ ID NO: 332091 - DNA, 25 bp, Artificial
  probe
  misc_feature (1)..(25): SEQ ID NO: 2636; WAN024FDD; Start 207; Stop 231
aatcattgtaccaagtatctggcat

SEQ ID NO: 332092 - DNA, 25 bp, Artificial
  probe
  misc_feature (1)..(25): SEQ ID NO: 2636; WAN024FDD; Start 646; Stop 670
ttggatgagacagttactgactatt

SEQ ID NO: 332093 - DNA, 25 bp, Artificial
  probe
  misc_feature (1)..(25): SEQ ID NO: 2636; WAN024FDD; Start 208; Stop 232
atcattgtaccaagtatctggcatc

SEQ ID NO: 332094 - DNA, 25 bp, Artificial
  probe
  misc_feature (1)..(25): SEQ ID NO: 2636; WAN024FDD; Start 337; Stop 361
ctggagatgttgcgtcataataaag

SEQ ID NO: 332095 - DNA, 25 bp, Artificial
  probe
  misc_feature (1)..(25): SEQ ID NO: 2636; WAN024FDD; Start 339; Stop 363
ggagatgttgcgtcataataaagtt

SEQ ID NO: 332096 - DNA, 25 bp, Artificial
  probe
  misc_feature (1)..(25): SEQ ID NO: 2636; WAN024FDD; Start 336; Stop 360
tctggagatgttgcgtcataataaa

SEQ ID NO: 332097 - DNA, 25 bp, Artificial
  probe
  misc_feature (1)..(25): SEQ ID NO: 2636; WAN024FDD; Start 338; Stop 362
tggagatgttgcgtcataataaagt

SEQ ID NO: 332098 - DNA, 25 bp, Artificial
  probe
  misc_feature (1)..(25): SEQ ID NO: 2636; WAN024FDD; Start 331; Stop 355
gactatctggagatgttgcgtcata

SEQ ID NO: 332099 - DNA, 25 bp, Artificial
  probe
  misc_feature (1)..(25): SEQ ID NO: 2636; WAN024FDD; Start 206; Stop 230
caatcattgtaccaagtatctggca

SEQ ID NO: 332100 - DNA, 25 bp, Artificial
  probe
  misc_feature (1)..(25): SEQ ID NO: 2636; WAN024FDD; Start 354; Stop 378
taataaagttgatggagtggttgcc

SEQ ID NO: 332101 - DNA, 25 bp, Artificial
  probe
  misc_feature (1)..(25): SEQ ID NO: 2636; WAN024FDD; Start 519; Stop 543
tagtaaaggatgtcagcatttagcc

SEQ ID NO: 332102 - DNA, 25 bp, Artificial
  probe
  misc_feature (1)..(25): SEQ ID NO: 2636; WAN024FDD; Start 340; Stop 364
gagatgttgcgtcataataaagttg

SEQ ID NO: 332103 - DNA, 25 bp, Artificial
  probe
  misc_feature (1)..(25): SEQ ID NO: 2636; WAN024FDD; Start 651; Stop 675
tgagacagttactgactattatgga

SEQ ID NO: 332104 - DNA, 25 bp, Artificial
  probe
  misc_feature (1)..(25): SEQ ID NO: 2636; WAN024FDD; Start 647; Stop 671
tggatgagacagttactgactatta

SEQ ID NO: 332105 - DNA, 25 bp, Artificial
  probe
  misc_feature (1)..(25): SEQ ID NO: 2636; WAN024FDD; Start 345; Stop 369
gttgcgtcataataaagttgatgga

SEQ ID NO: 332106 - DNA, 25 bp, Artificial
  probe
  misc_feature (1)..(25): SEQ ID NO: 2636; WAN024FDD; Start 349; Stop 373
cgtcataataaagttgatggagtgg

SEQ ID NO: 332107 - DNA, 25 bp, Artificial
  probe
  misc_feature (1)..(25): SEQ ID NO: 2636; WAN024FDD; Start 348; Stop 372
gcgtcataataaagttgatggagtg

SEQ ID NO: 332108 - DNA, 25 bp, Artificial
  probe
  misc_feature (1)..(25): SEQ ID NO: 2636; WAN024FDD; Start 346; Stop 370
ttgcgtcataataaagttgatggag

SEQ ID NO: 332109 - DNA, 25 bp, Artificial
  probe
  misc_feature (1)..(25): SEQ ID NO: 2636; WAN024FDD; Start 344; Stop 368
tgttgcgtcataataaagttgatgg

SEQ ID NO: 332110 - DNA, 25 bp, Artificial
  probe
  misc_feature (1)..(25): SEQ ID NO: 2636; WAN024FDD; Start 518; Stop 542
ttagtaaaggatgtcagcatttagc

SEQ ID NO: 332111 - DNA, 25 bp, Artificial
  probe
  misc_feature (1)..(25): SEQ ID NO: 2637; WAN024FIY; Start 236; Stop 260
aacgattgattacacttggaggtag

SEQ ID NO: 332112 - DNA, 25 bp, Artificial
  probe
  misc_feature (1)..(25): SEQ ID NO: 2637; WAN024FIY; Start 235; Stop 259
gaacgattgattacacttggaggta

SEQ ID NO: 332113 - DNA, 25 bp, Artificial
  probe
  misc_feature (1)..(25): SEQ ID NO: 2637; WAN024FIY; Start 237; Stop 261
acgattgattacacttggaggtagc

SEQ ID NO: 332114 - DNA, 25 bp, Artificial
  probe
  misc_feature (1)..(25): SEQ ID NO: 2637; WAN024FIY; Start 190; Stop 214
gatgagtacatggatgctcttgatg

SEQ ID NO: 332115 - DNA, 25 bp, Artificial
  probe
  misc_feature (1)..(25): SEQ ID NO: 2637; WAN024FIY; Start 324; Stop 348
ccgtaatgttgaagaaagtttggaa

SEQ ID NO: 332116 - DNA, 25 bp, Artificial
  probe
  misc_feature (1)..(25): SEQ ID NO: 2637; WAN024FIY; Start 322; Stop 346
taccgtaatgttgaagaaagtttgg

SEQ ID NO: 332117 - DNA, 25 bp, Artificial
  probe
  misc_feature (1)..(25): SEQ ID NO: 2637; WAN024FIY; Start 186; Stop 210
aatggatgagtacatggatgctctt

SEQ ID NO: 332118 - DNA, 25 bp, Artificial
  probe
  misc_feature (1)..(25): SEQ ID NO: 2637; WAN024FIY; Start 323; Stop 347
accgtaatgttgaagaaagtttgga

SEQ ID NO: 332119 - DNA, 25 bp, Artificial
  probe
  misc_feature (1)..(25): SEQ ID NO: 2637; WAN024FIY; Start 196; Stop 220
tacatggatgctcttgatggtcatt

SEQ ID NO: 332120 - DNA, 25 bp, Artificial
  probe
  misc_feature (1)..(25): SEQ ID NO: 2637; WAN024FIY; Start 326; Stop 350
gtaatgttgaagaaagtttggaacg

SEQ ID NO: 332121 - DNA, 25 bp, Artificial
  probe
  misc_feature (1)..(25): SEQ ID NO: 2637; WAN024FIY; Start 325; Stop 349
cgtaatgttgaagaaagtttggaac

SEQ ID NO: 332122 - DNA, 25 bp, Artificial
  probe
  misc_feature (1)..(25): SEQ ID NO: 2637; WAN024FIY; Start 318; Stop 342
tgaataccgtaatgttgaagaaagt

SEQ ID NO: 332123 - DNA, 25 bp, Artificial
  probe
  misc_feature (1)..(25): SEQ ID NO: 2637; WAN024FIY; Start 418; Stop 442
ggcgatgatgttacaaacgatattt

SEQ ID NO: 332124 - DNA, 25 bp, Artificial
  probe
  misc_feature (1)..(25): SEQ ID NO: 2637; WAN024FIY; Start 234; Stop 258
cgaacgattgattacacttggaggt

SEQ ID NO: 332125 - DNA, 25 bp, Artificial
  probe
  misc_feature (1)..(25): SEQ ID NO: 2637; WAN024FIY; Start 74; Stop 98
aaacaaaggaagtattgaaccaagc

SEQ ID NO: 332126 - DNA, 25 bp, Artificial
  probe
  misc_feature (1)..(25): SEQ ID NO: 2637; WAN024FIY; Start 202; Stop 226
gatgctcttgatggtcatttagatg

SEQ ID NO: 332127 - DNA, 25 bp, Artificial
  probe
  misc_feature (1)..(25): SEQ ID NO: 2637; WAN024FIY; Start 79; Stop 103
aaggaagtattgaaccaagctgttg

SEQ ID NO: 332128 - DNA, 25 bp, Artificial
  probe
  misc_feature (1)..(25): SEQ ID NO: 2637; WAN024FIY; Start 417; Stop 441
aggcgatgatgttacaaacgatatt

SEQ ID NO: 332129 - DNA, 25 bp, Artificial
  probe
  misc_feature (1)..(25): SEQ ID NO: 2637; WAN024FIY; Start 416; Stop 440
aaggcgatgatgttacaaacgatat

SEQ ID NO: 332130 - DNA, 25 bp, Artificial
  probe
  misc_feature (1)..(25): SEQ ID NO: 2637; WAN024FIY; Start 238; Stop 262
cgattgattacacttggaggtagcc

SEQ ID NO: 332131 - DNA, 25 bp, Artificial
  probe
  misc_feature (1)..(25): SEQ ID NO: 2637; WAN024FIY; Start 189; Stop 213
ggatgagtacatggatgctcttgat

SEQ ID NO: 332132 - DNA, 25 bp, Artificial
  probe
  misc_feature (1)..(25): SEQ ID NO: 2637; WAN024FIY; Start 201; Stop 225
ggatgctcttgatggtcatttagat

SEQ ID NO: 332133 - DNA, 25 bp, Artificial
  probe
  misc_feature (1)..(25): SEQ ID NO: 2637; WAN024FIY; Start 199; Stop 223
atggatgctcttgatggtcatttag

SEQ ID NO: 332134 - DNA, 25 bp, Artificial
  probe
  misc_feature (1)..(25): SEQ ID NO: 2637; WAN024FIY; Start 217; Stop 241
catttagatgaaatcagcgaacgat

SEQ ID NO: 332135 - DNA, 25 bp, Artificial
  probe
  misc_feature (1)..(25): SEQ ID NO: 2637; WAN024FIY; Start 191; Stop 215
atgagtacatggatgctcttgatgg

SEQ ID NO: 332136 - DNA, 25 bp, Artificial
  probe
  misc_feature (1)..(25): SEQ ID NO: 2637; WAN024FIY; Start 187; Stop 211
atggatgagtacatggatgctcttg

SEQ ID NO: 332137 - DNA, 25 bp, Artificial
  probe
  misc_feature (1)..(25): SEQ ID NO: 2637; WAN024FIY; Start 321; Stop 345
ataccgtaatgttgaagaaagtttg

SEQ ID NO: 332138 - DNA, 25 bp, Artificial
  probe
  misc_feature (1)..(25): SEQ ID NO: 2637; WAN024FIY; Start 232; Stop 256
agcgaacgattgattacacttggag

SEQ ID NO: 332139 - DNA, 25 bp, Artificial
  probe
  misc_feature (1)..(25): SEQ ID NO: 2637; WAN024FIY; Start 415; Stop 439
gaaggcgatgatgttacaaacgata

SEQ ID NO: 332140 - DNA, 25 bp, Artificial
  probe
  misc_feature (1)..(25): SEQ ID NO: 2637; WAN024FIY; Start 195; Stop 219
gtacatggatgctcttgatggtcat

SEQ ID NO: 332141 - DNA, 25 bp, Artificial
  probe
  misc_feature (1)..(25): SEQ ID NO: 2637; WAN024FIY; Start 319; Stop 343
gaataccgtaatgttgaagaaagtt

SEQ ID NO: 332142 - DNA, 25 bp, Artificial
  probe
  misc_feature (1)..(25): SEQ ID NO: 2637; WAN024FIY; Start 200; Stop 224
tggatgctcttgatggtcatttaga

SEQ ID NO: 332143 - DNA, 25 bp, Artificial
  probe
  misc_feature (1)..(25): SEQ ID NO: 2637; WAN024FIY; Start 231; Stop 255
cagcgaacgattgattacacttgga

SEQ ID NO: 332144 - DNA, 25 bp, Artificial
  probe
  misc_feature (1)..(25): SEQ ID NO: 2638; WAN024D6Z; Start 563; Stop 587
caactatctatgtaactcacgacca

SEQ ID NO: 332145 - DNA, 25 bp, Artificial
  probe
  misc_feature (1)..(25): SEQ ID NO: 2638; WAN024D6Z; Start 564; Stop 588
aactatctatgtaactcacgaccaa

SEQ ID NO: 332146 - DNA, 25 bp, Artificial
  probe
  misc_feature (1)..(25): SEQ ID NO: 2638; WAN024D6Z; Start 562; Stop 586
acaactatctatgtaactcacgacc

SEQ ID NO: 332147 - DNA, 25 bp, Artificial
  probe
  misc_feature (1)..(25): SEQ ID NO: 2638; WAN024D6Z; Start 46; Stop 70
agcgaacactattcagttgaagatt

SEQ ID NO: 332148 - DNA, 25 bp, Artificial
  probe
  misc_feature (1)..(25): SEQ ID NO: 2638; WAN024D6Z; Start 612; Stop 636
ccgtatcgttattatgtcagctact

SEQ ID NO: 332149 - DNA, 25 bp, Artificial
  probe
  misc_feature (1)..(25): SEQ ID NO: 2638; WAN024D6Z; Start 550; Stop 574
cgtatcggagctacaactatctatg

SEQ ID NO: 332150 - DNA, 25 bp, Artificial
  probe
  misc_feature (1)..(25): SEQ ID NO: 2638; WAN024D6Z; Start 549; Stop 573
tcgtatcggagctacaactatctat

SEQ ID NO: 332151 - DNA, 25 bp, Artificial
  probe
  misc_feature (1)..(25): SEQ ID NO: 2638; WAN024D6Z; Start 611; Stop 635
accgtatcgttattatgtcagctac

SEQ ID NO: 332152 - DNA, 25 bp, Artificial
  probe
  misc_feature (1)..(25): SEQ ID NO: 2638; WAN024D6Z; Start 608; Stop 632
cagaccgtatcgttattatgtcagc

SEQ ID NO: 332153 - DNA, 25 bp, Artificial
  probe
  misc_feature (1)..(25): SEQ ID NO: 2638; WAN024D6Z; Start 607; Stop 631
gcagaccgtatcgttattatgtcag

SEQ ID NO: 332154 - DNA, 25 bp, Artificial
  probe
  misc_feature (1)..(25): SEQ ID NO: 2638; WAN024D6Z; Start 45; Stop 69
cagcgaacactattcagttgaagat

SEQ ID NO: 332155 - DNA, 25 bp, Artificial
  probe
  misc_feature (1)..(25): SEQ ID NO: 2638; WAN024D6Z; Start 548; Stop 572
gtcgtatcggagctacaactatcta

SEQ ID NO: 332156 - DNA, 25 bp, Artificial
  probe
  misc_feature (1)..(25): SEQ ID NO: 2638; WAN024D6Z; Start 43; Stop 67
aacagcgaacactattcagttgaag

SEQ ID NO: 332157 - DNA, 25 bp, Artificial
  probe
  misc_feature (1)..(25): SEQ ID NO: 2638; WAN024D6Z; Start 312; Stop 336
gcgtaaatacagcaaagaagacatt

SEQ ID NO: 332158 - DNA, 25 bp, Artificial
  probe
  misc_feature (1)..(25): SEQ ID NO: 2638; WAN024D6Z; Start 126; Stop 150
tggtaaatcaactacactccgtatg

SEQ ID NO: 332159 - DNA, 25 bp, Artificial
  probe
  misc_feature (1)..(25): SEQ ID NO: 2638; WAN024D6Z; Start 565; Stop 589
actatctatgtaactcacgaccaaa

SEQ ID NO: 332160 - DNA, 25 bp, Artificial
  probe
  misc_feature (1)..(25): SEQ ID NO: 2638; WAN024D6Z; Start 604; Stop 628
cttgcagaccgtatcgttattatgt

SEQ ID NO: 332161 - DNA, 25 bp, Artificial
  probe
  misc_feature (1)..(25): SEQ ID NO: 2638; WAN024D6Z; Start 603; Stop 627
acttgcagaccgtatcgttattatg

SEQ ID NO: 332162 - DNA, 25 bp, Artificial
  probe
  misc_feature (1)..(25): SEQ ID NO: 2638; WAN024D6Z; Start 602; Stop 626
cacttgcagaccgtatcgttattat

SEQ ID NO: 332163 - DNA, 25 bp, Artificial
  probe
  misc_feature (1)..(25): SEQ ID NO: 2638; WAN024D6Z; Start 566; Stop 590
ctatctatgtaactcacgaccaaac

SEQ ID NO: 332164 - DNA, 25 bp, Artificial
  probe
  misc_feature (1)..(25): SEQ ID NO: 2638; WAN024D6Z; Start 320; Stop 344
acagcaaagaagacattaacaaacg

SEQ ID NO: 332165 - DNA, 25 bp, Artificial
  probe
  misc_feature (1)..(25): SEQ ID NO: 2638; WAN024D6Z; Start 464; Stop 488
aagtattcttgatggacgaaccttt

SEQ ID NO: 332166 - DNA, 25 bp, Artificial
  probe
  misc_feature (1)..(25): SEQ ID NO: 2638; WAN024D6Z; Start 463; Stop 487
aaagtattcttgatggacgaacctt

SEQ ID NO: 332167 - DNA, 25 bp, Artificial
  probe
  misc_feature (1)..(25): SEQ ID NO: 2638; WAN024D6Z; Start 299; Stop 323
tcggtttgaaattgcgtaaatacag

SEQ ID NO: 332168 - DNA, 25 bp, Artificial
  probe
  misc_feature (1)..(25): SEQ ID NO: 2638; WAN024D6Z; Start 133; Stop 157
tcaactacactccgtatgattgctg

SEQ ID NO: 332169 - DNA, 25 bp, Artificial
  probe
  misc_feature (1)..(25): SEQ ID NO: 2638; WAN024D6Z; Start 36; Stop 60
atatccaaacagcgaacactattca

SEQ ID NO: 332170 - DNA, 25 bp, Artificial
  probe
  misc_feature (1)..(25): SEQ ID NO: 2638; WAN024D6Z; Start 551; Stop 575
gtatcggagctacaactatctatgt

SEQ ID NO: 332171 - DNA, 25 bp, Artificial
  probe
  misc_feature (1)..(25): SEQ ID NO: 2638; WAN024D6Z; Start 35; Stop 59
aatatccaaacagcgaacactattc

SEQ ID NO: 332172 - DNA, 25 bp, Artificial
  probe
  misc_feature (1)..(25): SEQ ID NO: 2638; WAN024D6Z; Start 610; Stop 634
gaccgtatcgttattatgtcagcta

SEQ ID NO: 332173 - DNA, 25 bp, Artificial
  probe
  misc_feature (1)..(25): SEQ ID NO: 2638; WAN024D6Z; Start 462; Stop 486
gaaagtattcttgatggacgaacct

SEQ ID NO: 332174 - DNA, 25 bp, Artificial
  probe
  misc_feature (1)..(25): SEQ ID NO: 2638; WAN024D6Z; Start 298; Stop 322
ttcggtttgaaattgcgtaaataca

SEQ ID NO: 332175 - DNA, 25 bp, Artificial
  probe
  misc_feature (1)..(25): SEQ ID NO: 2638; WAN024D6Z; Start 34; Stop 58
aaatatccaaacagcgaacactatt

SEQ ID NO: 332176 - DNA, 25 bp, Artificial
  probe
  misc_feature (1)..(25): SEQ ID NO: 2638; WAN024D6Z; Start 465; Stop 489
agtattcttgatggacgaacctttg

SEQ ID NO: 332177 - DNA, 25 bp, Artificial
  probe
  misc_feature (1)..(25): SEQ ID NO: 2639; WAN024C7F; Start 578; Stop 602
ctggtctaccgattgtatatgctat

SEQ ID NO: 332178 - DNA, 25 bp, Artificial
  probe
  misc_feature (1)..(25): SEQ ID NO: 2639; WAN024C7F; Start 579; Stop 603
tggtctaccgattgtatatgctatt

SEQ ID NO: 332179 - DNA, 25 bp, Artificial
  probe
  misc_feature (1)..(25): SEQ ID NO: 2639; WAN024C7F; Start 983; Stop 1007
ctattgaactcttcggaacacaagt

SEQ ID NO: 332180 - DNA, 25 bp, Artificial
  probe
  misc_feature (1)..(25): SEQ ID NO: 2639; WAN024C7F; Start 634; Stop 658
ttgattcaggcttatcgtgagattg

SEQ ID NO: 332181 - DNA, 25 bp, Artificial
  probe
  misc_feature (1)..(25): SEQ ID NO: 2639; WAN024C7F; Start 633; Stop 657
gttgattcaggcttatcgtgagatt

SEQ ID NO: 332182 - DNA, 25 bp, Artificial
  probe
  misc_feature (1)..(25): SEQ ID NO: 2639; WAN024C7F; Start 577; Stop 601
gctggtctaccgattgtatatgcta

SEQ ID NO: 332183 - DNA, 25 bp, Artificial
  probe
  misc_feature (1)..(25): SEQ ID NO: 2639; WAN024C7F; Start 587; Stop 611
cgattgtatatgctattattggtgg

SEQ ID NO: 332184 - DNA, 25 bp, Artificial
  probe
  misc_feature (1)..(25): SEQ ID NO: 2639; WAN024C7F; Start 586; Stop 610
ccgattgtatatgctattattggtg

SEQ ID NO: 332185 - DNA, 25 bp, Artificial
  probe
  misc_feature (1)..(25): SEQ ID NO: 2639; WAN024C7F; Start 632; Stop 656
agttgattcaggcttatcgtgagat

SEQ ID NO: 332186 - DNA, 25 bp, Artificial
  probe
  misc_feature (1)..(25): SEQ ID NO: 2639; WAN024C7F; Start 982; Stop 1006
gctattgaactcttcggaacacaag

SEQ ID NO: 332187 - DNA, 25 bp, Artificial
  probe
  misc_feature (1)..(25): SEQ ID NO: 2639; WAN024C7F; Start 637; Stop 661
attcaggcttatcgtgagattggaa

SEQ ID NO: 332188 - DNA, 25 bp, Artificial
  probe
  misc_feature (1)..(25): SEQ ID NO: 2639; WAN024C7F; Start 631; Stop 655
aagttgattcaggcttatcgtgaga

SEQ ID NO: 332189 - DNA, 25 bp, Artificial
  probe
  misc_feature (1)..(25): SEQ ID NO: 2639; WAN024C7F; Start 580; Stop 604
ggtctaccgattgtatatgctatta

SEQ ID NO: 332190 - DNA, 25 bp, Artificial
  probe
  misc_feature (1)..(25): SEQ ID NO: 2639; WAN024C7F; Start 353; Stop 377
aatctttccctctgtttggttatga

SEQ ID NO: 332191 - DNA, 25 bp, Artificial
  probe
  misc_feature (1)..(25): SEQ ID NO: 2639; WAN024C7F; Start 636; Stop 660
gattcaggcttatcgtgagattgga

SEQ ID NO: 332192 - DNA, 25 bp, Artificial
  probe
  misc_feature (1)..(25): SEQ ID NO: 2639; WAN024C7F; Start 368; Stop 392
ttggttatgacttgaaagactacga

SEQ ID NO: 332193 - DNA, 25 bp, Artificial
  probe
  misc_feature (1)..(25): SEQ ID NO: 2639; WAN024C7F; Start 361; Stop 385
cctctgtttggttatgacttgaaag

SEQ ID NO: 332194 - DNA, 25 bp, Artificial
  probe
  misc_feature (1)..(25): SEQ ID NO: 2639; WAN024C7F; Start 370; Stop 394
ggttatgacttgaaagactacgact

SEQ ID NO: 332195 - DNA, 25 bp, Artificial
  probe
  misc_feature (1)..(25): SEQ ID NO: 2639; WAN024C7F; Start 904; Stop 928
atgatagaggatttaggattggacc

SEQ ID NO: 332196 - DNA, 25 bp, Artificial
  probe
  misc_feature (1)..(25): SEQ ID NO: 2639; WAN024C7F; Start 748; Stop 772
gattatttccatccgactaagcaag

SEQ ID NO: 332197 - DNA, 25 bp, Artificial
  probe
  misc_feature (1)..(25): SEQ ID NO: 2639; WAN024C7F; Start 747; Stop 771
agattatttccatccgactaagcaa

SEQ ID NO: 332198 - DNA, 25 bp, Artificial
  probe
  misc_feature (1)..(25): SEQ ID NO: 2639; WAN024C7F; Start 746; Stop 770
aagattatttccatccgactaagca

SEQ ID NO: 332199 - DNA, 25 bp, Artificial
  probe
  misc_feature (1)..(25): SEQ ID NO: 2639; WAN024C7F; Start 574; Stop 598
caggctggtctaccgattgtatatg

SEQ ID NO: 332200 - DNA, 25 bp, Artificial
  probe
  misc_feature (1)..(25): SEQ ID NO: 2639; WAN024C7F; Start 573; Stop 597
tcaggctggtctaccgattgtatat

SEQ ID NO: 332201 - DNA, 25 bp, Artificial
  probe
  misc_feature (1)..(25): SEQ ID NO: 2639; WAN024C7F; Start 354; Stop 378
atctttccctctgtttggttatgac

SEQ ID NO: 332202 - DNA, 25 bp, Artificial
  probe
  misc_feature (1)..(25): SEQ ID NO: 2639; WAN024C7F; Start 369; Stop 393
tggttatgacttgaaagactacgac

SEQ ID NO: 332203 - DNA, 25 bp, Artificial
  probe
  misc_feature (1)..(25): SEQ ID NO: 2639; WAN024C7F; Start 364; Stop 388
ctgtttggttatgacttgaaagact

SEQ ID NO: 332204 - DNA, 25 bp, Artificial
  probe
  misc_feature (1)..(25): SEQ ID NO: 2639; WAN024C7F; Start 371; Stop 395
gttatgacttgaaagactacgactc

SEQ ID NO: 332205 - DNA, 25 bp, Artificial
  probe
  misc_feature (1)..(25): SEQ ID NO: 2639; WAN024C7F; Start 367; Stop 391
tttggttatgacttgaaagactacg

SEQ ID NO: 332206 - DNA, 25 bp, Artificial
  probe
  misc_feature (1)..(25): SEQ ID NO: 2639; WAN024C7F; Start 356; Stop 380
ctttccctctgtttggttatgactt

SEQ ID NO: 332207 - DNA, 25 bp, Artificial
  probe
  misc_feature (1)..(25): SEQ ID NO: 2639; WAN024C7F; Start 352; Stop 376
gaatctttccctctgtttggttatg

SEQ ID NO: 332208 - DNA, 25 bp, Artificial
  probe
  misc_feature (1)..(25): SEQ ID NO: 2639; WAN024C7F; Start 745; Stop 769
aaagattatttccatccgactaagc

SEQ ID NO: 332209 - DNA, 25 bp, Artificial
  probe
  misc_feature (1)..(25): SEQ ID NO: 2639; WAN024C7F; Start 638; Stop 662
ttcaggcttatcgtgagattggaag

SEQ ID NO: 332210 - DNA, 25 bp, Artificial
  probe
  misc_feature (1)..(25): SEQ ID NO: 2640; WAN024FQX; Start 68; Stop 92
tcaatgccacaacaattaggataga

SEQ ID NO: 332211 - DNA, 25 bp, Artificial
  probe
  misc_feature (1)..(25): SEQ ID NO: 2640; WAN024FQX; Start 69; Stop 93
caatgccacaacaattaggatagat

SEQ ID NO: 332212 - DNA, 25 bp, Artificial
  probe
  misc_feature (1)..(25): SEQ ID NO: 2640; WAN024FQX; Start 66; Stop 90
catcaatgccacaacaattaggata

SEQ ID NO: 332213 - DNA, 25 bp, Artificial
  probe
  misc_feature (1)..(25): SEQ ID NO: 2640; WAN024FQX; Start 67; Stop 91
atcaatgccacaacaattaggatag

SEQ ID NO: 332214 - DNA, 25 bp, Artificial
  probe
  misc_feature (1)..(25): SEQ ID NO: 2640; WAN024FQX; Start 65; Stop 89
acatcaatgccacaacaattaggat

SEQ ID NO: 332215 - DNA, 25 bp, Artificial
  probe
  misc_feature (1)..(25): SEQ ID NO: 2640; WAN024FQX; Start 71; Stop 95
atgccacaacaattaggatagataa

SEQ ID NO: 332216 - DNA, 25 bp, Artificial
  probe
  misc_feature (1)..(25): SEQ ID NO: 2640; WAN024FQX; Start 70; Stop 94
aatgccacaacaattaggatagata

SEQ ID NO: 332217 - DNA, 25 bp, Artificial
  probe
  misc_feature (1)..(25): SEQ ID NO: 2640; WAN024FQX; Start 64; Stop 88
cacatcaatgccacaacaattagga

SEQ ID NO: 332218 - DNA, 25 bp, Artificial
  probe
  misc_feature (1)..(25): SEQ ID NO: 2640; WAN024FQX; Start 72; Stop 96
tgccacaacaattaggatagataat

SEQ ID NO: 332219 - DNA, 25 bp, Artificial
  probe
  misc_feature (1)..(25): SEQ ID NO: 2640; WAN024FQX; Start 73; Stop 97
gccacaacaattaggatagataatt

SEQ ID NO: 332220 - DNA, 25 bp, Artificial
  probe
  misc_feature (1)..(25): SEQ ID NO: 2640; WAN024FQX; Start 29; Stop 53
gtgatggtaacaaccgctacaacaa

SEQ ID NO: 332221 - DNA, 25 bp, Artificial
  probe
  misc_feature (1)..(25): SEQ ID NO: 2640; WAN024FQX; Start 31; Stop 55
gatggtaacaaccgctacaacaaag

SEQ ID NO: 332222 - DNA, 25 bp, Artificial
  probe
  misc_feature (1)..(25): SEQ ID NO: 2640; WAN024FQX; Start 61; Stop 85
atgcacatcaatgccacaacaatta

SEQ ID NO: 332223 - DNA, 25 bp, Artificial
  probe
  misc_feature (1)..(25): SEQ ID NO: 2640; WAN024FQX; Start 60; Stop 84
tatgcacatcaatgccacaacaatt

SEQ ID NO: 332224 - DNA, 25 bp, Artificial
  probe
  misc_feature (1)..(25): SEQ ID NO: 2640; WAN024FQX; Start 59; Stop 83
ttatgcacatcaatgccacaacaat

SEQ ID NO: 332225 - DNA, 25 bp, Artificial
  probe
  misc_feature (1)..(25): SEQ ID NO: 2640; WAN024FQX; Start 63; Stop 87
gcacatcaatgccacaacaattagg

SEQ ID NO: 332226 - DNA, 25 bp, Artificial
  probe
  misc_feature (1)..(25): SEQ ID NO: 2640; WAN024FQX; Start 30; Stop 54
tgatggtaacaaccgctacaacaaa

SEQ ID NO: 332227 - DNA, 25 bp, Artificial
  probe
  misc_feature (1)..(25): SEQ ID NO: 2640; WAN024FQX; Start 62; Stop 86
tgcacatcaatgccacaacaattag

SEQ ID NO: 332228 - DNA, 25 bp, Artificial
  probe
  misc_feature (1)..(25): SEQ ID NO: 2640; WAN024FQX; Start 47; Stop 71
acaacaaaggttttatgcacatcaa

SEQ ID NO: 332229 - DNA, 25 bp, Artificial
  probe
  misc_feature (1)..(25): SEQ ID NO: 2640; WAN024FQX; Start 46; Stop 70
tacaacaaaggttttatgcacatca

SEQ ID NO: 332230 - DNA, 25 bp, Artificial
  probe
  misc_feature (1)..(25): SEQ ID NO: 2640; WAN024FQX; Start 49; Stop 73
aacaaaggttttatgcacatcaatg

SEQ ID NO: 332231 - DNA, 25 bp, Artificial
  probe
  misc_feature (1)..(25): SEQ ID NO: 2640; WAN024FQX; Start 48; Stop 72
caacaaaggttttatgcacatcaat

SEQ ID NO: 332232 - DNA, 25 bp, Artificial
  probe
  misc_feature (1)..(25): SEQ ID NO: 2640; WAN024FQX; Start 45; Stop 69
ctacaacaaaggttttatgcacatc

SEQ ID NO: 332233 - DNA, 25 bp, Artificial
  probe
  misc_feature (1)..(25): SEQ ID NO: 2640; WAN024FQX; Start 44; Stop 68
gctacaacaaaggttttatgcacat

SEQ ID NO: 332234 - DNA, 25 bp, Artificial
  probe
  misc_feature (1)..(25): SEQ ID NO: 2640; WAN024FQX; Start 32; Stop 56
atggtaacaaccgctacaacaaagg

SEQ ID NO: 332235 - DNA, 25 bp, Artificial
  probe
  misc_feature (1)..(25): SEQ ID NO: 2640; WAN024FQX; Start 58; Stop 82
tttatgcacatcaatgccacaacaa

SEQ ID NO: 332236 - DNA, 25 bp, Artificial
  probe
  misc_feature (1)..(25): SEQ ID NO: 2640; WAN024FQX; Start 43; Stop 67
cgctacaacaaaggttttatgcaca

SEQ ID NO: 332237 - DNA, 25 bp, Artificial
  probe
  misc_feature (1)..(25): SEQ ID NO: 2640; WAN024FQX; Start 35; Stop 59
gtaacaaccgctacaacaaaggttt

SEQ ID NO: 332238 - DNA, 25 bp, Artificial
  probe
  misc_feature (1)..(25): SEQ ID NO: 2640; WAN024FQX; Start 18; Stop 42
cttgcttgtcggtgatggtaacaac

SEQ ID NO: 332239 - DNA, 25 bp, Artificial
  probe
  misc_feature (1)..(25): SEQ ID NO: 2640; WAN024FQX; Start 33; Stop 57
tggtaacaaccgctacaacaaaggt

SEQ ID NO: 332240 - DNA, 25 bp, Artificial
  probe
  misc_feature (1)..(25): SEQ ID NO: 2640; WAN024FQX; Start 1; Stop 25
atggtagcttgtgagtccttgcttg

SEQ ID NO: 332241 - DNA, 25 bp, Artificial
  probe
  misc_feature (1)..(25): SEQ ID NO: 2640; WAN024FQX; Start 50; Stop 74
acaaaggttttatgcacatcaatgc

SEQ ID NO: 332242 - DNA, 25 bp, Artificial
  probe
  misc_feature (1)..(25): SEQ ID NO: 2640; WAN024FQX; Start 42; Stop 66
ccgctacaacaaaggttttatgcac

SEQ ID NO: 332243 - DNA, 25 bp, Artificial
  probe
  misc_feature (1)..(25): SEQ ID NO: 2641; WAN024CJO; Start 153; Stop 177
tgtatctgatgatgcctttgactta

SEQ ID NO: 332244 - DNA, 25 bp, Artificial
  probe
  misc_feature (1)..(25): SEQ ID NO: 2641; WAN024CJO; Start 152; Stop 176
atgtatctgatgatgcctttgactt

SEQ ID NO: 332245 - DNA, 25 bp, Artificial
  probe
  misc_feature (1)..(25): SEQ ID NO: 2641; WAN024CJO; Start 151; Stop 175
tatgtatctgatgatgcctttgact

SEQ ID NO: 332246 - DNA, 25 bp, Artificial
  probe
  misc_feature (1)..(25): SEQ ID NO: 2641; WAN024CJO; Start 144; Stop 168
ggtttcttatgtatctgatgatgcc

SEQ ID NO: 332247 - DNA, 25 bp, Artificial
  probe
  misc_feature (1)..(25): SEQ ID NO: 2641; WAN024CJO; Start 78; Stop 102
taaatacgaagcgaaattgttacca

SEQ ID NO: 332248 - DNA, 25 bp, Artificial
  probe
  misc_feature (1)..(25): SEQ ID NO: 2641; WAN024CJO; Start 73; Stop 97
ggtgttaaatacgaagcgaaattgt

SEQ ID NO: 332249 - DNA, 25 bp, Artificial
  probe
  misc_feature (1)..(25): SEQ ID NO: 2641; WAN024CJO; Start 72; Stop 96
tggtgttaaatacgaagcgaaattg

SEQ ID NO: 332250 - DNA, 25 bp, Artificial
  probe
  misc_feature (1)..(25): SEQ ID NO: 2641; WAN024CJO; Start 71; Stop 95
gtggtgttaaatacgaagcgaaatt

SEQ ID NO: 332251 - DNA, 25 bp, Artificial
  probe
  misc_feature (1)..(25): SEQ ID NO: 2641; WAN024CJO; Start 150; Stop 174
ttatgtatctgatgatgcctttgac

SEQ ID NO: 332252 - DNA, 25 bp, Artificial
  probe
  misc_feature (1)..(25): SEQ ID NO: 2641; WAN024CJO; Start 74; Stop 98
gtgttaaatacgaagcgaaattgtt

SEQ ID NO: 332253 - DNA, 25 bp, Artificial
  probe
  misc_feature (1)..(25): SEQ ID NO: 2641; WAN024CJO; Start 190; Stop 214
atatttgacgaatacgacgatgttt

SEQ ID NO: 332254 - DNA, 25 bp, Artificial
  probe
  misc_feature (1)..(25): SEQ ID NO: 2641; WAN024CJO; Start 157; Stop 181
tctgatgatgcctttgacttaaatt

SEQ ID NO: 332255 - DNA, 25 bp, Artificial
  probe
  misc_feature (1)..(25): SEQ ID NO: 2641; WAN024CJO; Start 154; Stop 178
gtatctgatgatgcctttgacttaa

SEQ ID NO: 332256 - DNA, 25 bp, Artificial
  probe
  misc_feature (1)..(25): SEQ ID NO: 2641; WAN024CJO; Start 149; Stop 173
cttatgtatctgatgatgcctttga

SEQ ID NO: 332257 - DNA, 25 bp, Artificial
  probe
  misc_feature (1)..(25): SEQ ID NO: 2641; WAN024CJO; Start 148; Stop 172
tcttatgtatctgatgatgcctttg

SEQ ID NO: 332258 - DNA, 25 bp, Artificial
  probe
  misc_feature (1)..(25): SEQ ID NO: 2641; WAN024CJO; Start 145; Stop 169
gtttcttatgtatctgatgatgcct

SEQ ID NO: 332259 - DNA, 25 bp, Artificial
  probe
  misc_feature (1)..(25): SEQ ID NO: 2641; WAN024CJO; Start 143; Stop 167
aggtttcttatgtatctgatgatgc

SEQ ID NO: 332260 - DNA, 25 bp, Artificial
  probe
  misc_feature (1)..(25): SEQ ID NO: 2641; WAN024CJO; Start 156; Stop 180
atctgatgatgcctttgacttaaat

SEQ ID NO: 332261 - DNA, 25 bp, Artificial
  probe
  misc_feature (1)..(25): SEQ ID NO: 2641; WAN024CJO; Start 79; Stop 103
aaatacgaagcgaaattgttaccaa

SEQ ID NO: 332262 - DNA, 25 bp, Artificial
  probe
  misc_feature (1)..(25): SEQ ID NO: 2641; WAN024CJO; Start 70; Stop 94
agtggtgttaaatacgaagcgaaat

SEQ ID NO: 332263 - DNA, 25 bp, Artificial
  probe
  misc_feature (1)..(25): SEQ ID NO: 2641; WAN024CJO; Start 80; Stop 104
aatacgaagcgaaattgttaccaag

SEQ ID NO: 332264 - DNA, 25 bp, Artificial
  probe
  misc_feature (1)..(25): SEQ ID NO: 2641; WAN024CJO; Start 64; Stop 88
attccaagtggtgttaaatacgaag

SEQ ID NO: 332265 - DNA, 25 bp, Artificial
  probe
  misc_feature (1)..(25): SEQ ID NO: 2641; WAN024CJO; Start 69; Stop 93
aagtggtgttaaatacgaagcgaaa

SEQ ID NO: 332266 - DNA, 25 bp, Artificial
  probe
  misc_feature (1)..(25): SEQ ID NO: 2641; WAN024CJO; Start 77; Stop 101
ttaaatacgaagcgaaattgttacc

SEQ ID NO: 332267 - DNA, 25 bp, Artificial
  probe
  misc_feature (1)..(25): SEQ ID NO: 2641; WAN024CJO; Start 95; Stop 119
tgttaccaagtggtgagattatctt

SEQ ID NO: 332268 - DNA, 25 bp, Artificial
  probe
  misc_feature (1)..(25): SEQ ID NO: 2641; WAN024CJO; Start 94; Stop 118
ttgttaccaagtggtgagattatct

SEQ ID NO: 332269 - DNA, 25 bp, Artificial
  probe
  misc_feature (1)..(25): SEQ ID NO: 2641; WAN024CJO; Start 155; Stop 179
tatctgatgatgcctttgacttaaa

SEQ ID NO: 332270 - DNA, 25 bp, Artificial
  probe
  misc_feature (1)..(25): SEQ ID NO: 2641; WAN024CJO; Start 81; Stop 105
atacgaagcgaaattgttaccaagt

SEQ ID NO: 332271 - DNA, 25 bp, Artificial
  probe
  misc_feature (1)..(25): SEQ ID NO: 2641; WAN024CJO; Start 147; Stop 171
ttcttatgtatctgatgatgccttt

SEQ ID NO: 332272 - DNA, 25 bp, Artificial
  probe
  misc_feature (1)..(25): SEQ ID NO: 2641; WAN024CJO; Start 146; Stop 170
tttcttatgtatctgatgatgcctt

SEQ ID NO: 332273 - DNA, 25 bp, Artificial
  probe
  misc_feature (1)..(25): SEQ ID NO: 2641; WAN024CJO; Start 104; Stop 128
gtggtgagattatctttactcctga

SEQ ID NO: 332274 - DNA, 25 bp, Artificial
  probe
  misc_feature (1)..(25): SEQ ID NO: 2641; WAN024CJO; Start 103; Stop 127
agtggtgagattatctttactcctg

SEQ ID NO: 332275 - DNA, 25 bp, Artificial
  probe
  misc_feature (1)..(25): SEQ ID NO: 2641; WAN024CJO; Start 140; Stop 164
agcaggtttcttatgtatctgatga

SEQ ID NO: 332276 - DNA, 25 bp, Artificial
  probe
  misc_feature (1)..(25): SEQ ID NO: 2642; WAN024DBH; Start 387; Stop 411
tcataatcacatcctaatcaacgct

SEQ ID NO: 332277 - DNA, 25 bp, Artificial
  probe
  misc_feature (1)..(25): SEQ ID NO: 2642; WAN024DBH; Start 386; Stop 410
ttcataatcacatcctaatcaacgc

SEQ ID NO: 332278 - DNA, 25 bp, Artificial
  probe
  misc_feature (1)..(25): SEQ ID NO: 2642; WAN024DBH; Start 388; Stop 412
cataatcacatcctaatcaacgcta

SEQ ID NO: 332279 - DNA, 25 bp, Artificial
  probe
  misc_feature (1)..(25): SEQ ID NO: 2642; WAN024DBH; Start 391; Stop 415
aatcacatcctaatcaacgctattg

SEQ ID NO: 332280 - DNA, 25 bp, Artificial
  probe
  misc_feature (1)..(25): SEQ ID NO: 2642; WAN024DBH; Start 272; Stop 296
ctgaagataatctgacacctgaaga

SEQ ID NO: 332281 - DNA, 25 bp, Artificial
  probe
  misc_feature (1)..(25): SEQ ID NO: 2642; WAN024DBH; Start 273; Stop 297
tgaagataatctgacacctgaagaa

SEQ ID NO: 332282 - DNA, 25 bp, Artificial
  probe
  misc_feature (1)..(25): SEQ ID NO: 2642; WAN024DBH; Start 390; Stop 414
taatcacatcctaatcaacgctatt

SEQ ID NO: 332283 - DNA, 25 bp, Artificial
  probe
  misc_feature (1)..(25): SEQ ID NO: 2642; WAN024DBH; Start 271; Stop 295
cctgaagataatctgacacctgaag

SEQ ID NO: 332284 - DNA, 25 bp, Artificial
  probe
  misc_feature (1)..(25): SEQ ID NO: 2642; WAN024DBH; Start 267; Stop 291
ttctcctgaagataatctgacacct

SEQ ID NO: 332285 - DNA, 25 bp, Artificial
  probe
  misc_feature (1)..(25): SEQ ID NO: 2642; WAN024DBH; Start 270; Stop 294
tcctgaagataatctgacacctgaa

SEQ ID NO: 332286 - DNA, 25 bp, Artificial
  probe
  misc_feature (1)..(25): SEQ ID NO: 2642; WAN024DBH; Start 389; Stop 413
ataatcacatcctaatcaacgctat

SEQ ID NO: 332287 - DNA, 25 bp, Artificial
  probe
  misc_feature (1)..(25): SEQ ID NO: 2642; WAN024DBH; Start 439; Stop 463
atatggaactatgccttggaacgaa

SEQ ID NO: 332288 - DNA, 25 bp, Artificial
  probe
  misc_feature (1)..(25): SEQ ID NO: 2642; WAN024DBH; Start 385; Stop 409
gttcataatcacatcctaatcaacg

SEQ ID NO: 332289 - DNA, 25 bp, Artificial
  probe
  misc_feature (1)..(25): SEQ ID NO: 2642; WAN024DBH; Start 269; Stop 293
ctcctgaagataatctgacacctga

SEQ ID NO: 332290 - DNA, 25 bp, Artificial
  probe
  misc_feature (1)..(25): SEQ ID NO: 2642; WAN024DBH; Start 268; Stop 292
tctcctgaagataatctgacacctg

SEQ ID NO: 332291 - DNA, 25 bp, Artificial
  probe
  misc_feature (1)..(25): SEQ ID NO: 2642; WAN024DBH; Start 353; Stop 377
ttatcgtagcaactcacacagacaa

SEQ ID NO: 332292 - DNA, 25 bp, Artificial
  probe
  misc_feature (1)..(25): SEQ ID NO: 2642; WAN024DBH; Start 178; Stop 202
actaataacgacaagttgtacgagt

SEQ ID NO: 332293 - DNA, 25 bp, Artificial
  probe
  misc_feature (1)..(25): SEQ ID NO: 2642; WAN024DBH; Start 179; Stop 203
ctaataacgacaagttgtacgagtc

SEQ ID NO: 332294 - DNA, 25 bp, Artificial
  probe
  misc_feature (1)..(25): SEQ ID NO: 2642; WAN024DBH; Start 1064; Stop 1088
tccaagaagaacgagataaggataa

SEQ ID NO: 332295 - DNA, 25 bp, Artificial
  probe
  misc_feature (1)..(25): SEQ ID NO: 2642; WAN024DBH; Start 1063; Stop 1087
ttccaagaagaacgagataaggata

SEQ ID NO: 332296 - DNA, 25 bp, Artificial
  probe
  misc_feature (1)..(25): SEQ ID NO: 2642; WAN024DBH; Start 180; Stop 204
taataacgacaagttgtacgagtcc

SEQ ID NO: 332297 - DNA, 25 bp, Artificial
  probe
  misc_feature (1)..(25): SEQ ID NO: 2642; WAN024DBH; Start 177; Stop 201
tactaataacgacaagttgtacgag

SEQ ID NO: 332298 - DNA, 25 bp, Artificial
  probe
  misc_feature (1)..(25): SEQ ID NO: 2642; WAN024DBH; Start 467; Stop 491
tccgtatgatttcagaccgtatttc

SEQ ID NO: 332299 - DNA, 25 bp, Artificial
  probe
  misc_feature (1)..(25): SEQ ID NO: 2642; WAN024DBH; Start 466; Stop 490
ctccgtatgatttcagaccgtattt

SEQ ID NO: 332300 - DNA, 25 bp, Artificial
  probe
  misc_feature (1)..(25): SEQ ID NO: 2642; WAN024DBH; Start 1058; Stop 1082
atgctttccaagaagaacgagataa

SEQ ID NO: 332301 - DNA, 25 bp, Artificial
  probe
  misc_feature (1)..(25): SEQ ID NO: 2642; WAN024DBH; Start 1156; Stop 1180
aatgagataccgttcgtgaatttga

SEQ ID NO: 332302 - DNA, 25 bp, Artificial
  probe
  misc_feature (1)..(25): SEQ ID NO: 2642; WAN024DBH; Start 312; Stop 336
ttatgagaccatgatggaattgaca

SEQ ID NO: 332303 - DNA, 25 bp, Artificial
  probe
  misc_feature (1)..(25): SEQ ID NO: 2642; WAN024DBH; Start 311; Stop 335
gttatgagaccatgatggaattgac

SEQ ID NO: 332304 - DNA, 25 bp, Artificial
  probe
  misc_feature (1)..(25): SEQ ID NO: 2642; WAN024DBH; Start 176; Stop 200
ttactaataacgacaagttgtacga

SEQ ID NO: 332305 - DNA, 25 bp, Artificial
  probe
  misc_feature (1)..(25): SEQ ID NO: 2642; WAN024DBH; Start 789; Stop 813
gcaagagattgaaagtcgtttagaa

SEQ ID NO: 332306 - DNA, 25 bp, Artificial
  probe
  misc_feature (1)..(25): SEQ ID NO: 2642; WAN024DBH; Start 787; Stop 811
aagcaagagattgaaagtcgtttag

SEQ ID NO: 332307 - DNA, 25 bp, Artificial
  probe
  misc_feature (1)..(25): SEQ ID NO: 2642; WAN024DBH; Start 785; Stop 809
ctaagcaagagattgaaagtcgttt

SEQ ID NO: 332308 - DNA, 25 bp, Artificial
  probe
  misc_feature (1)..(25): SEQ ID NO: 2642; WAN024DBH; Start 313; Stop 337
tatgagaccatgatggaattgacag

SEQ ID NO: 332309 - DNA, 25 bp, Artificial
  probe
  misc_feature (1)..(25): SEQ ID NO: 2643; WAN024FTK; Start 566; Stop 590
ttatgaatgatggcttgatgacagg

SEQ ID NO: 332310 - DNA, 25 bp, Artificial
  probe
  misc_feature (1)..(25): SEQ ID NO: 2643; WAN024FTK; Start 398; Stop 422
agattcgtcagactatatcagaagc

SEQ ID NO: 332311 - DNA, 25 bp, Artificial
  probe
  misc_feature (1)..(25): SEQ ID NO: 2643; WAN024FTK; Start 399; Stop 423
gattcgtcagactatatcagaagcc

SEQ ID NO: 332312 - DNA, 25 bp, Artificial
  probe
  misc_feature (1)..(25): SEQ ID NO: 2643; WAN024FTK; Start 400; Stop 424
attcgtcagactatatcagaagcct

SEQ ID NO: 332313 - DNA, 25 bp, Artificial
  probe
  misc_feature (1)..(25): SEQ ID NO: 2643; WAN024FTK; Start 401; Stop 425
ttcgtcagactatatcagaagcctt

SEQ ID NO: 332314 - DNA, 25 bp, Artificial
  probe
  misc_feature (1)..(25): SEQ ID NO: 2643; WAN024FTK; Start 396; Stop 420
tcagattcgtcagactatatcagaa

SEQ ID NO: 332315 - DNA, 25 bp, Artificial
  probe
  misc_feature (1)..(25): SEQ ID NO: 2643; WAN024FTK; Start 395; Stop 419
atcagattcgtcagactatatcaga

SEQ ID NO: 332316 - DNA, 25 bp, Artificial
  probe
  misc_feature (1)..(25): SEQ ID NO: 2643; WAN024FTK; Start 1143; Stop 1167
caaggtgattagtatgaaggttagt

SEQ ID NO: 332317 - DNA, 25 bp, Artificial
  probe
  misc_feature (1)..(25): SEQ ID NO: 2643; WAN024FTK; Start 397; Stop 421
cagattcgtcagactatatcagaag

SEQ ID NO: 332318 - DNA, 25 bp, Artificial
  probe
  misc_feature (1)..(25): SEQ ID NO: 2643; WAN024FTK; Start 70; Stop 94
ctagaagccagtgatcttgagaatg

SEQ ID NO: 332319 - DNA, 25 bp, Artificial
  probe
  misc_feature (1)..(25): SEQ ID NO: 2643; WAN024FTK; Start 862; Stop 886
acctacgatgtgattgtcctagatc

SEQ ID NO: 332320 - DNA, 25 bp, Artificial
  probe
  misc_feature (1)..(25): SEQ ID NO: 2643; WAN024FTK; Start 68; Stop 92
tactagaagccagtgatcttgagaa

SEQ ID NO: 332321 - DNA, 25 bp, Artificial
  probe
  misc_feature (1)..(25): SEQ ID NO: 2643; WAN024FTK; Start 67; Stop 91
ttactagaagccagtgatcttgaga

SEQ ID NO: 332322 - DNA, 25 bp, Artificial
  probe
  misc_feature (1)..(25): SEQ ID NO: 2643; WAN024FTK; Start 1140; Stop 1164
cctcaaggtgattagtatgaaggtt

SEQ ID NO: 332323 - DNA, 25 bp, Artificial
  probe
  misc_feature (1)..(25): SEQ ID NO: 2643; WAN024FTK; Start 71; Stop 95
tagaagccagtgatcttgagaatgt

SEQ ID NO: 332324 - DNA, 25 bp, Artificial
  probe
  misc_feature (1)..(25): SEQ ID NO: 2643; WAN024FTK; Start 69; Stop 93
actagaagccagtgatcttgagaat

SEQ ID NO: 332325 - DNA, 25 bp, Artificial
  probe
  misc_feature (1)..(25): SEQ ID NO: 2643; WAN024FTK; Start 863; Stop 887
cctacgatgtgattgtcctagatcc

SEQ ID NO: 332326 - DNA, 25 bp, Artificial
  probe
  misc_feature (1)..(25): SEQ ID NO: 2643; WAN024FTK; Start 861; Stop 885
gacctacgatgtgattgtcctagat

SEQ ID NO: 332327 - DNA, 25 bp, Artificial
  probe
  misc_feature (1)..(25): SEQ ID NO: 2643; WAN024FTK; Start 1142; Stop 1166
tcaaggtgattagtatgaaggttag

SEQ ID NO: 332328 - DNA, 25 bp, Artificial
  probe
  misc_feature (1)..(25): SEQ ID NO: 2643; WAN024FTK; Start 1141; Stop 1165
ctcaaggtgattagtatgaaggtta

SEQ ID NO: 332329 - DNA, 25 bp, Artificial
  probe
  misc_feature (1)..(25): SEQ ID NO: 2643; WAN024FTK; Start 858; Stop 882
cttgacctacgatgtgattgtccta

SEQ ID NO: 332330 - DNA, 25 bp, Artificial
  probe
  misc_feature (1)..(25): SEQ ID NO: 2643; WAN024FTK; Start 565; Stop 589
tttatgaatgatggcttgatgacag

SEQ ID NO: 332331 - DNA, 25 bp, Artificial
  probe
  misc_feature (1)..(25): SEQ ID NO: 2643; WAN024FTK; Start 564; Stop 588
ctttatgaatgatggcttgatgaca

SEQ ID NO: 332332 - DNA, 25 bp, Artificial
  probe
  misc_feature (1)..(25): SEQ ID NO: 2643; WAN024FTK; Start 946; Stop 970
ttgatttcccagagtcttgagattt

SEQ ID NO: 332333 - DNA, 25 bp, Artificial
  probe
  misc_feature (1)..(25): SEQ ID NO: 2643; WAN024FTK; Start 546; Stop 570
tggtgtcctgtatcaagtctttatg

SEQ ID NO: 332334 - DNA, 25 bp, Artificial
  probe
  misc_feature (1)..(25): SEQ ID NO: 2643; WAN024FTK; Start 543; Stop 567
aaatggtgtcctgtatcaagtcttt

SEQ ID NO: 332335 - DNA, 25 bp, Artificial
  probe
  misc_feature (1)..(25): SEQ ID NO: 2643; WAN024FTK; Start 563; Stop 587
tctttatgaatgatggcttgatgac

SEQ ID NO: 332336 - DNA, 25 bp, Artificial
  probe
  misc_feature (1)..(25): SEQ ID NO: 2643; WAN024FTK; Start 562; Stop 586
gtctttatgaatgatggcttgatga

SEQ ID NO: 332337 - DNA, 25 bp, Artificial
  probe
  misc_feature (1)..(25): SEQ ID NO: 2643; WAN024FTK; Start 561; Stop 585
agtctttatgaatgatggcttgatg

SEQ ID NO: 332338 - DNA, 25 bp, Artificial
  probe
  misc_feature (1)..(25): SEQ ID NO: 2643; WAN024FTK; Start 544; Stop 568
aatggtgtcctgtatcaagtcttta

SEQ ID NO: 332339 - DNA, 25 bp, Artificial
  probe
  misc_feature (1)..(25): SEQ ID NO: 2643; WAN024FTK; Start 545; Stop 569
atggtgtcctgtatcaagtctttat

SEQ ID NO: 332340 - DNA, 25 bp, Artificial
  probe
  misc_feature (1)..(25): SEQ ID NO: 2643; WAN024FTK; Start 945; Stop 969
gttgatttcccagagtcttgagatt

SEQ ID NO: 332341 - DNA, 25 bp, Artificial
  probe
  misc_feature (1)..(25): SEQ ID NO: 2643; WAN024FTK; Start 864; Stop 888
ctacgatgtgattgtcctagatccg

SEQ ID NO: 332342 - DNA, 25 bp, Artificial
  probe
  misc_feature (1)..(25): SEQ ID NO: 2644; WAN024DFD; Start 70; Stop 94
gcttgtatgacgatagaggagttag

SEQ ID NO: 332343 - DNA, 25 bp, Artificial
  probe
  misc_feature (1)..(25): SEQ ID NO: 2644; WAN024DFD; Start 76; Stop 100
atgacgatagaggagttagaagagg

SEQ ID NO: 332344 - DNA, 25 bp, Artificial
  probe
  misc_feature (1)..(25): SEQ ID NO: 2644; WAN024DFD; Start 80; Stop 104
cgatagaggagttagaagaggtcaa

SEQ ID NO: 332345 - DNA, 25 bp, Artificial
  probe
  misc_feature (1)..(25): SEQ ID NO: 2644; WAN024DFD; Start 73; Stop 97
tgtatgacgatagaggagttagaag

SEQ ID NO: 332346 - DNA, 25 bp, Artificial
  probe
  misc_feature (1)..(25): SEQ ID NO: 2644; WAN024DFD; Start 71; Stop 95
cttgtatgacgatagaggagttaga

SEQ ID NO: 332347 - DNA, 25 bp, Artificial
  probe
  misc_feature (1)..(25): SEQ ID NO: 2644; WAN024DFD; Start 74; Stop 98
gtatgacgatagaggagttagaaga

SEQ ID NO: 332348 - DNA, 25 bp, Artificial
  probe
  misc_feature (1)..(25): SEQ ID NO: 2644; WAN024DFD; Start 72; Stop 96
ttgtatgacgatagaggagttagaa

SEQ ID NO: 332349 - DNA, 25 bp, Artificial
  probe
  misc_feature (1)..(25): SEQ ID NO: 2644; WAN024DFD; Start 69; Stop 93
ggcttgtatgacgatagaggagtta

SEQ ID NO: 332350 - DNA, 25 bp, Artificial
  probe
  misc_feature (1)..(25): SEQ ID NO: 2644; WAN024DFD; Start 75; Stop 99
tatgacgatagaggagttagaagag

SEQ ID NO: 332351 - DNA, 25 bp, Artificial
  probe
  misc_feature (1)..(25): SEQ ID NO: 2644; WAN024DFD; Start 79; Stop 103
acgatagaggagttagaagaggtca

SEQ ID NO: 332352 - DNA, 25 bp, Artificial
  probe
  misc_feature (1)..(25): SEQ ID NO: 2644; WAN024DFD; Start 77; Stop 101
tgacgatagaggagttagaagaggt

SEQ ID NO: 332353 - DNA, 25 bp, Artificial
  probe
  misc_feature (1)..(25): SEQ ID NO: 2644; WAN024DFD; Start 647; Stop 671
gtggaattggtggagaatacatcaa

SEQ ID NO: 332354 - DNA, 25 bp, Artificial
  probe
  misc_feature (1)..(25): SEQ ID NO: 2644; WAN024DFD; Start 644; Stop 668
ttggtggaattggtggagaatacat

SEQ ID NO: 332355 - DNA, 25 bp, Artificial
  probe
  misc_feature (1)..(25): SEQ ID NO: 2644; WAN024DFD; Start 188; Stop 212
ttccacttggttccatcaactctat

SEQ ID NO: 332356 - DNA, 25 bp, Artificial
  probe
  misc_feature (1)..(25): SEQ ID NO: 2644; WAN024DFD; Start 78; Stop 102
gacgatagaggagttagaagaggtc

SEQ ID NO: 332357 - DNA, 25 bp, Artificial
  probe
  misc_feature (1)..(25): SEQ ID NO: 2644; WAN024DFD; Start 646; Stop 670
ggtggaattggtggagaatacatca

SEQ ID NO: 332358 - DNA, 25 bp, Artificial
  probe
  misc_feature (1)..(25): SEQ ID NO: 2644; WAN024DFD; Start 645; Stop 669
tggtggaattggtggagaatacatc

SEQ ID NO: 332359 - DNA, 25 bp, Artificial
  probe
  misc_feature (1)..(25): SEQ ID NO: 2644; WAN024DFD; Start 189; Stop 213
tccacttggttccatcaactctatg

SEQ ID NO: 332360 - DNA, 25 bp, Artificial
  probe
  misc_feature (1)..(25): SEQ ID NO: 2644; WAN024DFD; Start 378; Stop 402
gctaaatctttcctgtccaaatgtt

SEQ ID NO: 332361 - DNA, 25 bp, Artificial
  probe
  misc_feature (1)..(25): SEQ ID NO: 2644; WAN024DFD; Start 380; Stop 404
taaatctttcctgtccaaatgttcc

SEQ ID NO: 332362 - DNA, 25 bp, Artificial
  probe
  misc_feature (1)..(25): SEQ ID NO: 2644; WAN024DFD; Start 187; Stop 211
gttccacttggttccatcaactcta

SEQ ID NO: 332363 - DNA, 25 bp, Artificial
  probe
  misc_feature (1)..(25): SEQ ID NO: 2644; WAN024DFD; Start 381; Stop 405
aaatctttcctgtccaaatgttcca

SEQ ID NO: 332364 - DNA, 25 bp, Artificial
  probe
  misc_feature (1)..(25): SEQ ID NO: 2644; WAN024DFD; Start 81; Stop 105
gatagaggagttagaagaggtcaaa

SEQ ID NO: 332365 - DNA, 25 bp, Artificial
  probe
  misc_feature (1)..(25): SEQ ID NO: 2644; WAN024DFD; Start 280; Stop 304
aaccgaactttcttcttatctctgg

SEQ ID NO: 332366 - DNA, 25 bp, Artificial
  probe
  misc_feature (1)..(25): SEQ ID NO: 2644; WAN024DFD; Start 279; Stop 303
gaaccgaactttcttcttatctctg

SEQ ID NO: 332367 - DNA, 25 bp, Artificial
  probe
  misc_feature (1)..(25): SEQ ID NO: 2644; WAN024DFD; Start 68; Stop 92
tggcttgtatgacgatagaggagtt

SEQ ID NO: 332368 - DNA, 25 bp, Artificial
  probe
  misc_feature (1)..(25): SEQ ID NO: 2644; WAN024DFD; Start 543; Stop 567
tttcaacaaatatccgctcaagttt

SEQ ID NO: 332369 - DNA, 25 bp, Artificial
  probe
  misc_feature (1)..(25): SEQ ID NO: 2644; WAN024DFD; Start 278; Stop 302
cgaaccgaactttcttcttatctct

SEQ ID NO: 332370 - DNA, 25 bp, Artificial
  probe
  misc_feature (1)..(25): SEQ ID NO: 2644; WAN024DFD; Start 284; Stop 308
gaactttcttcttatctctggtcgg

SEQ ID NO: 332371 - DNA, 25 bp, Artificial
  probe
  misc_feature (1)..(25): SEQ ID NO: 2644; WAN024DFD; Start 282; Stop 306
ccgaactttcttcttatctctggtc

SEQ ID NO: 332372 - DNA, 25 bp, Artificial
  probe
  misc_feature (1)..(25): SEQ ID NO: 2644; WAN024DFD; Start 649; Stop 673
ggaattggtggagaatacatcaaac

SEQ ID NO: 332373 - DNA, 25 bp, Artificial
  probe
  misc_feature (1)..(25): SEQ ID NO: 2644; WAN024DFD; Start 648; Stop 672
tggaattggtggagaatacatcaaa

SEQ ID NO: 332374 - DNA, 25 bp, Artificial
  probe
  misc_feature (1)..(25): SEQ ID NO: 2644; WAN024DFD; Start 850; Stop 874
attaccaatgaactgaaagcaatca

SEQ ID NO: 332375 - DNA, 25 bp, Artificial
  probe
  misc_feature (1)..(25): SEQ ID NO: 2645; WAN024F5Z; Start 4; Stop 28
gtatcttcaccagagactatccatt

SEQ ID NO: 332376 - DNA, 25 bp, Artificial
  probe
  misc_feature (1)..(25): SEQ ID NO: 2645; WAN024F5Z; Start 183; Stop 207
gtcaccaataatagccttgaagtct

SEQ ID NO: 332377 - DNA, 25 bp, Artificial
  probe
  misc_feature (1)..(25): SEQ ID NO: 2645; WAN024F5Z; Start 184; Stop 208
tcaccaataatagccttgaagtcta

SEQ ID NO: 332378 - DNA, 25 bp, Artificial
  probe
  misc_feature (1)..(25): SEQ ID NO: 2645; WAN024F5Z; Start 185; Stop 209
caccaataatagccttgaagtctaa

SEQ ID NO: 332379 - DNA, 25 bp, Artificial
  probe
  misc_feature (1)..(25): SEQ ID NO: 2645; WAN024F5Z; Start 182; Stop 206
cgtcaccaataatagccttgaagtc

SEQ ID NO: 332380 - DNA, 25 bp, Artificial
  probe
  misc_feature (1)..(25): SEQ ID NO: 2645; WAN024F5Z; Start 3; Stop 27
ggtatcttcaccagagactatccat

SEQ ID NO: 332381 - DNA, 25 bp, Artificial
  probe
  misc_feature (1)..(25): SEQ ID NO: 2645; WAN024F5Z; Start 14; Stop 38
cagagactatccatttgagcaattc

SEQ ID NO: 332382 - DNA, 25 bp, Artificial
  probe
  misc_feature (1)..(25): SEQ ID NO: 2645; WAN024F5Z; Start 6; Stop 30
atcttcaccagagactatccatttg

SEQ ID NO: 332383 - DNA, 25 bp, Artificial
  probe
  misc_feature (1)..(25): SEQ ID NO: 2645; WAN024F5Z; Start 13; Stop 37
ccagagactatccatttgagcaatt

SEQ ID NO: 332384 - DNA, 25 bp, Artificial
  probe
  misc_feature (1)..(25): SEQ ID NO: 2645; WAN024F5Z; Start 16; Stop 40
gagactatccatttgagcaattctg

SEQ ID NO: 332385 - DNA, 25 bp, Artificial
  probe
  misc_feature (1)..(25): SEQ ID NO: 2645; WAN024F5Z; Start 15; Stop 39
agagactatccatttgagcaattct

SEQ ID NO: 332386 - DNA, 25 bp, Artificial
  probe
  misc_feature (1)..(25): SEQ ID NO: 2645; WAN024F5Z; Start 190; Stop 214
ataatagccttgaagtctaaaccac

SEQ ID NO: 332387 - DNA, 25 bp, Artificial
  probe
  misc_feature (1)..(25): SEQ ID NO: 2645; WAN024F5Z; Start 193; Stop 217
atagccttgaagtctaaaccactac

SEQ ID NO: 332388 - DNA, 25 bp, Artificial
  probe
  misc_feature (1)..(25): SEQ ID NO: 2645; WAN024F5Z; Start 181; Stop 205
ccgtcaccaataatagccttgaagt

SEQ ID NO: 332389 - DNA, 25 bp, Artificial
  probe
  misc_feature (1)..(25): SEQ ID NO: 2645; WAN024F5Z; Start 180; Stop 204
accgtcaccaataatagccttgaag

SEQ ID NO: 332390 - DNA, 25 bp, Artificial
  probe
  misc_feature (1)..(25): SEQ ID NO: 2645; WAN024F5Z; Start 192; Stop 216
aatagccttgaagtctaaaccacta

SEQ ID NO: 332391 - DNA, 25 bp, Artificial
  probe
  misc_feature (1)..(25): SEQ ID NO: 2645; WAN024F5Z; Start 191; Stop 215
taatagccttgaagtctaaaccact

SEQ ID NO: 332392 - DNA, 25 bp, Artificial
  probe
  misc_feature (1)..(25): SEQ ID NO: 2645; WAN024F5Z; Start 8; Stop 32
cttcaccagagactatccatttgag

SEQ ID NO: 332393 - DNA, 25 bp, Artificial
  probe
  misc_feature (1)..(25): SEQ ID NO: 2645; WAN024F5Z; Start 5; Stop 29
tatcttcaccagagactatccattt

SEQ ID NO: 332394 - DNA, 25 bp, Artificial
  probe
  misc_feature (1)..(25): SEQ ID NO: 2645; WAN024F5Z; Start 7; Stop 31
tcttcaccagagactatccatttga

SEQ ID NO: 332395 - DNA, 25 bp, Artificial
  probe
  misc_feature (1)..(25): SEQ ID NO: 2645; WAN024F5Z; Start 12; Stop 36
accagagactatccatttgagcaat

SEQ ID NO: 332396 - DNA, 25 bp, Artificial
  probe
  misc_feature (1)..(25): SEQ ID NO: 2645; WAN024F5Z; Start 179; Stop 203
caccgtcaccaataatagccttgaa

SEQ ID NO: 332397 - DNA, 25 bp, Artificial
  probe
  misc_feature (1)..(25): SEQ ID NO: 2645; WAN024F5Z; Start 33; Stop 57
caattctgccttgatttcttcttgc

SEQ ID NO: 332398 - DNA, 25 bp, Artificial
  probe
  misc_feature (1)..(25): SEQ ID NO: 2645; WAN024F5Z; Start 189; Stop 213
aataatagccttgaagtctaaacca

SEQ ID NO: 332399 - DNA, 25 bp, Artificial
  probe
  misc_feature (1)..(25): SEQ ID NO: 2645; WAN024F5Z; Start 186; Stop 210
accaataatagccttgaagtctaaa

SEQ ID NO: 332400 - DNA, 25 bp, Artificial
  probe
  misc_feature (1)..(25): SEQ ID NO: 2645; WAN024F5Z; Start 197; Stop 221
ccttgaagtctaaaccactacgagt

SEQ ID NO: 332401 - DNA, 25 bp, Artificial
  probe
  misc_feature (1)..(25): SEQ ID NO: 2645; WAN024F5Z; Start 194; Stop 218
tagccttgaagtctaaaccactacg

SEQ ID NO: 332402 - DNA, 25 bp, Artificial
  probe
  misc_feature (1)..(25): SEQ ID NO: 2645; WAN024F5Z; Start 11; Stop 35
caccagagactatccatttgagcaa

SEQ ID NO: 332403 - DNA, 25 bp, Artificial
  probe
  misc_feature (1)..(25): SEQ ID NO: 2645; WAN024F5Z; Start 146; Stop 170
taaattcttggctatccttaccacc

SEQ ID NO: 332404 - DNA, 25 bp, Artificial
  probe
  misc_feature (1)..(25): SEQ ID NO: 2645; WAN024F5Z; Start 188; Stop 212
caataatagccttgaagtctaaacc

SEQ ID NO: 332405 - DNA, 25 bp, Artificial
  probe
  misc_feature (1)..(25): SEQ ID NO: 2645; WAN024F5Z; Start 187; Stop 211
ccaataatagccttgaagtctaaac

SEQ ID NO: 332406 - DNA, 25 bp, Artificial
  probe
  misc_feature (1)..(25): SEQ ID NO: 2645; WAN024F5Z; Start 143; Stop 167
ccataaattcttggctatccttacc

SEQ ID NO: 332407 - DNA, 25 bp, Artificial
  probe
  misc_feature (1)..(25): SEQ ID NO: 2645; WAN024F5Z; Start 9; Stop 33
ttcaccagagactatccatttgagc

SEQ ID NO: 332408 - DNA, 25 bp, Artificial
  probe
  misc_feature (1)..(25): SEQ ID NO: 2646; WAN024DM6; Start 56; Stop 80
gtcaatggaactatggagtaggttg

SEQ ID NO: 332409 - DNA, 25 bp, Artificial
  probe
  misc_feature (1)..(25): SEQ ID NO: 2646; WAN024DM6; Start 59; Stop 83
aatggaactatggagtaggttggac

SEQ ID NO: 332410 - DNA, 25 bp, Artificial
  probe
  misc_feature (1)..(25): SEQ ID NO: 2646; WAN024DM6; Start 58; Stop 82
caatggaactatggagtaggttgga

SEQ ID NO: 332411 - DNA, 25 bp, Artificial
  probe
  misc_feature (1)..(25): SEQ ID NO: 2646; WAN024DM6; Start 57; Stop 81
tcaatggaactatggagtaggttgg

SEQ ID NO: 332412 - DNA, 25 bp, Artificial
  probe
  misc_feature (1)..(25): SEQ ID NO: 2646; WAN024DM6; Start 55; Stop 79
ggtcaatggaactatggagtaggtt

SEQ ID NO: 332413 - DNA, 25 bp, Artificial
  probe
  misc_feature (1)..(25): SEQ ID NO: 2646; WAN024DM6; Start 67; Stop 91
tatggagtaggttggacaggaactt

SEQ ID NO: 332414 - DNA, 25 bp, Artificial
  probe
  misc_feature (1)..(25): SEQ ID NO: 2646; WAN024DM6; Start 64; Stop 88
aactatggagtaggttggacaggaa

SEQ ID NO: 332415 - DNA, 25 bp, Artificial
  probe
  misc_feature (1)..(25): SEQ ID NO: 2646; WAN024DM6; Start 60; Stop 84
atggaactatggagtaggttggaca

SEQ ID NO: 332416 - DNA, 25 bp, Artificial
  probe
  misc_feature (1)..(25): SEQ ID NO: 2646; WAN024DM6; Start 54; Stop 78
tggtcaatggaactatggagtaggt

SEQ ID NO: 332417 - DNA, 25 bp, Artificial
  probe
  misc_feature (1)..(25): SEQ ID NO: 2646; WAN024DM6; Start 114; Stop 138
ttctactcgatatcatacagcaact

SEQ ID NO: 332418 - DNA, 25 bp, Artificial
  probe
  misc_feature (1)..(25): SEQ ID NO: 2646; WAN024DM6; Start 111; Stop 135
acattctactcgatatcatacagca

SEQ ID NO: 332419 - DNA, 25 bp, Artificial
  probe
  misc_feature (1)..(25): SEQ ID NO: 2646; WAN024DM6; Start 113; Stop 137
attctactcgatatcatacagcaac

SEQ ID NO: 332420 - DNA, 25 bp, Artificial
  probe
  misc_feature (1)..(25): SEQ ID NO: 2646; WAN024DM6; Start 112; Stop 136
cattctactcgatatcatacagcaa

SEQ ID NO: 332421 - DNA, 25 bp, Artificial
  probe
  misc_feature (1)..(25): SEQ ID NO: 2646; WAN024DM6; Start 66; Stop 90
ctatggagtaggttggacaggaact

SEQ ID NO: 332422 - DNA, 25 bp, Artificial
  probe
  misc_feature (1)..(25): SEQ ID NO: 2646; WAN024DM6; Start 63; Stop 87
gaactatggagtaggttggacagga

SEQ ID NO: 332423 - DNA, 25 bp, Artificial
  probe
  misc_feature (1)..(25): SEQ ID NO: 2646; WAN024DM6; Start 115; Stop 139
tctactcgatatcatacagcaactg

SEQ ID NO: 332424 - DNA, 25 bp, Artificial
  probe
  misc_feature (1)..(25): SEQ ID NO: 2646; WAN024DM6; Start 65; Stop 89
actatggagtaggttggacaggaac

SEQ ID NO: 332425 - DNA, 25 bp, Artificial
  probe
  misc_feature (1)..(25): SEQ ID NO: 2646; WAN024DM6; Start 61; Stop 85
tggaactatggagtaggttggacag

SEQ ID NO: 332426 - DNA, 25 bp, Artificial
  probe
  misc_feature (1)..(25): SEQ ID NO: 2646; WAN024DM6; Start 3; Stop 27
ggtatgtggtatacttgctactaca

SEQ ID NO: 332427 - DNA, 25 bp, Artificial
  probe
  misc_feature (1)..(25): SEQ ID NO: 2646; WAN024DM6; Start 2; Stop 26
tggtatgtggtatacttgctactac

SEQ ID NO: 332428 - DNA, 25 bp, Artificial
  probe
  misc_feature (1)..(25): SEQ ID NO: 2646; WAN024DM6; Start 151; Stop 175
ggtagaacctctaaggattatgcaa

SEQ ID NO: 332429 - DNA, 25 bp, Artificial
  probe
  misc_feature (1)..(25): SEQ ID NO: 2646; WAN024DM6; Start 98; Stop 122
attctgattacttacattctactcg

SEQ ID NO: 332430 - DNA, 25 bp, Artificial
  probe
  misc_feature (1)..(25): SEQ ID NO: 2646; WAN024DM6; Start 110; Stop 134
tacattctactcgatatcatacagc

SEQ ID NO: 332431 - DNA, 25 bp, Artificial
  probe
  misc_feature (1)..(25): SEQ ID NO: 2646; WAN024DM6; Start 1; Stop 25
atggtatgtggtatacttgctacta

SEQ ID NO: 332432 - DNA, 25 bp, Artificial
  probe
  misc_feature (1)..(25): SEQ ID NO: 2646; WAN024DM6; Start 99; Stop 123
ttctgattacttacattctactcga

SEQ ID NO: 332433 - DNA, 25 bp, Artificial
  probe
  misc_feature (1)..(25): SEQ ID NO: 2646; WAN024DM6; Start 100; Stop 124
tctgattacttacattctactcgat

SEQ ID NO: 332434 - DNA, 25 bp, Artificial
  probe
  misc_feature (1)..(25): SEQ ID NO: 2646; WAN024DM6; Start 62; Stop 86
ggaactatggagtaggttggacagg

SEQ ID NO: 332435 - DNA, 25 bp, Artificial
  probe
  misc_feature (1)..(25): SEQ ID NO: 2646; WAN024DM6; Start 4; Stop 28
gtatgtggtatacttgctactacaa

SEQ ID NO: 332436 - DNA, 25 bp, Artificial
  probe
  misc_feature (1)..(25): SEQ ID NO: 2646; WAN024DM6; Start 13; Stop 37
atacttgctactacaaatgctttag

SEQ ID NO: 332437 - DNA, 25 bp, Artificial
  probe
  misc_feature (1)..(25): SEQ ID NO: 2646; WAN024DM6; Start 9; Stop 33
tggtatacttgctactacaaatgct

SEQ ID NO: 332438 - DNA, 25 bp, Artificial
  probe
  misc_feature (1)..(25): SEQ ID NO: 2646; WAN024DM6; Start 8; Stop 32
gtggtatacttgctactacaaatgc

SEQ ID NO: 332439 - DNA, 25 bp, Artificial
  probe
  misc_feature (1)..(25): SEQ ID NO: 2646; WAN024DM6; Start 218; Stop 242
caacaggaatggaatatttctatgg

SEQ ID NO: 332440 - DNA, 25 bp, Artificial
  probe
  misc_feature (1)..(25): SEQ ID NO: 2646; WAN024DM6; Start 219; Stop 243
aacaggaatggaatatttctatgga

SEQ ID NO: 332441 - DNA, 25 bp, Artificial
  probe
  misc_feature (1)..(25): SEQ ID NO: 2647; WAN024CAZ; Start 1702; Stop 1726
gttgatatggagaaggaagactacc

SEQ ID NO: 332442 - DNA, 25 bp, Artificial
  probe
  misc_feature (1)..(25): SEQ ID NO: 2647; WAN024CAZ; Start 227; Stop 251
atatgaagaatgaccaggatacacg

SEQ ID NO: 332443 - DNA, 25 bp, Artificial
  probe
  misc_feature (1)..(25): SEQ ID NO: 2647; WAN024CAZ; Start 1701; Stop 1725
tgttgatatggagaaggaagactac

SEQ ID NO: 332444 - DNA, 25 bp, Artificial
  probe
  misc_feature (1)..(25): SEQ ID NO: 2647; WAN024CAZ; Start 1700; Stop 1724
gtgttgatatggagaaggaagacta

SEQ ID NO: 332445 - DNA, 25 bp, Artificial
  probe
  misc_feature (1)..(25): SEQ ID NO: 2647; WAN024CAZ; Start 1281; Stop 1305
attattggaagaagtggaagacgac

SEQ ID NO: 332446 - DNA, 25 bp, Artificial
  probe
  misc_feature (1)..(25): SEQ ID NO: 2647; WAN024CAZ; Start 1280; Stop 1304
aattattggaagaagtggaagacga

SEQ ID NO: 332447 - DNA, 25 bp, Artificial
  probe
  misc_feature (1)..(25): SEQ ID NO: 2647; WAN024CAZ; Start 663; Stop 687
ttacgaacaattccaacacacctat

SEQ ID NO: 332448 - DNA, 25 bp, Artificial
  probe
  misc_feature (1)..(25): SEQ ID NO: 2647; WAN024CAZ; Start 662; Stop 686
cttacgaacaattccaacacaccta

SEQ ID NO: 332449 - DNA, 25 bp, Artificial
  probe
  misc_feature (1)..(25): SEQ ID NO: 2647; WAN024CAZ; Start 1699; Stop 1723
ggtgttgatatggagaaggaagact

SEQ ID NO: 332450 - DNA, 25 bp, Artificial
  probe
  misc_feature (1)..(25): SEQ ID NO: 2647; WAN024CAZ; Start 1697; Stop 1721
ctggtgttgatatggagaaggaaga

SEQ ID NO: 332451 - DNA, 25 bp, Artificial
  probe
  misc_feature (1)..(25): SEQ ID NO: 2647; WAN024CAZ; Start 664; Stop 688
tacgaacaattccaacacacctatg

SEQ ID NO: 332452 - DNA, 25 bp, Artificial
  probe
  misc_feature (1)..(25): SEQ ID NO: 2647; WAN024CAZ; Start 654; Stop 678
ttatgcgacttacgaacaattccaa

SEQ ID NO: 332453 - DNA, 25 bp, Artificial
  probe
  misc_feature (1)..(25): SEQ ID NO: 2647; WAN024CAZ; Start 1698; Stop 1722
tggtgttgatatggagaaggaagac

SEQ ID NO: 332454 - DNA, 25 bp, Artificial
  probe
  misc_feature (1)..(25): SEQ ID NO: 2647; WAN024CAZ; Start 655; Stop 679
tatgcgacttacgaacaattccaac

SEQ ID NO: 332455 - DNA, 25 bp, Artificial
  probe
  misc_feature (1)..(25): SEQ ID NO: 2647; WAN024CAZ; Start 1706; Stop 1730
atatggagaaggaagactacctcaa

SEQ ID NO: 332456 - DNA, 25 bp, Artificial
  probe
  misc_feature (1)..(25): SEQ ID NO: 2647; WAN024CAZ; Start 1703; Stop 1727
ttgatatggagaaggaagactacct

SEQ ID NO: 332457 - DNA, 25 bp, Artificial
  probe
  misc_feature (1)..(25): SEQ ID NO: 2647; WAN024CAZ; Start 139; Stop 163
ctcttggatagtgcggataacctac

SEQ ID NO: 332458 - DNA, 25 bp, Artificial
  probe
  misc_feature (1)..(25): SEQ ID NO: 2647; WAN024CAZ; Start 138; Stop 162
tctcttggatagtgcggataaccta

SEQ ID NO: 332459 - DNA, 25 bp, Artificial
  probe
  misc_feature (1)..(25): SEQ ID NO: 2647; WAN024CAZ; Start 1705; Stop 1729
gatatggagaaggaagactacctca

SEQ ID NO: 332460 - DNA, 25 bp, Artificial
  probe
  misc_feature (1)..(25): SEQ ID NO: 2647; WAN024CAZ; Start 1704; Stop 1728
tgatatggagaaggaagactacctc

SEQ ID NO: 332461 - DNA, 25 bp, Artificial
  probe
  misc_feature (1)..(25): SEQ ID NO: 2647; WAN024CAZ; Start 1707; Stop 1731
tatggagaaggaagactacctcaac

SEQ ID NO: 332462 - DNA, 25 bp, Artificial
  probe
  misc_feature (1)..(25): SEQ ID NO: 2647; WAN024CAZ; Start 660; Stop 684
gacttacgaacaattccaacacacc

SEQ ID NO: 332463 - DNA, 25 bp, Artificial
  probe
  misc_feature (1)..(25): SEQ ID NO: 2647; WAN024CAZ; Start 1493; Stop 1517
aagacaatcctgaaatccaatacga

SEQ ID NO: 332464 - DNA, 25 bp, Artificial
  probe
  misc_feature (1)..(25): SEQ ID NO: 2647; WAN024CAZ; Start 1492; Stop 1516
gaagacaatcctgaaatccaatacg

SEQ ID NO: 332465 - DNA, 25 bp, Artificial
  probe
  misc_feature (1)..(25): SEQ ID NO: 2647; WAN024CAZ; Start 1282; Stop 1306
ttattggaagaagtggaagacgacg

SEQ ID NO: 332466 - DNA, 25 bp, Artificial
  probe
  misc_feature (1)..(25): SEQ ID NO: 2647; WAN024CAZ; Start 144; Stop 168
ggatagtgcggataacctactagaa

SEQ ID NO: 332467 - DNA, 25 bp, Artificial
  probe
  misc_feature (1)..(25): SEQ ID NO: 2647; WAN024CAZ; Start 1494; Stop 1518
agacaatcctgaaatccaatacgag

SEQ ID NO: 332468 - DNA, 25 bp, Artificial
  probe
  misc_feature (1)..(25): SEQ ID NO: 2647; WAN024CAZ; Start 1127; Stop 1151
acaatctggacaatctctttactct

SEQ ID NO: 332469 - DNA, 25 bp, Artificial
  probe
  misc_feature (1)..(25): SEQ ID NO: 2647; WAN024CAZ; Start 137; Stop 161
atctcttggatagtgcggataacct

SEQ ID NO: 332470 - DNA, 25 bp, Artificial
  probe
  misc_feature (1)..(25): SEQ ID NO: 2647; WAN024CAZ; Start 136; Stop 160
catctcttggatagtgcggataacc

SEQ ID NO: 332471 - DNA, 25 bp, Artificial
  probe
  misc_feature (1)..(25): SEQ ID NO: 2647; WAN024CAZ; Start 141; Stop 165
cttggatagtgcggataacctacta

SEQ ID NO: 332472 - DNA, 25 bp, Artificial
  probe
  misc_feature (1)..(25): SEQ ID NO: 2647; WAN024CAZ; Start 1094; Stop 1118
ataccaatgcctttatgcttctcaa

SEQ ID NO: 332473 - DNA, 25 bp, Artificial
  probe
  misc_feature (1)..(25): SEQ ID NO: 2647; WAN024CAZ; Start 1759; Stop 1783
ttaaatgagtttgaagcccttgttg

SEQ ID NO: 332474 - DNA, 25 bp, Artificial
  probe
  misc_feature (1)..(25): SEQ ID NO: 2648; WAN024CY2; Start 67; Stop 91
aatgagaaacgaatccttagcaatg

SEQ ID NO: 332475 - DNA, 25 bp, Artificial
  probe
  misc_feature (1)..(25): SEQ ID NO: 2648; WAN024CY2; Start 259; Stop 283
attcacttgttgggagatatttgga

SEQ ID NO: 332476 - DNA, 25 bp, Artificial
  probe
  misc_feature (1)..(25): SEQ ID NO: 2648; WAN024CY2; Start 258; Stop 282
gattcacttgttgggagatatttgg

SEQ ID NO: 332477 - DNA, 25 bp, Artificial
  probe
  misc_feature (1)..(25): SEQ ID NO: 2648; WAN024CY2; Start 66; Stop 90
gaatgagaaacgaatccttagcaat

SEQ ID NO: 332478 - DNA, 25 bp, Artificial
  probe
  misc_feature (1)..(25): SEQ ID NO: 2648; WAN024CY2; Start 65; Stop 89
agaatgagaaacgaatccttagcaa

SEQ ID NO: 332479 - DNA, 25 bp, Artificial
  probe
  misc_feature (1)..(25): SEQ ID NO: 2648; WAN024CY2; Start 59; Stop 83
cgatagagaatgagaaacgaatcct

SEQ ID NO: 332480 - DNA, 25 bp, Artificial
  probe
  misc_feature (1)..(25): SEQ ID NO: 2648; WAN024CY2; Start 63; Stop 87
agagaatgagaaacgaatccttagc

SEQ ID NO: 332481 - DNA, 25 bp, Artificial
  probe
  misc_feature (1)..(25): SEQ ID NO: 2648; WAN024CY2; Start 64; Stop 88
gagaatgagaaacgaatccttagca

SEQ ID NO: 332482 - DNA, 25 bp, Artificial
  probe
  misc_feature (1)..(25): SEQ ID NO: 2648; WAN024CY2; Start 257; Stop 281
tgattcacttgttgggagatatttg

SEQ ID NO: 332483 - DNA, 25 bp, Artificial
  probe
  misc_feature (1)..(25): SEQ ID NO: 2648; WAN024CY2; Start 260; Stop 284
ttcacttgttgggagatatttggac

SEQ ID NO: 332484 - DNA, 25 bp, Artificial
  probe
  misc_feature (1)..(25): SEQ ID NO: 2648; WAN024CY2; Start 94; Stop 118
gggaaagaatttggagttgagaata

SEQ ID NO: 332485 - DNA, 25 bp, Artificial
  probe
  misc_feature (1)..(25): SEQ ID NO: 2648; WAN024CY2; Start 267; Stop 291
gttgggagatatttggacagtgaag

SEQ ID NO: 332486 - DNA, 25 bp, Artificial
  probe
  misc_feature (1)..(25): SEQ ID NO: 2648; WAN024CY2; Start 68; Stop 92
atgagaaacgaatccttagcaatgg

SEQ ID NO: 332487 - DNA, 25 bp, Artificial
  probe
  misc_feature (1)..(25): SEQ ID NO: 2648; WAN024CY2; Start 246; Stop 270
gttgatgttggtgattcacttgttg

SEQ ID NO: 332488 - DNA, 25 bp, Artificial
  probe
  misc_feature (1)..(25): SEQ ID NO: 2648; WAN024CY2; Start 456; Stop 480
gtatcgacgaatagctgaagaggaa

SEQ ID NO: 332489 - DNA, 25 bp, Artificial
  probe
  misc_feature (1)..(25): SEQ ID NO: 2648; WAN024CY2; Start 244; Stop 268
atgttgatgttggtgattcacttgt

SEQ ID NO: 332490 - DNA, 25 bp, Artificial
  probe
  misc_feature (1)..(25): SEQ ID NO: 2648; WAN024CY2; Start 60; Stop 84
gatagagaatgagaaacgaatcctt

SEQ ID NO: 332491 - DNA, 25 bp, Artificial
  probe
  misc_feature (1)..(25): SEQ ID NO: 2648; WAN024CY2; Start 245; Stop 269
tgttgatgttggtgattcacttgtt

SEQ ID NO: 332492 - DNA, 25 bp, Artificial
  probe
  misc_feature (1)..(25): SEQ ID NO: 2648; WAN024CY2; Start 93; Stop 117
cgggaaagaatttggagttgagaat

SEQ ID NO: 332493 - DNA, 25 bp, Artificial
  probe
  misc_feature (1)..(25): SEQ ID NO: 2648; WAN024CY2; Start 454; Stop 478
ttgtatcgacgaatagctgaagagg

SEQ ID NO: 332494 - DNA, 25 bp, Artificial
  probe
  misc_feature (1)..(25): SEQ ID NO: 2648; WAN024CY2; Start 95; Stop 119
ggaaagaatttggagttgagaatac

SEQ ID NO: 332495 - DNA, 25 bp, Artificial
  probe
  misc_feature (1)..(25): SEQ ID NO: 2648; WAN024CY2; Start 62; Stop 86
tagagaatgagaaacgaatccttag

SEQ ID NO: 332496 - DNA, 25 bp, Artificial
  probe
  misc_feature (1)..(25): SEQ ID NO: 2648; WAN024CY2; Start 247; Stop 271
ttgatgttggtgattcacttgttgg

SEQ ID NO: 332497 - DNA, 25 bp, Artificial
  probe
  misc_feature (1)..(25): SEQ ID NO: 2648; WAN024CY2; Start 380; Stop 404
agttgattggcttgaccttgttgag

SEQ ID NO: 332498 - DNA, 25 bp, Artificial
  probe
  misc_feature (1)..(25): SEQ ID NO: 2648; WAN024CY2; Start 379; Stop 403
gagttgattggcttgaccttgttga

SEQ ID NO: 332499 - DNA, 25 bp, Artificial
  probe
  misc_feature (1)..(25): SEQ ID NO: 2648; WAN024CY2; Start 377; Stop 401
ctgagttgattggcttgaccttgtt

SEQ ID NO: 332500 - DNA, 25 bp, Artificial
  probe
  misc_feature (1)..(25): SEQ ID NO: 2648; WAN024CY2; Start 264; Stop 288
cttgttgggagatatttggacagtg

SEQ ID NO: 332501 - DNA, 25 bp, Artificial
  probe
  misc_feature (1)..(25): SEQ ID NO: 2648; WAN024CY2; Start 262; Stop 286
cacttgttgggagatatttggacag

SEQ ID NO: 332502 - DNA, 25 bp, Artificial
  probe
  misc_feature (1)..(25): SEQ ID NO: 2648; WAN024CY2; Start 266; Stop 290
tgttgggagatatttggacagtgaa

SEQ ID NO: 332503 - DNA, 25 bp, Artificial
  probe
  misc_feature (1)..(25): SEQ ID NO: 2648; WAN024CY2; Start 265; Stop 289
ttgttgggagatatttggacagtga

SEQ ID NO: 332504 - DNA, 25 bp, Artificial
  probe
  misc_feature (1)..(25): SEQ ID NO: 2648; WAN024CY2; Start 263; Stop 287
acttgttgggagatatttggacagt

SEQ ID NO: 332505 - DNA, 25 bp, Artificial
  probe
  misc_feature (1)..(25): SEQ ID NO: 2648; WAN024CY2; Start 261; Stop 285
tcacttgttgggagatatttggaca

SEQ ID NO: 332506 - DNA, 25 bp, Artificial
  probe
  misc_feature (1)..(25): SEQ ID NO: 2648; WAN024CY2; Start 455; Stop 479
tgtatcgacgaatagctgaagagga

SEQ ID NO: 332507 - DNA, 25 bp, Artificial
  probe
  misc_feature (1)..(25): SEQ ID NO: 2649; WAN024DNR; Start 662; Stop 686
ctattcttcgtggtgctcttaatga

SEQ ID NO: 332508 - DNA, 25 bp, Artificial
  probe
  misc_feature (1)..(25): SEQ ID NO: 2649; WAN024DNR; Start 31; Stop 55
aatatagaagaagttcgtgccttgt

SEQ ID NO: 332509 - DNA, 25 bp, Artificial
  probe
  misc_feature (1)..(25): SEQ ID NO: 2649; WAN024DNR; Start 32; Stop 56
atatagaagaagttcgtgccttgtc

SEQ ID NO: 332510 - DNA, 25 bp, Artificial
  probe
  misc_feature (1)..(25): SEQ ID NO: 2649; WAN024DNR; Start 329; Stop 353
cgcctagtcttatcaatggaatcaa

SEQ ID NO: 332511 - DNA, 25 bp, Artificial
  probe
  misc_feature (1)..(25): SEQ ID NO: 2649; WAN024DNR; Start 809; Stop 833
agcagtatattgaacagatccgaat

SEQ ID NO: 332512 - DNA, 25 bp, Artificial
  probe
  misc_feature (1)..(25): SEQ ID NO: 2649; WAN024DNR; Start 808; Stop 832
aagcagtatattgaacagatccgaa

SEQ ID NO: 332513 - DNA, 25 bp, Artificial
  probe
  misc_feature (1)..(25): SEQ ID NO: 2649; WAN024DNR; Start 807; Stop 831
taagcagtatattgaacagatccga

SEQ ID NO: 332514 - DNA, 25 bp, Artificial
  probe
  misc_feature (1)..(25): SEQ ID NO: 2649; WAN024DNR; Start 806; Stop 830
gtaagcagtatattgaacagatccg

SEQ ID NO: 332515 - DNA, 25 bp, Artificial
  probe
  misc_feature (1)..(25): SEQ ID NO: 2649; WAN024DNR; Start 810; Stop 834
gcagtatattgaacagatccgaatt

SEQ ID NO: 332516 - DNA, 25 bp, Artificial
  probe
  misc_feature (1)..(25): SEQ ID NO: 2649; WAN024DNR; Start 805; Stop 829
ggtaagcagtatattgaacagatcc

SEQ ID NO: 332517 - DNA, 25 bp, Artificial
  probe
  misc_feature (1)..(25): SEQ ID NO: 2649; WAN024DNR; Start 663; Stop 687
tattcttcgtggtgctcttaatgag

SEQ ID NO: 332518 - DNA, 25 bp, Artificial
  probe
  misc_feature (1)..(25): SEQ ID NO: 2649; WAN024DNR; Start 33; Stop 57
tatagaagaagttcgtgccttgtca

SEQ ID NO: 332519 - DNA, 25 bp, Artificial
  probe
  misc_feature (1)..(25): SEQ ID NO: 2649; WAN024DNR; Start 846; Stop 870
cttgattaaccgtgcttggaatgaa

SEQ ID NO: 332520 - DNA, 25 bp, Artificial
  probe
  misc_feature (1)..(25): SEQ ID NO: 2649; WAN024DNR; Start 661; Stop 685
gctattcttcgtggtgctcttaatg

SEQ ID NO: 332521 - DNA, 25 bp, Artificial
  probe
  misc_feature (1)..(25): SEQ ID NO: 2649; WAN024DNR; Start 215; Stop 239
tacaagaagaagtggcagatcgtat

SEQ ID NO: 332522 - DNA, 25 bp, Artificial
  probe
  misc_feature (1)..(25): SEQ ID NO: 2649; WAN024DNR; Start 804; Stop 828
tggtaagcagtatattgaacagatc

SEQ ID NO: 332523 - DNA, 25 bp, Artificial
  probe
  misc_feature (1)..(25): SEQ ID NO: 2649; WAN024DNR; Start 667; Stop 691
cttcgtggtgctcttaatgagtatg

SEQ ID NO: 332524 - DNA, 25 bp, Artificial
  probe
  misc_feature (1)..(25): SEQ ID NO: 2649; WAN024DNR; Start 666; Stop 690
tcttcgtggtgctcttaatgagtat

SEQ ID NO: 332525 - DNA, 25 bp, Artificial
  probe
  misc_feature (1)..(25): SEQ ID NO: 2649; WAN024DNR; Start 665; Stop 689
ttcttcgtggtgctcttaatgagta

SEQ ID NO: 332526 - DNA, 25 bp, Artificial
  probe
  misc_feature (1)..(25): SEQ ID NO: 2649; WAN024DNR; Start 801; Stop 825
ttctggtaagcagtatattgaacag

SEQ ID NO: 332527 - DNA, 25 bp, Artificial
  probe
  misc_feature (1)..(25): SEQ ID NO: 2649; WAN024DNR; Start 365; Stop 389
atcttcactatcgtgtcatcacaga

SEQ ID NO: 332528 - DNA, 25 bp, Artificial
  probe
  misc_feature (1)..(25): SEQ ID NO: 2649; WAN024DNR; Start 364; Stop 388
catcttcactatcgtgtcatcacag

SEQ ID NO: 332529 - DNA, 25 bp, Artificial
  probe
  misc_feature (1)..(25): SEQ ID NO: 2649; WAN024DNR; Start 803; Stop 827
ctggtaagcagtatattgaacagat

SEQ ID NO: 332530 - DNA, 25 bp, Artificial
  probe
  misc_feature (1)..(25): SEQ ID NO: 2649; WAN024DNR; Start 34; Stop 58
atagaagaagttcgtgccttgtcaa

SEQ ID NO: 332531 - DNA, 25 bp, Artificial
  probe
  misc_feature (1)..(25): SEQ ID NO: 2649; WAN024DNR; Start 811; Stop 835
cagtatattgaacagatccgaattg

SEQ ID NO: 332532 - DNA, 25 bp, Artificial
  probe
  misc_feature (1)..(25): SEQ ID NO: 2649; WAN024DNR; Start 815; Stop 839
atattgaacagatccgaattgtccg

SEQ ID NO: 332533 - DNA, 25 bp, Artificial
  probe
  misc_feature (1)..(25): SEQ ID NO: 2649; WAN024DNR; Start 814; Stop 838
tatattgaacagatccgaattgtcc

SEQ ID NO: 332534 - DNA, 25 bp, Artificial
  probe
  misc_feature (1)..(25): SEQ ID NO: 2649; WAN024DNR; Start 214; Stop 238
ctacaagaagaagtggcagatcgta

SEQ ID NO: 332535 - DNA, 25 bp, Artificial
  probe
  misc_feature (1)..(25): SEQ ID NO: 2649; WAN024DNR; Start 366; Stop 390
tcttcactatcgtgtcatcacagaa

SEQ ID NO: 332536 - DNA, 25 bp, Artificial
  probe
  misc_feature (1)..(25): SEQ ID NO: 2649; WAN024DNR; Start 664; Stop 688
attcttcgtggtgctcttaatgagt

SEQ ID NO: 332537 - DNA, 25 bp, Artificial
  probe
  misc_feature (1)..(25): SEQ ID NO: 2649; WAN024DNR; Start 434; Stop 458
ttccgcttgtagatgatttgatttc

SEQ ID NO: 332538 - DNA, 25 bp, Artificial
  probe
  misc_feature (1)..(25): SEQ ID NO: 2649; WAN024DNR; Start 433; Stop 457
cttccgcttgtagatgatttgattt

SEQ ID NO: 332539 - DNA, 25 bp, Artificial
  probe
  misc_feature (1)..(25): SEQ ID NO: 2649; WAN024DNR; Start 242; Stop 266
ttatggttatgcgtgtttatactgc

SEQ ID NO: 332540 - DNA, 25 bp, Artificial
  probe
  misc_feature (1)..(25): SEQ ID NO: 2650; WAN024CHZ; Start 1733; Stop 1757
ctcctattgctccgattgttaagaa

SEQ ID NO: 332541 - DNA, 25 bp, Artificial
  probe
  misc_feature (1)..(25): SEQ ID NO: 2650; WAN024CHZ; Start 2032; Stop 2056
tctaaggatgagcacttgattaagg

SEQ ID NO: 332542 - DNA, 25 bp, Artificial
  probe
  misc_feature (1)..(25): SEQ ID NO: 2650; WAN024CHZ; Start 967; Stop 991
caagatatgctgagtgaagagtcta

SEQ ID NO: 332543 - DNA, 25 bp, Artificial
  probe
  misc_feature (1)..(25): SEQ ID NO: 2650; WAN024CHZ; Start 2603; Stop 2627
ccattcaactcagtgttcctcttat

SEQ ID NO: 332544 - DNA, 25 bp, Artificial
  probe
  misc_feature (1)..(25): SEQ ID NO: 2650; WAN024CHZ; Start 2605; Stop 2629
attcaactcagtgttcctcttatcg

SEQ ID NO: 332545 - DNA, 25 bp, Artificial
  probe
  misc_feature (1)..(25): SEQ ID NO: 2650; WAN024CHZ; Start 2604; Stop 2628
cattcaactcagtgttcctcttatc

SEQ ID NO: 332546 - DNA, 25 bp, Artificial
  probe
  misc_feature (1)..(25): SEQ ID NO: 2650; WAN024CHZ; Start 1287; Stop 1311
tcagacttacttggttgatgatgaa

SEQ ID NO: 332547 - DNA, 25 bp, Artificial
  probe
  misc_feature (1)..(25): SEQ ID NO: 2650; WAN024CHZ; Start 1282; Stop 1306
tatggtcagacttacttggttgatg

SEQ ID NO: 332548 - DNA, 25 bp, Artificial
  probe
  misc_feature (1)..(25): SEQ ID NO: 2650; WAN024CHZ; Start 968; Stop 992
aagatatgctgagtgaagagtctat

SEQ ID NO: 332549 - DNA, 25 bp, Artificial
  probe
  misc_feature (1)..(25): SEQ ID NO: 2650; WAN024CHZ; Start 1281; Stop 1305
ttatggtcagacttacttggttgat

SEQ ID NO: 332550 - DNA, 25 bp, Artificial
  probe
  misc_feature (1)..(25): SEQ ID NO: 2650; WAN024CHZ; Start 1286; Stop 1310
gtcagacttacttggttgatgatga

SEQ ID NO: 332551 - DNA, 25 bp, Artificial
  probe
  misc_feature (1)..(25): SEQ ID NO: 2650; WAN024CHZ; Start 2031; Stop 2055
ttctaaggatgagcacttgattaag

SEQ ID NO: 332552 - DNA, 25 bp, Artificial
  probe
  misc_feature (1)..(25): SEQ ID NO: 2650; WAN024CHZ; Start 966; Stop 990
tcaagatatgctgagtgaagagtct

SEQ ID NO: 332553 - DNA, 25 bp, Artificial
  probe
  misc_feature (1)..(25): SEQ ID NO: 2650; WAN024CHZ; Start 965; Stop 989
gtcaagatatgctgagtgaagagtc

SEQ ID NO: 332554 - DNA, 25 bp, Artificial
  probe
  misc_feature (1)..(25): SEQ ID NO: 2650; WAN024CHZ; Start 2033; Stop 2057
ctaaggatgagcacttgattaaggc

SEQ ID NO: 332555 - DNA, 25 bp, Artificial
  probe
  misc_feature (1)..(25): SEQ ID NO: 2650; WAN024CHZ; Start 249; Stop 273
gacagagatgtatgcggactataag

SEQ ID NO: 332556 - DNA, 25 bp, Artificial
  probe
  misc_feature (1)..(25): SEQ ID NO: 2650; WAN024CHZ; Start 964; Stop 988
agtcaagatatgctgagtgaagagt

SEQ ID NO: 332557 - DNA, 25 bp, Artificial
  probe
  misc_feature (1)..(25): SEQ ID NO: 2650; WAN024CHZ; Start 2621; Stop 2645
ctcttatcgcagatgagaatgaagg

SEQ ID NO: 332558 - DNA, 25 bp, Artificial
  probe
  misc_feature (1)..(25): SEQ ID NO: 2650; WAN024CHZ; Start 2620; Stop 2644
cctcttatcgcagatgagaatgaag

SEQ ID NO: 332559 - DNA, 25 bp, Artificial
  probe
  misc_feature (1)..(25): SEQ ID NO: 2650; WAN024CHZ; Start 970; Stop 994
gatatgctgagtgaagagtctatct

SEQ ID NO: 332560 - DNA, 25 bp, Artificial
  probe
  misc_feature (1)..(25): SEQ ID NO: 2650; WAN024CHZ; Start 969; Stop 993
agatatgctgagtgaagagtctatc

SEQ ID NO: 332561 - DNA, 25 bp, Artificial
  probe
  misc_feature (1)..(25): SEQ ID NO: 2650; WAN024CHZ; Start 2617; Stop 2641
gttcctcttatcgcagatgagaatg

SEQ ID NO: 332562 - DNA, 25 bp, Artificial
  probe
  misc_feature (1)..(25): SEQ ID NO: 2650; WAN024CHZ; Start 1285; Stop 1309
ggtcagacttacttggttgatgatg

SEQ ID NO: 332563 - DNA, 25 bp, Artificial
  probe
  misc_feature (1)..(25): SEQ ID NO: 2650; WAN024CHZ; Start 2619; Stop 2643
tcctcttatcgcagatgagaatgaa

SEQ ID NO: 332564 - DNA, 25 bp, Artificial
  probe
  misc_feature (1)..(25): SEQ ID NO: 2650; WAN024CHZ; Start 2618; Stop 2642
ttcctcttatcgcagatgagaatga

SEQ ID NO: 332565 - DNA, 25 bp, Artificial
  probe
  misc_feature (1)..(25): SEQ ID NO: 2650; WAN024CHZ; Start 736; Stop 760
aatctcatcaatgacaaggaacagg

SEQ ID NO: 332566 - DNA, 25 bp, Artificial
  probe
  misc_feature (1)..(25): SEQ ID NO: 2650; WAN024CHZ; Start 1284; Stop 1308
tggtcagacttacttggttgatgat

SEQ ID NO: 332567 - DNA, 25 bp, Artificial
  probe
  misc_feature (1)..(25): SEQ ID NO: 2650; WAN024CHZ; Start 1283; Stop 1307
atggtcagacttacttggttgatga

SEQ ID NO: 332568 - DNA, 25 bp, Artificial
  probe
  misc_feature (1)..(25): SEQ ID NO: 2650; WAN024CHZ; Start 963; Stop 987
cagtcaagatatgctgagtgaagag

SEQ ID NO: 332569 - DNA, 25 bp, Artificial
  probe
  misc_feature (1)..(25): SEQ ID NO: 2650; WAN024CHZ; Start 2616; Stop 2640
tgttcctcttatcgcagatgagaat

SEQ ID NO: 332570 - DNA, 25 bp, Artificial
  probe
  misc_feature (1)..(25): SEQ ID NO: 2650; WAN024CHZ; Start 2445; Stop 2469
tattctcaagattgccatgattcag

SEQ ID NO: 332571 - DNA, 25 bp, Artificial
  probe
  misc_feature (1)..(25): SEQ ID NO: 2650; WAN024CHZ; Start 250; Stop 274
acagagatgtatgcggactataagg

SEQ ID NO: 332572 - DNA, 25 bp, Artificial
  probe
  misc_feature (1)..(25): SEQ ID NO: 2650; WAN024CHZ; Start 248; Stop 272
ggacagagatgtatgcggactataa

SEQ ID NO: 332573 - DNA, 25 bp, Artificial
  probe
  misc_feature (1)..(25): SEQ ID NO: 2651; WAN024GDV; Start 351; Stop 375
gtcctatgccttgattgtggtattc

SEQ ID NO: 332574 - DNA, 25 bp, Artificial
  probe
  misc_feature (1)..(25): SEQ ID NO: 2651; WAN024GDV; Start 469; Stop 493
tacagtaaggttctgatgacagtct

SEQ ID NO: 332575 - DNA, 25 bp, Artificial
  probe
  misc_feature (1)..(25): SEQ ID NO: 2651; WAN024GDV; Start 468; Stop 492
ttacagtaaggttctgatgacagtc

SEQ ID NO: 332576 - DNA, 25 bp, Artificial
  probe
  misc_feature (1)..(25): SEQ ID NO: 2651; WAN024GDV; Start 352; Stop 376
tcctatgccttgattgtggtattca

SEQ ID NO: 332577 - DNA, 25 bp, Artificial
  probe
  misc_feature (1)..(25): SEQ ID NO: 2651; WAN024GDV; Start 21; Stop 45
gacaccgattatcagtctcttcttg

SEQ ID NO: 332578 - DNA, 25 bp, Artificial
  probe
  misc_feature (1)..(25): SEQ ID NO: 2651; WAN024GDV; Start 23; Stop 47
caccgattatcagtctcttcttgct

SEQ ID NO: 332579 - DNA, 25 bp, Artificial
  probe
  misc_feature (1)..(25): SEQ ID NO: 2651; WAN024GDV; Start 470; Stop 494
acagtaaggttctgatgacagtctt

SEQ ID NO: 332580 - DNA, 25 bp, Artificial
  probe
  misc_feature (1)..(25): SEQ ID NO: 2651; WAN024GDV; Start 350; Stop 374
ggtcctatgccttgattgtggtatt

SEQ ID NO: 332581 - DNA, 25 bp, Artificial
  probe
  misc_feature (1)..(25): SEQ ID NO: 2651; WAN024GDV; Start 22; Stop 46
acaccgattatcagtctcttcttgc

SEQ ID NO: 332582 - DNA, 25 bp, Artificial
  probe
  misc_feature (1)..(25): SEQ ID NO: 2651; WAN024GDV; Start 397; Stop 421
caagaaatcaagtccctcaaagaag

SEQ ID NO: 332583 - DNA, 25 bp, Artificial
  probe
  misc_feature (1)..(25): SEQ ID NO: 2651; WAN024GDV; Start 386; Stop 410
ctctcattcagcaagaaatcaagtc

SEQ ID NO: 332584 - DNA, 25 bp, Artificial
  probe
  misc_feature (1)..(25): SEQ ID NO: 2651; WAN024GDV; Start 383; Stop 407
ttcctctcattcagcaagaaatcaa

SEQ ID NO: 332585 - DNA, 25 bp, Artificial
  probe
  misc_feature (1)..(25): SEQ ID NO: 2651; WAN024GDV; Start 398; Stop 422
aagaaatcaagtccctcaaagaagc

SEQ ID NO: 332586 - DNA, 25 bp, Artificial
  probe
  misc_feature (1)..(25): SEQ ID NO: 2651; WAN024GDV; Start 24; Stop 48
accgattatcagtctcttcttgctg

SEQ ID NO: 332587 - DNA, 25 bp, Artificial
  probe
  misc_feature (1)..(25): SEQ ID NO: 2651; WAN024GDV; Start 384; Stop 408
tcctctcattcagcaagaaatcaag

SEQ ID NO: 332588 - DNA, 25 bp, Artificial
  probe
  misc_feature (1)..(25): SEQ ID NO: 2651; WAN024GDV; Start 396; Stop 420
gcaagaaatcaagtccctcaaagaa

SEQ ID NO: 332589 - DNA, 25 bp, Artificial
  probe
  misc_feature (1)..(25): SEQ ID NO: 2651; WAN024GDV; Start 387; Stop 411
tctcattcagcaagaaatcaagtcc

SEQ ID NO: 332590 - DNA, 25 bp, Artificial
  probe
  misc_feature (1)..(25): SEQ ID NO: 2651; WAN024GDV; Start 385; Stop 409
cctctcattcagcaagaaatcaagt

SEQ ID NO: 332591 - DNA, 25 bp, Artificial
  probe
  misc_feature (1)..(25): SEQ ID NO: 2651; WAN024GDV; Start 345; Stop 369
ctcttggtcctatgccttgattgtg

SEQ ID NO: 332592 - DNA, 25 bp, Artificial
  probe
  misc_feature (1)..(25): SEQ ID NO: 2651; WAN024GDV; Start 544; Stop 568
gaacatgcacagttgaagaatagct

SEQ ID NO: 332593 - DNA, 25 bp, Artificial
  probe
  misc_feature (1)..(25): SEQ ID NO: 2651; WAN024GDV; Start 542; Stop 566
acgaacatgcacagttgaagaatag

SEQ ID NO: 332594 - DNA, 25 bp, Artificial
  probe
  misc_feature (1)..(25): SEQ ID NO: 2651; WAN024GDV; Start 541; Stop 565
gacgaacatgcacagttgaagaata

SEQ ID NO: 332595 - DNA, 25 bp, Artificial
  probe
  misc_feature (1)..(25): SEQ ID NO: 2651; WAN024GDV; Start 474; Stop 498
taaggttctgatgacagtctttagg

SEQ ID NO: 332596 - DNA, 25 bp, Artificial
  probe
  misc_feature (1)..(25): SEQ ID NO: 2651; WAN024GDV; Start 537; Stop 561
atatgacgaacatgcacagttgaag

SEQ ID NO: 332597 - DNA, 25 bp, Artificial
  probe
  misc_feature (1)..(25): SEQ ID NO: 2651; WAN024GDV; Start 536; Stop 560
gatatgacgaacatgcacagttgaa

SEQ ID NO: 332598 - DNA, 25 bp, Artificial
  probe
  misc_feature (1)..(25): SEQ ID NO: 2651; WAN024GDV; Start 471; Stop 495
cagtaaggttctgatgacagtcttt

SEQ ID NO: 332599 - DNA, 25 bp, Artificial
  probe
  misc_feature (1)..(25): SEQ ID NO: 2651; WAN024GDV; Start 349; Stop 373
tggtcctatgccttgattgtggtat

SEQ ID NO: 332600 - DNA, 25 bp, Artificial
  probe
  misc_feature (1)..(25): SEQ ID NO: 2651; WAN024GDV; Start 467; Stop 491
tttacagtaaggttctgatgacagt

SEQ ID NO: 332601 - DNA, 25 bp, Artificial
  probe
  misc_feature (1)..(25): SEQ ID NO: 2651; WAN024GDV; Start 356; Stop 380
atgccttgattgtggtattcaattc

SEQ ID NO: 332602 - DNA, 25 bp, Artificial
  probe
  misc_feature (1)..(25): SEQ ID NO: 2651; WAN024GDV; Start 472; Stop 496
agtaaggttctgatgacagtcttta

SEQ ID NO: 332603 - DNA, 25 bp, Artificial
  probe
  misc_feature (1)..(25): SEQ ID NO: 2651; WAN024GDV; Start 354; Stop 378
ctatgccttgattgtggtattcaat

SEQ ID NO: 332604 - DNA, 25 bp, Artificial
  probe
  misc_feature (1)..(25): SEQ ID NO: 2651; WAN024GDV; Start 348; Stop 372
ttggtcctatgccttgattgtggta

SEQ ID NO: 332605 - DNA, 25 bp, Artificial
  probe
  misc_feature (1)..(25): SEQ ID NO: 2651; WAN024GDV; Start 203; Stop 227
cagttcagttacacggagatgcttc

SEQ ID NO: 332606 - DNA, 25 bp, Artificial
  probe
  misc_feature (1)..(25): SEQ ID NO: 2652; WAN024EU5; Start 100; Stop 124
atcaatgctaccaacgactactatt

SEQ ID NO: 332607 - DNA, 25 bp, Artificial
  probe
  misc_feature (1)..(25): SEQ ID NO: 2652; WAN024EU5; Start 332; Stop 356
ttcatccacatcagattcagcatat

SEQ ID NO: 332608 - DNA, 25 bp, Artificial
  probe
  misc_feature (1)..(25): SEQ ID NO: 2652; WAN024EU5; Start 99; Stop 123
gatcaatgctaccaacgactactat

SEQ ID NO: 332609 - DNA, 25 bp, Artificial
  probe
  misc_feature (1)..(25): SEQ ID NO: 2652; WAN024EU5; Start 448; Stop 472
attcgcttctatcatcaagataagg

SEQ ID NO: 332610 - DNA, 25 bp, Artificial
  probe
  misc_feature (1)..(25): SEQ ID NO: 2652; WAN024EU5; Start 101; Stop 125
tcaatgctaccaacgactactattt

SEQ ID NO: 332611 - DNA, 25 bp, Artificial
  probe
  misc_feature (1)..(25): SEQ ID NO: 2652; WAN024EU5; Start 331; Stop 355
tttcatccacatcagattcagcata

SEQ ID NO: 332612 - DNA, 25 bp, Artificial
  probe
  misc_feature (1)..(25): SEQ ID NO: 2652; WAN024EU5; Start 533; Stop 557
ccttccctcaaattccttatctcaa

SEQ ID NO: 332613 - DNA, 25 bp, Artificial
  probe
  misc_feature (1)..(25): SEQ ID NO: 2652; WAN024EU5; Start 507; Stop 531
atatggatatgaaatcaaggctggt

SEQ ID NO: 332614 - DNA, 25 bp, Artificial
  probe
  misc_feature (1)..(25): SEQ ID NO: 2652; WAN024EU5; Start 536; Stop 560
tccctcaaattccttatctcaatgt

SEQ ID NO: 332615 - DNA, 25 bp, Artificial
  probe
  misc_feature (1)..(25): SEQ ID NO: 2652; WAN024EU5; Start 152; Stop 176
agaaaccaactcctattcaaatcgt

SEQ ID NO: 332616 - DNA, 25 bp, Artificial
  probe
  misc_feature (1)..(25): SEQ ID NO: 2652; WAN024EU5; Start 151; Stop 175
aagaaaccaactcctattcaaatcg

SEQ ID NO: 332617 - DNA, 25 bp, Artificial
  probe
  misc_feature (1)..(25): SEQ ID NO: 2652; WAN024EU5; Start 508; Stop 532
tatggatatgaaatcaaggctggtg

SEQ ID NO: 332618 - DNA, 25 bp, Artificial
  probe
  misc_feature (1)..(25): SEQ ID NO: 2652; WAN024EU5; Start 381; Stop 405
aatctgctttgtccttcttcacttt

SEQ ID NO: 332619 - DNA, 25 bp, Artificial
  probe
  misc_feature (1)..(25): SEQ ID NO: 2652; WAN024EU5; Start 153; Stop 177
gaaaccaactcctattcaaatcgta

SEQ ID NO: 332620 - DNA, 25 bp, Artificial
  probe
  misc_feature (1)..(25): SEQ ID NO: 2652; WAN024EU5; Start 537; Stop 561
ccctcaaattccttatctcaatgtt

SEQ ID NO: 332621 - DNA, 25 bp, Artificial
  probe
  misc_feature (1)..(25): SEQ ID NO: 2652; WAN024EU5; Start 102; Stop 126
caatgctaccaacgactactatttg

SEQ ID NO: 332622 - DNA, 25 bp, Artificial
  probe
  misc_feature (1)..(25): SEQ ID NO: 2652; WAN024EU5; Start 103; Stop 127
aatgctaccaacgactactatttgt

SEQ ID NO: 332623 - DNA, 25 bp, Artificial
  probe
  misc_feature (1)..(25): SEQ ID NO: 2652; WAN024EU5; Start 506; Stop 530
aatatggatatgaaatcaaggctgg

SEQ ID NO: 332624 - DNA, 25 bp, Artificial
  probe
  misc_feature (1)..(25): SEQ ID NO: 2652; WAN024EU5; Start 447; Stop 471
gattcgcttctatcatcaagataag

SEQ ID NO: 332625 - DNA, 25 bp, Artificial
  probe
  misc_feature (1)..(25): SEQ ID NO: 2652; WAN024EU5; Start 535; Stop 559
ttccctcaaattccttatctcaatg

SEQ ID NO: 332626 - DNA, 25 bp, Artificial
  probe
  misc_feature (1)..(25): SEQ ID NO: 2652; WAN024EU5; Start 534; Stop 558
cttccctcaaattccttatctcaat

SEQ ID NO: 332627 - DNA, 25 bp, Artificial
  probe
  misc_feature (1)..(25): SEQ ID NO: 2652; WAN024EU5; Start 340; Stop 364
catcagattcagcatatggaacaag

SEQ ID NO: 332628 - DNA, 25 bp, Artificial
  probe
  misc_feature (1)..(25): SEQ ID NO: 2652; WAN024EU5; Start 341; Stop 365
atcagattcagcatatggaacaagt

SEQ ID NO: 332629 - DNA, 25 bp, Artificial
  probe
  misc_feature (1)..(25): SEQ ID NO: 2652; WAN024EU5; Start 154; Stop 178
aaaccaactcctattcaaatcgtac

SEQ ID NO: 332630 - DNA, 25 bp, Artificial
  probe
  misc_feature (1)..(25): SEQ ID NO: 2652; WAN024EU5; Start 380; Stop 404
gaatctgctttgtccttcttcactt

SEQ ID NO: 332631 - DNA, 25 bp, Artificial
  probe
  misc_feature (1)..(25): SEQ ID NO: 2652; WAN024EU5; Start 339; Stop 363
acatcagattcagcatatggaacaa

SEQ ID NO: 332632 - DNA, 25 bp, Artificial
  probe
  misc_feature (1)..(25): SEQ ID NO: 2652; WAN024EU5; Start 333; Stop 357
tcatccacatcagattcagcatatg

SEQ ID NO: 332633 - DNA, 25 bp, Artificial
  probe
  misc_feature (1)..(25): SEQ ID NO: 2652; WAN024EU5; Start 452; Stop 476
gcttctatcatcaagataagggaca

SEQ ID NO: 332634 - DNA, 25 bp, Artificial
  probe
  misc_feature (1)..(25): SEQ ID NO: 2652; WAN024EU5; Start 449; Stop 473
ttcgcttctatcatcaagataaggg

SEQ ID NO: 332635 - DNA, 25 bp, Artificial
  probe
  misc_feature (1)..(25): SEQ ID NO: 2652; WAN024EU5; Start 342; Stop 366
tcagattcagcatatggaacaagtc

SEQ ID NO: 332636 - DNA, 25 bp, Artificial
  probe
  misc_feature (1)..(25): SEQ ID NO: 2652; WAN024EU5; Start 108; Stop 132
taccaacgactactatttgtctcag

SEQ ID NO: 332637 - DNA, 25 bp, Artificial
  probe
  misc_feature (1)..(25): SEQ ID NO: 2652; WAN024EU5; Start 107; Stop 131
ctaccaacgactactatttgtctca

SEQ ID NO: 332638 - DNA, 25 bp, Artificial
  probe
  misc_feature (1)..(25): SEQ ID NO: 2652; WAN024EU5; Start 451; Stop 475
cgcttctatcatcaagataagggac

SEQ ID NO: 332639 - DNA, 25 bp, Artificial
  probe
  misc_feature (1)..(25): SEQ ID NO: 2653; WAN024CNK; Start 7; Stop 31
aaggtctgttctaggttcaggaaga

SEQ ID NO: 332640 - DNA, 25 bp, Artificial
  probe
  misc_feature (1)..(25): SEQ ID NO: 2653; WAN024CNK; Start 6; Stop 30
caaggtctgttctaggttcaggaag

SEQ ID NO: 332641 - DNA, 25 bp, Artificial
  probe
  misc_feature (1)..(25): SEQ ID NO: 2653; WAN024CNK; Start 1; Stop 25
atggtcaaggtctgttctaggttca

SEQ ID NO: 332642 - DNA, 25 bp, Artificial
  probe
  misc_feature (1)..(25): SEQ ID NO: 2653; WAN024CNK; Start 5; Stop 29
tcaaggtctgttctaggttcaggaa

SEQ ID NO: 332643 - DNA, 25 bp, Artificial
  probe
  misc_feature (1)..(25): SEQ ID NO: 2653; WAN024CNK; Start 73; Stop 97
tgcttcataccaaacattaatcgta

SEQ ID NO: 332644 - DNA, 25 bp, Artificial
  probe
  misc_feature (1)..(25): SEQ ID NO: 2653; WAN024CNK; Start 72; Stop 96
ttgcttcataccaaacattaatcgt

SEQ ID NO: 332645 - DNA, 25 bp, Artificial
  probe
  misc_feature (1)..(25): SEQ ID NO: 2653; WAN024CNK; Start 74; Stop 98
gcttcataccaaacattaatcgtag

SEQ ID NO: 332646 - DNA, 25 bp, Artificial
  probe
  misc_feature (1)..(25): SEQ ID NO: 2653; WAN024CNK; Start 8; Stop 32
aggtctgttctaggttcaggaagaa

SEQ ID NO: 332647 - DNA, 25 bp, Artificial
  probe
  misc_feature (1)..(25): SEQ ID NO: 2653; WAN024CNK; Start 4; Stop 28
gtcaaggtctgttctaggttcagga

SEQ ID NO: 332648 - DNA, 25 bp, Artificial
  probe
  misc_feature (1)..(25): SEQ ID NO: 2653; WAN024CNK; Start 2; Stop 26
tggtcaaggtctgttctaggttcag

SEQ ID NO: 332649 - DNA, 25 bp, Artificial
  probe
  misc_feature (1)..(25): SEQ ID NO: 2653; WAN024CNK; Start 25; Stop 49
aggaagaacaaacgggaagtgaatg

SEQ ID NO: 332650 - DNA, 25 bp, Artificial
  probe
  misc_feature (1)..(25): SEQ ID NO: 2653; WAN024CNK; Start 24; Stop 48
caggaagaacaaacgggaagtgaat

SEQ ID NO: 332651 - DNA, 25 bp, Artificial
  probe
  misc_feature (1)..(25): SEQ ID NO: 2653; WAN024CNK; Start 35; Stop 59
aacgggaagtgaatgttattttctt

SEQ ID NO: 332652 - DNA, 25 bp, Artificial
  probe
  misc_feature (1)..(25): SEQ ID NO: 2653; WAN024CNK; Start 34; Stop 58
aaacgggaagtgaatgttattttct

SEQ ID NO: 332653 - DNA, 25 bp, Artificial
  probe
  misc_feature (1)..(25): SEQ ID NO: 2653; WAN024CNK; Start 33; Stop 57
caaacgggaagtgaatgttattttc

SEQ ID NO: 332654 - DNA, 25 bp, Artificial
  probe
  misc_feature (1)..(25): SEQ ID NO: 2653; WAN024CNK; Start 75; Stop 99
cttcataccaaacattaatcgtaga

SEQ ID NO: 332655 - DNA, 25 bp, Artificial
  probe
  misc_feature (1)..(25): SEQ ID NO: 2653; WAN024CNK; Start 32; Stop 56
acaaacgggaagtgaatgttatttt

SEQ ID NO: 332656 - DNA, 25 bp, Artificial
  probe
  misc_feature (1)..(25): SEQ ID NO: 2653; WAN024CNK; Start 3; Stop 27
ggtcaaggtctgttctaggttcagg

SEQ ID NO: 332657 - DNA, 25 bp, Artificial
  probe
  misc_feature (1)..(25): SEQ ID NO: 2653; WAN024CNK; Start 71; Stop 95
tttgcttcataccaaacattaatcg

SEQ ID NO: 332658 - DNA, 25 bp, Artificial
  probe
  misc_feature (1)..(25): SEQ ID NO: 2653; WAN024CNK; Start 31; Stop 55
aacaaacgggaagtgaatgttattt

SEQ ID NO: 332659 - DNA, 25 bp, Artificial
  probe
  misc_feature (1)..(25): SEQ ID NO: 2653; WAN024CNK; Start 30; Stop 54
gaacaaacgggaagtgaatgttatt

SEQ ID NO: 332660 - DNA, 25 bp, Artificial
  probe
  misc_feature (1)..(25): SEQ ID NO: 2653; WAN024CNK; Start 29; Stop 53
agaacaaacgggaagtgaatgttat

SEQ ID NO: 332661 - DNA, 25 bp, Artificial
  probe
  misc_feature (1)..(25): SEQ ID NO: 2653; WAN024CNK; Start 28; Stop 52
aagaacaaacgggaagtgaatgtta

SEQ ID NO: 332662 - DNA, 25 bp, Artificial
  probe
  misc_feature (1)..(25): SEQ ID NO: 2653; WAN024CNK; Start 26; Stop 50
ggaagaacaaacgggaagtgaatgt

SEQ ID NO: 332663 - DNA, 25 bp, Artificial
  probe
  misc_feature (1)..(25): SEQ ID NO: 2653; WAN024CNK; Start 76; Stop 100
ttcataccaaacattaatcgtagat

SEQ ID NO: 332664 - DNA, 25 bp, Artificial
  probe
  misc_feature (1)..(25): SEQ ID NO: 2653; WAN024CNK; Start 23; Stop 47
tcaggaagaacaaacgggaagtgaa

SEQ ID NO: 332665 - DNA, 25 bp, Artificial
  probe
  misc_feature (1)..(25): SEQ ID NO: 2653; WAN024CNK; Start 22; Stop 46
ttcaggaagaacaaacgggaagtga

SEQ ID NO: 332666 - DNA, 25 bp, Artificial
  probe
  misc_feature (1)..(25): SEQ ID NO: 2653; WAN024CNK; Start 27; Stop 51
gaagaacaaacgggaagtgaatgtt

SEQ ID NO: 332667 - DNA, 25 bp, Artificial
  probe
  misc_feature (1)..(25): SEQ ID NO: 2653; WAN024CNK; Start 66; Stop 90
agtcttttgcttcataccaaacatt

SEQ ID NO: 332668 - DNA, 25 bp, Artificial
  probe
  misc_feature (1)..(25): SEQ ID NO: 2653; WAN024CNK; Start 65; Stop 89
aagtcttttgcttcataccaaacat

SEQ ID NO: 332669 - DNA, 25 bp, Artificial
  probe
  misc_feature (1)..(25): SEQ ID NO: 2653; WAN024CNK; Start 77; Stop 101
tcataccaaacattaatcgtagata

SEQ ID NO: 332670 - DNA, 25 bp, Artificial
  probe
  misc_feature (1)..(25): SEQ ID NO: 2653; WAN024CNK; Start 42; Stop 66
agtgaatgttattttcttcagcgaa

SEQ ID NO: 332671 - DNA, 25 bp, Artificial
  probe
  misc_feature (1)..(25): SEQ ID NO: 2653; WAN024CNK; Start 41; Stop 65
aagtgaatgttattttcttcagcga

SEQ ID NO: 332672 - DNA, 25 bp, Artificial
  probe
  misc_feature (1)..(25): SEQ ID NO: 2654; WAN024FS8; Start 18; Stop 42
gagggagaggagaaagagcatagag

SEQ ID NO: 332673 - DNA, 25 bp, Artificial
  probe
  misc_feature (1)..(25): SEQ ID NO: 2654; WAN024FS8; Start 16; Stop 40
gagagggagaggagaaagagcatag

SEQ ID NO: 332674 - DNA, 25 bp, Artificial
  probe
  misc_feature (1)..(25): SEQ ID NO: 2654; WAN024FS8; Start 17; Stop 41
agagggagaggagaaagagcataga

SEQ ID NO: 332675 - DNA, 25 bp, Artificial
  probe
  misc_feature (1)..(25): SEQ ID NO: 2654; WAN024FS8; Start 198; Stop 222
tatcagtcaaataattgtccccaac

SEQ ID NO: 332676 - DNA, 25 bp, Artificial
  probe
  misc_feature (1)..(25): SEQ ID NO: 2654; WAN024FS8; Start 199; Stop 223
atcagtcaaataattgtccccaacc

SEQ ID NO: 332677 - DNA, 25 bp, Artificial
  probe
  misc_feature (1)..(25): SEQ ID NO: 2654; WAN024FS8; Start 201; Stop 225
cagtcaaataattgtccccaaccat

SEQ ID NO: 332678 - DNA, 25 bp, Artificial
  probe
  misc_feature (1)..(25): SEQ ID NO: 2654; WAN024FS8; Start 205; Stop 229
caaataattgtccccaaccatgatt

SEQ ID NO: 332679 - DNA, 25 bp, Artificial
  probe
  misc_feature (1)..(25): SEQ ID NO: 2654; WAN024FS8; Start 58; Stop 82
ttagttttcatcaaaatcccactcc

SEQ ID NO: 332680 - DNA, 25 bp, Artificial
  probe
  misc_feature (1)..(25): SEQ ID NO: 2654; WAN024FS8; Start 197; Stop 221
atatcagtcaaataattgtccccaa

SEQ ID NO: 332681 - DNA, 25 bp, Artificial
  probe
  misc_feature (1)..(25): SEQ ID NO: 2654; WAN024FS8; Start 204; Stop 228
tcaaataattgtccccaaccatgat

SEQ ID NO: 332682 - DNA, 25 bp, Artificial
  probe
  misc_feature (1)..(25): SEQ ID NO: 2654; WAN024FS8; Start 207; Stop 231
aataattgtccccaaccatgattaa

SEQ ID NO: 332683 - DNA, 25 bp, Artificial
  probe
  misc_feature (1)..(25): SEQ ID NO: 2654; WAN024FS8; Start 206; Stop 230
aaataattgtccccaaccatgatta

SEQ ID NO: 332684 - DNA, 25 bp, Artificial
  probe
  misc_feature (1)..(25): SEQ ID NO: 2654; WAN024FS8; Start 59; Stop 83
tagttttcatcaaaatcccactccg

SEQ ID NO: 332685 - DNA, 25 bp, Artificial
  probe
  misc_feature (1)..(25): SEQ ID NO: 2654; WAN024FS8; Start 202; Stop 226
agtcaaataattgtccccaaccatg

SEQ ID NO: 332686 - DNA, 25 bp, Artificial
  probe
  misc_feature (1)..(25): SEQ ID NO: 2654; WAN024FS8; Start 200; Stop 224
tcagtcaaataattgtccccaacca

SEQ ID NO: 332687 - DNA, 25 bp, Artificial
  probe
  misc_feature (1)..(25): SEQ ID NO: 2654; WAN024FS8; Start 203; Stop 227
gtcaaataattgtccccaaccatga

SEQ ID NO: 332688 - DNA, 25 bp, Artificial
  probe
  misc_feature (1)..(25): SEQ ID NO: 2654; WAN024FS8; Start 57; Stop 81
tttagttttcatcaaaatcccactc

SEQ ID NO: 332689 - DNA, 25 bp, Artificial
  probe
  misc_feature (1)..(25): SEQ ID NO: 2654; WAN024FS8; Start 27; Stop 51
gagaaagagcatagagccccaaaag

SEQ ID NO: 332690 - DNA, 25 bp, Artificial
  probe
  misc_feature (1)..(25): SEQ ID NO: 2654; WAN024FS8; Start 19; Stop 43
agggagaggagaaagagcatagagc

SEQ ID NO: 332691 - DNA, 25 bp, Artificial
  probe
  misc_feature (1)..(25): SEQ ID NO: 2654; WAN024FS8; Start 56; Stop 80
atttagttttcatcaaaatcccact

SEQ ID NO: 332692 - DNA, 25 bp, Artificial
  probe
  misc_feature (1)..(25): SEQ ID NO: 2654; WAN024FS8; Start 55; Stop 79
aatttagttttcatcaaaatcccac

SEQ ID NO: 332693 - DNA, 25 bp, Artificial
  probe
  misc_feature (1)..(25): SEQ ID NO: 2654; WAN024FS8; Start 54; Stop 78
caatttagttttcatcaaaatccca

SEQ ID NO: 332694 - DNA, 25 bp, Artificial
  probe
  misc_feature (1)..(25): SEQ ID NO: 2654; WAN024FS8; Start 63; Stop 87
tttcatcaaaatcccactccgcaag

SEQ ID NO: 332695 - DNA, 25 bp, Artificial
  probe
  misc_feature (1)..(25): SEQ ID NO: 2654; WAN024FS8; Start 167; Stop 191
gttggaatgccattgtcaatcccag

SEQ ID NO: 332696 - DNA, 25 bp, Artificial
  probe
  misc_feature (1)..(25): SEQ ID NO: 2654; WAN024FS8; Start 53; Stop 77
tcaatttagttttcatcaaaatccc

SEQ ID NO: 332697 - DNA, 25 bp, Artificial
  probe
  misc_feature (1)..(25): SEQ ID NO: 2654; WAN024FS8; Start 62; Stop 86
ttttcatcaaaatcccactccgcaa

SEQ ID NO: 332698 - DNA, 25 bp, Artificial
  probe
  misc_feature (1)..(25): SEQ ID NO: 2654; WAN024FS8; Start 26; Stop 50
ggagaaagagcatagagccccaaaa

SEQ ID NO: 332699 - DNA, 25 bp, Artificial
  probe
  misc_feature (1)..(25): SEQ ID NO: 2654; WAN024FS8; Start 60; Stop 84
agttttcatcaaaatcccactccgc

SEQ ID NO: 332700 - DNA, 25 bp, Artificial
  probe
  misc_feature (1)..(25): SEQ ID NO: 2654; WAN024FS8; Start 61; Stop 85
gttttcatcaaaatcccactccgca

SEQ ID NO: 332701 - DNA, 25 bp, Artificial
  probe
  misc_feature (1)..(25): SEQ ID NO: 2655; WAN024CH7; Start 75; Stop 99
cttgacctgggatgtagtagatatt

SEQ ID NO: 332702 - DNA, 25 bp, Artificial
  probe
  misc_feature (1)..(25): SEQ ID NO: 2655; WAN024CH7; Start 74; Stop 98
gcttgacctgggatgtagtagatat

SEQ ID NO: 332703 - DNA, 25 bp, Artificial
  probe
  misc_feature (1)..(25): SEQ ID NO: 2655; WAN024CH7; Start 113; Stop 137
ttaaattctggagagagcaccttac

SEQ ID NO: 332704 - DNA, 25 bp, Artificial
  probe
  misc_feature (1)..(25): SEQ ID NO: 2655; WAN024CH7; Start 76; Stop 100
ttgacctgggatgtagtagatattt

SEQ ID NO: 332705 - DNA, 25 bp, Artificial
  probe
  misc_feature (1)..(25): SEQ ID NO: 2655; WAN024CH7; Start 114; Stop 138
taaattctggagagagcaccttacg

SEQ ID NO: 332706 - DNA, 25 bp, Artificial
  probe
  misc_feature (1)..(25): SEQ ID NO: 2655; WAN024CH7; Start 112; Stop 136
tttaaattctggagagagcacctta

SEQ ID NO: 332707 - DNA, 25 bp, Artificial
  probe
  misc_feature (1)..(25): SEQ ID NO: 2655; WAN024CH7; Start 111; Stop 135
ctttaaattctggagagagcacctt

SEQ ID NO: 332708 - DNA, 25 bp, Artificial
  probe
  misc_feature (1)..(25): SEQ ID NO: 2655; WAN024CH7; Start 179; Stop 203
ggaacggtcaattcttcaaaggtac

SEQ ID NO: 332709 - DNA, 25 bp, Artificial
  probe
  misc_feature (1)..(25): SEQ ID NO: 2655; WAN024CH7; Start 73; Stop 97
ggcttgacctgggatgtagtagata

SEQ ID NO: 332710 - DNA, 25 bp, Artificial
  probe
  misc_feature (1)..(25): SEQ ID NO: 2655; WAN024CH7; Start 209; Stop 233
atggagtccttaccaccgatagatg

SEQ ID NO: 332711 - DNA, 25 bp, Artificial
  probe
  misc_feature (1)..(25): SEQ ID NO: 2655; WAN024CH7; Start 105; Stop 129
caacagctttaaattctggagagag

SEQ ID NO: 332712 - DNA, 25 bp, Artificial
  probe
  misc_feature (1)..(25): SEQ ID NO: 2655; WAN024CH7; Start 208; Stop 232
catggagtccttaccaccgatagat

SEQ ID NO: 332713 - DNA, 25 bp, Artificial
  probe
  misc_feature (1)..(25): SEQ ID NO: 2655; WAN024CH7; Start 178; Stop 202
cggaacggtcaattcttcaaaggta

SEQ ID NO: 332714 - DNA, 25 bp, Artificial
  probe
  misc_feature (1)..(25): SEQ ID NO: 2655; WAN024CH7; Start 104; Stop 128
ccaacagctttaaattctggagaga

SEQ ID NO: 332715 - DNA, 25 bp, Artificial
  probe
  misc_feature (1)..(25): SEQ ID NO: 2655; WAN024CH7; Start 77; Stop 101
tgacctgggatgtagtagatatttt

SEQ ID NO: 332716 - DNA, 25 bp, Artificial
  probe
  misc_feature (1)..(25): SEQ ID NO: 2655; WAN024CH7; Start 78; Stop 102
gacctgggatgtagtagatattttc

SEQ ID NO: 332717 - DNA, 25 bp, Artificial
  probe
  misc_feature (1)..(25): SEQ ID NO: 2655; WAN024CH7; Start 103; Stop 127
cccaacagctttaaattctggagag

SEQ ID NO: 332718 - DNA, 25 bp, Artificial
  probe
  misc_feature (1)..(25): SEQ ID NO: 2655; WAN024CH7; Start 87; Stop 111
tgtagtagatattttccccaacagc

SEQ ID NO: 332719 - DNA, 25 bp, Artificial
  probe
  misc_feature (1)..(25): SEQ ID NO: 2655; WAN024CH7; Start 42; Stop 66
taatcaagtcaaaatcaatctctgc

SEQ ID NO: 332720 - DNA, 25 bp, Artificial
  probe
  misc_feature (1)..(25): SEQ ID NO: 2655; WAN024CH7; Start 106; Stop 130
aacagctttaaattctggagagagc

SEQ ID NO: 332721 - DNA, 25 bp, Artificial
  probe
  misc_feature (1)..(25): SEQ ID NO: 2655; WAN024CH7; Start 206; Stop 230
gacatggagtccttaccaccgatag

SEQ ID NO: 332722 - DNA, 25 bp, Artificial
  probe
  misc_feature (1)..(25): SEQ ID NO: 2655; WAN024CH7; Start 90; Stop 114
agtagatattttccccaacagcttt

SEQ ID NO: 332723 - DNA, 25 bp, Artificial
  probe
  misc_feature (1)..(25): SEQ ID NO: 2655; WAN024CH7; Start 88; Stop 112
gtagtagatattttccccaacagct

SEQ ID NO: 332724 - DNA, 25 bp, Artificial
  probe
  misc_feature (1)..(25): SEQ ID NO: 2655; WAN024CH7; Start 200; Stop 224
gtaccagacatggagtccttaccac

SEQ ID NO: 332725 - DNA, 25 bp, Artificial
  probe
  misc_feature (1)..(25): SEQ ID NO: 2655; WAN024CH7; Start 89; Stop 113
tagtagatattttccccaacagctt

SEQ ID NO: 332726 - DNA, 25 bp, Artificial
  probe
  misc_feature (1)..(25): SEQ ID NO: 2655; WAN024CH7; Start 79; Stop 103
acctgggatgtagtagatattttcc

SEQ ID NO: 332727 - DNA, 25 bp, Artificial
  probe
  misc_feature (1)..(25): SEQ ID NO: 2655; WAN024CH7; Start 108; Stop 132
cagctttaaattctggagagagcac

SEQ ID NO: 332728 - DNA, 25 bp, Artificial
  probe
  misc_feature (1)..(25): SEQ ID NO: 2655; WAN024CH7; Start 86; Stop 110
atgtagtagatattttccccaacag

SEQ ID NO: 332729 - DNA, 25 bp, Artificial
  probe
  misc_feature (1)..(25): SEQ ID NO: 2655; WAN024CH7; Start 85; Stop 109
gatgtagtagatattttccccaaca

SEQ ID NO: 332730 - DNA, 25 bp, Artificial
  probe
  misc_feature (1)..(25): SEQ ID NO: 2655; WAN024CH7; Start 93; Stop 117
agatattttccccaacagctttaaa

SEQ ID NO: 332731 - DNA, 25 bp, Artificial
  probe
  misc_feature (1)..(25): SEQ ID NO: 2655; WAN024CH7; Start 91; Stop 115
gtagatattttccccaacagcttta

SEQ ID NO: 332732 - DNA, 25 bp, Artificial
  probe
  misc_feature (1)..(25): SEQ ID NO: 2655; WAN024CH7; Start 84; Stop 108
ggatgtagtagatattttccccaac

SEQ ID NO: 332733 - DNA, 25 bp, Artificial
  probe
  misc_feature (1)..(25): SEQ ID NO: 2655; WAN024CH7; Start 207; Stop 231
acatggagtccttaccaccgataga

SEQ ID NO: 332734 - DNA, 25 bp, Artificial
  probe
  misc_feature (1)..(25): SEQ ID NO: 2657; WAN024CT9; Start 1261; Stop 1285
gatatggaagaggataaggtgaagg

SEQ ID NO: 332735 - DNA, 25 bp, Artificial
  probe
  misc_feature (1)..(25): SEQ ID NO: 2657; WAN024CT9; Start 306; Stop 330
gataggttatgagactgtgaaggaa

SEQ ID NO: 332736 - DNA, 25 bp, Artificial
  probe
  misc_feature (1)..(25): SEQ ID NO: 2657; WAN024CT9; Start 1262; Stop 1286
atatggaagaggataaggtgaaggt

SEQ ID NO: 332737 - DNA, 25 bp, Artificial
  probe
  misc_feature (1)..(25): SEQ ID NO: 2657; WAN024CT9; Start 1263; Stop 1287
tatggaagaggataaggtgaaggtt

SEQ ID NO: 332738 - DNA, 25 bp, Artificial
  probe
  misc_feature (1)..(25): SEQ ID NO: 2657; WAN024CT9; Start 1260; Stop 1284
tgatatggaagaggataaggtgaag

SEQ ID NO: 332739 - DNA, 25 bp, Artificial
  probe
  misc_feature (1)..(25): SEQ ID NO: 2657; WAN024CT9; Start 302; Stop 326
atcggataggttatgagactgtgaa

SEQ ID NO: 332740 - DNA, 25 bp, Artificial
  probe
  misc_feature (1)..(25): SEQ ID NO: 2657; WAN024CT9; Start 301; Stop 325
aatcggataggttatgagactgtga

SEQ ID NO: 332741 - DNA, 25 bp, Artificial
  probe
  misc_feature (1)..(25): SEQ ID NO: 2657; WAN024CT9; Start 300; Stop 324
caatcggataggttatgagactgtg

SEQ ID NO: 332742 - DNA, 25 bp, Artificial
  probe
  misc_feature (1)..(25): SEQ ID NO: 2657; WAN024CT9; Start 1099; Stop 1123
gagtcctatcaagagttcaagagta

SEQ ID NO: 332743 - DNA, 25 bp, Artificial
  probe
  misc_feature (1)..(25): SEQ ID NO: 2657; WAN024CT9; Start 314; Stop 338
atgagactgtgaaggaattaactgg

SEQ ID NO: 332744 - DNA, 25 bp, Artificial
  probe
  misc_feature (1)..(25): SEQ ID NO: 2657; WAN024CT9; Start 305; Stop 329
ggataggttatgagactgtgaagga

SEQ ID NO: 332745 - DNA, 25 bp, Artificial
  probe
  misc_feature (1)..(25): SEQ ID NO: 2657; WAN024CT9; Start 307; Stop 331
ataggttatgagactgtgaaggaat

SEQ ID NO: 332746 - DNA, 25 bp, Artificial
  probe
  misc_feature (1)..(25): SEQ ID NO: 2657; WAN024CT9; Start 1259; Stop 1283
ttgatatggaagaggataaggtgaa

SEQ ID NO: 332747 - DNA, 25 bp, Artificial
  probe
  misc_feature (1)..(25): SEQ ID NO: 2657; WAN024CT9; Start 1258; Stop 1282
cttgatatggaagaggataaggtga

SEQ ID NO: 332748 - DNA, 25 bp, Artificial
  probe
  misc_feature (1)..(25): SEQ ID NO: 2657; WAN024CT9; Start 1257; Stop 1281
gcttgatatggaagaggataaggtg

SEQ ID NO: 332749 - DNA, 25 bp, Artificial
  probe
  misc_feature (1)..(25): SEQ ID NO: 2657; WAN024CT9; Start 1109; Stop 1133
aagagttcaagagtaacagagatgc

SEQ ID NO: 332750 - DNA, 25 bp, Artificial
  probe
  misc_feature (1)..(25): SEQ ID NO: 2657; WAN024CT9; Start 309; Stop 333
aggttatgagactgtgaaggaatta

SEQ ID NO: 332751 - DNA, 25 bp, Artificial
  probe
  misc_feature (1)..(25): SEQ ID NO: 2657; WAN024CT9; Start 308; Stop 332
taggttatgagactgtgaaggaatt

SEQ ID NO: 332752 - DNA, 25 bp, Artificial
  probe
  misc_feature (1)..(25): SEQ ID NO: 2657; WAN024CT9; Start 1108; Stop 1132
caagagttcaagagtaacagagatg

SEQ ID NO: 332753 - DNA, 25 bp, Artificial
  probe
  misc_feature (1)..(25): SEQ ID NO: 2657; WAN024CT9; Start 1100; Stop 1124
agtcctatcaagagttcaagagtaa

SEQ ID NO: 332754 - DNA, 25 bp, Artificial
  probe
  misc_feature (1)..(25): SEQ ID NO: 2657; WAN024CT9; Start 303; Stop 327
tcggataggttatgagactgtgaag

SEQ ID NO: 332755 - DNA, 25 bp, Artificial
  probe
  misc_feature (1)..(25): SEQ ID NO: 2657; WAN024CT9; Start 1107; Stop 1131
tcaagagttcaagagtaacagagat

SEQ ID NO: 332756 - DNA, 25 bp, Artificial
  probe
  misc_feature (1)..(25): SEQ ID NO: 2657; WAN024CT9; Start 1106; Stop 1130
atcaagagttcaagagtaacagaga

SEQ ID NO: 332757 - DNA, 25 bp, Artificial
  probe
  misc_feature (1)..(25): SEQ ID NO: 2657; WAN024CT9; Start 298; Stop 322
atcaatcggataggttatgagactg

SEQ ID NO: 332758 - DNA, 25 bp, Artificial
  probe
  misc_feature (1)..(25): SEQ ID NO: 2657; WAN024CT9; Start 316; Stop 340
gagactgtgaaggaattaactggtg

SEQ ID NO: 332759 - DNA, 25 bp, Artificial
  probe
  misc_feature (1)..(25): SEQ ID NO: 2657; WAN024CT9; Start 1102; Stop 1126
tcctatcaagagttcaagagtaaca

SEQ ID NO: 332760 - DNA, 25 bp, Artificial
  probe
  misc_feature (1)..(25): SEQ ID NO: 2657; WAN024CT9; Start 1098; Stop 1122
ggagtcctatcaagagttcaagagt

SEQ ID NO: 332761 - DNA, 25 bp, Artificial
  probe
  misc_feature (1)..(25): SEQ ID NO: 2657; WAN024CT9; Start 299; Stop 323
tcaatcggataggttatgagactgt

SEQ ID NO: 332762 - DNA, 25 bp, Artificial
  probe
  misc_feature (1)..(25): SEQ ID NO: 2657; WAN024CT9; Start 1103; Stop 1127
cctatcaagagttcaagagtaacag

SEQ ID NO: 332763 - DNA, 25 bp, Artificial
  probe
  misc_feature (1)..(25): SEQ ID NO: 2657; WAN024CT9; Start 1101; Stop 1125
gtcctatcaagagttcaagagtaac

SEQ ID NO: 332764 - DNA, 25 bp, Artificial
  probe
  misc_feature (1)..(25): SEQ ID NO: 2657; WAN024CT9; Start 387; Stop 411
gcacaatcacatcattatcaattca

SEQ ID NO: 332765 - DNA, 25 bp, Artificial
  probe
  misc_feature (1)..(25): SEQ ID NO: 2657; WAN024CT9; Start 310; Stop 334
ggttatgagactgtgaaggaattaa

SEQ ID NO: 332766 - DNA, 25 bp, Artificial
  probe
  misc_feature (1)..(25): SEQ ID NO: 2657; WAN024CT9; Start 561; Stop 585
taatcacaagtatgaactcaagcag

SEQ ID NO: 332767 - DNA, 25 bp, Artificial
  probe
  misc_feature (1)..(25): SEQ ID NO: 2658; WAN024CTB; Start 381; Stop 405
tcatatccacaatcacatcatccta

SEQ ID NO: 332768 - DNA, 25 bp, Artificial
  probe
  misc_feature (1)..(25): SEQ ID NO: 2658; WAN024CTB; Start 382; Stop 406
catatccacaatcacatcatcctaa

SEQ ID NO: 332769 - DNA, 25 bp, Artificial
  probe
  misc_feature (1)..(25): SEQ ID NO: 2658; WAN024CTB; Start 1536; Stop 1560
agagaatatgattgaacaagtccaa

SEQ ID NO: 332770 - DNA, 25 bp, Artificial
  probe
  misc_feature (1)..(25): SEQ ID NO: 2658; WAN024CTB; Start 1535; Stop 1559
tagagaatatgattgaacaagtcca

SEQ ID NO: 332771 - DNA, 25 bp, Artificial
  probe
  misc_feature (1)..(25): SEQ ID NO: 2658; WAN024CTB; Start 1215; Stop 1239
tggtatccgacaagaaggacttatt

SEQ ID NO: 332772 - DNA, 25 bp, Artificial
  probe
  misc_feature (1)..(25): SEQ ID NO: 2658; WAN024CTB; Start 1214; Stop 1238
ttggtatccgacaagaaggacttat

SEQ ID NO: 332773 - DNA, 25 bp, Artificial
  probe
  misc_feature (1)..(25): SEQ ID NO: 2658; WAN024CTB; Start 387; Stop 411
ccacaatcacatcatcctaaattca

SEQ ID NO: 332774 - DNA, 25 bp, Artificial
  probe
  misc_feature (1)..(25): SEQ ID NO: 2658; WAN024CTB; Start 386; Stop 410
tccacaatcacatcatcctaaattc

SEQ ID NO: 332775 - DNA, 25 bp, Artificial
  probe
  misc_feature (1)..(25): SEQ ID NO: 2658; WAN024CTB; Start 1534; Stop 1558
ctagagaatatgattgaacaagtcc

SEQ ID NO: 332776 - DNA, 25 bp, Artificial
  probe
  misc_feature (1)..(25): SEQ ID NO: 2658; WAN024CTB; Start 1201; Stop 1225
attaaggtacagtttggtatccgac

SEQ ID NO: 332777 - DNA, 25 bp, Artificial
  probe
  misc_feature (1)..(25): SEQ ID NO: 2658; WAN024CTB; Start 1200; Stop 1224
cattaaggtacagtttggtatccga

SEQ ID NO: 332778 - DNA, 25 bp, Artificial
  probe
  misc_feature (1)..(25): SEQ ID NO: 2658; WAN024CTB; Start 1199; Stop 1223
acattaaggtacagtttggtatccg

SEQ ID NO: 332779 - DNA, 25 bp, Artificial
  probe
  misc_feature (1)..(25): SEQ ID NO: 2658; WAN024CTB; Start 385; Stop 409
atccacaatcacatcatcctaaatt

SEQ ID NO: 332780 - DNA, 25 bp, Artificial
  probe
  misc_feature (1)..(25): SEQ ID NO: 2658; WAN024CTB; Start 1202; Stop 1226
ttaaggtacagtttggtatccgaca

SEQ ID NO: 332781 - DNA, 25 bp, Artificial
  probe
  misc_feature (1)..(25): SEQ ID NO: 2658; WAN024CTB; Start 384; Stop 408
tatccacaatcacatcatcctaaat

SEQ ID NO: 332782 - DNA, 25 bp, Artificial
  probe
  misc_feature (1)..(25): SEQ ID NO: 2658; WAN024CTB; Start 383; Stop 407
atatccacaatcacatcatcctaaa

SEQ ID NO: 332783 - DNA, 25 bp, Artificial
  probe
  misc_feature (1)..(25): SEQ ID NO: 2658; WAN024CTB; Start 388; Stop 412
cacaatcacatcatcctaaattcaa

SEQ ID NO: 332784 - DNA, 25 bp, Artificial
  probe
  misc_feature (1)..(25): SEQ ID NO: 2658; WAN024CTB; Start 1207; Stop 1231
gtacagtttggtatccgacaagaag

SEQ ID NO: 332785 - DNA, 25 bp, Artificial
  probe
  misc_feature (1)..(25): SEQ ID NO: 2658; WAN024CTB; Start 1203; Stop 1227
taaggtacagtttggtatccgacaa

SEQ ID NO: 332786 - DNA, 25 bp, Artificial
  probe
  misc_feature (1)..(25): SEQ ID NO: 2658; WAN024CTB; Start 1216; Stop 1240
ggtatccgacaagaaggacttattt

SEQ ID NO: 332787 - DNA, 25 bp, Artificial
  probe
  misc_feature (1)..(25): SEQ ID NO: 2658; WAN024CTB; Start 1208; Stop 1232
tacagtttggtatccgacaagaagg

SEQ ID NO: 332788 - DNA, 25 bp, Artificial
  probe
  misc_feature (1)..(25): SEQ ID NO: 2658; WAN024CTB; Start 1198; Stop 1222
tacattaaggtacagtttggtatcc

SEQ ID NO: 332789 - DNA, 25 bp, Artificial
  probe
  misc_feature (1)..(25): SEQ ID NO: 2658; WAN024CTB; Start 1537; Stop 1561
gagaatatgattgaacaagtccaaa

SEQ ID NO: 332790 - DNA, 25 bp, Artificial
  probe
  misc_feature (1)..(25): SEQ ID NO: 2658; WAN024CTB; Start 1213; Stop 1237
tttggtatccgacaagaaggactta

SEQ ID NO: 332791 - DNA, 25 bp, Artificial
  probe
  misc_feature (1)..(25): SEQ ID NO: 2658; WAN024CTB; Start 389; Stop 413
acaatcacatcatcctaaattcaat

SEQ ID NO: 332792 - DNA, 25 bp, Artificial
  probe
  misc_feature (1)..(25): SEQ ID NO: 2658; WAN024CTB; Start 1206; Stop 1230
ggtacagtttggtatccgacaagaa

SEQ ID NO: 332793 - DNA, 25 bp, Artificial
  probe
  misc_feature (1)..(25): SEQ ID NO: 2658; WAN024CTB; Start 1204; Stop 1228
aaggtacagtttggtatccgacaag

SEQ ID NO: 332794 - DNA, 25 bp, Artificial
  probe
  misc_feature (1)..(25): SEQ ID NO: 2658; WAN024CTB; Start 1609; Stop 1633
acgacaaatagttctagcaatttag

SEQ ID NO: 332795 - DNA, 25 bp, Artificial
  probe
  misc_feature (1)..(25): SEQ ID NO: 2658; WAN024CTB; Start 1513; Stop 1537
ttcattgcccaaatatcatatctag

SEQ ID NO: 332796 - DNA, 25 bp, Artificial
  probe
  misc_feature (1)..(25): SEQ ID NO: 2658; WAN024CTB; Start 1194; Stop 1218
aatttacattaaggtacagtttggt

SEQ ID NO: 332797 - DNA, 25 bp, Artificial
  probe
  misc_feature (1)..(25): SEQ ID NO: 2658; WAN024CTB; Start 1212; Stop 1236
gtttggtatccgacaagaaggactt

SEQ ID NO: 332798 - DNA, 25 bp, Artificial
  probe
  misc_feature (1)..(25): SEQ ID NO: 2658; WAN024CTB; Start 1205; Stop 1229
aggtacagtttggtatccgacaaga

SEQ ID NO: 332799 - DNA, 25 bp, Artificial
  probe
  misc_feature (1)..(25): SEQ ID NO: 2658; WAN024CTB; Start 1610; Stop 1634
cgacaaatagttctagcaatttaga

SEQ ID NO: 332800 - DNA, 25 bp, Artificial
  probe
  misc_feature (1)..(25): SEQ ID NO: 2659; WAN024DU5; Start 73; Stop 97
gctgttggctcatctaagactaata

SEQ ID NO: 332801 - DNA, 25 bp, Artificial
  probe
  misc_feature (1)..(25): SEQ ID NO: 2659; WAN024DU5; Start 180; Stop 204
aagtgattcatcaattccaaccaga

SEQ ID NO: 332802 - DNA, 25 bp, Artificial
  probe
  misc_feature (1)..(25): SEQ ID NO: 2659; WAN024DU5; Start 74; Stop 98
ctgttggctcatctaagactaatat

SEQ ID NO: 332803 - DNA, 25 bp, Artificial
  probe
  misc_feature (1)..(25): SEQ ID NO: 2659; WAN024DU5; Start 181; Stop 205
agtgattcatcaattccaaccagag

SEQ ID NO: 332804 - DNA, 25 bp, Artificial
  probe
  misc_feature (1)..(25): SEQ ID NO: 2659; WAN024DU5; Start 222; Stop 246
agtcttcacagcatcttcttcagaa

SEQ ID NO: 332805 - DNA, 25 bp, Artificial
  probe
  misc_feature (1)..(25): SEQ ID NO: 2659; WAN024DU5; Start 221; Stop 245
cagtcttcacagcatcttcttcaga

SEQ ID NO: 332806 - DNA, 25 bp, Artificial
  probe
  misc_feature (1)..(25): SEQ ID NO: 2659; WAN024DU5; Start 182; Stop 206
gtgattcatcaattccaaccagagc

SEQ ID NO: 332807 - DNA, 25 bp, Artificial
  probe
  misc_feature (1)..(25): SEQ ID NO: 2659; WAN024DU5; Start 75; Stop 99
tgttggctcatctaagactaatata

SEQ ID NO: 332808 - DNA, 25 bp, Artificial
  probe
  misc_feature (1)..(25): SEQ ID NO: 2659; WAN024DU5; Start 185; Stop 209
attcatcaattccaaccagagccag

SEQ ID NO: 332809 - DNA, 25 bp, Artificial
  probe
  misc_feature (1)..(25): SEQ ID NO: 2659; WAN024DU5; Start 184; Stop 208
gattcatcaattccaaccagagcca

SEQ ID NO: 332810 - DNA, 25 bp, Artificial
  probe
  misc_feature (1)..(25): SEQ ID NO: 2659; WAN024DU5; Start 179; Stop 203
aaagtgattcatcaattccaaccag

SEQ ID NO: 332811 - DNA, 25 bp, Artificial
  probe
  misc_feature (1)..(25): SEQ ID NO: 2659; WAN024DU5; Start 226; Stop 250
ttcacagcatcttcttcagaaactc

SEQ ID NO: 332812 - DNA, 25 bp, Artificial
  probe
  misc_feature (1)..(25): SEQ ID NO: 2659; WAN024DU5; Start 225; Stop 249
cttcacagcatcttcttcagaaact

SEQ ID NO: 332813 - DNA, 25 bp, Artificial
  probe
  misc_feature (1)..(25): SEQ ID NO: 2659; WAN024DU5; Start 224; Stop 248
tcttcacagcatcttcttcagaaac

SEQ ID NO: 332814 - DNA, 25 bp, Artificial
  probe
  misc_feature (1)..(25): SEQ ID NO: 2659; WAN024DU5; Start 223; Stop 247
gtcttcacagcatcttcttcagaaa

SEQ ID NO: 332815 - DNA, 25 bp, Artificial
  probe
  misc_feature (1)..(25): SEQ ID NO: 2659; WAN024DU5; Start 230; Stop 254
cagcatcttcttcagaaactccaaa

SEQ ID NO: 332816 - DNA, 25 bp, Artificial
  probe
  misc_feature (1)..(25): SEQ ID NO: 2659; WAN024DU5; Start 76; Stop 100
gttggctcatctaagactaatatag

SEQ ID NO: 332817 - DNA, 25 bp, Artificial
  probe
  misc_feature (1)..(25): SEQ ID NO: 2659; WAN024DU5; Start 220; Stop 244
gcagtcttcacagcatcttcttcag

SEQ ID NO: 332818 - DNA, 25 bp, Artificial
  probe
  misc_feature (1)..(25): SEQ ID NO: 2659; WAN024DU5; Start 183; Stop 207
tgattcatcaattccaaccagagcc

SEQ ID NO: 332819 - DNA, 25 bp, Artificial
  probe
  misc_feature (1)..(25): SEQ ID NO: 2659; WAN024DU5; Start 314; Stop 338
caaactgaaataccaagccaacctg

SEQ ID NO: 332820 - DNA, 25 bp, Artificial
  probe
  misc_feature (1)..(25): SEQ ID NO: 2659; WAN024DU5; Start 229; Stop 253
acagcatcttcttcagaaactccaa

SEQ ID NO: 332821 - DNA, 25 bp, Artificial
  probe
  misc_feature (1)..(25): SEQ ID NO: 2659; WAN024DU5; Start 72; Stop 96
agctgttggctcatctaagactaat

SEQ ID NO: 332822 - DNA, 25 bp, Artificial
  probe
  misc_feature (1)..(25): SEQ ID NO: 2659; WAN024DU5; Start 315; Stop 339
aaactgaaataccaagccaacctgt

SEQ ID NO: 332823 - DNA, 25 bp, Artificial
  probe
  misc_feature (1)..(25): SEQ ID NO: 2659; WAN024DU5; Start 317; Stop 341
actgaaataccaagccaacctgttt

SEQ ID NO: 332824 - DNA, 25 bp, Artificial
  probe
  misc_feature (1)..(25): SEQ ID NO: 2659; WAN024DU5; Start 316; Stop 340
aactgaaataccaagccaacctgtt

SEQ ID NO: 332825 - DNA, 25 bp, Artificial
  probe
  misc_feature (1)..(25): SEQ ID NO: 2659; WAN024DU5; Start 227; Stop 251
tcacagcatcttcttcagaaactcc

SEQ ID NO: 332826 - DNA, 25 bp, Artificial
  probe
  misc_feature (1)..(25): SEQ ID NO: 2659; WAN024DU5; Start 228; Stop 252
cacagcatcttcttcagaaactcca

SEQ ID NO: 332827 - DNA, 25 bp, Artificial
  probe
  misc_feature (1)..(25): SEQ ID NO: 2659; WAN024DU5; Start 322; Stop 346
aataccaagccaacctgttttctaa

SEQ ID NO: 332828 - DNA, 25 bp, Artificial
  probe
  misc_feature (1)..(25): SEQ ID NO: 2659; WAN024DU5; Start 321; Stop 345
aaataccaagccaacctgttttcta

SEQ ID NO: 332829 - DNA, 25 bp, Artificial
  probe
  misc_feature (1)..(25): SEQ ID NO: 2659; WAN024DU5; Start 186; Stop 210
ttcatcaattccaaccagagccagt

SEQ ID NO: 332830 - DNA, 25 bp, Artificial
  probe
  misc_feature (1)..(25): SEQ ID NO: 2659; WAN024DU5; Start 189; Stop 213
atcaattccaaccagagccagtttc

SEQ ID NO: 332831 - DNA, 25 bp, Artificial
  probe
  misc_feature (1)..(25): SEQ ID NO: 2659; WAN024DU5; Start 187; Stop 211
tcatcaattccaaccagagccagtt

SEQ ID NO: 332832 - DNA, 25 bp, Artificial
  probe
  misc_feature (1)..(25): SEQ ID NO: 2659; WAN024DU5; Start 276; Stop 300
gtccttcaaaaccgtttcttcaaaa

SEQ ID NO: 332833 - DNA, 25 bp, Artificial
  probe
  misc_feature (1)..(25): SEQ ID NO: 2660; WAN024F44; Start 113; Stop 137
aaatcagcaaatctagcccaaatag

SEQ ID NO: 332834 - DNA, 25 bp, Artificial
  probe
  misc_feature (1)..(25): SEQ ID NO: 2660; WAN024F44; Start 114; Stop 138
aatcagcaaatctagcccaaatagg

SEQ ID NO: 332835 - DNA, 25 bp, Artificial
  probe
  misc_feature (1)..(25): SEQ ID NO: 2660; WAN024F44; Start 117; Stop 141
cagcaaatctagcccaaataggaaa

SEQ ID NO: 332836 - DNA, 25 bp, Artificial
  probe
  misc_feature (1)..(25): SEQ ID NO: 2660; WAN024F44; Start 115; Stop 139
atcagcaaatctagcccaaatagga

SEQ ID NO: 332837 - DNA, 25 bp, Artificial
  probe
  misc_feature (1)..(25): SEQ ID NO: 2660; WAN024F44; Start 116; Stop 140
tcagcaaatctagcccaaataggaa

SEQ ID NO: 332838 - DNA, 25 bp, Artificial
  probe
  misc_feature (1)..(25): SEQ ID NO: 2660; WAN024F44; Start 212; Stop 236
aaacaagaacagctcctaacaaatt

SEQ ID NO: 332839 - DNA, 25 bp, Artificial
  probe
  misc_feature (1)..(25): SEQ ID NO: 2660; WAN024F44; Start 214; Stop 238
acaagaacagctcctaacaaattaa

SEQ ID NO: 332840 - DNA, 25 bp, Artificial
  probe
  misc_feature (1)..(25): SEQ ID NO: 2660; WAN024F44; Start 213; Stop 237
aacaagaacagctcctaacaaatta

SEQ ID NO: 332841 - DNA, 25 bp, Artificial
  probe
  misc_feature (1)..(25): SEQ ID NO: 2660; WAN024F44; Start 215; Stop 239
caagaacagctcctaacaaattaat

SEQ ID NO: 332842 - DNA, 25 bp, Artificial
  probe
  misc_feature (1)..(25): SEQ ID NO: 2660; WAN024F44; Start 118; Stop 142
agcaaatctagcccaaataggaaaa

SEQ ID NO: 332843 - DNA, 25 bp, Artificial
  probe
  misc_feature (1)..(25): SEQ ID NO: 2660; WAN024F44; Start 112; Stop 136
aaaatcagcaaatctagcccaaata

SEQ ID NO: 332844 - DNA, 25 bp, Artificial
  probe
  misc_feature (1)..(25): SEQ ID NO: 2660; WAN024F44; Start 32; Stop 56
ttgctaaaatagtcaccaacactgt

SEQ ID NO: 332845 - DNA, 25 bp, Artificial
  probe
  misc_feature (1)..(25): SEQ ID NO: 2660; WAN024F44; Start 35; Stop 59
ctaaaatagtcaccaacactgtctt

SEQ ID NO: 332846 - DNA, 25 bp, Artificial
  probe
  misc_feature (1)..(25): SEQ ID NO: 2660; WAN024F44; Start 34; Stop 58
gctaaaatagtcaccaacactgtct

SEQ ID NO: 332847 - DNA, 25 bp, Artificial
  probe
  misc_feature (1)..(25): SEQ ID NO: 2660; WAN024F44; Start 33; Stop 57
tgctaaaatagtcaccaacactgtc

SEQ ID NO: 332848 - DNA, 25 bp, Artificial
  probe
  misc_feature (1)..(25): SEQ ID NO: 2660; WAN024F44; Start 200; Stop 224
agttatctgacaaaacaagaacagc

SEQ ID NO: 332849 - DNA, 25 bp, Artificial
  probe
  misc_feature (1)..(25): SEQ ID NO: 2660; WAN024F44; Start 36; Stop 60
taaaatagtcaccaacactgtcttt

SEQ ID NO: 332850 - DNA, 25 bp, Artificial
  probe
  misc_feature (1)..(25): SEQ ID NO: 2660; WAN024F44; Start 198; Stop 222
caagttatctgacaaaacaagaaca

SEQ ID NO: 332851 - DNA, 25 bp, Artificial
  probe
  misc_feature (1)..(25): SEQ ID NO: 2660; WAN024F44; Start 197; Stop 221
acaagttatctgacaaaacaagaac

SEQ ID NO: 332852 - DNA, 25 bp, Artificial
  probe
  misc_feature (1)..(25): SEQ ID NO: 2660; WAN024F44; Start 194; Stop 218
tgaacaagttatctgacaaaacaag

SEQ ID NO: 332853 - DNA, 25 bp, Artificial
  probe
  misc_feature (1)..(25): SEQ ID NO: 2660; WAN024F44; Start 192; Stop 216
gatgaacaagttatctgacaaaaca

SEQ ID NO: 332854 - DNA, 25 bp, Artificial
  probe
  misc_feature (1)..(25): SEQ ID NO: 2660; WAN024F44; Start 191; Stop 215
tgatgaacaagttatctgacaaaac

SEQ ID NO: 332855 - DNA, 25 bp, Artificial
  probe
  misc_feature (1)..(25): SEQ ID NO: 2660; WAN024F44; Start 26; Stop 50
gaagtgttgctaaaatagtcaccaa

SEQ ID NO: 332856 - DNA, 25 bp, Artificial
  probe
  misc_feature (1)..(25): SEQ ID NO: 2660; WAN024F44; Start 195; Stop 219
gaacaagttatctgacaaaacaaga

SEQ ID NO: 332857 - DNA, 25 bp, Artificial
  probe
  misc_feature (1)..(25): SEQ ID NO: 2660; WAN024F44; Start 25; Stop 49
agaagtgttgctaaaatagtcacca

SEQ ID NO: 332858 - DNA, 25 bp, Artificial
  probe
  misc_feature (1)..(25): SEQ ID NO: 2660; WAN024F44; Start 24; Stop 48
aagaagtgttgctaaaatagtcacc

SEQ ID NO: 332859 - DNA, 25 bp, Artificial
  probe
  misc_feature (1)..(25): SEQ ID NO: 2660; WAN024F44; Start 37; Stop 61
aaaatagtcaccaacactgtctttt

SEQ ID NO: 332860 - DNA, 25 bp, Artificial
  probe
  misc_feature (1)..(25): SEQ ID NO: 2660; WAN024F44; Start 211; Stop 235
aaaacaagaacagctcctaacaaat

SEQ ID NO: 332861 - DNA, 25 bp, Artificial
  probe
  misc_feature (1)..(25): SEQ ID NO: 2660; WAN024F44; Start 210; Stop 234
caaaacaagaacagctcctaacaaa

SEQ ID NO: 332862 - DNA, 25 bp, Artificial
  probe
  misc_feature (1)..(25): SEQ ID NO: 2660; WAN024F44; Start 22; Stop 46
aaaagaagtgttgctaaaatagtca

SEQ ID NO: 332863 - DNA, 25 bp, Artificial
  probe
  misc_feature (1)..(25): SEQ ID NO: 2660; WAN024F44; Start 196; Stop 220
aacaagttatctgacaaaacaagaa

SEQ ID NO: 332864 - DNA, 25 bp, Artificial
  probe
  misc_feature (1)..(25): SEQ ID NO: 2660; WAN024F44; Start 193; Stop 217
atgaacaagttatctgacaaaacaa

SEQ ID NO: 332865 - DNA, 25 bp, Artificial
  probe
  misc_feature (1)..(25): SEQ ID NO: 2660; WAN024F44; Start 189; Stop 213
tttgatgaacaagttatctgacaaa

SEQ ID NO: 332866 - DNA, 25 bp, Artificial
  probe
  misc_feature (1)..(25): SEQ ID NO: 2661; WAN024GA5; Start 7; Stop 31
ccattcttgcttgaagtgattgata

SEQ ID NO: 332867 - DNA, 25 bp, Artificial
  probe
  misc_feature (1)..(25): SEQ ID NO: 2661; WAN024GA5; Start 249; Stop 273
cattgaattgttctctgagtgttgc

SEQ ID NO: 332868 - DNA, 25 bp, Artificial
  probe
  misc_feature (1)..(25): SEQ ID NO: 2661; WAN024GA5; Start 248; Stop 272
acattgaattgttctctgagtgttg

SEQ ID NO: 332869 - DNA, 25 bp, Artificial
  probe
  misc_feature (1)..(25): SEQ ID NO: 2661; WAN024GA5; Start 8; Stop 32
cattcttgcttgaagtgattgatat

SEQ ID NO: 332870 - DNA, 25 bp, Artificial
  probe
  misc_feature (1)..(25): SEQ ID NO: 2661; WAN024GA5; Start 254; Stop 278
aattgttctctgagtgttgcgtcta

SEQ ID NO: 332871 - DNA, 25 bp, Artificial
  probe
  misc_feature (1)..(25): SEQ ID NO: 2661; WAN024GA5; Start 126; Stop 150
caacatctgcttccgtcttgataac

SEQ ID NO: 332872 - DNA, 25 bp, Artificial
  probe
  misc_feature (1)..(25): SEQ ID NO: 2661; WAN024GA5; Start 127; Stop 151
aacatctgcttccgtcttgataaca

SEQ ID NO: 332873 - DNA, 25 bp, Artificial
  probe
  misc_feature (1)..(25): SEQ ID NO: 2661; WAN024GA5; Start 250; Stop 274
attgaattgttctctgagtgttgcg

SEQ ID NO: 332874 - DNA, 25 bp, Artificial
  probe
  misc_feature (1)..(25): SEQ ID NO: 2661; WAN024GA5; Start 21; Stop 45
agtgattgatatcgtcttctgtctc

SEQ ID NO: 332875 - DNA, 25 bp, Artificial
  probe
  misc_feature (1)..(25): SEQ ID NO: 2661; WAN024GA5; Start 13; Stop 37
ttgcttgaagtgattgatatcgtct

SEQ ID NO: 332876 - DNA, 25 bp, Artificial
  probe
  misc_feature (1)..(25): SEQ ID NO: 2661; WAN024GA5; Start 10; Stop 34
ttcttgcttgaagtgattgatatcg

SEQ ID NO: 332877 - DNA, 25 bp, Artificial
  probe
  misc_feature (1)..(25): SEQ ID NO: 2661; WAN024GA5; Start 255; Stop 279
attgttctctgagtgttgcgtctag

SEQ ID NO: 332878 - DNA, 25 bp, Artificial
  probe
  misc_feature (1)..(25): SEQ ID NO: 2661; WAN024GA5; Start 20; Stop 44
aagtgattgatatcgtcttctgtct

SEQ ID NO: 332879 - DNA, 25 bp, Artificial
  probe
  misc_feature (1)..(25): SEQ ID NO: 2661; WAN024GA5; Start 12; Stop 36
cttgcttgaagtgattgatatcgtc

SEQ ID NO: 332880 - DNA, 25 bp, Artificial
  probe
  misc_feature (1)..(25): SEQ ID NO: 2661; WAN024GA5; Start 14; Stop 38
tgcttgaagtgattgatatcgtctt

SEQ ID NO: 332881 - DNA, 25 bp, Artificial
  probe
  misc_feature (1)..(25): SEQ ID NO: 2661; WAN024GA5; Start 11; Stop 35
tcttgcttgaagtgattgatatcgt

SEQ ID NO: 332882 - DNA, 25 bp, Artificial
  probe
  misc_feature (1)..(25): SEQ ID NO: 2661; WAN024GA5; Start 22; Stop 46
gtgattgatatcgtcttctgtctca

SEQ ID NO: 332883 - DNA, 25 bp, Artificial
  probe
  misc_feature (1)..(25): SEQ ID NO: 2661; WAN024GA5; Start 76; Stop 100
attatcaggtttggcaatcattgga

SEQ ID NO: 332884 - DNA, 25 bp, Artificial
  probe
  misc_feature (1)..(25): SEQ ID NO: 2661; WAN024GA5; Start 75; Stop 99
cattatcaggtttggcaatcattgg

SEQ ID NO: 332885 - DNA, 25 bp, Artificial
  probe
  misc_feature (1)..(25): SEQ ID NO: 2661; WAN024GA5; Start 6; Stop 30
cccattcttgcttgaagtgattgat

SEQ ID NO: 332886 - DNA, 25 bp, Artificial
  probe
  misc_feature (1)..(25): SEQ ID NO: 2661; WAN024GA5; Start 128; Stop 152
acatctgcttccgtcttgataacag

SEQ ID NO: 332887 - DNA, 25 bp, Artificial
  probe
  misc_feature (1)..(25): SEQ ID NO: 2661; WAN024GA5; Start 77; Stop 101
ttatcaggtttggcaatcattggaa

SEQ ID NO: 332888 - DNA, 25 bp, Artificial
  probe
  misc_feature (1)..(25): SEQ ID NO: 2661; WAN024GA5; Start 251; Stop 275
ttgaattgttctctgagtgttgcgt

SEQ ID NO: 332889 - DNA, 25 bp, Artificial
  probe
  misc_feature (1)..(25): SEQ ID NO: 2661; WAN024GA5; Start 78; Stop 102
tatcaggtttggcaatcattggaag

SEQ ID NO: 332890 - DNA, 25 bp, Artificial
  probe
  misc_feature (1)..(25): SEQ ID NO: 2661; WAN024GA5; Start 253; Stop 277
gaattgttctctgagtgttgcgtct

SEQ ID NO: 332891 - DNA, 25 bp, Artificial
  probe
  misc_feature (1)..(25): SEQ ID NO: 2661; WAN024GA5; Start 29; Stop 53
atatcgtcttctgtctcaagtttaa

SEQ ID NO: 332892 - DNA, 25 bp, Artificial
  probe
  misc_feature (1)..(25): SEQ ID NO: 2661; WAN024GA5; Start 9; Stop 33
attcttgcttgaagtgattgatatc

SEQ ID NO: 332893 - DNA, 25 bp, Artificial
  probe
  misc_feature (1)..(25): SEQ ID NO: 2661; WAN024GA5; Start 32; Stop 56
tcgtcttctgtctcaagtttaaagg

SEQ ID NO: 332894 - DNA, 25 bp, Artificial
  probe
  misc_feature (1)..(25): SEQ ID NO: 2661; WAN024GA5; Start 34; Stop 58
gtcttctgtctcaagtttaaaggtt

SEQ ID NO: 332895 - DNA, 25 bp, Artificial
  probe
  misc_feature (1)..(25): SEQ ID NO: 2661; WAN024GA5; Start 252; Stop 276
tgaattgttctctgagtgttgcgtc

SEQ ID NO: 332896 - DNA, 25 bp, Artificial
  probe
  misc_feature (1)..(25): SEQ ID NO: 2661; WAN024GA5; Start 31; Stop 55
atcgtcttctgtctcaagtttaaag

SEQ ID NO: 332897 - DNA, 25 bp, Artificial
  probe
  misc_feature (1)..(25): SEQ ID NO: 2661; WAN024GA5; Start 36; Stop 60
cttctgtctcaagtttaaaggttgc

SEQ ID NO: 332898 - DNA, 25 bp, Artificial
  probe
  misc_feature (1)..(25): SEQ ID NO: 2661; WAN024GA5; Start 33; Stop 57
cgtcttctgtctcaagtttaaaggt

SEQ ID NO: 332899 - DNA, 25 bp, Artificial
  probe
  misc_feature (1)..(25): SEQ ID NO: 2662; WAN024DV8; Start 201; Stop 225
aatgacctgttcttcactgatagtc

SEQ ID NO: 332900 - DNA, 25 bp, Artificial
  probe
  misc_feature (1)..(25): SEQ ID NO: 2662; WAN024DV8; Start 207; Stop 231
ctgttcttcactgatagtcacgatc

SEQ ID NO: 332901 - DNA, 25 bp, Artificial
  probe
  misc_feature (1)..(25): SEQ ID NO: 2662; WAN024DV8; Start 206; Stop 230
cctgttcttcactgatagtcacgat

SEQ ID NO: 332902 - DNA, 25 bp, Artificial
  probe
  misc_feature (1)..(25): SEQ ID NO: 2662; WAN024DV8; Start 139; Stop 163
tacataggacgaagaaagagaaagg

SEQ ID NO: 332903 - DNA, 25 bp, Artificial
  probe
  misc_feature (1)..(25): SEQ ID NO: 2662; WAN024DV8; Start 140; Stop 164
acataggacgaagaaagagaaaggt

SEQ ID NO: 332904 - DNA, 25 bp, Artificial
  probe
  misc_feature (1)..(25): SEQ ID NO: 2662; WAN024DV8; Start 200; Stop 224
aaatgacctgttcttcactgatagt

SEQ ID NO: 332905 - DNA, 25 bp, Artificial
  probe
  misc_feature (1)..(25): SEQ ID NO: 2662; WAN024DV8; Start 198; Stop 222
ggaaatgacctgttcttcactgata

SEQ ID NO: 332906 - DNA, 25 bp, Artificial
  probe
  misc_feature (1)..(25): SEQ ID NO: 2662; WAN024DV8; Start 199; Stop 223
gaaatgacctgttcttcactgatag

SEQ ID NO: 332907 - DNA, 25 bp, Artificial
  probe
  misc_feature (1)..(25): SEQ ID NO: 2662; WAN024DV8; Start 138; Stop 162
atacataggacgaagaaagagaaag

SEQ ID NO: 332908 - DNA, 25 bp, Artificial
  probe
  misc_feature (1)..(25): SEQ ID NO: 2662; WAN024DV8; Start 205; Stop 229
acctgttcttcactgatagtcacga

SEQ ID NO: 332909 - DNA, 25 bp, Artificial
  probe
  misc_feature (1)..(25): SEQ ID NO: 2662; WAN024DV8; Start 204; Stop 228
gacctgttcttcactgatagtcacg

SEQ ID NO: 332910 - DNA, 25 bp, Artificial
  probe
  misc_feature (1)..(25): SEQ ID NO: 2662; WAN024DV8; Start 141; Stop 165
cataggacgaagaaagagaaaggtc

SEQ ID NO: 332911 - DNA, 25 bp, Artificial
  probe
  misc_feature (1)..(25): SEQ ID NO: 2662; WAN024DV8; Start 129; Stop 153
agttaagatatacataggacgaaga

SEQ ID NO: 332912 - DNA, 25 bp, Artificial
  probe
  misc_feature (1)..(25): SEQ ID NO: 2662; WAN024DV8; Start 142; Stop 166
ataggacgaagaaagagaaaggtca

SEQ ID NO: 332913 - DNA, 25 bp, Artificial
  probe
  misc_feature (1)..(25): SEQ ID NO: 2662; WAN024DV8; Start 143; Stop 167
taggacgaagaaagagaaaggtcaa

SEQ ID NO: 332914 - DNA, 25 bp, Artificial
  probe
  misc_feature (1)..(25): SEQ ID NO: 2662; WAN024DV8; Start 243; Stop 267
atattggtccaaactcattgaactc

SEQ ID NO: 332915 - DNA, 25 bp, Artificial
  probe
  misc_feature (1)..(25): SEQ ID NO: 2662; WAN024DV8; Start 242; Stop 266
gatattggtccaaactcattgaact

SEQ ID NO: 332916 - DNA, 25 bp, Artificial
  probe
  misc_feature (1)..(25): SEQ ID NO: 2662; WAN024DV8; Start 241; Stop 265
agatattggtccaaactcattgaac

SEQ ID NO: 332917 - DNA, 25 bp, Artificial
  probe
  misc_feature (1)..(25): SEQ ID NO: 2662; WAN024DV8; Start 239; Stop 263
agagatattggtccaaactcattga

SEQ ID NO: 332918 - DNA, 25 bp, Artificial
  probe
  misc_feature (1)..(25): SEQ ID NO: 2662; WAN024DV8; Start 333; Stop 357
cccgatttccataaagctcttgtaa

SEQ ID NO: 332919 - DNA, 25 bp, Artificial
  probe
  misc_feature (1)..(25): SEQ ID NO: 2662; WAN024DV8; Start 244; Stop 268
tattggtccaaactcattgaactcg

SEQ ID NO: 332920 - DNA, 25 bp, Artificial
  probe
  misc_feature (1)..(25): SEQ ID NO: 2662; WAN024DV8; Start 240; Stop 264
gagatattggtccaaactcattgaa

SEQ ID NO: 332921 - DNA, 25 bp, Artificial
  probe
  misc_feature (1)..(25): SEQ ID NO: 2662; WAN024DV8; Start 135; Stop 159
gatatacataggacgaagaaagaga

SEQ ID NO: 332922 - DNA, 25 bp, Artificial
  probe
  misc_feature (1)..(25): SEQ ID NO: 2662; WAN024DV8; Start 134; Stop 158
agatatacataggacgaagaaagag

SEQ ID NO: 332923 - DNA, 25 bp, Artificial
  probe
  misc_feature (1)..(25): SEQ ID NO: 2662; WAN024DV8; Start 324; Stop 348
gatagctgtcccgatttccataaag

SEQ ID NO: 332924 - DNA, 25 bp, Artificial
  probe
  misc_feature (1)..(25): SEQ ID NO: 2662; WAN024DV8; Start 238; Stop 262
aagagatattggtccaaactcattg

SEQ ID NO: 332925 - DNA, 25 bp, Artificial
  probe
  misc_feature (1)..(25): SEQ ID NO: 2662; WAN024DV8; Start 236; Stop 260
caaagagatattggtccaaactcat

SEQ ID NO: 332926 - DNA, 25 bp, Artificial
  probe
  misc_feature (1)..(25): SEQ ID NO: 2662; WAN024DV8; Start 144; Stop 168
aggacgaagaaagagaaaggtcaaa

SEQ ID NO: 332927 - DNA, 25 bp, Artificial
  probe
  misc_feature (1)..(25): SEQ ID NO: 2662; WAN024DV8; Start 332; Stop 356
tcccgatttccataaagctcttgta

SEQ ID NO: 332928 - DNA, 25 bp, Artificial
  probe
  misc_feature (1)..(25): SEQ ID NO: 2662; WAN024DV8; Start 185; Stop 209
caatgacaaagagggaaatgacctg

SEQ ID NO: 332929 - DNA, 25 bp, Artificial
  probe
  misc_feature (1)..(25): SEQ ID NO: 2662; WAN024DV8; Start 137; Stop 161
tatacataggacgaagaaagagaaa

SEQ ID NO: 332930 - DNA, 25 bp, Artificial
  probe
  misc_feature (1)..(25): SEQ ID NO: 2662; WAN024DV8; Start 237; Stop 261
aaagagatattggtccaaactcatt

SEQ ID NO: 332931 - DNA, 25 bp, Artificial
  probe
  misc_feature (1)..(25): SEQ ID NO: 2662; WAN024DV8; Start 197; Stop 221
gggaaatgacctgttcttcactgat

SEQ ID NO: 332932 - DNA, 25 bp, Artificial
  probe
  misc_feature (1)..(25): SEQ ID NO: 2663; WAN024FF2; Start 928; Stop 952
ttcttaccagttacgctattaccag

SEQ ID NO: 332933 - DNA, 25 bp, Artificial
  probe
  misc_feature (1)..(25): SEQ ID NO: 2663; WAN024FF2; Start 927; Stop 951
cttcttaccagttacgctattacca

SEQ ID NO: 332934 - DNA, 25 bp, Artificial
  probe
  misc_feature (1)..(25): SEQ ID NO: 2663; WAN024FF2; Start 931; Stop 955
ttaccagttacgctattaccaggaa

SEQ ID NO: 332935 - DNA, 25 bp, Artificial
  probe
  misc_feature (1)..(25): SEQ ID NO: 2663; WAN024FF2; Start 926; Stop 950
acttcttaccagttacgctattacc

SEQ ID NO: 332936 - DNA, 25 bp, Artificial
  probe
  misc_feature (1)..(25): SEQ ID NO: 2663; WAN024FF2; Start 930; Stop 954
cttaccagttacgctattaccagga

SEQ ID NO: 332937 - DNA, 25 bp, Artificial
  probe
  misc_feature (1)..(25): SEQ ID NO: 2663; WAN024FF2; Start 929; Stop 953
tcttaccagttacgctattaccagg

SEQ ID NO: 332938 - DNA, 25 bp, Artificial
  probe
  misc_feature (1)..(25): SEQ ID NO: 2663; WAN024FF2; Start 923; Stop 947
gttacttcttaccagttacgctatt

SEQ ID NO: 332939 - DNA, 25 bp, Artificial
  probe
  misc_feature (1)..(25): SEQ ID NO: 2663; WAN024FF2; Start 862; Stop 886
gcttgtctcactattgatcttctct

SEQ ID NO: 332940 - DNA, 25 bp, Artificial
  probe
  misc_feature (1)..(25): SEQ ID NO: 2663; WAN024FF2; Start 860; Stop 884
ttgcttgtctcactattgatcttct

SEQ ID NO: 332941 - DNA, 25 bp, Artificial
  probe
  misc_feature (1)..(25): SEQ ID NO: 2663; WAN024FF2; Start 865; Stop 889
tgtctcactattgatcttctcttgc

SEQ ID NO: 332942 - DNA, 25 bp, Artificial
  probe
  misc_feature (1)..(25): SEQ ID NO: 2663; WAN024FF2; Start 861; Stop 885
tgcttgtctcactattgatcttctc

SEQ ID NO: 332943 - DNA, 25 bp, Artificial
  probe
  misc_feature (1)..(25): SEQ ID NO: 2663; WAN024FF2; Start 292; Stop 316
agtgaacatgattctgagaaggaac

SEQ ID NO: 332944 - DNA, 25 bp, Artificial
  probe
  misc_feature (1)..(25): SEQ ID NO: 2663; WAN024FF2; Start 859; Stop 883
attgcttgtctcactattgatcttc

SEQ ID NO: 332945 - DNA, 25 bp, Artificial
  probe
  misc_feature (1)..(25): SEQ ID NO: 2663; WAN024FF2; Start 858; Stop 882
gattgcttgtctcactattgatctt

SEQ ID NO: 332946 - DNA, 25 bp, Artificial
  probe
  misc_feature (1)..(25): SEQ ID NO: 2663; WAN024FF2; Start 925; Stop 949
tacttcttaccagttacgctattac

SEQ ID NO: 332947 - DNA, 25 bp, Artificial
  probe
  misc_feature (1)..(25): SEQ ID NO: 2663; WAN024FF2; Start 288; Stop 312
caacagtgaacatgattctgagaag

SEQ ID NO: 332948 - DNA, 25 bp, Artificial
  probe
  misc_feature (1)..(25): SEQ ID NO: 2663; WAN024FF2; Start 922; Stop 946
ggttacttcttaccagttacgctat

SEQ ID NO: 332949 - DNA, 25 bp, Artificial
  probe
  misc_feature (1)..(25): SEQ ID NO: 2663; WAN024FF2; Start 864; Stop 888
ttgtctcactattgatcttctcttg

SEQ ID NO: 332950 - DNA, 25 bp, Artificial
  probe
  misc_feature (1)..(25): SEQ ID NO: 2663; WAN024FF2; Start 291; Stop 315
cagtgaacatgattctgagaaggaa

SEQ ID NO: 332951 - DNA, 25 bp, Artificial
  probe
  misc_feature (1)..(25): SEQ ID NO: 2663; WAN024FF2; Start 293; Stop 317
gtgaacatgattctgagaaggaacg

SEQ ID NO: 332952 - DNA, 25 bp, Artificial
  probe
  misc_feature (1)..(25): SEQ ID NO: 2663; WAN024FF2; Start 289; Stop 313
aacagtgaacatgattctgagaagg

SEQ ID NO: 332953 - DNA, 25 bp, Artificial
  probe
  misc_feature (1)..(25): SEQ ID NO: 2663; WAN024FF2; Start 607; Stop 631
gctcctattatcaatgtttccagtg

SEQ ID NO: 332954 - DNA, 25 bp, Artificial
  probe
  misc_feature (1)..(25): SEQ ID NO: 2663; WAN024FF2; Start 863; Stop 887
cttgtctcactattgatcttctctt

SEQ ID NO: 332955 - DNA, 25 bp, Artificial
  probe
  misc_feature (1)..(25): SEQ ID NO: 2663; WAN024FF2; Start 932; Stop 956
taccagttacgctattaccaggaaa

SEQ ID NO: 332956 - DNA, 25 bp, Artificial
  probe
  misc_feature (1)..(25): SEQ ID NO: 2663; WAN024FF2; Start 290; Stop 314
acagtgaacatgattctgagaagga

SEQ ID NO: 332957 - DNA, 25 bp, Artificial
  probe
  misc_feature (1)..(25): SEQ ID NO: 2663; WAN024FF2; Start 866; Stop 890
gtctcactattgatcttctcttgca

SEQ ID NO: 332958 - DNA, 25 bp, Artificial
  probe
  misc_feature (1)..(25): SEQ ID NO: 2663; WAN024FF2; Start 924; Stop 948
ttacttcttaccagttacgctatta

SEQ ID NO: 332959 - DNA, 25 bp, Artificial
  probe
  misc_feature (1)..(25): SEQ ID NO: 2663; WAN024FF2; Start 857; Stop 881
agattgcttgtctcactattgatct

SEQ ID NO: 332960 - DNA, 25 bp, Artificial
  probe
  misc_feature (1)..(25): SEQ ID NO: 2663; WAN024FF2; Start 837; Stop 861
tatcaagcaacctttggaagagatt

SEQ ID NO: 332961 - DNA, 25 bp, Artificial
  probe
  misc_feature (1)..(25): SEQ ID NO: 2663; WAN024FF2; Start 834; Stop 858
tactatcaagcaacctttggaagag

SEQ ID NO: 332962 - DNA, 25 bp, Artificial
  probe
  misc_feature (1)..(25): SEQ ID NO: 2663; WAN024FF2; Start 833; Stop 857
ctactatcaagcaacctttggaaga

SEQ ID NO: 332963 - DNA, 25 bp, Artificial
  probe
  misc_feature (1)..(25): SEQ ID NO: 2663; WAN024FF2; Start 287; Stop 311
gcaacagtgaacatgattctgagaa

SEQ ID NO: 332964 - DNA, 25 bp, Artificial
  probe
  misc_feature (1)..(25): SEQ ID NO: 2663; WAN024FF2; Start 836; Stop 860
ctatcaagcaacctttggaagagat

SEQ ID NO: 332965 - DNA, 25 bp, Artificial
  probe
  misc_feature (1)..(25): SEQ ID NO: 2664; WAN024G9H; Start 157; Stop 181
gccgttaaagttaatggtatccgta

SEQ ID NO: 332966 - DNA, 25 bp, Artificial
  probe
  misc_feature (1)..(25): SEQ ID NO: 2664; WAN024G9H; Start 158; Stop 182
ccgttaaagttaatggtatccgtac

SEQ ID NO: 332967 - DNA, 25 bp, Artificial
  probe
  misc_feature (1)..(25): SEQ ID NO: 2664; WAN024G9H; Start 206; Stop 230
catttcatgtgcgtcaagtaagatt

SEQ ID NO: 332968 - DNA, 25 bp, Artificial
  probe
  misc_feature (1)..(25): SEQ ID NO: 2664; WAN024G9H; Start 207; Stop 231
atttcatgtgcgtcaagtaagattg

SEQ ID NO: 332969 - DNA, 25 bp, Artificial
  probe
  misc_feature (1)..(25): SEQ ID NO: 2664; WAN024G9H; Start 47; Stop 71
ttgacacctgtaaagatacatccaa

SEQ ID NO: 332970 - DNA, 25 bp, Artificial
  probe
  misc_feature (1)..(25): SEQ ID NO: 2664; WAN024G9H; Start 46; Stop 70
tttgacacctgtaaagatacatcca

SEQ ID NO: 332971 - DNA, 25 bp, Artificial
  probe
  misc_feature (1)..(25): SEQ ID NO: 2664; WAN024G9H; Start 48; Stop 72
tgacacctgtaaagatacatccaat

SEQ ID NO: 332972 - DNA, 25 bp, Artificial
  probe
  misc_feature (1)..(25): SEQ ID NO: 2664; WAN024G9H; Start 45; Stop 69
ctttgacacctgtaaagatacatcc

SEQ ID NO: 332973 - DNA, 25 bp, Artificial
  probe
  misc_feature (1)..(25): SEQ ID NO: 2664; WAN024G9H; Start 234; Stop 258
caaaagtcataaagaaacgaatgcg

SEQ ID NO: 332974 - DNA, 25 bp, Artificial
  probe
  misc_feature (1)..(25): SEQ ID NO: 2664; WAN024G9H; Start 233; Stop 257
ccaaaagtcataaagaaacgaatgc

SEQ ID NO: 332975 - DNA, 25 bp, Artificial
  probe
  misc_feature (1)..(25): SEQ ID NO: 2664; WAN024G9H; Start 49; Stop 73
gacacctgtaaagatacatccaata

SEQ ID NO: 332976 - DNA, 25 bp, Artificial
  probe
  misc_feature (1)..(25): SEQ ID NO: 2664; WAN024G9H; Start 153; Stop 177
cttggccgttaaagttaatggtatc

SEQ ID NO: 332977 - DNA, 25 bp, Artificial
  probe
  misc_feature (1)..(25): SEQ ID NO: 2664; WAN024G9H; Start 149; Stop 173
atttcttggccgttaaagttaatgg

SEQ ID NO: 332978 - DNA, 25 bp, Artificial
  probe
  misc_feature (1)..(25): SEQ ID NO: 2664; WAN024G9H; Start 232; Stop 256
accaaaagtcataaagaaacgaatg

SEQ ID NO: 332979 - DNA, 25 bp, Artificial
  probe
  misc_feature (1)..(25): SEQ ID NO: 2664; WAN024G9H; Start 152; Stop 176
tcttggccgttaaagttaatggtat

SEQ ID NO: 332980 - DNA, 25 bp, Artificial
  probe
  misc_feature (1)..(25): SEQ ID NO: 2664; WAN024G9H; Start 151; Stop 175
ttcttggccgttaaagttaatggta

SEQ ID NO: 332981 - DNA, 25 bp, Artificial
  probe
  misc_feature (1)..(25): SEQ ID NO: 2664; WAN024G9H; Start 146; Stop 170
acaatttcttggccgttaaagttaa

SEQ ID NO: 332982 - DNA, 25 bp, Artificial
  probe
  misc_feature (1)..(25): SEQ ID NO: 2664; WAN024G9H; Start 145; Stop 169
aacaatttcttggccgttaaagtta

SEQ ID NO: 332983 - DNA, 25 bp, Artificial
  probe
  misc_feature (1)..(25): SEQ ID NO: 2664; WAN024G9H; Start 180; Stop 204
tacgaaggagtccaacattttcaag

SEQ ID NO: 332984 - DNA, 25 bp, Artificial
  probe
  misc_feature (1)..(25): SEQ ID NO: 2664; WAN024G9H; Start 154; Stop 178
ttggccgttaaagttaatggtatcc

SEQ ID NO: 332985 - DNA, 25 bp, Artificial
  probe
  misc_feature (1)..(25): SEQ ID NO: 2664; WAN024G9H; Start 208; Stop 232
tttcatgtgcgtcaagtaagattga

SEQ ID NO: 332986 - DNA, 25 bp, Artificial
  probe
  misc_feature (1)..(25): SEQ ID NO: 2664; WAN024G9H; Start 148; Stop 172
aatttcttggccgttaaagttaatg

SEQ ID NO: 332987 - DNA, 25 bp, Artificial
  probe
  misc_feature (1)..(25): SEQ ID NO: 2664; WAN024G9H; Start 205; Stop 229
acatttcatgtgcgtcaagtaagat

SEQ ID NO: 332988 - DNA, 25 bp, Artificial
  probe
  misc_feature (1)..(25): SEQ ID NO: 2664; WAN024G9H; Start 144; Stop 168
gaacaatttcttggccgttaaagtt

SEQ ID NO: 332989 - DNA, 25 bp, Artificial
  probe
  misc_feature (1)..(25): SEQ ID NO: 2664; WAN024G9H; Start 50; Stop 74
acacctgtaaagatacatccaatat

SEQ ID NO: 332990 - DNA, 25 bp, Artificial
  probe
  misc_feature (1)..(25): SEQ ID NO: 2664; WAN024G9H; Start 188; Stop 212
agtccaacattttcaagacatttca

SEQ ID NO: 332991 - DNA, 25 bp, Artificial
  probe
  misc_feature (1)..(25): SEQ ID NO: 2664; WAN024G9H; Start 186; Stop 210
ggagtccaacattttcaagacattt

SEQ ID NO: 332992 - DNA, 25 bp, Artificial
  probe
  misc_feature (1)..(25): SEQ ID NO: 2664; WAN024G9H; Start 150; Stop 174
tttcttggccgttaaagttaatggt

SEQ ID NO: 332993 - DNA, 25 bp, Artificial
  probe
  misc_feature (1)..(25): SEQ ID NO: 2664; WAN024G9H; Start 202; Stop 226
aagacatttcatgtgcgtcaagtaa

SEQ ID NO: 332994 - DNA, 25 bp, Artificial
  probe
  misc_feature (1)..(25): SEQ ID NO: 2664; WAN024G9H; Start 147; Stop 171
caatttcttggccgttaaagttaat

SEQ ID NO: 332995 - DNA, 25 bp, Artificial
  probe
  misc_feature (1)..(25): SEQ ID NO: 2664; WAN024G9H; Start 187; Stop 211
gagtccaacattttcaagacatttc

SEQ ID NO: 332996 - DNA, 25 bp, Artificial
  probe
  misc_feature (1)..(25): SEQ ID NO: 2664; WAN024G9H; Start 185; Stop 209
aggagtccaacattttcaagacatt

SEQ ID NO: 332997 - DNA, 25 bp, Artificial
  probe
  misc_feature (1)..(25): SEQ ID NO: 2664; WAN024G9H; Start 184; Stop 208
aaggagtccaacattttcaagacat

SEQ ID NO: 332998 - DNA, 25 bp, Artificial
  probe
  misc_feature (1)..(25): SEQ ID NO: 2665; WAN024GHK; Start 44; Stop 68
gaaccgtcgtttccttgatattaaa

SEQ ID NO: 332999 - DNA, 25 bp, Artificial
  probe
  misc_feature (1)..(25): SEQ ID NO: 2665; WAN024GHK; Start 46; Stop 70
accgtcgtttccttgatattaaatt

SEQ ID NO: 333000 - DNA, 25 bp, Artificial
  probe
  misc_feature (1)..(25): SEQ ID NO: 2665; WAN024GHK; Start 45; Stop 69
aaccgtcgtttccttgatattaaat

SEQ ID NO: 333001 - DNA, 25 bp, Artificial
  probe
  misc_feature (1)..(25): SEQ ID NO: 2665; WAN024GHK; Start 67; Stop 91
aatttattattgctggcagttacac

SEQ ID NO: 333002 - DNA, 25 bp, Artificial
  probe
  misc_feature (1)..(25): SEQ ID NO: 2665; WAN024GHK; Start 68; Stop 92
atttattattgctggcagttacact

SEQ ID NO: 333003 - DNA, 25 bp, Artificial
  probe
  misc_feature (1)..(25): SEQ ID NO: 2665; WAN024GHK; Start 164; Stop 188
ttggagggaacacttcaaatgagag

SEQ ID NO: 333004 - DNA, 25 bp, Artificial
  probe
  misc_feature (1)..(25): SEQ ID NO: 2665; WAN024GHK; Start 123; Stop 147
ctgcaaggctgaaataatgttatca

SEQ ID NO: 333005 - DNA, 25 bp, Artificial
  probe
  misc_feature (1)..(25): SEQ ID NO: 2665; WAN024GHK; Start 124; Stop 148
tgcaaggctgaaataatgttatcat

SEQ ID NO: 333006 - DNA, 25 bp, Artificial
  probe
  misc_feature (1)..(25): SEQ ID NO: 2665; WAN024GHK; Start 175; Stop 199
acttcaaatgagagtgacggtgttt

SEQ ID NO: 333007 - DNA, 25 bp, Artificial
  probe
  misc_feature (1)..(25): SEQ ID NO: 2665; WAN024GHK; Start 47; Stop 71
ccgtcgtttccttgatattaaattt

SEQ ID NO: 333008 - DNA, 25 bp, Artificial
  probe
  misc_feature (1)..(25): SEQ ID NO: 2665; WAN024GHK; Start 125; Stop 149
gcaaggctgaaataatgttatcatt

SEQ ID NO: 333009 - DNA, 25 bp, Artificial
  probe
  misc_feature (1)..(25): SEQ ID NO: 2665; WAN024GHK; Start 117; Stop 141
catatcctgcaaggctgaaataatg

SEQ ID NO: 333010 - DNA, 25 bp, Artificial
  probe
  misc_feature (1)..(25): SEQ ID NO: 2665; WAN024GHK; Start 122; Stop 146
cctgcaaggctgaaataatgttatc

SEQ ID NO: 333011 - DNA, 25 bp, Artificial
  probe
  misc_feature (1)..(25): SEQ ID NO: 2665; WAN024GHK; Start 118; Stop 142
atatcctgcaaggctgaaataatgt

SEQ ID NO: 333012 - DNA, 25 bp, Artificial
  probe
  misc_feature (1)..(25): SEQ ID NO: 2665; WAN024GHK; Start 66; Stop 90
aaatttattattgctggcagttaca

SEQ ID NO: 333013 - DNA, 25 bp, Artificial
  probe
  misc_feature (1)..(25): SEQ ID NO: 2665; WAN024GHK; Start 121; Stop 145
tcctgcaaggctgaaataatgttat

SEQ ID NO: 333014 - DNA, 25 bp, Artificial
  probe
  misc_feature (1)..(25): SEQ ID NO: 2665; WAN024GHK; Start 120; Stop 144
atcctgcaaggctgaaataatgtta

SEQ ID NO: 333015 - DNA, 25 bp, Artificial
  probe
  misc_feature (1)..(25): SEQ ID NO: 2665; WAN024GHK; Start 119; Stop 143
tatcctgcaaggctgaaataatgtt

SEQ ID NO: 333016 - DNA, 25 bp, Artificial
  probe
  misc_feature (1)..(25): SEQ ID NO: 2665; WAN024GHK; Start 43; Stop 67
cgaaccgtcgtttccttgatattaa

SEQ ID NO: 333017 - DNA, 25 bp, Artificial
  probe
  misc_feature (1)..(25): SEQ ID NO: 2665; WAN024GHK; Start 72; Stop 96
attattgctggcagttacactgata

SEQ ID NO: 333018 - DNA, 25 bp, Artificial
  probe
  misc_feature (1)..(25): SEQ ID NO: 2665; WAN024GHK; Start 71; Stop 95
tattattgctggcagttacactgat

SEQ ID NO: 333019 - DNA, 25 bp, Artificial
  probe
  misc_feature (1)..(25): SEQ ID NO: 2665; WAN024GHK; Start 73; Stop 97
ttattgctggcagttacactgataa

SEQ ID NO: 333020 - DNA, 25 bp, Artificial
  probe
  misc_feature (1)..(25): SEQ ID NO: 2665; WAN024GHK; Start 70; Stop 94
ttattattgctggcagttacactga

SEQ ID NO: 333021 - DNA, 25 bp, Artificial
  probe
  misc_feature (1)..(25): SEQ ID NO: 2665; WAN024GHK; Start 165; Stop 189
tggagggaacacttcaaatgagagt

SEQ ID NO: 333022 - DNA, 25 bp, Artificial
  probe
  misc_feature (1)..(25): SEQ ID NO: 2665; WAN024GHK; Start 176; Stop 200
cttcaaatgagagtgacggtgtttg

SEQ ID NO: 333023 - DNA, 25 bp, Artificial
  probe
  misc_feature (1)..(25): SEQ ID NO: 2665; WAN024GHK; Start 16; Stop 40
aaatcattttggataaagtcagcca

SEQ ID NO: 333024 - DNA, 25 bp, Artificial
  probe
  misc_feature (1)..(25): SEQ ID NO: 2665; WAN024GHK; Start 135; Stop 159
aataatgttatcattacccacggct

SEQ ID NO: 333025 - DNA, 25 bp, Artificial
  probe
  misc_feature (1)..(25): SEQ ID NO: 2665; WAN024GHK; Start 134; Stop 158
aaataatgttatcattacccacggc

SEQ ID NO: 333026 - DNA, 25 bp, Artificial
  probe
  misc_feature (1)..(25): SEQ ID NO: 2665; WAN024GHK; Start 136; Stop 160
ataatgttatcattacccacggctg

SEQ ID NO: 333027 - DNA, 25 bp, Artificial
  probe
  misc_feature (1)..(25): SEQ ID NO: 2665; WAN024GHK; Start 84; Stop 108
agttacactgataaaatggggagcc

SEQ ID NO: 333028 - DNA, 25 bp, Artificial
  probe
  misc_feature (1)..(25): SEQ ID NO: 2665; WAN024GHK; Start 116; Stop 140
gcatatcctgcaaggctgaaataat

SEQ ID NO: 333029 - DNA, 25 bp, Artificial
  probe
  misc_feature (1)..(25): SEQ ID NO: 2665; WAN024GHK; Start 69; Stop 93
tttattattgctggcagttacactg

SEQ ID NO: 333030 - DNA, 25 bp, Artificial
  probe
  misc_feature (1)..(25): SEQ ID NO: 2665; WAN024GHK; Start 133; Stop 157
gaaataatgttatcattacccacgg

SEQ ID NO: 333031 - DNA, 25 bp, Artificial
  probe
  misc_feature (1)..(25): SEQ ID NO: 2666; WAN024DQH; Start 76; Stop 100
gtcaatatcgtcgctatggtatgta

SEQ ID NO: 333032 - DNA, 25 bp, Artificial
  probe
  misc_feature (1)..(25): SEQ ID NO: 2666; WAN024DQH; Start 77; Stop 101
tcaatatcgtcgctatggtatgtat

SEQ ID NO: 333033 - DNA, 25 bp, Artificial
  probe
  misc_feature (1)..(25): SEQ ID NO: 2666; WAN024DQH; Start 78; Stop 102
caatatcgtcgctatggtatgtatt

SEQ ID NO: 333034 - DNA, 25 bp, Artificial
  probe
  misc_feature (1)..(25): SEQ ID NO: 2666; WAN024DQH; Start 165; Stop 189
aatattcctagcaatagccatgttg

SEQ ID NO: 333035 - DNA, 25 bp, Artificial
  probe
  misc_feature (1)..(25): SEQ ID NO: 2666; WAN024DQH; Start 26; Stop 50
tactgctcctactctatgtatttgc

SEQ ID NO: 333036 - DNA, 25 bp, Artificial
  probe
  misc_feature (1)..(25): SEQ ID NO: 2666; WAN024DQH; Start 31; Stop 55
ctcctactctatgtatttgcgacac

SEQ ID NO: 333037 - DNA, 25 bp, Artificial
  probe
  misc_feature (1)..(25): SEQ ID NO: 2666; WAN024DQH; Start 28; Stop 52
ctgctcctactctatgtatttgcga

SEQ ID NO: 333038 - DNA, 25 bp, Artificial
  probe
  misc_feature (1)..(25): SEQ ID NO: 2666; WAN024DQH; Start 38; Stop 62
tctatgtatttgcgacaccagaaag

SEQ ID NO: 333039 - DNA, 25 bp, Artificial
  probe
  misc_feature (1)..(25): SEQ ID NO: 2666; WAN024DQH; Start 37; Stop 61
ctctatgtatttgcgacaccagaaa

SEQ ID NO: 333040 - DNA, 25 bp, Artificial
  probe
  misc_feature (1)..(25): SEQ ID NO: 2666; WAN024DQH; Start 34; Stop 58
ctactctatgtatttgcgacaccag

SEQ ID NO: 333041 - DNA, 25 bp, Artificial
  probe
  misc_feature (1)..(25): SEQ ID NO: 2666; WAN024DQH; Start 79; Stop 103
aatatcgtcgctatggtatgtattt

SEQ ID NO: 333042 - DNA, 25 bp, Artificial
  probe
  misc_feature (1)..(25): SEQ ID NO: 2666; WAN024DQH; Start 29; Stop 53
tgctcctactctatgtatttgcgac

SEQ ID NO: 333043 - DNA, 25 bp, Artificial
  probe
  misc_feature (1)..(25): SEQ ID NO: 2666; WAN024DQH; Start 27; Stop 51
actgctcctactctatgtatttgcg

SEQ ID NO: 333044 - DNA, 25 bp, Artificial
  probe
  misc_feature (1)..(25): SEQ ID NO: 2666; WAN024DQH; Start 35; Stop 59
tactctatgtatttgcgacaccaga

SEQ ID NO: 333045 - DNA, 25 bp, Artificial
  probe
  misc_feature (1)..(25): SEQ ID NO: 2666; WAN024DQH; Start 25; Stop 49
ttactgctcctactctatgtatttg

SEQ ID NO: 333046 - DNA, 25 bp, Artificial
  probe
  misc_feature (1)..(25): SEQ ID NO: 2666; WAN024DQH; Start 160; Stop 184
acagaaatattcctagcaatagcca

SEQ ID NO: 333047 - DNA, 25 bp, Artificial
  probe
  misc_feature (1)..(25): SEQ ID NO: 2666; WAN024DQH; Start 163; Stop 187
gaaatattcctagcaatagccatgt

SEQ ID NO: 333048 - DNA, 25 bp, Artificial
  probe
  misc_feature (1)..(25): SEQ ID NO: 2666; WAN024DQH; Start 159; Stop 183
aacagaaatattcctagcaatagcc

SEQ ID NO: 333049 - DNA, 25 bp, Artificial
  probe
  misc_feature (1)..(25): SEQ ID NO: 2666; WAN024DQH; Start 32; Stop 56
tcctactctatgtatttgcgacacc

SEQ ID NO: 333050 - DNA, 25 bp, Artificial
  probe
  misc_feature (1)..(25): SEQ ID NO: 2666; WAN024DQH; Start 162; Stop 186
agaaatattcctagcaatagccatg

SEQ ID NO: 333051 - DNA, 25 bp, Artificial
  probe
  misc_feature (1)..(25): SEQ ID NO: 2666; WAN024DQH; Start 161; Stop 185
cagaaatattcctagcaatagccat

SEQ ID NO: 333052 - DNA, 25 bp, Artificial
  probe
  misc_feature (1)..(25): SEQ ID NO: 2666; WAN024DQH; Start 36; Stop 60
actctatgtatttgcgacaccagaa

SEQ ID NO: 333053 - DNA, 25 bp, Artificial
  probe
  misc_feature (1)..(25): SEQ ID NO: 2666; WAN024DQH; Start 164; Stop 188
aaatattcctagcaatagccatgtt

SEQ ID NO: 333054 - DNA, 25 bp, Artificial
  probe
  misc_feature (1)..(25): SEQ ID NO: 2666; WAN024DQH; Start 33; Stop 57
cctactctatgtatttgcgacacca

SEQ ID NO: 333055 - DNA, 25 bp, Artificial
  probe
  misc_feature (1)..(25): SEQ ID NO: 2666; WAN024DQH; Start 30; Stop 54
gctcctactctatgtatttgcgaca

SEQ ID NO: 333056 - DNA, 25 bp, Artificial
  probe
  misc_feature (1)..(25): SEQ ID NO: 2666; WAN024DQH; Start 154; Stop 178
ttaccaacagaaatattcctagcaa

SEQ ID NO: 333057 - DNA, 25 bp, Artificial
  probe
  misc_feature (1)..(25): SEQ ID NO: 2666; WAN024DQH; Start 192; Stop 216
cctagcttactttagtgttagagac

SEQ ID NO: 333058 - DNA, 25 bp, Artificial
  probe
  misc_feature (1)..(25): SEQ ID NO: 2666; WAN024DQH; Start 191; Stop 215
tcctagcttactttagtgttagaga

SEQ ID NO: 333059 - DNA, 25 bp, Artificial
  probe
  misc_feature (1)..(25): SEQ ID NO: 2666; WAN024DQH; Start 24; Stop 48
tttactgctcctactctatgtattt

SEQ ID NO: 333060 - DNA, 25 bp, Artificial
  probe
  misc_feature (1)..(25): SEQ ID NO: 2666; WAN024DQH; Start 158; Stop 182
caacagaaatattcctagcaatagc

SEQ ID NO: 333061 - DNA, 25 bp, Artificial
  probe
  misc_feature (1)..(25): SEQ ID NO: 2666; WAN024DQH; Start 155; Stop 179
taccaacagaaatattcctagcaat

SEQ ID NO: 333062 - DNA, 25 bp, Artificial
  probe
  misc_feature (1)..(25): SEQ ID NO: 2666; WAN024DQH; Start 153; Stop 177
attaccaacagaaatattcctagca

SEQ ID NO: 333063 - DNA, 25 bp, Artificial
  probe
  misc_feature (1)..(25): SEQ ID NO: 2666; WAN024DQH; Start 156; Stop 180
accaacagaaatattcctagcaata

SEQ ID NO: 333064 - DNA, 25 bp, Artificial
  probe
  misc_feature (1)..(25): SEQ ID NO: 2667; WAN024CP6; Start 134; Stop 158
tcatcactggttatatcacgaggat

SEQ ID NO: 333065 - DNA, 25 bp, Artificial
  probe
  misc_feature (1)..(25): SEQ ID NO: 2667; WAN024CP6; Start 162; Stop 186
agatataaccgtcttctgttgtgta

SEQ ID NO: 333066 - DNA, 25 bp, Artificial
  probe
  misc_feature (1)..(25): SEQ ID NO: 2667; WAN024CP6; Start 207; Stop 231
cttgaatctcatcatcagtgtaggt

SEQ ID NO: 333067 - DNA, 25 bp, Artificial
  probe
  misc_feature (1)..(25): SEQ ID NO: 2667; WAN024CP6; Start 206; Stop 230
acttgaatctcatcatcagtgtagg

SEQ ID NO: 333068 - DNA, 25 bp, Artificial
  probe
  misc_feature (1)..(25): SEQ ID NO: 2667; WAN024CP6; Start 197; Stop 221
aacttggctacttgaatctcatcat

SEQ ID NO: 333069 - DNA, 25 bp, Artificial
  probe
  misc_feature (1)..(25): SEQ ID NO: 2667; WAN024CP6; Start 200; Stop 224
ttggctacttgaatctcatcatcag

SEQ ID NO: 333070 - DNA, 25 bp, Artificial
  probe
  misc_feature (1)..(25): SEQ ID NO: 2667; WAN024CP6; Start 199; Stop 223
cttggctacttgaatctcatcatca

SEQ ID NO: 333071 - DNA, 25 bp, Artificial
  probe
  misc_feature (1)..(25): SEQ ID NO: 2667; WAN024CP6; Start 198; Stop 222
acttggctacttgaatctcatcatc

SEQ ID NO: 333072 - DNA, 25 bp, Artificial
  probe
  misc_feature (1)..(25): SEQ ID NO: 2667; WAN024CP6; Start 203; Stop 227
gctacttgaatctcatcatcagtgt

SEQ ID NO: 333073 - DNA, 25 bp, Artificial
  probe
  misc_feature (1)..(25): SEQ ID NO: 2667; WAN024CP6; Start 135; Stop 159
catcactggttatatcacgaggatc

SEQ ID NO: 333074 - DNA, 25 bp, Artificial
  probe
  misc_feature (1)..(25): SEQ ID NO: 2667; WAN024CP6; Start 209; Stop 233
tgaatctcatcatcagtgtaggtaa

SEQ ID NO: 333075 - DNA, 25 bp, Artificial
  probe
  misc_feature (1)..(25): SEQ ID NO: 2667; WAN024CP6; Start 208; Stop 232
ttgaatctcatcatcagtgtaggta

SEQ ID NO: 333076 - DNA, 25 bp, Artificial
  probe
  misc_feature (1)..(25): SEQ ID NO: 2667; WAN024CP6; Start 196; Stop 220
caacttggctacttgaatctcatca

SEQ ID NO: 333077 - DNA, 25 bp, Artificial
  probe
  misc_feature (1)..(25): SEQ ID NO: 2667; WAN024CP6; Start 165; Stop 189
tataaccgtcttctgttgtgtactt

SEQ ID NO: 333078 - DNA, 25 bp, Artificial
  probe
  misc_feature (1)..(25): SEQ ID NO: 2667; WAN024CP6; Start 136; Stop 160
atcactggttatatcacgaggatca

SEQ ID NO: 333079 - DNA, 25 bp, Artificial
  probe
  misc_feature (1)..(25): SEQ ID NO: 2667; WAN024CP6; Start 164; Stop 188
atataaccgtcttctgttgtgtact

SEQ ID NO: 333080 - DNA, 25 bp, Artificial
  probe
  misc_feature (1)..(25): SEQ ID NO: 2667; WAN024CP6; Start 202; Stop 226
ggctacttgaatctcatcatcagtg

SEQ ID NO: 333081 - DNA, 25 bp, Artificial
  probe
  misc_feature (1)..(25): SEQ ID NO: 2667; WAN024CP6; Start 137; Stop 161
tcactggttatatcacgaggatcaa

SEQ ID NO: 333082 - DNA, 25 bp, Artificial
  probe
  misc_feature (1)..(25): SEQ ID NO: 2667; WAN024CP6; Start 163; Stop 187
gatataaccgtcttctgttgtgtac

SEQ ID NO: 333083 - DNA, 25 bp, Artificial
  probe
  misc_feature (1)..(25): SEQ ID NO: 2667; WAN024CP6; Start 210; Stop 234
gaatctcatcatcagtgtaggtaat

SEQ ID NO: 333084 - DNA, 25 bp, Artificial
  probe
  misc_feature (1)..(25): SEQ ID NO: 2667; WAN024CP6; Start 201; Stop 225
tggctacttgaatctcatcatcagt

SEQ ID NO: 333085 - DNA, 25 bp, Artificial
  probe
  misc_feature (1)..(25): SEQ ID NO: 2667; WAN024CP6; Start 166; Stop 190
ataaccgtcttctgttgtgtacttg

SEQ ID NO: 333086 - DNA, 25 bp, Artificial
  probe
  misc_feature (1)..(25): SEQ ID NO: 2667; WAN024CP6; Start 133; Stop 157
ctcatcactggttatatcacgagga

SEQ ID NO: 333087 - DNA, 25 bp, Artificial
  probe
  misc_feature (1)..(25): SEQ ID NO: 2667; WAN024CP6; Start 205; Stop 229
tacttgaatctcatcatcagtgtag

SEQ ID NO: 333088 - DNA, 25 bp, Artificial
  probe
  misc_feature (1)..(25): SEQ ID NO: 2667; WAN024CP6; Start 204; Stop 228
ctacttgaatctcatcatcagtgta

SEQ ID NO: 333089 - DNA, 25 bp, Artificial
  probe
  misc_feature (1)..(25): SEQ ID NO: 2667; WAN024CP6; Start 211; Stop 235
aatctcatcatcagtgtaggtaatt

SEQ ID NO: 333090 - DNA, 25 bp, Artificial
  probe
  misc_feature (1)..(25): SEQ ID NO: 2667; WAN024CP6; Start 214; Stop 238
ctcatcatcagtgtaggtaatttgc

SEQ ID NO: 333091 - DNA, 25 bp, Artificial
  probe
  misc_feature (1)..(25): SEQ ID NO: 2667; WAN024CP6; Start 23; Stop 47
aaacctttctctttagcataagcct

SEQ ID NO: 333092 - DNA, 25 bp, Artificial
  probe
  misc_feature (1)..(25): SEQ ID NO: 2667; WAN024CP6; Start 22; Stop 46
caaacctttctctttagcataagcc

SEQ ID NO: 333093 - DNA, 25 bp, Artificial
  probe
  misc_feature (1)..(25): SEQ ID NO: 2667; WAN024CP6; Start 21; Stop 45
tcaaacctttctctttagcataagc

SEQ ID NO: 333094 - DNA, 25 bp, Artificial
  probe
  misc_feature (1)..(25): SEQ ID NO: 2667; WAN024CP6; Start 24; Stop 48
aacctttctctttagcataagcctg

SEQ ID NO: 333095 - DNA, 25 bp, Artificial
  probe
  misc_feature (1)..(25): SEQ ID NO: 2667; WAN024CP6; Start 215; Stop 239
tcatcatcagtgtaggtaatttgcg

SEQ ID NO: 333096 - DNA, 25 bp, Artificial
  probe
  misc_feature (1)..(25): SEQ ID NO: 2667; WAN024CP6; Start 161; Stop 185
aagatataaccgtcttctgttgtgt

SEQ ID NO: 333097 - DNA, 25 bp, Artificial
  probe
  misc_feature (1)..(25): SEQ ID NO: 2668; WAN024G3H; Start 1385; Stop 1409
tggactatattgatgataaccgtgt

SEQ ID NO: 333098 - DNA, 25 bp, Artificial
  probe
  misc_feature (1)..(25): SEQ ID NO: 2668; WAN024G3H; Start 953; Stop 977
ataagcagatgaatcctatggtctt

SEQ ID NO: 333099 - DNA, 25 bp, Artificial
  probe
  misc_feature (1)..(25): SEQ ID NO: 2668; WAN024G3H; Start 1269; Stop 1293
aactaagattgcgaccattgaagag

SEQ ID NO: 333100 - DNA, 25 bp, Artificial
  probe
  misc_feature (1)..(25): SEQ ID NO: 2668; WAN024G3H; Start 1384; Stop 1408
atggactatattgatgataaccgtg

SEQ ID NO: 333101 - DNA, 25 bp, Artificial
  probe
  misc_feature (1)..(25): SEQ ID NO: 2668; WAN024G3H; Start 952; Stop 976
tataagcagatgaatcctatggtct

SEQ ID NO: 333102 - DNA, 25 bp, Artificial
  probe
  misc_feature (1)..(25): SEQ ID NO: 2668; WAN024G3H; Start 99; Stop 123
gatccgtaacttctctattatcgcc

SEQ ID NO: 333103 - DNA, 25 bp, Artificial
  probe
  misc_feature (1)..(25): SEQ ID NO: 2668; WAN024G3H; Start 98; Stop 122
agatccgtaacttctctattatcgc

SEQ ID NO: 333104 - DNA, 25 bp, Artificial
  probe
  misc_feature (1)..(25): SEQ ID NO: 2668; WAN024G3H; Start 522; Stop 546
tacagagattgaagatgtgattggt

SEQ ID NO: 333105 - DNA, 25 bp, Artificial
  probe
  misc_feature (1)..(25): SEQ ID NO: 2668; WAN024G3H; Start 523; Stop 547
acagagattgaagatgtgattggtt

SEQ ID NO: 333106 - DNA, 25 bp, Artificial
  probe
  misc_feature (1)..(25): SEQ ID NO: 2668; WAN024G3H; Start 1268; Stop 1292
caactaagattgcgaccattgaaga

SEQ ID NO: 333107 - DNA, 25 bp, Artificial
  probe
  misc_feature (1)..(25): SEQ ID NO: 2668; WAN024G3H; Start 945; Stop 969
acatggttataagcagatgaatcct

SEQ ID NO: 333108 - DNA, 25 bp, Artificial
  probe
  misc_feature (1)..(25): SEQ ID NO: 2668; WAN024G3H; Start 871; Stop 895
tctatcaagacggttcaggatactc

SEQ ID NO: 333109 - DNA, 25 bp, Artificial
  probe
  misc_feature (1)..(25): SEQ ID NO: 2668; WAN024G3H; Start 520; Stop 544
cgtacagagattgaagatgtgattg

SEQ ID NO: 333110 - DNA, 25 bp, Artificial
  probe
  misc_feature (1)..(25): SEQ ID NO: 2668; WAN024G3H; Start 1386; Stop 1410
ggactatattgatgataaccgtgtc

SEQ ID NO: 333111 - DNA, 25 bp, Artificial
  probe
  misc_feature (1)..(25): SEQ ID NO: 2668; WAN024G3H; Start 949; Stop 973
ggttataagcagatgaatcctatgg

SEQ ID NO: 333112 - DNA, 25 bp, Artificial
  probe
  misc_feature (1)..(25): SEQ ID NO: 2668; WAN024G3H; Start 521; Stop 545
gtacagagattgaagatgtgattgg

SEQ ID NO: 333113 - DNA, 25 bp, Artificial
  probe
  misc_feature (1)..(25): SEQ ID NO: 2668; WAN024G3H; Start 1224; Stop 1248
cggtgagtctatggatgtgtctaac

SEQ ID NO: 333114 - DNA, 25 bp, Artificial
  probe
  misc_feature (1)..(25): SEQ ID NO: 2668; WAN024G3H; Start 249; Stop 273
tattaagttgaatgccatcgagttg

SEQ ID NO: 333115 - DNA, 25 bp, Artificial
  probe
  misc_feature (1)..(25): SEQ ID NO: 2668; WAN024G3H; Start 248; Stop 272
ctattaagttgaatgccatcgagtt

SEQ ID NO: 333116 - DNA, 25 bp, Artificial
  probe
  misc_feature (1)..(25): SEQ ID NO: 2668; WAN024G3H; Start 519; Stop 543
gcgtacagagattgaagatgtgatt

SEQ ID NO: 333117 - DNA, 25 bp, Artificial
  probe
  misc_feature (1)..(25): SEQ ID NO: 2668; WAN024G3H; Start 944; Stop 968
tacatggttataagcagatgaatcc

SEQ ID NO: 333118 - DNA, 25 bp, Artificial
  probe
  misc_feature (1)..(25): SEQ ID NO: 2668; WAN024G3H; Start 1387; Stop 1411
gactatattgatgataaccgtgtca

SEQ ID NO: 333119 - DNA, 25 bp, Artificial
  probe
  misc_feature (1)..(25): SEQ ID NO: 2668; WAN024G3H; Start 950; Stop 974
gttataagcagatgaatcctatggt

SEQ ID NO: 333120 - DNA, 25 bp, Artificial
  probe
  misc_feature (1)..(25): SEQ ID NO: 2668; WAN024G3H; Start 948; Stop 972
tggttataagcagatgaatcctatg

SEQ ID NO: 333121 - DNA, 25 bp, Artificial
  probe
  misc_feature (1)..(25): SEQ ID NO: 2668; WAN024G3H; Start 255; Stop 279
gttgaatgccatcgagttgaattac

SEQ ID NO: 333122 - DNA, 25 bp, Artificial
  probe
  misc_feature (1)..(25): SEQ ID NO: 2668; WAN024G3H; Start 254; Stop 278
agttgaatgccatcgagttgaatta

SEQ ID NO: 333123 - DNA, 25 bp, Artificial
  probe
  misc_feature (1)..(25): SEQ ID NO: 2668; WAN024G3H; Start 252; Stop 276
taagttgaatgccatcgagttgaat

SEQ ID NO: 333124 - DNA, 25 bp, Artificial
  probe
  misc_feature (1)..(25): SEQ ID NO: 2668; WAN024G3H; Start 250; Stop 274
attaagttgaatgccatcgagttga

SEQ ID NO: 333125 - DNA, 25 bp, Artificial
  probe
  misc_feature (1)..(25): SEQ ID NO: 2668; WAN024G3H; Start 1223; Stop 1247
acggtgagtctatggatgtgtctaa

SEQ ID NO: 333126 - DNA, 25 bp, Artificial
  probe
  misc_feature (1)..(25): SEQ ID NO: 2668; WAN024G3H; Start 1267; Stop 1291
ccaactaagattgcgaccattgaag

SEQ ID NO: 333127 - DNA, 25 bp, Artificial
  probe
  misc_feature (1)..(25): SEQ ID NO: 2668; WAN024G3H; Start 251; Stop 275
ttaagttgaatgccatcgagttgaa

SEQ ID NO: 333128 - DNA, 25 bp, Artificial
  probe
  misc_feature (1)..(25): SEQ ID NO: 2668; WAN024G3H; Start 1739; Stop 1763
tacttgctaaatgttatggtggtga

SEQ ID NO: 333129 - DNA, 25 bp, Artificial
  probe
  misc_feature (1)..(25): SEQ ID NO: 2668; WAN024G3H; Start 529; Stop 553
attgaagatgtgattggtttggatg

SEQ ID NO: 333130 - DNA, 25 bp, Artificial
  probe
  misc_feature (1)..(25): SEQ ID NO: 2669; WAN024GAV; Start 35; Stop 59
cgataatatctccgacaccaatcaa

SEQ ID NO: 333131 - DNA, 25 bp, Artificial
  probe
  misc_feature (1)..(25): SEQ ID NO: 2669; WAN024GAV; Start 34; Stop 58
ccgataatatctccgacaccaatca

SEQ ID NO: 333132 - DNA, 25 bp, Artificial
  probe
  misc_feature (1)..(25): SEQ ID NO: 2669; WAN024GAV; Start 36; Stop 60
gataatatctccgacaccaatcaaa

SEQ ID NO: 333133 - DNA, 25 bp, Artificial
  probe
  misc_feature (1)..(25): SEQ ID NO: 2669; WAN024GAV; Start 106; Stop 130
tattcttcattcgcacggacaactg

SEQ ID NO: 333134 - DNA, 25 bp, Artificial
  probe
  misc_feature (1)..(25): SEQ ID NO: 2669; WAN024GAV; Start 105; Stop 129
gtattcttcattcgcacggacaact

SEQ ID NO: 333135 - DNA, 25 bp, Artificial
  probe
  misc_feature (1)..(25): SEQ ID NO: 2669; WAN024GAV; Start 59; Stop 83
aaagagggcgaagatataaggttcc

SEQ ID NO: 333136 - DNA, 25 bp, Artificial
  probe
  misc_feature (1)..(25): SEQ ID NO: 2669; WAN024GAV; Start 33; Stop 57
cccgataatatctccgacaccaatc

SEQ ID NO: 333137 - DNA, 25 bp, Artificial
  probe
  misc_feature (1)..(25): SEQ ID NO: 2669; WAN024GAV; Start 60; Stop 84
aagagggcgaagatataaggttcca

SEQ ID NO: 333138 - DNA, 25 bp, Artificial
  probe
  misc_feature (1)..(25): SEQ ID NO: 2669; WAN024GAV; Start 55; Stop 79
atcaaaagagggcgaagatataagg

SEQ ID NO: 333139 - DNA, 25 bp, Artificial
  probe
  misc_feature (1)..(25): SEQ ID NO: 2669; WAN024GAV; Start 52; Stop 76
ccaatcaaaagagggcgaagatata

SEQ ID NO: 333140 - DNA, 25 bp, Artificial
  probe
  misc_feature (1)..(25): SEQ ID NO: 2669; WAN024GAV; Start 57; Stop 81
caaaagagggcgaagatataaggtt

SEQ ID NO: 333141 - DNA, 25 bp, Artificial
  probe
  misc_feature (1)..(25): SEQ ID NO: 2669; WAN024GAV; Start 53; Stop 77
caatcaaaagagggcgaagatataa

SEQ ID NO: 333142 - DNA, 25 bp, Artificial
  probe
  misc_feature (1)..(25): SEQ ID NO: 2669; WAN024GAV; Start 58; Stop 82
aaaagagggcgaagatataaggttc

SEQ ID NO: 333143 - DNA, 25 bp, Artificial
  probe
  misc_feature (1)..(25): SEQ ID NO: 2669; WAN024GAV; Start 39; Stop 63
aatatctccgacaccaatcaaaaga

SEQ ID NO: 333144 - DNA, 25 bp, Artificial
  probe
  misc_feature (1)..(25): SEQ ID NO: 2669; WAN024GAV; Start 54; Stop 78
aatcaaaagagggcgaagatataag

SEQ ID NO: 333145 - DNA, 25 bp, Artificial
  probe
  misc_feature (1)..(25): SEQ ID NO: 2669; WAN024GAV; Start 38; Stop 62
taatatctccgacaccaatcaaaag

SEQ ID NO: 333146 - DNA, 25 bp, Artificial
  probe
  misc_feature (1)..(25): SEQ ID NO: 2669; WAN024GAV; Start 26; Stop 50
gttttaccccgataatatctccgac

SEQ ID NO: 333147 - DNA, 25 bp, Artificial
  probe
  misc_feature (1)..(25): SEQ ID NO: 2669; WAN024GAV; Start 27; Stop 51
ttttaccccgataatatctccgaca

SEQ ID NO: 333148 - DNA, 25 bp, Artificial
  probe
  misc_feature (1)..(25): SEQ ID NO: 2669; WAN024GAV; Start 56; Stop 80
tcaaaagagggcgaagatataaggt

SEQ ID NO: 333149 - DNA, 25 bp, Artificial
  probe
  misc_feature (1)..(25): SEQ ID NO: 2669; WAN024GAV; Start 61; Stop 85
agagggcgaagatataaggttccac

SEQ ID NO: 333150 - DNA, 25 bp, Artificial
  probe
  misc_feature (1)..(25): SEQ ID NO: 2669; WAN024GAV; Start 37; Stop 61
ataatatctccgacaccaatcaaaa

SEQ ID NO: 333151 - DNA, 25 bp, Artificial
  probe
  misc_feature (1)..(25): SEQ ID NO: 2669; WAN024GAV; Start 40; Stop 64
atatctccgacaccaatcaaaagag

SEQ ID NO: 333152 - DNA, 25 bp, Artificial
  probe
  misc_feature (1)..(25): SEQ ID NO: 2669; WAN024GAV; Start 28; Stop 52
tttaccccgataatatctccgacac

SEQ ID NO: 333153 - DNA, 25 bp, Artificial
  probe
  misc_feature (1)..(25): SEQ ID NO: 2669; WAN024GAV; Start 204; Stop 228
tttagcattttcatcaggacggaac

SEQ ID NO: 333154 - DNA, 25 bp, Artificial
  probe
  misc_feature (1)..(25): SEQ ID NO: 2669; WAN024GAV; Start 203; Stop 227
gtttagcattttcatcaggacggaa

SEQ ID NO: 333155 - DNA, 25 bp, Artificial
  probe
  misc_feature (1)..(25): SEQ ID NO: 2669; WAN024GAV; Start 51; Stop 75
accaatcaaaagagggcgaagatat

SEQ ID NO: 333156 - DNA, 25 bp, Artificial
  probe
  misc_feature (1)..(25): SEQ ID NO: 2669; WAN024GAV; Start 209; Stop 233
cattttcatcaggacggaacagttg

SEQ ID NO: 333157 - DNA, 25 bp, Artificial
  probe
  misc_feature (1)..(25): SEQ ID NO: 2669; WAN024GAV; Start 205; Stop 229
ttagcattttcatcaggacggaaca

SEQ ID NO: 333158 - DNA, 25 bp, Artificial
  probe
  misc_feature (1)..(25): SEQ ID NO: 2669; WAN024GAV; Start 41; Stop 65
tatctccgacaccaatcaaaagagg

SEQ ID NO: 333159 - DNA, 25 bp, Artificial
  probe
  misc_feature (1)..(25): SEQ ID NO: 2669; WAN024GAV; Start 210; Stop 234
attttcatcaggacggaacagttga

SEQ ID NO: 333160 - DNA, 25 bp, Artificial
  probe
  misc_feature (1)..(25): SEQ ID NO: 2669; WAN024GAV; Start 25; Stop 49
ggttttaccccgataatatctccga

SEQ ID NO: 333161 - DNA, 25 bp, Artificial
  probe
  misc_feature (1)..(25): SEQ ID NO: 2669; WAN024GAV; Start 50; Stop 74
caccaatcaaaagagggcgaagata

SEQ ID NO: 333162 - DNA, 25 bp, Artificial
  probe
  misc_feature (1)..(25): SEQ ID NO: 2669; WAN024GAV; Start 134; Stop 158
tacaagcttctacaaacatgtctgt

SEQ ID NO: 333163 - DNA, 25 bp, Artificial
  probe
  misc_feature (1)..(25): SEQ ID NO: 2670; WAN024DKE; Start 204; Stop 228
ttgtgataagtgtgatgttccgata

SEQ ID NO: 333164 - DNA, 25 bp, Artificial
  probe
  misc_feature (1)..(25): SEQ ID NO: 2670; WAN024DKE; Start 238; Stop 262
ccgatgatggactatggtatgttag

SEQ ID NO: 333165 - DNA, 25 bp, Artificial
  probe
  misc_feature (1)..(25): SEQ ID NO: 2670; WAN024DKE; Start 205; Stop 229
tgtgataagtgtgatgttccgatag

SEQ ID NO: 333166 - DNA, 25 bp, Artificial
  probe
  misc_feature (1)..(25): SEQ ID NO: 2670; WAN024DKE; Start 239; Stop 263
cgatgatggactatggtatgttaga

SEQ ID NO: 333167 - DNA, 25 bp, Artificial
  probe
  misc_feature (1)..(25): SEQ ID NO: 2670; WAN024DKE; Start 242; Stop 266
tgatggactatggtatgttagatgg

SEQ ID NO: 333168 - DNA, 25 bp, Artificial
  probe
  misc_feature (1)..(25): SEQ ID NO: 2670; WAN024DKE; Start 163; Stop 187
ggtccacaagttgcttatacattag

SEQ ID NO: 333169 - DNA, 25 bp, Artificial
  probe
  misc_feature (1)..(25): SEQ ID NO: 2670; WAN024DKE; Start 164; Stop 188
gtccacaagttgcttatacattaga

SEQ ID NO: 333170 - DNA, 25 bp, Artificial
  probe
  misc_feature (1)..(25): SEQ ID NO: 2670; WAN024DKE; Start 206; Stop 230
gtgataagtgtgatgttccgatagc

SEQ ID NO: 333171 - DNA, 25 bp, Artificial
  probe
  misc_feature (1)..(25): SEQ ID NO: 2670; WAN024DKE; Start 165; Stop 189
tccacaagttgcttatacattagat

SEQ ID NO: 333172 - DNA, 25 bp, Artificial
  probe
  misc_feature (1)..(25): SEQ ID NO: 2670; WAN024DKE; Start 241; Stop 265
atgatggactatggtatgttagatg

SEQ ID NO: 333173 - DNA, 25 bp, Artificial
  probe
  misc_feature (1)..(25): SEQ ID NO: 2670; WAN024DKE; Start 232; Stop 256
gttattccgatgatggactatggta

SEQ ID NO: 333174 - DNA, 25 bp, Artificial
  probe
  misc_feature (1)..(25): SEQ ID NO: 2670; WAN024DKE; Start 234; Stop 258
tattccgatgatggactatggtatg

SEQ ID NO: 333175 - DNA, 25 bp, Artificial
  probe
  misc_feature (1)..(25): SEQ ID NO: 2670; WAN024DKE; Start 240; Stop 264
gatgatggactatggtatgttagat

SEQ ID NO: 333176 - DNA, 25 bp, Artificial
  probe
  misc_feature (1)..(25): SEQ ID NO: 2670; WAN024DKE; Start 237; Stop 261
tccgatgatggactatggtatgtta

SEQ ID NO: 333177 - DNA, 25 bp, Artificial
  probe
  misc_feature (1)..(25): SEQ ID NO: 2670; WAN024DKE; Start 230; Stop 254
ctgttattccgatgatggactatgg

SEQ ID NO: 333178 - DNA, 25 bp, Artificial
  probe
  misc_feature (1)..(25): SEQ ID NO: 2670; WAN024DKE; Start 214; Stop 238
tgtgatgttccgatagctgttattc

SEQ ID NO: 333179 - DNA, 25 bp, Artificial
  probe
  misc_feature (1)..(25): SEQ ID NO: 2670; WAN024DKE; Start 235; Stop 259
attccgatgatggactatggtatgt

SEQ ID NO: 333180 - DNA, 25 bp, Artificial
  probe
  misc_feature (1)..(25): SEQ ID NO: 2670; WAN024DKE; Start 233; Stop 257
ttattccgatgatggactatggtat

SEQ ID NO: 333181 - DNA, 25 bp, Artificial
  probe
  misc_feature (1)..(25): SEQ ID NO: 2670; WAN024DKE; Start 213; Stop 237
gtgtgatgttccgatagctgttatt

SEQ ID NO: 333182 - DNA, 25 bp, Artificial
  probe
  misc_feature (1)..(25): SEQ ID NO: 2670; WAN024DKE; Start 236; Stop 260
ttccgatgatggactatggtatgtt

SEQ ID NO: 333183 - DNA, 25 bp, Artificial
  probe
  misc_feature (1)..(25): SEQ ID NO: 2670; WAN024DKE; Start 231; Stop 255
tgttattccgatgatggactatggt

SEQ ID NO: 333184 - DNA, 25 bp, Artificial
  probe
  misc_feature (1)..(25): SEQ ID NO: 2670; WAN024DKE; Start 208; Stop 232
gataagtgtgatgttccgatagctg

SEQ ID NO: 333185 - DNA, 25 bp, Artificial
  probe
  misc_feature (1)..(25): SEQ ID NO: 2670; WAN024DKE; Start 243; Stop 267
gatggactatggtatgttagatggg

SEQ ID NO: 333186 - DNA, 25 bp, Artificial
  probe
  misc_feature (1)..(25): SEQ ID NO: 2670; WAN024DKE; Start 229; Stop 253
gctgttattccgatgatggactatg

SEQ ID NO: 333187 - DNA, 25 bp, Artificial
  probe
  misc_feature (1)..(25): SEQ ID NO: 2670; WAN024DKE; Start 244; Stop 268
atggactatggtatgttagatggga

SEQ ID NO: 333188 - DNA, 25 bp, Artificial
  probe
  misc_feature (1)..(25): SEQ ID NO: 2670; WAN024DKE; Start 246; Stop 270
ggactatggtatgttagatgggaaa

SEQ ID NO: 333189 - DNA, 25 bp, Artificial
  probe
  misc_feature (1)..(25): SEQ ID NO: 2670; WAN024DKE; Start 245; Stop 269
tggactatggtatgttagatgggaa

SEQ ID NO: 333190 - DNA, 25 bp, Artificial
  probe
  misc_feature (1)..(25): SEQ ID NO: 2670; WAN024DKE; Start 203; Stop 227
tttgtgataagtgtgatgttccgat

SEQ ID NO: 333191 - DNA, 25 bp, Artificial
  probe
  misc_feature (1)..(25): SEQ ID NO: 2670; WAN024DKE; Start 202; Stop 226
atttgtgataagtgtgatgttccga

SEQ ID NO: 333192 - DNA, 25 bp, Artificial
  probe
  misc_feature (1)..(25): SEQ ID NO: 2670; WAN024DKE; Start 215; Stop 239
gtgatgttccgatagctgttattcc

SEQ ID NO: 333193 - DNA, 25 bp, Artificial
  probe
  misc_feature (1)..(25): SEQ ID NO: 2670; WAN024DKE; Start 207; Stop 231
tgataagtgtgatgttccgatagct

SEQ ID NO: 333194 - DNA, 25 bp, Artificial
  probe
  misc_feature (1)..(25): SEQ ID NO: 2670; WAN024DKE; Start 201; Stop 225
aatttgtgataagtgtgatgttccg

SEQ ID NO: 333195 - DNA, 25 bp, Artificial
  probe
  misc_feature (1)..(25): SEQ ID NO: 2670; WAN024DKE; Start 221; Stop 245
ttccgatagctgttattccgatgat

SEQ ID NO: 333196 - DNA, 25 bp, Artificial
  probe
  misc_feature (1)..(25): SEQ ID NO: 2671; WAN024CI3; Start 223; Stop 247
cgtgtattcagtgaccaatctattc

SEQ ID NO: 333197 - DNA, 25 bp, Artificial
  probe
  misc_feature (1)..(25): SEQ ID NO: 2671; WAN024CI3; Start 523; Stop 547
ggattgcctgaagaattagttgaag

SEQ ID NO: 333198 - DNA, 25 bp, Artificial
  probe
  misc_feature (1)..(25): SEQ ID NO: 2671; WAN024CI3; Start 840; Stop 864
cttgccattgattgttatgtatcca

SEQ ID NO: 333199 - DNA, 25 bp, Artificial
  probe
  misc_feature (1)..(25): SEQ ID NO: 2671; WAN024CI3; Start 524; Stop 548
gattgcctgaagaattagttgaagc

SEQ ID NO: 333200 - DNA, 25 bp, Artificial
  probe
  misc_feature (1)..(25): SEQ ID NO: 2671; WAN024CI3; Start 839; Stop 863
gcttgccattgattgttatgtatcc

SEQ ID NO: 333201 - DNA, 25 bp, Artificial
  probe
  misc_feature (1)..(25): SEQ ID NO: 2671; WAN024CI3; Start 887; Stop 911
aaggaattatggctggttcacttaa

SEQ ID NO: 333202 - DNA, 25 bp, Artificial
  probe
  misc_feature (1)..(25): SEQ ID NO: 2671; WAN024CI3; Start 842; Stop 866
tgccattgattgttatgtatccatt

SEQ ID NO: 333203 - DNA, 25 bp, Artificial
  probe
  misc_feature (1)..(25): SEQ ID NO: 2671; WAN024CI3; Start 841; Stop 865
ttgccattgattgttatgtatccat

SEQ ID NO: 333204 - DNA, 25 bp, Artificial
  probe
  misc_feature (1)..(25): SEQ ID NO: 2671; WAN024CI3; Start 222; Stop 246
gcgtgtattcagtgaccaatctatt

SEQ ID NO: 333205 - DNA, 25 bp, Artificial
  probe
  misc_feature (1)..(25): SEQ ID NO: 2671; WAN024CI3; Start 230; Stop 254
tcagtgaccaatctattctaagagg

SEQ ID NO: 333206 - DNA, 25 bp, Artificial
  probe
  misc_feature (1)..(25): SEQ ID NO: 2671; WAN024CI3; Start 355; Stop 379
cgtcgttggattaactacttcttga

SEQ ID NO: 333207 - DNA, 25 bp, Artificial
  probe
  misc_feature (1)..(25): SEQ ID NO: 2671; WAN024CI3; Start 356; Stop 380
gtcgttggattaactacttcttgat

SEQ ID NO: 333208 - DNA, 25 bp, Artificial
  probe
  misc_feature (1)..(25): SEQ ID NO: 2671; WAN024CI3; Start 843; Stop 867
gccattgattgttatgtatccattc

SEQ ID NO: 333209 - DNA, 25 bp, Artificial
  probe
  misc_feature (1)..(25): SEQ ID NO: 2671; WAN024CI3; Start 224; Stop 248
gtgtattcagtgaccaatctattct

SEQ ID NO: 333210 - DNA, 25 bp, Artificial
  probe
  misc_feature (1)..(25): SEQ ID NO: 2671; WAN024CI3; Start 221; Stop 245
agcgtgtattcagtgaccaatctat

SEQ ID NO: 333211 - DNA, 25 bp, Artificial
  probe
  misc_feature (1)..(25): SEQ ID NO: 2671; WAN024CI3; Start 358; Stop 382
cgttggattaactacttcttgattg

SEQ ID NO: 333212 - DNA, 25 bp, Artificial
  probe
  misc_feature (1)..(25): SEQ ID NO: 2671; WAN024CI3; Start 357; Stop 381
tcgttggattaactacttcttgatt

SEQ ID NO: 333213 - DNA, 25 bp, Artificial
  probe
  misc_feature (1)..(25): SEQ ID NO: 2671; WAN024CI3; Start 644; Stop 668
ttgtaggacagtggaactcatactt

SEQ ID NO: 333214 - DNA, 25 bp, Artificial
  probe
  misc_feature (1)..(25): SEQ ID NO: 2671; WAN024CI3; Start 848; Stop 872
tgattgttatgtatccattcttcca

SEQ ID NO: 333215 - DNA, 25 bp, Artificial
  probe
  misc_feature (1)..(25): SEQ ID NO: 2671; WAN024CI3; Start 522; Stop 546
aggattgcctgaagaattagttgaa

SEQ ID NO: 333216 - DNA, 25 bp, Artificial
  probe
  misc_feature (1)..(25): SEQ ID NO: 2671; WAN024CI3; Start 521; Stop 545
aaggattgcctgaagaattagttga

SEQ ID NO: 333217 - DNA, 25 bp, Artificial
  probe
  misc_feature (1)..(25): SEQ ID NO: 2671; WAN024CI3; Start 520; Stop 544
caaggattgcctgaagaattagttg

SEQ ID NO: 333218 - DNA, 25 bp, Artificial
  probe
  misc_feature (1)..(25): SEQ ID NO: 2671; WAN024CI3; Start 155; Stop 179
atcctaaggttctggttagtagagg

SEQ ID NO: 333219 - DNA, 25 bp, Artificial
  probe
  misc_feature (1)..(25): SEQ ID NO: 2671; WAN024CI3; Start 517; Stop 541
ttccaaggattgcctgaagaattag

SEQ ID NO: 333220 - DNA, 25 bp, Artificial
  probe
  misc_feature (1)..(25): SEQ ID NO: 2671; WAN024CI3; Start 154; Stop 178
gatcctaaggttctggttagtagag

SEQ ID NO: 333221 - DNA, 25 bp, Artificial
  probe
  misc_feature (1)..(25): SEQ ID NO: 2671; WAN024CI3; Start 229; Stop 253
ttcagtgaccaatctattctaagag

SEQ ID NO: 333222 - DNA, 25 bp, Artificial
  probe
  misc_feature (1)..(25): SEQ ID NO: 2671; WAN024CI3; Start 519; Stop 543
ccaaggattgcctgaagaattagtt

SEQ ID NO: 333223 - DNA, 25 bp, Artificial
  probe
  misc_feature (1)..(25): SEQ ID NO: 2671; WAN024CI3; Start 838; Stop 862
agcttgccattgattgttatgtatc

SEQ ID NO: 333224 - DNA, 25 bp, Artificial
  probe
  misc_feature (1)..(25): SEQ ID NO: 2671; WAN024CI3; Start 837; Stop 861
cagcttgccattgattgttatgtat

SEQ ID NO: 333225 - DNA, 25 bp, Artificial
  probe
  misc_feature (1)..(25): SEQ ID NO: 2671; WAN024CI3; Start 525; Stop 549
attgcctgaagaattagttgaagct

SEQ ID NO: 333226 - DNA, 25 bp, Artificial
  probe
  misc_feature (1)..(25): SEQ ID NO: 2671; WAN024CI3; Start 231; Stop 255
cagtgaccaatctattctaagaggt

SEQ ID NO: 333227 - DNA, 25 bp, Artificial
  probe
  misc_feature (1)..(25): SEQ ID NO: 2671; WAN024CI3; Start 220; Stop 244
cagcgtgtattcagtgaccaatcta

SEQ ID NO: 333228 - DNA, 25 bp, Artificial
  probe
  misc_feature (1)..(25): SEQ ID NO: 2671; WAN024CI3; Start 126; Stop 150
actttatatcgtcgtagcatccttt

SEQ ID NO: 333229 - DNA, 25 bp, Artificial
  probe
  misc_feature (1)..(25): SEQ ID NO: 2672; WAN024COR; Start 44; Stop 68
taatggaatgtgctaccaaactgta

SEQ ID NO: 333230 - DNA, 25 bp, Artificial
  probe
  misc_feature (1)..(25): SEQ ID NO: 2672; WAN024COR; Start 2; Stop 26
tggtgaagtatttcctatcgaagaa

SEQ ID NO: 333231 - DNA, 25 bp, Artificial
  probe
  misc_feature (1)..(25): SEQ ID NO: 2672; WAN024COR; Start 45; Stop 69
aatggaatgtgctaccaaactgtat

SEQ ID NO: 333232 - DNA, 25 bp, Artificial
  probe
  misc_feature (1)..(25): SEQ ID NO: 2672; WAN024COR; Start 1; Stop 25
atggtgaagtatttcctatcgaaga

SEQ ID NO: 333233 - DNA, 25 bp, Artificial
  probe
  misc_feature (1)..(25): SEQ ID NO: 2672; WAN024COR; Start 40; Stop 64
atcctaatggaatgtgctaccaaac

SEQ ID NO: 333234 - DNA, 25 bp, Artificial
  probe
  misc_feature (1)..(25): SEQ ID NO: 2672; WAN024COR; Start 39; Stop 63
catcctaatggaatgtgctaccaaa

SEQ ID NO: 333235 - DNA, 25 bp, Artificial
  probe
  misc_feature (1)..(25): SEQ ID NO: 2672; WAN024COR; Start 8; Stop 32
agtatttcctatcgaagaatgtcct

SEQ ID NO: 333236 - DNA, 25 bp, Artificial
  probe
  misc_feature (1)..(25): SEQ ID NO: 2672; WAN024COR; Start 11; Stop 35
atttcctatcgaagaatgtcctttc

SEQ ID NO: 333237 - DNA, 25 bp, Artificial
  probe
  misc_feature (1)..(25): SEQ ID NO: 2672; WAN024COR; Start 46; Stop 70
atggaatgtgctaccaaactgtatg

SEQ ID NO: 333238 - DNA, 25 bp, Artificial
  probe
  misc_feature (1)..(25): SEQ ID NO: 2672; WAN024COR; Start 43; Stop 67
ctaatggaatgtgctaccaaactgt

SEQ ID NO: 333239 - DNA, 25 bp, Artificial
  probe
  misc_feature (1)..(25): SEQ ID NO: 2672; WAN024COR; Start 9; Stop 33
gtatttcctatcgaagaatgtcctt

SEQ ID NO: 333240 - DNA, 25 bp, Artificial
  probe
  misc_feature (1)..(25): SEQ ID NO: 2672; WAN024COR; Start 7; Stop 31
aagtatttcctatcgaagaatgtcc

SEQ ID NO: 333241 - DNA, 25 bp, Artificial
  probe
  misc_feature (1)..(25): SEQ ID NO: 2672; WAN024COR; Start 3; Stop 27
ggtgaagtatttcctatcgaagaat

SEQ ID NO: 333242 - DNA, 25 bp, Artificial
  probe
  misc_feature (1)..(25): SEQ ID NO: 2672; WAN024COR; Start 42; Stop 66
cctaatggaatgtgctaccaaactg

SEQ ID NO: 333243 - DNA, 25 bp, Artificial
  probe
  misc_feature (1)..(25): SEQ ID NO: 2672; WAN024COR; Start 41; Stop 65
tcctaatggaatgtgctaccaaact

SEQ ID NO: 333244 - DNA, 25 bp, Artificial
  probe
  misc_feature (1)..(25): SEQ ID NO: 2672; WAN024COR; Start 10; Stop 34
tatttcctatcgaagaatgtccttt

SEQ ID NO: 333245 - DNA, 25 bp, Artificial
  probe
  misc_feature (1)..(25): SEQ ID NO: 2672; WAN024COR; Start 5; Stop 29
tgaagtatttcctatcgaagaatgt

SEQ ID NO: 333246 - DNA, 25 bp, Artificial
  probe
  misc_feature (1)..(25): SEQ ID NO: 2672; WAN024COR; Start 24; Stop 48
gaatgtcctttcgaccatcctaatg

SEQ ID NO: 333247 - DNA, 25 bp, Artificial
  probe
  misc_feature (1)..(25): SEQ ID NO: 2672; WAN024COR; Start 23; Stop 47
agaatgtcctttcgaccatcctaat

SEQ ID NO: 333248 - DNA, 25 bp, Artificial
  probe
  misc_feature (1)..(25): SEQ ID NO: 2672; WAN024COR; Start 22; Stop 46
aagaatgtcctttcgaccatcctaa

SEQ ID NO: 333249 - DNA, 25 bp, Artificial
  probe
  misc_feature (1)..(25): SEQ ID NO: 2672; WAN024COR; Start 4; Stop 28
gtgaagtatttcctatcgaagaatg

SEQ ID NO: 333250 - DNA, 25 bp, Artificial
  probe
  misc_feature (1)..(25): SEQ ID NO: 2672; WAN024COR; Start 6; Stop 30
gaagtatttcctatcgaagaatgtc

SEQ ID NO: 333251 - DNA, 25 bp, Artificial
  probe
  misc_feature (1)..(25): SEQ ID NO: 2672; WAN024COR; Start 61; Stop 85
aaactgtatggtacgaaaactcact

SEQ ID NO: 333252 - DNA, 25 bp, Artificial
  probe
  misc_feature (1)..(25): SEQ ID NO: 2672; WAN024COR; Start 60; Stop 84
caaactgtatggtacgaaaactcac

SEQ ID NO: 333253 - DNA, 25 bp, Artificial
  probe
  misc_feature (1)..(25): SEQ ID NO: 2672; WAN024COR; Start 21; Stop 45
gaagaatgtcctttcgaccatccta

SEQ ID NO: 333254 - DNA, 25 bp, Artificial
  probe
  misc_feature (1)..(25): SEQ ID NO: 2672; WAN024COR; Start 62; Stop 86
aactgtatggtacgaaaactcactc

SEQ ID NO: 333255 - DNA, 25 bp, Artificial
  probe
  misc_feature (1)..(25): SEQ ID NO: 2672; WAN024COR; Start 47; Stop 71
tggaatgtgctaccaaactgtatgg

SEQ ID NO: 333256 - DNA, 25 bp, Artificial
  probe
  misc_feature (1)..(25): SEQ ID NO: 2672; WAN024COR; Start 38; Stop 62
ccatcctaatggaatgtgctaccaa

SEQ ID NO: 333257 - DNA, 25 bp, Artificial
  probe
  misc_feature (1)..(25): SEQ ID NO: 2672; WAN024COR; Start 59; Stop 83
ccaaactgtatggtacgaaaactca

SEQ ID NO: 333258 - DNA, 25 bp, Artificial
  probe
  misc_feature (1)..(25): SEQ ID NO: 2672; WAN024COR; Start 36; Stop 60
gaccatcctaatggaatgtgctacc

SEQ ID NO: 333259 - DNA, 25 bp, Artificial
  probe
  misc_feature (1)..(25): SEQ ID NO: 2672; WAN024COR; Start 77; Stop 101
aaactcactcgaagaaatcgctgat

SEQ ID NO: 333260 - DNA, 25 bp, Artificial
  probe
  misc_feature (1)..(25): SEQ ID NO: 2672; WAN024COR; Start 35; Stop 59
cgaccatcctaatggaatgtgctac

SEQ ID NO: 333261 - DNA, 25 bp, Artificial
  probe
  misc_feature (1)..(25): SEQ ID NO: 2672; WAN024COR; Start 84; Stop 108
ctcgaagaaatcgctgatgagttga

SEQ ID NO: 333262 - DNA, 25 bp, Artificial
  probe
  misc_feature (1)..(25): SEQ ID NO: 2673; WAN024CWF-5; Start 95; Stop 119
tatcaacatctactaaggctcttgc

SEQ ID NO: 333263 - DNA, 25 bp, Artificial
  probe
  misc_feature (1)..(25): SEQ ID NO: 2673; WAN024CWF-5; Start 172; Stop 196
tatggagaagcagaaggacttgtta

SEQ ID NO: 333264 - DNA, 25 bp, Artificial
  probe
  misc_feature (1)..(25): SEQ ID NO: 2673; WAN024CWF-5; Start 1706; Stop 1730
ttaagaaccaggtagaggatatagc

SEQ ID NO: 333265 - DNA, 25 bp, Artificial
  probe
  misc_feature (1)..(25): SEQ ID NO: 2673; WAN024CWF-5; Start 168; Stop 192
aacttatggagaagcagaaggactt

SEQ ID NO: 333266 - DNA, 25 bp, Artificial
  probe
  misc_feature (1)..(25): SEQ ID NO: 2673; WAN024CWF-5; Start 181; Stop 205
gcagaaggacttgttagtgatctta

SEQ ID NO: 333267 - DNA, 25 bp, Artificial
  probe
  misc_feature (1)..(25): SEQ ID NO: 2673; WAN024CWF-5; Start 171; Stop 195
ttatggagaagcagaaggacttgtt

SEQ ID NO: 333268 - DNA, 25 bp, Artificial
  probe
  misc_feature (1)..(25): SEQ ID NO: 2673; WAN024CWF-5; Start 177; Stop 201
agaagcagaaggacttgttagtgat

SEQ ID NO: 333269 - DNA, 25 bp, Artificial
  probe
  misc_feature (1)..(25): SEQ ID NO: 2673; WAN024CWF-5; Start 697; Stop 721
aaggattatcaacgaggacagtcag

SEQ ID NO: 333270 - DNA, 25 bp, Artificial
  probe
  misc_feature (1)..(25): SEQ ID NO: 2673; WAN024CWF-5; Start 94; Stop 118
ttatcaacatctactaaggctcttg

SEQ ID NO: 333271 - DNA, 25 bp, Artificial
  probe
  misc_feature (1)..(25): SEQ ID NO: 2673; WAN024CWF-5; Start 173; Stop 197
atggagaagcagaaggacttgttag

SEQ ID NO: 333272 - DNA, 25 bp, Artificial
  probe
  misc_feature (1)..(25): SEQ ID NO: 2673; WAN024CWF-5; Start 170; Stop 194
cttatggagaagcagaaggacttgt

SEQ ID NO: 333273 - DNA, 25 bp, Artificial
  probe
  misc_feature (1)..(25): SEQ ID NO: 2673; WAN024CWF-5; Start 169; Stop 193
acttatggagaagcagaaggacttg

SEQ ID NO: 333274 - DNA, 25 bp, Artificial
  probe
  misc_feature (1)..(25): SEQ ID NO: 2673; WAN024CWF-5; Start 167; Stop 191
caacttatggagaagcagaaggact

SEQ ID NO: 333275 - DNA, 25 bp, Artificial
  probe
  misc_feature (1)..(25): SEQ ID NO: 2673; WAN024CWF-5; Start 166; Stop 190
tcaacttatggagaagcagaaggac

SEQ ID NO: 333276 - DNA, 25 bp, Artificial
  probe
  misc_feature (1)..(25): SEQ ID NO: 2673; WAN024CWF-5; Start 165; Stop 189
gtcaacttatggagaagcagaagga

SEQ ID NO: 333277 - DNA, 25 bp, Artificial
  probe
  misc_feature (1)..(25): SEQ ID NO: 2673; WAN024CWF-5; Start 1707; Stop 1731
taagaaccaggtagaggatatagct

SEQ ID NO: 333278 - DNA, 25 bp, Artificial
  probe
  misc_feature (1)..(25): SEQ ID NO: 2673; WAN024CWF-5; Start 420; Stop 444
aatctcagttggtgaagaatatgat

SEQ ID NO: 333279 - DNA, 25 bp, Artificial
  probe
  misc_feature (1)..(25): SEQ ID NO: 2673; WAN024CWF-5; Start 178; Stop 202
gaagcagaaggacttgttagtgatc

SEQ ID NO: 333280 - DNA, 25 bp, Artificial
  probe
  misc_feature (1)..(25): SEQ ID NO: 2673; WAN024CWF-5; Start 838; Stop 862
ttgtgctatgataagacatggactg

SEQ ID NO: 333281 - DNA, 25 bp, Artificial
  probe
  misc_feature (1)..(25): SEQ ID NO: 2673; WAN024CWF-5; Start 421; Stop 445
atctcagttggtgaagaatatgatc

SEQ ID NO: 333282 - DNA, 25 bp, Artificial
  probe
  misc_feature (1)..(25): SEQ ID NO: 2673; WAN024CWF-5; Start 180; Stop 204
agcagaaggacttgttagtgatctt

SEQ ID NO: 333283 - DNA, 25 bp, Artificial
  probe
  misc_feature (1)..(25): SEQ ID NO: 2673; WAN024CWF-5; Start 179; Stop 203
aagcagaaggacttgttagtgatct

SEQ ID NO: 333284 - DNA, 25 bp, Artificial
  probe
  misc_feature (1)..(25): SEQ ID NO: 2673; WAN024CWF-5; Start 176; Stop 200
gagaagcagaaggacttgttagtga

SEQ ID NO: 333285 - DNA, 25 bp, Artificial
  probe
  misc_feature (1)..(25): SEQ ID NO: 2673; WAN024CWF-5; Start 559; Stop 583
cagttagaaccttgtcgaattgagt

SEQ ID NO: 333286 - DNA, 25 bp, Artificial
  probe
  misc_feature (1)..(25): SEQ ID NO: 2673; WAN024CWF-5; Start 560; Stop 584
agttagaaccttgtcgaattgagtt

SEQ ID NO: 333287 - DNA, 25 bp, Artificial
  probe
  misc_feature (1)..(25): SEQ ID NO: 2673; WAN024CWF-5; Start 1235; Stop 1259
cattggaggatatgttagaggaata

SEQ ID NO: 333288 - DNA, 25 bp, Artificial
  probe
  misc_feature (1)..(25): SEQ ID NO: 2673; WAN024CWF-5; Start 182; Stop 206
cagaaggacttgttagtgatcttat

SEQ ID NO: 333289 - DNA, 25 bp, Artificial
  probe
  misc_feature (1)..(25): SEQ ID NO: 2673; WAN024CWF-5; Start 839; Stop 863
tgtgctatgataagacatggactgt

SEQ ID NO: 333290 - DNA, 25 bp, Artificial
  probe
  misc_feature (1)..(25): SEQ ID NO: 2673; WAN024CWF-5; Start 1705; Stop 1729
gttaagaaccaggtagaggatatag

SEQ ID NO: 333291 - DNA, 25 bp, Artificial
  probe
  misc_feature (1)..(25): SEQ ID NO: 2673; WAN024CWF-5; Start 558; Stop 582
ccagttagaaccttgtcgaattgag

SEQ ID NO: 333292 - DNA, 25 bp, Artificial
  probe
  misc_feature (1)..(25): SEQ ID NO: 2673; WAN024CWF-5; Start 90; Stop 114
tggtttatcaacatctactaaggct

SEQ ID NO: 333293 - DNA, 25 bp, Artificial
  probe
  misc_feature (1)..(25): SEQ ID NO: 2673; WAN024CWF-5; Start 1713; Stop 1737
ccaggtagaggatatagctgatgat

SEQ ID NO: 333294 - DNA, 25 bp, Artificial
  probe
  misc_feature (1)..(25): SEQ ID NO: 2673; WAN024CWF-5; Start 1710; Stop 1734
gaaccaggtagaggatatagctgat

SEQ ID NO: 333295 - DNA, 25 bp, Artificial
  probe
  misc_feature (1)..(25): SEQ ID NO: 2674; WAN024G9B; Start 421; Stop 445
gttgttcttcgtagtggtaaggatg

SEQ ID NO: 333296 - DNA, 25 bp, Artificial
  probe
  misc_feature (1)..(25): SEQ ID NO: 2674; WAN024G9B; Start 1099; Stop 1123
gtgtatgttaatgcctcaactcgtt

SEQ ID NO: 333297 - DNA, 25 bp, Artificial
  probe
  misc_feature (1)..(25): SEQ ID NO: 2674; WAN024G9B; Start 219; Stop 243
tatagaagcgatggcaagaggaatt

SEQ ID NO: 333298 - DNA, 25 bp, Artificial
  probe
  misc_feature (1)..(25): SEQ ID NO: 2674; WAN024G9B; Start 420; Stop 444
ggttgttcttcgtagtggtaaggat

SEQ ID NO: 333299 - DNA, 25 bp, Artificial
  probe
  misc_feature (1)..(25): SEQ ID NO: 2674; WAN024G9B; Start 218; Stop 242
gtatagaagcgatggcaagaggaat

SEQ ID NO: 333300 - DNA, 25 bp, Artificial
  probe
  misc_feature (1)..(25): SEQ ID NO: 2674; WAN024G9B; Start 969; Stop 993
taaggttgtgagcagtttagaagaa

SEQ ID NO: 333301 - DNA, 25 bp, Artificial
  probe
  misc_feature (1)..(25): SEQ ID NO: 2674; WAN024G9B; Start 353; Stop 377
ttatctatgaaagccgtccaaatgt

SEQ ID NO: 333302 - DNA, 25 bp, Artificial
  probe
  misc_feature (1)..(25): SEQ ID NO: 2674; WAN024G9B; Start 352; Stop 376
attatctatgaaagccgtccaaatg

SEQ ID NO: 333303 - DNA, 25 bp, Artificial
  probe
  misc_feature (1)..(25): SEQ ID NO: 2674; WAN024G9B; Start 349; Stop 373
ggtattatctatgaaagccgtccaa

SEQ ID NO: 333304 - DNA, 25 bp, Artificial
  probe
  misc_feature (1)..(25): SEQ ID NO: 2674; WAN024G9B; Start 968; Stop 992
ttaaggttgtgagcagtttagaaga

SEQ ID NO: 333305 - DNA, 25 bp, Artificial
  probe
  misc_feature (1)..(25): SEQ ID NO: 2674; WAN024G9B; Start 967; Stop 991
gttaaggttgtgagcagtttagaag

SEQ ID NO: 333306 - DNA, 25 bp, Artificial
  probe
  misc_feature (1)..(25): SEQ ID NO: 2674; WAN024G9B; Start 966; Stop 990
tgttaaggttgtgagcagtttagaa

SEQ ID NO: 333307 - DNA, 25 bp, Artificial
  probe
  misc_feature (1)..(25): SEQ ID NO: 2674; WAN024G9B; Start 422; Stop 446
ttgttcttcgtagtggtaaggatgc

SEQ ID NO: 333308 - DNA, 25 bp, Artificial
  probe
  misc_feature (1)..(25): SEQ ID NO: 2674; WAN024G9B; Start 174; Stop 198
aatctcagatgtgatgttggatcgt

SEQ ID NO: 333309 - DNA, 25 bp, Artificial
  probe
  misc_feature (1)..(25): SEQ ID NO: 2674; WAN024G9B; Start 548; Stop 572
aaagtagttatgctatgatgaaggc

SEQ ID NO: 333310 - DNA, 25 bp, Artificial
  probe
  misc_feature (1)..(25): SEQ ID NO: 2674; WAN024G9B; Start 350; Stop 374
gtattatctatgaaagccgtccaaa

SEQ ID NO: 333311 - DNA, 25 bp, Artificial
  probe
  misc_feature (1)..(25): SEQ ID NO: 2674; WAN024G9B; Start 970; Stop 994
aaggttgtgagcagtttagaagaag

SEQ ID NO: 333312 - DNA, 25 bp, Artificial
  probe
  misc_feature (1)..(25): SEQ ID NO: 2674; WAN024G9B; Start 354; Stop 378
tatctatgaaagccgtccaaatgtg

SEQ ID NO: 333313 - DNA, 25 bp, Artificial
  probe
  misc_feature (1)..(25): SEQ ID NO: 2674; WAN024G9B; Start 1101; Stop 1125
gtatgttaatgcctcaactcgtttc

SEQ ID NO: 333314 - DNA, 25 bp, Artificial
  probe
  misc_feature (1)..(25): SEQ ID NO: 2674; WAN024G9B; Start 1102; Stop 1126
tatgttaatgcctcaactcgtttca

SEQ ID NO: 333315 - DNA, 25 bp, Artificial
  probe
  misc_feature (1)..(25): SEQ ID NO: 2674; WAN024G9B; Start 53; Stop 77
ttaacacagctagtgaagaagtgaa

SEQ ID NO: 333316 - DNA, 25 bp, Artificial
  probe
  misc_feature (1)..(25): SEQ ID NO: 2674; WAN024G9B; Start 52; Stop 76
attaacacagctagtgaagaagtga

SEQ ID NO: 333317 - DNA, 25 bp, Artificial
  probe
  misc_feature (1)..(25): SEQ ID NO: 2674; WAN024G9B; Start 51; Stop 75
gattaacacagctagtgaagaagtg

SEQ ID NO: 333318 - DNA, 25 bp, Artificial
  probe
  misc_feature (1)..(25): SEQ ID NO: 2674; WAN024G9B; Start 8; Stop 32
gtagacaagaacaatttgaacaggt

SEQ ID NO: 333319 - DNA, 25 bp, Artificial
  probe
  misc_feature (1)..(25): SEQ ID NO: 2674; WAN024G9B; Start 2; Stop 26
tggtgagtagacaagaacaatttga

SEQ ID NO: 333320 - DNA, 25 bp, Artificial
  probe
  misc_feature (1)..(25): SEQ ID NO: 2674; WAN024G9B; Start 175; Stop 199
atctcagatgtgatgttggatcgtc

SEQ ID NO: 333321 - DNA, 25 bp, Artificial
  probe
  misc_feature (1)..(25): SEQ ID NO: 2674; WAN024G9B; Start 3; Stop 27
ggtgagtagacaagaacaatttgaa

SEQ ID NO: 333322 - DNA, 25 bp, Artificial
  probe
  misc_feature (1)..(25): SEQ ID NO: 2674; WAN024G9B; Start 1; Stop 25
atggtgagtagacaagaacaatttg

SEQ ID NO: 333323 - DNA, 25 bp, Artificial
  probe
  misc_feature (1)..(25): SEQ ID NO: 2674; WAN024G9B; Start 1100; Stop 1124
tgtatgttaatgcctcaactcgttt

SEQ ID NO: 333324 - DNA, 25 bp, Artificial
  probe
  misc_feature (1)..(25): SEQ ID NO: 2674; WAN024G9B; Start 427; Stop 451
cttcgtagtggtaaggatgcctatc

SEQ ID NO: 333325 - DNA, 25 bp, Artificial
  probe
  misc_feature (1)..(25): SEQ ID NO: 2674; WAN024G9B; Start 7; Stop 31
agtagacaagaacaatttgaacagg

SEQ ID NO: 333326 - DNA, 25 bp, Artificial
  probe
  misc_feature (1)..(25): SEQ ID NO: 2674; WAN024G9B; Start 183; Stop 207
tgtgatgttggatcgtctttatttg

SEQ ID NO: 333327 - DNA, 25 bp, Artificial
  probe
  misc_feature (1)..(25): SEQ ID NO: 2674; WAN024G9B; Start 49; Stop 73
tcgattaacacagctagtgaagaag

SEQ ID NO: 333328 - DNA, 25 bp, Artificial
  probe
  misc_feature (1)..(25): SEQ ID NO: 2675; WAN024B69; Start 53; Stop 77
cagcaattccttacgaacaacgatt

SEQ ID NO: 333329 - DNA, 25 bp, Artificial
  probe
  misc_feature (1)..(25): SEQ ID NO: 2675; WAN024B69; Start 59; Stop 83
ttccttacgaacaacgatttggtat

SEQ ID NO: 333330 - DNA, 25 bp, Artificial
  probe
  misc_feature (1)..(25): SEQ ID NO: 2675; WAN024B69; Start 58; Stop 82
attccttacgaacaacgatttggta

SEQ ID NO: 333331 - DNA, 25 bp, Artificial
  probe
  misc_feature (1)..(25): SEQ ID NO: 2675; WAN024B69; Start 49; Stop 73
ctgtcagcaattccttacgaacaac

SEQ ID NO: 333332 - DNA, 25 bp, Artificial
  probe
  misc_feature (1)..(25): SEQ ID NO: 2675; WAN024B69; Start 52; Stop 76
tcagcaattccttacgaacaacgat

SEQ ID NO: 333333 - DNA, 25 bp, Artificial
  probe
  misc_feature (1)..(25): SEQ ID NO: 2675; WAN024B69; Start 66; Stop 90
cgaacaacgatttggtatgtgtatt

SEQ ID NO: 333334 - DNA, 25 bp, Artificial
  probe
  misc_feature (1)..(25): SEQ ID NO: 2675; WAN024B69; Start 56; Stop 80
caattccttacgaacaacgatttgg

SEQ ID NO: 333335 - DNA, 25 bp, Artificial
  probe
  misc_feature (1)..(25): SEQ ID NO: 2675; WAN024B69; Start 60; Stop 84
tccttacgaacaacgatttggtatg

SEQ ID NO: 333336 - DNA, 25 bp, Artificial
  probe
  misc_feature (1)..(25): SEQ ID NO: 2675; WAN024B69; Start 64; Stop 88
tacgaacaacgatttggtatgtgta

SEQ ID NO: 333337 - DNA, 25 bp, Artificial
  probe
  misc_feature (1)..(25): SEQ ID NO: 2675; WAN024B69; Start 62; Stop 86
cttacgaacaacgatttggtatgtg

SEQ ID NO: 333338 - DNA, 25 bp, Artificial
  probe
  misc_feature (1)..(25): SEQ ID NO: 2675; WAN024B69; Start 57; Stop 81
aattccttacgaacaacgatttggt

SEQ ID NO: 333339 - DNA, 25 bp, Artificial
  probe
  misc_feature (1)..(25): SEQ ID NO: 2675; WAN024B69; Start 54; Stop 78
agcaattccttacgaacaacgattt

SEQ ID NO: 333340 - DNA, 25 bp, Artificial
  probe
  misc_feature (1)..(25): SEQ ID NO: 2675; WAN024B69; Start 78; Stop 102
tggtatgtgtattcgtccatccaag

SEQ ID NO: 333341 - DNA, 25 bp, Artificial
  probe
  misc_feature (1)..(25): SEQ ID NO: 2675; WAN024B69; Start 65; Stop 89
acgaacaacgatttggtatgtgtat

SEQ ID NO: 333342 - DNA, 25 bp, Artificial
  probe
  misc_feature (1)..(25): SEQ ID NO: 2675; WAN024B69; Start 67; Stop 91
gaacaacgatttggtatgtgtattc

SEQ ID NO: 333343 - DNA, 25 bp, Artificial
  probe
  misc_feature (1)..(25): SEQ ID NO: 2675; WAN024B69; Start 55; Stop 79
gcaattccttacgaacaacgatttg

SEQ ID NO: 333344 - DNA, 25 bp, Artificial
  probe
  misc_feature (1)..(25): SEQ ID NO: 2675; WAN024B69; Start 63; Stop 87
ttacgaacaacgatttggtatgtgt

SEQ ID NO: 333345 - DNA, 25 bp, Artificial
  probe
  misc_feature (1)..(25): SEQ ID NO: 2675; WAN024B69; Start 79; Stop 103
ggtatgtgtattcgtccatccaagc

SEQ ID NO: 333346 - DNA, 25 bp, Artificial
  probe
  misc_feature (1)..(25): SEQ ID NO: 2675; WAN024B69; Start 8; Stop 32
aagtacgattggttctgctccatag

SEQ ID NO: 333347 - DNA, 25 bp, Artificial
  probe
  misc_feature (1)..(25): SEQ ID NO: 2675; WAN024B69; Start 61; Stop 85
ccttacgaacaacgatttggtatgt

SEQ ID NO: 333348 - DNA, 25 bp, Artificial
  probe
  misc_feature (1)..(25): SEQ ID NO: 2675; WAN024B69; Start 74; Stop 98
gatttggtatgtgtattcgtccatc

SEQ ID NO: 333349 - DNA, 25 bp, Artificial
  probe
  misc_feature (1)..(25): SEQ ID NO: 2675; WAN024B69; Start 7; Stop 31
caagtacgattggttctgctccata

SEQ ID NO: 333350 - DNA, 25 bp, Artificial
  probe
  misc_feature (1)..(25): SEQ ID NO: 2675; WAN024B69; Start 117; Stop 141
aagtaaccatctgtaccgaccttgt

SEQ ID NO: 333351 - DNA, 25 bp, Artificial
  probe
  misc_feature (1)..(25): SEQ ID NO: 2675; WAN024B69; Start 80; Stop 104
gtatgtgtattcgtccatccaagcg

SEQ ID NO: 333352 - DNA, 25 bp, Artificial
  probe
  misc_feature (1)..(25): SEQ ID NO: 2675; WAN024B69; Start 75; Stop 99
atttggtatgtgtattcgtccatcc

SEQ ID NO: 333353 - DNA, 25 bp, Artificial
  probe
  misc_feature (1)..(25): SEQ ID NO: 2675; WAN024B69; Start 107; Stop 131
tgaggcaacaaagtaaccatctgta

SEQ ID NO: 333354 - DNA, 25 bp, Artificial
  probe
  misc_feature (1)..(25): SEQ ID NO: 2675; WAN024B69; Start 51; Stop 75
gtcagcaattccttacgaacaacga

SEQ ID NO: 333355 - DNA, 25 bp, Artificial
  probe
  misc_feature (1)..(25): SEQ ID NO: 2675; WAN024B69; Start 105; Stop 129
tctgaggcaacaaagtaaccatctg

SEQ ID NO: 333356 - DNA, 25 bp, Artificial
  probe
  misc_feature (1)..(25): SEQ ID NO: 2675; WAN024B69; Start 104; Stop 128
gtctgaggcaacaaagtaaccatct

SEQ ID NO: 333357 - DNA, 25 bp, Artificial
  probe
  misc_feature (1)..(25): SEQ ID NO: 2675; WAN024B69; Start 108; Stop 132
gaggcaacaaagtaaccatctgtac

SEQ ID NO: 333358 - DNA, 25 bp, Artificial
  probe
  misc_feature (1)..(25): SEQ ID NO: 2675; WAN024B69; Start 112; Stop 136
caacaaagtaaccatctgtaccgac

SEQ ID NO: 333359 - DNA, 25 bp, Artificial
  probe
  misc_feature (1)..(25): SEQ ID NO: 2675; WAN024B69; Start 116; Stop 140
aaagtaaccatctgtaccgaccttg

SEQ ID NO: 333360 - DNA, 25 bp, Artificial
  probe
  misc_feature (1)..(25): SEQ ID NO: 2675; WAN024B69; Start 115; Stop 139
caaagtaaccatctgtaccgacctt

SEQ ID NO: 333361 - DNA, 25 bp, Artificial
  probe
  misc_feature (1)..(25): SEQ ID NO: 2676; WAN024C3P; Start 209; Stop 233
tattcaaccttcttgctaacctctt

SEQ ID NO: 333362 - DNA, 25 bp, Artificial
  probe
  misc_feature (1)..(25): SEQ ID NO: 2676; WAN024C3P; Start 208; Stop 232
gtattcaaccttcttgctaacctct

SEQ ID NO: 333363 - DNA, 25 bp, Artificial
  probe
  misc_feature (1)..(25): SEQ ID NO: 2676; WAN024C3P; Start 293; Stop 317
ctagaagtcttgagcatatagcctt

SEQ ID NO: 333364 - DNA, 25 bp, Artificial
  probe
  misc_feature (1)..(25): SEQ ID NO: 2676; WAN024C3P; Start 210; Stop 234
attcaaccttcttgctaacctcttg

SEQ ID NO: 333365 - DNA, 25 bp, Artificial
  probe
  misc_feature (1)..(25): SEQ ID NO: 2676; WAN024C3P; Start 292; Stop 316
actagaagtcttgagcatatagcct

SEQ ID NO: 333366 - DNA, 25 bp, Artificial
  probe
  misc_feature (1)..(25): SEQ ID NO: 2676; WAN024C3P; Start 291; Stop 315
cactagaagtcttgagcatatagcc

SEQ ID NO: 333367 - DNA, 25 bp, Artificial
  probe
  misc_feature (1)..(25): SEQ ID NO: 2676; WAN024C3P; Start 77; Stop 101
gtcttgaccgtcttgagagagataa

SEQ ID NO: 333368 - DNA, 25 bp, Artificial
  probe
  misc_feature (1)..(25): SEQ ID NO: 2676; WAN024C3P; Start 290; Stop 314
gcactagaagtcttgagcatatagc

SEQ ID NO: 333369 - DNA, 25 bp, Artificial
  probe
  misc_feature (1)..(25): SEQ ID NO: 2676; WAN024C3P; Start 217; Stop 241
cttcttgctaacctcttgctcaatg

SEQ ID NO: 333370 - DNA, 25 bp, Artificial
  probe
  misc_feature (1)..(25): SEQ ID NO: 2676; WAN024C3P; Start 207; Stop 231
ggtattcaaccttcttgctaacctc

SEQ ID NO: 333371 - DNA, 25 bp, Artificial
  probe
  misc_feature (1)..(25): SEQ ID NO: 2676; WAN024C3P; Start 295; Stop 319
agaagtcttgagcatatagcctttg

SEQ ID NO: 333372 - DNA, 25 bp, Artificial
  probe
  misc_feature (1)..(25): SEQ ID NO: 2676; WAN024C3P; Start 294; Stop 318
tagaagtcttgagcatatagccttt

SEQ ID NO: 333373 - DNA, 25 bp, Artificial
  probe
  misc_feature (1)..(25): SEQ ID NO: 2676; WAN024C3P; Start 281; Stop 305
aattcatctgcactagaagtcttga

SEQ ID NO: 333374 - DNA, 25 bp, Artificial
  probe
  misc_feature (1)..(25): SEQ ID NO: 2676; WAN024C3P; Start 280; Stop 304
caattcatctgcactagaagtcttg

SEQ ID NO: 333375 - DNA, 25 bp, Artificial
  probe
  misc_feature (1)..(25): SEQ ID NO: 2676; WAN024C3P; Start 282; Stop 306
attcatctgcactagaagtcttgag

SEQ ID NO: 333376 - DNA, 25 bp, Artificial
  probe
  misc_feature (1)..(25): SEQ ID NO: 2676; WAN024C3P; Start 206; Stop 230
tggtattcaaccttcttgctaacct

SEQ ID NO: 333377 - DNA, 25 bp, Artificial
  probe
  misc_feature (1)..(25): SEQ ID NO: 2676; WAN024C3P; Start 205; Stop 229
gtggtattcaaccttcttgctaacc

SEQ ID NO: 333378 - DNA, 25 bp, Artificial
  probe
  misc_feature (1)..(25): SEQ ID NO: 2676; WAN024C3P; Start 204; Stop 228
ggtggtattcaaccttcttgctaac

SEQ ID NO: 333379 - DNA, 25 bp, Artificial
  probe
  misc_feature (1)..(25): SEQ ID NO: 2676; WAN024C3P; Start 79; Stop 103
cttgaccgtcttgagagagataaag

SEQ ID NO: 333380 - DNA, 25 bp, Artificial
  probe
  misc_feature (1)..(25): SEQ ID NO: 2676; WAN024C3P; Start 216; Stop 240
ccttcttgctaacctcttgctcaat

SEQ ID NO: 333381 - DNA, 25 bp, Artificial
  probe
  misc_feature (1)..(25): SEQ ID NO: 2676; WAN024C3P; Start 78; Stop 102
tcttgaccgtcttgagagagataaa

SEQ ID NO: 333382 - DNA, 25 bp, Artificial
  probe
  misc_feature (1)..(25): SEQ ID NO: 2676; WAN024C3P; Start 296; Stop 320
gaagtcttgagcatatagcctttgg

SEQ ID NO: 333383 - DNA, 25 bp, Artificial
  probe
  misc_feature (1)..(25): SEQ ID NO: 2676; WAN024C3P; Start 218; Stop 242
ttcttgctaacctcttgctcaatgg

SEQ ID NO: 333384 - DNA, 25 bp, Artificial
  probe
  misc_feature (1)..(25): SEQ ID NO: 2676; WAN024C3P; Start 194; Stop 218
atatgattgcggtggtattcaacct

SEQ ID NO: 333385 - DNA, 25 bp, Artificial
  probe
  misc_feature (1)..(25): SEQ ID NO: 2676; WAN024C3P; Start 41; Stop 65
ctgacttcaagtttggcaagaatat

SEQ ID NO: 333386 - DNA, 25 bp, Artificial
  probe
  misc_feature (1)..(25): SEQ ID NO: 2676; WAN024C3P; Start 195; Stop 219
tatgattgcggtggtattcaacctt

SEQ ID NO: 333387 - DNA, 25 bp, Artificial
  probe
  misc_feature (1)..(25): SEQ ID NO: 2676; WAN024C3P; Start 211; Stop 235
ttcaaccttcttgctaacctcttgc

SEQ ID NO: 333388 - DNA, 25 bp, Artificial
  probe
  misc_feature (1)..(25): SEQ ID NO: 2676; WAN024C3P; Start 45; Stop 69
cttcaagtttggcaagaatattgga

SEQ ID NO: 333389 - DNA, 25 bp, Artificial
  probe
  misc_feature (1)..(25): SEQ ID NO: 2676; WAN024C3P; Start 46; Stop 70
ttcaagtttggcaagaatattggac

SEQ ID NO: 333390 - DNA, 25 bp, Artificial
  probe
  misc_feature (1)..(25): SEQ ID NO: 2676; WAN024C3P; Start 44; Stop 68
acttcaagtttggcaagaatattgg

SEQ ID NO: 333391 - DNA, 25 bp, Artificial
  probe
  misc_feature (1)..(25): SEQ ID NO: 2676; WAN024C3P; Start 42; Stop 66
tgacttcaagtttggcaagaatatt

SEQ ID NO: 333392 - DNA, 25 bp, Artificial
  probe
  misc_feature (1)..(25): SEQ ID NO: 2676; WAN024C3P; Start 43; Stop 67
gacttcaagtttggcaagaatattg

SEQ ID NO: 333393 - DNA, 25 bp, Artificial
  probe
  misc_feature (1)..(25): SEQ ID NO: 2676; WAN024C3P; Start 48; Stop 72
caagtttggcaagaatattggacac

SEQ ID NO: 333394 - DNA, 25 bp, Artificial
  probe
  misc_feature (1)..(25): SEQ ID NO: 2677; WAN024CB8; Start 144; Stop 168
gcacagtgtcatagtggttatagaa

SEQ ID NO: 333395 - DNA, 25 bp, Artificial
  probe
  misc_feature (1)..(25): SEQ ID NO: 2677; WAN024CB8; Start 227; Stop 251
gtatagctctcatcaatctccactt

SEQ ID NO: 333396 - DNA, 25 bp, Artificial
  probe
  misc_feature (1)..(25): SEQ ID NO: 2677; WAN024CB8; Start 225; Stop 249
ctgtatagctctcatcaatctccac

SEQ ID NO: 333397 - DNA, 25 bp, Artificial
  probe
  misc_feature (1)..(25): SEQ ID NO: 2677; WAN024CB8; Start 228; Stop 252
tatagctctcatcaatctccacttc

SEQ ID NO: 333398 - DNA, 25 bp, Artificial
  probe
  misc_feature (1)..(25): SEQ ID NO: 2677; WAN024CB8; Start 226; Stop 250
tgtatagctctcatcaatctccact

SEQ ID NO: 333399 - DNA, 25 bp, Artificial
  probe
  misc_feature (1)..(25): SEQ ID NO: 2677; WAN024CB8; Start 229; Stop 253
atagctctcatcaatctccacttca

SEQ ID NO: 333400 - DNA, 25 bp, Artificial
  probe
  misc_feature (1)..(25): SEQ ID NO: 2677; WAN024CB8; Start 143; Stop 167
ggcacagtgtcatagtggttataga

SEQ ID NO: 333401 - DNA, 25 bp, Artificial
  probe
  misc_feature (1)..(25): SEQ ID NO: 2677; WAN024CB8; Start 230; Stop 254
tagctctcatcaatctccacttcag

SEQ ID NO: 333402 - DNA, 25 bp, Artificial
  probe
  misc_feature (1)..(25): SEQ ID NO: 2677; WAN024CB8; Start 142; Stop 166
tggcacagtgtcatagtggttatag

SEQ ID NO: 333403 - DNA, 25 bp, Artificial
  probe
  misc_feature (1)..(25): SEQ ID NO: 2677; WAN024CB8; Start 141; Stop 165
ctggcacagtgtcatagtggttata

SEQ ID NO: 333404 - DNA, 25 bp, Artificial
  probe
  misc_feature (1)..(25): SEQ ID NO: 2677; WAN024CB8; Start 280; Stop 304
cagataatttgcgacttccttgagt

SEQ ID NO: 333405 - DNA, 25 bp, Artificial
  probe
  misc_feature (1)..(25): SEQ ID NO: 2677; WAN024CB8; Start 279; Stop 303
ccagataatttgcgacttccttgag

SEQ ID NO: 333406 - DNA, 25 bp, Artificial
  probe
  misc_feature (1)..(25): SEQ ID NO: 2677; WAN024CB8; Start 233; Stop 257
ctctcatcaatctccacttcagctc

SEQ ID NO: 333407 - DNA, 25 bp, Artificial
  probe
  misc_feature (1)..(25): SEQ ID NO: 2677; WAN024CB8; Start 145; Stop 169
cacagtgtcatagtggttatagaaa

SEQ ID NO: 333408 - DNA, 25 bp, Artificial
  probe
  misc_feature (1)..(25): SEQ ID NO: 2677; WAN024CB8; Start 224; Stop 248
gctgtatagctctcatcaatctcca

SEQ ID NO: 333409 - DNA, 25 bp, Artificial
  probe
  misc_feature (1)..(25): SEQ ID NO: 2677; WAN024CB8; Start 195; Stop 219
aactcttgaaatgtgccatgacaaa

SEQ ID NO: 333410 - DNA, 25 bp, Artificial
  probe
  misc_feature (1)..(25): SEQ ID NO: 2677; WAN024CB8; Start 273; Stop 297
tctcacccagataatttgcgacttc

SEQ ID NO: 333411 - DNA, 25 bp, Artificial
  probe
  misc_feature (1)..(25): SEQ ID NO: 2677; WAN024CB8; Start 278; Stop 302
cccagataatttgcgacttccttga

SEQ ID NO: 333412 - DNA, 25 bp, Artificial
  probe
  misc_feature (1)..(25): SEQ ID NO: 2677; WAN024CB8; Start 237; Stop 261
catcaatctccacttcagctccaac

SEQ ID NO: 333413 - DNA, 25 bp, Artificial
  probe
  misc_feature (1)..(25): SEQ ID NO: 2677; WAN024CB8; Start 196; Stop 220
actcttgaaatgtgccatgacaaag

SEQ ID NO: 333414 - DNA, 25 bp, Artificial
  probe
  misc_feature (1)..(25): SEQ ID NO: 2677; WAN024CB8; Start 194; Stop 218
gaactcttgaaatgtgccatgacaa

SEQ ID NO: 333415 - DNA, 25 bp, Artificial
  probe
  misc_feature (1)..(25): SEQ ID NO: 2677; WAN024CB8; Start 270; Stop 294
aaatctcacccagataatttgcgac

SEQ ID NO: 333416 - DNA, 25 bp, Artificial
  probe
  misc_feature (1)..(25): SEQ ID NO: 2677; WAN024CB8; Start 277; Stop 301
acccagataatttgcgacttccttg

SEQ ID NO: 333417 - DNA, 25 bp, Artificial
  probe
  misc_feature (1)..(25): SEQ ID NO: 2677; WAN024CB8; Start 276; Stop 300
cacccagataatttgcgacttcctt

SEQ ID NO: 333418 - DNA, 25 bp, Artificial
  probe
  misc_feature (1)..(25): SEQ ID NO: 2677; WAN024CB8; Start 236; Stop 260
tcatcaatctccacttcagctccaa

SEQ ID NO: 333419 - DNA, 25 bp, Artificial
  probe
  misc_feature (1)..(25): SEQ ID NO: 2677; WAN024CB8; Start 234; Stop 258
tctcatcaatctccacttcagctcc

SEQ ID NO: 333420 - DNA, 25 bp, Artificial
  probe
  misc_feature (1)..(25): SEQ ID NO: 2677; WAN024CB8; Start 223; Stop 247
cgctgtatagctctcatcaatctcc

SEQ ID NO: 333421 - DNA, 25 bp, Artificial
  probe
  misc_feature (1)..(25): SEQ ID NO: 2677; WAN024CB8; Start 238; Stop 262
atcaatctccacttcagctccaaca

SEQ ID NO: 333422 - DNA, 25 bp, Artificial
  probe
  misc_feature (1)..(25): SEQ ID NO: 2677; WAN024CB8; Start 274; Stop 298
ctcacccagataatttgcgacttcc

SEQ ID NO: 333423 - DNA, 25 bp, Artificial
  probe
  misc_feature (1)..(25): SEQ ID NO: 2677; WAN024CB8; Start 235; Stop 259
ctcatcaatctccacttcagctcca

SEQ ID NO: 333424 - DNA, 25 bp, Artificial
  probe
  misc_feature (1)..(25): SEQ ID NO: 2677; WAN024CB8; Start 197; Stop 221
ctcttgaaatgtgccatgacaaagg

SEQ ID NO: 333425 - DNA, 25 bp, Artificial
  probe
  misc_feature (1)..(25): SEQ ID NO: 2677; WAN024CB8; Start 272; Stop 296
atctcacccagataatttgcgactt

SEQ ID NO: 333426 - DNA, 25 bp, Artificial
  probe
  misc_feature (1)..(25): SEQ ID NO: 2677; WAN024CB8; Start 271; Stop 295
aatctcacccagataatttgcgact

SEQ ID NO: 333427 - DNA, 25 bp, Artificial
  probe
  misc_feature (1)..(25): SEQ ID NO: 2678; WAN024B2M; Start 32; Stop 56
cggaaatgttttatggctatgagaa

SEQ ID NO: 333428 - DNA, 25 bp, Artificial
  probe
  misc_feature (1)..(25): SEQ ID NO: 2678; WAN024B2M; Start 31; Stop 55
tcggaaatgttttatggctatgaga

SEQ ID NO: 333429 - DNA, 25 bp, Artificial
  probe
  misc_feature (1)..(25): SEQ ID NO: 2678; WAN024B2M; Start 30; Stop 54
atcggaaatgttttatggctatgag

SEQ ID NO: 333430 - DNA, 25 bp, Artificial
  probe
  misc_feature (1)..(25): SEQ ID NO: 2678; WAN024B2M; Start 33; Stop 57
ggaaatgttttatggctatgagaaa

SEQ ID NO: 333431 - DNA, 25 bp, Artificial
  probe
  misc_feature (1)..(25): SEQ ID NO: 2678; WAN024B2M; Start 149; Stop 173
ttagtcctgtgcagtacagaactaa

SEQ ID NO: 333432 - DNA, 25 bp, Artificial
  probe
  misc_feature (1)..(25): SEQ ID NO: 2678; WAN024B2M; Start 160; Stop 184
cagtacagaactaaatcctttggat

SEQ ID NO: 333433 - DNA, 25 bp, Artificial
  probe
  misc_feature (1)..(25): SEQ ID NO: 2678; WAN024B2M; Start 148; Stop 172
cttagtcctgtgcagtacagaacta

SEQ ID NO: 333434 - DNA, 25 bp, Artificial
  probe
  misc_feature (1)..(25): SEQ ID NO: 2678; WAN024B2M; Start 116; Stop 140
acaacaagagaattaaggtaaaact

SEQ ID NO: 333435 - DNA, 25 bp, Artificial
  probe
  misc_feature (1)..(25): SEQ ID NO: 2678; WAN024B2M; Start 146; Stop 170
gacttagtcctgtgcagtacagaac

SEQ ID NO: 333436 - DNA, 25 bp, Artificial
  probe
  misc_feature (1)..(25): SEQ ID NO: 2678; WAN024B2M; Start 161; Stop 185
agtacagaactaaatcctttggata

SEQ ID NO: 333437 - DNA, 25 bp, Artificial
  probe
  misc_feature (1)..(25): SEQ ID NO: 2678; WAN024B2M; Start 150; Stop 174
tagtcctgtgcagtacagaactaaa

SEQ ID NO: 333438 - DNA, 25 bp, Artificial
  probe
  misc_feature (1)..(25): SEQ ID NO: 2678; WAN024B2M; Start 115; Stop 139
aacaacaagagaattaaggtaaaac

SEQ ID NO: 333439 - DNA, 25 bp, Artificial
  probe
  misc_feature (1)..(25): SEQ ID NO: 2678; WAN024B2M; Start 114; Stop 138
caacaacaagagaattaaggtaaaa

SEQ ID NO: 333440 - DNA, 25 bp, Artificial
  probe
  misc_feature (1)..(25): SEQ ID NO: 2678; WAN024B2M; Start 147; Stop 171
acttagtcctgtgcagtacagaact

SEQ ID NO: 333441 - DNA, 25 bp, Artificial
  probe
  misc_feature (1)..(25): SEQ ID NO: 2678; WAN024B2M; Start 152; Stop 176
gtcctgtgcagtacagaactaaatc

SEQ ID NO: 333442 - DNA, 25 bp, Artificial
  probe
  misc_feature (1)..(25): SEQ ID NO: 2678; WAN024B2M; Start 151; Stop 175
agtcctgtgcagtacagaactaaat

SEQ ID NO: 333443 - DNA, 25 bp, Artificial
  probe
  misc_feature (1)..(25): SEQ ID NO: 2678; WAN024B2M; Start 162; Stop 186
gtacagaactaaatcctttggataa

SEQ ID NO: 333444 - DNA, 25 bp, Artificial
  probe
  misc_feature (1)..(25): SEQ ID NO: 2678; WAN024B2M; Start 154; Stop 178
cctgtgcagtacagaactaaatcct

SEQ ID NO: 333445 - DNA, 25 bp, Artificial
  probe
  misc_feature (1)..(25): SEQ ID NO: 2678; WAN024B2M; Start 153; Stop 177
tcctgtgcagtacagaactaaatcc

SEQ ID NO: 333446 - DNA, 25 bp, Artificial
  probe
  misc_feature (1)..(25): SEQ ID NO: 2678; WAN024B2M; Start 117; Stop 141
caacaagagaattaaggtaaaacta

SEQ ID NO: 333447 - DNA, 25 bp, Artificial
  probe
  misc_feature (1)..(25): SEQ ID NO: 2678; WAN024B2M; Start 124; Stop 148
agaattaaggtaaaactaaaaggac

SEQ ID NO: 333448 - DNA, 25 bp, Artificial
  probe
  misc_feature (1)..(25): SEQ ID NO: 2678; WAN024B2M; Start 123; Stop 147
gagaattaaggtaaaactaaaagga

SEQ ID NO: 333449 - DNA, 25 bp, Artificial
  probe
  misc_feature (1)..(25): SEQ ID NO: 2678; WAN024B2M; Start 122; Stop 146
agagaattaaggtaaaactaaaagg

SEQ ID NO: 333450 - DNA, 25 bp, Artificial
  probe
  misc_feature (1)..(25): SEQ ID NO: 2678; WAN024B2M; Start 145; Stop 169
ggacttagtcctgtgcagtacagaa

SEQ ID NO: 333451 - DNA, 25 bp, Artificial
  probe
  misc_feature (1)..(25): SEQ ID NO: 2678; WAN024B2M; Start 130; Stop 154
aaggtaaaactaaaaggacttagtc

SEQ ID NO: 333452 - DNA, 25 bp, Artificial
  probe
  misc_feature (1)..(25): SEQ ID NO: 2678; WAN024B2M; Start 131; Stop 155
aggtaaaactaaaaggacttagtcc

SEQ ID NO: 333453 - DNA, 25 bp, Artificial
  probe
  misc_feature (1)..(25): SEQ ID NO: 2679; WAN024FVQ; Start 560; Stop 584
aatacggcgaatatgtagaagaagt

SEQ ID NO: 333454 - DNA, 25 bp, Artificial
  probe
  misc_feature (1)..(25): SEQ ID NO: 2679; WAN024FVQ; Start 561; Stop 585
atacggcgaatatgtagaagaagtc

SEQ ID NO: 333455 - DNA, 25 bp, Artificial
  probe
  misc_feature (1)..(25): SEQ ID NO: 2679; WAN024FVQ; Start 482; Stop 506
ttactgtctatgaaggaaccgaact

SEQ ID NO: 333456 - DNA, 25 bp, Artificial
  probe
  misc_feature (1)..(25): SEQ ID NO: 2679; WAN024FVQ; Start 483; Stop 507
tactgtctatgaaggaaccgaactg

SEQ ID NO: 333457 - DNA, 25 bp, Artificial
  probe
  misc_feature (1)..(25): SEQ ID NO: 2679; WAN024FVQ; Start 568; Stop 592
gaatatgtagaagaagtcggactca

SEQ ID NO: 333458 - DNA, 25 bp, Artificial
  probe
  misc_feature (1)..(25): SEQ ID NO: 2679; WAN024FVQ; Start 569; Stop 593
aatatgtagaagaagtcggactcaa

SEQ ID NO: 333459 - DNA, 25 bp, Artificial
  probe
  misc_feature (1)..(25): SEQ ID NO: 2679; WAN024FVQ; Start 291; Stop 315
aagtgacgatgctaaggatgttgtt

SEQ ID NO: 333460 - DNA, 25 bp, Artificial
  probe
  misc_feature (1)..(25): SEQ ID NO: 2679; WAN024FVQ; Start 481; Stop 505
tttactgtctatgaaggaaccgaac

SEQ ID NO: 333461 - DNA, 25 bp, Artificial
  probe
  misc_feature (1)..(25): SEQ ID NO: 2679; WAN024FVQ; Start 383; Stop 407
tagcctttgaccattatgccattat

SEQ ID NO: 333462 - DNA, 25 bp, Artificial
  probe
  misc_feature (1)..(25): SEQ ID NO: 2679; WAN024FVQ; Start 535; Stop 559
atcgtcagcaataactttctcgtaa

SEQ ID NO: 333463 - DNA, 25 bp, Artificial
  probe
  misc_feature (1)..(25): SEQ ID NO: 2679; WAN024FVQ; Start 534; Stop 558
aatcgtcagcaataactttctcgta

SEQ ID NO: 333464 - DNA, 25 bp, Artificial
  probe
  misc_feature (1)..(25): SEQ ID NO: 2679; WAN024FVQ; Start 233; Stop 257
cagtgaccattgcctatttagtgta

SEQ ID NO: 333465 - DNA, 25 bp, Artificial
  probe
  misc_feature (1)..(25): SEQ ID NO: 2679; WAN024FVQ; Start 382; Stop 406
ttagcctttgaccattatgccatta

SEQ ID NO: 333466 - DNA, 25 bp, Artificial
  probe
  misc_feature (1)..(25): SEQ ID NO: 2679; WAN024FVQ; Start 536; Stop 560
tcgtcagcaataactttctcgtaaa

SEQ ID NO: 333467 - DNA, 25 bp, Artificial
  probe
  misc_feature (1)..(25): SEQ ID NO: 2679; WAN024FVQ; Start 559; Stop 583
aaatacggcgaatatgtagaagaag

SEQ ID NO: 333468 - DNA, 25 bp, Artificial
  probe
  misc_feature (1)..(25): SEQ ID NO: 2679; WAN024FVQ; Start 386; Stop 410
cctttgaccattatgccattatcca

SEQ ID NO: 333469 - DNA, 25 bp, Artificial
  probe
  misc_feature (1)..(25): SEQ ID NO: 2679; WAN024FVQ; Start 480; Stop 504
gtttactgtctatgaaggaaccgaa

SEQ ID NO: 333470 - DNA, 25 bp, Artificial
  probe
  misc_feature (1)..(25): SEQ ID NO: 2679; WAN024FVQ; Start 464; Stop 488
atctgttggaagaagagtttactgt

SEQ ID NO: 333471 - DNA, 25 bp, Artificial
  probe
  misc_feature (1)..(25): SEQ ID NO: 2679; WAN024FVQ; Start 477; Stop 501
agagtttactgtctatgaaggaacc

SEQ ID NO: 333472 - DNA, 25 bp, Artificial
  probe
  misc_feature (1)..(25): SEQ ID NO: 2679; WAN024FVQ; Start 466; Stop 490
ctgttggaagaagagtttactgtct

SEQ ID NO: 333473 - DNA, 25 bp, Artificial
  probe
  misc_feature (1)..(25): SEQ ID NO: 2679; WAN024FVQ; Start 465; Stop 489
tctgttggaagaagagtttactgtc

SEQ ID NO: 333474 - DNA, 25 bp, Artificial
  probe
  misc_feature (1)..(25): SEQ ID NO: 2679; WAN024FVQ; Start 256; Stop 280
tacctacctagtcgtgcattagaac

SEQ ID NO: 333475 - DNA, 25 bp, Artificial
  probe
  misc_feature (1)..(25): SEQ ID NO: 2679; WAN024FVQ; Start 255; Stop 279
gtacctacctagtcgtgcattagaa

SEQ ID NO: 333476 - DNA, 25 bp, Artificial
  probe
  misc_feature (1)..(25): SEQ ID NO: 2679; WAN024FVQ; Start 387; Stop 411
ctttgaccattatgccattatccaa

SEQ ID NO: 333477 - DNA, 25 bp, Artificial
  probe
  misc_feature (1)..(25): SEQ ID NO: 2679; WAN024FVQ; Start 467; Stop 491
tgttggaagaagagtttactgtcta

SEQ ID NO: 333478 - DNA, 25 bp, Artificial
  probe
  misc_feature (1)..(25): SEQ ID NO: 2679; WAN024FVQ; Start 384; Stop 408
agcctttgaccattatgccattatc

SEQ ID NO: 333479 - DNA, 25 bp, Artificial
  probe
  misc_feature (1)..(25): SEQ ID NO: 2679; WAN024FVQ; Start 139; Stop 163
gaagtgaaagaagaagtcaatctcg

SEQ ID NO: 333480 - DNA, 25 bp, Artificial
  probe
  misc_feature (1)..(25): SEQ ID NO: 2679; WAN024FVQ; Start 138; Stop 162
cgaagtgaaagaagaagtcaatctc

SEQ ID NO: 333481 - DNA, 25 bp, Artificial
  probe
  misc_feature (1)..(25): SEQ ID NO: 2679; WAN024FVQ; Start 478; Stop 502
gagtttactgtctatgaaggaaccg

SEQ ID NO: 333482 - DNA, 25 bp, Artificial
  probe
  misc_feature (1)..(25): SEQ ID NO: 2679; WAN024FVQ; Start 459; Stop 483
cctttatctgttggaagaagagttt

SEQ ID NO: 333483 - DNA, 25 bp, Artificial
  probe
  misc_feature (1)..(25): SEQ ID NO: 2679; WAN024FVQ; Start 243; Stop 267
tgcctatttagtgtacctacctagt

SEQ ID NO: 333484 - DNA, 25 bp, Artificial
  probe
  misc_feature (1)..(25): SEQ ID NO: 2679; WAN024FVQ; Start 240; Stop 264
cattgcctatttagtgtacctacct

SEQ ID NO: 333485 - DNA, 25 bp, Artificial
  probe
  misc_feature (1)..(25): SEQ ID NO: 2679; WAN024FVQ; Start 238; Stop 262
accattgcctatttagtgtacctac

SEQ ID NO: 333486 - DNA, 25 bp, Artificial
  probe
  misc_feature (1)..(25): SEQ ID NO: 2680; WAN024FUV; Start 305; Stop 329
ttaccattatgaatccaccactgtt

SEQ ID NO: 333487 - DNA, 25 bp, Artificial
  probe
  misc_feature (1)..(25): SEQ ID NO: 2680; WAN024FUV; Start 408; Stop 432
aagagaatcacatagaagccagttg

SEQ ID NO: 333488 - DNA, 25 bp, Artificial
  probe
  misc_feature (1)..(25): SEQ ID NO: 2680; WAN024FUV; Start 306; Stop 330
taccattatgaatccaccactgttg

SEQ ID NO: 333489 - DNA, 25 bp, Artificial
  probe
  misc_feature (1)..(25): SEQ ID NO: 2680; WAN024FUV; Start 310; Stop 334
attatgaatccaccactgttgttct

SEQ ID NO: 333490 - DNA, 25 bp, Artificial
  probe
  misc_feature (1)..(25): SEQ ID NO: 2680; WAN024FUV; Start 309; Stop 333
cattatgaatccaccactgttgttc

SEQ ID NO: 333491 - DNA, 25 bp, Artificial
  probe
  misc_feature (1)..(25): SEQ ID NO: 2680; WAN024FUV; Start 311; Stop 335
ttatgaatccaccactgttgttctc

SEQ ID NO: 333492 - DNA, 25 bp, Artificial
  probe
  misc_feature (1)..(25): SEQ ID NO: 2680; WAN024FUV; Start 466; Stop 490
aagaccagcaattctatcaaggaag

SEQ ID NO: 333493 - DNA, 25 bp, Artificial
  probe
  misc_feature (1)..(25): SEQ ID NO: 2680; WAN024FUV; Start 644; Stop 668
gtgtagtggaagtgatacgattatt

SEQ ID NO: 333494 - DNA, 25 bp, Artificial
  probe
  misc_feature (1)..(25): SEQ ID NO: 2680; WAN024FUV; Start 468; Stop 492
gaccagcaattctatcaaggaagtt

SEQ ID NO: 333495 - DNA, 25 bp, Artificial
  probe
  misc_feature (1)..(25): SEQ ID NO: 2680; WAN024FUV; Start 308; Stop 332
ccattatgaatccaccactgttgtt

SEQ ID NO: 333496 - DNA, 25 bp, Artificial
  probe
  misc_feature (1)..(25): SEQ ID NO: 2680; WAN024FUV; Start 710; Stop 734
ctggtgatatggaagaggaactgaa

SEQ ID NO: 333497 - DNA, 25 bp, Artificial
  probe
  misc_feature (1)..(25): SEQ ID NO: 2680; WAN024FUV; Start 58; Stop 82
gcagagaagattctatcaaccattg

SEQ ID NO: 333498 - DNA, 25 bp, Artificial
  probe
  misc_feature (1)..(25): SEQ ID NO: 2680; WAN024FUV; Start 313; Stop 337
atgaatccaccactgttgttctcta

SEQ ID NO: 333499 - DNA, 25 bp, Artificial
  probe
  misc_feature (1)..(25): SEQ ID NO: 2680; WAN024FUV; Start 312; Stop 336
tatgaatccaccactgttgttctct

SEQ ID NO: 333500 - DNA, 25 bp, Artificial
  probe
  misc_feature (1)..(25): SEQ ID NO: 2680; WAN024FUV; Start 314; Stop 338
tgaatccaccactgttgttctctaa

SEQ ID NO: 333501 - DNA, 25 bp, Artificial
  probe
  misc_feature (1)..(25): SEQ ID NO: 2680; WAN024FUV; Start 411; Stop 435
agaatcacatagaagccagttggat

SEQ ID NO: 333502 - DNA, 25 bp, Artificial
  probe
  misc_feature (1)..(25): SEQ ID NO: 2680; WAN024FUV; Start 467; Stop 491
agaccagcaattctatcaaggaagt

SEQ ID NO: 333503 - DNA, 25 bp, Artificial
  probe
  misc_feature (1)..(25): SEQ ID NO: 2680; WAN024FUV; Start 412; Stop 436
gaatcacatagaagccagttggatg

SEQ ID NO: 333504 - DNA, 25 bp, Artificial
  probe
  misc_feature (1)..(25): SEQ ID NO: 2680; WAN024FUV; Start 982; Stop 1006
caggcgattactaattacatgactt

SEQ ID NO: 333505 - DNA, 25 bp, Artificial
  probe
  misc_feature (1)..(25): SEQ ID NO: 2680; WAN024FUV; Start 59; Stop 83
cagagaagattctatcaaccattgt

SEQ ID NO: 333506 - DNA, 25 bp, Artificial
  probe
  misc_feature (1)..(25): SEQ ID NO: 2680; WAN024FUV; Start 984; Stop 1008
ggcgattactaattacatgacttct

SEQ ID NO: 333507 - DNA, 25 bp, Artificial
  probe
  misc_feature (1)..(25): SEQ ID NO: 2680; WAN024FUV; Start 983; Stop 1007
aggcgattactaattacatgacttc

SEQ ID NO: 333508 - DNA, 25 bp, Artificial
  probe
  misc_feature (1)..(25): SEQ ID NO: 2680; WAN024FUV; Start 649; Stop 673
gtggaagtgatacgattattacacc

SEQ ID NO: 333509 - DNA, 25 bp, Artificial
  probe
  misc_feature (1)..(25): SEQ ID NO: 2680; WAN024FUV; Start 991; Stop 1015
actaattacatgacttctgcctcaa

SEQ ID NO: 333510 - DNA, 25 bp, Artificial
  probe
  misc_feature (1)..(25): SEQ ID NO: 2680; WAN024FUV; Start 655; Stop 679
gtgatacgattattacaccaagagg

SEQ ID NO: 333511 - DNA, 25 bp, Artificial
  probe
  misc_feature (1)..(25): SEQ ID NO: 2680; WAN024FUV; Start 981; Stop 1005
tcaggcgattactaattacatgact

SEQ ID NO: 333512 - DNA, 25 bp, Artificial
  probe
  misc_feature (1)..(25): SEQ ID NO: 2680; WAN024FUV; Start 307; Stop 331
accattatgaatccaccactgttgt

SEQ ID NO: 333513 - DNA, 25 bp, Artificial
  probe
  misc_feature (1)..(25): SEQ ID NO: 2680; WAN024FUV; Start 980; Stop 1004
ctcaggcgattactaattacatgac

SEQ ID NO: 333514 - DNA, 25 bp, Artificial
  probe
  misc_feature (1)..(25): SEQ ID NO: 2680; WAN024FUV; Start 990; Stop 1014
tactaattacatgacttctgcctca

SEQ ID NO: 333515 - DNA, 25 bp, Artificial
  probe
  misc_feature (1)..(25): SEQ ID NO: 2680; WAN024FUV; Start 979; Stop 1003
gctcaggcgattactaattacatga

SEQ ID NO: 333516 - DNA, 25 bp, Artificial
  probe
  misc_feature (1)..(25): SEQ ID NO: 2680; WAN024FUV; Start 978; Stop 1002
agctcaggcgattactaattacatg

SEQ ID NO: 333517 - DNA, 25 bp, Artificial
  probe
  misc_feature (1)..(25): SEQ ID NO: 2680; WAN024FUV; Start 977; Stop 1001
cagctcaggcgattactaattacat

SEQ ID NO: 333518 - DNA, 25 bp, Artificial
  probe
  misc_feature (1)..(25): SEQ ID NO: 2680; WAN024FUV; Start 989; Stop 1013
ttactaattacatgacttctgcctc

SEQ ID NO: 333519 - DNA, 25 bp, Artificial
  probe
  misc_feature (1)..(25): SEQ ID NO: 2681; WAN024FXP; Start 251; Stop 275
atatgacgatgaatgataatggtgt

SEQ ID NO: 333520 - DNA, 25 bp, Artificial
  probe
  misc_feature (1)..(25): SEQ ID NO: 2681; WAN024FXP; Start 252; Stop 276
tatgacgatgaatgataatggtgtc

SEQ ID NO: 333521 - DNA, 25 bp, Artificial
  probe
  misc_feature (1)..(25): SEQ ID NO: 2681; WAN024FXP; Start 125; Stop 149
atctcagccatccaagtaagagttg

SEQ ID NO: 333522 - DNA, 25 bp, Artificial
  probe
  misc_feature (1)..(25): SEQ ID NO: 2681; WAN024FXP; Start 124; Stop 148
catctcagccatccaagtaagagtt

SEQ ID NO: 333523 - DNA, 25 bp, Artificial
  probe
  misc_feature (1)..(25): SEQ ID NO: 2681; WAN024FXP; Start 95; Stop 119
ccttggtaggctctatcttcaacaa

SEQ ID NO: 333524 - DNA, 25 bp, Artificial
  probe
  misc_feature (1)..(25): SEQ ID NO: 2681; WAN024FXP; Start 260; Stop 284
tgaatgataatggtgtcgtattctt

SEQ ID NO: 333525 - DNA, 25 bp, Artificial
  probe
  misc_feature (1)..(25): SEQ ID NO: 2681; WAN024FXP; Start 259; Stop 283
atgaatgataatggtgtcgtattct

SEQ ID NO: 333526 - DNA, 25 bp, Artificial
  probe
  misc_feature (1)..(25): SEQ ID NO: 2681; WAN024FXP; Start 120; Stop 144
gatccatctcagccatccaagtaag

SEQ ID NO: 333527 - DNA, 25 bp, Artificial
  probe
  misc_feature (1)..(25): SEQ ID NO: 2681; WAN024FXP; Start 121; Stop 145
atccatctcagccatccaagtaaga

SEQ ID NO: 333528 - DNA, 25 bp, Artificial
  probe
  misc_feature (1)..(25): SEQ ID NO: 2681; WAN024FXP; Start 257; Stop 281
cgatgaatgataatggtgtcgtatt

SEQ ID NO: 333529 - DNA, 25 bp, Artificial
  probe
  misc_feature (1)..(25): SEQ ID NO: 2681; WAN024FXP; Start 258; Stop 282
gatgaatgataatggtgtcgtattc

SEQ ID NO: 333530 - DNA, 25 bp, Artificial
  probe
  misc_feature (1)..(25): SEQ ID NO: 2681; WAN024FXP; Start 97; Stop 121
ttggtaggctctatcttcaacaaga

SEQ ID NO: 333531 - DNA, 25 bp, Artificial
  probe
  misc_feature (1)..(25): SEQ ID NO: 2681; WAN024FXP; Start 112; Stop 136
ttcaacaagatccatctcagccatc

SEQ ID NO: 333532 - DNA, 25 bp, Artificial
  probe
  misc_feature (1)..(25): SEQ ID NO: 2681; WAN024FXP; Start 111; Stop 135
cttcaacaagatccatctcagccat

SEQ ID NO: 333533 - DNA, 25 bp, Artificial
  probe
  misc_feature (1)..(25): SEQ ID NO: 2681; WAN024FXP; Start 253; Stop 277
atgacgatgaatgataatggtgtcg

SEQ ID NO: 333534 - DNA, 25 bp, Artificial
  probe
  misc_feature (1)..(25): SEQ ID NO: 2681; WAN024FXP; Start 119; Stop 143
agatccatctcagccatccaagtaa

SEQ ID NO: 333535 - DNA, 25 bp, Artificial
  probe
  misc_feature (1)..(25): SEQ ID NO: 2681; WAN024FXP; Start 118; Stop 142
aagatccatctcagccatccaagta

SEQ ID NO: 333536 - DNA, 25 bp, Artificial
  probe
  misc_feature (1)..(25): SEQ ID NO: 2681; WAN024FXP; Start 53; Stop 77
atacgagcagtattagctgtatcac

SEQ ID NO: 333537 - DNA, 25 bp, Artificial
  probe
  misc_feature (1)..(25): SEQ ID NO: 2681; WAN024FXP; Start 250; Stop 274
catatgacgatgaatgataatggtg

SEQ ID NO: 333538 - DNA, 25 bp, Artificial
  probe
  misc_feature (1)..(25): SEQ ID NO: 2681; WAN024FXP; Start 122; Stop 146
tccatctcagccatccaagtaagag

SEQ ID NO: 333539 - DNA, 25 bp, Artificial
  probe
  misc_feature (1)..(25): SEQ ID NO: 2681; WAN024FXP; Start 54; Stop 78
tacgagcagtattagctgtatcaca

SEQ ID NO: 333540 - DNA, 25 bp, Artificial
  probe
  misc_feature (1)..(25): SEQ ID NO: 2681; WAN024FXP; Start 50; Stop 74
tcgatacgagcagtattagctgtat

SEQ ID NO: 333541 - DNA, 25 bp, Artificial
  probe
  misc_feature (1)..(25): SEQ ID NO: 2681; WAN024FXP; Start 123; Stop 147
ccatctcagccatccaagtaagagt

SEQ ID NO: 333542 - DNA, 25 bp, Artificial
  probe
  misc_feature (1)..(25): SEQ ID NO: 2681; WAN024FXP; Start 96; Stop 120
cttggtaggctctatcttcaacaag

SEQ ID NO: 333543 - DNA, 25 bp, Artificial
  probe
  misc_feature (1)..(25): SEQ ID NO: 2681; WAN024FXP; Start 115; Stop 139
aacaagatccatctcagccatccaa

SEQ ID NO: 333544 - DNA, 25 bp, Artificial
  probe
  misc_feature (1)..(25): SEQ ID NO: 2681; WAN024FXP; Start 262; Stop 286
aatgataatggtgtcgtattcttta

SEQ ID NO: 333545 - DNA, 25 bp, Artificial
  probe
  misc_feature (1)..(25): SEQ ID NO: 2681; WAN024FXP; Start 261; Stop 285
gaatgataatggtgtcgtattcttt

SEQ ID NO: 333546 - DNA, 25 bp, Artificial
  probe
  misc_feature (1)..(25): SEQ ID NO: 2681; WAN024FXP; Start 264; Stop 288
tgataatggtgtcgtattctttaat

SEQ ID NO: 333547 - DNA, 25 bp, Artificial
  probe
  misc_feature (1)..(25): SEQ ID NO: 2681; WAN024FXP; Start 263; Stop 287
atgataatggtgtcgtattctttaa

SEQ ID NO: 333548 - DNA, 25 bp, Artificial
  probe
  misc_feature (1)..(25): SEQ ID NO: 2681; WAN024FXP; Start 134; Stop 158
atccaagtaagagttggttcatcaa

SEQ ID NO: 333549 - DNA, 25 bp, Artificial
  probe
  misc_feature (1)..(25): SEQ ID NO: 2681; WAN024FXP; Start 137; Stop 161
caagtaagagttggttcatcaaaac

SEQ ID NO: 333550 - DNA, 25 bp, Artificial
  probe
  misc_feature (1)..(25): SEQ ID NO: 2681; WAN024FXP; Start 117; Stop 141
caagatccatctcagccatccaagt

SEQ ID NO: 333551 - DNA, 25 bp, Artificial
  probe
  misc_feature (1)..(25): SEQ ID NO: 2681; WAN024FXP; Start 116; Stop 140
acaagatccatctcagccatccaag

SEQ ID NO: 333552 - DNA, 25 bp, Artificial
  probe
  misc_feature (1)..(25): SEQ ID NO: 2682; WAN024F49; Start 37; Stop 61
atgtccttattgccatcttcctcat

SEQ ID NO: 333553 - DNA, 25 bp, Artificial
  probe
  misc_feature (1)..(25): SEQ ID NO: 2682; WAN024F49; Start 38; Stop 62
tgtccttattgccatcttcctcatg

SEQ ID NO: 333554 - DNA, 25 bp, Artificial
  probe
  misc_feature (1)..(25): SEQ ID NO: 2682; WAN024F49; Start 254; Stop 278
tcataacttacctttctaagcgttt

SEQ ID NO: 333555 - DNA, 25 bp, Artificial
  probe
  misc_feature (1)..(25): SEQ ID NO: 2682; WAN024F49; Start 253; Stop 277
ttcataacttacctttctaagcgtt

SEQ ID NO: 333556 - DNA, 25 bp, Artificial
  probe
  misc_feature (1)..(25): SEQ ID NO: 2682; WAN024F49; Start 252; Stop 276
attcataacttacctttctaagcgt

SEQ ID NO: 333557 - DNA, 25 bp, Artificial
  probe
  misc_feature (1)..(25): SEQ ID NO: 2682; WAN024F49; Start 251; Stop 275
aattcataacttacctttctaagcg

SEQ ID NO: 333558 - DNA, 25 bp, Artificial
  probe
  misc_feature (1)..(25): SEQ ID NO: 2682; WAN024F49; Start 36; Stop 60
gatgtccttattgccatcttcctca

SEQ ID NO: 333559 - DNA, 25 bp, Artificial
  probe
  misc_feature (1)..(25): SEQ ID NO: 2682; WAN024F49; Start 31; Stop 55
ttgacgatgtccttattgccatctt

SEQ ID NO: 333560 - DNA, 25 bp, Artificial
  probe
  misc_feature (1)..(25): SEQ ID NO: 2682; WAN024F49; Start 32; Stop 56
tgacgatgtccttattgccatcttc

SEQ ID NO: 333561 - DNA, 25 bp, Artificial
  probe
  misc_feature (1)..(25): SEQ ID NO: 2682; WAN024F49; Start 30; Stop 54
cttgacgatgtccttattgccatct

SEQ ID NO: 333562 - DNA, 25 bp, Artificial
  probe
  misc_feature (1)..(25): SEQ ID NO: 2682; WAN024F49; Start 35; Stop 59
cgatgtccttattgccatcttcctc

SEQ ID NO: 333563 - DNA, 25 bp, Artificial
  probe
  misc_feature (1)..(25): SEQ ID NO: 2682; WAN024F49; Start 33; Stop 57
gacgatgtccttattgccatcttcc

SEQ ID NO: 333564 - DNA, 25 bp, Artificial
  probe
  misc_feature (1)..(25): SEQ ID NO: 2682; WAN024F49; Start 255; Stop 279
cataacttacctttctaagcgtttt

SEQ ID NO: 333565 - DNA, 25 bp, Artificial
  probe
  misc_feature (1)..(25): SEQ ID NO: 2682; WAN024F49; Start 34; Stop 58
acgatgtccttattgccatcttcct

SEQ ID NO: 333566 - DNA, 25 bp, Artificial
  probe
  misc_feature (1)..(25): SEQ ID NO: 2682; WAN024F49; Start 39; Stop 63
gtccttattgccatcttcctcatgg

SEQ ID NO: 333567 - DNA, 25 bp, Artificial
  probe
  misc_feature (1)..(25): SEQ ID NO: 2682; WAN024F49; Start 68; Stop 92
ccacgatatcaaaacggtcaatagg

SEQ ID NO: 333568 - DNA, 25 bp, Artificial
  probe
  misc_feature (1)..(25): SEQ ID NO: 2682; WAN024F49; Start 29; Stop 53
gcttgacgatgtccttattgccatc

SEQ ID NO: 333569 - DNA, 25 bp, Artificial
  probe
  misc_feature (1)..(25): SEQ ID NO: 2682; WAN024F49; Start 67; Stop 91
accacgatatcaaaacggtcaatag

SEQ ID NO: 333570 - DNA, 25 bp, Artificial
  probe
  misc_feature (1)..(25): SEQ ID NO: 2682; WAN024F49; Start 220; Stop 244
aatccccactcttttaagaaatttt

SEQ ID NO: 333571 - DNA, 25 bp, Artificial
  probe
  misc_feature (1)..(25): SEQ ID NO: 2682; WAN024F49; Start 66; Stop 90
caccacgatatcaaaacggtcaata

SEQ ID NO: 333572 - DNA, 25 bp, Artificial
  probe
  misc_feature (1)..(25): SEQ ID NO: 2682; WAN024F49; Start 318; Stop 342
gaagctgagtccctgcataccatag

SEQ ID NO: 333573 - DNA, 25 bp, Artificial
  probe
  misc_feature (1)..(25): SEQ ID NO: 2682; WAN024F49; Start 317; Stop 341
agaagctgagtccctgcataccata

SEQ ID NO: 333574 - DNA, 25 bp, Artificial
  probe
  misc_feature (1)..(25): SEQ ID NO: 2682; WAN024F49; Start 40; Stop 64
tccttattgccatcttcctcatggg

SEQ ID NO: 333575 - DNA, 25 bp, Artificial
  probe
  misc_feature (1)..(25): SEQ ID NO: 2682; WAN024F49; Start 65; Stop 89
ccaccacgatatcaaaacggtcaat

SEQ ID NO: 333576 - DNA, 25 bp, Artificial
  probe
  misc_feature (1)..(25): SEQ ID NO: 2682; WAN024F49; Start 142; Stop 166
atggaatgtccttctacgcgaacat

SEQ ID NO: 333577 - DNA, 25 bp, Artificial
  probe
  misc_feature (1)..(25): SEQ ID NO: 2682; WAN024F49; Start 297; Stop 321
tttaaagtgcaatttggcgcagaag

SEQ ID NO: 333578 - DNA, 25 bp, Artificial
  probe
  misc_feature (1)..(25): SEQ ID NO: 2682; WAN024F49; Start 296; Stop 320
ttttaaagtgcaatttggcgcagaa

SEQ ID NO: 333579 - DNA, 25 bp, Artificial
  probe
  misc_feature (1)..(25): SEQ ID NO: 2682; WAN024F49; Start 152; Stop 176
cttctacgcgaacattgctccaaaa

SEQ ID NO: 333580 - DNA, 25 bp, Artificial
  probe
  misc_feature (1)..(25): SEQ ID NO: 2682; WAN024F49; Start 144; Stop 168
ggaatgtccttctacgcgaacattg

SEQ ID NO: 333581 - DNA, 25 bp, Artificial
  probe
  misc_feature (1)..(25): SEQ ID NO: 2682; WAN024F49; Start 143; Stop 167
tggaatgtccttctacgcgaacatt

SEQ ID NO: 333582 - DNA, 25 bp, Artificial
  probe
  misc_feature (1)..(25): SEQ ID NO: 2682; WAN024F49; Start 145; Stop 169
gaatgtccttctacgcgaacattgc

SEQ ID NO: 333583 - DNA, 25 bp, Artificial
  probe
  misc_feature (1)..(25): SEQ ID NO: 2682; WAN024F49; Start 146; Stop 170
aatgtccttctacgcgaacattgct

SEQ ID NO: 333584 - DNA, 25 bp, Artificial
  probe
  misc_feature (1)..(25): SEQ ID NO: 2683; WAN024D9V; Start 145; Stop 169
gactaccgtcaggttgagtattatt

SEQ ID NO: 333585 - DNA, 25 bp, Artificial
  probe
  misc_feature (1)..(25): SEQ ID NO: 2683; WAN024D9V; Start 146; Stop 170
actaccgtcaggttgagtattatta

SEQ ID NO: 333586 - DNA, 25 bp, Artificial
  probe
  misc_feature (1)..(25): SEQ ID NO: 2683; WAN024D9V; Start 144; Stop 168
ggactaccgtcaggttgagtattat

SEQ ID NO: 333587 - DNA, 25 bp, Artificial
  probe
  misc_feature (1)..(25): SEQ ID NO: 2683; WAN024D9V; Start 82; Stop 106
atccgtaaagggcttgacattgata

SEQ ID NO: 333588 - DNA, 25 bp, Artificial
  probe
  misc_feature (1)..(25): SEQ ID NO: 2683; WAN024D9V; Start 117; Stop 141
gcacctgtcagatacttttaactca

SEQ ID NO: 333589 - DNA, 25 bp, Artificial
  probe
  misc_feature (1)..(25): SEQ ID NO: 2683; WAN024D9V; Start 81; Stop 105
gatccgtaaagggcttgacattgat

SEQ ID NO: 333590 - DNA, 25 bp, Artificial
  probe
  misc_feature (1)..(25): SEQ ID NO: 2683; WAN024D9V; Start 118; Stop 142
cacctgtcagatacttttaactcat

SEQ ID NO: 333591 - DNA, 25 bp, Artificial
  probe
  misc_feature (1)..(25): SEQ ID NO: 2683; WAN024D9V; Start 128; Stop 152
atacttttaactcatgggactaccg

SEQ ID NO: 333592 - DNA, 25 bp, Artificial
  probe
  misc_feature (1)..(25): SEQ ID NO: 2683; WAN024D9V; Start 122; Stop 146
tgtcagatacttttaactcatggga

SEQ ID NO: 333593 - DNA, 25 bp, Artificial
  probe
  misc_feature (1)..(25): SEQ ID NO: 2683; WAN024D9V; Start 121; Stop 145
ctgtcagatacttttaactcatggg

SEQ ID NO: 333594 - DNA, 25 bp, Artificial
  probe
  misc_feature (1)..(25): SEQ ID NO: 2683; WAN024D9V; Start 120; Stop 144
cctgtcagatacttttaactcatgg

SEQ ID NO: 333595 - DNA, 25 bp, Artificial
  probe
  misc_feature (1)..(25): SEQ ID NO: 2683; WAN024D9V; Start 124; Stop 148
tcagatacttttaactcatgggact

SEQ ID NO: 333596 - DNA, 25 bp, Artificial
  probe
  misc_feature (1)..(25): SEQ ID NO: 2683; WAN024D9V; Start 1; Stop 25
atggtgtctatggtcgataaggacg

SEQ ID NO: 333597 - DNA, 25 bp, Artificial
  probe
  misc_feature (1)..(25): SEQ ID NO: 2683; WAN024D9V; Start 129; Stop 153
tacttttaactcatgggactaccgt

SEQ ID NO: 333598 - DNA, 25 bp, Artificial
  probe
  misc_feature (1)..(25): SEQ ID NO: 2683; WAN024D9V; Start 143; Stop 167
gggactaccgtcaggttgagtatta

SEQ ID NO: 333599 - DNA, 25 bp, Artificial
  probe
  misc_feature (1)..(25): SEQ ID NO: 2683; WAN024D9V; Start 127; Stop 151
gatacttttaactcatgggactacc

SEQ ID NO: 333600 - DNA, 25 bp, Artificial
  probe
  misc_feature (1)..(25): SEQ ID NO: 2683; WAN024D9V; Start 119; Stop 143
acctgtcagatacttttaactcatg

SEQ ID NO: 333601 - DNA, 25 bp, Artificial
  probe
  misc_feature (1)..(25): SEQ ID NO: 2683; WAN024D9V; Start 123; Stop 147
gtcagatacttttaactcatgggac

SEQ ID NO: 333602 - DNA, 25 bp, Artificial
  probe
  misc_feature (1)..(25): SEQ ID NO: 2683; WAN024D9V; Start 115; Stop 139
atgcacctgtcagatacttttaact

SEQ ID NO: 333603 - DNA, 25 bp, Artificial
  probe
  misc_feature (1)..(25): SEQ ID NO: 2683; WAN024D9V; Start 126; Stop 150
agatacttttaactcatgggactac

SEQ ID NO: 333604 - DNA, 25 bp, Artificial
  probe
  misc_feature (1)..(25): SEQ ID NO: 2683; WAN024D9V; Start 125; Stop 149
cagatacttttaactcatgggacta

SEQ ID NO: 333605 - DNA, 25 bp, Artificial
  probe
  misc_feature (1)..(25): SEQ ID NO: 2683; WAN024D9V; Start 116; Stop 140
tgcacctgtcagatacttttaactc

SEQ ID NO: 333606 - DNA, 25 bp, Artificial
  probe
  misc_feature (1)..(25): SEQ ID NO: 2683; WAN024D9V; Start 79; Stop 103
gtgatccgtaaagggcttgacattg

SEQ ID NO: 333607 - DNA, 25 bp, Artificial
  probe
  misc_feature (1)..(25): SEQ ID NO: 2683; WAN024D9V; Start 80; Stop 104
tgatccgtaaagggcttgacattga

SEQ ID NO: 333608 - DNA, 25 bp, Artificial
  probe
  misc_feature (1)..(25): SEQ ID NO: 2683; WAN024D9V; Start 133; Stop 157
tttaactcatgggactaccgtcagg

SEQ ID NO: 333609 - DNA, 25 bp, Artificial
  probe
  misc_feature (1)..(25): SEQ ID NO: 2683; WAN024D9V; Start 28; Stop 52
aaactcatcccagaacaaggaggag

SEQ ID NO: 333610 - DNA, 25 bp, Artificial
  probe
  misc_feature (1)..(25): SEQ ID NO: 2683; WAN024D9V; Start 132; Stop 156
ttttaactcatgggactaccgtcag

SEQ ID NO: 333611 - DNA, 25 bp, Artificial
  probe
  misc_feature (1)..(25): SEQ ID NO: 2683; WAN024D9V; Start 131; Stop 155
cttttaactcatgggactaccgtca

SEQ ID NO: 333612 - DNA, 25 bp, Artificial
  probe
  misc_feature (1)..(25): SEQ ID NO: 2683; WAN024D9V; Start 130; Stop 154
acttttaactcatgggactaccgtc

SEQ ID NO: 333613 - DNA, 25 bp, Artificial
  probe
  misc_feature (1)..(25): SEQ ID NO: 2683; WAN024D9V; Start 27; Stop 51
caaactcatcccagaacaaggagga

SEQ ID NO: 333614 - DNA, 25 bp, Artificial
  probe
  misc_feature (1)..(25): SEQ ID NO: 2683; WAN024D9V; Start 78; Stop 102
tgtgatccgtaaagggcttgacatt

SEQ ID NO: 333615 - DNA, 25 bp, Artificial
  probe
  misc_feature (1)..(25): SEQ ID NO: 2683; WAN024D9V; Start 77; Stop 101
ttgtgatccgtaaagggcttgacat

SEQ ID NO: 333616 - DNA, 25 bp, Artificial
  probe
  misc_feature (1)..(25): SEQ ID NO: 2683; WAN024D9V; Start 75; Stop 99
agttgtgatccgtaaagggcttgac

SEQ ID NO: 333617 - DNA, 25 bp, Artificial
  probe
  misc_feature (1)..(25): SEQ ID NO: 2684; WAN024B82; Start 176; Stop 200
taatgagcgaccatattctcgataa

SEQ ID NO: 333618 - DNA, 25 bp, Artificial
  probe
  misc_feature (1)..(25): SEQ ID NO: 2684; WAN024B82; Start 175; Stop 199
ttaatgagcgaccatattctcgata

SEQ ID NO: 333619 - DNA, 25 bp, Artificial
  probe
  misc_feature (1)..(25): SEQ ID NO: 2684; WAN024B82; Start 113; Stop 137
tgcaaccaaagaaatcctctgatat

SEQ ID NO: 333620 - DNA, 25 bp, Artificial
  probe
  misc_feature (1)..(25): SEQ ID NO: 2684; WAN024B82; Start 114; Stop 138
gcaaccaaagaaatcctctgatatc

SEQ ID NO: 333621 - DNA, 25 bp, Artificial
  probe
  misc_feature (1)..(25): SEQ ID NO: 2684; WAN024B82; Start 112; Stop 136
ctgcaaccaaagaaatcctctgata

SEQ ID NO: 333622 - DNA, 25 bp, Artificial
  probe
  misc_feature (1)..(25): SEQ ID NO: 2684; WAN024B82; Start 115; Stop 139
caaccaaagaaatcctctgatatct

SEQ ID NO: 333623 - DNA, 25 bp, Artificial
  probe
  misc_feature (1)..(25): SEQ ID NO: 2684; WAN024B82; Start 106; Stop 130
ttagacctgcaaccaaagaaatcct

SEQ ID NO: 333624 - DNA, 25 bp, Artificial
  probe
  misc_feature (1)..(25): SEQ ID NO: 2684; WAN024B82; Start 123; Stop 147
gaaatcctctgatatcttcttccag

SEQ ID NO: 333625 - DNA, 25 bp, Artificial
  probe
  misc_feature (1)..(25): SEQ ID NO: 2684; WAN024B82; Start 177; Stop 201
aatgagcgaccatattctcgataaa

SEQ ID NO: 333626 - DNA, 25 bp, Artificial
  probe
  misc_feature (1)..(25): SEQ ID NO: 2684; WAN024B82; Start 174; Stop 198
tttaatgagcgaccatattctcgat

SEQ ID NO: 333627 - DNA, 25 bp, Artificial
  probe
  misc_feature (1)..(25): SEQ ID NO: 2684; WAN024B82; Start 107; Stop 131
tagacctgcaaccaaagaaatcctc

SEQ ID NO: 333628 - DNA, 25 bp, Artificial
  probe
  misc_feature (1)..(25): SEQ ID NO: 2684; WAN024B82; Start 128; Stop 152
cctctgatatcttcttccagatact

SEQ ID NO: 333629 - DNA, 25 bp, Artificial
  probe
  misc_feature (1)..(25): SEQ ID NO: 2684; WAN024B82; Start 127; Stop 151
tcctctgatatcttcttccagatac

SEQ ID NO: 333630 - DNA, 25 bp, Artificial
  probe
  misc_feature (1)..(25): SEQ ID NO: 2684; WAN024B82; Start 125; Stop 149
aatcctctgatatcttcttccagat

SEQ ID NO: 333631 - DNA, 25 bp, Artificial
  probe
  misc_feature (1)..(25): SEQ ID NO: 2684; WAN024B82; Start 122; Stop 146
agaaatcctctgatatcttcttcca

SEQ ID NO: 333632 - DNA, 25 bp, Artificial
  probe
  misc_feature (1)..(25): SEQ ID NO: 2684; WAN024B82; Start 111; Stop 135
cctgcaaccaaagaaatcctctgat

SEQ ID NO: 333633 - DNA, 25 bp, Artificial
  probe
  misc_feature (1)..(25): SEQ ID NO: 2684; WAN024B82; Start 117; Stop 141
accaaagaaatcctctgatatcttc

SEQ ID NO: 333634 - DNA, 25 bp, Artificial
  probe
  misc_feature (1)..(25): SEQ ID NO: 2684; WAN024B82; Start 118; Stop 142
ccaaagaaatcctctgatatcttct

SEQ ID NO: 333635 - DNA, 25 bp, Artificial
  probe
  misc_feature (1)..(25): SEQ ID NO: 2684; WAN024B82; Start 126; Stop 150
atcctctgatatcttcttccagata

SEQ ID NO: 333636 - DNA, 25 bp, Artificial
  probe
  misc_feature (1)..(25): SEQ ID NO: 2684; WAN024B82; Start 116; Stop 140
aaccaaagaaatcctctgatatctt

SEQ ID NO: 333637 - DNA, 25 bp, Artificial
  probe
  misc_feature (1)..(25): SEQ ID NO: 2684; WAN024B82; Start 129; Stop 153
ctctgatatcttcttccagatactt

SEQ ID NO: 333638 - DNA, 25 bp, Artificial
  probe
  misc_feature (1)..(25): SEQ ID NO: 2684; WAN024B82; Start 109; Stop 133
gacctgcaaccaaagaaatcctctg

SEQ ID NO: 333639 - DNA, 25 bp, Artificial
  probe
  misc_feature (1)..(25): SEQ ID NO: 2684; WAN024B82; Start 124; Stop 148
aaatcctctgatatcttcttccaga

SEQ ID NO: 333640 - DNA, 25 bp, Artificial
  probe
  misc_feature (1)..(25): SEQ ID NO: 2684; WAN024B82; Start 178; Stop 202
atgagcgaccatattctcgataaaa

SEQ ID NO: 333641 - DNA, 25 bp, Artificial
  probe
  misc_feature (1)..(25): SEQ ID NO: 2684; WAN024B82; Start 173; Stop 197
ttttaatgagcgaccatattctcga

SEQ ID NO: 333642 - DNA, 25 bp, Artificial
  probe
  misc_feature (1)..(25): SEQ ID NO: 2684; WAN024B82; Start 108; Stop 132
agacctgcaaccaaagaaatcctct

SEQ ID NO: 333643 - DNA, 25 bp, Artificial
  probe
  misc_feature (1)..(25): SEQ ID NO: 2684; WAN024B82; Start 110; Stop 134
acctgcaaccaaagaaatcctctga

SEQ ID NO: 333644 - DNA, 25 bp, Artificial
  probe
  misc_feature (1)..(25): SEQ ID NO: 2684; WAN024B82; Start 130; Stop 154
tctgatatcttcttccagatacttt

SEQ ID NO: 333645 - DNA, 25 bp, Artificial
  probe
  misc_feature (1)..(25): SEQ ID NO: 2684; WAN024B82; Start 121; Stop 145
aagaaatcctctgatatcttcttcc

SEQ ID NO: 333646 - DNA, 25 bp, Artificial
  probe
  misc_feature (1)..(25): SEQ ID NO: 2684; WAN024B82; Start 119; Stop 143
caaagaaatcctctgatatcttctt

SEQ ID NO: 333647 - DNA, 25 bp, Artificial
  probe
  misc_feature (1)..(25): SEQ ID NO: 2684; WAN024B82; Start 120; Stop 144
aaagaaatcctctgatatcttcttc

SEQ ID NO: 333648 - DNA, 25 bp, Artificial
  probe
  misc_feature (1)..(25): SEQ ID NO: 2685; WAN024D4Y; Start 169; Stop 193
tacactgaaagagggataagaaagc

SEQ ID NO: 333649 - DNA, 25 bp, Artificial
  probe
  misc_feature (1)..(25): SEQ ID NO: 2685; WAN024D4Y; Start 172; Stop 196
actgaaagagggataagaaagcaag

SEQ ID NO: 333650 - DNA, 25 bp, Artificial
  probe
  misc_feature (1)..(25): SEQ ID NO: 2685; WAN024D4Y; Start 171; Stop 195
cactgaaagagggataagaaagcaa

SEQ ID NO: 333651 - DNA, 25 bp, Artificial
  probe
  misc_feature (1)..(25): SEQ ID NO: 2685; WAN024D4Y; Start 160; Stop 184
ctgaataagtacactgaaagaggga

SEQ ID NO: 333652 - DNA, 25 bp, Artificial
  probe
  misc_feature (1)..(25): SEQ ID NO: 2685; WAN024D4Y; Start 132; Stop 156
aagacctatcacaatccttcatggt

SEQ ID NO: 333653 - DNA, 25 bp, Artificial
  probe
  misc_feature (1)..(25): SEQ ID NO: 2685; WAN024D4Y; Start 75; Stop 99
ttggataaagactagaggcggtaaa

SEQ ID NO: 333654 - DNA, 25 bp, Artificial
  probe
  misc_feature (1)..(25): SEQ ID NO: 2685; WAN024D4Y; Start 43; Stop 67
aaagagatggttaaactccttacgg

SEQ ID NO: 333655 - DNA, 25 bp, Artificial
  probe
  misc_feature (1)..(25): SEQ ID NO: 2685; WAN024D4Y; Start 167; Stop 191
agtacactgaaagagggataagaaa

SEQ ID NO: 333656 - DNA, 25 bp, Artificial
  probe
  misc_feature (1)..(25): SEQ ID NO: 2685; WAN024D4Y; Start 166; Stop 190
aagtacactgaaagagggataagaa

SEQ ID NO: 333657 - DNA, 25 bp, Artificial
  probe
  misc_feature (1)..(25): SEQ ID NO: 2685; WAN024D4Y; Start 161; Stop 185
tgaataagtacactgaaagagggat

SEQ ID NO: 333658 - DNA, 25 bp, Artificial
  probe
  misc_feature (1)..(25): SEQ ID NO: 2685; WAN024D4Y; Start 173; Stop 197
ctgaaagagggataagaaagcaagc

SEQ ID NO: 333659 - DNA, 25 bp, Artificial
  probe
  misc_feature (1)..(25): SEQ ID NO: 2685; WAN024D4Y; Start 170; Stop 194
acactgaaagagggataagaaagca

SEQ ID NO: 333660 - DNA, 25 bp, Artificial
  probe
  misc_feature (1)..(25): SEQ ID NO: 2685; WAN024D4Y; Start 168; Stop 192
gtacactgaaagagggataagaaag

SEQ ID NO: 333661 - DNA, 25 bp, Artificial
  probe
  misc_feature (1)..(25): SEQ ID NO: 2685; WAN024D4Y; Start 159; Stop 183
gctgaataagtacactgaaagaggg

SEQ ID NO: 333662 - DNA, 25 bp, Artificial
  probe
  misc_feature (1)..(25): SEQ ID NO: 2685; WAN024D4Y; Start 76; Stop 100
tggataaagactagaggcggtaaag

SEQ ID NO: 333663 - DNA, 25 bp, Artificial
  probe
  misc_feature (1)..(25): SEQ ID NO: 2685; WAN024D4Y; Start 131; Stop 155
aaagacctatcacaatccttcatgg

SEQ ID NO: 333664 - DNA, 25 bp, Artificial
  probe
  misc_feature (1)..(25): SEQ ID NO: 2685; WAN024D4Y; Start 130; Stop 154
gaaagacctatcacaatccttcatg

SEQ ID NO: 333665 - DNA, 25 bp, Artificial
  probe
  misc_feature (1)..(25): SEQ ID NO: 2685; WAN024D4Y; Start 74; Stop 98
gttggataaagactagaggcggtaa

SEQ ID NO: 333666 - DNA, 25 bp, Artificial
  probe
  misc_feature (1)..(25): SEQ ID NO: 2685; WAN024D4Y; Start 165; Stop 189
taagtacactgaaagagggataaga

SEQ ID NO: 333667 - DNA, 25 bp, Artificial
  probe
  misc_feature (1)..(25): SEQ ID NO: 2685; WAN024D4Y; Start 158; Stop 182
agctgaataagtacactgaaagagg

SEQ ID NO: 333668 - DNA, 25 bp, Artificial
  probe
  misc_feature (1)..(25): SEQ ID NO: 2685; WAN024D4Y; Start 129; Stop 153
ggaaagacctatcacaatccttcat

SEQ ID NO: 333669 - DNA, 25 bp, Artificial
  probe
  misc_feature (1)..(25): SEQ ID NO: 2685; WAN024D4Y; Start 77; Stop 101
ggataaagactagaggcggtaaagg

SEQ ID NO: 333670 - DNA, 25 bp, Artificial
  probe
  misc_feature (1)..(25): SEQ ID NO: 2685; WAN024D4Y; Start 164; Stop 188
ataagtacactgaaagagggataag

SEQ ID NO: 333671 - DNA, 25 bp, Artificial
  probe
  misc_feature (1)..(25): SEQ ID NO: 2685; WAN024D4Y; Start 162; Stop 186
gaataagtacactgaaagagggata

SEQ ID NO: 333672 - DNA, 25 bp, Artificial
  probe
  misc_feature (1)..(25): SEQ ID NO: 2685; WAN024D4Y; Start 78; Stop 102
gataaagactagaggcggtaaaggc

SEQ ID NO: 333673 - DNA, 25 bp, Artificial
  probe
  misc_feature (1)..(25): SEQ ID NO: 2685; WAN024D4Y; Start 44; Stop 68
aagagatggttaaactccttacggc

SEQ ID NO: 333674 - DNA, 25 bp, Artificial
  probe
  misc_feature (1)..(25): SEQ ID NO: 2685; WAN024D4Y; Start 183; Stop 207
gataagaaagcaagctgggttgtaa

SEQ ID NO: 333675 - DNA, 25 bp, Artificial
  probe
  misc_feature (1)..(25): SEQ ID NO: 2685; WAN024D4Y; Start 175; Stop 199
gaaagagggataagaaagcaagctg

SEQ ID NO: 333676 - DNA, 25 bp, Artificial
  probe
  misc_feature (1)..(25): SEQ ID NO: 2685; WAN024D4Y; Start 128; Stop 152
gggaaagacctatcacaatccttca

SEQ ID NO: 333677 - DNA, 25 bp, Artificial
  probe
  misc_feature (1)..(25): SEQ ID NO: 2685; WAN024D4Y; Start 188; Stop 212
gaaagcaagctgggttgtaactaat

SEQ ID NO: 333678 - DNA, 25 bp, Artificial
  probe
  misc_feature (1)..(25): SEQ ID NO: 2685; WAN024D4Y; Start 184; Stop 208
ataagaaagcaagctgggttgtaac

SEQ ID NO: 333679 - DNA, 25 bp, Artificial
  probe
  misc_feature (1)..(25): SEQ ID NO: 2685; WAN024D4Y; Start 174; Stop 198
tgaaagagggataagaaagcaagct

SEQ ID NO: 333680 - DNA, 25 bp, Artificial
  probe
  misc_feature (1)..(25): SEQ ID NO: 2685; WAN024D4Y; Start 79; Stop 103
ataaagactagaggcggtaaaggct

SEQ ID NO: 333681 - DNA, 25 bp, Artificial
  probe
  misc_feature (1)..(25): SEQ ID NO: 2686; WAN024C9W; Start 235; Stop 259
atctctgcctcatccttaatcatac

SEQ ID NO: 333682 - DNA, 25 bp, Artificial
  probe
  misc_feature (1)..(25): SEQ ID NO: 2686; WAN024C9W; Start 233; Stop 257
caatctctgcctcatccttaatcat

SEQ ID NO: 333683 - DNA, 25 bp, Artificial
  probe
  misc_feature (1)..(25): SEQ ID NO: 2686; WAN024C9W; Start 243; Stop 267
ctcatccttaatcatacgaagacct

SEQ ID NO: 333684 - DNA, 25 bp, Artificial
  probe
  misc_feature (1)..(25): SEQ ID NO: 2686; WAN024C9W; Start 234; Stop 258
aatctctgcctcatccttaatcata

SEQ ID NO: 333685 - DNA, 25 bp, Artificial
  probe
  misc_feature (1)..(25): SEQ ID NO: 2686; WAN024C9W; Start 242; Stop 266
cctcatccttaatcatacgaagacc

SEQ ID NO: 333686 - DNA, 25 bp, Artificial
  probe
  misc_feature (1)..(25): SEQ ID NO: 2686; WAN024C9W; Start 244; Stop 268
tcatccttaatcatacgaagacctt

SEQ ID NO: 333687 - DNA, 25 bp, Artificial
  probe
  misc_feature (1)..(25): SEQ ID NO: 2686; WAN024C9W; Start 238; Stop 262
tctgcctcatccttaatcatacgaa

SEQ ID NO: 333688 - DNA, 25 bp, Artificial
  probe
  misc_feature (1)..(25): SEQ ID NO: 2686; WAN024C9W; Start 241; Stop 265
gcctcatccttaatcatacgaagac

SEQ ID NO: 333689 - DNA, 25 bp, Artificial
  probe
  misc_feature (1)..(25): SEQ ID NO: 2686; WAN024C9W; Start 239; Stop 263
ctgcctcatccttaatcatacgaag

SEQ ID NO: 333690 - DNA, 25 bp, Artificial
  probe
  misc_feature (1)..(25): SEQ ID NO: 2686; WAN024C9W; Start 240; Stop 264
tgcctcatccttaatcatacgaaga

SEQ ID NO: 333691 - DNA, 25 bp, Artificial
  probe
  misc_feature (1)..(25): SEQ ID NO: 2686; WAN024C9W; Start 128; Stop 152
aatcaaggaagttggcaatctcaat

SEQ ID NO: 333692 - DNA, 25 bp, Artificial
  probe
  misc_feature (1)..(25): SEQ ID NO: 2686; WAN024C9W; Start 237; Stop 261
ctctgcctcatccttaatcatacga

SEQ ID NO: 333693 - DNA, 25 bp, Artificial
  probe
  misc_feature (1)..(25): SEQ ID NO: 2686; WAN024C9W; Start 236; Stop 260
tctctgcctcatccttaatcatacg

SEQ ID NO: 333694 - DNA, 25 bp, Artificial
  probe
  misc_feature (1)..(25): SEQ ID NO: 2686; WAN024C9W; Start 250; Stop 274
ttaatcatacgaagaccttccacaa

SEQ ID NO: 333695 - DNA, 25 bp, Artificial
  probe
  misc_feature (1)..(25): SEQ ID NO: 2686; WAN024C9W; Start 246; Stop 270
atccttaatcatacgaagaccttcc

SEQ ID NO: 333696 - DNA, 25 bp, Artificial
  probe
  misc_feature (1)..(25): SEQ ID NO: 2686; WAN024C9W; Start 129; Stop 153
atcaaggaagttggcaatctcaatt

SEQ ID NO: 333697 - DNA, 25 bp, Artificial
  probe
  misc_feature (1)..(25): SEQ ID NO: 2686; WAN024C9W; Start 249; Stop 273
cttaatcatacgaagaccttccaca

SEQ ID NO: 333698 - DNA, 25 bp, Artificial
  probe
  misc_feature (1)..(25): SEQ ID NO: 2686; WAN024C9W; Start 245; Stop 269
catccttaatcatacgaagaccttc

SEQ ID NO: 333699 - DNA, 25 bp, Artificial
  probe
  misc_feature (1)..(25): SEQ ID NO: 2686; WAN024C9W; Start 248; Stop 272
ccttaatcatacgaagaccttccac

SEQ ID NO: 333700 - DNA, 25 bp, Artificial
  probe
  misc_feature (1)..(25): SEQ ID NO: 2686; WAN024C9W; Start 247; Stop 271
tccttaatcatacgaagaccttcca

SEQ ID NO: 333701 - DNA, 25 bp, Artificial
  probe
  misc_feature (1)..(25): SEQ ID NO: 2686; WAN024C9W; Start 136; Stop 160
aagttggcaatctcaatttcagttt

SEQ ID NO: 333702 - DNA, 25 bp, Artificial
  probe
  misc_feature (1)..(25): SEQ ID NO: 2686; WAN024C9W; Start 135; Stop 159
gaagttggcaatctcaatttcagtt

SEQ ID NO: 333703 - DNA, 25 bp, Artificial
  probe
  misc_feature (1)..(25): SEQ ID NO: 2686; WAN024C9W; Start 198; Stop 222
ttggtctgagatagaacaagccttg

SEQ ID NO: 333704 - DNA, 25 bp, Artificial
  probe
  misc_feature (1)..(25): SEQ ID NO: 2686; WAN024C9W; Start 131; Stop 155
caaggaagttggcaatctcaatttc

SEQ ID NO: 333705 - DNA, 25 bp, Artificial
  probe
  misc_feature (1)..(25): SEQ ID NO: 2686; WAN024C9W; Start 127; Stop 151
aaatcaaggaagttggcaatctcaa

SEQ ID NO: 333706 - DNA, 25 bp, Artificial
  probe
  misc_feature (1)..(25): SEQ ID NO: 2686; WAN024C9W; Start 251; Stop 275
taatcatacgaagaccttccacaaa

SEQ ID NO: 333707 - DNA, 25 bp, Artificial
  probe
  misc_feature (1)..(25): SEQ ID NO: 2686; WAN024C9W; Start 132; Stop 156
aaggaagttggcaatctcaatttca

SEQ ID NO: 333708 - DNA, 25 bp, Artificial
  probe
  misc_feature (1)..(25): SEQ ID NO: 2686; WAN024C9W; Start 130; Stop 154
tcaaggaagttggcaatctcaattt

SEQ ID NO: 333709 - DNA, 25 bp, Artificial
  probe
  misc_feature (1)..(25): SEQ ID NO: 2686; WAN024C9W; Start 126; Stop 150
gaaatcaaggaagttggcaatctca

SEQ ID NO: 333710 - DNA, 25 bp, Artificial
  probe
  misc_feature (1)..(25): SEQ ID NO: 2686; WAN024C9W; Start 133; Stop 157
aggaagttggcaatctcaatttcag

SEQ ID NO: 333711 - DNA, 25 bp, Artificial
  probe
  misc_feature (1)..(25): SEQ ID NO: 2686; WAN024C9W; Start 252; Stop 276
aatcatacgaagaccttccacaaac

SEQ ID NO: 333712 - DNA, 25 bp, Artificial
  probe
  misc_feature (1)..(25): SEQ ID NO: 2686; WAN024C9W; Start 134; Stop 158
ggaagttggcaatctcaatttcagt

SEQ ID NO: 333713 - DNA, 25 bp, Artificial
  probe
  misc_feature (1)..(25): SEQ ID NO: 2686; WAN024C9W; Start 204; Stop 228
tgagatagaacaagccttgcgaatc

SEQ ID NO: 333714 - DNA, 25 bp, Artificial
  probe
  misc_feature (1)..(25): SEQ ID NO: 2687; WAN024GIY; Start 138; Stop 162
aatcgcaatgttacggatatcttct

SEQ ID NO: 333715 - DNA, 25 bp, Artificial
  probe
  misc_feature (1)..(25): SEQ ID NO: 2687; WAN024GIY; Start 137; Stop 161
taatcgcaatgttacggatatcttc

SEQ ID NO: 333716 - DNA, 25 bp, Artificial
  probe
  misc_feature (1)..(25): SEQ ID NO: 2687; WAN024GIY; Start 141; Stop 165
cgcaatgttacggatatcttctctt

SEQ ID NO: 333717 - DNA, 25 bp, Artificial
  probe
  misc_feature (1)..(25): SEQ ID NO: 2687; WAN024GIY; Start 139; Stop 163
atcgcaatgttacggatatcttctc

SEQ ID NO: 333718 - DNA, 25 bp, Artificial
  probe
  misc_feature (1)..(25): SEQ ID NO: 2687; WAN024GIY; Start 84; Stop 108
ttgtttcaataattcgtcaaccagg

SEQ ID NO: 333719 - DNA, 25 bp, Artificial
  probe
  misc_feature (1)..(25): SEQ ID NO: 2687; WAN024GIY; Start 136; Stop 160
ataatcgcaatgttacggatatctt

SEQ ID NO: 333720 - DNA, 25 bp, Artificial
  probe
  misc_feature (1)..(25): SEQ ID NO: 2687; WAN024GIY; Start 142; Stop 166
gcaatgttacggatatcttctctta

SEQ ID NO: 333721 - DNA, 25 bp, Artificial
  probe
  misc_feature (1)..(25): SEQ ID NO: 2687; WAN024GIY; Start 140; Stop 164
tcgcaatgttacggatatcttctct

SEQ ID NO: 333722 - DNA, 25 bp, Artificial
  probe
  misc_feature (1)..(25): SEQ ID NO: 2687; WAN024GIY; Start 135; Stop 159
gataatcgcaatgttacggatatct

SEQ ID NO: 333723 - DNA, 25 bp, Artificial
  probe
  misc_feature (1)..(25): SEQ ID NO: 2687; WAN024GIY; Start 85; Stop 109
tgtttcaataattcgtcaaccaggg

SEQ ID NO: 333724 - DNA, 25 bp, Artificial
  probe
  misc_feature (1)..(25): SEQ ID NO: 2687; WAN024GIY; Start 86; Stop 110
gtttcaataattcgtcaaccagggt

SEQ ID NO: 333725 - DNA, 25 bp, Artificial
  probe
  misc_feature (1)..(25): SEQ ID NO: 2687; WAN024GIY; Start 87; Stop 111
tttcaataattcgtcaaccagggtt

SEQ ID NO: 333726 - DNA, 25 bp, Artificial
  probe
  misc_feature (1)..(25): SEQ ID NO: 2687; WAN024GIY; Start 134; Stop 158
cgataatcgcaatgttacggatatc

SEQ ID NO: 333727 - DNA, 25 bp, Artificial
  probe
  misc_feature (1)..(25): SEQ ID NO: 2687; WAN024GIY; Start 70; Stop 94
tcaagcgtttctgattgtttcaata

SEQ ID NO: 333728 - DNA, 25 bp, Artificial
  probe
  misc_feature (1)..(25): SEQ ID NO: 2687; WAN024GIY; Start 71; Stop 95
caagcgtttctgattgtttcaataa

SEQ ID NO: 333729 - DNA, 25 bp, Artificial
  probe
  misc_feature (1)..(25): SEQ ID NO: 2687; WAN024GIY; Start 82; Stop 106
gattgtttcaataattcgtcaacca

SEQ ID NO: 333730 - DNA, 25 bp, Artificial
  probe
  misc_feature (1)..(25): SEQ ID NO: 2687; WAN024GIY; Start 81; Stop 105
tgattgtttcaataattcgtcaacc

SEQ ID NO: 333731 - DNA, 25 bp, Artificial
  probe
  misc_feature (1)..(25): SEQ ID NO: 2687; WAN024GIY; Start 83; Stop 107
attgtttcaataattcgtcaaccag

SEQ ID NO: 333732 - DNA, 25 bp, Artificial
  probe
  misc_feature (1)..(25): SEQ ID NO: 2687; WAN024GIY; Start 69; Stop 93
atcaagcgtttctgattgtttcaat

SEQ ID NO: 333733 - DNA, 25 bp, Artificial
  probe
  misc_feature (1)..(25): SEQ ID NO: 2687; WAN024GIY; Start 73; Stop 97
agcgtttctgattgtttcaataatt

SEQ ID NO: 333734 - DNA, 25 bp, Artificial
  probe
  misc_feature (1)..(25): SEQ ID NO: 2687; WAN024GIY; Start 72; Stop 96
aagcgtttctgattgtttcaataat

SEQ ID NO: 333735 - DNA, 25 bp, Artificial
  probe
  misc_feature (1)..(25): SEQ ID NO: 2687; WAN024GIY; Start 68; Stop 92
catcaagcgtttctgattgtttcaa

SEQ ID NO: 333736 - DNA, 25 bp, Artificial
  probe
  misc_feature (1)..(25): SEQ ID NO: 2687; WAN024GIY; Start 74; Stop 98
gcgtttctgattgtttcaataattc

SEQ ID NO: 333737 - DNA, 25 bp, Artificial
  probe
  misc_feature (1)..(25): SEQ ID NO: 2687; WAN024GIY; Start 206; Stop 230
ttctaactgaacgattataccataa

SEQ ID NO: 333738 - DNA, 25 bp, Artificial
  probe
  misc_feature (1)..(25): SEQ ID NO: 2687; WAN024GIY; Start 143; Stop 167
caatgttacggatatcttctcttaa

SEQ ID NO: 333739 - DNA, 25 bp, Artificial
  probe
  misc_feature (1)..(25): SEQ ID NO: 2687; WAN024GIY; Start 75; Stop 99
cgtttctgattgtttcaataattcg

SEQ ID NO: 333740 - DNA, 25 bp, Artificial
  probe
  misc_feature (1)..(25): SEQ ID NO: 2687; WAN024GIY; Start 80; Stop 104
ctgattgtttcaataattcgtcaac

SEQ ID NO: 333741 - DNA, 25 bp, Artificial
  probe
  misc_feature (1)..(25): SEQ ID NO: 2687; WAN024GIY; Start 79; Stop 103
tctgattgtttcaataattcgtcaa

SEQ ID NO: 333742 - DNA, 25 bp, Artificial
  probe
  misc_feature (1)..(25): SEQ ID NO: 2687; WAN024GIY; Start 78; Stop 102
ttctgattgtttcaataattcgtca

SEQ ID NO: 333743 - DNA, 25 bp, Artificial
  probe
  misc_feature (1)..(25): SEQ ID NO: 2687; WAN024GIY; Start 76; Stop 100
gtttctgattgtttcaataattcgt

SEQ ID NO: 333744 - DNA, 25 bp, Artificial
  probe
  misc_feature (1)..(25): SEQ ID NO: 2687; WAN024GIY; Start 77; Stop 101
tttctgattgtttcaataattcgtc

SEQ ID NO: 333745 - DNA, 25 bp, Artificial
  probe
  misc_feature (1)..(25): SEQ ID NO: 2687; WAN024GIY; Start 145; Stop 169
atgttacggatatcttctcttaatt

SEQ ID NO: 333746 - DNA, 25 bp, Artificial
  probe
  misc_feature (1)..(25): SEQ ID NO: 2687; WAN024GIY; Start 144; Stop 168
aatgttacggatatcttctcttaat

SEQ ID NO: 333747 - DNA, 25 bp, Artificial
  probe
  misc_feature (1)..(25): SEQ ID NO: 2688; WAN024D34; Start 143; Stop 167
ttattgaagcgactgaacctctaac

SEQ ID NO: 333748 - DNA, 25 bp, Artificial
  probe
  misc_feature (1)..(25): SEQ ID NO: 2688; WAN024D34; Start 472; Stop 496
gcagtaggaggtattacagtcaata

SEQ ID NO: 333749 - DNA, 25 bp, Artificial
  probe
  misc_feature (1)..(25): SEQ ID NO: 2688; WAN024D34; Start 142; Stop 166
gttattgaagcgactgaacctctaa

SEQ ID NO: 333750 - DNA, 25 bp, Artificial
  probe
  misc_feature (1)..(25): SEQ ID NO: 2688; WAN024D34; Start 42; Stop 66
tgtaactgtagtaggagtaggtgtt

SEQ ID NO: 333751 - DNA, 25 bp, Artificial
  probe
  misc_feature (1)..(25): SEQ ID NO: 2688; WAN024D34; Start 40; Stop 64
tctgtaactgtagtaggagtaggtg

SEQ ID NO: 333752 - DNA, 25 bp, Artificial
  probe
  misc_feature (1)..(25): SEQ ID NO: 2688; WAN024D34; Start 39; Stop 63
ttctgtaactgtagtaggagtaggt

SEQ ID NO: 333753 - DNA, 25 bp, Artificial
  probe
  misc_feature (1)..(25): SEQ ID NO: 2688; WAN024D34; Start 41; Stop 65
ctgtaactgtagtaggagtaggtgt

SEQ ID NO: 333754 - DNA, 25 bp, Artificial
  probe
  misc_feature (1)..(25): SEQ ID NO: 2688; WAN024D34; Start 425; Stop 449
atcgctatgtgatggtcaatatgag

SEQ ID NO: 333755 - DNA, 25 bp, Artificial
  probe
  misc_feature (1)..(25): SEQ ID NO: 2688; WAN024D34; Start 428; Stop 452
gctatgtgatggtcaatatgagagg

SEQ ID NO: 333756 - DNA, 25 bp, Artificial
  probe
  misc_feature (1)..(25): SEQ ID NO: 2688; WAN024D34; Start 239; Stop 263
tgatcttgatgacagtgaatcctaa

SEQ ID NO: 333757 - DNA, 25 bp, Artificial
  probe
  misc_feature (1)..(25): SEQ ID NO: 2688; WAN024D34; Start 238; Stop 262
atgatcttgatgacagtgaatccta

SEQ ID NO: 333758 - DNA, 25 bp, Artificial
  probe
  misc_feature (1)..(25): SEQ ID NO: 2688; WAN024D34; Start 427; Stop 451
cgctatgtgatggtcaatatgagag

SEQ ID NO: 333759 - DNA, 25 bp, Artificial
  probe
  misc_feature (1)..(25): SEQ ID NO: 2688; WAN024D34; Start 234; Stop 258
tagcatgatcttgatgacagtgaat

SEQ ID NO: 333760 - DNA, 25 bp, Artificial
  probe
  misc_feature (1)..(25): SEQ ID NO: 2688; WAN024D34; Start 233; Stop 257
atagcatgatcttgatgacagtgaa

SEQ ID NO: 333761 - DNA, 25 bp, Artificial
  probe
  misc_feature (1)..(25): SEQ ID NO: 2688; WAN024D34; Start 228; Stop 252
aagtgatagcatgatcttgatgaca

SEQ ID NO: 333762 - DNA, 25 bp, Artificial
  probe
  misc_feature (1)..(25): SEQ ID NO: 2688; WAN024D34; Start 426; Stop 450
tcgctatgtgatggtcaatatgaga

SEQ ID NO: 333763 - DNA, 25 bp, Artificial
  probe
  misc_feature (1)..(25): SEQ ID NO: 2688; WAN024D34; Start 227; Stop 251
gaagtgatagcatgatcttgatgac

SEQ ID NO: 333764 - DNA, 25 bp, Artificial
  probe
  misc_feature (1)..(25): SEQ ID NO: 2688; WAN024D34; Start 232; Stop 256
gatagcatgatcttgatgacagtga

SEQ ID NO: 333765 - DNA, 25 bp, Artificial
  probe
  misc_feature (1)..(25): SEQ ID NO: 2688; WAN024D34; Start 229; Stop 253
agtgatagcatgatcttgatgacag

SEQ ID NO: 333766 - DNA, 25 bp, Artificial
  probe
  misc_feature (1)..(25): SEQ ID NO: 2688; WAN024D34; Start 237; Stop 261
catgatcttgatgacagtgaatcct

SEQ ID NO: 333767 - DNA, 25 bp, Artificial
  probe
  misc_feature (1)..(25): SEQ ID NO: 2688; WAN024D34; Start 223; Stop 247
ggtagaagtgatagcatgatcttga

SEQ ID NO: 333768 - DNA, 25 bp, Artificial
  probe
  misc_feature (1)..(25): SEQ ID NO: 2688; WAN024D34; Start 231; Stop 255
tgatagcatgatcttgatgacagtg

SEQ ID NO: 333769 - DNA, 25 bp, Artificial
  probe
  misc_feature (1)..(25): SEQ ID NO: 2688; WAN024D34; Start 230; Stop 254
gtgatagcatgatcttgatgacagt

SEQ ID NO: 333770 - DNA, 25 bp, Artificial
  probe
  misc_feature (1)..(25): SEQ ID NO: 2688; WAN024D34; Start 226; Stop 250
agaagtgatagcatgatcttgatga

SEQ ID NO: 333771 - DNA, 25 bp, Artificial
  probe
  misc_feature (1)..(25): SEQ ID NO: 2688; WAN024D34; Start 424; Stop 448
gatcgctatgtgatggtcaatatga

SEQ ID NO: 333772 - DNA, 25 bp, Artificial
  probe
  misc_feature (1)..(25): SEQ ID NO: 2688; WAN024D34; Start 423; Stop 447
tgatcgctatgtgatggtcaatatg

SEQ ID NO: 333773 - DNA, 25 bp, Artificial
  probe
  misc_feature (1)..(25): SEQ ID NO: 2688; WAN024D34; Start 144; Stop 168
tattgaagcgactgaacctctaacc

SEQ ID NO: 333774 - DNA, 25 bp, Artificial
  probe
  misc_feature (1)..(25): SEQ ID NO: 2688; WAN024D34; Start 235; Stop 259
agcatgatcttgatgacagtgaatc

SEQ ID NO: 333775 - DNA, 25 bp, Artificial
  probe
  misc_feature (1)..(25): SEQ ID NO: 2688; WAN024D34; Start 222; Stop 246
cggtagaagtgatagcatgatcttg

SEQ ID NO: 333776 - DNA, 25 bp, Artificial
  probe
  misc_feature (1)..(25): SEQ ID NO: 2688; WAN024D34; Start 221; Stop 245
tcggtagaagtgatagcatgatctt

SEQ ID NO: 333777 - DNA, 25 bp, Artificial
  probe
  misc_feature (1)..(25): SEQ ID NO: 2688; WAN024D34; Start 153; Stop 177
gactgaacctctaaccattctgtta

SEQ ID NO: 333778 - DNA, 25 bp, Artificial
  probe
  misc_feature (1)..(25): SEQ ID NO: 2688; WAN024D34; Start 154; Stop 178
actgaacctctaaccattctgttaa

SEQ ID NO: 333779 - DNA, 25 bp, Artificial
  probe
  misc_feature (1)..(25): SEQ ID NO: 2688; WAN024D34; Start 406; Stop 430
atgatgaatatccatattgatcgct

SEQ ID NO: 333780 - DNA, 25 bp, Artificial
  probe
  misc_feature (1)..(25): SEQ ID NO: 2689; WAN024DTE; Start 80; Stop 104
ctgaggaaagcagtgattcttattt

SEQ ID NO: 333781 - DNA, 25 bp, Artificial
  probe
  misc_feature (1)..(25): SEQ ID NO: 2689; WAN024DTE; Start 79; Stop 103
cctgaggaaagcagtgattcttatt

SEQ ID NO: 333782 - DNA, 25 bp, Artificial
  probe
  misc_feature (1)..(25): SEQ ID NO: 2689; WAN024DTE; Start 78; Stop 102
acctgaggaaagcagtgattcttat

SEQ ID NO: 333783 - DNA, 25 bp, Artificial
  probe
  misc_feature (1)..(25): SEQ ID NO: 2689; WAN024DTE; Start 77; Stop 101
aacctgaggaaagcagtgattctta

SEQ ID NO: 333784 - DNA, 25 bp, Artificial
  probe
  misc_feature (1)..(25): SEQ ID NO: 2689; WAN024DTE; Start 81; Stop 105
tgaggaaagcagtgattcttatttt

SEQ ID NO: 333785 - DNA, 25 bp, Artificial
  probe
  misc_feature (1)..(25): SEQ ID NO: 2689; WAN024DTE; Start 88; Stop 112
agcagtgattcttattttaggagtt

SEQ ID NO: 333786 - DNA, 25 bp, Artificial
  probe
  misc_feature (1)..(25): SEQ ID NO: 2689; WAN024DTE; Start 76; Stop 100
caacctgaggaaagcagtgattctt

SEQ ID NO: 333787 - DNA, 25 bp, Artificial
  probe
  misc_feature (1)..(25): SEQ ID NO: 2689; WAN024DTE; Start 87; Stop 111
aagcagtgattcttattttaggagt

SEQ ID NO: 333788 - DNA, 25 bp, Artificial
  probe
  misc_feature (1)..(25): SEQ ID NO: 2689; WAN024DTE; Start 84; Stop 108
ggaaagcagtgattcttattttagg

SEQ ID NO: 333789 - DNA, 25 bp, Artificial
  probe
  misc_feature (1)..(25): SEQ ID NO: 2689; WAN024DTE; Start 8; Stop 32
aaataaggacaagagaaaacatgga

SEQ ID NO: 333790 - DNA, 25 bp, Artificial
  probe
  misc_feature (1)..(25): SEQ ID NO: 2689; WAN024DTE; Start 9; Stop 33
aataaggacaagagaaaacatggat

SEQ ID NO: 333791 - DNA, 25 bp, Artificial
  probe
  misc_feature (1)..(25): SEQ ID NO: 2689; WAN024DTE; Start 7; Stop 31
aaaataaggacaagagaaaacatgg

SEQ ID NO: 333792 - DNA, 25 bp, Artificial
  probe
  misc_feature (1)..(25): SEQ ID NO: 2689; WAN024DTE; Start 85; Stop 109
gaaagcagtgattcttattttagga

SEQ ID NO: 333793 - DNA, 25 bp, Artificial
  probe
  misc_feature (1)..(25): SEQ ID NO: 2689; WAN024DTE; Start 82; Stop 106
gaggaaagcagtgattcttatttta

SEQ ID NO: 333794 - DNA, 25 bp, Artificial
  probe
  misc_feature (1)..(25): SEQ ID NO: 2689; WAN024DTE; Start 86; Stop 110
aaagcagtgattcttattttaggag

SEQ ID NO: 333795 - DNA, 25 bp, Artificial
  probe
  misc_feature (1)..(25): SEQ ID NO: 2689; WAN024DTE; Start 83; Stop 107
aggaaagcagtgattcttattttag

SEQ ID NO: 333796 - DNA, 25 bp, Artificial
  probe
  misc_feature (1)..(25): SEQ ID NO: 2689; WAN024DTE; Start 11; Stop 35
taaggacaagagaaaacatggatat

SEQ ID NO: 333797 - DNA, 25 bp, Artificial
  probe
  misc_feature (1)..(25): SEQ ID NO: 2689; WAN024DTE; Start 10; Stop 34
ataaggacaagagaaaacatggata

SEQ ID NO: 333798 - DNA, 25 bp, Artificial
  probe
  misc_feature (1)..(25): SEQ ID NO: 2689; WAN024DTE; Start 89; Stop 113
gcagtgattcttattttaggagtta

SEQ ID NO: 333799 - DNA, 25 bp, Artificial
  probe
  misc_feature (1)..(25): SEQ ID NO: 2689; WAN024DTE; Start 13; Stop 37
aggacaagagaaaacatggatatct

SEQ ID NO: 333800 - DNA, 25 bp, Artificial
  probe
  misc_feature (1)..(25): SEQ ID NO: 2689; WAN024DTE; Start 12; Stop 36
aaggacaagagaaaacatggatatc

SEQ ID NO: 333801 - DNA, 25 bp, Artificial
  probe
  misc_feature (1)..(25): SEQ ID NO: 2689; WAN024DTE; Start 2; Stop 26
tggttaaaataaggacaagagaaaa

SEQ ID NO: 333802 - DNA, 25 bp, Artificial
  probe
  misc_feature (1)..(25): SEQ ID NO: 2689; WAN024DTE; Start 1; Stop 25
atggttaaaataaggacaagagaaa

SEQ ID NO: 333803 - DNA, 25 bp, Artificial
  probe
  misc_feature (1)..(25): SEQ ID NO: 2689; WAN024DTE; Start 3; Stop 27
ggttaaaataaggacaagagaaaac

SEQ ID NO: 333804 - DNA, 25 bp, Artificial
  probe
  misc_feature (1)..(25): SEQ ID NO: 2689; WAN024DTE; Start 14; Stop 38
ggacaagagaaaacatggatatcta

SEQ ID NO: 333805 - DNA, 25 bp, Artificial
  probe
  misc_feature (1)..(25): SEQ ID NO: 2689; WAN024DTE; Start 75; Stop 99
ccaacctgaggaaagcagtgattct

SEQ ID NO: 333806 - DNA, 25 bp, Artificial
  probe
  misc_feature (1)..(25): SEQ ID NO: 2689; WAN024DTE; Start 27; Stop 51
catggatatctatatccttgtgcca

SEQ ID NO: 333807 - DNA, 25 bp, Artificial
  probe
  misc_feature (1)..(25): SEQ ID NO: 2689; WAN024DTE; Start 26; Stop 50
acatggatatctatatccttgtgcc

SEQ ID NO: 333808 - DNA, 25 bp, Artificial
  probe
  misc_feature (1)..(25): SEQ ID NO: 2689; WAN024DTE; Start 28; Stop 52
atggatatctatatccttgtgccaa

SEQ ID NO: 333809 - DNA, 25 bp, Artificial
  probe
  misc_feature (1)..(25): SEQ ID NO: 2689; WAN024DTE; Start 4; Stop 28
gttaaaataaggacaagagaaaaca

SEQ ID NO: 333810 - DNA, 25 bp, Artificial
  probe
  misc_feature (1)..(25): SEQ ID NO: 2689; WAN024DTE; Start 74; Stop 98
accaacctgaggaaagcagtgattc

SEQ ID NO: 333811 - DNA, 25 bp, Artificial
  probe
  misc_feature (1)..(25): SEQ ID NO: 2689; WAN024DTE; Start 73; Stop 97
gaccaacctgaggaaagcagtgatt

SEQ ID NO: 333812 - DNA, 25 bp, Artificial
  probe
  misc_feature (1)..(25): SEQ ID NO: 2689; WAN024DTE; Start 25; Stop 49
aacatggatatctatatccttgtgc

SEQ ID NO: 333813 - DNA, 25 bp, Artificial
  probe
  misc_feature (1)..(25): SEQ ID NO: 2690; WAN024FGB; Start 386; Stop 410
atggctacttacctaatctaatcgt

SEQ ID NO: 333814 - DNA, 25 bp, Artificial
  probe
  misc_feature (1)..(25): SEQ ID NO: 2690; WAN024FGB; Start 569; Stop 593
ctaagatagatggtgcttcaagttg

SEQ ID NO: 333815 - DNA, 25 bp, Artificial
  probe
  misc_feature (1)..(25): SEQ ID NO: 2690; WAN024FGB; Start 570; Stop 594
taagatagatggtgcttcaagttgg

SEQ ID NO: 333816 - DNA, 25 bp, Artificial
  probe
  misc_feature (1)..(25): SEQ ID NO: 2690; WAN024FGB; Start 568; Stop 592
gctaagatagatggtgcttcaagtt

SEQ ID NO: 333817 - DNA, 25 bp, Artificial
  probe
  misc_feature (1)..(25): SEQ ID NO: 2690; WAN024FGB; Start 566; Stop 590
ctgctaagatagatggtgcttcaag

SEQ ID NO: 333818 - DNA, 25 bp, Artificial
  probe
  misc_feature (1)..(25): SEQ ID NO: 2690; WAN024FGB; Start 387; Stop 411
tggctacttacctaatctaatcgta

SEQ ID NO: 333819 - DNA, 25 bp, Artificial
  probe
  misc_feature (1)..(25): SEQ ID NO: 2690; WAN024FGB; Start 567; Stop 591
tgctaagatagatggtgcttcaagt

SEQ ID NO: 333820 - DNA, 25 bp, Artificial
  probe
  misc_feature (1)..(25): SEQ ID NO: 2690; WAN024FGB; Start 630; Stop 654
agtggttgtaggacttctagttgtt

SEQ ID NO: 333821 - DNA, 25 bp, Artificial
  probe
  misc_feature (1)..(25): SEQ ID NO: 2690; WAN024FGB; Start 42; Stop 66
gccagctatgattatcgtaggatta

SEQ ID NO: 333822 - DNA, 25 bp, Artificial
  probe
  misc_feature (1)..(25): SEQ ID NO: 2690; WAN024FGB; Start 683; Stop 707
ttgacattatctacctcattactgg

SEQ ID NO: 333823 - DNA, 25 bp, Artificial
  probe
  misc_feature (1)..(25): SEQ ID NO: 2690; WAN024FGB; Start 688; Stop 712
attatctacctcattactggtggtg

SEQ ID NO: 333824 - DNA, 25 bp, Artificial
  probe
  misc_feature (1)..(25): SEQ ID NO: 2690; WAN024FGB; Start 687; Stop 711
cattatctacctcattactggtggt

SEQ ID NO: 333825 - DNA, 25 bp, Artificial
  probe
  misc_feature (1)..(25): SEQ ID NO: 2690; WAN024FGB; Start 686; Stop 710
acattatctacctcattactggtgg

SEQ ID NO: 333826 - DNA, 25 bp, Artificial
  probe
  misc_feature (1)..(25): SEQ ID NO: 2690; WAN024FGB; Start 46; Stop 70
gctatgattatcgtaggattactct

SEQ ID NO: 333827 - DNA, 25 bp, Artificial
  probe
  misc_feature (1)..(25): SEQ ID NO: 2690; WAN024FGB; Start 385; Stop 409
tatggctacttacctaatctaatcg

SEQ ID NO: 333828 - DNA, 25 bp, Artificial
  probe
  misc_feature (1)..(25): SEQ ID NO: 2690; WAN024FGB; Start 844; Stop 868
tttgctatcatcagtaagtgggaaa

SEQ ID NO: 333829 - DNA, 25 bp, Artificial
  probe
  misc_feature (1)..(25): SEQ ID NO: 2690; WAN024FGB; Start 313; Stop 337
ttattgattgttccttgggcatttc

SEQ ID NO: 333830 - DNA, 25 bp, Artificial
  probe
  misc_feature (1)..(25): SEQ ID NO: 2690; WAN024FGB; Start 826; Stop 850
gcgatttgctttatctactttgcta

SEQ ID NO: 333831 - DNA, 25 bp, Artificial
  probe
  misc_feature (1)..(25): SEQ ID NO: 2690; WAN024FGB; Start 43; Stop 67
ccagctatgattatcgtaggattac

SEQ ID NO: 333832 - DNA, 25 bp, Artificial
  probe
  misc_feature (1)..(25): SEQ ID NO: 2690; WAN024FGB; Start 41; Stop 65
tgccagctatgattatcgtaggatt

SEQ ID NO: 333833 - DNA, 25 bp, Artificial
  probe
  misc_feature (1)..(25): SEQ ID NO: 2690; WAN024FGB; Start 40; Stop 64
ttgccagctatgattatcgtaggat

SEQ ID NO: 333834 - DNA, 25 bp, Artificial
  probe
  misc_feature (1)..(25): SEQ ID NO: 2690; WAN024FGB; Start 689; Stop 713
ttatctacctcattactggtggtgg

SEQ ID NO: 333835 - DNA, 25 bp, Artificial
  probe
  misc_feature (1)..(25): SEQ ID NO: 2690; WAN024FGB; Start 684; Stop 708
tgacattatctacctcattactggt

SEQ ID NO: 333836 - DNA, 25 bp, Artificial
  probe
  misc_feature (1)..(25): SEQ ID NO: 2690; WAN024FGB; Start 556; Stop 580
caatttgaggctgctaagatagatg

SEQ ID NO: 333837 - DNA, 25 bp, Artificial
  probe
  misc_feature (1)..(25): SEQ ID NO: 2690; WAN024FGB; Start 555; Stop 579
acaatttgaggctgctaagatagat

SEQ ID NO: 333838 - DNA, 25 bp, Artificial
  probe
  misc_feature (1)..(25): SEQ ID NO: 2690; WAN024FGB; Start 554; Stop 578
aacaatttgaggctgctaagataga

SEQ ID NO: 333839 - DNA, 25 bp, Artificial
  probe
  misc_feature (1)..(25): SEQ ID NO: 2690; WAN024FGB; Start 553; Stop 577
gaacaatttgaggctgctaagatag

SEQ ID NO: 333840 - DNA, 25 bp, Artificial
  probe
  misc_feature (1)..(25): SEQ ID NO: 2690; WAN024FGB; Start 552; Stop 576
agaacaatttgaggctgctaagata

SEQ ID NO: 333841 - DNA, 25 bp, Artificial
  probe
  misc_feature (1)..(25): SEQ ID NO: 2690; WAN024FGB; Start 600; Stop 624
gttcaagtttatcgtctttccacat

SEQ ID NO: 333842 - DNA, 25 bp, Artificial
  probe
  misc_feature (1)..(25): SEQ ID NO: 2690; WAN024FGB; Start 463; Stop 487
gcattcctatgtttggtgtttatca

SEQ ID NO: 333843 - DNA, 25 bp, Artificial
  probe
  misc_feature (1)..(25): SEQ ID NO: 2690; WAN024FGB; Start 595; Stop 619
caggtgttcaagtttatcgtctttc

SEQ ID NO: 333844 - DNA, 25 bp, Artificial
  probe
  misc_feature (1)..(25): SEQ ID NO: 2690; WAN024FGB; Start 462; Stop 486
ggcattcctatgtttggtgtttatc

SEQ ID NO: 333845 - DNA, 25 bp, Artificial
  probe
  misc_feature (1)..(25): SEQ ID NO: 2690; WAN024FGB; Start 557; Stop 581
aatttgaggctgctaagatagatgg

SEQ ID NO: 333846 - DNA, 25 bp, Artificial
  probe
  misc_feature (1)..(25): SEQ ID NO: 2691; WAN024CZM; Start 150; Stop 174
atatgacatcgtaatcgcttctctt

SEQ ID NO: 333847 - DNA, 25 bp, Artificial
  probe
  misc_feature (1)..(25): SEQ ID NO: 2691; WAN024CZM; Start 146; Stop 170
taggatatgacatcgtaatcgcttc

SEQ ID NO: 333848 - DNA, 25 bp, Artificial
  probe
  misc_feature (1)..(25): SEQ ID NO: 2691; WAN024CZM; Start 141; Stop 165
agcagtaggatatgacatcgtaatc

SEQ ID NO: 333849 - DNA, 25 bp, Artificial
  probe
  misc_feature (1)..(25): SEQ ID NO: 2691; WAN024CZM; Start 151; Stop 175
tatgacatcgtaatcgcttctcttc

SEQ ID NO: 333850 - DNA, 25 bp, Artificial
  probe
  misc_feature (1)..(25): SEQ ID NO: 2691; WAN024CZM; Start 149; Stop 173
gatatgacatcgtaatcgcttctct

SEQ ID NO: 333851 - DNA, 25 bp, Artificial
  probe
  misc_feature (1)..(25): SEQ ID NO: 2691; WAN024CZM; Start 145; Stop 169
gtaggatatgacatcgtaatcgctt

SEQ ID NO: 333852 - DNA, 25 bp, Artificial
  probe
  misc_feature (1)..(25): SEQ ID NO: 2691; WAN024CZM; Start 144; Stop 168
agtaggatatgacatcgtaatcgct

SEQ ID NO: 333853 - DNA, 25 bp, Artificial
  probe
  misc_feature (1)..(25): SEQ ID NO: 2691; WAN024CZM; Start 143; Stop 167
cagtaggatatgacatcgtaatcgc

SEQ ID NO: 333854 - DNA, 25 bp, Artificial
  probe
  misc_feature (1)..(25): SEQ ID NO: 2691; WAN024CZM; Start 142; Stop 166
gcagtaggatatgacatcgtaatcg

SEQ ID NO: 333855 - DNA, 25 bp, Artificial
  probe
  misc_feature (1)..(25): SEQ ID NO: 2691; WAN024CZM; Start 139; Stop 163
ttagcagtaggatatgacatcgtaa

SEQ ID NO: 333856 - DNA, 25 bp, Artificial
  probe
  misc_feature (1)..(25): SEQ ID NO: 2691; WAN024CZM; Start 154; Stop 178
gacatcgtaatcgcttctcttcatt

SEQ ID NO: 333857 - DNA, 25 bp, Artificial
  probe
  misc_feature (1)..(25): SEQ ID NO: 2691; WAN024CZM; Start 148; Stop 172
ggatatgacatcgtaatcgcttctc

SEQ ID NO: 333858 - DNA, 25 bp, Artificial
  probe
  misc_feature (1)..(25): SEQ ID NO: 2691; WAN024CZM; Start 140; Stop 164
tagcagtaggatatgacatcgtaat

SEQ ID NO: 333859 - DNA, 25 bp, Artificial
  probe
  misc_feature (1)..(25): SEQ ID NO: 2691; WAN024CZM; Start 262; Stop 286
ctcagtcaagcactacagtaactaa

SEQ ID NO: 333860 - DNA, 25 bp, Artificial
  probe
  misc_feature (1)..(25): SEQ ID NO: 2691; WAN024CZM; Start 263; Stop 287
tcagtcaagcactacagtaactaat

SEQ ID NO: 333861 - DNA, 25 bp, Artificial
  probe
  misc_feature (1)..(25): SEQ ID NO: 2691; WAN024CZM; Start 147; Stop 171
aggatatgacatcgtaatcgcttct

SEQ ID NO: 333862 - DNA, 25 bp, Artificial
  probe
  misc_feature (1)..(25): SEQ ID NO: 2691; WAN024CZM; Start 43; Stop 67
tcaatggttatcaagatgaaggttg

SEQ ID NO: 333863 - DNA, 25 bp, Artificial
  probe
  misc_feature (1)..(25): SEQ ID NO: 2691; WAN024CZM; Start 261; Stop 285
actcagtcaagcactacagtaacta

SEQ ID NO: 333864 - DNA, 25 bp, Artificial
  probe
  misc_feature (1)..(25): SEQ ID NO: 2691; WAN024CZM; Start 260; Stop 284
aactcagtcaagcactacagtaact

SEQ ID NO: 333865 - DNA, 25 bp, Artificial
  probe
  misc_feature (1)..(25): SEQ ID NO: 2691; WAN024CZM; Start 42; Stop 66
atcaatggttatcaagatgaaggtt

SEQ ID NO: 333866 - DNA, 25 bp, Artificial
  probe
  misc_feature (1)..(25): SEQ ID NO: 2691; WAN024CZM; Start 153; Stop 177
tgacatcgtaatcgcttctcttcat

SEQ ID NO: 333867 - DNA, 25 bp, Artificial
  probe
  misc_feature (1)..(25): SEQ ID NO: 2691; WAN024CZM; Start 152; Stop 176
atgacatcgtaatcgcttctcttca

SEQ ID NO: 333868 - DNA, 25 bp, Artificial
  probe
  misc_feature (1)..(25): SEQ ID NO: 2691; WAN024CZM; Start 156; Stop 180
catcgtaatcgcttctcttcatttg

SEQ ID NO: 333869 - DNA, 25 bp, Artificial
  probe
  misc_feature (1)..(25): SEQ ID NO: 2691; WAN024CZM; Start 137; Stop 161
gtttagcagtaggatatgacatcgt

SEQ ID NO: 333870 - DNA, 25 bp, Artificial
  probe
  misc_feature (1)..(25): SEQ ID NO: 2691; WAN024CZM; Start 135; Stop 159
aggtttagcagtaggatatgacatc

SEQ ID NO: 333871 - DNA, 25 bp, Artificial
  probe
  misc_feature (1)..(25): SEQ ID NO: 2691; WAN024CZM; Start 133; Stop 157
aaaggtttagcagtaggatatgaca

SEQ ID NO: 333872 - DNA, 25 bp, Artificial
  probe
  misc_feature (1)..(25): SEQ ID NO: 2691; WAN024CZM; Start 35; Stop 59
tgggttcatcaatggttatcaagat

SEQ ID NO: 333873 - DNA, 25 bp, Artificial
  probe
  misc_feature (1)..(25): SEQ ID NO: 2691; WAN024CZM; Start 134; Stop 158
aaggtttagcagtaggatatgacat

SEQ ID NO: 333874 - DNA, 25 bp, Artificial
  probe
  misc_feature (1)..(25): SEQ ID NO: 2691; WAN024CZM; Start 155; Stop 179
acatcgtaatcgcttctcttcattt

SEQ ID NO: 333875 - DNA, 25 bp, Artificial
  probe
  misc_feature (1)..(25): SEQ ID NO: 2691; WAN024CZM; Start 157; Stop 181
atcgtaatcgcttctcttcatttga

SEQ ID NO: 333876 - DNA, 25 bp, Artificial
  probe
  misc_feature (1)..(25): SEQ ID NO: 2691; WAN024CZM; Start 34; Stop 58
atgggttcatcaatggttatcaaga

SEQ ID NO: 333877 - DNA, 25 bp, Artificial
  probe
  misc_feature (1)..(25): SEQ ID NO: 2691; WAN024CZM; Start 33; Stop 57
aatgggttcatcaatggttatcaag

SEQ ID NO: 333878 - DNA, 25 bp, Artificial
  probe
  misc_feature (1)..(25): SEQ ID NO: 2691; WAN024CZM; Start 32; Stop 56
gaatgggttcatcaatggttatcaa

SEQ ID NO: 333879 - DNA, 25 bp, Artificial
  probe
  misc_feature (1)..(25): SEQ ID NO: 2692; WAN024EXQ; Start 140; Stop 164
aagtagcaagttccttagatgagtt

SEQ ID NO: 333880 - DNA, 25 bp, Artificial
  probe
  misc_feature (1)..(25): SEQ ID NO: 2692; WAN024EXQ; Start 141; Stop 165
agtagcaagttccttagatgagttg

SEQ ID NO: 333881 - DNA, 25 bp, Artificial
  probe
  misc_feature (1)..(25): SEQ ID NO: 2692; WAN024EXQ; Start 832; Stop 856
gatgatgatcggactcgtatctatc

SEQ ID NO: 333882 - DNA, 25 bp, Artificial
  probe
  misc_feature (1)..(25): SEQ ID NO: 2692; WAN024EXQ; Start 817; Stop 841
gaatcgcaagaagaagatgatgatc

SEQ ID NO: 333883 - DNA, 25 bp, Artificial
  probe
  misc_feature (1)..(25): SEQ ID NO: 2692; WAN024EXQ; Start 142; Stop 166
gtagcaagttccttagatgagttgg

SEQ ID NO: 333884 - DNA, 25 bp, Artificial
  probe
  misc_feature (1)..(25): SEQ ID NO: 2692; WAN024EXQ; Start 712; Stop 736
cattatgtcttaatccaaggaagca

SEQ ID NO: 333885 - DNA, 25 bp, Artificial
  probe
  misc_feature (1)..(25): SEQ ID NO: 2692; WAN024EXQ; Start 857; Stop 881
atagtacagagatggatggagcaat

SEQ ID NO: 333886 - DNA, 25 bp, Artificial
  probe
  misc_feature (1)..(25): SEQ ID NO: 2692; WAN024EXQ; Start 858; Stop 882
tagtacagagatggatggagcaatt

SEQ ID NO: 333887 - DNA, 25 bp, Artificial
  probe
  misc_feature (1)..(25): SEQ ID NO: 2692; WAN024EXQ; Start 911; Stop 935
cattatggctatcatctgtcattga

SEQ ID NO: 333888 - DNA, 25 bp, Artificial
  probe
  misc_feature (1)..(25): SEQ ID NO: 2692; WAN024EXQ; Start 143; Stop 167
tagcaagttccttagatgagttggt

SEQ ID NO: 333889 - DNA, 25 bp, Artificial
  probe
  misc_feature (1)..(25): SEQ ID NO: 2692; WAN024EXQ; Start 823; Stop 847
caagaagaagatgatgatcggactc

SEQ ID NO: 333890 - DNA, 25 bp, Artificial
  probe
  misc_feature (1)..(25): SEQ ID NO: 2692; WAN024EXQ; Start 827; Stop 851
aagaagatgatgatcggactcgtat

SEQ ID NO: 333891 - DNA, 25 bp, Artificial
  probe
  misc_feature (1)..(25): SEQ ID NO: 2692; WAN024EXQ; Start 840; Stop 864
tcggactcgtatctatcatagtaca

SEQ ID NO: 333892 - DNA, 25 bp, Artificial
  probe
  misc_feature (1)..(25): SEQ ID NO: 2692; WAN024EXQ; Start 713; Stop 737
attatgtcttaatccaaggaagcaa

SEQ ID NO: 333893 - DNA, 25 bp, Artificial
  probe
  misc_feature (1)..(25): SEQ ID NO: 2692; WAN024EXQ; Start 841; Stop 865
cggactcgtatctatcatagtacag

SEQ ID NO: 333894 - DNA, 25 bp, Artificial
  probe
  misc_feature (1)..(25): SEQ ID NO: 2692; WAN024EXQ; Start 854; Stop 878
atcatagtacagagatggatggagc

SEQ ID NO: 333895 - DNA, 25 bp, Artificial
  probe
  misc_feature (1)..(25): SEQ ID NO: 2692; WAN024EXQ; Start 816; Stop 840
cgaatcgcaagaagaagatgatgat

SEQ ID NO: 333896 - DNA, 25 bp, Artificial
  probe
  misc_feature (1)..(25): SEQ ID NO: 2692; WAN024EXQ; Start 397; Stop 421
attaatcaaggagttatcggagacg

SEQ ID NO: 333897 - DNA, 25 bp, Artificial
  probe
  misc_feature (1)..(25): SEQ ID NO: 2692; WAN024EXQ; Start 828; Stop 852
agaagatgatgatcggactcgtatc

SEQ ID NO: 333898 - DNA, 25 bp, Artificial
  probe
  misc_feature (1)..(25): SEQ ID NO: 2692; WAN024EXQ; Start 818; Stop 842
aatcgcaagaagaagatgatgatcg

SEQ ID NO: 333899 - DNA, 25 bp, Artificial
  probe
  misc_feature (1)..(25): SEQ ID NO: 2692; WAN024EXQ; Start 853; Stop 877
tatcatagtacagagatggatggag

SEQ ID NO: 333900 - DNA, 25 bp, Artificial
  probe
  misc_feature (1)..(25): SEQ ID NO: 2692; WAN024EXQ; Start 852; Stop 876
ctatcatagtacagagatggatgga

SEQ ID NO: 333901 - DNA, 25 bp, Artificial
  probe
  misc_feature (1)..(25): SEQ ID NO: 2692; WAN024EXQ; Start 396; Stop 420
cattaatcaaggagttatcggagac

SEQ ID NO: 333902 - DNA, 25 bp, Artificial
  probe
  misc_feature (1)..(25): SEQ ID NO: 2692; WAN024EXQ; Start 395; Stop 419
tcattaatcaaggagttatcggaga

SEQ ID NO: 333903 - DNA, 25 bp, Artificial
  probe
  misc_feature (1)..(25): SEQ ID NO: 2692; WAN024EXQ; Start 856; Stop 880
catagtacagagatggatggagcaa

SEQ ID NO: 333904 - DNA, 25 bp, Artificial
  probe
  misc_feature (1)..(25): SEQ ID NO: 2692; WAN024EXQ; Start 851; Stop 875
tctatcatagtacagagatggatgg

SEQ ID NO: 333905 - DNA, 25 bp, Artificial
  probe
  misc_feature (1)..(25): SEQ ID NO: 2692; WAN024EXQ; Start 839; Stop 863
atcggactcgtatctatcatagtac

SEQ ID NO: 333906 - DNA, 25 bp, Artificial
  probe
  misc_feature (1)..(25): SEQ ID NO: 2692; WAN024EXQ; Start 826; Stop 850
gaagaagatgatgatcggactcgta

SEQ ID NO: 333907 - DNA, 25 bp, Artificial
  probe
  misc_feature (1)..(25): SEQ ID NO: 2692; WAN024EXQ; Start 711; Stop 735
acattatgtcttaatccaaggaagc

SEQ ID NO: 333908 - DNA, 25 bp, Artificial
  probe
  misc_feature (1)..(25): SEQ ID NO: 2692; WAN024EXQ; Start 144; Stop 168
agcaagttccttagatgagttggtt

SEQ ID NO: 333909 - DNA, 25 bp, Artificial
  probe
  misc_feature (1)..(25): SEQ ID NO: 2692; WAN024EXQ; Start 86; Stop 110
ctcttctctatgatccagataatgc

SEQ ID NO: 333910 - DNA, 25 bp, Artificial
  probe
  misc_feature (1)..(25): SEQ ID NO: 2692; WAN024EXQ; Start 510; Stop 534
cttgtatcaccacatccatgaattg

SEQ ID NO: 333911 - DNA, 25 bp, Artificial
  probe
  misc_feature (1)..(25): SEQ ID NO: 2692; WAN024EXQ; Start 509; Stop 533
acttgtatcaccacatccatgaatt

SEQ ID NO: 333912 - DNA, 25 bp, Artificial
  probe
  misc_feature (1)..(25): SEQ ID NO: 2693; WAN024CVW; Start 142; Stop 166
tacgctatggttaaggaagtatctg

SEQ ID NO: 333913 - DNA, 25 bp, Artificial
  probe
  misc_feature (1)..(25): SEQ ID NO: 2693; WAN024CVW; Start 147; Stop 171
tatggttaaggaagtatctggtgac

SEQ ID NO: 333914 - DNA, 25 bp, Artificial
  probe
  misc_feature (1)..(25): SEQ ID NO: 2693; WAN024CVW; Start 137; Stop 161
ctatctacgctatggttaaggaagt

SEQ ID NO: 333915 - DNA, 25 bp, Artificial
  probe
  misc_feature (1)..(25): SEQ ID NO: 2693; WAN024CVW; Start 141; Stop 165
ctacgctatggttaaggaagtatct

SEQ ID NO: 333916 - DNA, 25 bp, Artificial
  probe
  misc_feature (1)..(25): SEQ ID NO: 2693; WAN024CVW; Start 140; Stop 164
tctacgctatggttaaggaagtatc

SEQ ID NO: 333917 - DNA, 25 bp, Artificial
  probe
  misc_feature (1)..(25): SEQ ID NO: 2693; WAN024CVW; Start 146; Stop 170
ctatggttaaggaagtatctggtga

SEQ ID NO: 333918 - DNA, 25 bp, Artificial
  probe
  misc_feature (1)..(25): SEQ ID NO: 2693; WAN024CVW; Start 145; Stop 169
gctatggttaaggaagtatctggtg

SEQ ID NO: 333919 - DNA, 25 bp, Artificial
  probe
  misc_feature (1)..(25): SEQ ID NO: 2693; WAN024CVW; Start 160; Stop 184
gtatctggtgacttgaatgatgttc

SEQ ID NO: 333920 - DNA, 25 bp, Artificial
  probe
  misc_feature (1)..(25): SEQ ID NO: 2693; WAN024CVW; Start 168; Stop 192
tgacttgaatgatgttcggatgatt

SEQ ID NO: 333921 - DNA, 25 bp, Artificial
  probe
  misc_feature (1)..(25): SEQ ID NO: 2693; WAN024CVW; Start 161; Stop 185
tatctggtgacttgaatgatgttcg

SEQ ID NO: 333922 - DNA, 25 bp, Artificial
  probe
  misc_feature (1)..(25): SEQ ID NO: 2693; WAN024CVW; Start 139; Stop 163
atctacgctatggttaaggaagtat

SEQ ID NO: 333923 - DNA, 25 bp, Artificial
  probe
  misc_feature (1)..(25): SEQ ID NO: 2693; WAN024CVW; Start 159; Stop 183
agtatctggtgacttgaatgatgtt

SEQ ID NO: 333924 - DNA, 25 bp, Artificial
  probe
  misc_feature (1)..(25): SEQ ID NO: 2693; WAN024CVW; Start 179; Stop 203
atgttcggatgattcagtcaagtag

SEQ ID NO: 333925 - DNA, 25 bp, Artificial
  probe
  misc_feature (1)..(25): SEQ ID NO: 2693; WAN024CVW; Start 178; Stop 202
gatgttcggatgattcagtcaagta

SEQ ID NO: 333926 - DNA, 25 bp, Artificial
  probe
  misc_feature (1)..(25): SEQ ID NO: 2693; WAN024CVW; Start 167; Stop 191
gtgacttgaatgatgttcggatgat

SEQ ID NO: 333927 - DNA, 25 bp, Artificial
  probe
  misc_feature (1)..(25): SEQ ID NO: 2693; WAN024CVW; Start 175; Stop 199
aatgatgttcggatgattcagtcaa

SEQ ID NO: 333928 - DNA, 25 bp, Artificial
  probe
  misc_feature (1)..(25): SEQ ID NO: 2693; WAN024CVW; Start 148; Stop 172
atggttaaggaagtatctggtgact

SEQ ID NO: 333929 - DNA, 25 bp, Artificial
  probe
  misc_feature (1)..(25): SEQ ID NO: 2693; WAN024CVW; Start 138; Stop 162
tatctacgctatggttaaggaagta

SEQ ID NO: 333930 - DNA, 25 bp, Artificial
  probe
  misc_feature (1)..(25): SEQ ID NO: 2693; WAN024CVW; Start 176; Stop 200
atgatgttcggatgattcagtcaag

SEQ ID NO: 333931 - DNA, 25 bp, Artificial
  probe
  misc_feature (1)..(25): SEQ ID NO: 2693; WAN024CVW; Start 144; Stop 168
cgctatggttaaggaagtatctggt

SEQ ID NO: 333932 - DNA, 25 bp, Artificial
  probe
  misc_feature (1)..(25): SEQ ID NO: 2693; WAN024CVW; Start 143; Stop 167
acgctatggttaaggaagtatctgg

SEQ ID NO: 333933 - DNA, 25 bp, Artificial
  probe
  misc_feature (1)..(25): SEQ ID NO: 2693; WAN024CVW; Start 181; Stop 205
gttcggatgattcagtcaagtagtg

SEQ ID NO: 333934 - DNA, 25 bp, Artificial
  probe
  misc_feature (1)..(25): SEQ ID NO: 2693; WAN024CVW; Start 136; Stop 160
cctatctacgctatggttaaggaag

SEQ ID NO: 333935 - DNA, 25 bp, Artificial
  probe
  misc_feature (1)..(25): SEQ ID NO: 2693; WAN024CVW; Start 180; Stop 204
tgttcggatgattcagtcaagtagt

SEQ ID NO: 333936 - DNA, 25 bp, Artificial
  probe
  misc_feature (1)..(25): SEQ ID NO: 2693; WAN024CVW; Start 691; Stop 715
atctctcctgaacaagaaccaagtc

SEQ ID NO: 333937 - DNA, 25 bp, Artificial
  probe
  misc_feature (1)..(25): SEQ ID NO: 2693; WAN024CVW; Start 133; Stop 157
tatcctatctacgctatggttaagg

SEQ ID NO: 333938 - DNA, 25 bp, Artificial
  probe
  misc_feature (1)..(25): SEQ ID NO: 2693; WAN024CVW; Start 169; Stop 193
gacttgaatgatgttcggatgattc

SEQ ID NO: 333939 - DNA, 25 bp, Artificial
  probe
  misc_feature (1)..(25): SEQ ID NO: 2693; WAN024CVW; Start 177; Stop 201
tgatgttcggatgattcagtcaagt

SEQ ID NO: 333940 - DNA, 25 bp, Artificial
  probe
  misc_feature (1)..(25): SEQ ID NO: 2693; WAN024CVW; Start 182; Stop 206
ttcggatgattcagtcaagtagtgg

SEQ ID NO: 333941 - DNA, 25 bp, Artificial
  probe
  misc_feature (1)..(25): SEQ ID NO: 2693; WAN024CVW; Start 132; Stop 156
ttatcctatctacgctatggttaag

SEQ ID NO: 333942 - DNA, 25 bp, Artificial
  probe
  misc_feature (1)..(25): SEQ ID NO: 2693; WAN024CVW; Start 174; Stop 198
gaatgatgttcggatgattcagtca

SEQ ID NO: 333943 - DNA, 25 bp, Artificial
  probe
  misc_feature (1)..(25): SEQ ID NO: 2693; WAN024CVW; Start 325; Stop 349
aaatccaaagtgaaggtcttagagg

SEQ ID NO: 333944 - DNA, 25 bp, Artificial
  probe
  misc_feature (1)..(25): SEQ ID NO: 2693; WAN024CVW; Start 501; Stop 525
agaggtggatagtgagcataaagag

SEQ ID NO: 333945 - DNA, 25 bp, Artificial
  probe
  misc_feature (1)..(25): SEQ ID NO: 2694; WAN024C85; Start 1080; Stop 1104
gattagaatggatatggcttggctt

SEQ ID NO: 333946 - DNA, 25 bp, Artificial
  probe
  misc_feature (1)..(25): SEQ ID NO: 2694; WAN024C85; Start 1078; Stop 1102
atgattagaatggatatggcttggc

SEQ ID NO: 333947 - DNA, 25 bp, Artificial
  probe
  misc_feature (1)..(25): SEQ ID NO: 2694; WAN024C85; Start 1081; Stop 1105
attagaatggatatggcttggcttc

SEQ ID NO: 333948 - DNA, 25 bp, Artificial
  probe
  misc_feature (1)..(25): SEQ ID NO: 2694; WAN024C85; Start 1702; Stop 1726
actatacctggtaatactcctgtga

SEQ ID NO: 333949 - DNA, 25 bp, Artificial
  probe
  misc_feature (1)..(25): SEQ ID NO: 2694; WAN024C85; Start 1079; Stop 1103
tgattagaatggatatggcttggct

SEQ ID NO: 333950 - DNA, 25 bp, Artificial
  probe
  misc_feature (1)..(25): SEQ ID NO: 2694; WAN024C85; Start 1077; Stop 1101
tatgattagaatggatatggcttgg

SEQ ID NO: 333951 - DNA, 25 bp, Artificial
  probe
  misc_feature (1)..(25): SEQ ID NO: 2694; WAN024C85; Start 1494; Stop 1518
tagaatgaatcttgctgtacttcct

SEQ ID NO: 333952 - DNA, 25 bp, Artificial
  probe
  misc_feature (1)..(25): SEQ ID NO: 2694; WAN024C85; Start 1495; Stop 1519
agaatgaatcttgctgtacttcctc

SEQ ID NO: 333953 - DNA, 25 bp, Artificial
  probe
  misc_feature (1)..(25): SEQ ID NO: 2694; WAN024C85; Start 1493; Stop 1517
ctagaatgaatcttgctgtacttcc

SEQ ID NO: 333954 - DNA, 25 bp, Artificial
  probe
  misc_feature (1)..(25): SEQ ID NO: 2694; WAN024C85; Start 461; Stop 485
ttgagattgtacttgagttggttcg

SEQ ID NO: 333955 - DNA, 25 bp, Artificial
  probe
  misc_feature (1)..(25): SEQ ID NO: 2694; WAN024C85; Start 1496; Stop 1520
gaatgaatcttgctgtacttcctca

SEQ ID NO: 333956 - DNA, 25 bp, Artificial
  probe
  misc_feature (1)..(25): SEQ ID NO: 2694; WAN024C85; Start 1705; Stop 1729
atacctggtaatactcctgtgatag

SEQ ID NO: 333957 - DNA, 25 bp, Artificial
  probe
  misc_feature (1)..(25): SEQ ID NO: 2694; WAN024C85; Start 1703; Stop 1727
ctatacctggtaatactcctgtgat

SEQ ID NO: 333958 - DNA, 25 bp, Artificial
  probe
  misc_feature (1)..(25): SEQ ID NO: 2694; WAN024C85; Start 1429; Stop 1453
ttaagttcttcagtgagagcagcat

SEQ ID NO: 333959 - DNA, 25 bp, Artificial
  probe
  misc_feature (1)..(25): SEQ ID NO: 2694; WAN024C85; Start 1497; Stop 1521
aatgaatcttgctgtacttcctcag

SEQ ID NO: 333960 - DNA, 25 bp, Artificial
  probe
  misc_feature (1)..(25): SEQ ID NO: 2694; WAN024C85; Start 1706; Stop 1730
tacctggtaatactcctgtgatagg

SEQ ID NO: 333961 - DNA, 25 bp, Artificial
  probe
  misc_feature (1)..(25): SEQ ID NO: 2694; WAN024C85; Start 1701; Stop 1725
cactatacctggtaatactcctgtg

SEQ ID NO: 333962 - DNA, 25 bp, Artificial
  probe
  misc_feature (1)..(25): SEQ ID NO: 2694; WAN024C85; Start 680; Stop 704
tgatgcacacgctattagacttatt

SEQ ID NO: 333963 - DNA, 25 bp, Artificial
  probe
  misc_feature (1)..(25): SEQ ID NO: 2694; WAN024C85; Start 679; Stop 703
ttgatgcacacgctattagacttat

SEQ ID NO: 333964 - DNA, 25 bp, Artificial
  probe
  misc_feature (1)..(25): SEQ ID NO: 2694; WAN024C85; Start 1709; Stop 1733
ctggtaatactcctgtgataggtgg

SEQ ID NO: 333965 - DNA, 25 bp, Artificial
  probe
  misc_feature (1)..(25): SEQ ID NO: 2694; WAN024C85; Start 1708; Stop 1732
cctggtaatactcctgtgataggtg

SEQ ID NO: 333966 - DNA, 25 bp, Artificial
  probe
  misc_feature (1)..(25): SEQ ID NO: 2694; WAN024C85; Start 684; Stop 708
gcacacgctattagacttatttgat

SEQ ID NO: 333967 - DNA, 25 bp, Artificial
  probe
  misc_feature (1)..(25): SEQ ID NO: 2694; WAN024C85; Start 1074; Stop 1098
tgatatgattagaatggatatggct

SEQ ID NO: 333968 - DNA, 25 bp, Artificial
  probe
  misc_feature (1)..(25): SEQ ID NO: 2694; WAN024C85; Start 1985; Stop 2009
tagggcaagagttaatagaaagtgt

SEQ ID NO: 333969 - DNA, 25 bp, Artificial
  probe
  misc_feature (1)..(25): SEQ ID NO: 2694; WAN024C85; Start 1977; Stop 2001
gcagatgttagggcaagagttaata

SEQ ID NO: 333970 - DNA, 25 bp, Artificial
  probe
  misc_feature (1)..(25): SEQ ID NO: 2694; WAN024C85; Start 1712; Stop 1736
gtaatactcctgtgataggtggtgg

SEQ ID NO: 333971 - DNA, 25 bp, Artificial
  probe
  misc_feature (1)..(25): SEQ ID NO: 2694; WAN024C85; Start 1711; Stop 1735
ggtaatactcctgtgataggtggtg

SEQ ID NO: 333972 - DNA, 25 bp, Artificial
  probe
  misc_feature (1)..(25): SEQ ID NO: 2694; WAN024C85; Start 1988; Stop 2012
ggcaagagttaatagaaagtgtgaa

SEQ ID NO: 333973 - DNA, 25 bp, Artificial
  probe
  misc_feature (1)..(25): SEQ ID NO: 2694; WAN024C85; Start 1987; Stop 2011
gggcaagagttaatagaaagtgtga

SEQ ID NO: 333974 - DNA, 25 bp, Artificial
  probe
  misc_feature (1)..(25): SEQ ID NO: 2694; WAN024C85; Start 1986; Stop 2010
agggcaagagttaatagaaagtgtg

SEQ ID NO: 333975 - DNA, 25 bp, Artificial
  probe
  misc_feature (1)..(25): SEQ ID NO: 2694; WAN024C85; Start 463; Stop 487
gagattgtacttgagttggttcgga

SEQ ID NO: 333976 - DNA, 25 bp, Artificial
  probe
  misc_feature (1)..(25): SEQ ID NO: 2694; WAN024C85; Start 1700; Stop 1724
ccactatacctggtaatactcctgt

SEQ ID NO: 333977 - DNA, 25 bp, Artificial
  probe
  misc_feature (1)..(25): SEQ ID NO: 2694; WAN024C85; Start 925; Stop 949
ttacttactgtccattcaccaatga

SEQ ID NO: 333978 - DNA, 25 bp, Artificial
  probe
  misc_feature (1)..(25): SEQ ID NO: 2695; WAN024DLV; Start 47; Stop 71
ctgatggatatggagacattaagga

SEQ ID NO: 333979 - DNA, 25 bp, Artificial
  probe
  misc_feature (1)..(25): SEQ ID NO: 2695; WAN024DLV; Start 48; Stop 72
tgatggatatggagacattaaggat

SEQ ID NO: 333980 - DNA, 25 bp, Artificial
  probe
  misc_feature (1)..(25): SEQ ID NO: 2695; WAN024DLV; Start 109; Stop 133
aatggacattgtggaggtatagatc

SEQ ID NO: 333981 - DNA, 25 bp, Artificial
  probe
  misc_feature (1)..(25): SEQ ID NO: 2695; WAN024DLV; Start 101; Stop 125
ggtataataatggacattgtggagg

SEQ ID NO: 333982 - DNA, 25 bp, Artificial
  probe
  misc_feature (1)..(25): SEQ ID NO: 2695; WAN024DLV; Start 331; Stop 355
cttatacactgtcatggctactcaa

SEQ ID NO: 333983 - DNA, 25 bp, Artificial
  probe
  misc_feature (1)..(25): SEQ ID NO: 2695; WAN024DLV; Start 329; Stop 353
aacttatacactgtcatggctactc

SEQ ID NO: 333984 - DNA, 25 bp, Artificial
  probe
  misc_feature (1)..(25): SEQ ID NO: 2695; WAN024DLV; Start 108; Stop 132
taatggacattgtggaggtatagat

SEQ ID NO: 333985 - DNA, 25 bp, Artificial
  probe
  misc_feature (1)..(25): SEQ ID NO: 2695; WAN024DLV; Start 107; Stop 131
ataatggacattgtggaggtataga

SEQ ID NO: 333986 - DNA, 25 bp, Artificial
  probe
  misc_feature (1)..(25): SEQ ID NO: 2695; WAN024DLV; Start 332; Stop 356
ttatacactgtcatggctactcaac

SEQ ID NO: 333987 - DNA, 25 bp, Artificial
  probe
  misc_feature (1)..(25): SEQ ID NO: 2695; WAN024DLV; Start 328; Stop 352
caacttatacactgtcatggctact

SEQ ID NO: 333988 - DNA, 25 bp, Artificial
  probe
  misc_feature (1)..(25): SEQ ID NO: 2695; WAN024DLV; Start 158; Stop 182
agcagatcagaaggatgtctctata

SEQ ID NO: 333989 - DNA, 25 bp, Artificial
  probe
  misc_feature (1)..(25): SEQ ID NO: 2695; WAN024DLV; Start 337; Stop 361
cactgtcatggctactcaactaatt

SEQ ID NO: 333990 - DNA, 25 bp, Artificial
  probe
  misc_feature (1)..(25): SEQ ID NO: 2695; WAN024DLV; Start 159; Stop 183
gcagatcagaaggatgtctctatat

SEQ ID NO: 333991 - DNA, 25 bp, Artificial
  probe
  misc_feature (1)..(25): SEQ ID NO: 2695; WAN024DLV; Start 157; Stop 181
aagcagatcagaaggatgtctctat

SEQ ID NO: 333992 - DNA, 25 bp, Artificial
  probe
  misc_feature (1)..(25): SEQ ID NO: 2695; WAN024DLV; Start 338; Stop 362
actgtcatggctactcaactaatta

SEQ ID NO: 333993 - DNA, 25 bp, Artificial
  probe
  misc_feature (1)..(25): SEQ ID NO: 2695; WAN024DLV; Start 334; Stop 358
atacactgtcatggctactcaacta

SEQ ID NO: 333994 - DNA, 25 bp, Artificial
  probe
  misc_feature (1)..(25): SEQ ID NO: 2695; WAN024DLV; Start 333; Stop 357
tatacactgtcatggctactcaact

SEQ ID NO: 333995 - DNA, 25 bp, Artificial
  probe
  misc_feature (1)..(25): SEQ ID NO: 2695; WAN024DLV; Start 330; Stop 354
acttatacactgtcatggctactca

SEQ ID NO: 333996 - DNA, 25 bp, Artificial
  probe
  misc_feature (1)..(25): SEQ ID NO: 2695; WAN024DLV; Start 102; Stop 126
gtataataatggacattgtggaggt

SEQ ID NO: 333997 - DNA, 25 bp, Artificial
  probe
  misc_feature (1)..(25): SEQ ID NO: 2695; WAN024DLV; Start 335; Stop 359
tacactgtcatggctactcaactaa

SEQ ID NO: 333998 - DNA, 25 bp, Artificial
  probe
  misc_feature (1)..(25): SEQ ID NO: 2695; WAN024DLV; Start 122; Stop 146
gaggtatagatccgcatataattgg

SEQ ID NO: 333999 - DNA, 25 bp, Artificial
  probe
  misc_feature (1)..(25): SEQ ID NO: 2695; WAN024DLV; Start 46; Stop 70
cctgatggatatggagacattaagg

SEQ ID NO: 334000 - DNA, 25 bp, Artificial
  probe
  misc_feature (1)..(25): SEQ ID NO: 2695; WAN024DLV; Start 106; Stop 130
aataatggacattgtggaggtatag

SEQ ID NO: 334001 - DNA, 25 bp, Artificial
  probe
  misc_feature (1)..(25): SEQ ID NO: 2695; WAN024DLV; Start 100; Stop 124
aggtataataatggacattgtggag

SEQ ID NO: 334002 - DNA, 25 bp, Artificial
  probe
  misc_feature (1)..(25): SEQ ID NO: 2695; WAN024DLV; Start 336; Stop 360
acactgtcatggctactcaactaat

SEQ ID NO: 334003 - DNA, 25 bp, Artificial
  probe
  misc_feature (1)..(25): SEQ ID NO: 2695; WAN024DLV; Start 339; Stop 363
ctgtcatggctactcaactaattat

SEQ ID NO: 334004 - DNA, 25 bp, Artificial
  probe
  misc_feature (1)..(25): SEQ ID NO: 2695; WAN024DLV; Start 240; Stop 264
agatattgcctatgttgattgtact

SEQ ID NO: 334005 - DNA, 25 bp, Artificial
  probe
  misc_feature (1)..(25): SEQ ID NO: 2695; WAN024DLV; Start 118; Stop 142
tgtggaggtatagatccgcatataa

SEQ ID NO: 334006 - DNA, 25 bp, Artificial
  probe
  misc_feature (1)..(25): SEQ ID NO: 2695; WAN024DLV; Start 117; Stop 141
ttgtggaggtatagatccgcatata

SEQ ID NO: 334007 - DNA, 25 bp, Artificial
  probe
  misc_feature (1)..(25): SEQ ID NO: 2695; WAN024DLV; Start 119; Stop 143
gtggaggtatagatccgcatataat

SEQ ID NO: 334008 - DNA, 25 bp, Artificial
  probe
  misc_feature (1)..(25): SEQ ID NO: 2695; WAN024DLV; Start 241; Stop 265
gatattgcctatgttgattgtactc

SEQ ID NO: 334009 - DNA, 25 bp, Artificial
  probe
  misc_feature (1)..(25): SEQ ID NO: 2695; WAN024DLV; Start 242; Stop 266
atattgcctatgttgattgtactca

SEQ ID NO: 334010 - DNA, 25 bp, Artificial
  probe
  misc_feature (1)..(25): SEQ ID NO: 2695; WAN024DLV; Start 340; Stop 364
tgtcatggctactcaactaattatt

SEQ ID NO: 334011 - DNA, 25 bp, Artificial
  probe
  misc_feature (1)..(25): SEQ ID NO: 2696; WAN024FXG; Start 368; Stop 392
taataggctatctagcaacaccgtt

SEQ ID NO: 334012 - DNA, 25 bp, Artificial
  probe
  misc_feature (1)..(25): SEQ ID NO: 2696; WAN024FXG; Start 367; Stop 391
ttaataggctatctagcaacaccgt

SEQ ID NO: 334013 - DNA, 25 bp, Artificial
  probe
  misc_feature (1)..(25): SEQ ID NO: 2696; WAN024FXG; Start 751; Stop 775
gcgattaaatcacctaaagcgatta

SEQ ID NO: 334014 - DNA, 25 bp, Artificial
  probe
  misc_feature (1)..(25): SEQ ID NO: 2696; WAN024FXG; Start 279; Stop 303
ttggagagaaggtaatatgcagttt

SEQ ID NO: 334015 - DNA, 25 bp, Artificial
  probe
  misc_feature (1)..(25): SEQ ID NO: 2696; WAN024FXG; Start 278; Stop 302
tttggagagaaggtaatatgcagtt

SEQ ID NO: 334016 - DNA, 25 bp, Artificial
  probe
  misc_feature (1)..(25): SEQ ID NO: 2696; WAN024FXG; Start 280; Stop 304
tggagagaaggtaatatgcagttta

SEQ ID NO: 334017 - DNA, 25 bp, Artificial
  probe
  misc_feature (1)..(25): SEQ ID NO: 2696; WAN024FXG; Start 567; Stop 591
tggaataggaattcttattgcacag

SEQ ID NO: 334018 - DNA, 25 bp, Artificial
  probe
  misc_feature (1)..(25): SEQ ID NO: 2696; WAN024FXG; Start 568; Stop 592
ggaataggaattcttattgcacaga

SEQ ID NO: 334019 - DNA, 25 bp, Artificial
  probe
  misc_feature (1)..(25): SEQ ID NO: 2696; WAN024FXG; Start 281; Stop 305
ggagagaaggtaatatgcagtttat

SEQ ID NO: 334020 - DNA, 25 bp, Artificial
  probe
  misc_feature (1)..(25): SEQ ID NO: 2696; WAN024FXG; Start 566; Stop 590
ttggaataggaattcttattgcaca

SEQ ID NO: 334021 - DNA, 25 bp, Artificial
  probe
  misc_feature (1)..(25): SEQ ID NO: 2696; WAN024FXG; Start 270; Stop 294
atggatgttttggagagaaggtaat

SEQ ID NO: 334022 - DNA, 25 bp, Artificial
  probe
  misc_feature (1)..(25): SEQ ID NO: 2696; WAN024FXG; Start 268; Stop 292
gtatggatgttttggagagaaggta

SEQ ID NO: 334023 - DNA, 25 bp, Artificial
  probe
  misc_feature (1)..(25): SEQ ID NO: 2696; WAN024FXG; Start 752; Stop 776
cgattaaatcacctaaagcgattaa

SEQ ID NO: 334024 - DNA, 25 bp, Artificial
  probe
  misc_feature (1)..(25): SEQ ID NO: 2696; WAN024FXG; Start 271; Stop 295
tggatgttttggagagaaggtaata

SEQ ID NO: 334025 - DNA, 25 bp, Artificial
  probe
  misc_feature (1)..(25): SEQ ID NO: 2696; WAN024FXG; Start 269; Stop 293
tatggatgttttggagagaaggtaa

SEQ ID NO: 334026 - DNA, 25 bp, Artificial
  probe
  misc_feature (1)..(25): SEQ ID NO: 2696; WAN024FXG; Start 448; Stop 472
agactactattgacaaaacgatgga

SEQ ID NO: 334027 - DNA, 25 bp, Artificial
  probe
  misc_feature (1)..(25): SEQ ID NO: 2696; WAN024FXG; Start 266; Stop 290
ttgtatggatgttttggagagaagg

SEQ ID NO: 334028 - DNA, 25 bp, Artificial
  probe
  misc_feature (1)..(25): SEQ ID NO: 2696; WAN024FXG; Start 265; Stop 289
tttgtatggatgttttggagagaag

SEQ ID NO: 334029 - DNA, 25 bp, Artificial
  probe
  misc_feature (1)..(25): SEQ ID NO: 2696; WAN024FXG; Start 798; Stop 822
tggagataaatatgcgacttttgtt

SEQ ID NO: 334030 - DNA, 25 bp, Artificial
  probe
  misc_feature (1)..(25): SEQ ID NO: 2696; WAN024FXG; Start 797; Stop 821
ttggagataaatatgcgacttttgt

SEQ ID NO: 334031 - DNA, 25 bp, Artificial
  probe
  misc_feature (1)..(25): SEQ ID NO: 2696; WAN024FXG; Start 274; Stop 298
atgttttggagagaaggtaatatgc

SEQ ID NO: 334032 - DNA, 25 bp, Artificial
  probe
  misc_feature (1)..(25): SEQ ID NO: 2696; WAN024FXG; Start 636; Stop 660
aatcttgggaacaattatctatcca

SEQ ID NO: 334033 - DNA, 25 bp, Artificial
  probe
  misc_feature (1)..(25): SEQ ID NO: 2696; WAN024FXG; Start 447; Stop 471
aagactactattgacaaaacgatgg

SEQ ID NO: 334034 - DNA, 25 bp, Artificial
  probe
  misc_feature (1)..(25): SEQ ID NO: 2696; WAN024FXG; Start 449; Stop 473
gactactattgacaaaacgatggat

SEQ ID NO: 334035 - DNA, 25 bp, Artificial
  probe
  misc_feature (1)..(25): SEQ ID NO: 2696; WAN024FXG; Start 366; Stop 390
tttaataggctatctagcaacaccg

SEQ ID NO: 334036 - DNA, 25 bp, Artificial
  probe
  misc_feature (1)..(25): SEQ ID NO: 2696; WAN024FXG; Start 911; Stop 935
tgatatgttgttttctaggggttct

SEQ ID NO: 334037 - DNA, 25 bp, Artificial
  probe
  misc_feature (1)..(25): SEQ ID NO: 2696; WAN024FXG; Start 71; Stop 95
gtgttgttgctattcatatatggct

SEQ ID NO: 334038 - DNA, 25 bp, Artificial
  probe
  misc_feature (1)..(25): SEQ ID NO: 2696; WAN024FXG; Start 70; Stop 94
agtgttgttgctattcatatatggc

SEQ ID NO: 334039 - DNA, 25 bp, Artificial
  probe
  misc_feature (1)..(25): SEQ ID NO: 2696; WAN024FXG; Start 264; Stop 288
atttgtatggatgttttggagagaa

SEQ ID NO: 334040 - DNA, 25 bp, Artificial
  probe
  misc_feature (1)..(25): SEQ ID NO: 2696; WAN024FXG; Start 108; Stop 132
tggagcgttttatcaaataatagca

SEQ ID NO: 334041 - DNA, 25 bp, Artificial
  probe
  misc_feature (1)..(25): SEQ ID NO: 2696; WAN024FXG; Start 132; Stop 156
acgatttgcagttccaatgttcttt

SEQ ID NO: 334042 - DNA, 25 bp, Artificial
  probe
  misc_feature (1)..(25): SEQ ID NO: 2696; WAN024FXG; Start 109; Stop 133
ggagcgttttatcaaataatagcac

SEQ ID NO: 334043 - DNA, 25 bp, Artificial
  probe
  misc_feature (1)..(25): SEQ ID NO: 2696; WAN024FXG; Start 910; Stop 934
ttgatatgttgttttctaggggttc

SEQ ID NO: 334044 - DNA, 25 bp, Artificial
  probe
  misc_feature (1)..(25): SEQ ID NO: 2697; WAN024GET; Start 185; Stop 209
cacgcaatattccttcaagtcagtt

SEQ ID NO: 334045 - DNA, 25 bp, Artificial
  probe
  misc_feature (1)..(25): SEQ ID NO: 2697; WAN024GET; Start 47; Stop 71
ggatgggctttaactatcttcgtat

SEQ ID NO: 334046 - DNA, 25 bp, Artificial
  probe
  misc_feature (1)..(25): SEQ ID NO: 2697; WAN024GET; Start 50; Stop 74
tgggctttaactatcttcgtattcg

SEQ ID NO: 334047 - DNA, 25 bp, Artificial
  probe
  misc_feature (1)..(25): SEQ ID NO: 2697; WAN024GET; Start 334; Stop 358
ctttcttatggcttggattcttgga

SEQ ID NO: 334048 - DNA, 25 bp, Artificial
  probe
  misc_feature (1)..(25): SEQ ID NO: 2697; WAN024GET; Start 229; Stop 253
cttcgtaaagataaacctgtccttc

SEQ ID NO: 334049 - DNA, 25 bp, Artificial
  probe
  misc_feature (1)..(25): SEQ ID NO: 2697; WAN024GET; Start 228; Stop 252
ccttcgtaaagataaacctgtcctt

SEQ ID NO: 334050 - DNA, 25 bp, Artificial
  probe
  misc_feature (1)..(25): SEQ ID NO: 2697; WAN024GET; Start 336; Stop 360
ttcttatggcttggattcttggaaa

SEQ ID NO: 334051 - DNA, 25 bp, Artificial
  probe
  misc_feature (1)..(25): SEQ ID NO: 2697; WAN024GET; Start 335; Stop 359
tttcttatggcttggattcttggaa

SEQ ID NO: 334052 - DNA, 25 bp, Artificial
  probe
  misc_feature (1)..(25): SEQ ID NO: 2697; WAN024GET; Start 235; Stop 259
aaagataaacctgtccttctctacg

SEQ ID NO: 334053 - DNA, 25 bp, Artificial
  probe
  misc_feature (1)..(25): SEQ ID NO: 2697; WAN024GET; Start 232; Stop 256
cgtaaagataaacctgtccttctct

SEQ ID NO: 334054 - DNA, 25 bp, Artificial
  probe
  misc_feature (1)..(25): SEQ ID NO: 2697; WAN024GET; Start 231; Stop 255
tcgtaaagataaacctgtccttctc

SEQ ID NO: 334055 - DNA, 25 bp, Artificial
  probe
  misc_feature (1)..(25): SEQ ID NO: 2697; WAN024GET; Start 230; Stop 254
ttcgtaaagataaacctgtccttct

SEQ ID NO: 334056 - DNA, 25 bp, Artificial
  probe
  misc_feature (1)..(25): SEQ ID NO: 2697; WAN024GET; Start 186; Stop 210
acgcaatattccttcaagtcagttg

SEQ ID NO: 334057 - DNA, 25 bp, Artificial
  probe
  misc_feature (1)..(25): SEQ ID NO: 2697; WAN024GET; Start 54; Stop 78
ctttaactatcttcgtattcgccgt

SEQ ID NO: 334058 - DNA, 25 bp, Artificial
  probe
  misc_feature (1)..(25): SEQ ID NO: 2697; WAN024GET; Start 236; Stop 260
aagataaacctgtccttctctacga

SEQ ID NO: 334059 - DNA, 25 bp, Artificial
  probe
  misc_feature (1)..(25): SEQ ID NO: 2697; WAN024GET; Start 337; Stop 361
tcttatggcttggattcttggaaag

SEQ ID NO: 334060 - DNA, 25 bp, Artificial
  probe
  misc_feature (1)..(25): SEQ ID NO: 2697; WAN024GET; Start 55; Stop 79
tttaactatcttcgtattcgccgtg

SEQ ID NO: 334061 - DNA, 25 bp, Artificial
  probe
  misc_feature (1)..(25): SEQ ID NO: 2697; WAN024GET; Start 49; Stop 73
atgggctttaactatcttcgtattc

SEQ ID NO: 334062 - DNA, 25 bp, Artificial
  probe
  misc_feature (1)..(25): SEQ ID NO: 2697; WAN024GET; Start 48; Stop 72
gatgggctttaactatcttcgtatt

SEQ ID NO: 334063 - DNA, 25 bp, Artificial
  probe
  misc_feature (1)..(25): SEQ ID NO: 2697; WAN024GET; Start 46; Stop 70
tggatgggctttaactatcttcgta

SEQ ID NO: 334064 - DNA, 25 bp, Artificial
  probe
  misc_feature (1)..(25): SEQ ID NO: 2697; WAN024GET; Start 333; Stop 357
cctttcttatggcttggattcttgg

SEQ ID NO: 334065 - DNA, 25 bp, Artificial
  probe
  misc_feature (1)..(25): SEQ ID NO: 2697; WAN024GET; Start 56; Stop 80
ttaactatcttcgtattcgccgtgc

SEQ ID NO: 334066 - DNA, 25 bp, Artificial
  probe
  misc_feature (1)..(25): SEQ ID NO: 2697; WAN024GET; Start 348; Stop 372
ggattcttggaaagggaaagtgaag

SEQ ID NO: 334067 - DNA, 25 bp, Artificial
  probe
  misc_feature (1)..(25): SEQ ID NO: 2697; WAN024GET; Start 51; Stop 75
gggctttaactatcttcgtattcgc

SEQ ID NO: 334068 - DNA, 25 bp, Artificial
  probe
  misc_feature (1)..(25): SEQ ID NO: 2697; WAN024GET; Start 338; Stop 362
cttatggcttggattcttggaaagg

SEQ ID NO: 334069 - DNA, 25 bp, Artificial
  probe
  misc_feature (1)..(25): SEQ ID NO: 2697; WAN024GET; Start 353; Stop 377
cttggaaagggaaagtgaagactag

SEQ ID NO: 334070 - DNA, 25 bp, Artificial
  probe
  misc_feature (1)..(25): SEQ ID NO: 2697; WAN024GET; Start 345; Stop 369
cttggattcttggaaagggaaagtg

SEQ ID NO: 334071 - DNA, 25 bp, Artificial
  probe
  misc_feature (1)..(25): SEQ ID NO: 2697; WAN024GET; Start 227; Stop 251
cccttcgtaaagataaacctgtcct

SEQ ID NO: 334072 - DNA, 25 bp, Artificial
  probe
  misc_feature (1)..(25): SEQ ID NO: 2697; WAN024GET; Start 53; Stop 77
gctttaactatcttcgtattcgccg

SEQ ID NO: 334073 - DNA, 25 bp, Artificial
  probe
  misc_feature (1)..(25): SEQ ID NO: 2697; WAN024GET; Start 347; Stop 371
tggattcttggaaagggaaagtgaa

SEQ ID NO: 334074 - DNA, 25 bp, Artificial
  probe
  misc_feature (1)..(25): SEQ ID NO: 2697; WAN024GET; Start 346; Stop 370
ttggattcttggaaagggaaagtga

SEQ ID NO: 334075 - DNA, 25 bp, Artificial
  probe
  misc_feature (1)..(25): SEQ ID NO: 2697; WAN024GET; Start 332; Stop 356
tcctttcttatggcttggattcttg

SEQ ID NO: 334076 - DNA, 25 bp, Artificial
  probe
  misc_feature (1)..(25): SEQ ID NO: 2697; WAN024GET; Start 225; Stop 249
agcccttcgtaaagataaacctgtc

SEQ ID NO: 334077 - DNA, 25 bp, Artificial
  probe
  misc_feature (1)..(25): SEQ ID NO: 2698; WAN024CJ6; Start 410; Stop 434
ctggatttgttgctgtaataagtgg

SEQ ID NO: 334078 - DNA, 25 bp, Artificial
  probe
  misc_feature (1)..(25): SEQ ID NO: 2698; WAN024CJ6; Start 409; Stop 433
tctggatttgttgctgtaataagtg

SEQ ID NO: 334079 - DNA, 25 bp, Artificial
  probe
  misc_feature (1)..(25): SEQ ID NO: 2698; WAN024CJ6; Start 412; Stop 436
ggatttgttgctgtaataagtggtg

SEQ ID NO: 334080 - DNA, 25 bp, Artificial
  probe
  misc_feature (1)..(25): SEQ ID NO: 2698; WAN024CJ6; Start 418; Stop 442
gttgctgtaataagtggtgcgattg

SEQ ID NO: 334081 - DNA, 25 bp, Artificial
  probe
  misc_feature (1)..(25): SEQ ID NO: 2698; WAN024CJ6; Start 386; Stop 410
aatttgcggttaatcctgttacatc

SEQ ID NO: 334082 - DNA, 25 bp, Artificial
  probe
  misc_feature (1)..(25): SEQ ID NO: 2698; WAN024CJ6; Start 411; Stop 435
tggatttgttgctgtaataagtggt

SEQ ID NO: 334083 - DNA, 25 bp, Artificial
  probe
  misc_feature (1)..(25): SEQ ID NO: 2698; WAN024CJ6; Start 385; Stop 409
caatttgcggttaatcctgttacat

SEQ ID NO: 334084 - DNA, 25 bp, Artificial
  probe
  misc_feature (1)..(25): SEQ ID NO: 2698; WAN024CJ6; Start 387; Stop 411
atttgcggttaatcctgttacatct

SEQ ID NO: 334085 - DNA, 25 bp, Artificial
  probe
  misc_feature (1)..(25): SEQ ID NO: 2698; WAN024CJ6; Start 413; Stop 437
gatttgttgctgtaataagtggtgc

SEQ ID NO: 334086 - DNA, 25 bp, Artificial
  probe
  misc_feature (1)..(25): SEQ ID NO: 2698; WAN024CJ6; Start 101; Stop 125
cggtttcagaagatattgtaaatgc

SEQ ID NO: 334087 - DNA, 25 bp, Artificial
  probe
  misc_feature (1)..(25): SEQ ID NO: 2698; WAN024CJ6; Start 408; Stop 432
atctggatttgttgctgtaataagt

SEQ ID NO: 334088 - DNA, 25 bp, Artificial
  probe
  misc_feature (1)..(25): SEQ ID NO: 2698; WAN024CJ6; Start 226; Stop 250
caagaagcaagtttgatgtatggag

SEQ ID NO: 334089 - DNA, 25 bp, Artificial
  probe
  misc_feature (1)..(25): SEQ ID NO: 2698; WAN024CJ6; Start 95; Stop 119
atgtttcggtttcagaagatattgt

SEQ ID NO: 334090 - DNA, 25 bp, Artificial
  probe
  misc_feature (1)..(25): SEQ ID NO: 2698; WAN024CJ6; Start 31; Stop 55
gccctaactacagtagataaagcaa

SEQ ID NO: 334091 - DNA, 25 bp, Artificial
  probe
  misc_feature (1)..(25): SEQ ID NO: 2698; WAN024CJ6; Start 378; Stop 402
tttgaaacaatttgcggttaatcct

SEQ ID NO: 334092 - DNA, 25 bp, Artificial
  probe
  misc_feature (1)..(25): SEQ ID NO: 2698; WAN024CJ6; Start 377; Stop 401
atttgaaacaatttgcggttaatcc

SEQ ID NO: 334093 - DNA, 25 bp, Artificial
  probe
  misc_feature (1)..(25): SEQ ID NO: 2698; WAN024CJ6; Start 407; Stop 431
catctggatttgttgctgtaataag

SEQ ID NO: 334094 - DNA, 25 bp, Artificial
  probe
  misc_feature (1)..(25): SEQ ID NO: 2698; WAN024CJ6; Start 515; Stop 539
accttgtttacaccatagatttacc

SEQ ID NO: 334095 - DNA, 25 bp, Artificial
  probe
  misc_feature (1)..(25): SEQ ID NO: 2698; WAN024CJ6; Start 417; Stop 441
tgttgctgtaataagtggtgcgatt

SEQ ID NO: 334096 - DNA, 25 bp, Artificial
  probe
  misc_feature (1)..(25): SEQ ID NO: 2698; WAN024CJ6; Start 416; Stop 440
ttgttgctgtaataagtggtgcgat

SEQ ID NO: 334097 - DNA, 25 bp, Artificial
  probe
  misc_feature (1)..(25): SEQ ID NO: 2698; WAN024CJ6; Start 389; Stop 413
ttgcggttaatcctgttacatctgg

SEQ ID NO: 334098 - DNA, 25 bp, Artificial
  probe
  misc_feature (1)..(25): SEQ ID NO: 2698; WAN024CJ6; Start 29; Stop 53
gtgccctaactacagtagataaagc

SEQ ID NO: 334099 - DNA, 25 bp, Artificial
  probe
  misc_feature (1)..(25): SEQ ID NO: 2698; WAN024CJ6; Start 516; Stop 540
ccttgtttacaccatagatttacct

SEQ ID NO: 334100 - DNA, 25 bp, Artificial
  probe
  misc_feature (1)..(25): SEQ ID NO: 2698; WAN024CJ6; Start 379; Stop 403
ttgaaacaatttgcggttaatcctg

SEQ ID NO: 334101 - DNA, 25 bp, Artificial
  probe
  misc_feature (1)..(25): SEQ ID NO: 2698; WAN024CJ6; Start 96; Stop 120
tgtttcggtttcagaagatattgta

SEQ ID NO: 334102 - DNA, 25 bp, Artificial
  probe
  misc_feature (1)..(25): SEQ ID NO: 2698; WAN024CJ6; Start 388; Stop 412
tttgcggttaatcctgttacatctg

SEQ ID NO: 334103 - DNA, 25 bp, Artificial
  probe
  misc_feature (1)..(25): SEQ ID NO: 2698; WAN024CJ6; Start 376; Stop 400
catttgaaacaatttgcggttaatc

SEQ ID NO: 334104 - DNA, 25 bp, Artificial
  probe
  misc_feature (1)..(25): SEQ ID NO: 2698; WAN024CJ6; Start 512; Stop 536
tgaaccttgtttacaccatagattt

SEQ ID NO: 334105 - DNA, 25 bp, Artificial
  probe
  misc_feature (1)..(25): SEQ ID NO: 2698; WAN024CJ6; Start 227; Stop 251
aagaagcaagtttgatgtatggagc

SEQ ID NO: 334106 - DNA, 25 bp, Artificial
  probe
  misc_feature (1)..(25): SEQ ID NO: 2698; WAN024CJ6; Start 272; Stop 296
tttacgaaagaggtcctgtaggttt

SEQ ID NO: 334107 - DNA, 25 bp, Artificial
  probe
  misc_feature (1)..(25): SEQ ID NO: 2698; WAN024CJ6; Start 108; Stop 132
agaagatattgtaaatgctggtcaa

SEQ ID NO: 334108 - DNA, 25 bp, Artificial
  probe
  misc_feature (1)..(25): SEQ ID NO: 2698; WAN024CJ6; Start 94; Stop 118
aatgtttcggtttcagaagatattg

SEQ ID NO: 334109 - DNA, 25 bp, Artificial
  probe
  misc_feature (1)..(25): SEQ ID NO: 2698; WAN024CJ6; Start 225; Stop 249
acaagaagcaagtttgatgtatgga

SEQ ID NO: 334110 - DNA, 25 bp, Artificial
  probe
  misc_feature (1)..(25): SEQ ID NO: 2699; WAN024C8U; Start 32; Stop 56
taactcgtattcgtaatgctaacca

SEQ ID NO: 334111 - DNA, 25 bp, Artificial
  probe
  misc_feature (1)..(25): SEQ ID NO: 2699; WAN024C8U; Start 23; Stop 47
cagacttcctaactcgtattcgtaa

SEQ ID NO: 334112 - DNA, 25 bp, Artificial
  probe
  misc_feature (1)..(25): SEQ ID NO: 2699; WAN024C8U; Start 31; Stop 55
ctaactcgtattcgtaatgctaacc

SEQ ID NO: 334113 - DNA, 25 bp, Artificial
  probe
  misc_feature (1)..(25): SEQ ID NO: 2699; WAN024C8U; Start 30; Stop 54
cctaactcgtattcgtaatgctaac

SEQ ID NO: 334114 - DNA, 25 bp, Artificial
  probe
  misc_feature (1)..(25): SEQ ID NO: 2699; WAN024C8U; Start 27; Stop 51
cttcctaactcgtattcgtaatgct

SEQ ID NO: 334115 - DNA, 25 bp, Artificial
  probe
  misc_feature (1)..(25): SEQ ID NO: 2699; WAN024C8U; Start 33; Stop 57
aactcgtattcgtaatgctaaccaa

SEQ ID NO: 334116 - DNA, 25 bp, Artificial
  probe
  misc_feature (1)..(25): SEQ ID NO: 2699; WAN024C8U; Start 29; Stop 53
tcctaactcgtattcgtaatgctaa

SEQ ID NO: 334117 - DNA, 25 bp, Artificial
  probe
  misc_feature (1)..(25): SEQ ID NO: 2699; WAN024C8U; Start 28; Stop 52
ttcctaactcgtattcgtaatgcta

SEQ ID NO: 334118 - DNA, 25 bp, Artificial
  probe
  misc_feature (1)..(25): SEQ ID NO: 2699; WAN024C8U; Start 26; Stop 50
acttcctaactcgtattcgtaatgc

SEQ ID NO: 334119 - DNA, 25 bp, Artificial
  probe
  misc_feature (1)..(25): SEQ ID NO: 2699; WAN024C8U; Start 25; Stop 49
gacttcctaactcgtattcgtaatg

SEQ ID NO: 334120 - DNA, 25 bp, Artificial
  probe
  misc_feature (1)..(25): SEQ ID NO: 2699; WAN024C8U; Start 24; Stop 48
agacttcctaactcgtattcgtaat

SEQ ID NO: 334121 - DNA, 25 bp, Artificial
  probe
  misc_feature (1)..(25): SEQ ID NO: 2699; WAN024C8U; Start 34; Stop 58
actcgtattcgtaatgctaaccaag

SEQ ID NO: 334122 - DNA, 25 bp, Artificial
  probe
  misc_feature (1)..(25): SEQ ID NO: 2699; WAN024C8U; Start 18; Stop 42
aatcgcagacttcctaactcgtatt

SEQ ID NO: 334123 - DNA, 25 bp, Artificial
  probe
  misc_feature (1)..(25): SEQ ID NO: 2699; WAN024C8U; Start 22; Stop 46
gcagacttcctaactcgtattcgta

SEQ ID NO: 334124 - DNA, 25 bp, Artificial
  probe
  misc_feature (1)..(25): SEQ ID NO: 2699; WAN024C8U; Start 19; Stop 43
atcgcagacttcctaactcgtattc

SEQ ID NO: 334125 - DNA, 25 bp, Artificial
  probe
  misc_feature (1)..(25): SEQ ID NO: 2699; WAN024C8U; Start 17; Stop 41
caatcgcagacttcctaactcgtat

SEQ ID NO: 334126 - DNA, 25 bp, Artificial
  probe
  misc_feature (1)..(25): SEQ ID NO: 2699; WAN024C8U; Start 361; Stop 385
aagaatgttggtggtgaggttatcg

SEQ ID NO: 334127 - DNA, 25 bp, Artificial
  probe
  misc_feature (1)..(25): SEQ ID NO: 2699; WAN024C8U; Start 360; Stop 384
aaagaatgttggtggtgaggttatc

SEQ ID NO: 334128 - DNA, 25 bp, Artificial
  probe
  misc_feature (1)..(25): SEQ ID NO: 2699; WAN024C8U; Start 326; Stop 350
ctgaaggtttgcttactgataaaga

SEQ ID NO: 334129 - DNA, 25 bp, Artificial
  probe
  misc_feature (1)..(25): SEQ ID NO: 2699; WAN024C8U; Start 325; Stop 349
tctgaaggtttgcttactgataaag

SEQ ID NO: 334130 - DNA, 25 bp, Artificial
  probe
  misc_feature (1)..(25): SEQ ID NO: 2699; WAN024C8U; Start 327; Stop 351
tgaaggtttgcttactgataaagaa

SEQ ID NO: 334131 - DNA, 25 bp, Artificial
  probe
  misc_feature (1)..(25): SEQ ID NO: 2699; WAN024C8U; Start 324; Stop 348
ttctgaaggtttgcttactgataaa

SEQ ID NO: 334132 - DNA, 25 bp, Artificial
  probe
  misc_feature (1)..(25): SEQ ID NO: 2699; WAN024C8U; Start 322; Stop 346
acttctgaaggtttgcttactgata

SEQ ID NO: 334133 - DNA, 25 bp, Artificial
  probe
  misc_feature (1)..(25): SEQ ID NO: 2699; WAN024C8U; Start 337; Stop 361
cttactgataaagaagcacgccaaa

SEQ ID NO: 334134 - DNA, 25 bp, Artificial
  probe
  misc_feature (1)..(25): SEQ ID NO: 2699; WAN024C8U; Start 328; Stop 352
gaaggtttgcttactgataaagaag

SEQ ID NO: 334135 - DNA, 25 bp, Artificial
  probe
  misc_feature (1)..(25): SEQ ID NO: 2699; WAN024C8U; Start 321; Stop 345
aacttctgaaggtttgcttactgat

SEQ ID NO: 334136 - DNA, 25 bp, Artificial
  probe
  misc_feature (1)..(25): SEQ ID NO: 2699; WAN024C8U; Start 323; Stop 347
cttctgaaggtttgcttactgataa

SEQ ID NO: 334137 - DNA, 25 bp, Artificial
  probe
  misc_feature (1)..(25): SEQ ID NO: 2699; WAN024C8U; Start 305; Stop 329
gaattgccatcctttcaacttctga

SEQ ID NO: 334138 - DNA, 25 bp, Artificial
  probe
  misc_feature (1)..(25): SEQ ID NO: 2699; WAN024C8U; Start 320; Stop 344
caacttctgaaggtttgcttactga

SEQ ID NO: 334139 - DNA, 25 bp, Artificial
  probe
  misc_feature (1)..(25): SEQ ID NO: 2699; WAN024C8U; Start 239; Stop 263
tttctaaaccaggacttcgtgtcta

SEQ ID NO: 334140 - DNA, 25 bp, Artificial
  probe
  misc_feature (1)..(25): SEQ ID NO: 2699; WAN024C8U; Start 172; Stop 196
ggcgtcatccgtgtatttcttaaat

SEQ ID NO: 334141 - DNA, 25 bp, Artificial
  probe
  misc_feature (1)..(25): SEQ ID NO: 2699; WAN024C8U; Start 319; Stop 343
tcaacttctgaaggtttgcttactg

SEQ ID NO: 334142 - DNA, 25 bp, Artificial
  probe
  misc_feature (1)..(25): SEQ ID NO: 2699; WAN024C8U; Start 171; Stop 195
aggcgtcatccgtgtatttcttaaa

SEQ ID NO: 334143 - DNA, 25 bp, Artificial
  probe
  misc_feature (1)..(25): SEQ ID NO: 2700; WAN024DLT; Start 268; Stop 292
cacttatcgtactatgaatgtctct

SEQ ID NO: 334144 - DNA, 25 bp, Artificial
  probe
  misc_feature (1)..(25): SEQ ID NO: 2700; WAN024DLT; Start 212; Stop 236
aagaaaggaagaaagaagacaggtt

SEQ ID NO: 334145 - DNA, 25 bp, Artificial
  probe
  misc_feature (1)..(25): SEQ ID NO: 2700; WAN024DLT; Start 205; Stop 229
ccgattgaagaaaggaagaaagaag

SEQ ID NO: 334146 - DNA, 25 bp, Artificial
  probe
  misc_feature (1)..(25): SEQ ID NO: 2700; WAN024DLT; Start 213; Stop 237
agaaaggaagaaagaagacaggtta

SEQ ID NO: 334147 - DNA, 25 bp, Artificial
  probe
  misc_feature (1)..(25): SEQ ID NO: 2700; WAN024DLT; Start 211; Stop 235
gaagaaaggaagaaagaagacaggt

SEQ ID NO: 334148 - DNA, 25 bp, Artificial
  probe
  misc_feature (1)..(25): SEQ ID NO: 2700; WAN024DLT; Start 210; Stop 234
tgaagaaaggaagaaagaagacagg

SEQ ID NO: 334149 - DNA, 25 bp, Artificial
  probe
  misc_feature (1)..(25): SEQ ID NO: 2700; WAN024DLT; Start 214; Stop 238
gaaaggaagaaagaagacaggttag

SEQ ID NO: 334150 - DNA, 25 bp, Artificial
  probe
  misc_feature (1)..(25): SEQ ID NO: 2700; WAN024DLT; Start 206; Stop 230
cgattgaagaaaggaagaaagaaga

SEQ ID NO: 334151 - DNA, 25 bp, Artificial
  probe
  misc_feature (1)..(25): SEQ ID NO: 2700; WAN024DLT; Start 215; Stop 239
aaaggaagaaagaagacaggttagc

SEQ ID NO: 334152 - DNA, 25 bp, Artificial
  probe
  misc_feature (1)..(25): SEQ ID NO: 2700; WAN024DLT; Start 209; Stop 233
ttgaagaaaggaagaaagaagacag

SEQ ID NO: 334153 - DNA, 25 bp, Artificial
  probe
  misc_feature (1)..(25): SEQ ID NO: 2700; WAN024DLT; Start 177; Stop 201
tcataagttgtgtaaccttgggaaa

SEQ ID NO: 334154 - DNA, 25 bp, Artificial
  probe
  misc_feature (1)..(25): SEQ ID NO: 2700; WAN024DLT; Start 176; Stop 200
ttcataagttgtgtaaccttgggaa

SEQ ID NO: 334155 - DNA, 25 bp, Artificial
  probe
  misc_feature (1)..(25): SEQ ID NO: 2700; WAN024DLT; Start 175; Stop 199
tttcataagttgtgtaaccttggga

SEQ ID NO: 334156 - DNA, 25 bp, Artificial
  probe
  misc_feature (1)..(25): SEQ ID NO: 2700; WAN024DLT; Start 267; Stop 291
acacttatcgtactatgaatgtctc

SEQ ID NO: 334157 - DNA, 25 bp, Artificial
  probe
  misc_feature (1)..(25): SEQ ID NO: 2700; WAN024DLT; Start 178; Stop 202
cataagttgtgtaaccttgggaaat

SEQ ID NO: 334158 - DNA, 25 bp, Artificial
  probe
  misc_feature (1)..(25): SEQ ID NO: 2700; WAN024DLT; Start 174; Stop 198
atttcataagttgtgtaaccttggg

SEQ ID NO: 334159 - DNA, 25 bp, Artificial
  probe
  misc_feature (1)..(25): SEQ ID NO: 2700; WAN024DLT; Start 181; Stop 205
aagttgtgtaaccttgggaaatatc

SEQ ID NO: 334160 - DNA, 25 bp, Artificial
  probe
  misc_feature (1)..(25): SEQ ID NO: 2700; WAN024DLT; Start 406; Stop 430
aaatgtgtcgtatattgtccgcttt

SEQ ID NO: 334161 - DNA, 25 bp, Artificial
  probe
  misc_feature (1)..(25): SEQ ID NO: 2700; WAN024DLT; Start 208; Stop 232
attgaagaaaggaagaaagaagaca

SEQ ID NO: 334162 - DNA, 25 bp, Artificial
  probe
  misc_feature (1)..(25): SEQ ID NO: 2700; WAN024DLT; Start 37; Stop 61
tctccacatttagatgacgcaattt

SEQ ID NO: 334163 - DNA, 25 bp, Artificial
  probe
  misc_feature (1)..(25): SEQ ID NO: 2700; WAN024DLT; Start 170; Stop 194
agcaatttcataagttgtgtaacct

SEQ ID NO: 334164 - DNA, 25 bp, Artificial
  probe
  misc_feature (1)..(25): SEQ ID NO: 2700; WAN024DLT; Start 407; Stop 431
aatgtgtcgtatattgtccgctttc

SEQ ID NO: 334165 - DNA, 25 bp, Artificial
  probe
  misc_feature (1)..(25): SEQ ID NO: 2700; WAN024DLT; Start 207; Stop 231
gattgaagaaaggaagaaagaagac

SEQ ID NO: 334166 - DNA, 25 bp, Artificial
  probe
  misc_feature (1)..(25): SEQ ID NO: 2700; WAN024DLT; Start 171; Stop 195
gcaatttcataagttgtgtaacctt

SEQ ID NO: 334167 - DNA, 25 bp, Artificial
  probe
  misc_feature (1)..(25): SEQ ID NO: 2700; WAN024DLT; Start 169; Stop 193
aagcaatttcataagttgtgtaacc

SEQ ID NO: 334168 - DNA, 25 bp, Artificial
  probe
  misc_feature (1)..(25): SEQ ID NO: 2700; WAN024DLT; Start 92; Stop 116
cttcagaaggagaaattgtacttgt

SEQ ID NO: 334169 - DNA, 25 bp, Artificial
  probe
  misc_feature (1)..(25): SEQ ID NO: 2700; WAN024DLT; Start 91; Stop 115
acttcagaaggagaaattgtacttg

SEQ ID NO: 334170 - DNA, 25 bp, Artificial
  probe
  misc_feature (1)..(25): SEQ ID NO: 2700; WAN024DLT; Start 180; Stop 204
taagttgtgtaaccttgggaaatat

SEQ ID NO: 334171 - DNA, 25 bp, Artificial
  probe
  misc_feature (1)..(25): SEQ ID NO: 2700; WAN024DLT; Start 179; Stop 203
ataagttgtgtaaccttgggaaata

SEQ ID NO: 334172 - DNA, 25 bp, Artificial
  probe
  misc_feature (1)..(25): SEQ ID NO: 2700; WAN024DLT; Start 93; Stop 117
ttcagaaggagaaattgtacttgtt

SEQ ID NO: 334173 - DNA, 25 bp, Artificial
  probe
  misc_feature (1)..(25): SEQ ID NO: 2700; WAN024DLT; Start 412; Stop 436
gtcgtatattgtccgctttcacttg

SEQ ID NO: 334174 - DNA, 25 bp, Artificial
  probe
  misc_feature (1)..(25): SEQ ID NO: 2700; WAN024DLT; Start 405; Stop 429
caaatgtgtcgtatattgtccgctt

SEQ ID NO: 334175 - DNA, 25 bp, Artificial
  probe
  misc_feature (1)..(25): SEQ ID NO: 2700; WAN024DLT; Start 173; Stop 197
aatttcataagttgtgtaaccttgg

SEQ ID NO: 334176 - DNA, 25 bp, Artificial
  probe
  misc_feature (1)..(25): SEQ ID NO: 2701; WAN024GOJ; Start 532; Stop 556
gctcttaacaaggttctctctggaa

SEQ ID NO: 334177 - DNA, 25 bp, Artificial
  probe
  misc_feature (1)..(25): SEQ ID NO: 2701; WAN024GOJ; Start 962; Stop 986
atttgagacgggaagaacagattat

SEQ ID NO: 334178 - DNA, 25 bp, Artificial
  probe
  misc_feature (1)..(25): SEQ ID NO: 2701; WAN024GOJ; Start 961; Stop 985
gatttgagacgggaagaacagatta

SEQ ID NO: 334179 - DNA, 25 bp, Artificial
  probe
  misc_feature (1)..(25): SEQ ID NO: 2701; WAN024GOJ; Start 1007; Stop 1031
tatcagcccttcttaactccctatc

SEQ ID NO: 334180 - DNA, 25 bp, Artificial
  probe
  misc_feature (1)..(25): SEQ ID NO: 2701; WAN024GOJ; Start 1006; Stop 1030
ctatcagcccttcttaactccctat

SEQ ID NO: 334181 - DNA, 25 bp, Artificial
  probe
  misc_feature (1)..(25): SEQ ID NO: 2701; WAN024GOJ; Start 130; Stop 154
ttaagtaagagcttggaggatcagg

SEQ ID NO: 334182 - DNA, 25 bp, Artificial
  probe
  misc_feature (1)..(25): SEQ ID NO: 2701; WAN024GOJ; Start 30; Stop 54
gacaggaggtaggatggaaagttta

SEQ ID NO: 334183 - DNA, 25 bp, Artificial
  probe
  misc_feature (1)..(25): SEQ ID NO: 2701; WAN024GOJ; Start 955; Stop 979
tttgatgatttgagacgggaagaac

SEQ ID NO: 334184 - DNA, 25 bp, Artificial
  probe
  misc_feature (1)..(25): SEQ ID NO: 2701; WAN024GOJ; Start 954; Stop 978
ctttgatgatttgagacgggaagaa

SEQ ID NO: 334185 - DNA, 25 bp, Artificial
  probe
  misc_feature (1)..(25): SEQ ID NO: 2701; WAN024GOJ; Start 32; Stop 56
caggaggtaggatggaaagtttact

SEQ ID NO: 334186 - DNA, 25 bp, Artificial
  probe
  misc_feature (1)..(25): SEQ ID NO: 2701; WAN024GOJ; Start 952; Stop 976
ttctttgatgatttgagacgggaag

SEQ ID NO: 334187 - DNA, 25 bp, Artificial
  probe
  misc_feature (1)..(25): SEQ ID NO: 2701; WAN024GOJ; Start 951; Stop 975
cttctttgatgatttgagacgggaa

SEQ ID NO: 334188 - DNA, 25 bp, Artificial
  probe
  misc_feature (1)..(25): SEQ ID NO: 2701; WAN024GOJ; Start 1178; Stop 1202
aattattaaaccgtcgtaccatagc

SEQ ID NO: 334189 - DNA, 25 bp, Artificial
  probe
  misc_feature (1)..(25): SEQ ID NO: 2701; WAN024GOJ; Start 1174; Stop 1198
gatgaattattaaaccgtcgtacca

SEQ ID NO: 334190 - DNA, 25 bp, Artificial
  probe
  misc_feature (1)..(25): SEQ ID NO: 2701; WAN024GOJ; Start 1173; Stop 1197
tgatgaattattaaaccgtcgtacc

SEQ ID NO: 334191 - DNA, 25 bp, Artificial
  probe
  misc_feature (1)..(25): SEQ ID NO: 2701; WAN024GOJ; Start 129; Stop 153
cttaagtaagagcttggaggatcag

SEQ ID NO: 334192 - DNA, 25 bp, Artificial
  probe
  misc_feature (1)..(25): SEQ ID NO: 2701; WAN024GOJ; Start 31; Stop 55
acaggaggtaggatggaaagtttac

SEQ ID NO: 334193 - DNA, 25 bp, Artificial
  probe
  misc_feature (1)..(25): SEQ ID NO: 2701; WAN024GOJ; Start 733; Stop 757
tctaagtttccactggcagattatt

SEQ ID NO: 334194 - DNA, 25 bp, Artificial
  probe
  misc_feature (1)..(25): SEQ ID NO: 2701; WAN024GOJ; Start 306; Stop 330
aatgacagataatctcctccaaact

SEQ ID NO: 334195 - DNA, 25 bp, Artificial
  probe
  misc_feature (1)..(25): SEQ ID NO: 2701; WAN024GOJ; Start 732; Stop 756
ctctaagtttccactggcagattat

SEQ ID NO: 334196 - DNA, 25 bp, Artificial
  probe
  misc_feature (1)..(25): SEQ ID NO: 2701; WAN024GOJ; Start 325; Stop 349
caaactagagacaagacagaccaac

SEQ ID NO: 334197 - DNA, 25 bp, Artificial
  probe
  misc_feature (1)..(25): SEQ ID NO: 2701; WAN024GOJ; Start 308; Stop 332
tgacagataatctcctccaaactag

SEQ ID NO: 334198 - DNA, 25 bp, Artificial
  probe
  misc_feature (1)..(25): SEQ ID NO: 2701; WAN024GOJ; Start 465; Stop 489
ttctaaacaactggagtctgtcaat

SEQ ID NO: 334199 - DNA, 25 bp, Artificial
  probe
  misc_feature (1)..(25): SEQ ID NO: 2701; WAN024GOJ; Start 303; Stop 327
agaaatgacagataatctcctccaa

SEQ ID NO: 334200 - DNA, 25 bp, Artificial
  probe
  misc_feature (1)..(25): SEQ ID NO: 2701; WAN024GOJ; Start 302; Stop 326
aagaaatgacagataatctcctcca

SEQ ID NO: 334201 - DNA, 25 bp, Artificial
  probe
  misc_feature (1)..(25): SEQ ID NO: 2701; WAN024GOJ; Start 34; Stop 58
ggaggtaggatggaaagtttactta

SEQ ID NO: 334202 - DNA, 25 bp, Artificial
  probe
  misc_feature (1)..(25): SEQ ID NO: 2701; WAN024GOJ; Start 464; Stop 488
tttctaaacaactggagtctgtcaa

SEQ ID NO: 334203 - DNA, 25 bp, Artificial
  probe
  misc_feature (1)..(25): SEQ ID NO: 2701; WAN024GOJ; Start 309; Stop 333
gacagataatctcctccaaactaga

SEQ ID NO: 334204 - DNA, 25 bp, Artificial
  probe
  misc_feature (1)..(25): SEQ ID NO: 2701; WAN024GOJ; Start 466; Stop 490
tctaaacaactggagtctgtcaatc

SEQ ID NO: 334205 - DNA, 25 bp, Artificial
  probe
  misc_feature (1)..(25): SEQ ID NO: 2701; WAN024GOJ; Start 301; Stop 325
caagaaatgacagataatctcctcc

SEQ ID NO: 334206 - DNA, 25 bp, Artificial
  probe
  misc_feature (1)..(25): SEQ ID NO: 2701; WAN024GOJ; Start 33; Stop 57
aggaggtaggatggaaagtttactt

SEQ ID NO: 334207 - DNA, 25 bp, Artificial
  probe
  misc_feature (1)..(25): SEQ ID NO: 2701; WAN024GOJ; Start 959; Stop 983
atgatttgagacgggaagaacagat

SEQ ID NO: 334208 - DNA, 25 bp, Artificial
  probe
  misc_feature (1)..(25): SEQ ID NO: 2701; WAN024GOJ; Start 736; Stop 760
aagtttccactggcagattattacc

SEQ ID NO: 334209 - DNA, 25 bp, Artificial
  probe
  misc_feature (1)..(25): SEQ ID NO: 2702; WAN024G47; Start 687; Stop 711
attgatattagcaggtgtaggtgtt

SEQ ID NO: 334210 - DNA, 25 bp, Artificial
  probe
  misc_feature (1)..(25): SEQ ID NO: 2702; WAN024G47; Start 686; Stop 710
cattgatattagcaggtgtaggtgt

SEQ ID NO: 334211 - DNA, 25 bp, Artificial
  probe
  misc_feature (1)..(25): SEQ ID NO: 2702; WAN024G47; Start 1100; Stop 1124
aaggtcttgctgtggttatattatt

SEQ ID NO: 334212 - DNA, 25 bp, Artificial
  probe
  misc_feature (1)..(25): SEQ ID NO: 2702; WAN024G47; Start 684; Stop 708
aacattgatattagcaggtgtaggt

SEQ ID NO: 334213 - DNA, 25 bp, Artificial
  probe
  misc_feature (1)..(25): SEQ ID NO: 2702; WAN024G47; Start 685; Stop 709
acattgatattagcaggtgtaggtg

SEQ ID NO: 334214 - DNA, 25 bp, Artificial
  probe
  misc_feature (1)..(25): SEQ ID NO: 2702; WAN024G47; Start 681; Stop 705
aggaacattgatattagcaggtgta

SEQ ID NO: 334215 - DNA, 25 bp, Artificial
  probe
  misc_feature (1)..(25): SEQ ID NO: 2702; WAN024G47; Start 683; Stop 707
gaacattgatattagcaggtgtagg

SEQ ID NO: 334216 - DNA, 25 bp, Artificial
  probe
  misc_feature (1)..(25): SEQ ID NO: 2702; WAN024G47; Start 682; Stop 706
ggaacattgatattagcaggtgtag

SEQ ID NO: 334217 - DNA, 25 bp, Artificial
  probe
  misc_feature (1)..(25): SEQ ID NO: 2702; WAN024G47; Start 680; Stop 704
caggaacattgatattagcaggtgt

SEQ ID NO: 334218 - DNA, 25 bp, Artificial
  probe
  misc_feature (1)..(25): SEQ ID NO: 2702; WAN024G47; Start 679; Stop 703
gcaggaacattgatattagcaggtg

SEQ ID NO: 334219 - DNA, 25 bp, Artificial
  probe
  misc_feature (1)..(25): SEQ ID NO: 2702; WAN024G47; Start 442; Stop 466
tatagtttacggtcagagtttggtc

SEQ ID NO: 334220 - DNA, 25 bp, Artificial
  probe
  misc_feature (1)..(25): SEQ ID NO: 2702; WAN024G47; Start 688; Stop 712
ttgatattagcaggtgtaggtgttt

SEQ ID NO: 334221 - DNA, 25 bp, Artificial
  probe
  misc_feature (1)..(25): SEQ ID NO: 2702; WAN024G47; Start 757; Stop 781
atatctcaatcaacgacggaaatca

SEQ ID NO: 334222 - DNA, 25 bp, Artificial
  probe
  misc_feature (1)..(25): SEQ ID NO: 2702; WAN024G47; Start 756; Stop 780
aatatctcaatcaacgacggaaatc

SEQ ID NO: 334223 - DNA, 25 bp, Artificial
  probe
  misc_feature (1)..(25): SEQ ID NO: 2702; WAN024G47; Start 441; Stop 465
atatagtttacggtcagagtttggt

SEQ ID NO: 334224 - DNA, 25 bp, Artificial
  probe
  misc_feature (1)..(25): SEQ ID NO: 2702; WAN024G47; Start 916; Stop 940
ttatacataggcgaatatgcgtatt

SEQ ID NO: 334225 - DNA, 25 bp, Artificial
  probe
  misc_feature (1)..(25): SEQ ID NO: 2702; WAN024G47; Start 755; Stop 779
aaatatctcaatcaacgacggaaat

SEQ ID NO: 334226 - DNA, 25 bp, Artificial
  probe
  misc_feature (1)..(25): SEQ ID NO: 2702; WAN024G47; Start 818; Stop 842
tatggaattggcgtggatatgaaat

SEQ ID NO: 334227 - DNA, 25 bp, Artificial
  probe
  misc_feature (1)..(25): SEQ ID NO: 2702; WAN024G47; Start 758; Stop 782
tatctcaatcaacgacggaaatcac

SEQ ID NO: 334228 - DNA, 25 bp, Artificial
  probe
  misc_feature (1)..(25): SEQ ID NO: 2702; WAN024G47; Start 133; Stop 157
agactaccaatttcaattccaggag

SEQ ID NO: 334229 - DNA, 25 bp, Artificial
  probe
  misc_feature (1)..(25): SEQ ID NO: 2702; WAN024G47; Start 817; Stop 841
atatggaattggcgtggatatgaaa

SEQ ID NO: 334230 - DNA, 25 bp, Artificial
  probe
  misc_feature (1)..(25): SEQ ID NO: 2702; WAN024G47; Start 132; Stop 156
tagactaccaatttcaattccagga

SEQ ID NO: 334231 - DNA, 25 bp, Artificial
  probe
  misc_feature (1)..(25): SEQ ID NO: 2702; WAN024G47; Start 291; Stop 315
tggatgtgttctgtcaaataacgat

SEQ ID NO: 334232 - DNA, 25 bp, Artificial
  probe
  misc_feature (1)..(25): SEQ ID NO: 2702; WAN024G47; Start 292; Stop 316
ggatgtgttctgtcaaataacgata

SEQ ID NO: 334233 - DNA, 25 bp, Artificial
  probe
  misc_feature (1)..(25): SEQ ID NO: 2702; WAN024G47; Start 187; Stop 211
gggctatttataggtattgggaatg

SEQ ID NO: 334234 - DNA, 25 bp, Artificial
  probe
  misc_feature (1)..(25): SEQ ID NO: 2702; WAN024G47; Start 131; Stop 155
gtagactaccaatttcaattccagg

SEQ ID NO: 334235 - DNA, 25 bp, Artificial
  probe
  misc_feature (1)..(25): SEQ ID NO: 2702; WAN024G47; Start 892; Stop 916
ttaggaggaggatttggaacagttt

SEQ ID NO: 334236 - DNA, 25 bp, Artificial
  probe
  misc_feature (1)..(25): SEQ ID NO: 2702; WAN024G47; Start 891; Stop 915
tttaggaggaggatttggaacagtt

SEQ ID NO: 334237 - DNA, 25 bp, Artificial
  probe
  misc_feature (1)..(25): SEQ ID NO: 2702; WAN024G47; Start 290; Stop 314
ttggatgtgttctgtcaaataacga

SEQ ID NO: 334238 - DNA, 25 bp, Artificial
  probe
  misc_feature (1)..(25): SEQ ID NO: 2702; WAN024G47; Start 821; Stop 845
ggaattggcgtggatatgaaatgta

SEQ ID NO: 334239 - DNA, 25 bp, Artificial
  probe
  misc_feature (1)..(25): SEQ ID NO: 2702; WAN024G47; Start 830; Stop 854
gtggatatgaaatgtactctgcctt

SEQ ID NO: 334240 - DNA, 25 bp, Artificial
  probe
  misc_feature (1)..(25): SEQ ID NO: 2702; WAN024G47; Start 822; Stop 846
gaattggcgtggatatgaaatgtac

SEQ ID NO: 334241 - DNA, 25 bp, Artificial
  probe
  misc_feature (1)..(25): SEQ ID NO: 2702; WAN024G47; Start 831; Stop 855
tggatatgaaatgtactctgcctta

SEQ ID NO: 334242 - DNA, 25 bp, Artificial
  probe
  misc_feature (1)..(25): SEQ ID NO: 2703; WAN024EZP; Start 47; Stop 71
tgtgttatacttgttgttcaaccac

SEQ ID NO: 334243 - DNA, 25 bp, Artificial
  probe
  misc_feature (1)..(25): SEQ ID NO: 2703; WAN024EZP; Start 119; Stop 143
cgaacaaagggaaatcaaatagaga

SEQ ID NO: 334244 - DNA, 25 bp, Artificial
  probe
  misc_feature (1)..(25): SEQ ID NO: 2703; WAN024EZP; Start 118; Stop 142
gcgaacaaagggaaatcaaatagag

SEQ ID NO: 334245 - DNA, 25 bp, Artificial
  probe
  misc_feature (1)..(25): SEQ ID NO: 2703; WAN024EZP; Start 115; Stop 139
aaggcgaacaaagggaaatcaaata

SEQ ID NO: 334246 - DNA, 25 bp, Artificial
  probe
  misc_feature (1)..(25): SEQ ID NO: 2703; WAN024EZP; Start 167; Stop 191
ttcctcaaactatccacactgaaat

SEQ ID NO: 334247 - DNA, 25 bp, Artificial
  probe
  misc_feature (1)..(25): SEQ ID NO: 2703; WAN024EZP; Start 127; Stop 151
gggaaatcaaatagagaaattgcct

SEQ ID NO: 334248 - DNA, 25 bp, Artificial
  probe
  misc_feature (1)..(25): SEQ ID NO: 2703; WAN024EZP; Start 126; Stop 150
agggaaatcaaatagagaaattgcc

SEQ ID NO: 334249 - DNA, 25 bp, Artificial
  probe
  misc_feature (1)..(25): SEQ ID NO: 2703; WAN024EZP; Start 166; Stop 190
gttcctcaaactatccacactgaaa

SEQ ID NO: 334250 - DNA, 25 bp, Artificial
  probe
  misc_feature (1)..(25): SEQ ID NO: 2703; WAN024EZP; Start 117; Stop 141
ggcgaacaaagggaaatcaaataga

SEQ ID NO: 334251 - DNA, 25 bp, Artificial
  probe
  misc_feature (1)..(25): SEQ ID NO: 2703; WAN024EZP; Start 116; Stop 140
aggcgaacaaagggaaatcaaatag

SEQ ID NO: 334252 - DNA, 25 bp, Artificial
  probe
  misc_feature (1)..(25): SEQ ID NO: 2703; WAN024EZP; Start 114; Stop 138
aaaggcgaacaaagggaaatcaaat

SEQ ID NO: 334253 - DNA, 25 bp, Artificial
  probe
  misc_feature (1)..(25): SEQ ID NO: 2703; WAN024EZP; Start 128; Stop 152
ggaaatcaaatagagaaattgcctc

SEQ ID NO: 334254 - DNA, 25 bp, Artificial
  probe
  misc_feature (1)..(25): SEQ ID NO: 2703; WAN024EZP; Start 125; Stop 149
aagggaaatcaaatagagaaattgc

SEQ ID NO: 334255 - DNA, 25 bp, Artificial
  probe
  misc_feature (1)..(25): SEQ ID NO: 2703; WAN024EZP; Start 120; Stop 144
gaacaaagggaaatcaaatagagaa

SEQ ID NO: 334256 - DNA, 25 bp, Artificial
  probe
  misc_feature (1)..(25): SEQ ID NO: 2703; WAN024EZP; Start 121; Stop 145
aacaaagggaaatcaaatagagaaa

SEQ ID NO: 334257 - DNA, 25 bp, Artificial
  probe
  misc_feature (1)..(25): SEQ ID NO: 2703; WAN024EZP; Start 5; Stop 29
ttcaactagccgatagctcttgtag

SEQ ID NO: 334258 - DNA, 25 bp, Artificial
  probe
  misc_feature (1)..(25): SEQ ID NO: 2703; WAN024EZP; Start 14; Stop 38
ccgatagctcttgtaggcataagaa

SEQ ID NO: 334259 - DNA, 25 bp, Artificial
  probe
  misc_feature (1)..(25): SEQ ID NO: 2703; WAN024EZP; Start 122; Stop 146
acaaagggaaatcaaatagagaaat

SEQ ID NO: 334260 - DNA, 25 bp, Artificial
  probe
  misc_feature (1)..(25): SEQ ID NO: 2703; WAN024EZP; Start 4; Stop 28
gttcaactagccgatagctcttgta

SEQ ID NO: 334261 - DNA, 25 bp, Artificial
  probe
  misc_feature (1)..(25): SEQ ID NO: 2703; WAN024EZP; Start 263; Stop 287
aacagtcttatgaaaacaatcgcaa

SEQ ID NO: 334262 - DNA, 25 bp, Artificial
  probe
  misc_feature (1)..(25): SEQ ID NO: 2703; WAN024EZP; Start 104; Stop 128
ttatactacaaaaggcgaacaaagg

SEQ ID NO: 334263 - DNA, 25 bp, Artificial
  probe
  misc_feature (1)..(25): SEQ ID NO: 2703; WAN024EZP; Start 101; Stop 125
ccattatactacaaaaggcgaacaa

SEQ ID NO: 334264 - DNA, 25 bp, Artificial
  probe
  misc_feature (1)..(25): SEQ ID NO: 2703; WAN024EZP; Start 100; Stop 124
accattatactacaaaaggcgaaca

SEQ ID NO: 334265 - DNA, 25 bp, Artificial
  probe
  misc_feature (1)..(25): SEQ ID NO: 2703; WAN024EZP; Start 262; Stop 286
caacagtcttatgaaaacaatcgca

SEQ ID NO: 334266 - DNA, 25 bp, Artificial
  probe
  misc_feature (1)..(25): SEQ ID NO: 2703; WAN024EZP; Start 264; Stop 288
acagtcttatgaaaacaatcgcaag

SEQ ID NO: 334267 - DNA, 25 bp, Artificial
  probe
  misc_feature (1)..(25): SEQ ID NO: 2703; WAN024EZP; Start 105; Stop 129
tatactacaaaaggcgaacaaaggg

SEQ ID NO: 334268 - DNA, 25 bp, Artificial
  probe
  misc_feature (1)..(25): SEQ ID NO: 2703; WAN024EZP; Start 261; Stop 285
tcaacagtcttatgaaaacaatcgc

SEQ ID NO: 334269 - DNA, 25 bp, Artificial
  probe
  misc_feature (1)..(25): SEQ ID NO: 2703; WAN024EZP; Start 163; Stop 187
aaagttcctcaaactatccacactg

SEQ ID NO: 334270 - DNA, 25 bp, Artificial
  probe
  misc_feature (1)..(25): SEQ ID NO: 2703; WAN024EZP; Start 258; Stop 282
tgctcaacagtcttatgaaaacaat

SEQ ID NO: 334271 - DNA, 25 bp, Artificial
  probe
  misc_feature (1)..(25): SEQ ID NO: 2703; WAN024EZP; Start 257; Stop 281
atgctcaacagtcttatgaaaacaa

SEQ ID NO: 334272 - DNA, 25 bp, Artificial
  probe
  misc_feature (1)..(25): SEQ ID NO: 2703; WAN024EZP; Start 265; Stop 289
cagtcttatgaaaacaatcgcaagc

SEQ ID NO: 334273 - DNA, 25 bp, Artificial
  probe
  misc_feature (1)..(25): SEQ ID NO: 2703; WAN024EZP; Start 15; Stop 39
cgatagctcttgtaggcataagaaa

SEQ ID NO: 334274 - DNA, 25 bp, Artificial
  probe
  misc_feature (1)..(25): SEQ ID NO: 2703; WAN024EZP; Start 259; Stop 283
gctcaacagtcttatgaaaacaatc

SEQ ID NO: 334275 - DNA, 25 bp, Artificial
  probe
  misc_feature (1)..(25): SEQ ID NO: 2704; WAN024CZH; Start 606; Stop 630
cttgattatcggagaaattcgtgac

SEQ ID NO: 334276 - DNA, 25 bp, Artificial
  probe
  misc_feature (1)..(25): SEQ ID NO: 2704; WAN024CZH; Start 607; Stop 631
ttgattatcggagaaattcgtgaca

SEQ ID NO: 334277 - DNA, 25 bp, Artificial
  probe
  misc_feature (1)..(25): SEQ ID NO: 2704; WAN024CZH; Start 605; Stop 629
tcttgattatcggagaaattcgtga

SEQ ID NO: 334278 - DNA, 25 bp, Artificial
  probe
  misc_feature (1)..(25): SEQ ID NO: 2704; WAN024CZH; Start 604; Stop 628
ctcttgattatcggagaaattcgtg

SEQ ID NO: 334279 - DNA, 25 bp, Artificial
  probe
  misc_feature (1)..(25): SEQ ID NO: 2704; WAN024CZH; Start 171; Stop 195
ctttaagtttgtggcgggtatgaat

SEQ ID NO: 334280 - DNA, 25 bp, Artificial
  probe
  misc_feature (1)..(25): SEQ ID NO: 2704; WAN024CZH; Start 172; Stop 196
tttaagtttgtggcgggtatgaatg

SEQ ID NO: 334281 - DNA, 25 bp, Artificial
  probe
  misc_feature (1)..(25): SEQ ID NO: 2704; WAN024CZH; Start 8; Stop 32
aagaaattgcacaagaaatcattcg

SEQ ID NO: 334282 - DNA, 25 bp, Artificial
  probe
  misc_feature (1)..(25): SEQ ID NO: 2704; WAN024CZH; Start 173; Stop 197
ttaagtttgtggcgggtatgaatgt

SEQ ID NO: 334283 - DNA, 25 bp, Artificial
  probe
  misc_feature (1)..(25): SEQ ID NO: 2704; WAN024CZH; Start 3; Stop 27
ggttcaagaaattgcacaagaaatc

SEQ ID NO: 334284 - DNA, 25 bp, Artificial
  probe
  misc_feature (1)..(25): SEQ ID NO: 2704; WAN024CZH; Start 2; Stop 26
tggttcaagaaattgcacaagaaat

SEQ ID NO: 334285 - DNA, 25 bp, Artificial
  probe
  misc_feature (1)..(25): SEQ ID NO: 2704; WAN024CZH; Start 1; Stop 25
atggttcaagaaattgcacaagaaa

SEQ ID NO: 334286 - DNA, 25 bp, Artificial
  probe
  misc_feature (1)..(25): SEQ ID NO: 2704; WAN024CZH; Start 4; Stop 28
gttcaagaaattgcacaagaaatca

SEQ ID NO: 334287 - DNA, 25 bp, Artificial
  probe
  misc_feature (1)..(25): SEQ ID NO: 2704; WAN024CZH; Start 6; Stop 30
tcaagaaattgcacaagaaatcatt

SEQ ID NO: 334288 - DNA, 25 bp, Artificial
  probe
  misc_feature (1)..(25): SEQ ID NO: 2704; WAN024CZH; Start 5; Stop 29
ttcaagaaattgcacaagaaatcat

SEQ ID NO: 334289 - DNA, 25 bp, Artificial
  probe
  misc_feature (1)..(25): SEQ ID NO: 2704; WAN024CZH; Start 7; Stop 31
caagaaattgcacaagaaatcattc

SEQ ID NO: 334290 - DNA, 25 bp, Artificial
  probe
  misc_feature (1)..(25): SEQ ID NO: 2704; WAN024CZH; Start 773; Stop 797
aaggagtctgctaccagagattaat

SEQ ID NO: 334291 - DNA, 25 bp, Artificial
  probe
  misc_feature (1)..(25): SEQ ID NO: 2704; WAN024CZH; Start 170; Stop 194
actttaagtttgtggcgggtatgaa

SEQ ID NO: 334292 - DNA, 25 bp, Artificial
  probe
  misc_feature (1)..(25): SEQ ID NO: 2704; WAN024CZH; Start 772; Stop 796
caaggagtctgctaccagagattaa

SEQ ID NO: 334293 - DNA, 25 bp, Artificial
  probe
  misc_feature (1)..(25): SEQ ID NO: 2704; WAN024CZH; Start 566; Stop 590
aaaatctaatcaaactttccttgcg

SEQ ID NO: 334294 - DNA, 25 bp, Artificial
  probe
  misc_feature (1)..(25): SEQ ID NO: 2704; WAN024CZH; Start 592; Stop 616
catcgaccagatctcttgattatcg

SEQ ID NO: 334295 - DNA, 25 bp, Artificial
  probe
  misc_feature (1)..(25): SEQ ID NO: 2704; WAN024CZH; Start 77; Stop 101
agttagacgcctatgagcttcatat

SEQ ID NO: 334296 - DNA, 25 bp, Artificial
  probe
  misc_feature (1)..(25): SEQ ID NO: 2704; WAN024CZH; Start 76; Stop 100
aagttagacgcctatgagcttcata

SEQ ID NO: 334297 - DNA, 25 bp, Artificial
  probe
  misc_feature (1)..(25): SEQ ID NO: 2704; WAN024CZH; Start 593; Stop 617
atcgaccagatctcttgattatcgg

SEQ ID NO: 334298 - DNA, 25 bp, Artificial
  probe
  misc_feature (1)..(25): SEQ ID NO: 2704; WAN024CZH; Start 603; Stop 627
tctcttgattatcggagaaattcgt

SEQ ID NO: 334299 - DNA, 25 bp, Artificial
  probe
  misc_feature (1)..(25): SEQ ID NO: 2704; WAN024CZH; Start 602; Stop 626
atctcttgattatcggagaaattcg

SEQ ID NO: 334300 - DNA, 25 bp, Artificial
  probe
  misc_feature (1)..(25): SEQ ID NO: 2704; WAN024CZH; Start 595; Stop 619
cgaccagatctcttgattatcggag

SEQ ID NO: 334301 - DNA, 25 bp, Artificial
  probe
  misc_feature (1)..(25): SEQ ID NO: 2704; WAN024CZH; Start 169; Stop 193
cactttaagtttgtggcgggtatga

SEQ ID NO: 334302 - DNA, 25 bp, Artificial
  probe
  misc_feature (1)..(25): SEQ ID NO: 2704; WAN024CZH; Start 168; Stop 192
tcactttaagtttgtggcgggtatg

SEQ ID NO: 334303 - DNA, 25 bp, Artificial
  probe
  misc_feature (1)..(25): SEQ ID NO: 2704; WAN024CZH; Start 167; Stop 191
gtcactttaagtttgtggcgggtat

SEQ ID NO: 334304 - DNA, 25 bp, Artificial
  probe
  misc_feature (1)..(25): SEQ ID NO: 2704; WAN024CZH; Start 597; Stop 621
accagatctcttgattatcggagaa

SEQ ID NO: 334305 - DNA, 25 bp, Artificial
  probe
  misc_feature (1)..(25): SEQ ID NO: 2704; WAN024CZH; Start 78; Stop 102
gttagacgcctatgagcttcatatg

SEQ ID NO: 334306 - DNA, 25 bp, Artificial
  probe
  misc_feature (1)..(25): SEQ ID NO: 2704; WAN024CZH; Start 594; Stop 618
tcgaccagatctcttgattatcgga

SEQ ID NO: 334307 - DNA, 25 bp, Artificial
  probe
  misc_feature (1)..(25): SEQ ID NO: 2704; WAN024CZH; Start 596; Stop 620
gaccagatctcttgattatcggaga

SEQ ID NO: 334308 - DNA, 25 bp, Artificial
  probe
  misc_feature (1)..(25): SEQ ID NO: 2705; WAN024FZR; Start 184; Stop 208
ataattccgatgacaatggcaatag

SEQ ID NO: 334309 - DNA, 25 bp, Artificial
  probe
  misc_feature (1)..(25): SEQ ID NO: 2705; WAN024FZR; Start 183; Stop 207
gataattccgatgacaatggcaata

SEQ ID NO: 334310 - DNA, 25 bp, Artificial
  probe
  misc_feature (1)..(25): SEQ ID NO: 2705; WAN024FZR; Start 176; Stop 200
taccgaagataattccgatgacaat

SEQ ID NO: 334311 - DNA, 25 bp, Artificial
  probe
  misc_feature (1)..(25): SEQ ID NO: 2705; WAN024FZR; Start 175; Stop 199
ataccgaagataattccgatgacaa

SEQ ID NO: 334312 - DNA, 25 bp, Artificial
  probe
  misc_feature (1)..(25): SEQ ID NO: 2705; WAN024FZR; Start 172; Stop 196
aacataccgaagataattccgatga

SEQ ID NO: 334313 - DNA, 25 bp, Artificial
  probe
  misc_feature (1)..(25): SEQ ID NO: 2705; WAN024FZR; Start 182; Stop 206
agataattccgatgacaatggcaat

SEQ ID NO: 334314 - DNA, 25 bp, Artificial
  probe
  misc_feature (1)..(25): SEQ ID NO: 2705; WAN024FZR; Start 174; Stop 198
cataccgaagataattccgatgaca

SEQ ID NO: 334315 - DNA, 25 bp, Artificial
  probe
  misc_feature (1)..(25): SEQ ID NO: 2705; WAN024FZR; Start 173; Stop 197
acataccgaagataattccgatgac

SEQ ID NO: 334316 - DNA, 25 bp, Artificial
  probe
  misc_feature (1)..(25): SEQ ID NO: 2705; WAN024FZR; Start 181; Stop 205
aagataattccgatgacaatggcaa

SEQ ID NO: 334317 - DNA, 25 bp, Artificial
  probe
  misc_feature (1)..(25): SEQ ID NO: 2705; WAN024FZR; Start 177; Stop 201
accgaagataattccgatgacaatg

SEQ ID NO: 334318 - DNA, 25 bp, Artificial
  probe
  misc_feature (1)..(25): SEQ ID NO: 2705; WAN024FZR; Start 180; Stop 204
gaagataattccgatgacaatggca

SEQ ID NO: 334319 - DNA, 25 bp, Artificial
  probe
  misc_feature (1)..(25): SEQ ID NO: 2705; WAN024FZR; Start 185; Stop 209
taattccgatgacaatggcaatagc

SEQ ID NO: 334320 - DNA, 25 bp, Artificial
  probe
  misc_feature (1)..(25): SEQ ID NO: 2705; WAN024FZR; Start 178; Stop 202
ccgaagataattccgatgacaatgg

SEQ ID NO: 334321 - DNA, 25 bp, Artificial
  probe
  misc_feature (1)..(25): SEQ ID NO: 2705; WAN024FZR; Start 224; Stop 248
ctagagcaagagtgataccaagacc

SEQ ID NO: 334322 - DNA, 25 bp, Artificial
  probe
  misc_feature (1)..(25): SEQ ID NO: 2705; WAN024FZR; Start 211; Stop 235
aatgagataagagctagagcaagag

SEQ ID NO: 334323 - DNA, 25 bp, Artificial
  probe
  misc_feature (1)..(25): SEQ ID NO: 2705; WAN024FZR; Start 217; Stop 241
ataagagctagagcaagagtgatac

SEQ ID NO: 334324 - DNA, 25 bp, Artificial
  probe
  misc_feature (1)..(25): SEQ ID NO: 2705; WAN024FZR; Start 215; Stop 239
agataagagctagagcaagagtgat

SEQ ID NO: 334325 - DNA, 25 bp, Artificial
  probe
  misc_feature (1)..(25): SEQ ID NO: 2705; WAN024FZR; Start 212; Stop 236
atgagataagagctagagcaagagt

SEQ ID NO: 334326 - DNA, 25 bp, Artificial
  probe
  misc_feature (1)..(25): SEQ ID NO: 2705; WAN024FZR; Start 216; Stop 240
gataagagctagagcaagagtgata

SEQ ID NO: 334327 - DNA, 25 bp, Artificial
  probe
  misc_feature (1)..(25): SEQ ID NO: 2705; WAN024FZR; Start 91; Stop 115
agaatcatcaatggaataccacgaa

SEQ ID NO: 334328 - DNA, 25 bp, Artificial
  probe
  misc_feature (1)..(25): SEQ ID NO: 2705; WAN024FZR; Start 90; Stop 114
aagaatcatcaatggaataccacga

SEQ ID NO: 334329 - DNA, 25 bp, Artificial
  probe
  misc_feature (1)..(25): SEQ ID NO: 2705; WAN024FZR; Start 89; Stop 113
caagaatcatcaatggaataccacg

SEQ ID NO: 334330 - DNA, 25 bp, Artificial
  probe
  misc_feature (1)..(25): SEQ ID NO: 2705; WAN024FZR; Start 96; Stop 120
catcaatggaataccacgaataacg

SEQ ID NO: 334331 - DNA, 25 bp, Artificial
  probe
  misc_feature (1)..(25): SEQ ID NO: 2705; WAN024FZR; Start 218; Stop 242
taagagctagagcaagagtgatacc

SEQ ID NO: 334332 - DNA, 25 bp, Artificial
  probe
  misc_feature (1)..(25): SEQ ID NO: 2705; WAN024FZR; Start 92; Stop 116
gaatcatcaatggaataccacgaat

SEQ ID NO: 334333 - DNA, 25 bp, Artificial
  probe
  misc_feature (1)..(25): SEQ ID NO: 2705; WAN024FZR; Start 88; Stop 112
gcaagaatcatcaatggaataccac

SEQ ID NO: 334334 - DNA, 25 bp, Artificial
  probe
  misc_feature (1)..(25): SEQ ID NO: 2705; WAN024FZR; Start 179; Stop 203
cgaagataattccgatgacaatggc

SEQ ID NO: 334335 - DNA, 25 bp, Artificial
  probe
  misc_feature (1)..(25): SEQ ID NO: 2705; WAN024FZR; Start 214; Stop 238
gagataagagctagagcaagagtga

SEQ ID NO: 334336 - DNA, 25 bp, Artificial
  probe
  misc_feature (1)..(25): SEQ ID NO: 2705; WAN024FZR; Start 95; Stop 119
tcatcaatggaataccacgaataac

SEQ ID NO: 334337 - DNA, 25 bp, Artificial
  probe
  misc_feature (1)..(25): SEQ ID NO: 2705; WAN024FZR; Start 86; Stop 110
ctgcaagaatcatcaatggaatacc

SEQ ID NO: 334338 - DNA, 25 bp, Artificial
  probe
  misc_feature (1)..(25): SEQ ID NO: 2705; WAN024FZR; Start 213; Stop 237
tgagataagagctagagcaagagtg

SEQ ID NO: 334339 - DNA, 25 bp, Artificial
  probe
  misc_feature (1)..(25): SEQ ID NO: 2705; WAN024FZR; Start 195; Stop 219
gacaatggcaatagcaaatgagata

SEQ ID NO: 334340 - DNA, 25 bp, Artificial
  probe
  misc_feature (1)..(25): SEQ ID NO: 2705; WAN024FZR; Start 85; Stop 109
gctgcaagaatcatcaatggaatac

SEQ ID NO: 334341 - DNA, 25 bp, Artificial
  probe
  misc_feature (1)..(25): SEQ ID NO: 2706; WAN024CA8; Start 684; Stop 708
accaacacgctatcaagaataacta

SEQ ID NO: 334342 - DNA, 25 bp, Artificial
  probe
  misc_feature (1)..(25): SEQ ID NO: 2706; WAN024CA8; Start 372; Stop 396
cggctatggattgattactcttcta

SEQ ID NO: 334343 - DNA, 25 bp, Artificial
  probe
  misc_feature (1)..(25): SEQ ID NO: 2706; WAN024CA8; Start 370; Stop 394
ttcggctatggattgattactcttc

SEQ ID NO: 334344 - DNA, 25 bp, Artificial
  probe
  misc_feature (1)..(25): SEQ ID NO: 2706; WAN024CA8; Start 685; Stop 709
ccaacacgctatcaagaataactaa

SEQ ID NO: 334345 - DNA, 25 bp, Artificial
  probe
  misc_feature (1)..(25): SEQ ID NO: 2706; WAN024CA8; Start 683; Stop 707
gaccaacacgctatcaagaataact

SEQ ID NO: 334346 - DNA, 25 bp, Artificial
  probe
  misc_feature (1)..(25): SEQ ID NO: 2706; WAN024CA8; Start 371; Stop 395
tcggctatggattgattactcttct

SEQ ID NO: 334347 - DNA, 25 bp, Artificial
  probe
  misc_feature (1)..(25): SEQ ID NO: 2706; WAN024CA8; Start 419; Stop 443
ttgccttctacttgatgtactactt

SEQ ID NO: 334348 - DNA, 25 bp, Artificial
  probe
  misc_feature (1)..(25): SEQ ID NO: 2706; WAN024CA8; Start 682; Stop 706
ggaccaacacgctatcaagaataac

SEQ ID NO: 334349 - DNA, 25 bp, Artificial
  probe
  misc_feature (1)..(25): SEQ ID NO: 2706; WAN024CA8; Start 686; Stop 710
caacacgctatcaagaataactaat

SEQ ID NO: 334350 - DNA, 25 bp, Artificial
  probe
  misc_feature (1)..(25): SEQ ID NO: 2706; WAN024CA8; Start 369; Stop 393
tttcggctatggattgattactctt

SEQ ID NO: 334351 - DNA, 25 bp, Artificial
  probe
  misc_feature (1)..(25): SEQ ID NO: 2706; WAN024CA8; Start 368; Stop 392
ctttcggctatggattgattactct

SEQ ID NO: 334352 - DNA, 25 bp, Artificial
  probe
  misc_feature (1)..(25): SEQ ID NO: 2706; WAN024CA8; Start 6; Stop 30
tctaagaggagttcctatgtctcaa

SEQ ID NO: 334353 - DNA, 25 bp, Artificial
  probe
  misc_feature (1)..(25): SEQ ID NO: 2706; WAN024CA8; Start 5; Stop 29
ttctaagaggagttcctatgtctca

SEQ ID NO: 334354 - DNA, 25 bp, Artificial
  probe
  misc_feature (1)..(25): SEQ ID NO: 2706; WAN024CA8; Start 4; Stop 28
gttctaagaggagttcctatgtctc

SEQ ID NO: 334355 - DNA, 25 bp, Artificial
  probe
  misc_feature (1)..(25): SEQ ID NO: 2706; WAN024CA8; Start 1; Stop 25
atggttctaagaggagttcctatgt

SEQ ID NO: 334356 - DNA, 25 bp, Artificial
  probe
  misc_feature (1)..(25): SEQ ID NO: 2706; WAN024CA8; Start 413; Stop 437
gtggatttgccttctacttgatgta

SEQ ID NO: 334357 - DNA, 25 bp, Artificial
  probe
  misc_feature (1)..(25): SEQ ID NO: 2706; WAN024CA8; Start 3; Stop 27
ggttctaagaggagttcctatgtct

SEQ ID NO: 334358 - DNA, 25 bp, Artificial
  probe
  misc_feature (1)..(25): SEQ ID NO: 2706; WAN024CA8; Start 2; Stop 26
tggttctaagaggagttcctatgtc

SEQ ID NO: 334359 - DNA, 25 bp, Artificial
  probe
  misc_feature (1)..(25): SEQ ID NO: 2706; WAN024CA8; Start 78; Stop 102
tgctacccaacaattcatcaaagat

SEQ ID NO: 334360 - DNA, 25 bp, Artificial
  probe
  misc_feature (1)..(25): SEQ ID NO: 2706; WAN024CA8; Start 525; Stop 549
tatgttcctttggttgcttgtcttc

SEQ ID NO: 334361 - DNA, 25 bp, Artificial
  probe
  misc_feature (1)..(25): SEQ ID NO: 2706; WAN024CA8; Start 524; Stop 548
ctatgttcctttggttgcttgtctt

SEQ ID NO: 334362 - DNA, 25 bp, Artificial
  probe
  misc_feature (1)..(25): SEQ ID NO: 2706; WAN024CA8; Start 522; Stop 546
ttctatgttcctttggttgcttgtc

SEQ ID NO: 334363 - DNA, 25 bp, Artificial
  probe
  misc_feature (1)..(25): SEQ ID NO: 2706; WAN024CA8; Start 521; Stop 545
cttctatgttcctttggttgcttgt

SEQ ID NO: 334364 - DNA, 25 bp, Artificial
  probe
  misc_feature (1)..(25): SEQ ID NO: 2706; WAN024CA8; Start 420; Stop 444
tgccttctacttgatgtactacttt

SEQ ID NO: 334365 - DNA, 25 bp, Artificial
  probe
  misc_feature (1)..(25): SEQ ID NO: 2706; WAN024CA8; Start 418; Stop 442
tttgccttctacttgatgtactact

SEQ ID NO: 334366 - DNA, 25 bp, Artificial
  probe
  misc_feature (1)..(25): SEQ ID NO: 2706; WAN024CA8; Start 415; Stop 439
ggatttgccttctacttgatgtact

SEQ ID NO: 334367 - DNA, 25 bp, Artificial
  probe
  misc_feature (1)..(25): SEQ ID NO: 2706; WAN024CA8; Start 421; Stop 445
gccttctacttgatgtactactttg

SEQ ID NO: 334368 - DNA, 25 bp, Artificial
  probe
  misc_feature (1)..(25): SEQ ID NO: 2706; WAN024CA8; Start 414; Stop 438
tggatttgccttctacttgatgtac

SEQ ID NO: 334369 - DNA, 25 bp, Artificial
  probe
  misc_feature (1)..(25): SEQ ID NO: 2706; WAN024CA8; Start 367; Stop 391
gctttcggctatggattgattactc

SEQ ID NO: 334370 - DNA, 25 bp, Artificial
  probe
  misc_feature (1)..(25): SEQ ID NO: 2706; WAN024CA8; Start 77; Stop 101
ttgctacccaacaattcatcaaaga

SEQ ID NO: 334371 - DNA, 25 bp, Artificial
  probe
  misc_feature (1)..(25): SEQ ID NO: 2706; WAN024CA8; Start 160; Stop 184
gaggagcaatctaaaggtacaactg

SEQ ID NO: 334372 - DNA, 25 bp, Artificial
  probe
  misc_feature (1)..(25): SEQ ID NO: 2706; WAN024CA8; Start 157; Stop 181
cttgaggagcaatctaaaggtacaa

SEQ ID NO: 334373 - DNA, 25 bp, Artificial
  probe
  misc_feature (1)..(25): SEQ ID NO: 2706; WAN024CA8; Start 158; Stop 182
ttgaggagcaatctaaaggtacaac

SEQ ID NO: 334374 - DNA, 25 bp, Artificial
  probe
  misc_feature (1)..(25): SEQ ID NO: 2707; WAN024B62; Start 476; Stop 500
agattatagttatggatgagccttc

SEQ ID NO: 334375 - DNA, 25 bp, Artificial
  probe
  misc_feature (1)..(25): SEQ ID NO: 2707; WAN024B62; Start 141; Stop 165
caatggactagctgtaaggtatgat

SEQ ID NO: 334376 - DNA, 25 bp, Artificial
  probe
  misc_feature (1)..(25): SEQ ID NO: 2707; WAN024B62; Start 139; Stop 163
atcaatggactagctgtaaggtatg

SEQ ID NO: 334377 - DNA, 25 bp, Artificial
  probe
  misc_feature (1)..(25): SEQ ID NO: 2707; WAN024B62; Start 137; Stop 161
caatcaatggactagctgtaaggta

SEQ ID NO: 334378 - DNA, 25 bp, Artificial
  probe
  misc_feature (1)..(25): SEQ ID NO: 2707; WAN024B62; Start 145; Stop 169
ggactagctgtaaggtatgataacg

SEQ ID NO: 334379 - DNA, 25 bp, Artificial
  probe
  misc_feature (1)..(25): SEQ ID NO: 2707; WAN024B62; Start 148; Stop 172
ctagctgtaaggtatgataacgcaa

SEQ ID NO: 334380 - DNA, 25 bp, Artificial
  probe
  misc_feature (1)..(25): SEQ ID NO: 2707; WAN024B62; Start 144; Stop 168
tggactagctgtaaggtatgataac

SEQ ID NO: 334381 - DNA, 25 bp, Artificial
  probe
  misc_feature (1)..(25): SEQ ID NO: 2707; WAN024B62; Start 135; Stop 159
ttcaatcaatggactagctgtaagg

SEQ ID NO: 334382 - DNA, 25 bp, Artificial
  probe
  misc_feature (1)..(25): SEQ ID NO: 2707; WAN024B62; Start 477; Stop 501
gattatagttatggatgagccttca

SEQ ID NO: 334383 - DNA, 25 bp, Artificial
  probe
  misc_feature (1)..(25): SEQ ID NO: 2707; WAN024B62; Start 1039; Stop 1063
ttcaacgagcttagattaggagtaa

SEQ ID NO: 334384 - DNA, 25 bp, Artificial
  probe
  misc_feature (1)..(25): SEQ ID NO: 2707; WAN024B62; Start 138; Stop 162
aatcaatggactagctgtaaggtat

SEQ ID NO: 334385 - DNA, 25 bp, Artificial
  probe
  misc_feature (1)..(25): SEQ ID NO: 2707; WAN024B62; Start 1038; Stop 1062
attcaacgagcttagattaggagta

SEQ ID NO: 334386 - DNA, 25 bp, Artificial
  probe
  misc_feature (1)..(25): SEQ ID NO: 2707; WAN024B62; Start 1037; Stop 1061
tattcaacgagcttagattaggagt

SEQ ID NO: 334387 - DNA, 25 bp, Artificial
  probe
  misc_feature (1)..(25): SEQ ID NO: 2707; WAN024B62; Start 1035; Stop 1059
agtattcaacgagcttagattagga

SEQ ID NO: 334388 - DNA, 25 bp, Artificial
  probe
  misc_feature (1)..(25): SEQ ID NO: 2707; WAN024B62; Start 146; Stop 170
gactagctgtaaggtatgataacgc

SEQ ID NO: 334389 - DNA, 25 bp, Artificial
  probe
  misc_feature (1)..(25): SEQ ID NO: 2707; WAN024B62; Start 605; Stop 629
tgatggacatagttgaccgtgtatt

SEQ ID NO: 334390 - DNA, 25 bp, Artificial
  probe
  misc_feature (1)..(25): SEQ ID NO: 2707; WAN024B62; Start 604; Stop 628
ttgatggacatagttgaccgtgtat

SEQ ID NO: 334391 - DNA, 25 bp, Artificial
  probe
  misc_feature (1)..(25): SEQ ID NO: 2707; WAN024B62; Start 1221; Stop 1245
accttcaagtggtatggattattcc

SEQ ID NO: 334392 - DNA, 25 bp, Artificial
  probe
  misc_feature (1)..(25): SEQ ID NO: 2707; WAN024B62; Start 1036; Stop 1060
gtattcaacgagcttagattaggag

SEQ ID NO: 334393 - DNA, 25 bp, Artificial
  probe
  misc_feature (1)..(25): SEQ ID NO: 2707; WAN024B62; Start 134; Stop 158
attcaatcaatggactagctgtaag

SEQ ID NO: 334394 - DNA, 25 bp, Artificial
  probe
  misc_feature (1)..(25): SEQ ID NO: 2707; WAN024B62; Start 1218; Stop 1242
cgaaccttcaagtggtatggattat

SEQ ID NO: 334395 - DNA, 25 bp, Artificial
  probe
  misc_feature (1)..(25): SEQ ID NO: 2707; WAN024B62; Start 147; Stop 171
actagctgtaaggtatgataacgca

SEQ ID NO: 334396 - DNA, 25 bp, Artificial
  probe
  misc_feature (1)..(25): SEQ ID NO: 2707; WAN024B62; Start 136; Stop 160
tcaatcaatggactagctgtaaggt

SEQ ID NO: 334397 - DNA, 25 bp, Artificial
  probe
  misc_feature (1)..(25): SEQ ID NO: 2707; WAN024B62; Start 156; Stop 180
aaggtatgataacgcaaagacaaag

SEQ ID NO: 334398 - DNA, 25 bp, Artificial
  probe
  misc_feature (1)..(25): SEQ ID NO: 2707; WAN024B62; Start 152; Stop 176
ctgtaaggtatgataacgcaaagac

SEQ ID NO: 334399 - DNA, 25 bp, Artificial
  probe
  misc_feature (1)..(25): SEQ ID NO: 2707; WAN024B62; Start 600; Stop 624
ttatttgatggacatagttgaccgt

SEQ ID NO: 334400 - DNA, 25 bp, Artificial
  probe
  misc_feature (1)..(25): SEQ ID NO: 2707; WAN024B62; Start 143; Stop 167
atggactagctgtaaggtatgataa

SEQ ID NO: 334401 - DNA, 25 bp, Artificial
  probe
  misc_feature (1)..(25): SEQ ID NO: 2707; WAN024B62; Start 142; Stop 166
aatggactagctgtaaggtatgata

SEQ ID NO: 334402 - DNA, 25 bp, Artificial
  probe
  misc_feature (1)..(25): SEQ ID NO: 2707; WAN024B62; Start 133; Stop 157
aattcaatcaatggactagctgtaa

SEQ ID NO: 334403 - DNA, 25 bp, Artificial
  probe
  misc_feature (1)..(25): SEQ ID NO: 2707; WAN024B62; Start 475; Stop 499
aagattatagttatggatgagcctt

SEQ ID NO: 334404 - DNA, 25 bp, Artificial
  probe
  misc_feature (1)..(25): SEQ ID NO: 2707; WAN024B62; Start 154; Stop 178
gtaaggtatgataacgcaaagacaa

SEQ ID NO: 334405 - DNA, 25 bp, Artificial
  probe
  misc_feature (1)..(25): SEQ ID NO: 2707; WAN024B62; Start 140; Stop 164
tcaatggactagctgtaaggtatga

SEQ ID NO: 334406 - DNA, 25 bp, Artificial
  probe
  misc_feature (1)..(25): SEQ ID NO: 2707; WAN024B62; Start 1220; Stop 1244
aaccttcaagtggtatggattattc

SEQ ID NO: 334407 - DNA, 25 bp, Artificial
  probe
  misc_feature (1)..(25): SEQ ID NO: 2708; WAN024FNG; Start 1; Stop 25
atggttgaatatattagtcgcaagt

SEQ ID NO: 334408 - DNA, 25 bp, Artificial
  probe
  misc_feature (1)..(25): SEQ ID NO: 2708; WAN024FNG; Start 287; Stop 311
attggtttgttcagcagaaattaat

SEQ ID NO: 334409 - DNA, 25 bp, Artificial
  probe
  misc_feature (1)..(25): SEQ ID NO: 2708; WAN024FNG; Start 2; Stop 26
tggttgaatatattagtcgcaagta

SEQ ID NO: 334410 - DNA, 25 bp, Artificial
  probe
  misc_feature (1)..(25): SEQ ID NO: 2708; WAN024FNG; Start 33; Stop 57
gacagaagaggaatttcaagcggaa

SEQ ID NO: 334411 - DNA, 25 bp, Artificial
  probe
  misc_feature (1)..(25): SEQ ID NO: 2708; WAN024FNG; Start 26; Stop 50
atttcttgacagaagaggaatttca

SEQ ID NO: 334412 - DNA, 25 bp, Artificial
  probe
  misc_feature (1)..(25): SEQ ID NO: 2708; WAN024FNG; Start 27; Stop 51
tttcttgacagaagaggaatttcaa

SEQ ID NO: 334413 - DNA, 25 bp, Artificial
  probe
  misc_feature (1)..(25): SEQ ID NO: 2708; WAN024FNG; Start 23; Stop 47
agtatttcttgacagaagaggaatt

SEQ ID NO: 334414 - DNA, 25 bp, Artificial
  probe
  misc_feature (1)..(25): SEQ ID NO: 2708; WAN024FNG; Start 22; Stop 46
aagtatttcttgacagaagaggaat

SEQ ID NO: 334415 - DNA, 25 bp, Artificial
  probe
  misc_feature (1)..(25): SEQ ID NO: 2708; WAN024FNG; Start 3; Stop 27
ggttgaatatattagtcgcaagtat

SEQ ID NO: 334416 - DNA, 25 bp, Artificial
  probe
  misc_feature (1)..(25): SEQ ID NO: 2708; WAN024FNG; Start 15; Stop 39
tagtcgcaagtatttcttgacagaa

SEQ ID NO: 334417 - DNA, 25 bp, Artificial
  probe
  misc_feature (1)..(25): SEQ ID NO: 2708; WAN024FNG; Start 14; Stop 38
ttagtcgcaagtatttcttgacaga

SEQ ID NO: 334418 - DNA, 25 bp, Artificial
  probe
  misc_feature (1)..(25): SEQ ID NO: 2708; WAN024FNG; Start 13; Stop 37
attagtcgcaagtatttcttgacag

SEQ ID NO: 334419 - DNA, 25 bp, Artificial
  probe
  misc_feature (1)..(25): SEQ ID NO: 2708; WAN024FNG; Start 34; Stop 58
acagaagaggaatttcaagcggaaa

SEQ ID NO: 334420 - DNA, 25 bp, Artificial
  probe
  misc_feature (1)..(25): SEQ ID NO: 2708; WAN024FNG; Start 24; Stop 48
gtatttcttgacagaagaggaattt

SEQ ID NO: 334421 - DNA, 25 bp, Artificial
  probe
  misc_feature (1)..(25): SEQ ID NO: 2708; WAN024FNG; Start 20; Stop 44
gcaagtatttcttgacagaagagga

SEQ ID NO: 334422 - DNA, 25 bp, Artificial
  probe
  misc_feature (1)..(25): SEQ ID NO: 2708; WAN024FNG; Start 289; Stop 313
tggtttgttcagcagaaattaattg

SEQ ID NO: 334423 - DNA, 25 bp, Artificial
  probe
  misc_feature (1)..(25): SEQ ID NO: 2708; WAN024FNG; Start 115; Stop 139
ttgaatgattttggttcttcgactt

SEQ ID NO: 334424 - DNA, 25 bp, Artificial
  probe
  misc_feature (1)..(25): SEQ ID NO: 2708; WAN024FNG; Start 18; Stop 42
tcgcaagtatttcttgacagaagag

SEQ ID NO: 334425 - DNA, 25 bp, Artificial
  probe
  misc_feature (1)..(25): SEQ ID NO: 2708; WAN024FNG; Start 114; Stop 138
attgaatgattttggttcttcgact

SEQ ID NO: 334426 - DNA, 25 bp, Artificial
  probe
  misc_feature (1)..(25): SEQ ID NO: 2708; WAN024FNG; Start 113; Stop 137
cattgaatgattttggttcttcgac

SEQ ID NO: 334427 - DNA, 25 bp, Artificial
  probe
  misc_feature (1)..(25): SEQ ID NO: 2708; WAN024FNG; Start 124; Stop 148
tttggttcttcgacttatgataaga

SEQ ID NO: 334428 - DNA, 25 bp, Artificial
  probe
  misc_feature (1)..(25): SEQ ID NO: 2708; WAN024FNG; Start 21; Stop 45
caagtatttcttgacagaagaggaa

SEQ ID NO: 334429 - DNA, 25 bp, Artificial
  probe
  misc_feature (1)..(25): SEQ ID NO: 2708; WAN024FNG; Start 17; Stop 41
gtcgcaagtatttcttgacagaaga

SEQ ID NO: 334430 - DNA, 25 bp, Artificial
  probe
  misc_feature (1)..(25): SEQ ID NO: 2708; WAN024FNG; Start 16; Stop 40
agtcgcaagtatttcttgacagaag

SEQ ID NO: 334431 - DNA, 25 bp, Artificial
  probe
  misc_feature (1)..(25): SEQ ID NO: 2708; WAN024FNG; Start 120; Stop 144
tgattttggttcttcgacttatgat

SEQ ID NO: 334432 - DNA, 25 bp, Artificial
  probe
  misc_feature (1)..(25): SEQ ID NO: 2708; WAN024FNG; Start 119; Stop 143
atgattttggttcttcgacttatga

SEQ ID NO: 334433 - DNA, 25 bp, Artificial
  probe
  misc_feature (1)..(25): SEQ ID NO: 2708; WAN024FNG; Start 116; Stop 140
tgaatgattttggttcttcgactta

SEQ ID NO: 334434 - DNA, 25 bp, Artificial
  probe
  misc_feature (1)..(25): SEQ ID NO: 2708; WAN024FNG; Start 25; Stop 49
tatttcttgacagaagaggaatttc

SEQ ID NO: 334435 - DNA, 25 bp, Artificial
  probe
  misc_feature (1)..(25): SEQ ID NO: 2708; WAN024FNG; Start 290; Stop 314
ggtttgttcagcagaaattaattga

SEQ ID NO: 334436 - DNA, 25 bp, Artificial
  probe
  misc_feature (1)..(25): SEQ ID NO: 2708; WAN024FNG; Start 288; Stop 312
ttggtttgttcagcagaaattaatt

SEQ ID NO: 334437 - DNA, 25 bp, Artificial
  probe
  misc_feature (1)..(25): SEQ ID NO: 2708; WAN024FNG; Start 32; Stop 56
tgacagaagaggaatttcaagcgga

SEQ ID NO: 334438 - DNA, 25 bp, Artificial
  probe
  misc_feature (1)..(25): SEQ ID NO: 2708; WAN024FNG; Start 12; Stop 36
tattagtcgcaagtatttcttgaca

SEQ ID NO: 334439 - DNA, 25 bp, Artificial
  probe
  misc_feature (1)..(25): SEQ ID NO: 2708; WAN024FNG; Start 118; Stop 142
aatgattttggttcttcgacttatg

SEQ ID NO: 334440 - DNA, 25 bp, Artificial
  probe
  misc_feature (1)..(25): SEQ ID NO: 2709; WAN024CAX; Start 2; Stop 26
tggttgaatcgtatagtaagaatgc

SEQ ID NO: 334441 - DNA, 25 bp, Artificial
  probe
  misc_feature (1)..(25): SEQ ID NO: 2709; WAN024CAX; Start 3; Stop 27
ggttgaatcgtatagtaagaatgct

SEQ ID NO: 334442 - DNA, 25 bp, Artificial
  probe
  misc_feature (1)..(25): SEQ ID NO: 2709; WAN024CAX; Start 17; Stop 41
gtaagaatgctaaccataacatgcg

SEQ ID NO: 334443 - DNA, 25 bp, Artificial
  probe
  misc_feature (1)..(25): SEQ ID NO: 2709; WAN024CAX; Start 16; Stop 40
agtaagaatgctaaccataacatgc

SEQ ID NO: 334444 - DNA, 25 bp, Artificial
  probe
  misc_feature (1)..(25): SEQ ID NO: 2709; WAN024CAX; Start 495; Stop 519
tggtgtggttgtcttggatgatatt

SEQ ID NO: 334445 - DNA, 25 bp, Artificial
  probe
  misc_feature (1)..(25): SEQ ID NO: 2709; WAN024CAX; Start 391; Stop 415
gtcttatctacactgacagagtctt

SEQ ID NO: 334446 - DNA, 25 bp, Artificial
  probe
  misc_feature (1)..(25): SEQ ID NO: 2709; WAN024CAX; Start 18; Stop 42
taagaatgctaaccataacatgcgt

SEQ ID NO: 334447 - DNA, 25 bp, Artificial
  probe
  misc_feature (1)..(25): SEQ ID NO: 2709; WAN024CAX; Start 8; Stop 32
aatcgtatagtaagaatgctaacca

SEQ ID NO: 334448 - DNA, 25 bp, Artificial
  probe
  misc_feature (1)..(25): SEQ ID NO: 2709; WAN024CAX; Start 397; Stop 421
tctacactgacagagtcttatgatt

SEQ ID NO: 334449 - DNA, 25 bp, Artificial
  probe
  misc_feature (1)..(25): SEQ ID NO: 2709; WAN024CAX; Start 396; Stop 420
atctacactgacagagtcttatgat

SEQ ID NO: 334450 - DNA, 25 bp, Artificial
  probe
  misc_feature (1)..(25): SEQ ID NO: 2709; WAN024CAX; Start 276; Stop 300
tgctaagattacaactattgatcgt

SEQ ID NO: 334451 - DNA, 25 bp, Artificial
  probe
  misc_feature (1)..(25): SEQ ID NO: 2709; WAN024CAX; Start 7; Stop 31
gaatcgtatagtaagaatgctaacc

SEQ ID NO: 334452 - DNA, 25 bp, Artificial
  probe
  misc_feature (1)..(25): SEQ ID NO: 2709; WAN024CAX; Start 494; Stop 518
gtggtgtggttgtcttggatgatat

SEQ ID NO: 334453 - DNA, 25 bp, Artificial
  probe
  misc_feature (1)..(25): SEQ ID NO: 2709; WAN024CAX; Start 9; Stop 33
atcgtatagtaagaatgctaaccat

SEQ ID NO: 334454 - DNA, 25 bp, Artificial
  probe
  misc_feature (1)..(25): SEQ ID NO: 2709; WAN024CAX; Start 19; Stop 43
aagaatgctaaccataacatgcgtc

SEQ ID NO: 334455 - DNA, 25 bp, Artificial
  probe
  misc_feature (1)..(25): SEQ ID NO: 2709; WAN024CAX; Start 269; Stop 293
cgccaaatgctaagattacaactat

SEQ ID NO: 334456 - DNA, 25 bp, Artificial
  probe
  misc_feature (1)..(25): SEQ ID NO: 2709; WAN024CAX; Start 434; Stop 458
attctgccaagtctaaatacatcgt

SEQ ID NO: 334457 - DNA, 25 bp, Artificial
  probe
  misc_feature (1)..(25): SEQ ID NO: 2709; WAN024CAX; Start 433; Stop 457
gattctgccaagtctaaatacatcg

SEQ ID NO: 334458 - DNA, 25 bp, Artificial
  probe
  misc_feature (1)..(25): SEQ ID NO: 2709; WAN024CAX; Start 395; Stop 419
tatctacactgacagagtcttatga

SEQ ID NO: 334459 - DNA, 25 bp, Artificial
  probe
  misc_feature (1)..(25): SEQ ID NO: 2709; WAN024CAX; Start 392; Stop 416
tcttatctacactgacagagtctta

SEQ ID NO: 334460 - DNA, 25 bp, Artificial
  probe
  misc_feature (1)..(25): SEQ ID NO: 2709; WAN024CAX; Start 443; Stop 467
agtctaaatacatcgtctttctgcc

SEQ ID NO: 334461 - DNA, 25 bp, Artificial
  probe
  misc_feature (1)..(25): SEQ ID NO: 2709; WAN024CAX; Start 432; Stop 456
ggattctgccaagtctaaatacatc

SEQ ID NO: 334462 - DNA, 25 bp, Artificial
  probe
  misc_feature (1)..(25): SEQ ID NO: 2709; WAN024CAX; Start 435; Stop 459
ttctgccaagtctaaatacatcgtc

SEQ ID NO: 334463 - DNA, 25 bp, Artificial
  probe
  misc_feature (1)..(25): SEQ ID NO: 2709; WAN024CAX; Start 444; Stop 468
gtctaaatacatcgtctttctgcca

SEQ ID NO: 334464 - DNA, 25 bp, Artificial
  probe
  misc_feature (1)..(25): SEQ ID NO: 2709; WAN024CAX; Start 439; Stop 463
gccaagtctaaatacatcgtctttc

SEQ ID NO: 334465 - DNA, 25 bp, Artificial
  probe
  misc_feature (1)..(25): SEQ ID NO: 2709; WAN024CAX; Start 640; Stop 664
ttagtgcctttaggagatggtattc

SEQ ID NO: 334466 - DNA, 25 bp, Artificial
  probe
  misc_feature (1)..(25): SEQ ID NO: 2709; WAN024CAX; Start 438; Stop 462
tgccaagtctaaatacatcgtcttt

SEQ ID NO: 334467 - DNA, 25 bp, Artificial
  probe
  misc_feature (1)..(25): SEQ ID NO: 2709; WAN024CAX; Start 445; Stop 469
tctaaatacatcgtctttctgccag

SEQ ID NO: 334468 - DNA, 25 bp, Artificial
  probe
  misc_feature (1)..(25): SEQ ID NO: 2709; WAN024CAX; Start 56; Stop 80
aagaagaaattgtagacttgatgcg

SEQ ID NO: 334469 - DNA, 25 bp, Artificial
  probe
  misc_feature (1)..(25): SEQ ID NO: 2709; WAN024CAX; Start 442; Stop 466
aagtctaaatacatcgtctttctgc

SEQ ID NO: 334470 - DNA, 25 bp, Artificial
  probe
  misc_feature (1)..(25): SEQ ID NO: 2709; WAN024CAX; Start 496; Stop 520
ggtgtggttgtcttggatgatattt

SEQ ID NO: 334471 - DNA, 25 bp, Artificial
  probe
  misc_feature (1)..(25): SEQ ID NO: 2709; WAN024CAX; Start 639; Stop 663
attagtgcctttaggagatggtatt

SEQ ID NO: 334472 - DNA, 25 bp, Artificial
  probe
  misc_feature (1)..(25): SEQ ID NO: 2709; WAN024CAX; Start 437; Stop 461
ctgccaagtctaaatacatcgtctt

SEQ ID NO: 334473 - DNA, 25 bp, Artificial
  probe
  misc_feature (1)..(25): SEQ ID NO: 2710; WAN024DVR; Start 4; Stop 28
gttgacattcctccatacacagaac

SEQ ID NO: 334474 - DNA, 25 bp, Artificial
  probe
  misc_feature (1)..(25): SEQ ID NO: 2710; WAN024DVR; Start 6; Stop 30
tgacattcctccatacacagaacaa

SEQ ID NO: 334475 - DNA, 25 bp, Artificial
  probe
  misc_feature (1)..(25): SEQ ID NO: 2710; WAN024DVR; Start 5; Stop 29
ttgacattcctccatacacagaaca

SEQ ID NO: 334476 - DNA, 25 bp, Artificial
  probe
  misc_feature (1)..(25): SEQ ID NO: 2710; WAN024DVR; Start 30; Stop 54
aatgaatccaatcaacaagaatacc

SEQ ID NO: 334477 - DNA, 25 bp, Artificial
  probe
  misc_feature (1)..(25): SEQ ID NO: 2710; WAN024DVR; Start 3; Stop 27
ggttgacattcctccatacacagaa

SEQ ID NO: 334478 - DNA, 25 bp, Artificial
  probe
  misc_feature (1)..(25): SEQ ID NO: 2710; WAN024DVR; Start 36; Stop 60
tccaatcaacaagaatacccacata

SEQ ID NO: 334479 - DNA, 25 bp, Artificial
  probe
  misc_feature (1)..(25): SEQ ID NO: 2710; WAN024DVR; Start 33; Stop 57
gaatccaatcaacaagaatacccac

SEQ ID NO: 334480 - DNA, 25 bp, Artificial
  probe
  misc_feature (1)..(25): SEQ ID NO: 2710; WAN024DVR; Start 35; Stop 59
atccaatcaacaagaatacccacat

SEQ ID NO: 334481 - DNA, 25 bp, Artificial
  probe
  misc_feature (1)..(25): SEQ ID NO: 2710; WAN024DVR; Start 34; Stop 58
aatccaatcaacaagaatacccaca

SEQ ID NO: 334482 - DNA, 25 bp, Artificial
  probe
  misc_feature (1)..(25): SEQ ID NO: 2710; WAN024DVR; Start 14; Stop 38
ctccatacacagaacaaatgaatcc

SEQ ID NO: 334483 - DNA, 25 bp, Artificial
  probe
  misc_feature (1)..(25): SEQ ID NO: 2710; WAN024DVR; Start 13; Stop 37
cctccatacacagaacaaatgaatc

SEQ ID NO: 334484 - DNA, 25 bp, Artificial
  probe
  misc_feature (1)..(25): SEQ ID NO: 2710; WAN024DVR; Start 37; Stop 61
ccaatcaacaagaatacccacatat

SEQ ID NO: 334485 - DNA, 25 bp, Artificial
  probe
  misc_feature (1)..(25): SEQ ID NO: 2710; WAN024DVR; Start 16; Stop 40
ccatacacagaacaaatgaatccaa

SEQ ID NO: 334486 - DNA, 25 bp, Artificial
  probe
  misc_feature (1)..(25): SEQ ID NO: 2710; WAN024DVR; Start 12; Stop 36
tcctccatacacagaacaaatgaat

SEQ ID NO: 334487 - DNA, 25 bp, Artificial
  probe
  misc_feature (1)..(25): SEQ ID NO: 2710; WAN024DVR; Start 11; Stop 35
ttcctccatacacagaacaaatgaa

SEQ ID NO: 334488 - DNA, 25 bp, Artificial
  probe
  misc_feature (1)..(25): SEQ ID NO: 2710; WAN024DVR; Start 10; Stop 34
attcctccatacacagaacaaatga

SEQ ID NO: 334489 - DNA, 25 bp, Artificial
  probe
  misc_feature (1)..(25): SEQ ID NO: 2710; WAN024DVR; Start 15; Stop 39
tccatacacagaacaaatgaatcca

SEQ ID NO: 334490 - DNA, 25 bp, Artificial
  probe
  misc_feature (1)..(25): SEQ ID NO: 2710; WAN024DVR; Start 8; Stop 32
acattcctccatacacagaacaaat

SEQ ID NO: 334491 - DNA, 25 bp, Artificial
  probe
  misc_feature (1)..(25): SEQ ID NO: 2710; WAN024DVR; Start 7; Stop 31
gacattcctccatacacagaacaaa

SEQ ID NO: 334492 - DNA, 25 bp, Artificial
  probe
  misc_feature (1)..(25): SEQ ID NO: 2710; WAN024DVR; Start 32; Stop 56
tgaatccaatcaacaagaataccca

SEQ ID NO: 334493 - DNA, 25 bp, Artificial
  probe
  misc_feature (1)..(25): SEQ ID NO: 2710; WAN024DVR; Start 22; Stop 46
acagaacaaatgaatccaatcaaca

SEQ ID NO: 334494 - DNA, 25 bp, Artificial
  probe
  misc_feature (1)..(25): SEQ ID NO: 2710; WAN024DVR; Start 20; Stop 44
acacagaacaaatgaatccaatcaa

SEQ ID NO: 334495 - DNA, 25 bp, Artificial
  probe
  misc_feature (1)..(25): SEQ ID NO: 2710; WAN024DVR; Start 21; Stop 45
cacagaacaaatgaatccaatcaac

SEQ ID NO: 334496 - DNA, 25 bp, Artificial
  probe
  misc_feature (1)..(25): SEQ ID NO: 2710; WAN024DVR; Start 31; Stop 55
atgaatccaatcaacaagaataccc

SEQ ID NO: 334497 - DNA, 25 bp, Artificial
  probe
  misc_feature (1)..(25): SEQ ID NO: 2710; WAN024DVR; Start 19; Stop 43
tacacagaacaaatgaatccaatca

SEQ ID NO: 334498 - DNA, 25 bp, Artificial
  probe
  misc_feature (1)..(25): SEQ ID NO: 2710; WAN024DVR; Start 23; Stop 47
cagaacaaatgaatccaatcaacaa

SEQ ID NO: 334499 - DNA, 25 bp, Artificial
  probe
  misc_feature (1)..(25): SEQ ID NO: 2710; WAN024DVR; Start 18; Stop 42
atacacagaacaaatgaatccaatc

SEQ ID NO: 334500 - DNA, 25 bp, Artificial
  probe
  misc_feature (1)..(25): SEQ ID NO: 2710; WAN024DVR; Start 25; Stop 49
gaacaaatgaatccaatcaacaaga

SEQ ID NO: 334501 - DNA, 25 bp, Artificial
  probe
  misc_feature (1)..(25): SEQ ID NO: 2710; WAN024DVR; Start 24; Stop 48
agaacaaatgaatccaatcaacaag

SEQ ID NO: 334502 - DNA, 25 bp, Artificial
  probe
  misc_feature (1)..(25): SEQ ID NO: 2710; WAN024DVR; Start 17; Stop 41
catacacagaacaaatgaatccaat

SEQ ID NO: 334503 - DNA, 25 bp, Artificial
  probe
  misc_feature (1)..(25): SEQ ID NO: 2710; WAN024DVR; Start 139; Stop 163
ataacgattggtggaaccttagcaa

SEQ ID NO: 334504 - DNA, 25 bp, Artificial
  probe
  misc_feature (1)..(25): SEQ ID NO: 2710; WAN024DVR; Start 26; Stop 50
aacaaatgaatccaatcaacaagaa

SEQ ID NO: 334505 - DNA, 25 bp, Artificial
  probe
  misc_feature (1)..(25): SEQ ID NO: 2710; WAN024DVR; Start 27; Stop 51
acaaatgaatccaatcaacaagaat

SEQ ID NO: 334506 - DNA, 25 bp, Artificial
  probe
  misc_feature (1)..(25): SEQ ID NO: 2711; WAN024GNN; Start 4; Stop 28
gttgactatgtaaggtgtgatgact

SEQ ID NO: 334507 - DNA, 25 bp, Artificial
  probe
  misc_feature (1)..(25): SEQ ID NO: 2711; WAN024GNN; Start 1; Stop 25
atggttgactatgtaaggtgtgatg

SEQ ID NO: 334508 - DNA, 25 bp, Artificial
  probe
  misc_feature (1)..(25): SEQ ID NO: 2711; WAN024GNN; Start 6; Stop 30
tgactatgtaaggtgtgatgacttc

SEQ ID NO: 334509 - DNA, 25 bp, Artificial
  probe
  misc_feature (1)..(25): SEQ ID NO: 2711; WAN024GNN; Start 5; Stop 29
ttgactatgtaaggtgtgatgactt

SEQ ID NO: 334510 - DNA, 25 bp, Artificial
  probe
  misc_feature (1)..(25): SEQ ID NO: 2711; WAN024GNN; Start 3; Stop 27
ggttgactatgtaaggtgtgatgac

SEQ ID NO: 334511 - DNA, 25 bp, Artificial
  probe
  misc_feature (1)..(25): SEQ ID NO: 2711; WAN024GNN; Start 2; Stop 26
tggttgactatgtaaggtgtgatga

SEQ ID NO: 334512 - DNA, 25 bp, Artificial
  probe
  misc_feature (1)..(25): SEQ ID NO: 2711; WAN024GNN; Start 20; Stop 44
gtgatgacttcagtatagccttctt

SEQ ID NO: 334513 - DNA, 25 bp, Artificial
  probe
  misc_feature (1)..(25): SEQ ID NO: 2711; WAN024GNN; Start 14; Stop 38
taaggtgtgatgacttcagtatagc

SEQ ID NO: 334514 - DNA, 25 bp, Artificial
  probe
  misc_feature (1)..(25): SEQ ID NO: 2711; WAN024GNN; Start 9; Stop 33
ctatgtaaggtgtgatgacttcagt

SEQ ID NO: 334515 - DNA, 25 bp, Artificial
  probe
  misc_feature (1)..(25): SEQ ID NO: 2711; WAN024GNN; Start 8; Stop 32
actatgtaaggtgtgatgacttcag

SEQ ID NO: 334516 - DNA, 25 bp, Artificial
  probe
  misc_feature (1)..(25): SEQ ID NO: 2711; WAN024GNN; Start 7; Stop 31
gactatgtaaggtgtgatgacttca

SEQ ID NO: 334517 - DNA, 25 bp, Artificial
  probe
  misc_feature (1)..(25): SEQ ID NO: 2711; WAN024GNN; Start 11; Stop 35
atgtaaggtgtgatgacttcagtat

SEQ ID NO: 334518 - DNA, 25 bp, Artificial
  probe
  misc_feature (1)..(25): SEQ ID NO: 2711; WAN024GNN; Start 19; Stop 43
tgtgatgacttcagtatagccttct

SEQ ID NO: 334519 - DNA, 25 bp, Artificial
  probe
  misc_feature (1)..(25): SEQ ID NO: 2711; WAN024GNN; Start 18; Stop 42
gtgtgatgacttcagtatagccttc

SEQ ID NO: 334520 - DNA, 25 bp, Artificial
  probe
  misc_feature (1)..(25): SEQ ID NO: 2711; WAN024GNN; Start 12; Stop 36
tgtaaggtgtgatgacttcagtata

SEQ ID NO: 334521 - DNA, 25 bp, Artificial
  probe
  misc_feature (1)..(25): SEQ ID NO: 2711; WAN024GNN; Start 10; Stop 34
tatgtaaggtgtgatgacttcagta

SEQ ID NO: 334522 - DNA, 25 bp, Artificial
  probe
  misc_feature (1)..(25): SEQ ID NO: 2711; WAN024GNN; Start 13; Stop 37
gtaaggtgtgatgacttcagtatag

SEQ ID NO: 334523 - DNA, 25 bp, Artificial
  probe
  misc_feature (1)..(25): SEQ ID NO: 2711; WAN024GNN; Start 17; Stop 41
ggtgtgatgacttcagtatagcctt

SEQ ID NO: 334524 - DNA, 25 bp, Artificial
  probe
  misc_feature (1)..(25): SEQ ID NO: 2711; WAN024GNN; Start 15; Stop 39
aaggtgtgatgacttcagtatagcc

SEQ ID NO: 334525 - DNA, 25 bp, Artificial
  probe
  misc_feature (1)..(25): SEQ ID NO: 2711; WAN024GNN; Start 514; Stop 538
ttcattcaagacagcagcatctaca

SEQ ID NO: 334526 - DNA, 25 bp, Artificial
  probe
  misc_feature (1)..(25): SEQ ID NO: 2711; WAN024GNN; Start 281; Stop 305
gggatatttggaagagtcgttgtaa

SEQ ID NO: 334527 - DNA, 25 bp, Artificial
  probe
  misc_feature (1)..(25): SEQ ID NO: 2711; WAN024GNN; Start 282; Stop 306
ggatatttggaagagtcgttgtaaa

SEQ ID NO: 334528 - DNA, 25 bp, Artificial
  probe
  misc_feature (1)..(25): SEQ ID NO: 2711; WAN024GNN; Start 287; Stop 311
tttggaagagtcgttgtaaattctg

SEQ ID NO: 334529 - DNA, 25 bp, Artificial
  probe
  misc_feature (1)..(25): SEQ ID NO: 2711; WAN024GNN; Start 512; Stop 536
atttcattcaagacagcagcatcta

SEQ ID NO: 334530 - DNA, 25 bp, Artificial
  probe
  misc_feature (1)..(25): SEQ ID NO: 2711; WAN024GNN; Start 288; Stop 312
ttggaagagtcgttgtaaattctgt

SEQ ID NO: 334531 - DNA, 25 bp, Artificial
  probe
  misc_feature (1)..(25): SEQ ID NO: 2711; WAN024GNN; Start 149; Stop 173
cagtcaaggataccaaggtcttcac

SEQ ID NO: 334532 - DNA, 25 bp, Artificial
  probe
  misc_feature (1)..(25): SEQ ID NO: 2711; WAN024GNN; Start 291; Stop 315
gaagagtcgttgtaaattctgtcaa

SEQ ID NO: 334533 - DNA, 25 bp, Artificial
  probe
  misc_feature (1)..(25): SEQ ID NO: 2711; WAN024GNN; Start 280; Stop 304
tgggatatttggaagagtcgttgta

SEQ ID NO: 334534 - DNA, 25 bp, Artificial
  probe
  misc_feature (1)..(25): SEQ ID NO: 2711; WAN024GNN; Start 21; Stop 45
tgatgacttcagtatagccttcttt

SEQ ID NO: 334535 - DNA, 25 bp, Artificial
  probe
  misc_feature (1)..(25): SEQ ID NO: 2711; WAN024GNN; Start 290; Stop 314
ggaagagtcgttgtaaattctgtca

SEQ ID NO: 334536 - DNA, 25 bp, Artificial
  probe
  misc_feature (1)..(25): SEQ ID NO: 2711; WAN024GNN; Start 289; Stop 313
tggaagagtcgttgtaaattctgtc

SEQ ID NO: 334537 - DNA, 25 bp, Artificial
  probe
  misc_feature (1)..(25): SEQ ID NO: 2711; WAN024GNN; Start 509; Stop 533
ttcatttcattcaagacagcagcat

SEQ ID NO: 334538 - DNA, 25 bp, Artificial
  probe
  misc_feature (1)..(25): SEQ ID NO: 2711; WAN024GNN; Start 507; Stop 531
ctttcatttcattcaagacagcagc

SEQ ID NO: 334539 - DNA, 25 bp, Artificial
  probe
  misc_feature (1)..(25): SEQ ID NO: 2712; WAN024GKF; Start 1769; Stop 1793
atatcgttacagacaagcaggttac

SEQ ID NO: 334540 - DNA, 25 bp, Artificial
  probe
  misc_feature (1)..(25): SEQ ID NO: 2712; WAN024GKF; Start 1768; Stop 1792
tatatcgttacagacaagcaggtta

SEQ ID NO: 334541 - DNA, 25 bp, Artificial
  probe
  misc_feature (1)..(25): SEQ ID NO: 2712; WAN024GKF; Start 474; Stop 498
atactatacagacgccttctcaatg

SEQ ID NO: 334542 - DNA, 25 bp, Artificial
  probe
  misc_feature (1)..(25): SEQ ID NO: 2712; WAN024GKF; Start 473; Stop 497
catactatacagacgccttctcaat

SEQ ID NO: 334543 - DNA, 25 bp, Artificial
  probe
  misc_feature (1)..(25): SEQ ID NO: 2712; WAN024GKF; Start 58; Stop 82
ttcatcactcctgctattgtatcca

SEQ ID NO: 334544 - DNA, 25 bp, Artificial
  probe
  misc_feature (1)..(25): SEQ ID NO: 2712; WAN024GKF; Start 463; Stop 487
atctcaactccatactatacagacg

SEQ ID NO: 334545 - DNA, 25 bp, Artificial
  probe
  misc_feature (1)..(25): SEQ ID NO: 2712; WAN024GKF; Start 475; Stop 499
tactatacagacgccttctcaatga

SEQ ID NO: 334546 - DNA, 25 bp, Artificial
  probe
  misc_feature (1)..(25): SEQ ID NO: 2712; WAN024GKF; Start 814; Stop 838
caactaactggtgaagatggaactg

SEQ ID NO: 334547 - DNA, 25 bp, Artificial
  probe
  misc_feature (1)..(25): SEQ ID NO: 2712; WAN024GKF; Start 1781; Stop 1805
acaagcaggttaccattcttaattc

SEQ ID NO: 334548 - DNA, 25 bp, Artificial
  probe
  misc_feature (1)..(25): SEQ ID NO: 2712; WAN024GKF; Start 1780; Stop 1804
gacaagcaggttaccattcttaatt

SEQ ID NO: 334549 - DNA, 25 bp, Artificial
  probe
  misc_feature (1)..(25): SEQ ID NO: 2712; WAN024GKF; Start 1779; Stop 1803
agacaagcaggttaccattcttaat

SEQ ID NO: 334550 - DNA, 25 bp, Artificial
  probe
  misc_feature (1)..(25): SEQ ID NO: 2712; WAN024GKF; Start 1782; Stop 1806
caagcaggttaccattcttaattct

SEQ ID NO: 334551 - DNA, 25 bp, Artificial
  probe
  misc_feature (1)..(25): SEQ ID NO: 2712; WAN024GKF; Start 816; Stop 840
actaactggtgaagatggaactgaa

SEQ ID NO: 334552 - DNA, 25 bp, Artificial
  probe
  misc_feature (1)..(25): SEQ ID NO: 2712; WAN024GKF; Start 815; Stop 839
aactaactggtgaagatggaactga

SEQ ID NO: 334553 - DNA, 25 bp, Artificial
  probe
  misc_feature (1)..(25): SEQ ID NO: 2712; WAN024GKF; Start 1767; Stop 1791
atatatcgttacagacaagcaggtt

SEQ ID NO: 334554 - DNA, 25 bp, Artificial
  probe
  misc_feature (1)..(25): SEQ ID NO: 2712; WAN024GKF; Start 1766; Stop 1790
aatatatcgttacagacaagcaggt

SEQ ID NO: 334555 - DNA, 25 bp, Artificial
  probe
  misc_feature (1)..(25): SEQ ID NO: 2712; WAN024GKF; Start 468; Stop 492
aactccatactatacagacgccttc

SEQ ID NO: 334556 - DNA, 25 bp, Artificial
  probe
  misc_feature (1)..(25): SEQ ID NO: 2712; WAN024GKF; Start 1785; Stop 1809
gcaggttaccattcttaattctact

SEQ ID NO: 334557 - DNA, 25 bp, Artificial
  probe
  misc_feature (1)..(25): SEQ ID NO: 2712; WAN024GKF; Start 1784; Stop 1808
agcaggttaccattcttaattctac

SEQ ID NO: 334558 - DNA, 25 bp, Artificial
  probe
  misc_feature (1)..(25): SEQ ID NO: 2712; WAN024GKF; Start 1778; Stop 1802
cagacaagcaggttaccattcttaa

SEQ ID NO: 334559 - DNA, 25 bp, Artificial
  probe
  misc_feature (1)..(25): SEQ ID NO: 2712; WAN024GKF; Start 59; Stop 83
tcatcactcctgctattgtatccaa

SEQ ID NO: 334560 - DNA, 25 bp, Artificial
  probe
  misc_feature (1)..(25): SEQ ID NO: 2712; WAN024GKF; Start 1167; Stop 1191
aatagaagataggtactacggcagg

SEQ ID NO: 334561 - DNA, 25 bp, Artificial
  probe
  misc_feature (1)..(25): SEQ ID NO: 2712; WAN024GKF; Start 464; Stop 488
tctcaactccatactatacagacgc

SEQ ID NO: 334562 - DNA, 25 bp, Artificial
  probe
  misc_feature (1)..(25): SEQ ID NO: 2712; WAN024GKF; Start 467; Stop 491
caactccatactatacagacgcctt

SEQ ID NO: 334563 - DNA, 25 bp, Artificial
  probe
  misc_feature (1)..(25): SEQ ID NO: 2712; WAN024GKF; Start 476; Stop 500
actatacagacgccttctcaatgaa

SEQ ID NO: 334564 - DNA, 25 bp, Artificial
  probe
  misc_feature (1)..(25): SEQ ID NO: 2712; WAN024GKF; Start 1166; Stop 1190
taatagaagataggtactacggcag

SEQ ID NO: 334565 - DNA, 25 bp, Artificial
  probe
  misc_feature (1)..(25): SEQ ID NO: 2712; WAN024GKF; Start 1209; Stop 1233
cattgtcattgatgatagaacgcaa

SEQ ID NO: 334566 - DNA, 25 bp, Artificial
  probe
  misc_feature (1)..(25): SEQ ID NO: 2712; WAN024GKF; Start 1206; Stop 1230
aaccattgtcattgatgatagaacg

SEQ ID NO: 334567 - DNA, 25 bp, Artificial
  probe
  misc_feature (1)..(25): SEQ ID NO: 2712; WAN024GKF; Start 472; Stop 496
ccatactatacagacgccttctcaa

SEQ ID NO: 334568 - DNA, 25 bp, Artificial
  probe
  misc_feature (1)..(25): SEQ ID NO: 2712; WAN024GKF; Start 807; Stop 831
ttatcagcaactaactggtgaagat

SEQ ID NO: 334569 - DNA, 25 bp, Artificial
  probe
  misc_feature (1)..(25): SEQ ID NO: 2712; WAN024GKF; Start 1366; Stop 1390
gtccaagaagactatcgttatgtca

SEQ ID NO: 334570 - DNA, 25 bp, Artificial
  probe
  misc_feature (1)..(25): SEQ ID NO: 2712; WAN024GKF; Start 460; Stop 484
gctatctcaactccatactatacag

SEQ ID NO: 334571 - DNA, 25 bp, Artificial
  probe
  misc_feature (1)..(25): SEQ ID NO: 2712; WAN024GKF; Start 470; Stop 494
ctccatactatacagacgccttctc

SEQ ID NO: 334572 - DNA, 25 bp, Artificial
  probe
  misc_feature (1)..(25): SEQ ID NO: 2713; WAN024GBR; Start 140; Stop 164
aagttacctggttcacctacataag

SEQ ID NO: 334573 - DNA, 25 bp, Artificial
  probe
  misc_feature (1)..(25): SEQ ID NO: 2713; WAN024GBR; Start 139; Stop 163
gaagttacctggttcacctacataa

SEQ ID NO: 334574 - DNA, 25 bp, Artificial
  probe
  misc_feature (1)..(25): SEQ ID NO: 2713; WAN024GBR; Start 223; Stop 247
ttcacagatacggtacaattcatcc

SEQ ID NO: 334575 - DNA, 25 bp, Artificial
  probe
  misc_feature (1)..(25): SEQ ID NO: 2713; WAN024GBR; Start 225; Stop 249
cacagatacggtacaattcatccaa

SEQ ID NO: 334576 - DNA, 25 bp, Artificial
  probe
  misc_feature (1)..(25): SEQ ID NO: 2713; WAN024GBR; Start 222; Stop 246
attcacagatacggtacaattcatc

SEQ ID NO: 334577 - DNA, 25 bp, Artificial
  probe
  misc_feature (1)..(25): SEQ ID NO: 2713; WAN024GBR; Start 224; Stop 248
tcacagatacggtacaattcatcca

SEQ ID NO: 334578 - DNA, 25 bp, Artificial
  probe
  misc_feature (1)..(25): SEQ ID NO: 2713; WAN024GBR; Start 221; Stop 245
tattcacagatacggtacaattcat

SEQ ID NO: 334579 - DNA, 25 bp, Artificial
  probe
  misc_feature (1)..(25): SEQ ID NO: 2713; WAN024GBR; Start 141; Stop 165
agttacctggttcacctacataagg

SEQ ID NO: 334580 - DNA, 25 bp, Artificial
  probe
  misc_feature (1)..(25): SEQ ID NO: 2713; WAN024GBR; Start 5; Stop 29
ttgataccagcaccgttaaagatat

SEQ ID NO: 334581 - DNA, 25 bp, Artificial
  probe
  misc_feature (1)..(25): SEQ ID NO: 2713; WAN024GBR; Start 220; Stop 244
gtattcacagatacggtacaattca

SEQ ID NO: 334582 - DNA, 25 bp, Artificial
  probe
  misc_feature (1)..(25): SEQ ID NO: 2713; WAN024GBR; Start 60; Stop 84
taccagcctcattcaatttatccaa

SEQ ID NO: 334583 - DNA, 25 bp, Artificial
  probe
  misc_feature (1)..(25): SEQ ID NO: 2713; WAN024GBR; Start 59; Stop 83
ataccagcctcattcaatttatcca

SEQ ID NO: 334584 - DNA, 25 bp, Artificial
  probe
  misc_feature (1)..(25): SEQ ID NO: 2713; WAN024GBR; Start 4; Stop 28
gttgataccagcaccgttaaagata

SEQ ID NO: 334585 - DNA, 25 bp, Artificial
  probe
  misc_feature (1)..(25): SEQ ID NO: 2713; WAN024GBR; Start 61; Stop 85
accagcctcattcaatttatccaaa

SEQ ID NO: 334586 - DNA, 25 bp, Artificial
  probe
  misc_feature (1)..(25): SEQ ID NO: 2713; WAN024GBR; Start 227; Stop 251
cagatacggtacaattcatccaaag

SEQ ID NO: 334587 - DNA, 25 bp, Artificial
  probe
  misc_feature (1)..(25): SEQ ID NO: 2713; WAN024GBR; Start 226; Stop 250
acagatacggtacaattcatccaaa

SEQ ID NO: 334588 - DNA, 25 bp, Artificial
  probe
  misc_feature (1)..(25): SEQ ID NO: 2713; WAN024GBR; Start 228; Stop 252
agatacggtacaattcatccaaagg

SEQ ID NO: 334589 - DNA, 25 bp, Artificial
  probe
  misc_feature (1)..(25): SEQ ID NO: 2713; WAN024GBR; Start 57; Stop 81
cgataccagcctcattcaatttatc

SEQ ID NO: 334590 - DNA, 25 bp, Artificial
  probe
  misc_feature (1)..(25): SEQ ID NO: 2713; WAN024GBR; Start 58; Stop 82
gataccagcctcattcaatttatcc

SEQ ID NO: 334591 - DNA, 25 bp, Artificial
  probe
  misc_feature (1)..(25): SEQ ID NO: 2713; WAN024GBR; Start 208; Stop 232
aatcgaacgagcgtattcacagata

SEQ ID NO: 334592 - DNA, 25 bp, Artificial
  probe
  misc_feature (1)..(25): SEQ ID NO: 2713; WAN024GBR; Start 207; Stop 231
taatcgaacgagcgtattcacagat

SEQ ID NO: 334593 - DNA, 25 bp, Artificial
  probe
  misc_feature (1)..(25): SEQ ID NO: 2713; WAN024GBR; Start 138; Stop 162
tgaagttacctggttcacctacata

SEQ ID NO: 334594 - DNA, 25 bp, Artificial
  probe
  misc_feature (1)..(25): SEQ ID NO: 2713; WAN024GBR; Start 242; Stop 266
tcatccaaaggaataatgtcttcgt

SEQ ID NO: 334595 - DNA, 25 bp, Artificial
  probe
  misc_feature (1)..(25): SEQ ID NO: 2713; WAN024GBR; Start 243; Stop 267
catccaaaggaataatgtcttcgtg

SEQ ID NO: 334596 - DNA, 25 bp, Artificial
  probe
  misc_feature (1)..(25): SEQ ID NO: 2713; WAN024GBR; Start 241; Stop 265
ttcatccaaaggaataatgtcttcg

SEQ ID NO: 334597 - DNA, 25 bp, Artificial
  probe
  misc_feature (1)..(25): SEQ ID NO: 2713; WAN024GBR; Start 56; Stop 80
tcgataccagcctcattcaatttat

SEQ ID NO: 334598 - DNA, 25 bp, Artificial
  probe
  misc_feature (1)..(25): SEQ ID NO: 2713; WAN024GBR; Start 230; Stop 254
atacggtacaattcatccaaaggaa

SEQ ID NO: 334599 - DNA, 25 bp, Artificial
  probe
  misc_feature (1)..(25): SEQ ID NO: 2713; WAN024GBR; Start 229; Stop 253
gatacggtacaattcatccaaagga

SEQ ID NO: 334600 - DNA, 25 bp, Artificial
  probe
  misc_feature (1)..(25): SEQ ID NO: 2713; WAN024GBR; Start 244; Stop 268
atccaaaggaataatgtcttcgtgg

SEQ ID NO: 334601 - DNA, 25 bp, Artificial
  probe
  misc_feature (1)..(25): SEQ ID NO: 2713; WAN024GBR; Start 232; Stop 256
acggtacaattcatccaaaggaata

SEQ ID NO: 334602 - DNA, 25 bp, Artificial
  probe
  misc_feature (1)..(25): SEQ ID NO: 2713; WAN024GBR; Start 231; Stop 255
tacggtacaattcatccaaaggaat

SEQ ID NO: 334603 - DNA, 25 bp, Artificial
  probe
  misc_feature (1)..(25): SEQ ID NO: 2713; WAN024GBR; Start 206; Stop 230
gtaatcgaacgagcgtattcacaga

SEQ ID NO: 334604 - DNA, 25 bp, Artificial
  probe
  misc_feature (1)..(25): SEQ ID NO: 2713; WAN024GBR; Start 233; Stop 257
cggtacaattcatccaaaggaataa

SEQ ID NO: 334605 - DNA, 25 bp, Artificial
  probe
  misc_feature (1)..(25): SEQ ID NO: 2714; WAN024CGE; Start 41; Stop 65
ttactggtttcatttcttctccttt

SEQ ID NO: 334606 - DNA, 25 bp, Artificial
  probe
  misc_feature (1)..(25): SEQ ID NO: 2714; WAN024CGE; Start 40; Stop 64
attactggtttcatttcttctcctt

SEQ ID NO: 334607 - DNA, 25 bp, Artificial
  probe
  misc_feature (1)..(25): SEQ ID NO: 2714; WAN024CGE; Start 39; Stop 63
aattactggtttcatttcttctcct

SEQ ID NO: 334608 - DNA, 25 bp, Artificial
  probe
  misc_feature (1)..(25): SEQ ID NO: 2714; WAN024CGE; Start 38; Stop 62
aaattactggtttcatttcttctcc

SEQ ID NO: 334609 - DNA, 25 bp, Artificial
  probe
  misc_feature (1)..(25): SEQ ID NO: 2714; WAN024CGE; Start 117; Stop 141
aaaggtgtctcatgccctaactaat

SEQ ID NO: 334610 - DNA, 25 bp, Artificial
  probe
  misc_feature (1)..(25): SEQ ID NO: 2714; WAN024CGE; Start 28; Stop 52
atgatgatggaaattactggtttca

SEQ ID NO: 334611 - DNA, 25 bp, Artificial
  probe
  misc_feature (1)..(25): SEQ ID NO: 2714; WAN024CGE; Start 27; Stop 51
catgatgatggaaattactggtttc

SEQ ID NO: 334612 - DNA, 25 bp, Artificial
  probe
  misc_feature (1)..(25): SEQ ID NO: 2714; WAN024CGE; Start 29; Stop 53
tgatgatggaaattactggtttcat

SEQ ID NO: 334613 - DNA, 25 bp, Artificial
  probe
  misc_feature (1)..(25): SEQ ID NO: 2714; WAN024CGE; Start 42; Stop 66
tactggtttcatttcttctcctttt

SEQ ID NO: 334614 - DNA, 25 bp, Artificial
  probe
  misc_feature (1)..(25): SEQ ID NO: 2714; WAN024CGE; Start 116; Stop 140
caaaggtgtctcatgccctaactaa

SEQ ID NO: 334615 - DNA, 25 bp, Artificial
  probe
  misc_feature (1)..(25): SEQ ID NO: 2714; WAN024CGE; Start 30; Stop 54
gatgatggaaattactggtttcatt

SEQ ID NO: 334616 - DNA, 25 bp, Artificial
  probe
  misc_feature (1)..(25): SEQ ID NO: 2714; WAN024CGE; Start 75; Stop 99
ttcaacaatcaccttagcttgtgag

SEQ ID NO: 334617 - DNA, 25 bp, Artificial
  probe
  misc_feature (1)..(25): SEQ ID NO: 2714; WAN024CGE; Start 31; Stop 55
atgatggaaattactggtttcattt

SEQ ID NO: 334618 - DNA, 25 bp, Artificial
  probe
  misc_feature (1)..(25): SEQ ID NO: 2714; WAN024CGE; Start 26; Stop 50
ccatgatgatggaaattactggttt

SEQ ID NO: 334619 - DNA, 25 bp, Artificial
  probe
  misc_feature (1)..(25): SEQ ID NO: 2714; WAN024CGE; Start 19; Stop 43
tttgagcccatgatgatggaaatta

SEQ ID NO: 334620 - DNA, 25 bp, Artificial
  probe
  misc_feature (1)..(25): SEQ ID NO: 2714; WAN024CGE; Start 25; Stop 49
cccatgatgatggaaattactggtt

SEQ ID NO: 334621 - DNA, 25 bp, Artificial
  probe
  misc_feature (1)..(25): SEQ ID NO: 2714; WAN024CGE; Start 20; Stop 44
ttgagcccatgatgatggaaattac

SEQ ID NO: 334622 - DNA, 25 bp, Artificial
  probe
  misc_feature (1)..(25): SEQ ID NO: 2714; WAN024CGE; Start 22; Stop 46
gagcccatgatgatggaaattactg

SEQ ID NO: 334623 - DNA, 25 bp, Artificial
  probe
  misc_feature (1)..(25): SEQ ID NO: 2714; WAN024CGE; Start 115; Stop 139
ccaaaggtgtctcatgccctaacta

SEQ ID NO: 334624 - DNA, 25 bp, Artificial
  probe
  misc_feature (1)..(25): SEQ ID NO: 2714; WAN024CGE; Start 76; Stop 100
tcaacaatcaccttagcttgtgagg

SEQ ID NO: 334625 - DNA, 25 bp, Artificial
  probe
  misc_feature (1)..(25): SEQ ID NO: 2714; WAN024CGE; Start 21; Stop 45
tgagcccatgatgatggaaattact

SEQ ID NO: 334626 - DNA, 25 bp, Artificial
  probe
  misc_feature (1)..(25): SEQ ID NO: 2714; WAN024CGE; Start 74; Stop 98
tttcaacaatcaccttagcttgtga

SEQ ID NO: 334627 - DNA, 25 bp, Artificial
  probe
  misc_feature (1)..(25): SEQ ID NO: 2714; WAN024CGE; Start 35; Stop 59
tggaaattactggtttcatttcttc

SEQ ID NO: 334628 - DNA, 25 bp, Artificial
  probe
  misc_feature (1)..(25): SEQ ID NO: 2714; WAN024CGE; Start 32; Stop 56
tgatggaaattactggtttcatttc

SEQ ID NO: 334629 - DNA, 25 bp, Artificial
  probe
  misc_feature (1)..(25): SEQ ID NO: 2714; WAN024CGE; Start 23; Stop 47
agcccatgatgatggaaattactgg

SEQ ID NO: 334630 - DNA, 25 bp, Artificial
  probe
  misc_feature (1)..(25): SEQ ID NO: 2714; WAN024CGE; Start 33; Stop 57
gatggaaattactggtttcatttct

SEQ ID NO: 334631 - DNA, 25 bp, Artificial
  probe
  misc_feature (1)..(25): SEQ ID NO: 2714; WAN024CGE; Start 36; Stop 60
ggaaattactggtttcatttcttct

SEQ ID NO: 334632 - DNA, 25 bp, Artificial
  probe
  misc_feature (1)..(25): SEQ ID NO: 2714; WAN024CGE; Start 73; Stop 97
ttttcaacaatcaccttagcttgtg

SEQ ID NO: 334633 - DNA, 25 bp, Artificial
  probe
  misc_feature (1)..(25): SEQ ID NO: 2714; WAN024CGE; Start 24; Stop 48
gcccatgatgatggaaattactggt

SEQ ID NO: 334634 - DNA, 25 bp, Artificial
  probe
  misc_feature (1)..(25): SEQ ID NO: 2714; WAN024CGE; Start 34; Stop 58
atggaaattactggtttcatttctt

SEQ ID NO: 334635 - DNA, 25 bp, Artificial
  probe
  misc_feature (1)..(25): SEQ ID NO: 2714; WAN024CGE; Start 17; Stop 41
attttgagcccatgatgatggaaat

SEQ ID NO: 334636 - DNA, 25 bp, Artificial
  probe
  misc_feature (1)..(25): SEQ ID NO: 2714; WAN024CGE; Start 12; Stop 36
gtcggattttgagcccatgatgatg

SEQ ID NO: 334637 - DNA, 25 bp, Artificial
  probe
  misc_feature (1)..(25): SEQ ID NO: 2714; WAN024CGE; Start 11; Stop 35
agtcggattttgagcccatgatgat

SEQ ID NO: 334638 - DNA, 25 bp, Artificial
  probe
  misc_feature (1)..(25): SEQ ID NO: 2715; WAN024CNX; Start 14; Stop 38
taatagaaccgatgttgctagacaa

SEQ ID NO: 334639 - DNA, 25 bp, Artificial
  probe
  misc_feature (1)..(25): SEQ ID NO: 2715; WAN024CNX; Start 13; Stop 37
ataatagaaccgatgttgctagaca

SEQ ID NO: 334640 - DNA, 25 bp, Artificial
  probe
  misc_feature (1)..(25): SEQ ID NO: 2715; WAN024CNX; Start 12; Stop 36
tataatagaaccgatgttgctagac

SEQ ID NO: 334641 - DNA, 25 bp, Artificial
  probe
  misc_feature (1)..(25): SEQ ID NO: 2715; WAN024CNX; Start 11; Stop 35
ctataatagaaccgatgttgctaga

SEQ ID NO: 334642 - DNA, 25 bp, Artificial
  probe
  misc_feature (1)..(25): SEQ ID NO: 2715; WAN024CNX; Start 5; Stop 29
ttgcgtctataatagaaccgatgtt

SEQ ID NO: 334643 - DNA, 25 bp, Artificial
  probe
  misc_feature (1)..(25): SEQ ID NO: 2715; WAN024CNX; Start 8; Stop 32
cgtctataatagaaccgatgttgct

SEQ ID NO: 334644 - DNA, 25 bp, Artificial
  probe
  misc_feature (1)..(25): SEQ ID NO: 2715; WAN024CNX; Start 6; Stop 30
tgcgtctataatagaaccgatgttg

SEQ ID NO: 334645 - DNA, 25 bp, Artificial
  probe
  misc_feature (1)..(25): SEQ ID NO: 2715; WAN024CNX; Start 4; Stop 28
gttgcgtctataatagaaccgatgt

SEQ ID NO: 334646 - DNA, 25 bp, Artificial
  probe
  misc_feature (1)..(25): SEQ ID NO: 2715; WAN024CNX; Start 9; Stop 33
gtctataatagaaccgatgttgcta

SEQ ID NO: 334647 - DNA, 25 bp, Artificial
  probe
  misc_feature (1)..(25): SEQ ID NO: 2715; WAN024CNX; Start 7; Stop 31
gcgtctataatagaaccgatgttgc

SEQ ID NO: 334648 - DNA, 25 bp, Artificial
  probe
  misc_feature (1)..(25): SEQ ID NO: 2715; WAN024CNX; Start 15; Stop 39
aatagaaccgatgttgctagacaaa

SEQ ID NO: 334649 - DNA, 25 bp, Artificial
  probe
  misc_feature (1)..(25): SEQ ID NO: 2715; WAN024CNX; Start 10; Stop 34
tctataatagaaccgatgttgctag

SEQ ID NO: 334650 - DNA, 25 bp, Artificial
  probe
  misc_feature (1)..(25): SEQ ID NO: 2715; WAN024CNX; Start 16; Stop 40
atagaaccgatgttgctagacaaag

SEQ ID NO: 334651 - DNA, 25 bp, Artificial
  probe
  misc_feature (1)..(25): SEQ ID NO: 2715; WAN024CNX; Start 56; Stop 80
agtctaatttattcgagagcttgtc

SEQ ID NO: 334652 - DNA, 25 bp, Artificial
  probe
  misc_feature (1)..(25): SEQ ID NO: 2715; WAN024CNX; Start 55; Stop 79
gagtctaatttattcgagagcttgt

SEQ ID NO: 334653 - DNA, 25 bp, Artificial
  probe
  misc_feature (1)..(25): SEQ ID NO: 2715; WAN024CNX; Start 45; Stop 69
tgcaatcttcgagtctaatttattc

SEQ ID NO: 334654 - DNA, 25 bp, Artificial
  probe
  misc_feature (1)..(25): SEQ ID NO: 2715; WAN024CNX; Start 57; Stop 81
gtctaatttattcgagagcttgtcg

SEQ ID NO: 334655 - DNA, 25 bp, Artificial
  probe
  misc_feature (1)..(25): SEQ ID NO: 2715; WAN024CNX; Start 54; Stop 78
cgagtctaatttattcgagagcttg

SEQ ID NO: 334656 - DNA, 25 bp, Artificial
  probe
  misc_feature (1)..(25): SEQ ID NO: 2715; WAN024CNX; Start 3; Stop 27
ggttgcgtctataatagaaccgatg

SEQ ID NO: 334657 - DNA, 25 bp, Artificial
  probe
  misc_feature (1)..(25): SEQ ID NO: 2715; WAN024CNX; Start 46; Stop 70
gcaatcttcgagtctaatttattcg

SEQ ID NO: 334658 - DNA, 25 bp, Artificial
  probe
  misc_feature (1)..(25): SEQ ID NO: 2715; WAN024CNX; Start 2; Stop 26
tggttgcgtctataatagaaccgat

SEQ ID NO: 334659 - DNA, 25 bp, Artificial
  probe
  misc_feature (1)..(25): SEQ ID NO: 2715; WAN024CNX; Start 1; Stop 25
atggttgcgtctataatagaaccga

SEQ ID NO: 334660 - DNA, 25 bp, Artificial
  probe
  misc_feature (1)..(25): SEQ ID NO: 2715; WAN024CNX; Start 17; Stop 41
tagaaccgatgttgctagacaaagc

SEQ ID NO: 334661 - DNA, 25 bp, Artificial
  probe
  misc_feature (1)..(25): SEQ ID NO: 2715; WAN024CNX; Start 40; Stop 64
gcatttgcaatcttcgagtctaatt

SEQ ID NO: 334662 - DNA, 25 bp, Artificial
  probe
  misc_feature (1)..(25): SEQ ID NO: 2715; WAN024CNX; Start 39; Stop 63
agcatttgcaatcttcgagtctaat

SEQ ID NO: 334663 - DNA, 25 bp, Artificial
  probe
  misc_feature (1)..(25): SEQ ID NO: 2715; WAN024CNX; Start 41; Stop 65
catttgcaatcttcgagtctaattt

SEQ ID NO: 334664 - DNA, 25 bp, Artificial
  probe
  misc_feature (1)..(25): SEQ ID NO: 2715; WAN024CNX; Start 38; Stop 62
aagcatttgcaatcttcgagtctaa

SEQ ID NO: 334665 - DNA, 25 bp, Artificial
  probe
  misc_feature (1)..(25): SEQ ID NO: 2715; WAN024CNX; Start 37; Stop 61
aaagcatttgcaatcttcgagtcta

SEQ ID NO: 334666 - DNA, 25 bp, Artificial
  probe
  misc_feature (1)..(25): SEQ ID NO: 2715; WAN024CNX; Start 71; Stop 95
agagcttgtcgaatataaagacact

SEQ ID NO: 334667 - DNA, 25 bp, Artificial
  probe
  misc_feature (1)..(25): SEQ ID NO: 2715; WAN024CNX; Start 70; Stop 94
gagagcttgtcgaatataaagacac

SEQ ID NO: 334668 - DNA, 25 bp, Artificial
  probe
  misc_feature (1)..(25): SEQ ID NO: 2715; WAN024CNX; Start 75; Stop 99
cttgtcgaatataaagacacttgct

SEQ ID NO: 334669 - DNA, 25 bp, Artificial
  probe
  misc_feature (1)..(25): SEQ ID NO: 2715; WAN024CNX; Start 73; Stop 97
agcttgtcgaatataaagacacttg

SEQ ID NO: 334670 - DNA, 25 bp, Artificial
  probe
  misc_feature (1)..(25): SEQ ID NO: 2715; WAN024CNX; Start 74; Stop 98
gcttgtcgaatataaagacacttgc

SEQ ID NO: 334671 - DNA, 25 bp, Artificial
  probe
  misc_feature (1)..(25): SEQ ID NO: 2716; WAN024G2D; Start 63; Stop 87
cataacctgtatctgtcaagaggac

SEQ ID NO: 334672 - DNA, 25 bp, Artificial
  probe
  misc_feature (1)..(25): SEQ ID NO: 2716; WAN024G2D; Start 215; Stop 239
gaagaatccaccttgccaagatatt

SEQ ID NO: 334673 - DNA, 25 bp, Artificial
  probe
  misc_feature (1)..(25): SEQ ID NO: 2716; WAN024G2D; Start 62; Stop 86
acataacctgtatctgtcaagagga

SEQ ID NO: 334674 - DNA, 25 bp, Artificial
  probe
  misc_feature (1)..(25): SEQ ID NO: 2716; WAN024G2D; Start 99; Stop 123
catccttcataaagcgatagaactg

SEQ ID NO: 334675 - DNA, 25 bp, Artificial
  probe
  misc_feature (1)..(25): SEQ ID NO: 2716; WAN024G2D; Start 98; Stop 122
tcatccttcataaagcgatagaact

SEQ ID NO: 334676 - DNA, 25 bp, Artificial
  probe
  misc_feature (1)..(25): SEQ ID NO: 2716; WAN024G2D; Start 91; Stop 115
actcttatcatccttcataaagcga

SEQ ID NO: 334677 - DNA, 25 bp, Artificial
  probe
  misc_feature (1)..(25): SEQ ID NO: 2716; WAN024G2D; Start 100; Stop 124
atccttcataaagcgatagaactgc

SEQ ID NO: 334678 - DNA, 25 bp, Artificial
  probe
  misc_feature (1)..(25): SEQ ID NO: 2716; WAN024G2D; Start 90; Stop 114
aactcttatcatccttcataaagcg

SEQ ID NO: 334679 - DNA, 25 bp, Artificial
  probe
  misc_feature (1)..(25): SEQ ID NO: 2716; WAN024G2D; Start 97; Stop 121
atcatccttcataaagcgatagaac

SEQ ID NO: 334680 - DNA, 25 bp, Artificial
  probe
  misc_feature (1)..(25): SEQ ID NO: 2716; WAN024G2D; Start 92; Stop 116
ctcttatcatccttcataaagcgat

SEQ ID NO: 334681 - DNA, 25 bp, Artificial
  probe
  misc_feature (1)..(25): SEQ ID NO: 2716; WAN024G2D; Start 50; Stop 74
atacggtcactgacataacctgtat

SEQ ID NO: 334682 - DNA, 25 bp, Artificial
  probe
  misc_feature (1)..(25): SEQ ID NO: 2716; WAN024G2D; Start 278; Stop 302
taaagatccataccatacttgcgag

SEQ ID NO: 334683 - DNA, 25 bp, Artificial
  probe
  misc_feature (1)..(25): SEQ ID NO: 2716; WAN024G2D; Start 277; Stop 301
ataaagatccataccatacttgcga

SEQ ID NO: 334684 - DNA, 25 bp, Artificial
  probe
  misc_feature (1)..(25): SEQ ID NO: 2716; WAN024G2D; Start 276; Stop 300
cataaagatccataccatacttgcg

SEQ ID NO: 334685 - DNA, 25 bp, Artificial
  probe
  misc_feature (1)..(25): SEQ ID NO: 2716; WAN024G2D; Start 274; Stop 298
ggcataaagatccataccatacttg

SEQ ID NO: 334686 - DNA, 25 bp, Artificial
  probe
  misc_feature (1)..(25): SEQ ID NO: 2716; WAN024G2D; Start 218; Stop 242
gaatccaccttgccaagatatttac

SEQ ID NO: 334687 - DNA, 25 bp, Artificial
  probe
  misc_feature (1)..(25): SEQ ID NO: 2716; WAN024G2D; Start 217; Stop 241
agaatccaccttgccaagatattta

SEQ ID NO: 334688 - DNA, 25 bp, Artificial
  probe
  misc_feature (1)..(25): SEQ ID NO: 2716; WAN024G2D; Start 219; Stop 243
aatccaccttgccaagatatttact

SEQ ID NO: 334689 - DNA, 25 bp, Artificial
  probe
  misc_feature (1)..(25): SEQ ID NO: 2716; WAN024G2D; Start 221; Stop 245
tccaccttgccaagatatttactat

SEQ ID NO: 334690 - DNA, 25 bp, Artificial
  probe
  misc_feature (1)..(25): SEQ ID NO: 2716; WAN024G2D; Start 220; Stop 244
atccaccttgccaagatatttacta

SEQ ID NO: 334691 - DNA, 25 bp, Artificial
  probe
  misc_feature (1)..(25): SEQ ID NO: 2716; WAN024G2D; Start 216; Stop 240
aagaatccaccttgccaagatattt

SEQ ID NO: 334692 - DNA, 25 bp, Artificial
  probe
  misc_feature (1)..(25): SEQ ID NO: 2716; WAN024G2D; Start 51; Stop 75
tacggtcactgacataacctgtatc

SEQ ID NO: 334693 - DNA, 25 bp, Artificial
  probe
  misc_feature (1)..(25): SEQ ID NO: 2716; WAN024G2D; Start 214; Stop 238
cgaagaatccaccttgccaagatat

SEQ ID NO: 334694 - DNA, 25 bp, Artificial
  probe
  misc_feature (1)..(25): SEQ ID NO: 2716; WAN024G2D; Start 9; Stop 33
cctcgataagataaccatccgcatt

SEQ ID NO: 334695 - DNA, 25 bp, Artificial
  probe
  misc_feature (1)..(25): SEQ ID NO: 2716; WAN024G2D; Start 54; Stop 78
ggtcactgacataacctgtatctgt

SEQ ID NO: 334696 - DNA, 25 bp, Artificial
  probe
  misc_feature (1)..(25): SEQ ID NO: 2716; WAN024G2D; Start 222; Stop 246
ccaccttgccaagatatttactatt

SEQ ID NO: 334697 - DNA, 25 bp, Artificial
  probe
  misc_feature (1)..(25): SEQ ID NO: 2716; WAN024G2D; Start 49; Stop 73
catacggtcactgacataacctgta

SEQ ID NO: 334698 - DNA, 25 bp, Artificial
  probe
  misc_feature (1)..(25): SEQ ID NO: 2716; WAN024G2D; Start 10; Stop 34
ctcgataagataaccatccgcattt

SEQ ID NO: 334699 - DNA, 25 bp, Artificial
  probe
  misc_feature (1)..(25): SEQ ID NO: 2716; WAN024G2D; Start 269; Stop 293
tcattggcataaagatccataccat

SEQ ID NO: 334700 - DNA, 25 bp, Artificial
  probe
  misc_feature (1)..(25): SEQ ID NO: 2716; WAN024G2D; Start 268; Stop 292
ttcattggcataaagatccatacca

SEQ ID NO: 334701 - DNA, 25 bp, Artificial
  probe
  misc_feature (1)..(25): SEQ ID NO: 2716; WAN024G2D; Start 273; Stop 297
tggcataaagatccataccatactt

SEQ ID NO: 334702 - DNA, 25 bp, Artificial
  probe
  misc_feature (1)..(25): SEQ ID NO: 2716; WAN024G2D; Start 272; Stop 296
ttggcataaagatccataccatact

SEQ ID NO: 334703 - DNA, 25 bp, Artificial
  probe
  misc_feature (1)..(25): SEQ ID NO: 2716; WAN024G2D; Start 267; Stop 291
tttcattggcataaagatccatacc

SEQ ID NO: 334704 - DNA, 25 bp, Artificial
  probe
  misc_feature (1)..(25): SEQ ID NO: 2717; WAN024GM5; Start 111; Stop 135
taactacacaccttatgatggagac

SEQ ID NO: 334705 - DNA, 25 bp, Artificial
  probe
  misc_feature (1)..(25): SEQ ID NO: 2717; WAN024GM5; Start 110; Stop 134
ctaactacacaccttatgatggaga

SEQ ID NO: 334706 - DNA, 25 bp, Artificial
  probe
  misc_feature (1)..(25): SEQ ID NO: 2717; WAN024GM5; Start 109; Stop 133
gctaactacacaccttatgatggag

SEQ ID NO: 334707 - DNA, 25 bp, Artificial
  probe
  misc_feature (1)..(25): SEQ ID NO: 2717; WAN024GM5; Start 1178; Stop 1202
ctatccaatacgaaggtgtaacaac

SEQ ID NO: 334708 - DNA, 25 bp, Artificial
  probe
  misc_feature (1)..(25): SEQ ID NO: 2717; WAN024GM5; Start 1177; Stop 1201
tctatccaatacgaaggtgtaacaa

SEQ ID NO: 334709 - DNA, 25 bp, Artificial
  probe
  misc_feature (1)..(25): SEQ ID NO: 2717; WAN024GM5; Start 1176; Stop 1200
ttctatccaatacgaaggtgtaaca

SEQ ID NO: 334710 - DNA, 25 bp, Artificial
  probe
  misc_feature (1)..(25): SEQ ID NO: 2717; WAN024GM5; Start 2066; Stop 2090
agactcgtgatgaacaagttgataa

SEQ ID NO: 334711 - DNA, 25 bp, Artificial
  probe
  misc_feature (1)..(25): SEQ ID NO: 2717; WAN024GM5; Start 2065; Stop 2089
aagactcgtgatgaacaagttgata

SEQ ID NO: 334712 - DNA, 25 bp, Artificial
  probe
  misc_feature (1)..(25): SEQ ID NO: 2717; WAN024GM5; Start 2064; Stop 2088
taagactcgtgatgaacaagttgat

SEQ ID NO: 334713 - DNA, 25 bp, Artificial
  probe
  misc_feature (1)..(25): SEQ ID NO: 2717; WAN024GM5; Start 2029; Stop 2053
tcattgactacacaagtatcacctc

SEQ ID NO: 334714 - DNA, 25 bp, Artificial
  probe
  misc_feature (1)..(25): SEQ ID NO: 2717; WAN024GM5; Start 2028; Stop 2052
ctcattgactacacaagtatcacct

SEQ ID NO: 334715 - DNA, 25 bp, Artificial
  probe
  misc_feature (1)..(25): SEQ ID NO: 2717; WAN024GM5; Start 2027; Stop 2051
tctcattgactacacaagtatcacc

SEQ ID NO: 334716 - DNA, 25 bp, Artificial
  probe
  misc_feature (1)..(25): SEQ ID NO: 2717; WAN024GM5; Start 2022; Stop 2046
cggtatctcattgactacacaagta

SEQ ID NO: 334717 - DNA, 25 bp, Artificial
  probe
  misc_feature (1)..(25): SEQ ID NO: 2717; WAN024GM5; Start 2067; Stop 2091
gactcgtgatgaacaagttgataac

SEQ ID NO: 334718 - DNA, 25 bp, Artificial
  probe
  misc_feature (1)..(25): SEQ ID NO: 2717; WAN024GM5; Start 1504; Stop 1528
atgactgataggtacaactacgaag

SEQ ID NO: 334719 - DNA, 25 bp, Artificial
  probe
  misc_feature (1)..(25): SEQ ID NO: 2717; WAN024GM5; Start 2020; Stop 2044
gacggtatctcattgactacacaag

SEQ ID NO: 334720 - DNA, 25 bp, Artificial
  probe
  misc_feature (1)..(25): SEQ ID NO: 2717; WAN024GM5; Start 2063; Stop 2087
gtaagactcgtgatgaacaagttga

SEQ ID NO: 334721 - DNA, 25 bp, Artificial
  probe
  misc_feature (1)..(25): SEQ ID NO: 2717; WAN024GM5; Start 1179; Stop 1203
tatccaatacgaaggtgtaacaaca

SEQ ID NO: 334722 - DNA, 25 bp, Artificial
  probe
  misc_feature (1)..(25): SEQ ID NO: 2717; WAN024GM5; Start 1503; Stop 1527
catgactgataggtacaactacgaa

SEQ ID NO: 334723 - DNA, 25 bp, Artificial
  probe
  misc_feature (1)..(25): SEQ ID NO: 2717; WAN024GM5; Start 1; Stop 25
atggttgttaagacagttgttgaag

SEQ ID NO: 334724 - DNA, 25 bp, Artificial
  probe
  misc_feature (1)..(25): SEQ ID NO: 2717; WAN024GM5; Start 1029; Stop 1053
tcaccgtgttactaagatggactac

SEQ ID NO: 334725 - DNA, 25 bp, Artificial
  probe
  misc_feature (1)..(25): SEQ ID NO: 2717; WAN024GM5; Start 1498; Stop 1522
cactacatgactgataggtacaact

SEQ ID NO: 334726 - DNA, 25 bp, Artificial
  probe
  misc_feature (1)..(25): SEQ ID NO: 2717; WAN024GM5; Start 1497; Stop 1521
ccactacatgactgataggtacaac

SEQ ID NO: 334727 - DNA, 25 bp, Artificial
  probe
  misc_feature (1)..(25): SEQ ID NO: 2717; WAN024GM5; Start 1496; Stop 1520
tccactacatgactgataggtacaa

SEQ ID NO: 334728 - DNA, 25 bp, Artificial
  probe
  misc_feature (1)..(25): SEQ ID NO: 2717; WAN024GM5; Start 114; Stop 138
ctacacaccttatgatggagacgaa

SEQ ID NO: 334729 - DNA, 25 bp, Artificial
  probe
  misc_feature (1)..(25): SEQ ID NO: 2717; WAN024GM5; Start 2030; Stop 2054
cattgactacacaagtatcacctcg

SEQ ID NO: 334730 - DNA, 25 bp, Artificial
  probe
  misc_feature (1)..(25): SEQ ID NO: 2717; WAN024GM5; Start 1501; Stop 1525
tacatgactgataggtacaactacg

SEQ ID NO: 334731 - DNA, 25 bp, Artificial
  probe
  misc_feature (1)..(25): SEQ ID NO: 2717; WAN024GM5; Start 1495; Stop 1519
atccactacatgactgataggtaca

SEQ ID NO: 334732 - DNA, 25 bp, Artificial
  probe
  misc_feature (1)..(25): SEQ ID NO: 2717; WAN024GM5; Start 1183; Stop 1207
caatacgaaggtgtaacaacaatgg

SEQ ID NO: 334733 - DNA, 25 bp, Artificial
  probe
  misc_feature (1)..(25): SEQ ID NO: 2717; WAN024GM5; Start 1182; Stop 1206
ccaatacgaaggtgtaacaacaatg

SEQ ID NO: 334734 - DNA, 25 bp, Artificial
  probe
  misc_feature (1)..(25): SEQ ID NO: 2717; WAN024GM5; Start 1181; Stop 1205
tccaatacgaaggtgtaacaacaat

SEQ ID NO: 334735 - DNA, 25 bp, Artificial
  probe
  misc_feature (1)..(25): SEQ ID NO: 2717; WAN024GM5; Start 1180; Stop 1204
atccaatacgaaggtgtaacaacaa

SEQ ID NO: 334736 - DNA, 25 bp, Artificial
  probe
  misc_feature (1)..(25): SEQ ID NO: 2717; WAN024GM5; Start 1494; Stop 1518
catccactacatgactgataggtac

SEQ ID NO: 334737 - DNA, 25 bp, Artificial
  probe
  misc_feature (1)..(25): SEQ ID NO: 2718; WAN024GNI; Start 330; Stop 354
gataattcctaatcctccagccttg

SEQ ID NO: 334738 - DNA, 25 bp, Artificial
  probe
  misc_feature (1)..(25): SEQ ID NO: 2718; WAN024GNI; Start 191; Stop 215
cttcttcaataacgagatccacgat

SEQ ID NO: 334739 - DNA, 25 bp, Artificial
  probe
  misc_feature (1)..(25): SEQ ID NO: 2718; WAN024GNI; Start 186; Stop 210
aacaccttcttcaataacgagatcc

SEQ ID NO: 334740 - DNA, 25 bp, Artificial
  probe
  misc_feature (1)..(25): SEQ ID NO: 2718; WAN024GNI; Start 329; Stop 353
cgataattcctaatcctccagcctt

SEQ ID NO: 334741 - DNA, 25 bp, Artificial
  probe
  misc_feature (1)..(25): SEQ ID NO: 2718; WAN024GNI; Start 184; Stop 208
ttaacaccttcttcaataacgagat

SEQ ID NO: 334742 - DNA, 25 bp, Artificial
  probe
  misc_feature (1)..(25): SEQ ID NO: 2718; WAN024GNI; Start 185; Stop 209
taacaccttcttcaataacgagatc

SEQ ID NO: 334743 - DNA, 25 bp, Artificial
  probe
  misc_feature (1)..(25): SEQ ID NO: 2718; WAN024GNI; Start 188; Stop 212
caccttcttcaataacgagatccac

SEQ ID NO: 334744 - DNA, 25 bp, Artificial
  probe
  misc_feature (1)..(25): SEQ ID NO: 2718; WAN024GNI; Start 325; Stop 349
ccaccgataattcctaatcctccag

SEQ ID NO: 334745 - DNA, 25 bp, Artificial
  probe
  misc_feature (1)..(25): SEQ ID NO: 2718; WAN024GNI; Start 187; Stop 211
acaccttcttcaataacgagatcca

SEQ ID NO: 334746 - DNA, 25 bp, Artificial
  probe
  misc_feature (1)..(25): SEQ ID NO: 2718; WAN024GNI; Start 326; Stop 350
caccgataattcctaatcctccagc

SEQ ID NO: 334747 - DNA, 25 bp, Artificial
  probe
  misc_feature (1)..(25): SEQ ID NO: 2718; WAN024GNI; Start 190; Stop 214
ccttcttcaataacgagatccacga

SEQ ID NO: 334748 - DNA, 25 bp, Artificial
  probe
  misc_feature (1)..(25): SEQ ID NO: 2718; WAN024GNI; Start 145; Stop 169
atatacttgcttggatttcctgctc

SEQ ID NO: 334749 - DNA, 25 bp, Artificial
  probe
  misc_feature (1)..(25): SEQ ID NO: 2718; WAN024GNI; Start 181; Stop 205
actttaacaccttcttcaataacga

SEQ ID NO: 334750 - DNA, 25 bp, Artificial
  probe
  misc_feature (1)..(25): SEQ ID NO: 2718; WAN024GNI; Start 331; Stop 355
ataattcctaatcctccagccttgg

SEQ ID NO: 334751 - DNA, 25 bp, Artificial
  probe
  misc_feature (1)..(25): SEQ ID NO: 2718; WAN024GNI; Start 144; Stop 168
catatacttgcttggatttcctgct

SEQ ID NO: 334752 - DNA, 25 bp, Artificial
  probe
  misc_feature (1)..(25): SEQ ID NO: 2718; WAN024GNI; Start 189; Stop 213
accttcttcaataacgagatccacg

SEQ ID NO: 334753 - DNA, 25 bp, Artificial
  probe
  misc_feature (1)..(25): SEQ ID NO: 2718; WAN024GNI; Start 176; Stop 200
tgacaactttaacaccttcttcaat

SEQ ID NO: 334754 - DNA, 25 bp, Artificial
  probe
  misc_feature (1)..(25): SEQ ID NO: 2718; WAN024GNI; Start 182; Stop 206
ctttaacaccttcttcaataacgag

SEQ ID NO: 334755 - DNA, 25 bp, Artificial
  probe
  misc_feature (1)..(25): SEQ ID NO: 2718; WAN024GNI; Start 183; Stop 207
tttaacaccttcttcaataacgaga

SEQ ID NO: 334756 - DNA, 25 bp, Artificial
  probe
  misc_feature (1)..(25): SEQ ID NO: 2718; WAN024GNI; Start 180; Stop 204
aactttaacaccttcttcaataacg

SEQ ID NO: 334757 - DNA, 25 bp, Artificial
  probe
  misc_feature (1)..(25): SEQ ID NO: 2718; WAN024GNI; Start 225; Stop 249
aaagggagataagagcatgatgttg

SEQ ID NO: 334758 - DNA, 25 bp, Artificial
  probe
  misc_feature (1)..(25): SEQ ID NO: 2718; WAN024GNI; Start 224; Stop 248
caaagggagataagagcatgatgtt

SEQ ID NO: 334759 - DNA, 25 bp, Artificial
  probe
  misc_feature (1)..(25): SEQ ID NO: 2718; WAN024GNI; Start 328; Stop 352
ccgataattcctaatcctccagcct

SEQ ID NO: 334760 - DNA, 25 bp, Artificial
  probe
  misc_feature (1)..(25): SEQ ID NO: 2718; WAN024GNI; Start 175; Stop 199
gtgacaactttaacaccttcttcaa

SEQ ID NO: 334761 - DNA, 25 bp, Artificial
  probe
  misc_feature (1)..(25): SEQ ID NO: 2718; WAN024GNI; Start 174; Stop 198
tgtgacaactttaacaccttcttca

SEQ ID NO: 334762 - DNA, 25 bp, Artificial
  probe
  misc_feature (1)..(25): SEQ ID NO: 2718; WAN024GNI; Start 226; Stop 250
aagggagataagagcatgatgttga

SEQ ID NO: 334763 - DNA, 25 bp, Artificial
  probe
  misc_feature (1)..(25): SEQ ID NO: 2718; WAN024GNI; Start 222; Stop 246
cacaaagggagataagagcatgatg

SEQ ID NO: 334764 - DNA, 25 bp, Artificial
  probe
  misc_feature (1)..(25): SEQ ID NO: 2718; WAN024GNI; Start 177; Stop 201
gacaactttaacaccttcttcaata

SEQ ID NO: 334765 - DNA, 25 bp, Artificial
  probe
  misc_feature (1)..(25): SEQ ID NO: 2718; WAN024GNI; Start 327; Stop 351
accgataattcctaatcctccagcc

SEQ ID NO: 334766 - DNA, 25 bp, Artificial
  probe
  misc_feature (1)..(25): SEQ ID NO: 2718; WAN024GNI; Start 110; Stop 134
gaataacgattatcccagcttcatg

SEQ ID NO: 334767 - DNA, 25 bp, Artificial
  probe
  misc_feature (1)..(25): SEQ ID NO: 2718; WAN024GNI; Start 1; Stop 25
atggttgttaatttaccgatatgcc

SEQ ID NO: 334768 - DNA, 25 bp, Artificial
  probe
  misc_feature (1)..(25): SEQ ID NO: 2718; WAN024GNI; Start 173; Stop 197
ttgtgacaactttaacaccttcttc

SEQ ID NO: 334769 - DNA, 25 bp, Artificial
  probe
  misc_feature (1)..(25): SEQ ID NO: 2718; WAN024GNI; Start 30; Stop 54
agcttccattccttctgcaataaca

SEQ ID NO: 334770 - DNA, 25 bp, Artificial
  probe
  misc_feature (1)..(25): SEQ ID NO: 2719; WAN024DBQ; Start 514; Stop 538
gcaagtgtaattgatgaagcgatat

SEQ ID NO: 334771 - DNA, 25 bp, Artificial
  probe
  misc_feature (1)..(25): SEQ ID NO: 2719; WAN024DBQ; Start 560; Stop 584
tagcttatggactagatatcggtgt

SEQ ID NO: 334772 - DNA, 25 bp, Artificial
  probe
  misc_feature (1)..(25): SEQ ID NO: 2719; WAN024DBQ; Start 404; Stop 428
tatggattagtgaggttgtagaatt

SEQ ID NO: 334773 - DNA, 25 bp, Artificial
  probe
  misc_feature (1)..(25): SEQ ID NO: 2719; WAN024DBQ; Start 562; Stop 586
gcttatggactagatatcggtgtta

SEQ ID NO: 334774 - DNA, 25 bp, Artificial
  probe
  misc_feature (1)..(25): SEQ ID NO: 2719; WAN024DBQ; Start 403; Stop 427
atatggattagtgaggttgtagaat

SEQ ID NO: 334775 - DNA, 25 bp, Artificial
  probe
  misc_feature (1)..(25): SEQ ID NO: 2719; WAN024DBQ; Start 561; Stop 585
agcttatggactagatatcggtgtt

SEQ ID NO: 334776 - DNA, 25 bp, Artificial
  probe
  misc_feature (1)..(25): SEQ ID NO: 2719; WAN024DBQ; Start 559; Stop 583
atagcttatggactagatatcggtg

SEQ ID NO: 334777 - DNA, 25 bp, Artificial
  probe
  misc_feature (1)..(25): SEQ ID NO: 2719; WAN024DBQ; Start 509; Stop 533
ttgatgcaagtgtaattgatgaagc

SEQ ID NO: 334778 - DNA, 25 bp, Artificial
  probe
  misc_feature (1)..(25): SEQ ID NO: 2719; WAN024DBQ; Start 401; Stop 425
ctatatggattagtgaggttgtaga

SEQ ID NO: 334779 - DNA, 25 bp, Artificial
  probe
  misc_feature (1)..(25): SEQ ID NO: 2719; WAN024DBQ; Start 400; Stop 424
cctatatggattagtgaggttgtag

SEQ ID NO: 334780 - DNA, 25 bp, Artificial
  probe
  misc_feature (1)..(25): SEQ ID NO: 2719; WAN024DBQ; Start 399; Stop 423
tcctatatggattagtgaggttgta

SEQ ID NO: 334781 - DNA, 25 bp, Artificial
  probe
  misc_feature (1)..(25): SEQ ID NO: 2719; WAN024DBQ; Start 565; Stop 589
tatggactagatatcggtgttactc

SEQ ID NO: 334782 - DNA, 25 bp, Artificial
  probe
  misc_feature (1)..(25): SEQ ID NO: 2719; WAN024DBQ; Start 513; Stop 537
tgcaagtgtaattgatgaagcgata

SEQ ID NO: 334783 - DNA, 25 bp, Artificial
  probe
  misc_feature (1)..(25): SEQ ID NO: 2719; WAN024DBQ; Start 566; Stop 590
atggactagatatcggtgttactcg

SEQ ID NO: 334784 - DNA, 25 bp, Artificial
  probe
  misc_feature (1)..(25): SEQ ID NO: 2719; WAN024DBQ; Start 16; Stop 40
agacaaagtaaattaccaagtgagg

SEQ ID NO: 334785 - DNA, 25 bp, Artificial
  probe
  misc_feature (1)..(25): SEQ ID NO: 2719; WAN024DBQ; Start 608; Stop 632
ttgttgaagtaaatgatggttatgc

SEQ ID NO: 334786 - DNA, 25 bp, Artificial
  probe
  misc_feature (1)..(25): SEQ ID NO: 2719; WAN024DBQ; Start 604; Stop 628
cttgttgttgaagtaaatgatggtt

SEQ ID NO: 334787 - DNA, 25 bp, Artificial
  probe
  misc_feature (1)..(25): SEQ ID NO: 2719; WAN024DBQ; Start 68; Stop 92
taggtgcctacttacaaggagaaga

SEQ ID NO: 334788 - DNA, 25 bp, Artificial
  probe
  misc_feature (1)..(25): SEQ ID NO: 2719; WAN024DBQ; Start 558; Stop 582
aatagcttatggactagatatcggt

SEQ ID NO: 334789 - DNA, 25 bp, Artificial
  probe
  misc_feature (1)..(25): SEQ ID NO: 2719; WAN024DBQ; Start 554; Stop 578
cgccaatagcttatggactagatat

SEQ ID NO: 334790 - DNA, 25 bp, Artificial
  probe
  misc_feature (1)..(25): SEQ ID NO: 2719; WAN024DBQ; Start 70; Stop 94
ggtgcctacttacaaggagaagaag

SEQ ID NO: 334791 - DNA, 25 bp, Artificial
  probe
  misc_feature (1)..(25): SEQ ID NO: 2719; WAN024DBQ; Start 564; Stop 588
ttatggactagatatcggtgttact

SEQ ID NO: 334792 - DNA, 25 bp, Artificial
  probe
  misc_feature (1)..(25): SEQ ID NO: 2719; WAN024DBQ; Start 557; Stop 581
caatagcttatggactagatatcgg

SEQ ID NO: 334793 - DNA, 25 bp, Artificial
  probe
  misc_feature (1)..(25): SEQ ID NO: 2719; WAN024DBQ; Start 512; Stop 536
atgcaagtgtaattgatgaagcgat

SEQ ID NO: 334794 - DNA, 25 bp, Artificial
  probe
  misc_feature (1)..(25): SEQ ID NO: 2719; WAN024DBQ; Start 482; Stop 506
cctatacaggtgattatcatgcaca

SEQ ID NO: 334795 - DNA, 25 bp, Artificial
  probe
  misc_feature (1)..(25): SEQ ID NO: 2719; WAN024DBQ; Start 563; Stop 587
cttatggactagatatcggtgttac

SEQ ID NO: 334796 - DNA, 25 bp, Artificial
  probe
  misc_feature (1)..(25): SEQ ID NO: 2719; WAN024DBQ; Start 515; Stop 539
caagtgtaattgatgaagcgatatc

SEQ ID NO: 334797 - DNA, 25 bp, Artificial
  probe
  misc_feature (1)..(25): SEQ ID NO: 2719; WAN024DBQ; Start 402; Stop 426
tatatggattagtgaggttgtagaa

SEQ ID NO: 334798 - DNA, 25 bp, Artificial
  probe
  misc_feature (1)..(25): SEQ ID NO: 2719; WAN024DBQ; Start 69; Stop 93
aggtgcctacttacaaggagaagaa

SEQ ID NO: 334799 - DNA, 25 bp, Artificial
  probe
  misc_feature (1)..(25): SEQ ID NO: 2719; WAN024DBQ; Start 485; Stop 509
atacaggtgattatcatgcacaatt

SEQ ID NO: 334800 - DNA, 25 bp, Artificial
  probe
  misc_feature (1)..(25): SEQ ID NO: 2719; WAN024DBQ; Start 483; Stop 507
ctatacaggtgattatcatgcacaa

SEQ ID NO: 334801 - DNA, 25 bp, Artificial
  probe
  misc_feature (1)..(25): SEQ ID NO: 2719; WAN024DBQ; Start 412; Stop 436
agtgaggttgtagaattcatagctg

SEQ ID NO: 334802 - DNA, 25 bp, Artificial
  probe
  misc_feature (1)..(25): SEQ ID NO: 2719; WAN024DBQ; Start 413; Stop 437
gtgaggttgtagaattcatagctga

SEQ ID NO: 334803 - DNA, 25 bp, Artificial
  probe
  misc_feature (1)..(25): SEQ ID NO: 2720; WAN024GD4; Start 40; Stop 64
gaaccaatacttcaagacctgcttc

SEQ ID NO: 334804 - DNA, 25 bp, Artificial
  probe
  misc_feature (1)..(25): SEQ ID NO: 2720; WAN024GD4; Start 7; Stop 31
taccttcaagacttactgtgtccaa

SEQ ID NO: 334805 - DNA, 25 bp, Artificial
  probe
  misc_feature (1)..(25): SEQ ID NO: 2720; WAN024GD4; Start 6; Stop 30
ttaccttcaagacttactgtgtcca

SEQ ID NO: 334806 - DNA, 25 bp, Artificial
  probe
  misc_feature (1)..(25): SEQ ID NO: 2720; WAN024GD4; Start 27; Stop 51
tccaaaccaatgtgaaccaatactt

SEQ ID NO: 334807 - DNA, 25 bp, Artificial
  probe
  misc_feature (1)..(25): SEQ ID NO: 2720; WAN024GD4; Start 1; Stop 25
atggtttaccttcaagacttactgt

SEQ ID NO: 334808 - DNA, 25 bp, Artificial
  probe
  misc_feature (1)..(25): SEQ ID NO: 2720; WAN024GD4; Start 41; Stop 65
aaccaatacttcaagacctgcttcc

SEQ ID NO: 334809 - DNA, 25 bp, Artificial
  probe
  misc_feature (1)..(25): SEQ ID NO: 2720; WAN024GD4; Start 28; Stop 52
ccaaaccaatgtgaaccaatacttc

SEQ ID NO: 334810 - DNA, 25 bp, Artificial
  probe
  misc_feature (1)..(25): SEQ ID NO: 2720; WAN024GD4; Start 3; Stop 27
ggtttaccttcaagacttactgtgt

SEQ ID NO: 334811 - DNA, 25 bp, Artificial
  probe
  misc_feature (1)..(25): SEQ ID NO: 2720; WAN024GD4; Start 2; Stop 26
tggtttaccttcaagacttactgtg

SEQ ID NO: 334812 - DNA, 25 bp, Artificial
  probe
  misc_feature (1)..(25): SEQ ID NO: 2720; WAN024GD4; Start 112; Stop 136
tacctgaaactggagatacaatgtt

SEQ ID NO: 334813 - DNA, 25 bp, Artificial
  probe
  misc_feature (1)..(25): SEQ ID NO: 2720; WAN024GD4; Start 18; Stop 42
cttactgtgtccaaaccaatgtgaa

SEQ ID NO: 334814 - DNA, 25 bp, Artificial
  probe
  misc_feature (1)..(25): SEQ ID NO: 2720; WAN024GD4; Start 111; Stop 135
gtacctgaaactggagatacaatgt

SEQ ID NO: 334815 - DNA, 25 bp, Artificial
  probe
  misc_feature (1)..(25): SEQ ID NO: 2720; WAN024GD4; Start 26; Stop 50
gtccaaaccaatgtgaaccaatact

SEQ ID NO: 334816 - DNA, 25 bp, Artificial
  probe
  misc_feature (1)..(25): SEQ ID NO: 2720; WAN024GD4; Start 25; Stop 49
tgtccaaaccaatgtgaaccaatac

SEQ ID NO: 334817 - DNA, 25 bp, Artificial
  probe
  misc_feature (1)..(25): SEQ ID NO: 2720; WAN024GD4; Start 24; Stop 48
gtgtccaaaccaatgtgaaccaata

SEQ ID NO: 334818 - DNA, 25 bp, Artificial
  probe
  misc_feature (1)..(25): SEQ ID NO: 2720; WAN024GD4; Start 19; Stop 43
ttactgtgtccaaaccaatgtgaac

SEQ ID NO: 334819 - DNA, 25 bp, Artificial
  probe
  misc_feature (1)..(25): SEQ ID NO: 2720; WAN024GD4; Start 110; Stop 134
agtacctgaaactggagatacaatg

SEQ ID NO: 334820 - DNA, 25 bp, Artificial
  probe
  misc_feature (1)..(25): SEQ ID NO: 2720; WAN024GD4; Start 5; Stop 29
tttaccttcaagacttactgtgtcc

SEQ ID NO: 334821 - DNA, 25 bp, Artificial
  probe
  misc_feature (1)..(25): SEQ ID NO: 2720; WAN024GD4; Start 4; Stop 28
gtttaccttcaagacttactgtgtc

SEQ ID NO: 334822 - DNA, 25 bp, Artificial
  probe
  misc_feature (1)..(25): SEQ ID NO: 2720; WAN024GD4; Start 31; Stop 55
aaccaatgtgaaccaatacttcaag

SEQ ID NO: 334823 - DNA, 25 bp, Artificial
  probe
  misc_feature (1)..(25): SEQ ID NO: 2720; WAN024GD4; Start 35; Stop 59
aatgtgaaccaatacttcaagacct

SEQ ID NO: 334824 - DNA, 25 bp, Artificial
  probe
  misc_feature (1)..(25): SEQ ID NO: 2720; WAN024GD4; Start 34; Stop 58
caatgtgaaccaatacttcaagacc

SEQ ID NO: 334825 - DNA, 25 bp, Artificial
  probe
  misc_feature (1)..(25): SEQ ID NO: 2720; WAN024GD4; Start 33; Stop 57
ccaatgtgaaccaatacttcaagac

SEQ ID NO: 334826 - DNA, 25 bp, Artificial
  probe
  misc_feature (1)..(25): SEQ ID NO: 2720; WAN024GD4; Start 32; Stop 56
accaatgtgaaccaatacttcaaga

SEQ ID NO: 334827 - DNA, 25 bp, Artificial
  probe
  misc_feature (1)..(25): SEQ ID NO: 2720; WAN024GD4; Start 36; Stop 60
atgtgaaccaatacttcaagacctg

SEQ ID NO: 334828 - DNA, 25 bp, Artificial
  probe
  misc_feature (1)..(25): SEQ ID NO: 2720; WAN024GD4; Start 14; Stop 38
aagacttactgtgtccaaaccaatg

SEQ ID NO: 334829 - DNA, 25 bp, Artificial
  probe
  misc_feature (1)..(25): SEQ ID NO: 2720; WAN024GD4; Start 13; Stop 37
caagacttactgtgtccaaaccaat

SEQ ID NO: 334830 - DNA, 25 bp, Artificial
  probe
  misc_feature (1)..(25): SEQ ID NO: 2720; WAN024GD4; Start 17; Stop 41
acttactgtgtccaaaccaatgtga

SEQ ID NO: 334831 - DNA, 25 bp, Artificial
  probe
  misc_feature (1)..(25): SEQ ID NO: 2720; WAN024GD4; Start 218; Stop 242
aacttgaccgtctgctactgagtaa

SEQ ID NO: 334832 - DNA, 25 bp, Artificial
  probe
  misc_feature (1)..(25): SEQ ID NO: 2720; WAN024GD4; Start 10; Stop 34
cttcaagacttactgtgtccaaacc

SEQ ID NO: 334833 - DNA, 25 bp, Artificial
  probe
  misc_feature (1)..(25): SEQ ID NO: 2720; WAN024GD4; Start 9; Stop 33
ccttcaagacttactgtgtccaaac

SEQ ID NO: 334834 - DNA, 25 bp, Artificial
  probe
  misc_feature (1)..(25): SEQ ID NO: 2720; WAN024GD4; Start 8; Stop 32
accttcaagacttactgtgtccaaa

SEQ ID NO: 334835 - DNA, 25 bp, Artificial
  probe
  misc_feature (1)..(25): SEQ ID NO: 2720; WAN024GD4; Start 16; Stop 40
gacttactgtgtccaaaccaatgtg

SEQ ID NO: 334836 - DNA, 25 bp, Artificial
  probe
  misc_feature (1)..(25): SEQ ID NO: 2721; WAN024FIB; Start 623; Stop 647
ctatcctctctcgtaatgccaatct

SEQ ID NO: 334837 - DNA, 25 bp, Artificial
  probe
  misc_feature (1)..(25): SEQ ID NO: 2721; WAN024FIB; Start 624; Stop 648
tatcctctctcgtaatgccaatctg

SEQ ID NO: 334838 - DNA, 25 bp, Artificial
  probe
  misc_feature (1)..(25): SEQ ID NO: 2721; WAN024FIB; Start 269; Stop 293
aagagagcattgacaactacatcca

SEQ ID NO: 334839 - DNA, 25 bp, Artificial
  probe
  misc_feature (1)..(25): SEQ ID NO: 2721; WAN024FIB; Start 622; Stop 646
cctatcctctctcgtaatgccaatc

SEQ ID NO: 334840 - DNA, 25 bp, Artificial
  probe
  misc_feature (1)..(25): SEQ ID NO: 2721; WAN024FIB; Start 270; Stop 294
agagagcattgacaactacatccaa

SEQ ID NO: 334841 - DNA, 25 bp, Artificial
  probe
  misc_feature (1)..(25): SEQ ID NO: 2721; WAN024FIB; Start 543; Stop 567
ctatggaaatggaaacaacgaagaa

SEQ ID NO: 334842 - DNA, 25 bp, Artificial
  probe
  misc_feature (1)..(25): SEQ ID NO: 2721; WAN024FIB; Start 664; Stop 688
actactgccctcaagaagaaatatg

SEQ ID NO: 334843 - DNA, 25 bp, Artificial
  probe
  misc_feature (1)..(25): SEQ ID NO: 2721; WAN024FIB; Start 541; Stop 565
gtctatggaaatggaaacaacgaag

SEQ ID NO: 334844 - DNA, 25 bp, Artificial
  probe
  misc_feature (1)..(25): SEQ ID NO: 2721; WAN024FIB; Start 661; Stop 685
gttactactgccctcaagaagaaat

SEQ ID NO: 334845 - DNA, 25 bp, Artificial
  probe
  misc_feature (1)..(25): SEQ ID NO: 2721; WAN024FIB; Start 544; Stop 568
tatggaaatggaaacaacgaagaaa

SEQ ID NO: 334846 - DNA, 25 bp, Artificial
  probe
  misc_feature (1)..(25): SEQ ID NO: 2721; WAN024FIB; Start 662; Stop 686
ttactactgccctcaagaagaaata

SEQ ID NO: 334847 - DNA, 25 bp, Artificial
  probe
  misc_feature (1)..(25): SEQ ID NO: 2721; WAN024FIB; Start 665; Stop 689
ctactgccctcaagaagaaatatgg

SEQ ID NO: 334848 - DNA, 25 bp, Artificial
  probe
  misc_feature (1)..(25): SEQ ID NO: 2721; WAN024FIB; Start 663; Stop 687
tactactgccctcaagaagaaatat

SEQ ID NO: 334849 - DNA, 25 bp, Artificial
  probe
  misc_feature (1)..(25): SEQ ID NO: 2721; WAN024FIB; Start 462; Stop 486
cgatgaaacctactatggatttgaa

SEQ ID NO: 334850 - DNA, 25 bp, Artificial
  probe
  misc_feature (1)..(25): SEQ ID NO: 2721; WAN024FIB; Start 268; Stop 292
aaagagagcattgacaactacatcc

SEQ ID NO: 334851 - DNA, 25 bp, Artificial
  probe
  misc_feature (1)..(25): SEQ ID NO: 2721; WAN024FIB; Start 542; Stop 566
tctatggaaatggaaacaacgaaga

SEQ ID NO: 334852 - DNA, 25 bp, Artificial
  probe
  misc_feature (1)..(25): SEQ ID NO: 2721; WAN024FIB; Start 666; Stop 690
tactgccctcaagaagaaatatggt

SEQ ID NO: 334853 - DNA, 25 bp, Artificial
  probe
  misc_feature (1)..(25): SEQ ID NO: 2721; WAN024FIB; Start 2; Stop 26
tggtttatacttcactttcctcaaa

SEQ ID NO: 334854 - DNA, 25 bp, Artificial
  probe
  misc_feature (1)..(25): SEQ ID NO: 2721; WAN024FIB; Start 271; Stop 295
gagagcattgacaactacatccaaa

SEQ ID NO: 334855 - DNA, 25 bp, Artificial
  probe
  misc_feature (1)..(25): SEQ ID NO: 2721; WAN024FIB; Start 659; Stop 683
tagttactactgccctcaagaagaa

SEQ ID NO: 334856 - DNA, 25 bp, Artificial
  probe
  misc_feature (1)..(25): SEQ ID NO: 2721; WAN024FIB; Start 1; Stop 25
atggtttatacttcactttcctcaa

SEQ ID NO: 334857 - DNA, 25 bp, Artificial
  probe
  misc_feature (1)..(25): SEQ ID NO: 2721; WAN024FIB; Start 660; Stop 684
agttactactgccctcaagaagaaa

SEQ ID NO: 334858 - DNA, 25 bp, Artificial
  probe
  misc_feature (1)..(25): SEQ ID NO: 2721; WAN024FIB; Start 166; Stop 190
tctctccatgatgactttgatgaaa

SEQ ID NO: 334859 - DNA, 25 bp, Artificial
  probe
  misc_feature (1)..(25): SEQ ID NO: 2721; WAN024FIB; Start 165; Stop 189
ttctctccatgatgactttgatgaa

SEQ ID NO: 334860 - DNA, 25 bp, Artificial
  probe
  misc_feature (1)..(25): SEQ ID NO: 2721; WAN024FIB; Start 164; Stop 188
tttctctccatgatgactttgatga

SEQ ID NO: 334861 - DNA, 25 bp, Artificial
  probe
  misc_feature (1)..(25): SEQ ID NO: 2721; WAN024FIB; Start 163; Stop 187
gtttctctccatgatgactttgatg

SEQ ID NO: 334862 - DNA, 25 bp, Artificial
  probe
  misc_feature (1)..(25): SEQ ID NO: 2721; WAN024FIB; Start 540; Stop 564
tgtctatggaaatggaaacaacgaa

SEQ ID NO: 334863 - DNA, 25 bp, Artificial
  probe
  misc_feature (1)..(25): SEQ ID NO: 2721; WAN024FIB; Start 658; Stop 682
ctagttactactgccctcaagaaga

SEQ ID NO: 334864 - DNA, 25 bp, Artificial
  probe
  misc_feature (1)..(25): SEQ ID NO: 2721; WAN024FIB; Start 162; Stop 186
cgtttctctccatgatgactttgat

SEQ ID NO: 334865 - DNA, 25 bp, Artificial
  probe
  misc_feature (1)..(25): SEQ ID NO: 2721; WAN024FIB; Start 160; Stop 184
atcgtttctctccatgatgactttg

SEQ ID NO: 334866 - DNA, 25 bp, Artificial
  probe
  misc_feature (1)..(25): SEQ ID NO: 2721; WAN024FIB; Start 535; Stop 559
caggttgtctatggaaatggaaaca

SEQ ID NO: 334867 - DNA, 25 bp, Artificial
  probe
  misc_feature (1)..(25): SEQ ID NO: 2721; WAN024FIB; Start 534; Stop 558
acaggttgtctatggaaatggaaac

SEQ ID NO: 334868 - DNA, 25 bp, Artificial
  probe
  misc_feature (1)..(25): SEQ ID NO: 2721; WAN024FIB; Start 399; Stop 423
ctacacgctcaaccagaccaataac

SEQ ID NO: 334869 - DNA, 25 bp, Artificial
  probe
  misc_feature (1)..(25): SEQ ID NO: 2722; WAN024DBI; Start 62; Stop 86
aattgaatgaacggattgctaagag

SEQ ID NO: 334870 - DNA, 25 bp, Artificial
  probe
  misc_feature (1)..(25): SEQ ID NO: 2722; WAN024DBI; Start 152; Stop 176
cgattaacactgatacttatgacca

SEQ ID NO: 334871 - DNA, 25 bp, Artificial
  probe
  misc_feature (1)..(25): SEQ ID NO: 2722; WAN024DBI; Start 151; Stop 175
acgattaacactgatacttatgacc

SEQ ID NO: 334872 - DNA, 25 bp, Artificial
  probe
  misc_feature (1)..(25): SEQ ID NO: 2722; WAN024DBI; Start 150; Stop 174
cacgattaacactgatacttatgac

SEQ ID NO: 334873 - DNA, 25 bp, Artificial
  probe
  misc_feature (1)..(25): SEQ ID NO: 2722; WAN024DBI; Start 39; Stop 63
tctaactgatccagaattacaccaa

SEQ ID NO: 334874 - DNA, 25 bp, Artificial
  probe
  misc_feature (1)..(25): SEQ ID NO: 2722; WAN024DBI; Start 146; Stop 170
ttgtcacgattaacactgatactta

SEQ ID NO: 334875 - DNA, 25 bp, Artificial
  probe
  misc_feature (1)..(25): SEQ ID NO: 2722; WAN024DBI; Start 148; Stop 172
gtcacgattaacactgatacttatg

SEQ ID NO: 334876 - DNA, 25 bp, Artificial
  probe
  misc_feature (1)..(25): SEQ ID NO: 2722; WAN024DBI; Start 40; Stop 64
ctaactgatccagaattacaccaat

SEQ ID NO: 334877 - DNA, 25 bp, Artificial
  probe
  misc_feature (1)..(25): SEQ ID NO: 2722; WAN024DBI; Start 147; Stop 171
tgtcacgattaacactgatacttat

SEQ ID NO: 334878 - DNA, 25 bp, Artificial
  probe
  misc_feature (1)..(25): SEQ ID NO: 2722; WAN024DBI; Start 149; Stop 173
tcacgattaacactgatacttatga

SEQ ID NO: 334879 - DNA, 25 bp, Artificial
  probe
  misc_feature (1)..(25): SEQ ID NO: 2722; WAN024DBI; Start 273; Stop 297
attgagtaaaggagtcggagagtta

SEQ ID NO: 334880 - DNA, 25 bp, Artificial
  probe
  misc_feature (1)..(25): SEQ ID NO: 2722; WAN024DBI; Start 276; Stop 300
gagtaaaggagtcggagagttaatt

SEQ ID NO: 334881 - DNA, 25 bp, Artificial
  probe
  misc_feature (1)..(25): SEQ ID NO: 2722; WAN024DBI; Start 275; Stop 299
tgagtaaaggagtcggagagttaat

SEQ ID NO: 334882 - DNA, 25 bp, Artificial
  probe
  misc_feature (1)..(25): SEQ ID NO: 2722; WAN024DBI; Start 274; Stop 298
ttgagtaaaggagtcggagagttaa

SEQ ID NO: 334883 - DNA, 25 bp, Artificial
  probe
  misc_feature (1)..(25): SEQ ID NO: 2722; WAN024DBI; Start 41; Stop 65
taactgatccagaattacaccaatt

SEQ ID NO: 334884 - DNA, 25 bp, Artificial
  probe
  misc_feature (1)..(25): SEQ ID NO: 2722; WAN024DBI; Start 301; Stop 325
aaggaagtggacaaagaatttcaag

SEQ ID NO: 334885 - DNA, 25 bp, Artificial
  probe
  misc_feature (1)..(25): SEQ ID NO: 2722; WAN024DBI; Start 302; Stop 326
aggaagtggacaaagaatttcaagt

SEQ ID NO: 334886 - DNA, 25 bp, Artificial
  probe
  misc_feature (1)..(25): SEQ ID NO: 2722; WAN024DBI; Start 133; Stop 157
cccaatatgtcatttgtcacgatta

SEQ ID NO: 334887 - DNA, 25 bp, Artificial
  probe
  misc_feature (1)..(25): SEQ ID NO: 2722; WAN024DBI; Start 129; Stop 153
taatcccaatatgtcatttgtcacg

SEQ ID NO: 334888 - DNA, 25 bp, Artificial
  probe
  misc_feature (1)..(25): SEQ ID NO: 2722; WAN024DBI; Start 303; Stop 327
ggaagtggacaaagaatttcaagtg

SEQ ID NO: 334889 - DNA, 25 bp, Artificial
  probe
  misc_feature (1)..(25): SEQ ID NO: 2722; WAN024DBI; Start 131; Stop 155
atcccaatatgtcatttgtcacgat

SEQ ID NO: 334890 - DNA, 25 bp, Artificial
  probe
  misc_feature (1)..(25): SEQ ID NO: 2722; WAN024DBI; Start 269; Stop 293
aagaattgagtaaaggagtcggaga

SEQ ID NO: 334891 - DNA, 25 bp, Artificial
  probe
  misc_feature (1)..(25): SEQ ID NO: 2722; WAN024DBI; Start 266; Stop 290
tacaagaattgagtaaaggagtcgg

SEQ ID NO: 334892 - DNA, 25 bp, Artificial
  probe
  misc_feature (1)..(25): SEQ ID NO: 2722; WAN024DBI; Start 132; Stop 156
tcccaatatgtcatttgtcacgatt

SEQ ID NO: 334893 - DNA, 25 bp, Artificial
  probe
  misc_feature (1)..(25): SEQ ID NO: 2722; WAN024DBI; Start 130; Stop 154
aatcccaatatgtcatttgtcacga

SEQ ID NO: 334894 - DNA, 25 bp, Artificial
  probe
  misc_feature (1)..(25): SEQ ID NO: 2722; WAN024DBI; Start 248; Stop 272
tgatttctcaggaccaattacaaga

SEQ ID NO: 334895 - DNA, 25 bp, Artificial
  probe
  misc_feature (1)..(25): SEQ ID NO: 2722; WAN024DBI; Start 6; Stop 30
ttatcgctatcgtaccaatctcaaa

SEQ ID NO: 334896 - DNA, 25 bp, Artificial
  probe
  misc_feature (1)..(25): SEQ ID NO: 2722; WAN024DBI; Start 5; Stop 29
tttatcgctatcgtaccaatctcaa

SEQ ID NO: 334897 - DNA, 25 bp, Artificial
  probe
  misc_feature (1)..(25): SEQ ID NO: 2722; WAN024DBI; Start 272; Stop 296
aattgagtaaaggagtcggagagtt

SEQ ID NO: 334898 - DNA, 25 bp, Artificial
  probe
  misc_feature (1)..(25): SEQ ID NO: 2722; WAN024DBI; Start 125; Stop 149
tgcttaatcccaatatgtcatttgt

SEQ ID NO: 334899 - DNA, 25 bp, Artificial
  probe
  misc_feature (1)..(25): SEQ ID NO: 2722; WAN024DBI; Start 300; Stop 324
taaggaagtggacaaagaatttcaa

SEQ ID NO: 334900 - DNA, 25 bp, Artificial
  probe
  misc_feature (1)..(25): SEQ ID NO: 2722; WAN024DBI; Start 299; Stop 323
ttaaggaagtggacaaagaatttca

SEQ ID NO: 334901 - DNA, 25 bp, Artificial
  probe
  misc_feature (1)..(25): SEQ ID NO: 2722; WAN024DBI; Start 4; Stop 28
gtttatcgctatcgtaccaatctca

SEQ ID NO: 334902 - DNA, 25 bp, Artificial
  probe
  misc_feature (1)..(25): SEQ ID NO: 2723; WAN024CH2; Start 1008; Stop 1032
attgttggatgaagcagtctatgaa

SEQ ID NO: 334903 - DNA, 25 bp, Artificial
  probe
  misc_feature (1)..(25): SEQ ID NO: 2723; WAN024CH2; Start 1006; Stop 1030
gaattgttggatgaagcagtctatg

SEQ ID NO: 334904 - DNA, 25 bp, Artificial
  probe
  misc_feature (1)..(25): SEQ ID NO: 2723; WAN024CH2; Start 1007; Stop 1031
aattgttggatgaagcagtctatga

SEQ ID NO: 334905 - DNA, 25 bp, Artificial
  probe
  misc_feature (1)..(25): SEQ ID NO: 2723; WAN024CH2; Start 106; Stop 130
ggttatgaagttgttgaacggatta

SEQ ID NO: 334906 - DNA, 25 bp, Artificial
  probe
  misc_feature (1)..(25): SEQ ID NO: 2723; WAN024CH2; Start 1005; Stop 1029
agaattgttggatgaagcagtctat

SEQ ID NO: 334907 - DNA, 25 bp, Artificial
  probe
  misc_feature (1)..(25): SEQ ID NO: 2723; WAN024CH2; Start 1004; Stop 1028
aagaattgttggatgaagcagtcta

SEQ ID NO: 334908 - DNA, 25 bp, Artificial
  probe
  misc_feature (1)..(25): SEQ ID NO: 2723; WAN024CH2; Start 731; Stop 755
ctcgtatctatgtcaaggctgtctt

SEQ ID NO: 334909 - DNA, 25 bp, Artificial
  probe
  misc_feature (1)..(25): SEQ ID NO: 2723; WAN024CH2; Start 107; Stop 131
gttatgaagttgttgaacggattaa

SEQ ID NO: 334910 - DNA, 25 bp, Artificial
  probe
  misc_feature (1)..(25): SEQ ID NO: 2723; WAN024CH2; Start 275; Stop 299
ctatcaagtacgacaagcacgatac

SEQ ID NO: 334911 - DNA, 25 bp, Artificial
  probe
  misc_feature (1)..(25): SEQ ID NO: 2723; WAN024CH2; Start 730; Stop 754
actcgtatctatgtcaaggctgtct

SEQ ID NO: 334912 - DNA, 25 bp, Artificial
  probe
  misc_feature (1)..(25): SEQ ID NO: 2723; WAN024CH2; Start 1010; Stop 1034
tgttggatgaagcagtctatgaaat

SEQ ID NO: 334913 - DNA, 25 bp, Artificial
  probe
  misc_feature (1)..(25): SEQ ID NO: 2723; WAN024CH2; Start 1009; Stop 1033
ttgttggatgaagcagtctatgaaa

SEQ ID NO: 334914 - DNA, 25 bp, Artificial
  probe
  misc_feature (1)..(25): SEQ ID NO: 2723; WAN024CH2; Start 616; Stop 640
gggattcactcaaatggttactctt

SEQ ID NO: 334915 - DNA, 25 bp, Artificial
  probe
  misc_feature (1)..(25): SEQ ID NO: 2723; WAN024CH2; Start 1015; Stop 1039
gatgaagcagtctatgaaattggtc

SEQ ID NO: 334916 - DNA, 25 bp, Artificial
  probe
  misc_feature (1)..(25): SEQ ID NO: 2723; WAN024CH2; Start 617; Stop 641
ggattcactcaaatggttactcttt

SEQ ID NO: 334917 - DNA, 25 bp, Artificial
  probe
  misc_feature (1)..(25): SEQ ID NO: 2723; WAN024CH2; Start 1012; Stop 1036
ttggatgaagcagtctatgaaattg

SEQ ID NO: 334918 - DNA, 25 bp, Artificial
  probe
  misc_feature (1)..(25): SEQ ID NO: 2723; WAN024CH2; Start 1011; Stop 1035
gttggatgaagcagtctatgaaatt

SEQ ID NO: 334919 - DNA, 25 bp, Artificial
  probe
  misc_feature (1)..(25): SEQ ID NO: 2723; WAN024CH2; Start 718; Stop 742
ctacttgagccgactcgtatctatg

SEQ ID NO: 334920 - DNA, 25 bp, Artificial
  probe
  misc_feature (1)..(25): SEQ ID NO: 2723; WAN024CH2; Start 717; Stop 741
tctacttgagccgactcgtatctat

SEQ ID NO: 334921 - DNA, 25 bp, Artificial
  probe
  misc_feature (1)..(25): SEQ ID NO: 2723; WAN024CH2; Start 1014; Stop 1038
ggatgaagcagtctatgaaattggt

SEQ ID NO: 334922 - DNA, 25 bp, Artificial
  probe
  misc_feature (1)..(25): SEQ ID NO: 2723; WAN024CH2; Start 1013; Stop 1037
tggatgaagcagtctatgaaattgg

SEQ ID NO: 334923 - DNA, 25 bp, Artificial
  probe
  misc_feature (1)..(25): SEQ ID NO: 2723; WAN024CH2; Start 686; Stop 710
cagaattggaaggcaagaaacttaa

SEQ ID NO: 334924 - DNA, 25 bp, Artificial
  probe
  misc_feature (1)..(25): SEQ ID NO: 2723; WAN024CH2; Start 716; Stop 740
ttctacttgagccgactcgtatcta

SEQ ID NO: 334925 - DNA, 25 bp, Artificial
  probe
  misc_feature (1)..(25): SEQ ID NO: 2723; WAN024CH2; Start 267; Stop 291
catgttggctatcaagtacgacaag

SEQ ID NO: 334926 - DNA, 25 bp, Artificial
  probe
  misc_feature (1)..(25): SEQ ID NO: 2723; WAN024CH2; Start 615; Stop 639
tgggattcactcaaatggttactct

SEQ ID NO: 334927 - DNA, 25 bp, Artificial
  probe
  misc_feature (1)..(25): SEQ ID NO: 2723; WAN024CH2; Start 1016; Stop 1040
atgaagcagtctatgaaattggtcg

SEQ ID NO: 334928 - DNA, 25 bp, Artificial
  probe
  misc_feature (1)..(25): SEQ ID NO: 2723; WAN024CH2; Start 729; Stop 753
gactcgtatctatgtcaaggctgtc

SEQ ID NO: 334929 - DNA, 25 bp, Artificial
  probe
  misc_feature (1)..(25): SEQ ID NO: 2723; WAN024CH2; Start 1003; Stop 1027
aaagaattgttggatgaagcagtct

SEQ ID NO: 334930 - DNA, 25 bp, Artificial
  probe
  misc_feature (1)..(25): SEQ ID NO: 2723; WAN024CH2; Start 266; Stop 290
tcatgttggctatcaagtacgacaa

SEQ ID NO: 334931 - DNA, 25 bp, Artificial
  probe
  misc_feature (1)..(25): SEQ ID NO: 2723; WAN024CH2; Start 940; Stop 964
gaaatcttcaatatgggtgtgggac

SEQ ID NO: 334932 - DNA, 25 bp, Artificial
  probe
  misc_feature (1)..(25): SEQ ID NO: 2723; WAN024CH2; Start 913; Stop 937
ggtcagattaaacacgaagaaatgt

SEQ ID NO: 334933 - DNA, 25 bp, Artificial
  probe
  misc_feature (1)..(25): SEQ ID NO: 2723; WAN024CH2; Start 941; Stop 965
aaatcttcaatatgggtgtgggact

SEQ ID NO: 334934 - DNA, 25 bp, Artificial
  probe
  misc_feature (1)..(25): SEQ ID NO: 2723; WAN024CH2; Start 719; Stop 743
tacttgagccgactcgtatctatgt

SEQ ID NO: 334935 - DNA, 25 bp, Artificial
  probe
  misc_feature (1)..(25): SEQ ID NO: 2724; WAN024DWC; Start 337; Stop 361
acagattattcggttaaggtcagtc

SEQ ID NO: 334936 - DNA, 25 bp, Artificial
  probe
  misc_feature (1)..(25): SEQ ID NO: 2724; WAN024DWC; Start 336; Stop 360
cacagattattcggttaaggtcagt

SEQ ID NO: 334937 - DNA, 25 bp, Artificial
  probe
  misc_feature (1)..(25): SEQ ID NO: 2724; WAN024DWC; Start 335; Stop 359
acacagattattcggttaaggtcag

SEQ ID NO: 334938 - DNA, 25 bp, Artificial
  probe
  misc_feature (1)..(25): SEQ ID NO: 2724; WAN024DWC; Start 333; Stop 357
tcacacagattattcggttaaggtc

SEQ ID NO: 334939 - DNA, 25 bp, Artificial
  probe
  misc_feature (1)..(25): SEQ ID NO: 2724; WAN024DWC; Start 332; Stop 356
ctcacacagattattcggttaaggt

SEQ ID NO: 334940 - DNA, 25 bp, Artificial
  probe
  misc_feature (1)..(25): SEQ ID NO: 2724; WAN024DWC; Start 334; Stop 358
cacacagattattcggttaaggtca

SEQ ID NO: 334941 - DNA, 25 bp, Artificial
  probe
  misc_feature (1)..(25): SEQ ID NO: 2724; WAN024DWC; Start 338; Stop 362
cagattattcggttaaggtcagtcc

SEQ ID NO: 334942 - DNA, 25 bp, Artificial
  probe
  misc_feature (1)..(25): SEQ ID NO: 2724; WAN024DWC; Start 487; Stop 511
gaagcggactacaatgcctattatc

SEQ ID NO: 334943 - DNA, 25 bp, Artificial
  probe
  misc_feature (1)..(25): SEQ ID NO: 2724; WAN024DWC; Start 488; Stop 512
aagcggactacaatgcctattatct

SEQ ID NO: 334944 - DNA, 25 bp, Artificial
  probe
  misc_feature (1)..(25): SEQ ID NO: 2724; WAN024DWC; Start 486; Stop 510
agaagcggactacaatgcctattat

SEQ ID NO: 334945 - DNA, 25 bp, Artificial
  probe
  misc_feature (1)..(25): SEQ ID NO: 2724; WAN024DWC; Start 331; Stop 355
gctcacacagattattcggttaagg

SEQ ID NO: 334946 - DNA, 25 bp, Artificial
  probe
  misc_feature (1)..(25): SEQ ID NO: 2724; WAN024DWC; Start 935; Stop 959
gaggaactccactcttgcttaatat

SEQ ID NO: 334947 - DNA, 25 bp, Artificial
  probe
  misc_feature (1)..(25): SEQ ID NO: 2724; WAN024DWC; Start 936; Stop 960
aggaactccactcttgcttaatatt

SEQ ID NO: 334948 - DNA, 25 bp, Artificial
  probe
  misc_feature (1)..(25): SEQ ID NO: 2724; WAN024DWC; Start 485; Stop 509
gagaagcggactacaatgcctatta

SEQ ID NO: 334949 - DNA, 25 bp, Artificial
  probe
  misc_feature (1)..(25): SEQ ID NO: 2724; WAN024DWC; Start 16; Stop 40
caacctgtggataatcttgtgaaca

SEQ ID NO: 334950 - DNA, 25 bp, Artificial
  probe
  misc_feature (1)..(25): SEQ ID NO: 2724; WAN024DWC; Start 489; Stop 513
agcggactacaatgcctattatctg

SEQ ID NO: 334951 - DNA, 25 bp, Artificial
  probe
  misc_feature (1)..(25): SEQ ID NO: 2724; WAN024DWC; Start 939; Stop 963
aactccactcttgcttaatattccg

SEQ ID NO: 334952 - DNA, 25 bp, Artificial
  probe
  misc_feature (1)..(25): SEQ ID NO: 2724; WAN024DWC; Start 938; Stop 962
gaactccactcttgcttaatattcc

SEQ ID NO: 334953 - DNA, 25 bp, Artificial
  probe
  misc_feature (1)..(25): SEQ ID NO: 2724; WAN024DWC; Start 937; Stop 961
ggaactccactcttgcttaatattc

SEQ ID NO: 334954 - DNA, 25 bp, Artificial
  probe
  misc_feature (1)..(25): SEQ ID NO: 2724; WAN024DWC; Start 339; Stop 363
agattattcggttaaggtcagtcct

SEQ ID NO: 334955 - DNA, 25 bp, Artificial
  probe
  misc_feature (1)..(25): SEQ ID NO: 2724; WAN024DWC; Start 17; Stop 41
aacctgtggataatcttgtgaacaa

SEQ ID NO: 334956 - DNA, 25 bp, Artificial
  probe
  misc_feature (1)..(25): SEQ ID NO: 2724; WAN024DWC; Start 330; Stop 354
agctcacacagattattcggttaag

SEQ ID NO: 334957 - DNA, 25 bp, Artificial
  probe
  misc_feature (1)..(25): SEQ ID NO: 2724; WAN024DWC; Start 329; Stop 353
cagctcacacagattattcggttaa

SEQ ID NO: 334958 - DNA, 25 bp, Artificial
  probe
  misc_feature (1)..(25): SEQ ID NO: 2724; WAN024DWC; Start 934; Stop 958
cgaggaactccactcttgcttaata

SEQ ID NO: 334959 - DNA, 25 bp, Artificial
  probe
  misc_feature (1)..(25): SEQ ID NO: 2724; WAN024DWC; Start 322; Stop 346
tatccgacagctcacacagattatt

SEQ ID NO: 334960 - DNA, 25 bp, Artificial
  probe
  misc_feature (1)..(25): SEQ ID NO: 2724; WAN024DWC; Start 321; Stop 345
ttatccgacagctcacacagattat

SEQ ID NO: 334961 - DNA, 25 bp, Artificial
  probe
  misc_feature (1)..(25): SEQ ID NO: 2724; WAN024DWC; Start 1684; Stop 1708
ttggatttctatctgaacctaacgg

SEQ ID NO: 334962 - DNA, 25 bp, Artificial
  probe
  misc_feature (1)..(25): SEQ ID NO: 2724; WAN024DWC; Start 1679; Stop 1703
aaaccttggatttctatctgaacct

SEQ ID NO: 334963 - DNA, 25 bp, Artificial
  probe
  misc_feature (1)..(25): SEQ ID NO: 2724; WAN024DWC; Start 1038; Stop 1062
ctataaagaagatttggctctggga

SEQ ID NO: 334964 - DNA, 25 bp, Artificial
  probe
  misc_feature (1)..(25): SEQ ID NO: 2724; WAN024DWC; Start 1037; Stop 1061
tctataaagaagatttggctctggg

SEQ ID NO: 334965 - DNA, 25 bp, Artificial
  probe
  misc_feature (1)..(25): SEQ ID NO: 2724; WAN024DWC; Start 1683; Stop 1707
cttggatttctatctgaacctaacg

SEQ ID NO: 334966 - DNA, 25 bp, Artificial
  probe
  misc_feature (1)..(25): SEQ ID NO: 2724; WAN024DWC; Start 1035; Stop 1059
gctctataaagaagatttggctctg

SEQ ID NO: 334967 - DNA, 25 bp, Artificial
  probe
  misc_feature (1)..(25): SEQ ID NO: 2724; WAN024DWC; Start 759; Stop 783
tgataaactaggaacagaagcagag

SEQ ID NO: 334968 - DNA, 25 bp, Artificial
  probe
  misc_feature (1)..(25): SEQ ID NO: 2725; WAN024CBF; Start 234; Stop 258
aacacacataggtattccttctgta

SEQ ID NO: 334969 - DNA, 25 bp, Artificial
  probe
  misc_feature (1)..(25): SEQ ID NO: 2725; WAN024CBF; Start 235; Stop 259
acacacataggtattccttctgtat

SEQ ID NO: 334970 - DNA, 25 bp, Artificial
  probe
  misc_feature (1)..(25): SEQ ID NO: 2725; WAN024CBF; Start 237; Stop 261
acacataggtattccttctgtatca

SEQ ID NO: 334971 - DNA, 25 bp, Artificial
  probe
  misc_feature (1)..(25): SEQ ID NO: 2725; WAN024CBF; Start 236; Stop 260
cacacataggtattccttctgtatc

SEQ ID NO: 334972 - DNA, 25 bp, Artificial
  probe
  misc_feature (1)..(25): SEQ ID NO: 2725; WAN024CBF; Start 121; Stop 145
ccctcaacatcttccttctcaaata

SEQ ID NO: 334973 - DNA, 25 bp, Artificial
  probe
  misc_feature (1)..(25): SEQ ID NO: 2725; WAN024CBF; Start 238; Stop 262
cacataggtattccttctgtatcag

SEQ ID NO: 334974 - DNA, 25 bp, Artificial
  probe
  misc_feature (1)..(25): SEQ ID NO: 2725; WAN024CBF; Start 122; Stop 146
cctcaacatcttccttctcaaataa

SEQ ID NO: 334975 - DNA, 25 bp, Artificial
  probe
  misc_feature (1)..(25): SEQ ID NO: 2725; WAN024CBF; Start 163; Stop 187
tgttcaataatttcacttaacccgc

SEQ ID NO: 334976 - DNA, 25 bp, Artificial
  probe
  misc_feature (1)..(25): SEQ ID NO: 2725; WAN024CBF; Start 169; Stop 193
ataatttcacttaacccgccaacat

SEQ ID NO: 334977 - DNA, 25 bp, Artificial
  probe
  misc_feature (1)..(25): SEQ ID NO: 2725; WAN024CBF; Start 167; Stop 191
caataatttcacttaacccgccaac

SEQ ID NO: 334978 - DNA, 25 bp, Artificial
  probe
  misc_feature (1)..(25): SEQ ID NO: 2725; WAN024CBF; Start 166; Stop 190
tcaataatttcacttaacccgccaa

SEQ ID NO: 334979 - DNA, 25 bp, Artificial
  probe
  misc_feature (1)..(25): SEQ ID NO: 2725; WAN024CBF; Start 165; Stop 189
ttcaataatttcacttaacccgcca

SEQ ID NO: 334980 - DNA, 25 bp, Artificial
  probe
  misc_feature (1)..(25): SEQ ID NO: 2725; WAN024CBF; Start 210; Stop 234
agttccttgtgacattgactctaaa

SEQ ID NO: 334981 - DNA, 25 bp, Artificial
  probe
  misc_feature (1)..(25): SEQ ID NO: 2725; WAN024CBF; Start 164; Stop 188
gttcaataatttcacttaacccgcc

SEQ ID NO: 334982 - DNA, 25 bp, Artificial
  probe
  misc_feature (1)..(25): SEQ ID NO: 2725; WAN024CBF; Start 120; Stop 144
tccctcaacatcttccttctcaaat

SEQ ID NO: 334983 - DNA, 25 bp, Artificial
  probe
  misc_feature (1)..(25): SEQ ID NO: 2725; WAN024CBF; Start 171; Stop 195
aatttcacttaacccgccaacatta

SEQ ID NO: 334984 - DNA, 25 bp, Artificial
  probe
  misc_feature (1)..(25): SEQ ID NO: 2725; WAN024CBF; Start 170; Stop 194
taatttcacttaacccgccaacatt

SEQ ID NO: 334985 - DNA, 25 bp, Artificial
  probe
  misc_feature (1)..(25): SEQ ID NO: 2725; WAN024CBF; Start 168; Stop 192
aataatttcacttaacccgccaaca

SEQ ID NO: 334986 - DNA, 25 bp, Artificial
  probe
  misc_feature (1)..(25): SEQ ID NO: 2725; WAN024CBF; Start 172; Stop 196
atttcacttaacccgccaacattac

SEQ ID NO: 334987 - DNA, 25 bp, Artificial
  probe
  misc_feature (1)..(25): SEQ ID NO: 2725; WAN024CBF; Start 148; Stop 172
aatccatcaaccctatgttcaataa

SEQ ID NO: 334988 - DNA, 25 bp, Artificial
  probe
  misc_feature (1)..(25): SEQ ID NO: 2725; WAN024CBF; Start 147; Stop 171
aaatccatcaaccctatgttcaata

SEQ ID NO: 334989 - DNA, 25 bp, Artificial
  probe
  misc_feature (1)..(25): SEQ ID NO: 2725; WAN024CBF; Start 119; Stop 143
ctccctcaacatcttccttctcaaa

SEQ ID NO: 334990 - DNA, 25 bp, Artificial
  probe
  misc_feature (1)..(25): SEQ ID NO: 2725; WAN024CBF; Start 150; Stop 174
tccatcaaccctatgttcaataatt

SEQ ID NO: 334991 - DNA, 25 bp, Artificial
  probe
  misc_feature (1)..(25): SEQ ID NO: 2725; WAN024CBF; Start 233; Stop 257
aaacacacataggtattccttctgt

SEQ ID NO: 334992 - DNA, 25 bp, Artificial
  probe
  misc_feature (1)..(25): SEQ ID NO: 2725; WAN024CBF; Start 174; Stop 198
ttcacttaacccgccaacattacta

SEQ ID NO: 334993 - DNA, 25 bp, Artificial
  probe
  misc_feature (1)..(25): SEQ ID NO: 2725; WAN024CBF; Start 149; Stop 173
atccatcaaccctatgttcaataat

SEQ ID NO: 334994 - DNA, 25 bp, Artificial
  probe
  misc_feature (1)..(25): SEQ ID NO: 2725; WAN024CBF; Start 162; Stop 186
atgttcaataatttcacttaacccg

SEQ ID NO: 334995 - DNA, 25 bp, Artificial
  probe
  misc_feature (1)..(25): SEQ ID NO: 2725; WAN024CBF; Start 123; Stop 147
ctcaacatcttccttctcaaataaa

SEQ ID NO: 334996 - DNA, 25 bp, Artificial
  probe
  misc_feature (1)..(25): SEQ ID NO: 2725; WAN024CBF; Start 155; Stop 179
caaccctatgttcaataatttcact

SEQ ID NO: 334997 - DNA, 25 bp, Artificial
  probe
  misc_feature (1)..(25): SEQ ID NO: 2725; WAN024CBF; Start 154; Stop 178
tcaaccctatgttcaataatttcac

SEQ ID NO: 334998 - DNA, 25 bp, Artificial
  probe
  misc_feature (1)..(25): SEQ ID NO: 2725; WAN024CBF; Start 151; Stop 175
ccatcaaccctatgttcaataattt

SEQ ID NO: 334999 - DNA, 25 bp, Artificial
  probe
  misc_feature (1)..(25): SEQ ID NO: 2725; WAN024CBF; Start 175; Stop 199
tcacttaacccgccaacattactag

SEQ ID NO: 335000 - DNA, 25 bp, Artificial
  probe
  misc_feature (1)..(25): SEQ ID NO: 2725; WAN024CBF; Start 173; Stop 197
tttcacttaacccgccaacattact

SEQ ID NO: 335001 - DNA, 25 bp, Artificial
  probe
  misc_feature (1)..(25): SEQ ID NO: 2726; WAN024CAA; Start 245; Stop 269
atacctatcgcttgctaccttatct

SEQ ID NO: 335002 - DNA, 25 bp, Artificial
  probe
  misc_feature (1)..(25): SEQ ID NO: 2726; WAN024CAA; Start 246; Stop 270
tacctatcgcttgctaccttatctt

SEQ ID NO: 335003 - DNA, 25 bp, Artificial
  probe
  misc_feature (1)..(25): SEQ ID NO: 2726; WAN024CAA; Start 244; Stop 268
gatacctatcgcttgctaccttatc

SEQ ID NO: 335004 - DNA, 25 bp, Artificial
  probe
  misc_feature (1)..(25): SEQ ID NO: 2726; WAN024CAA; Start 28; Stop 52
ttatctagtggcattatcggagagg

SEQ ID NO: 335005 - DNA, 25 bp, Artificial
  probe
  misc_feature (1)..(25): SEQ ID NO: 2726; WAN024CAA; Start 29; Stop 53
tatctagtggcattatcggagagga

SEQ ID NO: 335006 - DNA, 25 bp, Artificial
  probe
  misc_feature (1)..(25): SEQ ID NO: 2726; WAN024CAA; Start 873; Stop 897
cgactataaagaggcactattggat

SEQ ID NO: 335007 - DNA, 25 bp, Artificial
  probe
  misc_feature (1)..(25): SEQ ID NO: 2726; WAN024CAA; Start 870; Stop 894
tgacgactataaagaggcactattg

SEQ ID NO: 335008 - DNA, 25 bp, Artificial
  probe
  misc_feature (1)..(25): SEQ ID NO: 2726; WAN024CAA; Start 869; Stop 893
atgacgactataaagaggcactatt

SEQ ID NO: 335009 - DNA, 25 bp, Artificial
  probe
  misc_feature (1)..(25): SEQ ID NO: 2726; WAN024CAA; Start 500; Stop 524
tttggtatgaggaacgaactgattt

SEQ ID NO: 335010 - DNA, 25 bp, Artificial
  probe
  misc_feature (1)..(25): SEQ ID NO: 2726; WAN024CAA; Start 30; Stop 54
atctagtggcattatcggagaggat

SEQ ID NO: 335011 - DNA, 25 bp, Artificial
  probe
  misc_feature (1)..(25): SEQ ID NO: 2726; WAN024CAA; Start 871; Stop 895
gacgactataaagaggcactattgg

SEQ ID NO: 335012 - DNA, 25 bp, Artificial
  probe
  misc_feature (1)..(25): SEQ ID NO: 2726; WAN024CAA; Start 882; Stop 906
agaggcactattggatatcattgac

SEQ ID NO: 335013 - DNA, 25 bp, Artificial
  probe
  misc_feature (1)..(25): SEQ ID NO: 2726; WAN024CAA; Start 450; Stop 474
taaagaattgattgagacgggaaga

SEQ ID NO: 335014 - DNA, 25 bp, Artificial
  probe
  misc_feature (1)..(25): SEQ ID NO: 2726; WAN024CAA; Start 883; Stop 907
gaggcactattggatatcattgaca

SEQ ID NO: 335015 - DNA, 25 bp, Artificial
  probe
  misc_feature (1)..(25): SEQ ID NO: 2726; WAN024CAA; Start 881; Stop 905
aagaggcactattggatatcattga

SEQ ID NO: 335016 - DNA, 25 bp, Artificial
  probe
  misc_feature (1)..(25): SEQ ID NO: 2726; WAN024CAA; Start 452; Stop 476
aagaattgattgagacgggaagaat

SEQ ID NO: 335017 - DNA, 25 bp, Artificial
  probe
  misc_feature (1)..(25): SEQ ID NO: 2726; WAN024CAA; Start 872; Stop 896
acgactataaagaggcactattgga

SEQ ID NO: 335018 - DNA, 25 bp, Artificial
  probe
  misc_feature (1)..(25): SEQ ID NO: 2726; WAN024CAA; Start 451; Stop 475
aaagaattgattgagacgggaagaa

SEQ ID NO: 335019 - DNA, 25 bp, Artificial
  probe
  misc_feature (1)..(25): SEQ ID NO: 2726; WAN024CAA; Start 449; Stop 473
ttaaagaattgattgagacgggaag

SEQ ID NO: 335020 - DNA, 25 bp, Artificial
  probe
  misc_feature (1)..(25): SEQ ID NO: 2726; WAN024CAA; Start 203; Stop 227
atgatagcatcgacatgatcctatg

SEQ ID NO: 335021 - DNA, 25 bp, Artificial
  probe
  misc_feature (1)..(25): SEQ ID NO: 2726; WAN024CAA; Start 31; Stop 55
tctagtggcattatcggagaggatt

SEQ ID NO: 335022 - DNA, 25 bp, Artificial
  probe
  misc_feature (1)..(25): SEQ ID NO: 2726; WAN024CAA; Start 25; Stop 49
agtttatctagtggcattatcggag

SEQ ID NO: 335023 - DNA, 25 bp, Artificial
  probe
  misc_feature (1)..(25): SEQ ID NO: 2726; WAN024CAA; Start 137; Stop 161
aaggattagactttatcaaggacca

SEQ ID NO: 335024 - DNA, 25 bp, Artificial
  probe
  misc_feature (1)..(25): SEQ ID NO: 2726; WAN024CAA; Start 138; Stop 162
aggattagactttatcaaggaccat

SEQ ID NO: 335025 - DNA, 25 bp, Artificial
  probe
  misc_feature (1)..(25): SEQ ID NO: 2726; WAN024CAA; Start 247; Stop 271
acctatcgcttgctaccttatcttt

SEQ ID NO: 335026 - DNA, 25 bp, Artificial
  probe
  misc_feature (1)..(25): SEQ ID NO: 2726; WAN024CAA; Start 139; Stop 163
ggattagactttatcaaggaccatc

SEQ ID NO: 335027 - DNA, 25 bp, Artificial
  probe
  misc_feature (1)..(25): SEQ ID NO: 2726; WAN024CAA; Start 26; Stop 50
gtttatctagtggcattatcggaga

SEQ ID NO: 335028 - DNA, 25 bp, Artificial
  probe
  misc_feature (1)..(25): SEQ ID NO: 2726; WAN024CAA; Start 27; Stop 51
tttatctagtggcattatcggagag

SEQ ID NO: 335029 - DNA, 25 bp, Artificial
  probe
  misc_feature (1)..(25): SEQ ID NO: 2726; WAN024CAA; Start 24; Stop 48
tagtttatctagtggcattatcgga

SEQ ID NO: 335030 - DNA, 25 bp, Artificial
  probe
  misc_feature (1)..(25): SEQ ID NO: 2726; WAN024CAA; Start 499; Stop 523
gtttggtatgaggaacgaactgatt

SEQ ID NO: 335031 - DNA, 25 bp, Artificial
  probe
  misc_feature (1)..(25): SEQ ID NO: 2726; WAN024CAA; Start 456; Stop 480
attgattgagacgggaagaatttca

SEQ ID NO: 335032 - DNA, 25 bp, Artificial
  probe
  misc_feature (1)..(25): SEQ ID NO: 2726; WAN024CAA; Start 868; Stop 892
catgacgactataaagaggcactat

SEQ ID NO: 335033 - DNA, 25 bp, Artificial
  probe
  misc_feature (1)..(25): SEQ ID NO: 2726; WAN024CAA; Start 455; Stop 479
aattgattgagacgggaagaatttc

SEQ ID NO: 335034 - DNA, 25 bp, Artificial
  probe
  misc_feature (1)..(25): SEQ ID NO: 2727; WAN024B5W; Start 232; Stop 256
agaggtgacttccaaactttaacaa

SEQ ID NO: 335035 - DNA, 25 bp, Artificial
  probe
  misc_feature (1)..(25): SEQ ID NO: 2727; WAN024B5W; Start 231; Stop 255
aagaggtgacttccaaactttaaca

SEQ ID NO: 335036 - DNA, 25 bp, Artificial
  probe
  misc_feature (1)..(25): SEQ ID NO: 2727; WAN024B5W; Start 230; Stop 254
aaagaggtgacttccaaactttaac

SEQ ID NO: 335037 - DNA, 25 bp, Artificial
  probe
  misc_feature (1)..(25): SEQ ID NO: 2727; WAN024B5W; Start 226; Stop 250
actaaaagaggtgacttccaaactt

SEQ ID NO: 335038 - DNA, 25 bp, Artificial
  probe
  misc_feature (1)..(25): SEQ ID NO: 2727; WAN024B5W; Start 225; Stop 249
aactaaaagaggtgacttccaaact

SEQ ID NO: 335039 - DNA, 25 bp, Artificial
  probe
  misc_feature (1)..(25): SEQ ID NO: 2727; WAN024B5W; Start 222; Stop 246
tgaaactaaaagaggtgacttccaa

SEQ ID NO: 335040 - DNA, 25 bp, Artificial
  probe
  misc_feature (1)..(25): SEQ ID NO: 2727; WAN024B5W; Start 221; Stop 245
ttgaaactaaaagaggtgacttcca

SEQ ID NO: 335041 - DNA, 25 bp, Artificial
  probe
  misc_feature (1)..(25): SEQ ID NO: 2727; WAN024B5W; Start 220; Stop 244
gttgaaactaaaagaggtgacttcc

SEQ ID NO: 335042 - DNA, 25 bp, Artificial
  probe
  misc_feature (1)..(25): SEQ ID NO: 2727; WAN024B5W; Start 224; Stop 248
aaactaaaagaggtgacttccaaac

SEQ ID NO: 335043 - DNA, 25 bp, Artificial
  probe
  misc_feature (1)..(25): SEQ ID NO: 2727; WAN024B5W; Start 223; Stop 247
gaaactaaaagaggtgacttccaaa

SEQ ID NO: 335044 - DNA, 25 bp, Artificial
  probe
  misc_feature (1)..(25): SEQ ID NO: 2727; WAN024B5W; Start 218; Stop 242
cagttgaaactaaaagaggtgactt

SEQ ID NO: 335045 - DNA, 25 bp, Artificial
  probe
  misc_feature (1)..(25): SEQ ID NO: 2727; WAN024B5W; Start 219; Stop 243
agttgaaactaaaagaggtgacttc

SEQ ID NO: 335046 - DNA, 25 bp, Artificial
  probe
  misc_feature (1)..(25): SEQ ID NO: 2727; WAN024B5W; Start 217; Stop 241
ccagttgaaactaaaagaggtgact

SEQ ID NO: 335047 - DNA, 25 bp, Artificial
  probe
  misc_feature (1)..(25): SEQ ID NO: 2727; WAN024B5W; Start 214; Stop 238
ttcccagttgaaactaaaagaggtg

SEQ ID NO: 335048 - DNA, 25 bp, Artificial
  probe
  misc_feature (1)..(25): SEQ ID NO: 2727; WAN024B5W; Start 216; Stop 240
cccagttgaaactaaaagaggtgac

SEQ ID NO: 335049 - DNA, 25 bp, Artificial
  probe
  misc_feature (1)..(25): SEQ ID NO: 2727; WAN024B5W; Start 215; Stop 239
tcccagttgaaactaaaagaggtga

SEQ ID NO: 335050 - DNA, 25 bp, Artificial
  probe
  misc_feature (1)..(25): SEQ ID NO: 2727; WAN024B5W; Start 227; Stop 251
ctaaaagaggtgacttccaaacttt

SEQ ID NO: 335051 - DNA, 25 bp, Artificial
  probe
  misc_feature (1)..(25): SEQ ID NO: 2727; WAN024B5W; Start 213; Stop 237
tttcccagttgaaactaaaagaggt

SEQ ID NO: 335052 - DNA, 25 bp, Artificial
  probe
  misc_feature (1)..(25): SEQ ID NO: 2727; WAN024B5W; Start 212; Stop 236
ttttcccagttgaaactaaaagagg

SEQ ID NO: 335053 - DNA, 25 bp, Artificial
  probe
  misc_feature (1)..(25): SEQ ID NO: 2727; WAN024B5W; Start 229; Stop 253
aaaagaggtgacttccaaactttaa

SEQ ID NO: 335054 - DNA, 25 bp, Artificial
  probe
  misc_feature (1)..(25): SEQ ID NO: 2727; WAN024B5W; Start 228; Stop 252
taaaagaggtgacttccaaacttta

SEQ ID NO: 335055 - DNA, 25 bp, Artificial
  probe
  misc_feature (1)..(25): SEQ ID NO: 2729; WAN024EX4; Start 276; Stop 300
tagtaataccaagaacgcctatgtc

SEQ ID NO: 335056 - DNA, 25 bp, Artificial
  probe
  misc_feature (1)..(25): SEQ ID NO: 2729; WAN024EX4; Start 279; Stop 303
taataccaagaacgcctatgtcatt

SEQ ID NO: 335057 - DNA, 25 bp, Artificial
  probe
  misc_feature (1)..(25): SEQ ID NO: 2729; WAN024EX4; Start 275; Stop 299
ttagtaataccaagaacgcctatgt

SEQ ID NO: 335058 - DNA, 25 bp, Artificial
  probe
  misc_feature (1)..(25): SEQ ID NO: 2729; WAN024EX4; Start 272; Stop 296
ccattagtaataccaagaacgccta

SEQ ID NO: 335059 - DNA, 25 bp, Artificial
  probe
  misc_feature (1)..(25): SEQ ID NO: 2729; WAN024EX4; Start 581; Stop 605
ttgatgagattgagagagaacagtt

SEQ ID NO: 335060 - DNA, 25 bp, Artificial
  probe
  misc_feature (1)..(25): SEQ ID NO: 2729; WAN024EX4; Start 270; Stop 294
taccattagtaataccaagaacgcc

SEQ ID NO: 335061 - DNA, 25 bp, Artificial
  probe
  misc_feature (1)..(25): SEQ ID NO: 2729; WAN024EX4; Start 278; Stop 302
gtaataccaagaacgcctatgtcat

SEQ ID NO: 335062 - DNA, 25 bp, Artificial
  probe
  misc_feature (1)..(25): SEQ ID NO: 2729; WAN024EX4; Start 277; Stop 301
agtaataccaagaacgcctatgtca

SEQ ID NO: 335063 - DNA, 25 bp, Artificial
  probe
  misc_feature (1)..(25): SEQ ID NO: 2729; WAN024EX4; Start 274; Stop 298
attagtaataccaagaacgcctatg

SEQ ID NO: 335064 - DNA, 25 bp, Artificial
  probe
  misc_feature (1)..(25): SEQ ID NO: 2729; WAN024EX4; Start 273; Stop 297
cattagtaataccaagaacgcctat

SEQ ID NO: 335065 - DNA, 25 bp, Artificial
  probe
  misc_feature (1)..(25): SEQ ID NO: 2729; WAN024EX4; Start 271; Stop 295
accattagtaataccaagaacgcct

SEQ ID NO: 335066 - DNA, 25 bp, Artificial
  probe
  misc_feature (1)..(25): SEQ ID NO: 2729; WAN024EX4; Start 30; Stop 54
ttgtacctggatagacctagaccta

SEQ ID NO: 335067 - DNA, 25 bp, Artificial
  probe
  misc_feature (1)..(25): SEQ ID NO: 2729; WAN024EX4; Start 280; Stop 304
aataccaagaacgcctatgtcattg

SEQ ID NO: 335068 - DNA, 25 bp, Artificial
  probe
  misc_feature (1)..(25): SEQ ID NO: 2729; WAN024EX4; Start 31; Stop 55
tgtacctggatagacctagacctag

SEQ ID NO: 335069 - DNA, 25 bp, Artificial
  probe
  misc_feature (1)..(25): SEQ ID NO: 2729; WAN024EX4; Start 637; Stop 661
gtatccatgacagacctaatctctc

SEQ ID NO: 335070 - DNA, 25 bp, Artificial
  probe
  misc_feature (1)..(25): SEQ ID NO: 2729; WAN024EX4; Start 390; Stop 414
ctactatcctgtcattgagcagatg

SEQ ID NO: 335071 - DNA, 25 bp, Artificial
  probe
  misc_feature (1)..(25): SEQ ID NO: 2729; WAN024EX4; Start 638; Stop 662
tatccatgacagacctaatctctca

SEQ ID NO: 335072 - DNA, 25 bp, Artificial
  probe
  misc_feature (1)..(25): SEQ ID NO: 2729; WAN024EX4; Start 541; Stop 565
ttgttagagcatattcaaggtcatg

SEQ ID NO: 335073 - DNA, 25 bp, Artificial
  probe
  misc_feature (1)..(25): SEQ ID NO: 2729; WAN024EX4; Start 256; Stop 280
catcgtcgcctgattaccattagta

SEQ ID NO: 335074 - DNA, 25 bp, Artificial
  probe
  misc_feature (1)..(25): SEQ ID NO: 2729; WAN024EX4; Start 375; Stop 399
aatcatcagcaatgcctactatcct

SEQ ID NO: 335075 - DNA, 25 bp, Artificial
  probe
  misc_feature (1)..(25): SEQ ID NO: 2729; WAN024EX4; Start 389; Stop 413
cctactatcctgtcattgagcagat

SEQ ID NO: 335076 - DNA, 25 bp, Artificial
  probe
  misc_feature (1)..(25): SEQ ID NO: 2729; WAN024EX4; Start 401; Stop 425
tcattgagcagatggacaagagtag

SEQ ID NO: 335077 - DNA, 25 bp, Artificial
  probe
  misc_feature (1)..(25): SEQ ID NO: 2729; WAN024EX4; Start 281; Stop 305
ataccaagaacgcctatgtcattga

SEQ ID NO: 335078 - DNA, 25 bp, Artificial
  probe
  misc_feature (1)..(25): SEQ ID NO: 2729; WAN024EX4; Start 639; Stop 663
atccatgacagacctaatctctcag

SEQ ID NO: 335079 - DNA, 25 bp, Artificial
  probe
  misc_feature (1)..(25): SEQ ID NO: 2729; WAN024EX4; Start 282; Stop 306
taccaagaacgcctatgtcattgaa

SEQ ID NO: 335080 - DNA, 25 bp, Artificial
  probe
  misc_feature (1)..(25): SEQ ID NO: 2729; WAN024EX4; Start 391; Stop 415
tactatcctgtcattgagcagatgg

SEQ ID NO: 335081 - DNA, 25 bp, Artificial
  probe
  misc_feature (1)..(25): SEQ ID NO: 2729; WAN024EX4; Start 269; Stop 293
ttaccattagtaataccaagaacgc

SEQ ID NO: 335082 - DNA, 25 bp, Artificial
  probe
  misc_feature (1)..(25): SEQ ID NO: 2729; WAN024EX4; Start 29; Stop 53
gttgtacctggatagacctagacct

SEQ ID NO: 335083 - DNA, 25 bp, Artificial
  probe
  misc_feature (1)..(25): SEQ ID NO: 2729; WAN024EX4; Start 485; Stop 509
ctgatttggagactggtatggttta

SEQ ID NO: 335084 - DNA, 25 bp, Artificial
  probe
  misc_feature (1)..(25): SEQ ID NO: 2729; WAN024EX4; Start 580; Stop 604
tttgatgagattgagagagaacagt

SEQ ID NO: 335085 - DNA, 25 bp, Artificial
  probe
  misc_feature (1)..(25): SEQ ID NO: 2729; WAN024EX4; Start 486; Stop 510
tgatttggagactggtatggtttat

SEQ ID NO: 335086 - DNA, 25 bp, Artificial
  probe
  misc_feature (1)..(25): SEQ ID NO: 2729; WAN024EX4; Start 111; Stop 135
cattgaatacgcactggatagaaac

SEQ ID NO: 335087 - DNA, 25 bp, Artificial
  probe
  misc_feature (1)..(25): SEQ ID NO: 2729; WAN024EX4; Start 587; Stop 611
agattgagagagaacagtttgatga

SEQ ID NO: 335088 - DNA, 25 bp, Artificial
  probe
  misc_feature (1)..(25): SEQ ID NO: 2730; WAN024EY8; Start 95; Stop 119
agataacagcaaagaagaccagatt

SEQ ID NO: 335089 - DNA, 25 bp, Artificial
  probe
  misc_feature (1)..(25): SEQ ID NO: 2730; WAN024EY8; Start 89; Stop 113
taaagcagataacagcaaagaagac

SEQ ID NO: 335090 - DNA, 25 bp, Artificial
  probe
  misc_feature (1)..(25): SEQ ID NO: 2730; WAN024EY8; Start 264; Stop 288
ttccttgacttctctttgggttaat

SEQ ID NO: 335091 - DNA, 25 bp, Artificial
  probe
  misc_feature (1)..(25): SEQ ID NO: 2730; WAN024EY8; Start 262; Stop 286
ctttccttgacttctctttgggtta

SEQ ID NO: 335092 - DNA, 25 bp, Artificial
  probe
  misc_feature (1)..(25): SEQ ID NO: 2730; WAN024EY8; Start 263; Stop 287
tttccttgacttctctttgggttaa

SEQ ID NO: 335093 - DNA, 25 bp, Artificial
  probe
  misc_feature (1)..(25): SEQ ID NO: 2730; WAN024EY8; Start 265; Stop 289
tccttgacttctctttgggttaatc

SEQ ID NO: 335094 - DNA, 25 bp, Artificial
  probe
  misc_feature (1)..(25): SEQ ID NO: 2730; WAN024EY8; Start 94; Stop 118
cagataacagcaaagaagaccagat

SEQ ID NO: 335095 - DNA, 25 bp, Artificial
  probe
  misc_feature (1)..(25): SEQ ID NO: 2730; WAN024EY8; Start 88; Stop 112
ttaaagcagataacagcaaagaaga

SEQ ID NO: 335096 - DNA, 25 bp, Artificial
  probe
  misc_feature (1)..(25): SEQ ID NO: 2730; WAN024EY8; Start 96; Stop 120
gataacagcaaagaagaccagattg

SEQ ID NO: 335097 - DNA, 25 bp, Artificial
  probe
  misc_feature (1)..(25): SEQ ID NO: 2730; WAN024EY8; Start 266; Stop 290
ccttgacttctctttgggttaatcc

SEQ ID NO: 335098 - DNA, 25 bp, Artificial
  probe
  misc_feature (1)..(25): SEQ ID NO: 2730; WAN024EY8; Start 90; Stop 114
aaagcagataacagcaaagaagacc

SEQ ID NO: 335099 - DNA, 25 bp, Artificial
  probe
  misc_feature (1)..(25): SEQ ID NO: 2730; WAN024EY8; Start 152; Stop 176
caatggcaaagttcaaagcgttaaa

SEQ ID NO: 335100 - DNA, 25 bp, Artificial
  probe
  misc_feature (1)..(25): SEQ ID NO: 2730; WAN024EY8; Start 261; Stop 285
tctttccttgacttctctttgggtt

SEQ ID NO: 335101 - DNA, 25 bp, Artificial
  probe
  misc_feature (1)..(25): SEQ ID NO: 2730; WAN024EY8; Start 176; Stop 200
aaagggtaaagacatttcgtttaac

SEQ ID NO: 335102 - DNA, 25 bp, Artificial
  probe
  misc_feature (1)..(25): SEQ ID NO: 2730; WAN024EY8; Start 86; Stop 110
cgttaaagcagataacagcaaagaa

SEQ ID NO: 335103 - DNA, 25 bp, Artificial
  probe
  misc_feature (1)..(25): SEQ ID NO: 2730; WAN024EY8; Start 258; Stop 282
ctgtctttccttgacttctctttgg

SEQ ID NO: 335104 - DNA, 25 bp, Artificial
  probe
  misc_feature (1)..(25): SEQ ID NO: 2730; WAN024EY8; Start 257; Stop 281
cctgtctttccttgacttctctttg

SEQ ID NO: 335105 - DNA, 25 bp, Artificial
  probe
  misc_feature (1)..(25): SEQ ID NO: 2730; WAN024EY8; Start 91; Stop 115
aagcagataacagcaaagaagacca

SEQ ID NO: 335106 - DNA, 25 bp, Artificial
  probe
  misc_feature (1)..(25): SEQ ID NO: 2730; WAN024EY8; Start 87; Stop 111
gttaaagcagataacagcaaagaag

SEQ ID NO: 335107 - DNA, 25 bp, Artificial
  probe
  misc_feature (1)..(25): SEQ ID NO: 2730; WAN024EY8; Start 93; Stop 117
gcagataacagcaaagaagaccaga

SEQ ID NO: 335108 - DNA, 25 bp, Artificial
  probe
  misc_feature (1)..(25): SEQ ID NO: 2730; WAN024EY8; Start 92; Stop 116
agcagataacagcaaagaagaccag

SEQ ID NO: 335109 - DNA, 25 bp, Artificial
  probe
  misc_feature (1)..(25): SEQ ID NO: 2730; WAN024EY8; Start 83; Stop 107
aagcgttaaagcagataacagcaaa

SEQ ID NO: 335110 - DNA, 25 bp, Artificial
  probe
  misc_feature (1)..(25): SEQ ID NO: 2730; WAN024EY8; Start 82; Stop 106
aaagcgttaaagcagataacagcaa

SEQ ID NO: 335111 - DNA, 25 bp, Artificial
  probe
  misc_feature (1)..(25): SEQ ID NO: 2730; WAN024EY8; Start 260; Stop 284
gtctttccttgacttctctttgggt

SEQ ID NO: 335112 - DNA, 25 bp, Artificial
  probe
  misc_feature (1)..(25): SEQ ID NO: 2730; WAN024EY8; Start 259; Stop 283
tgtctttccttgacttctctttggg

SEQ ID NO: 335113 - DNA, 25 bp, Artificial
  probe
  misc_feature (1)..(25): SEQ ID NO: 2730; WAN024EY8; Start 232; Stop 256
gtaaagtcattgaccaaaccctcag

SEQ ID NO: 335114 - DNA, 25 bp, Artificial
  probe
  misc_feature (1)..(25): SEQ ID NO: 2730; WAN024EY8; Start 85; Stop 109
gcgttaaagcagataacagcaaaga

SEQ ID NO: 335115 - DNA, 25 bp, Artificial
  probe
  misc_feature (1)..(25): SEQ ID NO: 2730; WAN024EY8; Start 84; Stop 108
agcgttaaagcagataacagcaaag

SEQ ID NO: 335116 - DNA, 25 bp, Artificial
  probe
  misc_feature (1)..(25): SEQ ID NO: 2730; WAN024EY8; Start 153; Stop 177
aatggcaaagttcaaagcgttaaaa

SEQ ID NO: 335117 - DNA, 25 bp, Artificial
  probe
  misc_feature (1)..(25): SEQ ID NO: 2730; WAN024EY8; Start 256; Stop 280
gcctgtctttccttgacttctcttt

SEQ ID NO: 335118 - DNA, 25 bp, Artificial
  probe
  misc_feature (1)..(25): SEQ ID NO: 2730; WAN024EY8; Start 151; Stop 175
gcaatggcaaagttcaaagcgttaa

SEQ ID NO: 335119 - DNA, 25 bp, Artificial
  probe
  misc_feature (1)..(25): SEQ ID NO: 2730; WAN024EY8; Start 267; Stop 291
cttgacttctctttgggttaatccc

SEQ ID NO: 335120 - DNA, 25 bp, Artificial
  probe
  misc_feature (1)..(25): SEQ ID NO: 2730; WAN024EY8; Start 177; Stop 201
aagggtaaagacatttcgtttaacg

SEQ ID NO: 335121 - DNA, 25 bp, Artificial
  probe
  misc_feature (1)..(25): SEQ ID NO: 2731; WAN024FQN; Start 1012; Stop 1036
ttcttgctccttcctatgattgtag

SEQ ID NO: 335122 - DNA, 25 bp, Artificial
  probe
  misc_feature (1)..(25): SEQ ID NO: 2731; WAN024FQN; Start 1014; Stop 1038
cttgctccttcctatgattgtagtt

SEQ ID NO: 335123 - DNA, 25 bp, Artificial
  probe
  misc_feature (1)..(25): SEQ ID NO: 2731; WAN024FQN; Start 1013; Stop 1037
tcttgctccttcctatgattgtagt

SEQ ID NO: 335124 - DNA, 25 bp, Artificial
  probe
  misc_feature (1)..(25): SEQ ID NO: 2731; WAN024FQN; Start 1015; Stop 1039
ttgctccttcctatgattgtagttt

SEQ ID NO: 335125 - DNA, 25 bp, Artificial
  probe
  misc_feature (1)..(25): SEQ ID NO: 2731; WAN024FQN; Start 600; Stop 624
aggtatccattcagcggttatttat

SEQ ID NO: 335126 - DNA, 25 bp, Artificial
  probe
  misc_feature (1)..(25): SEQ ID NO: 2731; WAN024FQN; Start 1016; Stop 1040
tgctccttcctatgattgtagtttc

SEQ ID NO: 335127 - DNA, 25 bp, Artificial
  probe
  misc_feature (1)..(25): SEQ ID NO: 2731; WAN024FQN; Start 1011; Stop 1035
tttcttgctccttcctatgattgta

SEQ ID NO: 335128 - DNA, 25 bp, Artificial
  probe
  misc_feature (1)..(25): SEQ ID NO: 2731; WAN024FQN; Start 599; Stop 623
taggtatccattcagcggttattta

SEQ ID NO: 335129 - DNA, 25 bp, Artificial
  probe
  misc_feature (1)..(25): SEQ ID NO: 2731; WAN024FQN; Start 601; Stop 625
ggtatccattcagcggttatttatt

SEQ ID NO: 335130 - DNA, 25 bp, Artificial
  probe
  misc_feature (1)..(25): SEQ ID NO: 2731; WAN024FQN; Start 1017; Stop 1041
gctccttcctatgattgtagtttca

SEQ ID NO: 335131 - DNA, 25 bp, Artificial
  probe
  misc_feature (1)..(25): SEQ ID NO: 2731; WAN024FQN; Start 792; Stop 816
tgacaattcatcctattcccagttt

SEQ ID NO: 335132 - DNA, 25 bp, Artificial
  probe
  misc_feature (1)..(25): SEQ ID NO: 2731; WAN024FQN; Start 1020; Stop 1044
ccttcctatgattgtagtttcaacc

SEQ ID NO: 335133 - DNA, 25 bp, Artificial
  probe
  misc_feature (1)..(25): SEQ ID NO: 2731; WAN024FQN; Start 1021; Stop 1045
cttcctatgattgtagtttcaacct

SEQ ID NO: 335134 - DNA, 25 bp, Artificial
  probe
  misc_feature (1)..(25): SEQ ID NO: 2731; WAN024FQN; Start 1019; Stop 1043
tccttcctatgattgtagtttcaac

SEQ ID NO: 335135 - DNA, 25 bp, Artificial
  probe
  misc_feature (1)..(25): SEQ ID NO: 2731; WAN024FQN; Start 791; Stop 815
ctgacaattcatcctattcccagtt

SEQ ID NO: 335136 - DNA, 25 bp, Artificial
  probe
  misc_feature (1)..(25): SEQ ID NO: 2731; WAN024FQN; Start 602; Stop 626
gtatccattcagcggttatttattt

SEQ ID NO: 335137 - DNA, 25 bp, Artificial
  probe
  misc_feature (1)..(25): SEQ ID NO: 2731; WAN024FQN; Start 1018; Stop 1042
ctccttcctatgattgtagtttcaa

SEQ ID NO: 335138 - DNA, 25 bp, Artificial
  probe
  misc_feature (1)..(25): SEQ ID NO: 2731; WAN024FQN; Start 63; Stop 87
aagtgttatagggctagtaaatgac

SEQ ID NO: 335139 - DNA, 25 bp, Artificial
  probe
  misc_feature (1)..(25): SEQ ID NO: 2731; WAN024FQN; Start 64; Stop 88
agtgttatagggctagtaaatgaca

SEQ ID NO: 335140 - DNA, 25 bp, Artificial
  probe
  misc_feature (1)..(25): SEQ ID NO: 2731; WAN024FQN; Start 790; Stop 814
tctgacaattcatcctattcccagt

SEQ ID NO: 335141 - DNA, 25 bp, Artificial
  probe
  misc_feature (1)..(25): SEQ ID NO: 2731; WAN024FQN; Start 65; Stop 89
gtgttatagggctagtaaatgacaa

SEQ ID NO: 335142 - DNA, 25 bp, Artificial
  probe
  misc_feature (1)..(25): SEQ ID NO: 2731; WAN024FQN; Start 1119; Stop 1143
tattctttgtctatcctgtgcagtt

SEQ ID NO: 335143 - DNA, 25 bp, Artificial
  probe
  misc_feature (1)..(25): SEQ ID NO: 2731; WAN024FQN; Start 1118; Stop 1142
gtattctttgtctatcctgtgcagt

SEQ ID NO: 335144 - DNA, 25 bp, Artificial
  probe
  misc_feature (1)..(25): SEQ ID NO: 2731; WAN024FQN; Start 422; Stop 446
tttctaaactatcgtatgctacagt

SEQ ID NO: 335145 - DNA, 25 bp, Artificial
  probe
  misc_feature (1)..(25): SEQ ID NO: 2731; WAN024FQN; Start 1117; Stop 1141
ggtattctttgtctatcctgtgcag

SEQ ID NO: 335146 - DNA, 25 bp, Artificial
  probe
  misc_feature (1)..(25): SEQ ID NO: 2731; WAN024FQN; Start 1022; Stop 1046
ttcctatgattgtagtttcaaccta

SEQ ID NO: 335147 - DNA, 25 bp, Artificial
  probe
  misc_feature (1)..(25): SEQ ID NO: 2731; WAN024FQN; Start 1120; Stop 1144
attctttgtctatcctgtgcagttg

SEQ ID NO: 335148 - DNA, 25 bp, Artificial
  probe
  misc_feature (1)..(25): SEQ ID NO: 2731; WAN024FQN; Start 66; Stop 90
tgttatagggctagtaaatgacaaa

SEQ ID NO: 335149 - DNA, 25 bp, Artificial
  probe
  misc_feature (1)..(25): SEQ ID NO: 2731; WAN024FQN; Start 1009; Stop 1033
cttttcttgctccttcctatgattg

SEQ ID NO: 335150 - DNA, 25 bp, Artificial
  probe
  misc_feature (1)..(25): SEQ ID NO: 2731; WAN024FQN; Start 1008; Stop 1032
tcttttcttgctccttcctatgatt

SEQ ID NO: 335151 - DNA, 25 bp, Artificial
  probe
  misc_feature (1)..(25): SEQ ID NO: 2731; WAN024FQN; Start 1006; Stop 1030
aatcttttcttgctccttcctatga

SEQ ID NO: 335152 - DNA, 25 bp, Artificial
  probe
  misc_feature (1)..(25): SEQ ID NO: 2731; WAN024FQN; Start 514; Stop 538
gttgccttgatgatgcttttactat

SEQ ID NO: 335153 - DNA, 25 bp, Artificial
  probe
  misc_feature (1)..(25): SEQ ID NO: 2731; WAN024FQN; Start 489; Stop 513
tagtggaatgagattttgtatggca

SEQ ID NO: 335154 - DNA, 25 bp, Artificial
  probe
  misc_feature (1)..(25): SEQ ID NO: 2732; WAN024DGV; Start 950; Stop 974
ctcaggaaacgacttatctctttag

SEQ ID NO: 335155 - DNA, 25 bp, Artificial
  probe
  misc_feature (1)..(25): SEQ ID NO: 2732; WAN024DGV; Start 738; Stop 762
gcaaggtgaacaaagtaaactagaa

SEQ ID NO: 335156 - DNA, 25 bp, Artificial
  probe
  misc_feature (1)..(25): SEQ ID NO: 2732; WAN024DGV; Start 953; Stop 977
aggaaacgacttatctctttagtgg

SEQ ID NO: 335157 - DNA, 25 bp, Artificial
  probe
  misc_feature (1)..(25): SEQ ID NO: 2732; WAN024DGV; Start 954; Stop 978
ggaaacgacttatctctttagtggt

SEQ ID NO: 335158 - DNA, 25 bp, Artificial
  probe
  misc_feature (1)..(25): SEQ ID NO: 2732; WAN024DGV; Start 952; Stop 976
caggaaacgacttatctctttagtg

SEQ ID NO: 335159 - DNA, 25 bp, Artificial
  probe
  misc_feature (1)..(25): SEQ ID NO: 2732; WAN024DGV; Start 951; Stop 975
tcaggaaacgacttatctctttagt

SEQ ID NO: 335160 - DNA, 25 bp, Artificial
  probe
  misc_feature (1)..(25): SEQ ID NO: 2732; WAN024DGV; Start 956; Stop 980
aaacgacttatctctttagtggttc

SEQ ID NO: 335161 - DNA, 25 bp, Artificial
  probe
  misc_feature (1)..(25): SEQ ID NO: 2732; WAN024DGV; Start 955; Stop 979
gaaacgacttatctctttagtggtt

SEQ ID NO: 335162 - DNA, 25 bp, Artificial
  probe
  misc_feature (1)..(25): SEQ ID NO: 2732; WAN024DGV; Start 985; Stop 1009
actgagtttaataagttctatgccc

SEQ ID NO: 335163 - DNA, 25 bp, Artificial
  probe
  misc_feature (1)..(25): SEQ ID NO: 2732; WAN024DGV; Start 47; Stop 71
atcaggtttcttctcgttcctttat

SEQ ID NO: 335164 - DNA, 25 bp, Artificial
  probe
  misc_feature (1)..(25): SEQ ID NO: 2732; WAN024DGV; Start 739; Stop 763
caaggtgaacaaagtaaactagaag

SEQ ID NO: 335165 - DNA, 25 bp, Artificial
  probe
  misc_feature (1)..(25): SEQ ID NO: 2732; WAN024DGV; Start 741; Stop 765
aggtgaacaaagtaaactagaagaa

SEQ ID NO: 335166 - DNA, 25 bp, Artificial
  probe
  misc_feature (1)..(25): SEQ ID NO: 2732; WAN024DGV; Start 740; Stop 764
aaggtgaacaaagtaaactagaaga

SEQ ID NO: 335167 - DNA, 25 bp, Artificial
  probe
  misc_feature (1)..(25): SEQ ID NO: 2732; WAN024DGV; Start 48; Stop 72
tcaggtttcttctcgttcctttatg

SEQ ID NO: 335168 - DNA, 25 bp, Artificial
  probe
  misc_feature (1)..(25): SEQ ID NO: 2732; WAN024DGV; Start 112; Stop 136
gctcgaattgtttatcttgctttga

SEQ ID NO: 335169 - DNA, 25 bp, Artificial
  probe
  misc_feature (1)..(25): SEQ ID NO: 2732; WAN024DGV; Start 46; Stop 70
gatcaggtttcttctcgttccttta

SEQ ID NO: 335170 - DNA, 25 bp, Artificial
  probe
  misc_feature (1)..(25): SEQ ID NO: 2732; WAN024DGV; Start 984; Stop 1008
cactgagtttaataagttctatgcc

SEQ ID NO: 335171 - DNA, 25 bp, Artificial
  probe
  misc_feature (1)..(25): SEQ ID NO: 2732; WAN024DGV; Start 1132; Stop 1156
tttaatggctatattgtacgcaaag

SEQ ID NO: 335172 - DNA, 25 bp, Artificial
  probe
  misc_feature (1)..(25): SEQ ID NO: 2732; WAN024DGV; Start 53; Stop 77
tttcttctcgttcctttatgcaatc

SEQ ID NO: 335173 - DNA, 25 bp, Artificial
  probe
  misc_feature (1)..(25): SEQ ID NO: 2732; WAN024DGV; Start 52; Stop 76
gtttcttctcgttcctttatgcaat

SEQ ID NO: 335174 - DNA, 25 bp, Artificial
  probe
  misc_feature (1)..(25): SEQ ID NO: 2732; WAN024DGV; Start 737; Stop 761
tgcaaggtgaacaaagtaaactaga

SEQ ID NO: 335175 - DNA, 25 bp, Artificial
  probe
  misc_feature (1)..(25): SEQ ID NO: 2732; WAN024DGV; Start 113; Stop 137
ctcgaattgtttatcttgctttgaa

SEQ ID NO: 335176 - DNA, 25 bp, Artificial
  probe
  misc_feature (1)..(25): SEQ ID NO: 2732; WAN024DGV; Start 151; Stop 175
attcaagttgcagctctggtttata

SEQ ID NO: 335177 - DNA, 25 bp, Artificial
  probe
  misc_feature (1)..(25): SEQ ID NO: 2732; WAN024DGV; Start 742; Stop 766
ggtgaacaaagtaaactagaagaaa

SEQ ID NO: 335178 - DNA, 25 bp, Artificial
  probe
  misc_feature (1)..(25): SEQ ID NO: 2732; WAN024DGV; Start 111; Stop 135
ggctcgaattgtttatcttgctttg

SEQ ID NO: 335179 - DNA, 25 bp, Artificial
  probe
  misc_feature (1)..(25): SEQ ID NO: 2732; WAN024DGV; Start 114; Stop 138
tcgaattgtttatcttgctttgaaa

SEQ ID NO: 335180 - DNA, 25 bp, Artificial
  probe
  misc_feature (1)..(25): SEQ ID NO: 2732; WAN024DGV; Start 152; Stop 176
ttcaagttgcagctctggtttatag

SEQ ID NO: 335181 - DNA, 25 bp, Artificial
  probe
  misc_feature (1)..(25): SEQ ID NO: 2732; WAN024DGV; Start 49; Stop 73
caggtttcttctcgttcctttatgc

SEQ ID NO: 335182 - DNA, 25 bp, Artificial
  probe
  misc_feature (1)..(25): SEQ ID NO: 2732; WAN024DGV; Start 1050; Stop 1074
acgtggaatacctaaatacaacttc

SEQ ID NO: 335183 - DNA, 25 bp, Artificial
  probe
  misc_feature (1)..(25): SEQ ID NO: 2732; WAN024DGV; Start 1191; Stop 1215
atacaaagctatccagttactcaaa

SEQ ID NO: 335184 - DNA, 25 bp, Artificial
  probe
  misc_feature (1)..(25): SEQ ID NO: 2732; WAN024DGV; Start 1190; Stop 1214
aatacaaagctatccagttactcaa

SEQ ID NO: 335185 - DNA, 25 bp, Artificial
  probe
  misc_feature (1)..(25): SEQ ID NO: 2732; WAN024DGV; Start 1189; Stop 1213
aaatacaaagctatccagttactca

SEQ ID NO: 335186 - DNA, 25 bp, Artificial
  probe
  misc_feature (1)..(25): SEQ ID NO: 2732; WAN024DGV; Start 1049; Stop 1073
aacgtggaatacctaaatacaactt

SEQ ID NO: 335187 - DNA, 25 bp, Artificial
  probe
  misc_feature (1)..(25): SEQ ID NO: 2733; WAN024D9T; Start 302; Stop 326
agtatgaagagttgattgctgctta

SEQ ID NO: 335188 - DNA, 25 bp, Artificial
  probe
  misc_feature (1)..(25): SEQ ID NO: 2733; WAN024D9T; Start 304; Stop 328
tatgaagagttgattgctgcttatg

SEQ ID NO: 335189 - DNA, 25 bp, Artificial
  probe
  misc_feature (1)..(25): SEQ ID NO: 2733; WAN024D9T; Start 303; Stop 327
gtatgaagagttgattgctgcttat

SEQ ID NO: 335190 - DNA, 25 bp, Artificial
  probe
  misc_feature (1)..(25): SEQ ID NO: 2733; WAN024D9T; Start 305; Stop 329
atgaagagttgattgctgcttatga

SEQ ID NO: 335191 - DNA, 25 bp, Artificial
  probe
  misc_feature (1)..(25): SEQ ID NO: 2733; WAN024D9T; Start 306; Stop 330
tgaagagttgattgctgcttatgaa

SEQ ID NO: 335192 - DNA, 25 bp, Artificial
  probe
  misc_feature (1)..(25): SEQ ID NO: 2733; WAN024D9T; Start 301; Stop 325
cagtatgaagagttgattgctgctt

SEQ ID NO: 335193 - DNA, 25 bp, Artificial
  probe
  misc_feature (1)..(25): SEQ ID NO: 2733; WAN024D9T; Start 294; Stop 318
taccttgcagtatgaagagttgatt

SEQ ID NO: 335194 - DNA, 25 bp, Artificial
  probe
  misc_feature (1)..(25): SEQ ID NO: 2733; WAN024D9T; Start 293; Stop 317
ttaccttgcagtatgaagagttgat

SEQ ID NO: 335195 - DNA, 25 bp, Artificial
  probe
  misc_feature (1)..(25): SEQ ID NO: 2733; WAN024D9T; Start 292; Stop 316
attaccttgcagtatgaagagttga

SEQ ID NO: 335196 - DNA, 25 bp, Artificial
  probe
  misc_feature (1)..(25): SEQ ID NO: 2733; WAN024D9T; Start 128; Stop 152
ttcagcctagagaggttagagagaa

SEQ ID NO: 335197 - DNA, 25 bp, Artificial
  probe
  misc_feature (1)..(25): SEQ ID NO: 2733; WAN024D9T; Start 307; Stop 331
gaagagttgattgctgcttatgaaa

SEQ ID NO: 335198 - DNA, 25 bp, Artificial
  probe
  misc_feature (1)..(25): SEQ ID NO: 2733; WAN024D9T; Start 295; Stop 319
accttgcagtatgaagagttgattg

SEQ ID NO: 335199 - DNA, 25 bp, Artificial
  probe
  misc_feature (1)..(25): SEQ ID NO: 2733; WAN024D9T; Start 291; Stop 315
tattaccttgcagtatgaagagttg

SEQ ID NO: 335200 - DNA, 25 bp, Artificial
  probe
  misc_feature (1)..(25): SEQ ID NO: 2733; WAN024D9T; Start 290; Stop 314
gtattaccttgcagtatgaagagtt

SEQ ID NO: 335201 - DNA, 25 bp, Artificial
  probe
  misc_feature (1)..(25): SEQ ID NO: 2733; WAN024D9T; Start 135; Stop 159
tagagaggttagagagaaactagcc

SEQ ID NO: 335202 - DNA, 25 bp, Artificial
  probe
  misc_feature (1)..(25): SEQ ID NO: 2733; WAN024D9T; Start 127; Stop 151
gttcagcctagagaggttagagaga

SEQ ID NO: 335203 - DNA, 25 bp, Artificial
  probe
  misc_feature (1)..(25): SEQ ID NO: 2733; WAN024D9T; Start 72; Stop 96
atctttcggtgacattcattacaat

SEQ ID NO: 335204 - DNA, 25 bp, Artificial
  probe
  misc_feature (1)..(25): SEQ ID NO: 2733; WAN024D9T; Start 206; Stop 230
aaatcatctcaccagttgaagaatt

SEQ ID NO: 335205 - DNA, 25 bp, Artificial
  probe
  misc_feature (1)..(25): SEQ ID NO: 2733; WAN024D9T; Start 123; Stop 147
aatcgttcagcctagagaggttaga

SEQ ID NO: 335206 - DNA, 25 bp, Artificial
  probe
  misc_feature (1)..(25): SEQ ID NO: 2733; WAN024D9T; Start 122; Stop 146
caatcgttcagcctagagaggttag

SEQ ID NO: 335207 - DNA, 25 bp, Artificial
  probe
  misc_feature (1)..(25): SEQ ID NO: 2733; WAN024D9T; Start 71; Stop 95
gatctttcggtgacattcattacaa

SEQ ID NO: 335208 - DNA, 25 bp, Artificial
  probe
  misc_feature (1)..(25): SEQ ID NO: 2733; WAN024D9T; Start 73; Stop 97
tctttcggtgacattcattacaata

SEQ ID NO: 335209 - DNA, 25 bp, Artificial
  probe
  misc_feature (1)..(25): SEQ ID NO: 2733; WAN024D9T; Start 225; Stop 249
agaattcaccttcgagatagatagc

SEQ ID NO: 335210 - DNA, 25 bp, Artificial
  probe
  misc_feature (1)..(25): SEQ ID NO: 2733; WAN024D9T; Start 69; Stop 93
aggatctttcggtgacattcattac

SEQ ID NO: 335211 - DNA, 25 bp, Artificial
  probe
  misc_feature (1)..(25): SEQ ID NO: 2733; WAN024D9T; Start 68; Stop 92
caggatctttcggtgacattcatta

SEQ ID NO: 335212 - DNA, 25 bp, Artificial
  probe
  misc_feature (1)..(25): SEQ ID NO: 2733; WAN024D9T; Start 289; Stop 313
ggtattaccttgcagtatgaagagt

SEQ ID NO: 335213 - DNA, 25 bp, Artificial
  probe
  misc_feature (1)..(25): SEQ ID NO: 2733; WAN024D9T; Start 286; Stop 310
atcggtattaccttgcagtatgaag

SEQ ID NO: 335214 - DNA, 25 bp, Artificial
  probe
  misc_feature (1)..(25): SEQ ID NO: 2733; WAN024D9T; Start 285; Stop 309
tatcggtattaccttgcagtatgaa

SEQ ID NO: 335215 - DNA, 25 bp, Artificial
  probe
  misc_feature (1)..(25): SEQ ID NO: 2733; WAN024D9T; Start 70; Stop 94
ggatctttcggtgacattcattaca

SEQ ID NO: 335216 - DNA, 25 bp, Artificial
  probe
  misc_feature (1)..(25): SEQ ID NO: 2733; WAN024D9T; Start 132; Stop 156
gcctagagaggttagagagaaacta

SEQ ID NO: 335217 - DNA, 25 bp, Artificial
  probe
  misc_feature (1)..(25): SEQ ID NO: 2733; WAN024D9T; Start 284; Stop 308
atatcggtattaccttgcagtatga

SEQ ID NO: 335218 - DNA, 25 bp, Artificial
  probe
  misc_feature (1)..(25): SEQ ID NO: 2733; WAN024D9T; Start 207; Stop 231
aatcatctcaccagttgaagaattc

SEQ ID NO: 335219 - DNA, 25 bp, Artificial
  probe
  misc_feature (1)..(25): SEQ ID NO: 2733; WAN024D9T; Start 124; Stop 148
atcgttcagcctagagaggttagag

SEQ ID NO: 335220 - DNA, 25 bp, Artificial
  probe
  misc_feature (1)..(25): SEQ ID NO: 2734; WAN024FO2; Start 14; Stop 38
ttaaagatgtacttgttgaagagaa

SEQ ID NO: 335221 - DNA, 25 bp, Artificial
  probe
  misc_feature (1)..(25): SEQ ID NO: 2734; WAN024FO2; Start 84; Stop 108
gaatgttagagcttttgattgtgga

SEQ ID NO: 335222 - DNA, 25 bp, Artificial
  probe
  misc_feature (1)..(25): SEQ ID NO: 2734; WAN024FO2; Start 83; Stop 107
agaatgttagagcttttgattgtgg

SEQ ID NO: 335223 - DNA, 25 bp, Artificial
  probe
  misc_feature (1)..(25): SEQ ID NO: 2734; WAN024FO2; Start 85; Stop 109
aatgttagagcttttgattgtggat

SEQ ID NO: 335224 - DNA, 25 bp, Artificial
  probe
  misc_feature (1)..(25): SEQ ID NO: 2734; WAN024FO2; Start 81; Stop 105
tgagaatgttagagcttttgattgt

SEQ ID NO: 335225 - DNA, 25 bp, Artificial
  probe
  misc_feature (1)..(25): SEQ ID NO: 2734; WAN024FO2; Start 82; Stop 106
gagaatgttagagcttttgattgtg

SEQ ID NO: 335226 - DNA, 25 bp, Artificial
  probe
  misc_feature (1)..(25): SEQ ID NO: 2734; WAN024FO2; Start 87; Stop 111
tgttagagcttttgattgtggatat

SEQ ID NO: 335227 - DNA, 25 bp, Artificial
  probe
  misc_feature (1)..(25): SEQ ID NO: 2734; WAN024FO2; Start 86; Stop 110
atgttagagcttttgattgtggata

SEQ ID NO: 335228 - DNA, 25 bp, Artificial
  probe
  misc_feature (1)..(25): SEQ ID NO: 2734; WAN024FO2; Start 78; Stop 102
tgatgagaatgttagagcttttgat

SEQ ID NO: 335229 - DNA, 25 bp, Artificial
  probe
  misc_feature (1)..(25): SEQ ID NO: 2734; WAN024FO2; Start 77; Stop 101
atgatgagaatgttagagcttttga

SEQ ID NO: 335230 - DNA, 25 bp, Artificial
  probe
  misc_feature (1)..(25): SEQ ID NO: 2734; WAN024FO2; Start 13; Stop 37
tttaaagatgtacttgttgaagaga

SEQ ID NO: 335231 - DNA, 25 bp, Artificial
  probe
  misc_feature (1)..(25): SEQ ID NO: 2734; WAN024FO2; Start 80; Stop 104
atgagaatgttagagcttttgattg

SEQ ID NO: 335232 - DNA, 25 bp, Artificial
  probe
  misc_feature (1)..(25): SEQ ID NO: 2734; WAN024FO2; Start 79; Stop 103
gatgagaatgttagagcttttgatt

SEQ ID NO: 335233 - DNA, 25 bp, Artificial
  probe
  misc_feature (1)..(25): SEQ ID NO: 2734; WAN024FO2; Start 12; Stop 36
ttttaaagatgtacttgttgaagag

SEQ ID NO: 335234 - DNA, 25 bp, Artificial
  probe
  misc_feature (1)..(25): SEQ ID NO: 2735; WAN024F5E; Start 974; Stop 998
aagatagcacggttattgtagaagg

SEQ ID NO: 335235 - DNA, 25 bp, Artificial
  probe
  misc_feature (1)..(25): SEQ ID NO: 2735; WAN024F5E; Start 975; Stop 999
agatagcacggttattgtagaaggt

SEQ ID NO: 335236 - DNA, 25 bp, Artificial
  probe
  misc_feature (1)..(25): SEQ ID NO: 2735; WAN024F5E; Start 887; Stop 911
gaacagttatcacagaagaccttgg

SEQ ID NO: 335237 - DNA, 25 bp, Artificial
  probe
  misc_feature (1)..(25): SEQ ID NO: 2735; WAN024F5E; Start 886; Stop 910
ggaacagttatcacagaagaccttg

SEQ ID NO: 335238 - DNA, 25 bp, Artificial
  probe
  misc_feature (1)..(25): SEQ ID NO: 2735; WAN024F5E; Start 735; Stop 759
cttgattattgcggatgatgtggat

SEQ ID NO: 335239 - DNA, 25 bp, Artificial
  probe
  misc_feature (1)..(25): SEQ ID NO: 2735; WAN024F5E; Start 732; Stop 756
actcttgattattgcggatgatgtg

SEQ ID NO: 335240 - DNA, 25 bp, Artificial
  probe
  misc_feature (1)..(25): SEQ ID NO: 2735; WAN024F5E; Start 731; Stop 755
cactcttgattattgcggatgatgt

SEQ ID NO: 335241 - DNA, 25 bp, Artificial
  probe
  misc_feature (1)..(25): SEQ ID NO: 2735; WAN024F5E; Start 736; Stop 760
ttgattattgcggatgatgtggatg

SEQ ID NO: 335242 - DNA, 25 bp, Artificial
  probe
  misc_feature (1)..(25): SEQ ID NO: 2735; WAN024F5E; Start 733; Stop 757
ctcttgattattgcggatgatgtgg

SEQ ID NO: 335243 - DNA, 25 bp, Artificial
  probe
  misc_feature (1)..(25): SEQ ID NO: 2735; WAN024F5E; Start 730; Stop 754
ccactcttgattattgcggatgatg

SEQ ID NO: 335244 - DNA, 25 bp, Artificial
  probe
  misc_feature (1)..(25): SEQ ID NO: 2735; WAN024F5E; Start 888; Stop 912
aacagttatcacagaagaccttggt

SEQ ID NO: 335245 - DNA, 25 bp, Artificial
  probe
  misc_feature (1)..(25): SEQ ID NO: 2735; WAN024F5E; Start 734; Stop 758
tcttgattattgcggatgatgtgga

SEQ ID NO: 335246 - DNA, 25 bp, Artificial
  probe
  misc_feature (1)..(25): SEQ ID NO: 2735; WAN024F5E; Start 1282; Stop 1306
gaattgacaggagatgaagcaacag

SEQ ID NO: 335247 - DNA, 25 bp, Artificial
  probe
  misc_feature (1)..(25): SEQ ID NO: 2735; WAN024F5E; Start 885; Stop 909
cggaacagttatcacagaagacctt

SEQ ID NO: 335248 - DNA, 25 bp, Artificial
  probe
  misc_feature (1)..(25): SEQ ID NO: 2735; WAN024F5E; Start 976; Stop 1000
gatagcacggttattgtagaaggtg

SEQ ID NO: 335249 - DNA, 25 bp, Artificial
  probe
  misc_feature (1)..(25): SEQ ID NO: 2735; WAN024F5E; Start 1275; Stop 1299
taccttggaattgacaggagatgaa

SEQ ID NO: 335250 - DNA, 25 bp, Artificial
  probe
  misc_feature (1)..(25): SEQ ID NO: 2735; WAN024F5E; Start 786; Stop 810
gaacaagattcgtggaaccttcaac

SEQ ID NO: 335251 - DNA, 25 bp, Artificial
  probe
  misc_feature (1)..(25): SEQ ID NO: 2735; WAN024F5E; Start 720; Stop 744
aagcaatcgtccactcttgattatt

SEQ ID NO: 335252 - DNA, 25 bp, Artificial
  probe
  misc_feature (1)..(25): SEQ ID NO: 2735; WAN024F5E; Start 1293; Stop 1317
agatgaagcaacaggacgtaatatt

SEQ ID NO: 335253 - DNA, 25 bp, Artificial
  probe
  misc_feature (1)..(25): SEQ ID NO: 2735; WAN024F5E; Start 471; Stop 495
tgagtacatctctgaagcaatggaa

SEQ ID NO: 335254 - DNA, 25 bp, Artificial
  probe
  misc_feature (1)..(25): SEQ ID NO: 2735; WAN024F5E; Start 1274; Stop 1298
ctaccttggaattgacaggagatga

SEQ ID NO: 335255 - DNA, 25 bp, Artificial
  probe
  misc_feature (1)..(25): SEQ ID NO: 2735; WAN024F5E; Start 1292; Stop 1316
gagatgaagcaacaggacgtaatat

SEQ ID NO: 335256 - DNA, 25 bp, Artificial
  probe
  misc_feature (1)..(25): SEQ ID NO: 2735; WAN024F5E; Start 467; Stop 491
ttggtgagtacatctctgaagcaat

SEQ ID NO: 335257 - DNA, 25 bp, Artificial
  probe
  misc_feature (1)..(25): SEQ ID NO: 2735; WAN024F5E; Start 873; Stop 897
catcttaacaggcggaacagttatc

SEQ ID NO: 335258 - DNA, 25 bp, Artificial
  probe
  misc_feature (1)..(25): SEQ ID NO: 2735; WAN024F5E; Start 1279; Stop 1303
ttggaattgacaggagatgaagcaa

SEQ ID NO: 335259 - DNA, 25 bp, Artificial
  probe
  misc_feature (1)..(25): SEQ ID NO: 2735; WAN024F5E; Start 973; Stop 997
aaagatagcacggttattgtagaag

SEQ ID NO: 335260 - DNA, 25 bp, Artificial
  probe
  misc_feature (1)..(25): SEQ ID NO: 2735; WAN024F5E; Start 1552; Stop 1576
gtagccaataaaccagaaccagtag

SEQ ID NO: 335261 - DNA, 25 bp, Artificial
  probe
  misc_feature (1)..(25): SEQ ID NO: 2735; WAN024F5E; Start 1294; Stop 1318
gatgaagcaacaggacgtaatattg

SEQ ID NO: 335262 - DNA, 25 bp, Artificial
  probe
  misc_feature (1)..(25): SEQ ID NO: 2735; WAN024F5E; Start 1055; Stop 1079
aaactacaacttctgaatttgaccg

SEQ ID NO: 335263 - DNA, 25 bp, Artificial
  probe
  misc_feature (1)..(25): SEQ ID NO: 2735; WAN024F5E; Start 874; Stop 898
atcttaacaggcggaacagttatca

SEQ ID NO: 335264 - DNA, 25 bp, Artificial
  probe
  misc_feature (1)..(25): SEQ ID NO: 2735; WAN024F5E; Start 1110; Stop 1134
gtcaggtggtgtagcggttattaag

SEQ ID NO: 335265 - DNA, 25 bp, Artificial
  probe
  misc_feature (1)..(25): SEQ ID NO: 2735; WAN024F5E; Start 470; Stop 494
gtgagtacatctctgaagcaatgga

SEQ ID NO: 335266 - DNA, 25 bp, Artificial
  probe
  misc_feature (1)..(25): SEQ ID NO: 2735; WAN024F5E; Start 972; Stop 996
caaagatagcacggttattgtagaa

SEQ ID NO: 335267 - DNA, 25 bp, Artificial
  probe
  misc_feature (1)..(25): SEQ ID NO: 2736; WAN024E28; Start 365; Stop 389
cgattcgctatcaattatatctagg

SEQ ID NO: 335268 - DNA, 25 bp, Artificial
  probe
  misc_feature (1)..(25): SEQ ID NO: 2736; WAN024E28; Start 340; Stop 364
gttgaatttcagaccagtaaaggag

SEQ ID NO: 335269 - DNA, 25 bp, Artificial
  probe
  misc_feature (1)..(25): SEQ ID NO: 2736; WAN024E28; Start 345; Stop 369
atttcagaccagtaaaggagcgatt

SEQ ID NO: 335270 - DNA, 25 bp, Artificial
  probe
  misc_feature (1)..(25): SEQ ID NO: 2736; WAN024E28; Start 344; Stop 368
aatttcagaccagtaaaggagcgat

SEQ ID NO: 335271 - DNA, 25 bp, Artificial
  probe
  misc_feature (1)..(25): SEQ ID NO: 2736; WAN024E28; Start 341; Stop 365
ttgaatttcagaccagtaaaggagc

SEQ ID NO: 335272 - DNA, 25 bp, Artificial
  probe
  misc_feature (1)..(25): SEQ ID NO: 2736; WAN024E28; Start 346; Stop 370
tttcagaccagtaaaggagcgattc

SEQ ID NO: 335273 - DNA, 25 bp, Artificial
  probe
  misc_feature (1)..(25): SEQ ID NO: 2736; WAN024E28; Start 337; Stop 361
aaggttgaatttcagaccagtaaag

SEQ ID NO: 335274 - DNA, 25 bp, Artificial
  probe
  misc_feature (1)..(25): SEQ ID NO: 2736; WAN024E28; Start 334; Stop 358
gctaaggttgaatttcagaccagta

SEQ ID NO: 335275 - DNA, 25 bp, Artificial
  probe
  misc_feature (1)..(25): SEQ ID NO: 2736; WAN024E28; Start 343; Stop 367
gaatttcagaccagtaaaggagcga

SEQ ID NO: 335276 - DNA, 25 bp, Artificial
  probe
  misc_feature (1)..(25): SEQ ID NO: 2736; WAN024E28; Start 339; Stop 363
ggttgaatttcagaccagtaaagga

SEQ ID NO: 335277 - DNA, 25 bp, Artificial
  probe
  misc_feature (1)..(25): SEQ ID NO: 2736; WAN024E28; Start 338; Stop 362
aggttgaatttcagaccagtaaagg

SEQ ID NO: 335278 - DNA, 25 bp, Artificial
  probe
  misc_feature (1)..(25): SEQ ID NO: 2736; WAN024E28; Start 335; Stop 359
ctaaggttgaatttcagaccagtaa

SEQ ID NO: 335279 - DNA, 25 bp, Artificial
  probe
  misc_feature (1)..(25): SEQ ID NO: 2736; WAN024E28; Start 11; Stop 35
aaatcgtaaagtcaatgattaaggc

SEQ ID NO: 335280 - DNA, 25 bp, Artificial
  probe
  misc_feature (1)..(25): SEQ ID NO: 2736; WAN024E28; Start 336; Stop 360
taaggttgaatttcagaccagtaaa

SEQ ID NO: 335281 - DNA, 25 bp, Artificial
  probe
  misc_feature (1)..(25): SEQ ID NO: 2736; WAN024E28; Start 366; Stop 390
gattcgctatcaattatatctagga

SEQ ID NO: 335282 - DNA, 25 bp, Artificial
  probe
  misc_feature (1)..(25): SEQ ID NO: 2736; WAN024E28; Start 153; Stop 177
gtttgaagaactctatcgggaaacc

SEQ ID NO: 335283 - DNA, 25 bp, Artificial
  probe
  misc_feature (1)..(25): SEQ ID NO: 2736; WAN024E28; Start 152; Stop 176
agtttgaagaactctatcgggaaac

SEQ ID NO: 335284 - DNA, 25 bp, Artificial
  probe
  misc_feature (1)..(25): SEQ ID NO: 2736; WAN024E28; Start 342; Stop 366
tgaatttcagaccagtaaaggagcg

SEQ ID NO: 335285 - DNA, 25 bp, Artificial
  probe
  misc_feature (1)..(25): SEQ ID NO: 2736; WAN024E28; Start 9; Stop 33
gcaaatcgtaaagtcaatgattaag

SEQ ID NO: 335286 - DNA, 25 bp, Artificial
  probe
  misc_feature (1)..(25): SEQ ID NO: 2736; WAN024E28; Start 36; Stop 60
ctttaccatgctggaaagtctcttg

SEQ ID NO: 335287 - DNA, 25 bp, Artificial
  probe
  misc_feature (1)..(25): SEQ ID NO: 2736; WAN024E28; Start 333; Stop 357
ggctaaggttgaatttcagaccagt

SEQ ID NO: 335288 - DNA, 25 bp, Artificial
  probe
  misc_feature (1)..(25): SEQ ID NO: 2736; WAN024E28; Start 332; Stop 356
tggctaaggttgaatttcagaccag

SEQ ID NO: 335289 - DNA, 25 bp, Artificial
  probe
  misc_feature (1)..(25): SEQ ID NO: 2736; WAN024E28; Start 331; Stop 355
ctggctaaggttgaatttcagacca

SEQ ID NO: 335290 - DNA, 25 bp, Artificial
  probe
  misc_feature (1)..(25): SEQ ID NO: 2736; WAN024E28; Start 10; Stop 34
caaatcgtaaagtcaatgattaagg

SEQ ID NO: 335291 - DNA, 25 bp, Artificial
  probe
  misc_feature (1)..(25): SEQ ID NO: 2736; WAN024E28; Start 367; Stop 391
attcgctatcaattatatctaggaa

SEQ ID NO: 335292 - DNA, 25 bp, Artificial
  probe
  misc_feature (1)..(25): SEQ ID NO: 2736; WAN024E28; Start 37; Stop 61
tttaccatgctggaaagtctcttgg

SEQ ID NO: 335293 - DNA, 25 bp, Artificial
  probe
  misc_feature (1)..(25): SEQ ID NO: 2736; WAN024E28; Start 35; Stop 59
cctttaccatgctggaaagtctctt

SEQ ID NO: 335294 - DNA, 25 bp, Artificial
  probe
  misc_feature (1)..(25): SEQ ID NO: 2736; WAN024E28; Start 12; Stop 36
aatcgtaaagtcaatgattaaggcc

SEQ ID NO: 335295 - DNA, 25 bp, Artificial
  probe
  misc_feature (1)..(25): SEQ ID NO: 2736; WAN024E28; Start 329; Stop 353
ccctggctaaggttgaatttcagac

SEQ ID NO: 335296 - DNA, 25 bp, Artificial
  probe
  misc_feature (1)..(25): SEQ ID NO: 2736; WAN024E28; Start 327; Stop 351
gtccctggctaaggttgaatttcag

SEQ ID NO: 335297 - DNA, 25 bp, Artificial
  probe
  misc_feature (1)..(25): SEQ ID NO: 2736; WAN024E28; Start 157; Stop 181
gaagaactctatcgggaaacccaaa

SEQ ID NO: 335298 - DNA, 25 bp, Artificial
  probe
  misc_feature (1)..(25): SEQ ID NO: 2736; WAN024E28; Start 154; Stop 178
tttgaagaactctatcgggaaaccc

SEQ ID NO: 335299 - DNA, 25 bp, Artificial
  probe
  misc_feature (1)..(25): SEQ ID NO: 2736; WAN024E28; Start 328; Stop 352
tccctggctaaggttgaatttcaga

SEQ ID NO: 335300 - DNA, 25 bp, Artificial
  probe
  misc_feature (1)..(25): SEQ ID NO: 2737; WAN024CB9; Start 477; Stop 501
ggcttcaacagacctagataagtat

SEQ ID NO: 335301 - DNA, 25 bp, Artificial
  probe
  misc_feature (1)..(25): SEQ ID NO: 2737; WAN024CB9; Start 473; Stop 497
aatcggcttcaacagacctagataa

SEQ ID NO: 335302 - DNA, 25 bp, Artificial
  probe
  misc_feature (1)..(25): SEQ ID NO: 2737; WAN024CB9; Start 840; Stop 864
ttatggattggagttgcctctctta

SEQ ID NO: 335303 - DNA, 25 bp, Artificial
  probe
  misc_feature (1)..(25): SEQ ID NO: 2737; WAN024CB9; Start 476; Stop 500
cggcttcaacagacctagataagta

SEQ ID NO: 335304 - DNA, 25 bp, Artificial
  probe
  misc_feature (1)..(25): SEQ ID NO: 2737; WAN024CB9; Start 259; Stop 283
ttctataaccactatgacactgtgc

SEQ ID NO: 335305 - DNA, 25 bp, Artificial
  probe
  misc_feature (1)..(25): SEQ ID NO: 2737; WAN024CB9; Start 478; Stop 502
gcttcaacagacctagataagtatt

SEQ ID NO: 335306 - DNA, 25 bp, Artificial
  probe
  misc_feature (1)..(25): SEQ ID NO: 2737; WAN024CB9; Start 474; Stop 498
atcggcttcaacagacctagataag

SEQ ID NO: 335307 - DNA, 25 bp, Artificial
  probe
  misc_feature (1)..(25): SEQ ID NO: 2737; WAN024CB9; Start 472; Stop 496
gaatcggcttcaacagacctagata

SEQ ID NO: 335308 - DNA, 25 bp, Artificial
  probe
  misc_feature (1)..(25): SEQ ID NO: 2737; WAN024CB9; Start 178; Stop 202
gtggagattgatgagagctatacag

SEQ ID NO: 335309 - DNA, 25 bp, Artificial
  probe
  misc_feature (1)..(25): SEQ ID NO: 2737; WAN024CB9; Start 176; Stop 200
aagtggagattgatgagagctatac

SEQ ID NO: 335310 - DNA, 25 bp, Artificial
  probe
  misc_feature (1)..(25): SEQ ID NO: 2737; WAN024CB9; Start 841; Stop 865
tatggattggagttgcctctcttac

SEQ ID NO: 335311 - DNA, 25 bp, Artificial
  probe
  misc_feature (1)..(25): SEQ ID NO: 2737; WAN024CB9; Start 175; Stop 199
gaagtggagattgatgagagctata

SEQ ID NO: 335312 - DNA, 25 bp, Artificial
  probe
  misc_feature (1)..(25): SEQ ID NO: 2737; WAN024CB9; Start 177; Stop 201
agtggagattgatgagagctataca

SEQ ID NO: 335313 - DNA, 25 bp, Artificial
  probe
  misc_feature (1)..(25): SEQ ID NO: 2737; WAN024CB9; Start 1338; Stop 1362
cgaattagtagaggagctgattaga

SEQ ID NO: 335314 - DNA, 25 bp, Artificial
  probe
  misc_feature (1)..(25): SEQ ID NO: 2737; WAN024CB9; Start 1332; Stop 1356
ccatatcgaattagtagaggagctg

SEQ ID NO: 335315 - DNA, 25 bp, Artificial
  probe
  misc_feature (1)..(25): SEQ ID NO: 2737; WAN024CB9; Start 1337; Stop 1361
tcgaattagtagaggagctgattag

SEQ ID NO: 335316 - DNA, 25 bp, Artificial
  probe
  misc_feature (1)..(25): SEQ ID NO: 2737; WAN024CB9; Start 1333; Stop 1357
catatcgaattagtagaggagctga

SEQ ID NO: 335317 - DNA, 25 bp, Artificial
  probe
  misc_feature (1)..(25): SEQ ID NO: 2737; WAN024CB9; Start 174; Stop 198
tgaagtggagattgatgagagctat

SEQ ID NO: 335318 - DNA, 25 bp, Artificial
  probe
  misc_feature (1)..(25): SEQ ID NO: 2737; WAN024CB9; Start 912; Stop 936
gcttaatatcgaaggaatccagtct

SEQ ID NO: 335319 - DNA, 25 bp, Artificial
  probe
  misc_feature (1)..(25): SEQ ID NO: 2737; WAN024CB9; Start 9; Stop 33
tcctagcgaacaagaacagattgaa

SEQ ID NO: 335320 - DNA, 25 bp, Artificial
  probe
  misc_feature (1)..(25): SEQ ID NO: 2737; WAN024CB9; Start 8; Stop 32
ttcctagcgaacaagaacagattga

SEQ ID NO: 335321 - DNA, 25 bp, Artificial
  probe
  misc_feature (1)..(25): SEQ ID NO: 2737; WAN024CB9; Start 828; Stop 852
agttagtcggatttatggattggag

SEQ ID NO: 335322 - DNA, 25 bp, Artificial
  probe
  misc_feature (1)..(25): SEQ ID NO: 2737; WAN024CB9; Start 823; Stop 847
gaggaagttagtcggatttatggat

SEQ ID NO: 335323 - DNA, 25 bp, Artificial
  probe
  misc_feature (1)..(25): SEQ ID NO: 2737; WAN024CB9; Start 830; Stop 854
ttagtcggatttatggattggagtt

SEQ ID NO: 335324 - DNA, 25 bp, Artificial
  probe
  misc_feature (1)..(25): SEQ ID NO: 2737; WAN024CB9; Start 827; Stop 851
aagttagtcggatttatggattgga

SEQ ID NO: 335325 - DNA, 25 bp, Artificial
  probe
  misc_feature (1)..(25): SEQ ID NO: 2737; WAN024CB9; Start 831; Stop 855
tagtcggatttatggattggagttg

SEQ ID NO: 335326 - DNA, 25 bp, Artificial
  probe
  misc_feature (1)..(25): SEQ ID NO: 2737; WAN024CB9; Start 829; Stop 853
gttagtcggatttatggattggagt

SEQ ID NO: 335327 - DNA, 25 bp, Artificial
  probe
  misc_feature (1)..(25): SEQ ID NO: 2737; WAN024CB9; Start 691; Stop 715
tatctcctccaagccttacagtctc

SEQ ID NO: 335328 - DNA, 25 bp, Artificial
  probe
  misc_feature (1)..(25): SEQ ID NO: 2737; WAN024CB9; Start 826; Stop 850
gaagttagtcggatttatggattgg

SEQ ID NO: 335329 - DNA, 25 bp, Artificial
  probe
  misc_feature (1)..(25): SEQ ID NO: 2737; WAN024CB9; Start 825; Stop 849
ggaagttagtcggatttatggattg

SEQ ID NO: 335330 - DNA, 25 bp, Artificial
  probe
  misc_feature (1)..(25): SEQ ID NO: 2737; WAN024CB9; Start 824; Stop 848
aggaagttagtcggatttatggatt

SEQ ID NO: 335331 - DNA, 25 bp, Artificial
  probe
  misc_feature (1)..(25): SEQ ID NO: 2737; WAN024CB9; Start 735; Stop 759
tatcttggttgaaggcttgtacgaa

SEQ ID NO: 335332 - DNA, 25 bp, Artificial
  probe
  misc_feature (1)..(25): SEQ ID NO: 2737; WAN024CB9; Start 913; Stop 937
cttaatatcgaaggaatccagtctg

SEQ ID NO: 335333 - DNA, 25 bp, Artificial
  probe
  misc_feature (1)..(25): SEQ ID NO: 2738; WAN024C5F; Start 128; Stop 152
ttatcaatcctgacatcgagtacaa

SEQ ID NO: 335334 - DNA, 25 bp, Artificial
  probe
  misc_feature (1)..(25): SEQ ID NO: 2738; WAN024C5F; Start 127; Stop 151
attatcaatcctgacatcgagtaca

SEQ ID NO: 335335 - DNA, 25 bp, Artificial
  probe
  misc_feature (1)..(25): SEQ ID NO: 2738; WAN024C5F; Start 195; Stop 219
ggttctcttactgatgatcctcatt

SEQ ID NO: 335336 - DNA, 25 bp, Artificial
  probe
  misc_feature (1)..(25): SEQ ID NO: 2738; WAN024C5F; Start 197; Stop 221
ttctcttactgatgatcctcattcc

SEQ ID NO: 335337 - DNA, 25 bp, Artificial
  probe
  misc_feature (1)..(25): SEQ ID NO: 2738; WAN024C5F; Start 69; Stop 93
tctagcactgattgtctcaatggaa

SEQ ID NO: 335338 - DNA, 25 bp, Artificial
  probe
  misc_feature (1)..(25): SEQ ID NO: 2738; WAN024C5F; Start 196; Stop 220
gttctcttactgatgatcctcattc

SEQ ID NO: 335339 - DNA, 25 bp, Artificial
  probe
  misc_feature (1)..(25): SEQ ID NO: 2738; WAN024C5F; Start 68; Stop 92
ctctagcactgattgtctcaatgga

SEQ ID NO: 335340 - DNA, 25 bp, Artificial
  probe
  misc_feature (1)..(25): SEQ ID NO: 2738; WAN024C5F; Start 198; Stop 222
tctcttactgatgatcctcattccg

SEQ ID NO: 335341 - DNA, 25 bp, Artificial
  probe
  misc_feature (1)..(25): SEQ ID NO: 2738; WAN024C5F; Start 60; Stop 84
cttgtacgctctagcactgattgtc

SEQ ID NO: 335342 - DNA, 25 bp, Artificial
  probe
  misc_feature (1)..(25): SEQ ID NO: 2738; WAN024C5F; Start 58; Stop 82
gtcttgtacgctctagcactgattg

SEQ ID NO: 335343 - DNA, 25 bp, Artificial
  probe
  misc_feature (1)..(25): SEQ ID NO: 2738; WAN024C5F; Start 64; Stop 88
tacgctctagcactgattgtctcaa

SEQ ID NO: 335344 - DNA, 25 bp, Artificial
  probe
  misc_feature (1)..(25): SEQ ID NO: 2738; WAN024C5F; Start 61; Stop 85
ttgtacgctctagcactgattgtct

SEQ ID NO: 335345 - DNA, 25 bp, Artificial
  probe
  misc_feature (1)..(25): SEQ ID NO: 2738; WAN024C5F; Start 59; Stop 83
tcttgtacgctctagcactgattgt

SEQ ID NO: 335346 - DNA, 25 bp, Artificial
  probe
  misc_feature (1)..(25): SEQ ID NO: 2738; WAN024C5F; Start 71; Stop 95
tagcactgattgtctcaatggaaat

SEQ ID NO: 335347 - DNA, 25 bp, Artificial
  probe
  misc_feature (1)..(25): SEQ ID NO: 2738; WAN024C5F; Start 70; Stop 94
ctagcactgattgtctcaatggaaa

SEQ ID NO: 335348 - DNA, 25 bp, Artificial
  probe
  misc_feature (1)..(25): SEQ ID NO: 2738; WAN024C5F; Start 355; Stop 379
ccgattgtaaaagtatttcagcgat

SEQ ID NO: 335349 - DNA, 25 bp, Artificial
  probe
  misc_feature (1)..(25): SEQ ID NO: 2738; WAN024C5F; Start 351; Stop 375
tcagccgattgtaaaagtatttcag

SEQ ID NO: 335350 - DNA, 25 bp, Artificial
  probe
  misc_feature (1)..(25): SEQ ID NO: 2738; WAN024C5F; Start 284; Stop 308
acatcgcatttacttttcaatctct

SEQ ID NO: 335351 - DNA, 25 bp, Artificial
  probe
  misc_feature (1)..(25): SEQ ID NO: 2738; WAN024C5F; Start 350; Stop 374
ttcagccgattgtaaaagtatttca

SEQ ID NO: 335352 - DNA, 25 bp, Artificial
  probe
  misc_feature (1)..(25): SEQ ID NO: 2738; WAN024C5F; Start 72; Stop 96
agcactgattgtctcaatggaaatc

SEQ ID NO: 335353 - DNA, 25 bp, Artificial
  probe
  misc_feature (1)..(25): SEQ ID NO: 2738; WAN024C5F; Start 62; Stop 86
tgtacgctctagcactgattgtctc

SEQ ID NO: 335354 - DNA, 25 bp, Artificial
  probe
  misc_feature (1)..(25): SEQ ID NO: 2738; WAN024C5F; Start 287; Stop 311
tcgcatttacttttcaatctctcat

SEQ ID NO: 335355 - DNA, 25 bp, Artificial
  probe
  misc_feature (1)..(25): SEQ ID NO: 2738; WAN024C5F; Start 286; Stop 310
atcgcatttacttttcaatctctca

SEQ ID NO: 335356 - DNA, 25 bp, Artificial
  probe
  misc_feature (1)..(25): SEQ ID NO: 2738; WAN024C5F; Start 352; Stop 376
cagccgattgtaaaagtatttcagc

SEQ ID NO: 335357 - DNA, 25 bp, Artificial
  probe
  misc_feature (1)..(25): SEQ ID NO: 2738; WAN024C5F; Start 285; Stop 309
catcgcatttacttttcaatctctc

SEQ ID NO: 335358 - DNA, 25 bp, Artificial
  probe
  misc_feature (1)..(25): SEQ ID NO: 2738; WAN024C5F; Start 49; Stop 73
gatggtttggtcttgtacgctctag

SEQ ID NO: 335359 - DNA, 25 bp, Artificial
  probe
  misc_feature (1)..(25): SEQ ID NO: 2738; WAN024C5F; Start 320; Stop 344
accgcaaattaaaaggaaatgttac

SEQ ID NO: 335360 - DNA, 25 bp, Artificial
  probe
  misc_feature (1)..(25): SEQ ID NO: 2738; WAN024C5F; Start 67; Stop 91
gctctagcactgattgtctcaatgg

SEQ ID NO: 335361 - DNA, 25 bp, Artificial
  probe
  misc_feature (1)..(25): SEQ ID NO: 2738; WAN024C5F; Start 42; Stop 66
gactgaagatggtttggtcttgtac

SEQ ID NO: 335362 - DNA, 25 bp, Artificial
  probe
  misc_feature (1)..(25): SEQ ID NO: 2738; WAN024C5F; Start 356; Stop 380
cgattgtaaaagtatttcagcgatt

SEQ ID NO: 335363 - DNA, 25 bp, Artificial
  probe
  misc_feature (1)..(25): SEQ ID NO: 2738; WAN024C5F; Start 321; Stop 345
ccgcaaattaaaaggaaatgttact

SEQ ID NO: 335364 - DNA, 25 bp, Artificial
  probe
  misc_feature (1)..(25): SEQ ID NO: 2738; WAN024C5F; Start 288; Stop 312
cgcatttacttttcaatctctcatt

SEQ ID NO: 335365 - DNA, 25 bp, Artificial
  probe
  misc_feature (1)..(25): SEQ ID NO: 2738; WAN024C5F; Start 57; Stop 81
ggtcttgtacgctctagcactgatt

SEQ ID NO: 335366 - DNA, 25 bp, Artificial
  probe
  misc_feature (1)..(25): SEQ ID NO: 2740; WAN024CVR; Start 40; Stop 64
aagagtattgtcattggtaaattga

SEQ ID NO: 335367 - DNA, 25 bp, Artificial
  probe
  misc_feature (1)..(25): SEQ ID NO: 2740; WAN024CVR; Start 41; Stop 65
agagtattgtcattggtaaattgat

SEQ ID NO: 335368 - DNA, 25 bp, Artificial
  probe
  misc_feature (1)..(25): SEQ ID NO: 2740; WAN024CVR; Start 10; Stop 34
ttcccctatactattgtggatgaaa

SEQ ID NO: 335369 - DNA, 25 bp, Artificial
  probe
  misc_feature (1)..(25): SEQ ID NO: 2740; WAN024CVR; Start 9; Stop 33
tttcccctatactattgtggatgaa

SEQ ID NO: 335370 - DNA, 25 bp, Artificial
  probe
  misc_feature (1)..(25): SEQ ID NO: 2740; WAN024CVR; Start 8; Stop 32
atttcccctatactattgtggatga

SEQ ID NO: 335371 - DNA, 25 bp, Artificial
  probe
  misc_feature (1)..(25): SEQ ID NO: 2740; WAN024CVR; Start 7; Stop 31
aatttcccctatactattgtggatg

SEQ ID NO: 335372 - DNA, 25 bp, Artificial
  probe
  misc_feature (1)..(25): SEQ ID NO: 2740; WAN024CVR; Start 39; Stop 63
taagagtattgtcattggtaaattg

SEQ ID NO: 335373 - DNA, 25 bp, Artificial
  probe
  misc_feature (1)..(25): SEQ ID NO: 2740; WAN024CVR; Start 44; Stop 68
gtattgtcattggtaaattgatagt

SEQ ID NO: 335374 - DNA, 25 bp, Artificial
  probe
  misc_feature (1)..(25): SEQ ID NO: 2740; WAN024CVR; Start 43; Stop 67
agtattgtcattggtaaattgatag

SEQ ID NO: 335375 - DNA, 25 bp, Artificial
  probe
  misc_feature (1)..(25): SEQ ID NO: 2740; WAN024CVR; Start 42; Stop 66
gagtattgtcattggtaaattgata

SEQ ID NO: 335376 - DNA, 25 bp, Artificial
  probe
  misc_feature (1)..(25): SEQ ID NO: 2740; WAN024CVR; Start 6; Stop 30
aaatttcccctatactattgtggat

SEQ ID NO: 335377 - DNA, 25 bp, Artificial
  probe
  misc_feature (1)..(25): SEQ ID NO: 2740; WAN024CVR; Start 5; Stop 29
taaatttcccctatactattgtgga

SEQ ID NO: 335378 - DNA, 25 bp, Artificial
  probe
  misc_feature (1)..(25): SEQ ID NO: 2741; WAN024DZO; Start 19; Stop 43
ttactgtatcaactccgcttgtctg

SEQ ID NO: 335379 - DNA, 25 bp, Artificial
  probe
  misc_feature (1)..(25): SEQ ID NO: 2741; WAN024DZO; Start 14; Stop 38
aagatttactgtatcaactccgctt

SEQ ID NO: 335380 - DNA, 25 bp, Artificial
  probe
  misc_feature (1)..(25): SEQ ID NO: 2741; WAN024DZO; Start 13; Stop 37
caagatttactgtatcaactccgct

SEQ ID NO: 335381 - DNA, 25 bp, Artificial
  probe
  misc_feature (1)..(25): SEQ ID NO: 2741; WAN024DZO; Start 12; Stop 36
tcaagatttactgtatcaactccgc

SEQ ID NO: 335382 - DNA, 25 bp, Artificial
  probe
  misc_feature (1)..(25): SEQ ID NO: 2741; WAN024DZO; Start 365; Stop 389
gaacagaactcagccgtttattaaa

SEQ ID NO: 335383 - DNA, 25 bp, Artificial
  probe
  misc_feature (1)..(25): SEQ ID NO: 2741; WAN024DZO; Start 11; Stop 35
ttcaagatttactgtatcaactccg

SEQ ID NO: 335384 - DNA, 25 bp, Artificial
  probe
  misc_feature (1)..(25): SEQ ID NO: 2741; WAN024DZO; Start 364; Stop 388
agaacagaactcagccgtttattaa

SEQ ID NO: 335385 - DNA, 25 bp, Artificial
  probe
  misc_feature (1)..(25): SEQ ID NO: 2741; WAN024DZO; Start 347; Stop 371
tcttaacagagtttgagagaacaga

SEQ ID NO: 335386 - DNA, 25 bp, Artificial
  probe
  misc_feature (1)..(25): SEQ ID NO: 2741; WAN024DZO; Start 366; Stop 390
aacagaactcagccgtttattaaat

SEQ ID NO: 335387 - DNA, 25 bp, Artificial
  probe
  misc_feature (1)..(25): SEQ ID NO: 2741; WAN024DZO; Start 76; Stop 100
cttgggattagtttgacacggtatc

SEQ ID NO: 335388 - DNA, 25 bp, Artificial
  probe
  misc_feature (1)..(25): SEQ ID NO: 2741; WAN024DZO; Start 349; Stop 373
ttaacagagtttgagagaacagaac

SEQ ID NO: 335389 - DNA, 25 bp, Artificial
  probe
  misc_feature (1)..(25): SEQ ID NO: 2741; WAN024DZO; Start 80; Stop 104
ggattagtttgacacggtatcagat

SEQ ID NO: 335390 - DNA, 25 bp, Artificial
  probe
  misc_feature (1)..(25): SEQ ID NO: 2741; WAN024DZO; Start 15; Stop 39
agatttactgtatcaactccgcttg

SEQ ID NO: 335391 - DNA, 25 bp, Artificial
  probe
  misc_feature (1)..(25): SEQ ID NO: 2741; WAN024DZO; Start 17; Stop 41
atttactgtatcaactccgcttgtc

SEQ ID NO: 335392 - DNA, 25 bp, Artificial
  probe
  misc_feature (1)..(25): SEQ ID NO: 2741; WAN024DZO; Start 16; Stop 40
gatttactgtatcaactccgcttgt

SEQ ID NO: 335393 - DNA, 25 bp, Artificial
  probe
  misc_feature (1)..(25): SEQ ID NO: 2741; WAN024DZO; Start 348; Stop 372
cttaacagagtttgagagaacagaa

SEQ ID NO: 335394 - DNA, 25 bp, Artificial
  probe
  misc_feature (1)..(25): SEQ ID NO: 2741; WAN024DZO; Start 81; Stop 105
gattagtttgacacggtatcagatt

SEQ ID NO: 335395 - DNA, 25 bp, Artificial
  probe
  misc_feature (1)..(25): SEQ ID NO: 2741; WAN024DZO; Start 367; Stop 391
acagaactcagccgtttattaaata

SEQ ID NO: 335396 - DNA, 25 bp, Artificial
  probe
  misc_feature (1)..(25): SEQ ID NO: 2741; WAN024DZO; Start 363; Stop 387
gagaacagaactcagccgtttatta

SEQ ID NO: 335397 - DNA, 25 bp, Artificial
  probe
  misc_feature (1)..(25): SEQ ID NO: 2741; WAN024DZO; Start 346; Stop 370
atcttaacagagtttgagagaacag

SEQ ID NO: 335398 - DNA, 25 bp, Artificial
  probe
  misc_feature (1)..(25): SEQ ID NO: 2741; WAN024DZO; Start 82; Stop 106
attagtttgacacggtatcagattt

SEQ ID NO: 335399 - DNA, 25 bp, Artificial
  probe
  misc_feature (1)..(25): SEQ ID NO: 2741; WAN024DZO; Start 20; Stop 44
tactgtatcaactccgcttgtctga

SEQ ID NO: 335400 - DNA, 25 bp, Artificial
  probe
  misc_feature (1)..(25): SEQ ID NO: 2741; WAN024DZO; Start 18; Stop 42
tttactgtatcaactccgcttgtct

SEQ ID NO: 335401 - DNA, 25 bp, Artificial
  probe
  misc_feature (1)..(25): SEQ ID NO: 2741; WAN024DZO; Start 77; Stop 101
ttgggattagtttgacacggtatca

SEQ ID NO: 335402 - DNA, 25 bp, Artificial
  probe
  misc_feature (1)..(25): SEQ ID NO: 2741; WAN024DZO; Start 79; Stop 103
gggattagtttgacacggtatcaga

SEQ ID NO: 335403 - DNA, 25 bp, Artificial
  probe
  misc_feature (1)..(25): SEQ ID NO: 2741; WAN024DZO; Start 78; Stop 102
tgggattagtttgacacggtatcag

SEQ ID NO: 335404 - DNA, 25 bp, Artificial
  probe
  misc_feature (1)..(25): SEQ ID NO: 2741; WAN024DZO; Start 362; Stop 386
agagaacagaactcagccgtttatt

SEQ ID NO: 335405 - DNA, 25 bp, Artificial
  probe
  misc_feature (1)..(25): SEQ ID NO: 2741; WAN024DZO; Start 345; Stop 369
tatcttaacagagtttgagagaaca

SEQ ID NO: 335406 - DNA, 25 bp, Artificial
  probe
  misc_feature (1)..(25): SEQ ID NO: 2741; WAN024DZO; Start 368; Stop 392
cagaactcagccgtttattaaataa

SEQ ID NO: 335407 - DNA, 25 bp, Artificial
  probe
  misc_feature (1)..(25): SEQ ID NO: 2741; WAN024DZO; Start 344; Stop 368
gtatcttaacagagtttgagagaac

SEQ ID NO: 335408 - DNA, 25 bp, Artificial
  probe
  misc_feature (1)..(25): SEQ ID NO: 2741; WAN024DZO; Start 361; Stop 385
gagagaacagaactcagccgtttat

SEQ ID NO: 335409 - DNA, 25 bp, Artificial
  probe
  misc_feature (1)..(25): SEQ ID NO: 2741; WAN024DZO; Start 75; Stop 99
gcttgggattagtttgacacggtat

SEQ ID NO: 335410 - DNA, 25 bp, Artificial
  probe
  misc_feature (1)..(25): SEQ ID NO: 2741; WAN024DZO; Start 343; Stop 367
agtatcttaacagagtttgagagaa

SEQ ID NO: 335411 - DNA, 25 bp, Artificial
  probe
  misc_feature (1)..(25): SEQ ID NO: 2742; WAN024DN8; Start 30; Stop 54
tttggaggaagattttgtctctatt

SEQ ID NO: 335412 - DNA, 25 bp, Artificial
  probe
  misc_feature (1)..(25): SEQ ID NO: 2742; WAN024DN8; Start 29; Stop 53
ttttggaggaagattttgtctctat

SEQ ID NO: 335413 - DNA, 25 bp, Artificial
  probe
  misc_feature (1)..(25): SEQ ID NO: 2742; WAN024DN8; Start 28; Stop 52
attttggaggaagattttgtctcta

SEQ ID NO: 335414 - DNA, 25 bp, Artificial
  probe
  misc_feature (1)..(25): SEQ ID NO: 2742; WAN024DN8; Start 31; Stop 55
ttggaggaagattttgtctctatta

SEQ ID NO: 335415 - DNA, 25 bp, Artificial
  probe
  misc_feature (1)..(25): SEQ ID NO: 2742; WAN024DN8; Start 32; Stop 56
tggaggaagattttgtctctattat

SEQ ID NO: 335416 - DNA, 25 bp, Artificial
  probe
  misc_feature (1)..(25): SEQ ID NO: 2742; WAN024DN8; Start 33; Stop 57
ggaggaagattttgtctctattatt

SEQ ID NO: 335417 - DNA, 25 bp, Artificial
  probe
  misc_feature (1)..(25): SEQ ID NO: 2743; WAN024B5A; Start 521; Stop 545
acaatctcaatatcatcactgttct

SEQ ID NO: 335418 - DNA, 25 bp, Artificial
  probe
  misc_feature (1)..(25): SEQ ID NO: 2743; WAN024B5A; Start 61; Stop 85
atagatgtcgtcaatagggattcac

SEQ ID NO: 335419 - DNA, 25 bp, Artificial
  probe
  misc_feature (1)..(25): SEQ ID NO: 2743; WAN024B5A; Start 522; Stop 546
caatctcaatatcatcactgttctt

SEQ ID NO: 335420 - DNA, 25 bp, Artificial
  probe
  misc_feature (1)..(25): SEQ ID NO: 2743; WAN024B5A; Start 70; Stop 94
gtcaatagggattcacacaaagaaa

SEQ ID NO: 335421 - DNA, 25 bp, Artificial
  probe
  misc_feature (1)..(25): SEQ ID NO: 2743; WAN024B5A; Start 523; Stop 547
aatctcaatatcatcactgttcttg

SEQ ID NO: 335422 - DNA, 25 bp, Artificial
  probe
  misc_feature (1)..(25): SEQ ID NO: 2743; WAN024B5A; Start 60; Stop 84
tatagatgtcgtcaatagggattca

SEQ ID NO: 335423 - DNA, 25 bp, Artificial
  probe
  misc_feature (1)..(25): SEQ ID NO: 2743; WAN024B5A; Start 69; Stop 93
cgtcaatagggattcacacaaagaa

SEQ ID NO: 335424 - DNA, 25 bp, Artificial
  probe
  misc_feature (1)..(25): SEQ ID NO: 2743; WAN024B5A; Start 71; Stop 95
tcaatagggattcacacaaagaaat

SEQ ID NO: 335425 - DNA, 25 bp, Artificial
  probe
  misc_feature (1)..(25): SEQ ID NO: 2743; WAN024B5A; Start 68; Stop 92
tcgtcaatagggattcacacaaaga

SEQ ID NO: 335426 - DNA, 25 bp, Artificial
  probe
  misc_feature (1)..(25): SEQ ID NO: 2743; WAN024B5A; Start 67; Stop 91
gtcgtcaatagggattcacacaaag

SEQ ID NO: 335427 - DNA, 25 bp, Artificial
  probe
  misc_feature (1)..(25): SEQ ID NO: 2743; WAN024B5A; Start 62; Stop 86
tagatgtcgtcaatagggattcaca

SEQ ID NO: 335428 - DNA, 25 bp, Artificial
  probe
  misc_feature (1)..(25): SEQ ID NO: 2743; WAN024B5A; Start 59; Stop 83
ttatagatgtcgtcaatagggattc

SEQ ID NO: 335429 - DNA, 25 bp, Artificial
  probe
  misc_feature (1)..(25): SEQ ID NO: 2743; WAN024B5A; Start 80; Stop 104
attcacacaaagaaatcatcgccaa

SEQ ID NO: 335430 - DNA, 25 bp, Artificial
  probe
  misc_feature (1)..(25): SEQ ID NO: 2743; WAN024B5A; Start 81; Stop 105
ttcacacaaagaaatcatcgccaaa

SEQ ID NO: 335431 - DNA, 25 bp, Artificial
  probe
  misc_feature (1)..(25): SEQ ID NO: 2743; WAN024B5A; Start 84; Stop 108
acacaaagaaatcatcgccaaactg

SEQ ID NO: 335432 - DNA, 25 bp, Artificial
  probe
  misc_feature (1)..(25): SEQ ID NO: 2743; WAN024B5A; Start 83; Stop 107
cacacaaagaaatcatcgccaaact

SEQ ID NO: 335433 - DNA, 25 bp, Artificial
  probe
  misc_feature (1)..(25): SEQ ID NO: 2743; WAN024B5A; Start 82; Stop 106
tcacacaaagaaatcatcgccaaac

SEQ ID NO: 335434 - DNA, 25 bp, Artificial
  probe
  misc_feature (1)..(25): SEQ ID NO: 2743; WAN024B5A; Start 75; Stop 99
tagggattcacacaaagaaatcatc

SEQ ID NO: 335435 - DNA, 25 bp, Artificial
  probe
  misc_feature (1)..(25): SEQ ID NO: 2743; WAN024B5A; Start 58; Stop 82
attatagatgtcgtcaatagggatt

SEQ ID NO: 335436 - DNA, 25 bp, Artificial
  probe
  misc_feature (1)..(25): SEQ ID NO: 2743; WAN024B5A; Start 481; Stop 505
tttacaaagggaaagatgagcttca

SEQ ID NO: 335437 - DNA, 25 bp, Artificial
  probe
  misc_feature (1)..(25): SEQ ID NO: 2743; WAN024B5A; Start 65; Stop 89
atgtcgtcaatagggattcacacaa

SEQ ID NO: 335438 - DNA, 25 bp, Artificial
  probe
  misc_feature (1)..(25): SEQ ID NO: 2743; WAN024B5A; Start 73; Stop 97
aatagggattcacacaaagaaatca

SEQ ID NO: 335439 - DNA, 25 bp, Artificial
  probe
  misc_feature (1)..(25): SEQ ID NO: 2743; WAN024B5A; Start 66; Stop 90
tgtcgtcaatagggattcacacaaa

SEQ ID NO: 335440 - DNA, 25 bp, Artificial
  probe
  misc_feature (1)..(25): SEQ ID NO: 2743; WAN024B5A; Start 63; Stop 87
agatgtcgtcaatagggattcacac

SEQ ID NO: 335441 - DNA, 25 bp, Artificial
  probe
  misc_feature (1)..(25): SEQ ID NO: 2743; WAN024B5A; Start 518; Stop 542
ttaacaatctcaatatcatcactgt

SEQ ID NO: 335442 - DNA, 25 bp, Artificial
  probe
  misc_feature (1)..(25): SEQ ID NO: 2743; WAN024B5A; Start 76; Stop 100
agggattcacacaaagaaatcatcg

SEQ ID NO: 335443 - DNA, 25 bp, Artificial
  probe
  misc_feature (1)..(25): SEQ ID NO: 2743; WAN024B5A; Start 74; Stop 98
atagggattcacacaaagaaatcat

SEQ ID NO: 335444 - DNA, 25 bp, Artificial
  probe
  misc_feature (1)..(25): SEQ ID NO: 2743; WAN024B5A; Start 72; Stop 96
caatagggattcacacaaagaaatc

SEQ ID NO: 335445 - DNA, 25 bp, Artificial
  probe
  misc_feature (1)..(25): SEQ ID NO: 2743; WAN024B5A; Start 524; Stop 548
atctcaatatcatcactgttcttga

SEQ ID NO: 335446 - DNA, 25 bp, Artificial
  probe
  misc_feature (1)..(25): SEQ ID NO: 2743; WAN024B5A; Start 64; Stop 88
gatgtcgtcaatagggattcacaca

SEQ ID NO: 335447 - DNA, 25 bp, Artificial
  probe
  misc_feature (1)..(25): SEQ ID NO: 2743; WAN024B5A; Start 79; Stop 103
gattcacacaaagaaatcatcgcca

SEQ ID NO: 335448 - DNA, 25 bp, Artificial
  probe
  misc_feature (1)..(25): SEQ ID NO: 2743; WAN024B5A; Start 527; Stop 551
tcaatatcatcactgttcttgaggg

SEQ ID NO: 335449 - DNA, 25 bp, Artificial
  probe
  misc_feature (1)..(25): SEQ ID NO: 2743; WAN024B5A; Start 89; Stop 113
aagaaatcatcgccaaactggacta

SEQ ID NO: 335450 - DNA, 25 bp, Artificial
  probe
  misc_feature (1)..(25): SEQ ID NO: 2744; WAN024C7O; Start 142; Stop 166
atagaggaatttatgccagaaacga

SEQ ID NO: 335451 - DNA, 25 bp, Artificial
  probe
  misc_feature (1)..(25): SEQ ID NO: 2744; WAN024C7O; Start 143; Stop 167
tagaggaatttatgccagaaacgag

SEQ ID NO: 335452 - DNA, 25 bp, Artificial
  probe
  misc_feature (1)..(25): SEQ ID NO: 2744; WAN024C7O; Start 243; Stop 267
cctcatcagccaatttctcagtatt

SEQ ID NO: 335453 - DNA, 25 bp, Artificial
  probe
  misc_feature (1)..(25): SEQ ID NO: 2744; WAN024C7O; Start 161; Stop 185
aaacgagcataaagcaagtgaagta

SEQ ID NO: 335454 - DNA, 25 bp, Artificial
  probe
  misc_feature (1)..(25): SEQ ID NO: 2744; WAN024C7O; Start 131; Stop 155
acaccgaggtcatagaggaatttat

SEQ ID NO: 335455 - DNA, 25 bp, Artificial
  probe
  misc_feature (1)..(25): SEQ ID NO: 2744; WAN024C7O; Start 81; Stop 105
aaatcatcccttggttaaagagttt

SEQ ID NO: 335456 - DNA, 25 bp, Artificial
  probe
  misc_feature (1)..(25): SEQ ID NO: 2744; WAN024C7O; Start 130; Stop 154
aacaccgaggtcatagaggaattta

SEQ ID NO: 335457 - DNA, 25 bp, Artificial
  probe
  misc_feature (1)..(25): SEQ ID NO: 2744; WAN024C7O; Start 242; Stop 266
tcctcatcagccaatttctcagtat

SEQ ID NO: 335458 - DNA, 25 bp, Artificial
  probe
  misc_feature (1)..(25): SEQ ID NO: 2744; WAN024C7O; Start 274; Stop 298
gtcaatatagcggaggtagtaccag

SEQ ID NO: 335459 - DNA, 25 bp, Artificial
  probe
  misc_feature (1)..(25): SEQ ID NO: 2744; WAN024C7O; Start 159; Stop 183
agaaacgagcataaagcaagtgaag

SEQ ID NO: 335460 - DNA, 25 bp, Artificial
  probe
  misc_feature (1)..(25): SEQ ID NO: 2744; WAN024C7O; Start 168; Stop 192
cataaagcaagtgaagtacagcatg

SEQ ID NO: 335461 - DNA, 25 bp, Artificial
  probe
  misc_feature (1)..(25): SEQ ID NO: 2744; WAN024C7O; Start 141; Stop 165
catagaggaatttatgccagaaacg

SEQ ID NO: 335462 - DNA, 25 bp, Artificial
  probe
  misc_feature (1)..(25): SEQ ID NO: 2744; WAN024C7O; Start 128; Stop 152
acaacaccgaggtcatagaggaatt

SEQ ID NO: 335463 - DNA, 25 bp, Artificial
  probe
  misc_feature (1)..(25): SEQ ID NO: 2744; WAN024C7O; Start 127; Stop 151
aacaacaccgaggtcatagaggaat

SEQ ID NO: 335464 - DNA, 25 bp, Artificial
  probe
  misc_feature (1)..(25): SEQ ID NO: 2744; WAN024C7O; Start 138; Stop 162
ggtcatagaggaatttatgccagaa

SEQ ID NO: 335465 - DNA, 25 bp, Artificial
  probe
  misc_feature (1)..(25): SEQ ID NO: 2744; WAN024C7O; Start 160; Stop 184
gaaacgagcataaagcaagtgaagt

SEQ ID NO: 335466 - DNA, 25 bp, Artificial
  probe
  misc_feature (1)..(25): SEQ ID NO: 2744; WAN024C7O; Start 158; Stop 182
cagaaacgagcataaagcaagtgaa

SEQ ID NO: 335467 - DNA, 25 bp, Artificial
  probe
  misc_feature (1)..(25): SEQ ID NO: 2744; WAN024C7O; Start 136; Stop 160
gaggtcatagaggaatttatgccag

SEQ ID NO: 335468 - DNA, 25 bp, Artificial
  probe
  misc_feature (1)..(25): SEQ ID NO: 2744; WAN024C7O; Start 162; Stop 186
aacgagcataaagcaagtgaagtac

SEQ ID NO: 335469 - DNA, 25 bp, Artificial
  probe
  misc_feature (1)..(25): SEQ ID NO: 2744; WAN024C7O; Start 241; Stop 265
gtcctcatcagccaatttctcagta

SEQ ID NO: 335470 - DNA, 25 bp, Artificial
  probe
  misc_feature (1)..(25): SEQ ID NO: 2744; WAN024C7O; Start 137; Stop 161
aggtcatagaggaatttatgccaga

SEQ ID NO: 335471 - DNA, 25 bp, Artificial
  probe
  misc_feature (1)..(25): SEQ ID NO: 2744; WAN024C7O; Start 132; Stop 156
caccgaggtcatagaggaatttatg

SEQ ID NO: 335472 - DNA, 25 bp, Artificial
  probe
  misc_feature (1)..(25): SEQ ID NO: 2744; WAN024C7O; Start 140; Stop 164
tcatagaggaatttatgccagaaac

SEQ ID NO: 335473 - DNA, 25 bp, Artificial
  probe
  misc_feature (1)..(25): SEQ ID NO: 2744; WAN024C7O; Start 139; Stop 163
gtcatagaggaatttatgccagaaa

SEQ ID NO: 335474 - DNA, 25 bp, Artificial
  probe
  misc_feature (1)..(25): SEQ ID NO: 2744; WAN024C7O; Start 167; Stop 191
gcataaagcaagtgaagtacagcat

SEQ ID NO: 335475 - DNA, 25 bp, Artificial
  probe
  misc_feature (1)..(25): SEQ ID NO: 2744; WAN024C7O; Start 212; Stop 236
atatctactggcaaccattgtttga

SEQ ID NO: 335476 - DNA, 25 bp, Artificial
  probe
  misc_feature (1)..(25): SEQ ID NO: 2744; WAN024C7O; Start 169; Stop 193
ataaagcaagtgaagtacagcatgt

SEQ ID NO: 335477 - DNA, 25 bp, Artificial
  probe
  misc_feature (1)..(25): SEQ ID NO: 2744; WAN024C7O; Start 164; Stop 188
cgagcataaagcaagtgaagtacag

SEQ ID NO: 335478 - DNA, 25 bp, Artificial
  probe
  misc_feature (1)..(25): SEQ ID NO: 2744; WAN024C7O; Start 170; Stop 194
taaagcaagtgaagtacagcatgtt

SEQ ID NO: 335479 - DNA, 25 bp, Artificial
  probe
  misc_feature (1)..(25): SEQ ID NO: 2744; WAN024C7O; Start 129; Stop 153
caacaccgaggtcatagaggaattt

SEQ ID NO: 335480 - DNA, 25 bp, Artificial
  probe
  misc_feature (1)..(25): SEQ ID NO: 2744; WAN024C7O; Start 213; Stop 237
tatctactggcaaccattgtttgag

SEQ ID NO: 335481 - DNA, 25 bp, Artificial
  probe
  misc_feature (1)..(25): SEQ ID NO: 2744; WAN024C7O; Start 165; Stop 189
gagcataaagcaagtgaagtacagc

SEQ ID NO: 335482 - DNA, 25 bp, Artificial
  probe
  misc_feature (1)..(25): SEQ ID NO: 2744; WAN024C7O; Start 244; Stop 268
ctcatcagccaatttctcagtattg

SEQ ID NO: 335483 - DNA, 25 bp, Artificial
  probe
  misc_feature (1)..(25): SEQ ID NO: 2745; WAN024FAQ; Start 568; Stop 592
tggacactcaatggttacaatcaat

SEQ ID NO: 335484 - DNA, 25 bp, Artificial
  probe
  misc_feature (1)..(25): SEQ ID NO: 2745; WAN024FAQ; Start 569; Stop 593
ggacactcaatggttacaatcaatt

SEQ ID NO: 335485 - DNA, 25 bp, Artificial
  probe
  misc_feature (1)..(25): SEQ ID NO: 2745; WAN024FAQ; Start 573; Stop 597
actcaatggttacaatcaattagcc

SEQ ID NO: 335486 - DNA, 25 bp, Artificial
  probe
  misc_feature (1)..(25): SEQ ID NO: 2745; WAN024FAQ; Start 574; Stop 598
ctcaatggttacaatcaattagcct

SEQ ID NO: 335487 - DNA, 25 bp, Artificial
  probe
  misc_feature (1)..(25): SEQ ID NO: 2745; WAN024FAQ; Start 633; Stop 657
tcaataccttcgttattctcaacca

SEQ ID NO: 335488 - DNA, 25 bp, Artificial
  probe
  misc_feature (1)..(25): SEQ ID NO: 2745; WAN024FAQ; Start 634; Stop 658
caataccttcgttattctcaaccaa

SEQ ID NO: 335489 - DNA, 25 bp, Artificial
  probe
  misc_feature (1)..(25): SEQ ID NO: 2745; WAN024FAQ; Start 575; Stop 599
tcaatggttacaatcaattagcctt

SEQ ID NO: 335490 - DNA, 25 bp, Artificial
  probe
  misc_feature (1)..(25): SEQ ID NO: 2745; WAN024FAQ; Start 572; Stop 596
cactcaatggttacaatcaattagc

SEQ ID NO: 335491 - DNA, 25 bp, Artificial
  probe
  misc_feature (1)..(25): SEQ ID NO: 2745; WAN024FAQ; Start 567; Stop 591
ttggacactcaatggttacaatcaa

SEQ ID NO: 335492 - DNA, 25 bp, Artificial
  probe
  misc_feature (1)..(25): SEQ ID NO: 2745; WAN024FAQ; Start 632; Stop 656
atcaataccttcgttattctcaacc

SEQ ID NO: 335493 - DNA, 25 bp, Artificial
  probe
  misc_feature (1)..(25): SEQ ID NO: 2745; WAN024FAQ; Start 566; Stop 590
cttggacactcaatggttacaatca

SEQ ID NO: 335494 - DNA, 25 bp, Artificial
  probe
  misc_feature (1)..(25): SEQ ID NO: 2745; WAN024FAQ; Start 1158; Stop 1182
cttccataccttgaccatgaactat

SEQ ID NO: 335495 - DNA, 25 bp, Artificial
  probe
  misc_feature (1)..(25): SEQ ID NO: 2745; WAN024FAQ; Start 1157; Stop 1181
acttccataccttgaccatgaacta

SEQ ID NO: 335496 - DNA, 25 bp, Artificial
  probe
  misc_feature (1)..(25): SEQ ID NO: 2745; WAN024FAQ; Start 571; Stop 595
acactcaatggttacaatcaattag

SEQ ID NO: 335497 - DNA, 25 bp, Artificial
  probe
  misc_feature (1)..(25): SEQ ID NO: 2745; WAN024FAQ; Start 570; Stop 594
gacactcaatggttacaatcaatta

SEQ ID NO: 335498 - DNA, 25 bp, Artificial
  probe
  misc_feature (1)..(25): SEQ ID NO: 2745; WAN024FAQ; Start 1164; Stop 1188
taccttgaccatgaactatgtcttg

SEQ ID NO: 335499 - DNA, 25 bp, Artificial
  probe
  misc_feature (1)..(25): SEQ ID NO: 2745; WAN024FAQ; Start 565; Stop 589
gcttggacactcaatggttacaatc

SEQ ID NO: 335500 - DNA, 25 bp, Artificial
  probe
  misc_feature (1)..(25): SEQ ID NO: 2745; WAN024FAQ; Start 1163; Stop 1187
ataccttgaccatgaactatgtctt

SEQ ID NO: 335501 - DNA, 25 bp, Artificial
  probe
  misc_feature (1)..(25): SEQ ID NO: 2745; WAN024FAQ; Start 214; Stop 238
aatgctggtgaagtattgaagacac

SEQ ID NO: 335502 - DNA, 25 bp, Artificial
  probe
  misc_feature (1)..(25): SEQ ID NO: 2745; WAN024FAQ; Start 1162; Stop 1186
cataccttgaccatgaactatgtct

SEQ ID NO: 335503 - DNA, 25 bp, Artificial
  probe
  misc_feature (1)..(25): SEQ ID NO: 2745; WAN024FAQ; Start 1159; Stop 1183
ttccataccttgaccatgaactatg

SEQ ID NO: 335504 - DNA, 25 bp, Artificial
  probe
  misc_feature (1)..(25): SEQ ID NO: 2745; WAN024FAQ; Start 631; Stop 655
aatcaataccttcgttattctcaac

SEQ ID NO: 335505 - DNA, 25 bp, Artificial
  probe
  misc_feature (1)..(25): SEQ ID NO: 2745; WAN024FAQ; Start 1161; Stop 1185
ccataccttgaccatgaactatgtc

SEQ ID NO: 335506 - DNA, 25 bp, Artificial
  probe
  misc_feature (1)..(25): SEQ ID NO: 2745; WAN024FAQ; Start 213; Stop 237
aaatgctggtgaagtattgaagaca

SEQ ID NO: 335507 - DNA, 25 bp, Artificial
  probe
  misc_feature (1)..(25): SEQ ID NO: 2745; WAN024FAQ; Start 1167; Stop 1191
cttgaccatgaactatgtcttgacc

SEQ ID NO: 335508 - DNA, 25 bp, Artificial
  probe
  misc_feature (1)..(25): SEQ ID NO: 2745; WAN024FAQ; Start 1166; Stop 1190
ccttgaccatgaactatgtcttgac

SEQ ID NO: 335509 - DNA, 25 bp, Artificial
  probe
  misc_feature (1)..(25): SEQ ID NO: 2745; WAN024FAQ; Start 1214; Stop 1238
atgatttgaatgccttctttaaccc

SEQ ID NO: 335510 - DNA, 25 bp, Artificial
  probe
  misc_feature (1)..(25): SEQ ID NO: 2745; WAN024FAQ; Start 1160; Stop 1184
tccataccttgaccatgaactatgt

SEQ ID NO: 335511 - DNA, 25 bp, Artificial
  probe
  misc_feature (1)..(25): SEQ ID NO: 2745; WAN024FAQ; Start 1156; Stop 1180
gacttccataccttgaccatgaact

SEQ ID NO: 335512 - DNA, 25 bp, Artificial
  probe
  misc_feature (1)..(25): SEQ ID NO: 2745; WAN024FAQ; Start 1155; Stop 1179
agacttccataccttgaccatgaac

SEQ ID NO: 335513 - DNA, 25 bp, Artificial
  probe
  misc_feature (1)..(25): SEQ ID NO: 2745; WAN024FAQ; Start 1154; Stop 1178
cagacttccataccttgaccatgaa

SEQ ID NO: 335514 - DNA, 25 bp, Artificial
  probe
  misc_feature (1)..(25): SEQ ID NO: 2745; WAN024FAQ; Start 251; Stop 275
gagatgtgcctgatgtggtcaatat

SEQ ID NO: 335515 - DNA, 25 bp, Artificial
  probe
  misc_feature (1)..(25): SEQ ID NO: 2745; WAN024FAQ; Start 1165; Stop 1189
accttgaccatgaactatgtcttga

SEQ ID NO: 335516 - DNA, 25 bp, Artificial
  probe
  misc_feature (1)..(25): SEQ ID NO: 2747; WAN024FN7; Start 108; Stop 132
gaaggctggttatcgtcatattgat

SEQ ID NO: 335517 - DNA, 25 bp, Artificial
  probe
  misc_feature (1)..(25): SEQ ID NO: 2747; WAN024FN7; Start 105; Stop 129
cttgaaggctggttatcgtcatatt

SEQ ID NO: 335518 - DNA, 25 bp, Artificial
  probe
  misc_feature (1)..(25): SEQ ID NO: 2747; WAN024FN7; Start 110; Stop 134
aggctggttatcgtcatattgatac

SEQ ID NO: 335519 - DNA, 25 bp, Artificial
  probe
  misc_feature (1)..(25): SEQ ID NO: 2747; WAN024FN7; Start 109; Stop 133
aaggctggttatcgtcatattgata

SEQ ID NO: 335520 - DNA, 25 bp, Artificial
  probe
  misc_feature (1)..(25): SEQ ID NO: 2747; WAN024FN7; Start 106; Stop 130
ttgaaggctggttatcgtcatattg

SEQ ID NO: 335521 - DNA, 25 bp, Artificial
  probe
  misc_feature (1)..(25): SEQ ID NO: 2747; WAN024FN7; Start 107; Stop 131
tgaaggctggttatcgtcatattga

SEQ ID NO: 335522 - DNA, 25 bp, Artificial
  probe
  misc_feature (1)..(25): SEQ ID NO: 2747; WAN024FN7; Start 58; Stop 82
tttaaggctaaggatggagaagaag

SEQ ID NO: 335523 - DNA, 25 bp, Artificial
  probe
  misc_feature (1)..(25): SEQ ID NO: 2747; WAN024FN7; Start 388; Stop 412
gcgatggaagacctctatcaagaag

SEQ ID NO: 335524 - DNA, 25 bp, Artificial
  probe
  misc_feature (1)..(25): SEQ ID NO: 2747; WAN024FN7; Start 65; Stop 89
ctaaggatggagaagaagcctatcg

SEQ ID NO: 335525 - DNA, 25 bp, Artificial
  probe
  misc_feature (1)..(25): SEQ ID NO: 2747; WAN024FN7; Start 736; Stop 760
gctaatcttgattgctttggaattg

SEQ ID NO: 335526 - DNA, 25 bp, Artificial
  probe
  misc_feature (1)..(25): SEQ ID NO: 2747; WAN024FN7; Start 389; Stop 413
cgatggaagacctctatcaagaagg

SEQ ID NO: 335527 - DNA, 25 bp, Artificial
  probe
  misc_feature (1)..(25): SEQ ID NO: 2747; WAN024FN7; Start 387; Stop 411
agcgatggaagacctctatcaagaa

SEQ ID NO: 335528 - DNA, 25 bp, Artificial
  probe
  misc_feature (1)..(25): SEQ ID NO: 2747; WAN024FN7; Start 66; Stop 90
taaggatggagaagaagcctatcgt

SEQ ID NO: 335529 - DNA, 25 bp, Artificial
  probe
  misc_feature (1)..(25): SEQ ID NO: 2747; WAN024FN7; Start 737; Stop 761
ctaatcttgattgctttggaattga

SEQ ID NO: 335530 - DNA, 25 bp, Artificial
  probe
  misc_feature (1)..(25): SEQ ID NO: 2747; WAN024FN7; Start 104; Stop 128
ccttgaaggctggttatcgtcatat

SEQ ID NO: 335531 - DNA, 25 bp, Artificial
  probe
  misc_feature (1)..(25): SEQ ID NO: 2747; WAN024FN7; Start 59; Stop 83
ttaaggctaaggatggagaagaagc

SEQ ID NO: 335532 - DNA, 25 bp, Artificial
  probe
  misc_feature (1)..(25): SEQ ID NO: 2747; WAN024FN7; Start 386; Stop 410
gagcgatggaagacctctatcaaga

SEQ ID NO: 335533 - DNA, 25 bp, Artificial
  probe
  misc_feature (1)..(25): SEQ ID NO: 2747; WAN024FN7; Start 169; Stop 193
caagcaatcaaagatagcggagttc

SEQ ID NO: 335534 - DNA, 25 bp, Artificial
  probe
  misc_feature (1)..(25): SEQ ID NO: 2747; WAN024FN7; Start 738; Stop 762
taatcttgattgctttggaattgaa

SEQ ID NO: 335535 - DNA, 25 bp, Artificial
  probe
  misc_feature (1)..(25): SEQ ID NO: 2747; WAN024FN7; Start 393; Stop 417
ggaagacctctatcaagaagggaaa

SEQ ID NO: 335536 - DNA, 25 bp, Artificial
  probe
  misc_feature (1)..(25): SEQ ID NO: 2747; WAN024FN7; Start 113; Stop 137
ctggttatcgtcatattgatacggc

SEQ ID NO: 335537 - DNA, 25 bp, Artificial
  probe
  misc_feature (1)..(25): SEQ ID NO: 2747; WAN024FN7; Start 112; Stop 136
gctggttatcgtcatattgatacgg

SEQ ID NO: 335538 - DNA, 25 bp, Artificial
  probe
  misc_feature (1)..(25): SEQ ID NO: 2747; WAN024FN7; Start 111; Stop 135
ggctggttatcgtcatattgatacg

SEQ ID NO: 335539 - DNA, 25 bp, Artificial
  probe
  misc_feature (1)..(25): SEQ ID NO: 2747; WAN024FN7; Start 143; Stop 167
tttatcagaatgaagaaagtgttgg

SEQ ID NO: 335540 - DNA, 25 bp, Artificial
  probe
  misc_feature (1)..(25): SEQ ID NO: 2747; WAN024FN7; Start 64; Stop 88
gctaaggatggagaagaagcctatc

SEQ ID NO: 335541 - DNA, 25 bp, Artificial
  probe
  misc_feature (1)..(25): SEQ ID NO: 2747; WAN024FN7; Start 390; Stop 414
gatggaagacctctatcaagaaggg

SEQ ID NO: 335542 - DNA, 25 bp, Artificial
  probe
  misc_feature (1)..(25): SEQ ID NO: 2747; WAN024FN7; Start 391; Stop 415
atggaagacctctatcaagaaggga

SEQ ID NO: 335543 - DNA, 25 bp, Artificial
  probe
  misc_feature (1)..(25): SEQ ID NO: 2747; WAN024FN7; Start 392; Stop 416
tggaagacctctatcaagaagggaa

SEQ ID NO: 335544 - DNA, 25 bp, Artificial
  probe
  misc_feature (1)..(25): SEQ ID NO: 2747; WAN024FN7; Start 79; Stop 103
gaagcctatcgtgcagtgttagaag

SEQ ID NO: 335545 - DNA, 25 bp, Artificial
  probe
  misc_feature (1)..(25): SEQ ID NO: 2747; WAN024FN7; Start 76; Stop 100
gaagaagcctatcgtgcagtgttag

SEQ ID NO: 335546 - DNA, 25 bp, Artificial
  probe
  misc_feature (1)..(25): SEQ ID NO: 2747; WAN024FN7; Start 57; Stop 81
ttttaaggctaaggatggagaagaa

SEQ ID NO: 335547 - DNA, 25 bp, Artificial
  probe
  misc_feature (1)..(25): SEQ ID NO: 2747; WAN024FN7; Start 41; Stop 65
tattgggatttggaacttttaaggc

SEQ ID NO: 335548 - DNA, 25 bp, Artificial
  probe
  misc_feature (1)..(25): SEQ ID NO: 2747; WAN024FN7; Start 44; Stop 68
tgggatttggaacttttaaggctaa

SEQ ID NO: 335549 - DNA, 25 bp, Artificial
  probe
  misc_feature (1)..(25): SEQ ID NO: 2748; WAN024CDC; Start 900; Stop 924
tattcaatcaaaagtgcgtccaaaa

SEQ ID NO: 335550 - DNA, 25 bp, Artificial
  probe
  misc_feature (1)..(25): SEQ ID NO: 2748; WAN024CDC; Start 899; Stop 923
ttattcaatcaaaagtgcgtccaaa

SEQ ID NO: 335551 - DNA, 25 bp, Artificial
  probe
  misc_feature (1)..(25): SEQ ID NO: 2748; WAN024CDC; Start 898; Stop 922
tttattcaatcaaaagtgcgtccaa

SEQ ID NO: 335552 - DNA, 25 bp, Artificial
  probe
  misc_feature (1)..(25): SEQ ID NO: 2748; WAN024CDC; Start 901; Stop 925
attcaatcaaaagtgcgtccaaaac

SEQ ID NO: 335553 - DNA, 25 bp, Artificial
  probe
  misc_feature (1)..(25): SEQ ID NO: 2748; WAN024CDC; Start 911; Stop 935
aagtgcgtccaaaactgtatagaat

SEQ ID NO: 335554 - DNA, 25 bp, Artificial
  probe
  misc_feature (1)..(25): SEQ ID NO: 2748; WAN024CDC; Start 912; Stop 936
agtgcgtccaaaactgtatagaatt

SEQ ID NO: 335555 - DNA, 25 bp, Artificial
  probe
  misc_feature (1)..(25): SEQ ID NO: 2748; WAN024CDC; Start 910; Stop 934
aaagtgcgtccaaaactgtatagaa

SEQ ID NO: 335556 - DNA, 25 bp, Artificial
  probe
  misc_feature (1)..(25): SEQ ID NO: 2748; WAN024CDC; Start 909; Stop 933
aaaagtgcgtccaaaactgtataga

SEQ ID NO: 335557 - DNA, 25 bp, Artificial
  probe
  misc_feature (1)..(25): SEQ ID NO: 2748; WAN024CDC; Start 908; Stop 932
caaaagtgcgtccaaaactgtatag

SEQ ID NO: 335558 - DNA, 25 bp, Artificial
  probe
  misc_feature (1)..(25): SEQ ID NO: 2748; WAN024CDC; Start 907; Stop 931
tcaaaagtgcgtccaaaactgtata

SEQ ID NO: 335559 - DNA, 25 bp, Artificial
  probe
  misc_feature (1)..(25): SEQ ID NO: 2748; WAN024CDC; Start 896; Stop 920
gttttattcaatcaaaagtgcgtcc

SEQ ID NO: 335560 - DNA, 25 bp, Artificial
  probe
  misc_feature (1)..(25): SEQ ID NO: 2748; WAN024CDC; Start 895; Stop 919
ggttttattcaatcaaaagtgcgtc

SEQ ID NO: 335561 - DNA, 25 bp, Artificial
  probe
  misc_feature (1)..(25): SEQ ID NO: 2748; WAN024CDC; Start 906; Stop 930
atcaaaagtgcgtccaaaactgtat

SEQ ID NO: 335562 - DNA, 25 bp, Artificial
  probe
  misc_feature (1)..(25): SEQ ID NO: 2748; WAN024CDC; Start 897; Stop 921
ttttattcaatcaaaagtgcgtcca

SEQ ID NO: 335563 - DNA, 25 bp, Artificial
  probe
  misc_feature (1)..(25): SEQ ID NO: 2748; WAN024CDC; Start 894; Stop 918
aggttttattcaatcaaaagtgcgt

SEQ ID NO: 335564 - DNA, 25 bp, Artificial
  probe
  misc_feature (1)..(25): SEQ ID NO: 2748; WAN024CDC; Start 905; Stop 929
aatcaaaagtgcgtccaaaactgta

SEQ ID NO: 335565 - DNA, 25 bp, Artificial
  probe
  misc_feature (1)..(25): SEQ ID NO: 2748; WAN024CDC; Start 893; Stop 917
taggttttattcaatcaaaagtgcg

SEQ ID NO: 335566 - DNA, 25 bp, Artificial
  probe
  misc_feature (1)..(25): SEQ ID NO: 2748; WAN024CDC; Start 902; Stop 926
ttcaatcaaaagtgcgtccaaaact

SEQ ID NO: 335567 - DNA, 25 bp, Artificial
  probe
  misc_feature (1)..(25): SEQ ID NO: 2748; WAN024CDC; Start 903; Stop 927
tcaatcaaaagtgcgtccaaaactg

SEQ ID NO: 335568 - DNA, 25 bp, Artificial
  probe
  misc_feature (1)..(25): SEQ ID NO: 2748; WAN024CDC; Start 904; Stop 928
caatcaaaagtgcgtccaaaactgt

SEQ ID NO: 335569 - DNA, 25 bp, Artificial
  probe
  misc_feature (1)..(25): SEQ ID NO: 2748; WAN024CDC; Start 892; Stop 916
ctaggttttattcaatcaaaagtgc

SEQ ID NO: 335570 - DNA, 25 bp, Artificial
  probe
  misc_feature (1)..(25): SEQ ID NO: 2748; WAN024CDC; Start 891; Stop 915
actaggttttattcaatcaaaagtg

SEQ ID NO: 335571 - DNA, 25 bp, Artificial
  probe
  misc_feature (1)..(25): SEQ ID NO: 2749; WAN024GNA; Start 60; Stop 84
aagtaatgctatggaggctattcag

SEQ ID NO: 335572 - DNA, 25 bp, Artificial
  probe
  misc_feature (1)..(25): SEQ ID NO: 2749; WAN024GNA; Start 61; Stop 85
agtaatgctatggaggctattcagg

SEQ ID NO: 335573 - DNA, 25 bp, Artificial
  probe
  misc_feature (1)..(25): SEQ ID NO: 2749; WAN024GNA; Start 59; Stop 83
aaagtaatgctatggaggctattca

SEQ ID NO: 335574 - DNA, 25 bp, Artificial
  probe
  misc_feature (1)..(25): SEQ ID NO: 2749; WAN024GNA; Start 280; Stop 304
gaagtggtagaagtatacgaacgat

SEQ ID NO: 335575 - DNA, 25 bp, Artificial
  probe
  misc_feature (1)..(25): SEQ ID NO: 2749; WAN024GNA; Start 278; Stop 302
aagaagtggtagaagtatacgaacg

SEQ ID NO: 335576 - DNA, 25 bp, Artificial
  probe
  misc_feature (1)..(25): SEQ ID NO: 2749; WAN024GNA; Start 281; Stop 305
aagtggtagaagtatacgaacgatt

SEQ ID NO: 335577 - DNA, 25 bp, Artificial
  probe
  misc_feature (1)..(25): SEQ ID NO: 2749; WAN024GNA; Start 279; Stop 303
agaagtggtagaagtatacgaacga

SEQ ID NO: 335578 - DNA, 25 bp, Artificial
  probe
  misc_feature (1)..(25): SEQ ID NO: 2749; WAN024GNA; Start 272; Stop 296
tggcgaaagaagtggtagaagtata

SEQ ID NO: 335579 - DNA, 25 bp, Artificial
  probe
  misc_feature (1)..(25): SEQ ID NO: 2749; WAN024GNA; Start 62; Stop 86
gtaatgctatggaggctattcaggc

SEQ ID NO: 335580 - DNA, 25 bp, Artificial
  probe
  misc_feature (1)..(25): SEQ ID NO: 2749; WAN024GNA; Start 271; Stop 295
ttggcgaaagaagtggtagaagtat

SEQ ID NO: 335581 - DNA, 25 bp, Artificial
  probe
  misc_feature (1)..(25): SEQ ID NO: 2749; WAN024GNA; Start 128; Stop 152
ctgatgcgaatgctgccttattaca

SEQ ID NO: 335582 - DNA, 25 bp, Artificial
  probe
  misc_feature (1)..(25): SEQ ID NO: 2749; WAN024GNA; Start 270; Stop 294
cttggcgaaagaagtggtagaagta

SEQ ID NO: 335583 - DNA, 25 bp, Artificial
  probe
  misc_feature (1)..(25): SEQ ID NO: 2749; WAN024GNA; Start 275; Stop 299
cgaaagaagtggtagaagtatacga

SEQ ID NO: 335584 - DNA, 25 bp, Artificial
  probe
  misc_feature (1)..(25): SEQ ID NO: 2749; WAN024GNA; Start 284; Stop 308
tggtagaagtatacgaacgatttga

SEQ ID NO: 335585 - DNA, 25 bp, Artificial
  probe
  misc_feature (1)..(25): SEQ ID NO: 2749; WAN024GNA; Start 283; Stop 307
gtggtagaagtatacgaacgatttg

SEQ ID NO: 335586 - DNA, 25 bp, Artificial
  probe
  misc_feature (1)..(25): SEQ ID NO: 2749; WAN024GNA; Start 282; Stop 306
agtggtagaagtatacgaacgattt

SEQ ID NO: 335587 - DNA, 25 bp, Artificial
  probe
  misc_feature (1)..(25): SEQ ID NO: 2749; WAN024GNA; Start 273; Stop 297
ggcgaaagaagtggtagaagtatac

SEQ ID NO: 335588 - DNA, 25 bp, Artificial
  probe
  misc_feature (1)..(25): SEQ ID NO: 2749; WAN024GNA; Start 285; Stop 309
ggtagaagtatacgaacgatttgaa

SEQ ID NO: 335589 - DNA, 25 bp, Artificial
  probe
  misc_feature (1)..(25): SEQ ID NO: 2749; WAN024GNA; Start 129; Stop 153
tgatgcgaatgctgccttattacag

SEQ ID NO: 335590 - DNA, 25 bp, Artificial
  probe
  misc_feature (1)..(25): SEQ ID NO: 2749; WAN024GNA; Start 115; Stop 139
aatcgaagattagctgatgcgaatg

SEQ ID NO: 335591 - DNA, 25 bp, Artificial
  probe
  misc_feature (1)..(25): SEQ ID NO: 2749; WAN024GNA; Start 114; Stop 138
caatcgaagattagctgatgcgaat

SEQ ID NO: 335592 - DNA, 25 bp, Artificial
  probe
  misc_feature (1)..(25): SEQ ID NO: 2749; WAN024GNA; Start 274; Stop 298
gcgaaagaagtggtagaagtatacg

SEQ ID NO: 335593 - DNA, 25 bp, Artificial
  probe
  misc_feature (1)..(25): SEQ ID NO: 2749; WAN024GNA; Start 277; Stop 301
aaagaagtggtagaagtatacgaac

SEQ ID NO: 335594 - DNA, 25 bp, Artificial
  probe
  misc_feature (1)..(25): SEQ ID NO: 2749; WAN024GNA; Start 209; Stop 233
caattagcctcttgatggtacacgc

SEQ ID NO: 335595 - DNA, 25 bp, Artificial
  probe
  misc_feature (1)..(25): SEQ ID NO: 2749; WAN024GNA; Start 93; Stop 117
aaaaggggatttctctaaagccaat

SEQ ID NO: 335596 - DNA, 25 bp, Artificial
  probe
  misc_feature (1)..(25): SEQ ID NO: 2749; WAN024GNA; Start 208; Stop 232
tcaattagcctcttgatggtacacg

SEQ ID NO: 335597 - DNA, 25 bp, Artificial
  probe
  misc_feature (1)..(25): SEQ ID NO: 2749; WAN024GNA; Start 57; Stop 81
caaaagtaatgctatggaggctatt

SEQ ID NO: 335598 - DNA, 25 bp, Artificial
  probe
  misc_feature (1)..(25): SEQ ID NO: 2749; WAN024GNA; Start 58; Stop 82
aaaagtaatgctatggaggctattc

SEQ ID NO: 335599 - DNA, 25 bp, Artificial
  probe
  misc_feature (1)..(25): SEQ ID NO: 2749; WAN024GNA; Start 276; Stop 300
gaaagaagtggtagaagtatacgaa

SEQ ID NO: 335600 - DNA, 25 bp, Artificial
  probe
  misc_feature (1)..(25): SEQ ID NO: 2749; WAN024GNA; Start 104; Stop 128
tctctaaagccaatcgaagattagc

SEQ ID NO: 335601 - DNA, 25 bp, Artificial
  probe
  misc_feature (1)..(25): SEQ ID NO: 2749; WAN024GNA; Start 100; Stop 124
gatttctctaaagccaatcgaagat

SEQ ID NO: 335602 - DNA, 25 bp, Artificial
  probe
  misc_feature (1)..(25): SEQ ID NO: 2749; WAN024GNA; Start 99; Stop 123
ggatttctctaaagccaatcgaaga

SEQ ID NO: 335603 - DNA, 25 bp, Artificial
  probe
  misc_feature (1)..(25): SEQ ID NO: 2749; WAN024GNA; Start 101; Stop 125
atttctctaaagccaatcgaagatt

SEQ ID NO: 335604 - DNA, 25 bp, Artificial
  probe
  misc_feature (1)..(25): SEQ ID NO: 2750; WAN024BGP; Start 155; Stop 179
acgatctccttatggtaactattca

SEQ ID NO: 335605 - DNA, 25 bp, Artificial
  probe
  misc_feature (1)..(25): SEQ ID NO: 2750; WAN024BGP; Start 156; Stop 180
cgatctccttatggtaactattcaa

SEQ ID NO: 335606 - DNA, 25 bp, Artificial
  probe
  misc_feature (1)..(25): SEQ ID NO: 2750; WAN024BGP; Start 177; Stop 201
tcaatacatgcgagaactaactaat

SEQ ID NO: 335607 - DNA, 25 bp, Artificial
  probe
  misc_feature (1)..(25): SEQ ID NO: 2750; WAN024BGP; Start 176; Stop 200
ttcaatacatgcgagaactaactaa

SEQ ID NO: 335608 - DNA, 25 bp, Artificial
  probe
  misc_feature (1)..(25): SEQ ID NO: 2750; WAN024BGP; Start 175; Stop 199
attcaatacatgcgagaactaacta

SEQ ID NO: 335609 - DNA, 25 bp, Artificial
  probe
  misc_feature (1)..(25): SEQ ID NO: 2750; WAN024BGP; Start 174; Stop 198
tattcaatacatgcgagaactaact

SEQ ID NO: 335610 - DNA, 25 bp, Artificial
  probe
  misc_feature (1)..(25): SEQ ID NO: 2750; WAN024BGP; Start 172; Stop 196
actattcaatacatgcgagaactaa

SEQ ID NO: 335611 - DNA, 25 bp, Artificial
  probe
  misc_feature (1)..(25): SEQ ID NO: 2750; WAN024BGP; Start 171; Stop 195
aactattcaatacatgcgagaacta

SEQ ID NO: 335612 - DNA, 25 bp, Artificial
  probe
  misc_feature (1)..(25): SEQ ID NO: 2750; WAN024BGP; Start 170; Stop 194
taactattcaatacatgcgagaact

SEQ ID NO: 335613 - DNA, 25 bp, Artificial
  probe
  misc_feature (1)..(25): SEQ ID NO: 2750; WAN024BGP; Start 169; Stop 193
gtaactattcaatacatgcgagaac

SEQ ID NO: 335614 - DNA, 25 bp, Artificial
  probe
  misc_feature (1)..(25): SEQ ID NO: 2750; WAN024BGP; Start 173; Stop 197
ctattcaatacatgcgagaactaac

SEQ ID NO: 335615 - DNA, 25 bp, Artificial
  probe
  misc_feature (1)..(25): SEQ ID NO: 2750; WAN024BGP; Start 165; Stop 189
tatggtaactattcaatacatgcga

SEQ ID NO: 335616 - DNA, 25 bp, Artificial
  probe
  misc_feature (1)..(25): SEQ ID NO: 2750; WAN024BGP; Start 164; Stop 188
ttatggtaactattcaatacatgcg

SEQ ID NO: 335617 - DNA, 25 bp, Artificial
  probe
  misc_feature (1)..(25): SEQ ID NO: 2750; WAN024BGP; Start 74; Stop 98
ttgaagagatgttagctgtgttaaa

SEQ ID NO: 335618 - DNA, 25 bp, Artificial
  probe
  misc_feature (1)..(25): SEQ ID NO: 2750; WAN024BGP; Start 73; Stop 97
tttgaagagatgttagctgtgttaa

SEQ ID NO: 335619 - DNA, 25 bp, Artificial
  probe
  misc_feature (1)..(25): SEQ ID NO: 2750; WAN024BGP; Start 160; Stop 184
ctccttatggtaactattcaataca

SEQ ID NO: 335620 - DNA, 25 bp, Artificial
  probe
  misc_feature (1)..(25): SEQ ID NO: 2750; WAN024BGP; Start 157; Stop 181
gatctccttatggtaactattcaat

SEQ ID NO: 335621 - DNA, 25 bp, Artificial
  probe
  misc_feature (1)..(25): SEQ ID NO: 2750; WAN024BGP; Start 159; Stop 183
tctccttatggtaactattcaatac

SEQ ID NO: 335622 - DNA, 25 bp, Artificial
  probe
  misc_feature (1)..(25): SEQ ID NO: 2750; WAN024BGP; Start 163; Stop 187
cttatggtaactattcaatacatgc

SEQ ID NO: 335623 - DNA, 25 bp, Artificial
  probe
  misc_feature (1)..(25): SEQ ID NO: 2750; WAN024BGP; Start 161; Stop 185
tccttatggtaactattcaatacat

SEQ ID NO: 335624 - DNA, 25 bp, Artificial
  probe
  misc_feature (1)..(25): SEQ ID NO: 2750; WAN024BGP; Start 40; Stop 64
ttcaagatccttgtaggtgttcagc

SEQ ID NO: 335625 - DNA, 25 bp, Artificial
  probe
  misc_feature (1)..(25): SEQ ID NO: 2750; WAN024BGP; Start 39; Stop 63
tttcaagatccttgtaggtgttcag

SEQ ID NO: 335626 - DNA, 25 bp, Artificial
  probe
  misc_feature (1)..(25): SEQ ID NO: 2750; WAN024BGP; Start 162; Stop 186
ccttatggtaactattcaatacatg

SEQ ID NO: 335627 - DNA, 25 bp, Artificial
  probe
  misc_feature (1)..(25): SEQ ID NO: 2750; WAN024BGP; Start 71; Stop 95
cttttgaagagatgttagctgtgtt

SEQ ID NO: 335628 - DNA, 25 bp, Artificial
  probe
  misc_feature (1)..(25): SEQ ID NO: 2750; WAN024BGP; Start 69; Stop 93
gacttttgaagagatgttagctgtg

SEQ ID NO: 335629 - DNA, 25 bp, Artificial
  probe
  misc_feature (1)..(25): SEQ ID NO: 2750; WAN024BGP; Start 38; Stop 62
gtttcaagatccttgtaggtgttca

SEQ ID NO: 335630 - DNA, 25 bp, Artificial
  probe
  misc_feature (1)..(25): SEQ ID NO: 2750; WAN024BGP; Start 70; Stop 94
acttttgaagagatgttagctgtgt

SEQ ID NO: 335631 - DNA, 25 bp, Artificial
  probe
  misc_feature (1)..(25): SEQ ID NO: 2750; WAN024BGP; Start 75; Stop 99
tgaagagatgttagctgtgttaaaa

SEQ ID NO: 335632 - DNA, 25 bp, Artificial
  probe
  misc_feature (1)..(25): SEQ ID NO: 2750; WAN024BGP; Start 72; Stop 96
ttttgaagagatgttagctgtgtta

SEQ ID NO: 335633 - DNA, 25 bp, Artificial
  probe
  misc_feature (1)..(25): SEQ ID NO: 2750; WAN024BGP; Start 31; Stop 55
gatagccgtttcaagatccttgtag

SEQ ID NO: 335634 - DNA, 25 bp, Artificial
  probe
  misc_feature (1)..(25): SEQ ID NO: 2750; WAN024BGP; Start 37; Stop 61
cgtttcaagatccttgtaggtgttc

SEQ ID NO: 335635 - DNA, 25 bp, Artificial
  probe
  misc_feature (1)..(25): SEQ ID NO: 2750; WAN024BGP; Start 32; Stop 56
atagccgtttcaagatccttgtagg

SEQ ID NO: 335636 - DNA, 25 bp, Artificial
  probe
  misc_feature (1)..(25): SEQ ID NO: 2750; WAN024BGP; Start 30; Stop 54
cgatagccgtttcaagatccttgta

SEQ ID NO: 335637 - DNA, 25 bp, Artificial
  probe
  misc_feature (1)..(25): SEQ ID NO: 2751; WAN024DTR; Start 1082; Stop 1106
tggaagtagcagttattaagatgga

SEQ ID NO: 335638 - DNA, 25 bp, Artificial
  probe
  misc_feature (1)..(25): SEQ ID NO: 2751; WAN024DTR; Start 1083; Stop 1107
ggaagtagcagttattaagatggaa

SEQ ID NO: 335639 - DNA, 25 bp, Artificial
  probe
  misc_feature (1)..(25): SEQ ID NO: 2751; WAN024DTR; Start 1081; Stop 1105
atggaagtagcagttattaagatgg

SEQ ID NO: 335640 - DNA, 25 bp, Artificial
  probe
  misc_feature (1)..(25): SEQ ID NO: 2751; WAN024DTR; Start 1078; Stop 1102
cagatggaagtagcagttattaaga

SEQ ID NO: 335641 - DNA, 25 bp, Artificial
  probe
  misc_feature (1)..(25): SEQ ID NO: 2751; WAN024DTR; Start 1080; Stop 1104
gatggaagtagcagttattaagatg

SEQ ID NO: 335642 - DNA, 25 bp, Artificial
  probe
  misc_feature (1)..(25): SEQ ID NO: 2751; WAN024DTR; Start 1079; Stop 1103
agatggaagtagcagttattaagat

SEQ ID NO: 335643 - DNA, 25 bp, Artificial
  probe
  misc_feature (1)..(25): SEQ ID NO: 2751; WAN024DTR; Start 1273; Stop 1297
atggaaggcagtacatttagacaaa

SEQ ID NO: 335644 - DNA, 25 bp, Artificial
  probe
  misc_feature (1)..(25): SEQ ID NO: 2751; WAN024DTR; Start 1272; Stop 1296
gatggaaggcagtacatttagacaa

SEQ ID NO: 335645 - DNA, 25 bp, Artificial
  probe
  misc_feature (1)..(25): SEQ ID NO: 2751; WAN024DTR; Start 1268; Stop 1292
cagagatggaaggcagtacatttag

SEQ ID NO: 335646 - DNA, 25 bp, Artificial
  probe
  misc_feature (1)..(25): SEQ ID NO: 2751; WAN024DTR; Start 1270; Stop 1294
gagatggaaggcagtacatttagac

SEQ ID NO: 335647 - DNA, 25 bp, Artificial
  probe
  misc_feature (1)..(25): SEQ ID NO: 2751; WAN024DTR; Start 1269; Stop 1293
agagatggaaggcagtacatttaga

SEQ ID NO: 335648 - DNA, 25 bp, Artificial
  probe
  misc_feature (1)..(25): SEQ ID NO: 2751; WAN024DTR; Start 1271; Stop 1295
agatggaaggcagtacatttagaca

SEQ ID NO: 335649 - DNA, 25 bp, Artificial
  probe
  misc_feature (1)..(25): SEQ ID NO: 2751; WAN024DTR; Start 1267; Stop 1291
acagagatggaaggcagtacattta

SEQ ID NO: 335650 - DNA, 25 bp, Artificial
  probe
  misc_feature (1)..(25): SEQ ID NO: 2751; WAN024DTR; Start 1275; Stop 1299
ggaaggcagtacatttagacaaatc

SEQ ID NO: 335651 - DNA, 25 bp, Artificial
  probe
  misc_feature (1)..(25): SEQ ID NO: 2751; WAN024DTR; Start 1274; Stop 1298
tggaaggcagtacatttagacaaat

SEQ ID NO: 335652 - DNA, 25 bp, Artificial
  probe
  misc_feature (1)..(25): SEQ ID NO: 2751; WAN024DTR; Start 1276; Stop 1300
gaaggcagtacatttagacaaatca

SEQ ID NO: 335653 - DNA, 25 bp, Artificial
  probe
  misc_feature (1)..(25): SEQ ID NO: 2751; WAN024DTR; Start 866; Stop 890
acacttactttgatttgaacaacat

SEQ ID NO: 335654 - DNA, 25 bp, Artificial
  probe
  misc_feature (1)..(25): SEQ ID NO: 2751; WAN024DTR; Start 1278; Stop 1302
aggcagtacatttagacaaatcatt

SEQ ID NO: 335655 - DNA, 25 bp, Artificial
  probe
  misc_feature (1)..(25): SEQ ID NO: 2751; WAN024DTR; Start 1277; Stop 1301
aaggcagtacatttagacaaatcat

SEQ ID NO: 335656 - DNA, 25 bp, Artificial
  probe
  misc_feature (1)..(25): SEQ ID NO: 2751; WAN024DTR; Start 935; Stop 959
atgctcgaaataatggtgtagagtt

SEQ ID NO: 335657 - DNA, 25 bp, Artificial
  probe
  misc_feature (1)..(25): SEQ ID NO: 2751; WAN024DTR; Start 934; Stop 958
tatgctcgaaataatggtgtagagt

SEQ ID NO: 335658 - DNA, 25 bp, Artificial
  probe
  misc_feature (1)..(25): SEQ ID NO: 2751; WAN024DTR; Start 936; Stop 960
tgctcgaaataatggtgtagagttt

SEQ ID NO: 335659 - DNA, 25 bp, Artificial
  probe
  misc_feature (1)..(25): SEQ ID NO: 2751; WAN024DTR; Start 636; Stop 660
aatggagaaagagattgctttgaag

SEQ ID NO: 335660 - DNA, 25 bp, Artificial
  probe
  misc_feature (1)..(25): SEQ ID NO: 2751; WAN024DTR; Start 865; Stop 889
tacacttactttgatttgaacaaca

SEQ ID NO: 335661 - DNA, 25 bp, Artificial
  probe
  misc_feature (1)..(25): SEQ ID NO: 2751; WAN024DTR; Start 635; Stop 659
aaatggagaaagagattgctttgaa

SEQ ID NO: 335662 - DNA, 25 bp, Artificial
  probe
  misc_feature (1)..(25): SEQ ID NO: 2751; WAN024DTR; Start 937; Stop 961
gctcgaaataatggtgtagagttta

SEQ ID NO: 335663 - DNA, 25 bp, Artificial
  probe
  misc_feature (1)..(25): SEQ ID NO: 2751; WAN024DTR; Start 1085; Stop 1109
aagtagcagttattaagatggaaac

SEQ ID NO: 335664 - DNA, 25 bp, Artificial
  probe
  misc_feature (1)..(25): SEQ ID NO: 2751; WAN024DTR; Start 1084; Stop 1108
gaagtagcagttattaagatggaaa

SEQ ID NO: 335665 - DNA, 25 bp, Artificial
  probe
  misc_feature (1)..(25): SEQ ID NO: 2751; WAN024DTR; Start 872; Stop 896
actttgatttgaacaacatagaaga

SEQ ID NO: 335666 - DNA, 25 bp, Artificial
  probe
  misc_feature (1)..(25): SEQ ID NO: 2751; WAN024DTR; Start 634; Stop 658
caaatggagaaagagattgctttga

SEQ ID NO: 335667 - DNA, 25 bp, Artificial
  probe
  misc_feature (1)..(25): SEQ ID NO: 2751; WAN024DTR; Start 633; Stop 657
tcaaatggagaaagagattgctttg

SEQ ID NO: 335668 - DNA, 25 bp, Artificial
  probe
  misc_feature (1)..(25): SEQ ID NO: 2751; WAN024DTR; Start 530; Stop 554
tggtaagtacgattaaacatttgaa

SEQ ID NO: 335669 - DNA, 25 bp, Artificial
  probe
  misc_feature (1)..(25): SEQ ID NO: 2751; WAN024DTR; Start 864; Stop 888
gtacacttactttgatttgaacaac

SEQ ID NO: 335670 - DNA, 25 bp, Artificial
  probe
  misc_feature (1)..(25): SEQ ID NO: 2752; WAN024F3L; Start 718; Stop 742
atcggtaactcacttgtagaagaag

SEQ ID NO: 335671 - DNA, 25 bp, Artificial
  probe
  misc_feature (1)..(25): SEQ ID NO: 2752; WAN024F3L; Start 717; Stop 741
aatcggtaactcacttgtagaagaa

SEQ ID NO: 335672 - DNA, 25 bp, Artificial
  probe
  misc_feature (1)..(25): SEQ ID NO: 2752; WAN024F3L; Start 720; Stop 744
cggtaactcacttgtagaagaagac

SEQ ID NO: 335673 - DNA, 25 bp, Artificial
  probe
  misc_feature (1)..(25): SEQ ID NO: 2752; WAN024F3L; Start 719; Stop 743
tcggtaactcacttgtagaagaaga

SEQ ID NO: 335674 - DNA, 25 bp, Artificial
  probe
  misc_feature (1)..(25): SEQ ID NO: 2752; WAN024F3L; Start 721; Stop 745
ggtaactcacttgtagaagaagaca

SEQ ID NO: 335675 - DNA, 25 bp, Artificial
  probe
  misc_feature (1)..(25): SEQ ID NO: 2752; WAN024F3L; Start 1140; Stop 1164
aatggaacttcttgaaggtaaggtt

SEQ ID NO: 335676 - DNA, 25 bp, Artificial
  probe
  misc_feature (1)..(25): SEQ ID NO: 2752; WAN024F3L; Start 1102; Stop 1126
gacaagttctcatggattagtacgg

SEQ ID NO: 335677 - DNA, 25 bp, Artificial
  probe
  misc_feature (1)..(25): SEQ ID NO: 2752; WAN024F3L; Start 1101; Stop 1125
agacaagttctcatggattagtacg

SEQ ID NO: 335678 - DNA, 25 bp, Artificial
  probe
  misc_feature (1)..(25): SEQ ID NO: 2752; WAN024F3L; Start 1099; Stop 1123
gcagacaagttctcatggattagta

SEQ ID NO: 335679 - DNA, 25 bp, Artificial
  probe
  misc_feature (1)..(25): SEQ ID NO: 2752; WAN024F3L; Start 1139; Stop 1163
caatggaacttcttgaaggtaaggt

SEQ ID NO: 335680 - DNA, 25 bp, Artificial
  probe
  misc_feature (1)..(25): SEQ ID NO: 2752; WAN024F3L; Start 1100; Stop 1124
cagacaagttctcatggattagtac

SEQ ID NO: 335681 - DNA, 25 bp, Artificial
  probe
  misc_feature (1)..(25): SEQ ID NO: 2752; WAN024F3L; Start 131; Stop 155
ttaagtacatcatcgaacaaggtgg

SEQ ID NO: 335682 - DNA, 25 bp, Artificial
  probe
  misc_feature (1)..(25): SEQ ID NO: 2752; WAN024F3L; Start 130; Stop 154
attaagtacatcatcgaacaaggtg

SEQ ID NO: 335683 - DNA, 25 bp, Artificial
  probe
  misc_feature (1)..(25): SEQ ID NO: 2752; WAN024F3L; Start 118; Stop 142
gctcttccaactattaagtacatca

SEQ ID NO: 335684 - DNA, 25 bp, Artificial
  probe
  misc_feature (1)..(25): SEQ ID NO: 2752; WAN024F3L; Start 114; Stop 138
agcagctcttccaactattaagtac

SEQ ID NO: 335685 - DNA, 25 bp, Artificial
  probe
  misc_feature (1)..(25): SEQ ID NO: 2752; WAN024F3L; Start 113; Stop 137
cagcagctcttccaactattaagta

SEQ ID NO: 335686 - DNA, 25 bp, Artificial
  probe
  misc_feature (1)..(25): SEQ ID NO: 2752; WAN024F3L; Start 690; Stop 714
cacattctacaaagcacaaggtatc

SEQ ID NO: 335687 - DNA, 25 bp, Artificial
  probe
  misc_feature (1)..(25): SEQ ID NO: 2752; WAN024F3L; Start 688; Stop 712
tacacattctacaaagcacaaggta

SEQ ID NO: 335688 - DNA, 25 bp, Artificial
  probe
  misc_feature (1)..(25): SEQ ID NO: 2752; WAN024F3L; Start 115; Stop 139
gcagctcttccaactattaagtaca

SEQ ID NO: 335689 - DNA, 25 bp, Artificial
  probe
  misc_feature (1)..(25): SEQ ID NO: 2752; WAN024F3L; Start 689; Stop 713
acacattctacaaagcacaaggtat

SEQ ID NO: 335690 - DNA, 25 bp, Artificial
  probe
  misc_feature (1)..(25): SEQ ID NO: 2752; WAN024F3L; Start 687; Stop 711
ttacacattctacaaagcacaaggt

SEQ ID NO: 335691 - DNA, 25 bp, Artificial
  probe
  misc_feature (1)..(25): SEQ ID NO: 2752; WAN024F3L; Start 132; Stop 156
taagtacatcatcgaacaaggtgga

SEQ ID NO: 335692 - DNA, 25 bp, Artificial
  probe
  misc_feature (1)..(25): SEQ ID NO: 2752; WAN024F3L; Start 680; Stop 704
ggatgacttacacattctacaaagc

SEQ ID NO: 335693 - DNA, 25 bp, Artificial
  probe
  misc_feature (1)..(25): SEQ ID NO: 2752; WAN024F3L; Start 678; Stop 702
tgggatgacttacacattctacaaa

SEQ ID NO: 335694 - DNA, 25 bp, Artificial
  probe
  misc_feature (1)..(25): SEQ ID NO: 2752; WAN024F3L; Start 716; Stop 740
aaatcggtaactcacttgtagaaga

SEQ ID NO: 335695 - DNA, 25 bp, Artificial
  probe
  misc_feature (1)..(25): SEQ ID NO: 2752; WAN024F3L; Start 685; Stop 709
acttacacattctacaaagcacaag

SEQ ID NO: 335696 - DNA, 25 bp, Artificial
  probe
  misc_feature (1)..(25): SEQ ID NO: 2752; WAN024F3L; Start 684; Stop 708
gacttacacattctacaaagcacaa

SEQ ID NO: 335697 - DNA, 25 bp, Artificial
  probe
  misc_feature (1)..(25): SEQ ID NO: 2752; WAN024F3L; Start 109; Stop 133
atcacagcagctcttccaactatta

SEQ ID NO: 335698 - DNA, 25 bp, Artificial
  probe
  misc_feature (1)..(25): SEQ ID NO: 2752; WAN024F3L; Start 108; Stop 132
tatcacagcagctcttccaactatt

SEQ ID NO: 335699 - DNA, 25 bp, Artificial
  probe
  misc_feature (1)..(25): SEQ ID NO: 2752; WAN024F3L; Start 686; Stop 710
cttacacattctacaaagcacaagg

SEQ ID NO: 335700 - DNA, 25 bp, Artificial
  probe
  misc_feature (1)..(25): SEQ ID NO: 2752; WAN024F3L; Start 682; Stop 706
atgacttacacattctacaaagcac

SEQ ID NO: 335701 - DNA, 25 bp, Artificial
  probe
  misc_feature (1)..(25): SEQ ID NO: 2752; WAN024F3L; Start 715; Stop 739
gaaatcggtaactcacttgtagaag

SEQ ID NO: 335702 - DNA, 25 bp, Artificial
  probe
  misc_feature (1)..(25): SEQ ID NO: 2752; WAN024F3L; Start 683; Stop 707
tgacttacacattctacaaagcaca

SEQ ID NO: 335703 - DNA, 25 bp, Artificial
  probe
  misc_feature (1)..(25): SEQ ID NO: 2753; WAN024FCA; Start 939; Stop 963
tgattatgaagtaactggtttggaa

SEQ ID NO: 335704 - DNA, 25 bp, Artificial
  probe
  misc_feature (1)..(25): SEQ ID NO: 2753; WAN024FCA; Start 667; Stop 691
ttggcggactctaaatacaatgaac

SEQ ID NO: 335705 - DNA, 25 bp, Artificial
  probe
  misc_feature (1)..(25): SEQ ID NO: 2753; WAN024FCA; Start 662; Stop 686
gtgaattggcggactctaaatacaa

SEQ ID NO: 335706 - DNA, 25 bp, Artificial
  probe
  misc_feature (1)..(25): SEQ ID NO: 2753; WAN024FCA; Start 1105; Stop 1129
tacgaggaagtagttggatacgctc

SEQ ID NO: 335707 - DNA, 25 bp, Artificial
  probe
  misc_feature (1)..(25): SEQ ID NO: 2753; WAN024FCA; Start 940; Stop 964
gattatgaagtaactggtttggaat

SEQ ID NO: 335708 - DNA, 25 bp, Artificial
  probe
  misc_feature (1)..(25): SEQ ID NO: 2753; WAN024FCA; Start 613; Stop 637
cttgatttgaaggacaatgtcgttg

SEQ ID NO: 335709 - DNA, 25 bp, Artificial
  probe
  misc_feature (1)..(25): SEQ ID NO: 2753; WAN024FCA; Start 664; Stop 688
gaattggcggactctaaatacaatg

SEQ ID NO: 335710 - DNA, 25 bp, Artificial
  probe
  misc_feature (1)..(25): SEQ ID NO: 2753; WAN024FCA; Start 621; Stop 645
gaaggacaatgtcgttgttatcatg

SEQ ID NO: 335711 - DNA, 25 bp, Artificial
  probe
  misc_feature (1)..(25): SEQ ID NO: 2753; WAN024FCA; Start 666; Stop 690
attggcggactctaaatacaatgaa

SEQ ID NO: 335712 - DNA, 25 bp, Artificial
  probe
  misc_feature (1)..(25): SEQ ID NO: 2753; WAN024FCA; Start 665; Stop 689
aattggcggactctaaatacaatga

SEQ ID NO: 335713 - DNA, 25 bp, Artificial
  probe
  misc_feature (1)..(25): SEQ ID NO: 2753; WAN024FCA; Start 663; Stop 687
tgaattggcggactctaaatacaat

SEQ ID NO: 335714 - DNA, 25 bp, Artificial
  probe
  misc_feature (1)..(25): SEQ ID NO: 2753; WAN024FCA; Start 620; Stop 644
tgaaggacaatgtcgttgttatcat

SEQ ID NO: 335715 - DNA, 25 bp, Artificial
  probe
  misc_feature (1)..(25): SEQ ID NO: 2753; WAN024FCA; Start 668; Stop 692
tggcggactctaaatacaatgaacg

SEQ ID NO: 335716 - DNA, 25 bp, Artificial
  probe
  misc_feature (1)..(25): SEQ ID NO: 2753; WAN024FCA; Start 619; Stop 643
ttgaaggacaatgtcgttgttatca

SEQ ID NO: 335717 - DNA, 25 bp, Artificial
  probe
  misc_feature (1)..(25): SEQ ID NO: 2753; WAN024FCA; Start 612; Stop 636
acttgatttgaaggacaatgtcgtt

SEQ ID NO: 335718 - DNA, 25 bp, Artificial
  probe
  misc_feature (1)..(25): SEQ ID NO: 2753; WAN024FCA; Start 675; Stop 699
ctctaaatacaatgaacgtcgtgct

SEQ ID NO: 335719 - DNA, 25 bp, Artificial
  probe
  misc_feature (1)..(25): SEQ ID NO: 2753; WAN024FCA; Start 941; Stop 965
attatgaagtaactggtttggaatt

SEQ ID NO: 335720 - DNA, 25 bp, Artificial
  probe
  misc_feature (1)..(25): SEQ ID NO: 2753; WAN024FCA; Start 661; Stop 685
cgtgaattggcggactctaaataca

SEQ ID NO: 335721 - DNA, 25 bp, Artificial
  probe
  misc_feature (1)..(25): SEQ ID NO: 2753; WAN024FCA; Start 678; Stop 702
taaatacaatgaacgtcgtgctgag

SEQ ID NO: 335722 - DNA, 25 bp, Artificial
  probe
  misc_feature (1)..(25): SEQ ID NO: 2753; WAN024FCA; Start 677; Stop 701
ctaaatacaatgaacgtcgtgctga

SEQ ID NO: 335723 - DNA, 25 bp, Artificial
  probe
  misc_feature (1)..(25): SEQ ID NO: 2753; WAN024FCA; Start 676; Stop 700
tctaaatacaatgaacgtcgtgctg

SEQ ID NO: 335724 - DNA, 25 bp, Artificial
  probe
  misc_feature (1)..(25): SEQ ID NO: 2753; WAN024FCA; Start 674; Stop 698
actctaaatacaatgaacgtcgtgc

SEQ ID NO: 335725 - DNA, 25 bp, Artificial
  probe
  misc_feature (1)..(25): SEQ ID NO: 2753; WAN024FCA; Start 673; Stop 697
gactctaaatacaatgaacgtcgtg

SEQ ID NO: 335726 - DNA, 25 bp, Artificial
  probe
  misc_feature (1)..(25): SEQ ID NO: 2753; WAN024FCA; Start 607; Stop 631
gtgccacttgatttgaaggacaatg

SEQ ID NO: 335727 - DNA, 25 bp, Artificial
  probe
  misc_feature (1)..(25): SEQ ID NO: 2753; WAN024FCA; Start 1135; Stop 1159
ttctatatcgctgaagttgcaggtg

SEQ ID NO: 335728 - DNA, 25 bp, Artificial
  probe
  misc_feature (1)..(25): SEQ ID NO: 2753; WAN024FCA; Start 672; Stop 696
ggactctaaatacaatgaacgtcgt

SEQ ID NO: 335729 - DNA, 25 bp, Artificial
  probe
  misc_feature (1)..(25): SEQ ID NO: 2753; WAN024FCA; Start 611; Stop 635
cacttgatttgaaggacaatgtcgt

SEQ ID NO: 335730 - DNA, 25 bp, Artificial
  probe
  misc_feature (1)..(25): SEQ ID NO: 2753; WAN024FCA; Start 1082; Stop 1106
ttaaggaagctgtaggcaaacacta

SEQ ID NO: 335731 - DNA, 25 bp, Artificial
  probe
  misc_feature (1)..(25): SEQ ID NO: 2753; WAN024FCA; Start 608; Stop 632
tgccacttgatttgaaggacaatgt

SEQ ID NO: 335732 - DNA, 25 bp, Artificial
  probe
  misc_feature (1)..(25): SEQ ID NO: 2753; WAN024FCA; Start 1104; Stop 1128
ctacgaggaagtagttggatacgct

SEQ ID NO: 335733 - DNA, 25 bp, Artificial
  probe
  misc_feature (1)..(25): SEQ ID NO: 2753; WAN024FCA; Start 1080; Stop 1104
ctttaaggaagctgtaggcaaacac

SEQ ID NO: 335734 - DNA, 25 bp, Artificial
  probe
  misc_feature (1)..(25): SEQ ID NO: 2753; WAN024FCA; Start 680; Stop 704
aatacaatgaacgtcgtgctgagtg

SEQ ID NO: 335735 - DNA, 25 bp, Artificial
  probe
  misc_feature (1)..(25): SEQ ID NO: 2753; WAN024FCA; Start 671; Stop 695
cggactctaaatacaatgaacgtcg

SEQ ID NO: 335736 - DNA, 25 bp, Artificial
  probe
  misc_feature (1)..(25): SEQ ID NO: 2754; WAN024GIJ; Start 310; Stop 334
ttgattcgcattcgtagattgttag

SEQ ID NO: 335737 - DNA, 25 bp, Artificial
  probe
  misc_feature (1)..(25): SEQ ID NO: 2754; WAN024GIJ; Start 825; Stop 849
aggtcaagttcaacaagtcatagat

SEQ ID NO: 335738 - DNA, 25 bp, Artificial
  probe
  misc_feature (1)..(25): SEQ ID NO: 2754; WAN024GIJ; Start 824; Stop 848
aaggtcaagttcaacaagtcataga

SEQ ID NO: 335739 - DNA, 25 bp, Artificial
  probe
  misc_feature (1)..(25): SEQ ID NO: 2754; WAN024GIJ; Start 311; Stop 335
tgattcgcattcgtagattgttaga

SEQ ID NO: 335740 - DNA, 25 bp, Artificial
  probe
  misc_feature (1)..(25): SEQ ID NO: 2754; WAN024GIJ; Start 829; Stop 853
caagttcaacaagtcatagatacgc

SEQ ID NO: 335741 - DNA, 25 bp, Artificial
  probe
  misc_feature (1)..(25): SEQ ID NO: 2754; WAN024GIJ; Start 312; Stop 336
gattcgcattcgtagattgttagat

SEQ ID NO: 335742 - DNA, 25 bp, Artificial
  probe
  misc_feature (1)..(25): SEQ ID NO: 2754; WAN024GIJ; Start 316; Stop 340
cgcattcgtagattgttagatacct

SEQ ID NO: 335743 - DNA, 25 bp, Artificial
  probe
  misc_feature (1)..(25): SEQ ID NO: 2754; WAN024GIJ; Start 315; Stop 339
tcgcattcgtagattgttagatacc

SEQ ID NO: 335744 - DNA, 25 bp, Artificial
  probe
  misc_feature (1)..(25): SEQ ID NO: 2754; WAN024GIJ; Start 822; Stop 846
agaaggtcaagttcaacaagtcata

SEQ ID NO: 335745 - DNA, 25 bp, Artificial
  probe
  misc_feature (1)..(25): SEQ ID NO: 2754; WAN024GIJ; Start 314; Stop 338
ttcgcattcgtagattgttagatac

SEQ ID NO: 335746 - DNA, 25 bp, Artificial
  probe
  misc_feature (1)..(25): SEQ ID NO: 2754; WAN024GIJ; Start 823; Stop 847
gaaggtcaagttcaacaagtcatag

SEQ ID NO: 335747 - DNA, 25 bp, Artificial
  probe
  misc_feature (1)..(25): SEQ ID NO: 2754; WAN024GIJ; Start 173; Stop 197
aagatgttatggaactctgtgatgt

SEQ ID NO: 335748 - DNA, 25 bp, Artificial
  probe
  misc_feature (1)..(25): SEQ ID NO: 2754; WAN024GIJ; Start 170; Stop 194
ttgaagatgttatggaactctgtga

SEQ ID NO: 335749 - DNA, 25 bp, Artificial
  probe
  misc_feature (1)..(25): SEQ ID NO: 2754; WAN024GIJ; Start 174; Stop 198
agatgttatggaactctgtgatgtc

SEQ ID NO: 335750 - DNA, 25 bp, Artificial
  probe
  misc_feature (1)..(25): SEQ ID NO: 2754; WAN024GIJ; Start 171; Stop 195
tgaagatgttatggaactctgtgat

SEQ ID NO: 335751 - DNA, 25 bp, Artificial
  probe
  misc_feature (1)..(25): SEQ ID NO: 2754; WAN024GIJ; Start 830; Stop 854
aagttcaacaagtcatagatacgcc

SEQ ID NO: 335752 - DNA, 25 bp, Artificial
  probe
  misc_feature (1)..(25): SEQ ID NO: 2754; WAN024GIJ; Start 828; Stop 852
tcaagttcaacaagtcatagatacg

SEQ ID NO: 335753 - DNA, 25 bp, Artificial
  probe
  misc_feature (1)..(25): SEQ ID NO: 2754; WAN024GIJ; Start 172; Stop 196
gaagatgttatggaactctgtgatg

SEQ ID NO: 335754 - DNA, 25 bp, Artificial
  probe
  misc_feature (1)..(25): SEQ ID NO: 2754; WAN024GIJ; Start 565; Stop 589
ccagaagtgtcaattagcagtgtaa

SEQ ID NO: 335755 - DNA, 25 bp, Artificial
  probe
  misc_feature (1)..(25): SEQ ID NO: 2754; WAN024GIJ; Start 835; Stop 859
caacaagtcatagatacgccagaag

SEQ ID NO: 335756 - DNA, 25 bp, Artificial
  probe
  misc_feature (1)..(25): SEQ ID NO: 2754; WAN024GIJ; Start 826; Stop 850
ggtcaagttcaacaagtcatagata

SEQ ID NO: 335757 - DNA, 25 bp, Artificial
  probe
  misc_feature (1)..(25): SEQ ID NO: 2754; WAN024GIJ; Start 562; Stop 586
ctaccagaagtgtcaattagcagtg

SEQ ID NO: 335758 - DNA, 25 bp, Artificial
  probe
  misc_feature (1)..(25): SEQ ID NO: 2754; WAN024GIJ; Start 821; Stop 845
cagaaggtcaagttcaacaagtcat

SEQ ID NO: 335759 - DNA, 25 bp, Artificial
  probe
  misc_feature (1)..(25): SEQ ID NO: 2754; WAN024GIJ; Start 313; Stop 337
attcgcattcgtagattgttagata

SEQ ID NO: 335760 - DNA, 25 bp, Artificial
  probe
  misc_feature (1)..(25): SEQ ID NO: 2754; WAN024GIJ; Start 832; Stop 856
gttcaacaagtcatagatacgccag

SEQ ID NO: 335761 - DNA, 25 bp, Artificial
  probe
  misc_feature (1)..(25): SEQ ID NO: 2754; WAN024GIJ; Start 834; Stop 858
tcaacaagtcatagatacgccagaa

SEQ ID NO: 335762 - DNA, 25 bp, Artificial
  probe
  misc_feature (1)..(25): SEQ ID NO: 2754; WAN024GIJ; Start 833; Stop 857
ttcaacaagtcatagatacgccaga

SEQ ID NO: 335763 - DNA, 25 bp, Artificial
  probe
  misc_feature (1)..(25): SEQ ID NO: 2754; WAN024GIJ; Start 317; Stop 341
gcattcgtagattgttagataccta

SEQ ID NO: 335764 - DNA, 25 bp, Artificial
  probe
  misc_feature (1)..(25): SEQ ID NO: 2754; WAN024GIJ; Start 831; Stop 855
agttcaacaagtcatagatacgcca

SEQ ID NO: 335765 - DNA, 25 bp, Artificial
  probe
  misc_feature (1)..(25): SEQ ID NO: 2754; WAN024GIJ; Start 564; Stop 588
accagaagtgtcaattagcagtgta

SEQ ID NO: 335766 - DNA, 25 bp, Artificial
  probe
  misc_feature (1)..(25): SEQ ID NO: 2754; WAN024GIJ; Start 563; Stop 587
taccagaagtgtcaattagcagtgt

SEQ ID NO: 335767 - DNA, 25 bp, Artificial
  probe
  misc_feature (1)..(25): SEQ ID NO: 2754; WAN024GIJ; Start 827; Stop 851
gtcaagttcaacaagtcatagatac

SEQ ID NO: 335768 - DNA, 25 bp, Artificial
  probe
  misc_feature (1)..(25): SEQ ID NO: 2754; WAN024GIJ; Start 561; Stop 585
actaccagaagtgtcaattagcagt

SEQ ID NO: 335769 - DNA, 25 bp, Artificial
  probe
  misc_feature (1)..(25): SEQ ID NO: 2755; WAN024EXK; Start 584; Stop 608
gtaggcaagatgacagagattaact

SEQ ID NO: 335770 - DNA, 25 bp, Artificial
  probe
  misc_feature (1)..(25): SEQ ID NO: 2755; WAN024EXK; Start 586; Stop 610
aggcaagatgacagagattaactaa

SEQ ID NO: 335771 - DNA, 25 bp, Artificial
  probe
  misc_feature (1)..(25): SEQ ID NO: 2755; WAN024EXK; Start 583; Stop 607
ggtaggcaagatgacagagattaac

SEQ ID NO: 335772 - DNA, 25 bp, Artificial
  probe
  misc_feature (1)..(25): SEQ ID NO: 2755; WAN024EXK; Start 582; Stop 606
aggtaggcaagatgacagagattaa

SEQ ID NO: 335773 - DNA, 25 bp, Artificial
  probe
  misc_feature (1)..(25): SEQ ID NO: 2755; WAN024EXK; Start 585; Stop 609
taggcaagatgacagagattaacta

SEQ ID NO: 335774 - DNA, 25 bp, Artificial
  probe
  misc_feature (1)..(25): SEQ ID NO: 2755; WAN024EXK; Start 581; Stop 605
gaggtaggcaagatgacagagatta

SEQ ID NO: 335775 - DNA, 25 bp, Artificial
  probe
  misc_feature (1)..(25): SEQ ID NO: 2755; WAN024EXK; Start 587; Stop 611
ggcaagatgacagagattaactaat

SEQ ID NO: 335776 - DNA, 25 bp, Artificial
  probe
  misc_feature (1)..(25): SEQ ID NO: 2755; WAN024EXK; Start 511; Stop 535
gccagccaggttcttgataataatg

SEQ ID NO: 335777 - DNA, 25 bp, Artificial
  probe
  misc_feature (1)..(25): SEQ ID NO: 2755; WAN024EXK; Start 517; Stop 541
caggttcttgataataatggcaatc

SEQ ID NO: 335778 - DNA, 25 bp, Artificial
  probe
  misc_feature (1)..(25): SEQ ID NO: 2755; WAN024EXK; Start 516; Stop 540
ccaggttcttgataataatggcaat

SEQ ID NO: 335779 - DNA, 25 bp, Artificial
  probe
  misc_feature (1)..(25): SEQ ID NO: 2755; WAN024EXK; Start 512; Stop 536
ccagccaggttcttgataataatgg

SEQ ID NO: 335780 - DNA, 25 bp, Artificial
  probe
  misc_feature (1)..(25): SEQ ID NO: 2755; WAN024EXK; Start 525; Stop 549
tgataataatggcaatcagaaccag

SEQ ID NO: 335781 - DNA, 25 bp, Artificial
  probe
  misc_feature (1)..(25): SEQ ID NO: 2755; WAN024EXK; Start 580; Stop 604
ggaggtaggcaagatgacagagatt

SEQ ID NO: 335782 - DNA, 25 bp, Artificial
  probe
  misc_feature (1)..(25): SEQ ID NO: 2755; WAN024EXK; Start 552; Stop 576
tcttaatcaagtgcatatccttctt

SEQ ID NO: 335783 - DNA, 25 bp, Artificial
  probe
  misc_feature (1)..(25): SEQ ID NO: 2755; WAN024EXK; Start 551; Stop 575
ttcttaatcaagtgcatatccttct

SEQ ID NO: 335784 - DNA, 25 bp, Artificial
  probe
  misc_feature (1)..(25): SEQ ID NO: 2755; WAN024EXK; Start 524; Stop 548
ttgataataatggcaatcagaacca

SEQ ID NO: 335785 - DNA, 25 bp, Artificial
  probe
  misc_feature (1)..(25): SEQ ID NO: 2755; WAN024EXK; Start 518; Stop 542
aggttcttgataataatggcaatca

SEQ ID NO: 335786 - DNA, 25 bp, Artificial
  probe
  misc_feature (1)..(25): SEQ ID NO: 2755; WAN024EXK; Start 523; Stop 547
cttgataataatggcaatcagaacc

SEQ ID NO: 335787 - DNA, 25 bp, Artificial
  probe
  misc_feature (1)..(25): SEQ ID NO: 2755; WAN024EXK; Start 519; Stop 543
ggttcttgataataatggcaatcag

SEQ ID NO: 335788 - DNA, 25 bp, Artificial
  probe
  misc_feature (1)..(25): SEQ ID NO: 2755; WAN024EXK; Start 280; Stop 304
gaggaactggctactttgagagaac

SEQ ID NO: 335789 - DNA, 25 bp, Artificial
  probe
  misc_feature (1)..(25): SEQ ID NO: 2755; WAN024EXK; Start 303; Stop 327
acagttggctcagacagaagagatt

SEQ ID NO: 335790 - DNA, 25 bp, Artificial
  probe
  misc_feature (1)..(25): SEQ ID NO: 2755; WAN024EXK; Start 302; Stop 326
aacagttggctcagacagaagagat

SEQ ID NO: 335791 - DNA, 25 bp, Artificial
  probe
  misc_feature (1)..(25): SEQ ID NO: 2755; WAN024EXK; Start 271; Stop 295
attatccgtgaggaactggctactt

SEQ ID NO: 335792 - DNA, 25 bp, Artificial
  probe
  misc_feature (1)..(25): SEQ ID NO: 2755; WAN024EXK; Start 279; Stop 303
tgaggaactggctactttgagagaa

SEQ ID NO: 335793 - DNA, 25 bp, Artificial
  probe
  misc_feature (1)..(25): SEQ ID NO: 2755; WAN024EXK; Start 268; Stop 292
gagattatccgtgaggaactggcta

SEQ ID NO: 335794 - DNA, 25 bp, Artificial
  probe
  misc_feature (1)..(25): SEQ ID NO: 2755; WAN024EXK; Start 522; Stop 546
tcttgataataatggcaatcagaac

SEQ ID NO: 335795 - DNA, 25 bp, Artificial
  probe
  misc_feature (1)..(25): SEQ ID NO: 2755; WAN024EXK; Start 520; Stop 544
gttcttgataataatggcaatcaga

SEQ ID NO: 335796 - DNA, 25 bp, Artificial
  probe
  misc_feature (1)..(25): SEQ ID NO: 2755; WAN024EXK; Start 304; Stop 328
cagttggctcagacagaagagattt

SEQ ID NO: 335797 - DNA, 25 bp, Artificial
  probe
  misc_feature (1)..(25): SEQ ID NO: 2755; WAN024EXK; Start 281; Stop 305
aggaactggctactttgagagaaca

SEQ ID NO: 335798 - DNA, 25 bp, Artificial
  probe
  misc_feature (1)..(25): SEQ ID NO: 2755; WAN024EXK; Start 270; Stop 294
gattatccgtgaggaactggctact

SEQ ID NO: 335799 - DNA, 25 bp, Artificial
  probe
  misc_feature (1)..(25): SEQ ID NO: 2755; WAN024EXK; Start 269; Stop 293
agattatccgtgaggaactggctac

SEQ ID NO: 335800 - DNA, 25 bp, Artificial
  probe
  misc_feature (1)..(25): SEQ ID NO: 2755; WAN024EXK; Start 301; Stop 325
gaacagttggctcagacagaagaga

SEQ ID NO: 335801 - DNA, 25 bp, Artificial
  probe
  misc_feature (1)..(25): SEQ ID NO: 2755; WAN024EXK; Start 300; Stop 324
agaacagttggctcagacagaagag

SEQ ID NO: 335802 - DNA, 25 bp, Artificial
  probe
  misc_feature (1)..(25): SEQ ID NO: 2756; WAN024GIO; Start 74; Stop 98
aaacgataaagaaagctgaccatgt

SEQ ID NO: 335803 - DNA, 25 bp, Artificial
  probe
  misc_feature (1)..(25): SEQ ID NO: 2756; WAN024GIO; Start 55; Stop 79
caaggtgtaaaagtgatgaaaacga

SEQ ID NO: 335804 - DNA, 25 bp, Artificial
  probe
  misc_feature (1)..(25): SEQ ID NO: 2756; WAN024GIO; Start 56; Stop 80
aaggtgtaaaagtgatgaaaacgat

SEQ ID NO: 335805 - DNA, 25 bp, Artificial
  probe
  misc_feature (1)..(25): SEQ ID NO: 2756; WAN024GIO; Start 78; Stop 102
gataaagaaagctgaccatgtcgtt

SEQ ID NO: 335806 - DNA, 25 bp, Artificial
  probe
  misc_feature (1)..(25): SEQ ID NO: 2756; WAN024GIO; Start 75; Stop 99
aacgataaagaaagctgaccatgtc

SEQ ID NO: 335807 - DNA, 25 bp, Artificial
  probe
  misc_feature (1)..(25): SEQ ID NO: 2756; WAN024GIO; Start 79; Stop 103
ataaagaaagctgaccatgtcgttg

SEQ ID NO: 335808 - DNA, 25 bp, Artificial
  probe
  misc_feature (1)..(25): SEQ ID NO: 2756; WAN024GIO; Start 65; Stop 89
aagtgatgaaaacgataaagaaagc

SEQ ID NO: 335809 - DNA, 25 bp, Artificial
  probe
  misc_feature (1)..(25): SEQ ID NO: 2756; WAN024GIO; Start 57; Stop 81
aggtgtaaaagtgatgaaaacgata

SEQ ID NO: 335810 - DNA, 25 bp, Artificial
  probe
  misc_feature (1)..(25): SEQ ID NO: 2756; WAN024GIO; Start 54; Stop 78
gcaaggtgtaaaagtgatgaaaacg

SEQ ID NO: 335811 - DNA, 25 bp, Artificial
  probe
  misc_feature (1)..(25): SEQ ID NO: 2756; WAN024GIO; Start 58; Stop 82
ggtgtaaaagtgatgaaaacgataa

SEQ ID NO: 335812 - DNA, 25 bp, Artificial
  probe
  misc_feature (1)..(25): SEQ ID NO: 2756; WAN024GIO; Start 72; Stop 96
gaaaacgataaagaaagctgaccat

SEQ ID NO: 335813 - DNA, 25 bp, Artificial
  probe
  misc_feature (1)..(25): SEQ ID NO: 2756; WAN024GIO; Start 70; Stop 94
atgaaaacgataaagaaagctgacc

SEQ ID NO: 335814 - DNA, 25 bp, Artificial
  probe
  misc_feature (1)..(25): SEQ ID NO: 2756; WAN024GIO; Start 73; Stop 97
aaaacgataaagaaagctgaccatg

SEQ ID NO: 335815 - DNA, 25 bp, Artificial
  probe
  misc_feature (1)..(25): SEQ ID NO: 2756; WAN024GIO; Start 68; Stop 92
tgatgaaaacgataaagaaagctga

SEQ ID NO: 335816 - DNA, 25 bp, Artificial
  probe
  misc_feature (1)..(25): SEQ ID NO: 2756; WAN024GIO; Start 67; Stop 91
gtgatgaaaacgataaagaaagctg

SEQ ID NO: 335817 - DNA, 25 bp, Artificial
  probe
  misc_feature (1)..(25): SEQ ID NO: 2756; WAN024GIO; Start 66; Stop 90
agtgatgaaaacgataaagaaagct

SEQ ID NO: 335818 - DNA, 25 bp, Artificial
  probe
  misc_feature (1)..(25): SEQ ID NO: 2756; WAN024GIO; Start 80; Stop 104
taaagaaagctgaccatgtcgttgt

SEQ ID NO: 335819 - DNA, 25 bp, Artificial
  probe
  misc_feature (1)..(25): SEQ ID NO: 2756; WAN024GIO; Start 69; Stop 93
gatgaaaacgataaagaaagctgac

SEQ ID NO: 335820 - DNA, 25 bp, Artificial
  probe
  misc_feature (1)..(25): SEQ ID NO: 2756; WAN024GIO; Start 71; Stop 95
tgaaaacgataaagaaagctgacca

SEQ ID NO: 335821 - DNA, 25 bp, Artificial
  probe
  misc_feature (1)..(25): SEQ ID NO: 2756; WAN024GIO; Start 53; Stop 77
tgcaaggtgtaaaagtgatgaaaac

SEQ ID NO: 335822 - DNA, 25 bp, Artificial
  probe
  misc_feature (1)..(25): SEQ ID NO: 2756; WAN024GIO; Start 52; Stop 76
gtgcaaggtgtaaaagtgatgaaaa

SEQ ID NO: 335823 - DNA, 25 bp, Artificial
  probe
  misc_feature (1)..(25): SEQ ID NO: 2756; WAN024GIO; Start 64; Stop 88
aaagtgatgaaaacgataaagaaag

SEQ ID NO: 335824 - DNA, 25 bp, Artificial
  probe
  misc_feature (1)..(25): SEQ ID NO: 2756; WAN024GIO; Start 59; Stop 83
gtgtaaaagtgatgaaaacgataaa

SEQ ID NO: 335825 - DNA, 25 bp, Artificial
  probe
  misc_feature (1)..(25): SEQ ID NO: 2756; WAN024GIO; Start 81; Stop 105
aaagaaagctgaccatgtcgttgtt

SEQ ID NO: 335826 - DNA, 25 bp, Artificial
  probe
  misc_feature (1)..(25): SEQ ID NO: 2756; WAN024GIO; Start 60; Stop 84
tgtaaaagtgatgaaaacgataaag

SEQ ID NO: 335827 - DNA, 25 bp, Artificial
  probe
  misc_feature (1)..(25): SEQ ID NO: 2756; WAN024GIO; Start 51; Stop 75
cgtgcaaggtgtaaaagtgatgaaa

SEQ ID NO: 335828 - DNA, 25 bp, Artificial
  probe
  misc_feature (1)..(25): SEQ ID NO: 2756; WAN024GIO; Start 63; Stop 87
aaaagtgatgaaaacgataaagaaa

SEQ ID NO: 335829 - DNA, 25 bp, Artificial
  probe
  misc_feature (1)..(25): SEQ ID NO: 2756; WAN024GIO; Start 61; Stop 85
gtaaaagtgatgaaaacgataaaga

SEQ ID NO: 335830 - DNA, 25 bp, Artificial
  probe
  misc_feature (1)..(25): SEQ ID NO: 2756; WAN024GIO; Start 77; Stop 101
cgataaagaaagctgaccatgtcgt

SEQ ID NO: 335831 - DNA, 25 bp, Artificial
  probe
  misc_feature (1)..(25): SEQ ID NO: 2756; WAN024GIO; Start 76; Stop 100
acgataaagaaagctgaccatgtcg

SEQ ID NO: 335832 - DNA, 25 bp, Artificial
  probe
  misc_feature (1)..(25): SEQ ID NO: 2756; WAN024GIO; Start 82; Stop 106
aagaaagctgaccatgtcgttgttg

SEQ ID NO: 335833 - DNA, 25 bp, Artificial
  probe
  misc_feature (1)..(25): SEQ ID NO: 2756; WAN024GIO; Start 62; Stop 86
taaaagtgatgaaaacgataaagaa

SEQ ID NO: 335834 - DNA, 25 bp, Artificial
  probe
  misc_feature (1)..(25): SEQ ID NO: 2756; WAN024GIO; Start 50; Stop 74
ccgtgcaaggtgtaaaagtgatgaa

SEQ ID NO: 335835 - DNA, 25 bp, Artificial
  probe
  misc_feature (1)..(25): SEQ ID NO: 2757; WAN024GL8; Start 271; Stop 295
attagaccagttgaagaagagtgta

SEQ ID NO: 335836 - DNA, 25 bp, Artificial
  probe
  misc_feature (1)..(25): SEQ ID NO: 2757; WAN024GL8; Start 270; Stop 294
tattagaccagttgaagaagagtgt

SEQ ID NO: 335837 - DNA, 25 bp, Artificial
  probe
  misc_feature (1)..(25): SEQ ID NO: 2757; WAN024GL8; Start 269; Stop 293
ctattagaccagttgaagaagagtg

SEQ ID NO: 335838 - DNA, 25 bp, Artificial
  probe
  misc_feature (1)..(25): SEQ ID NO: 2757; WAN024GL8; Start 278; Stop 302
cagttgaagaagagtgtaccgtata

SEQ ID NO: 335839 - DNA, 25 bp, Artificial
  probe
  misc_feature (1)..(25): SEQ ID NO: 2757; WAN024GL8; Start 272; Stop 296
ttagaccagttgaagaagagtgtac

SEQ ID NO: 335840 - DNA, 25 bp, Artificial
  probe
  misc_feature (1)..(25): SEQ ID NO: 2757; WAN024GL8; Start 157; Stop 181
atagccatcatagccataatacttg

SEQ ID NO: 335841 - DNA, 25 bp, Artificial
  probe
  misc_feature (1)..(25): SEQ ID NO: 2757; WAN024GL8; Start 13; Stop 37
atagttataggtcatggcatcgtac

SEQ ID NO: 335842 - DNA, 25 bp, Artificial
  probe
  misc_feature (1)..(25): SEQ ID NO: 2757; WAN024GL8; Start 268; Stop 292
actattagaccagttgaagaagagt

SEQ ID NO: 335843 - DNA, 25 bp, Artificial
  probe
  misc_feature (1)..(25): SEQ ID NO: 2757; WAN024GL8; Start 12; Stop 36
catagttataggtcatggcatcgta

SEQ ID NO: 335844 - DNA, 25 bp, Artificial
  probe
  misc_feature (1)..(25): SEQ ID NO: 2757; WAN024GL8; Start 273; Stop 297
tagaccagttgaagaagagtgtacc

SEQ ID NO: 335845 - DNA, 25 bp, Artificial
  probe
  misc_feature (1)..(25): SEQ ID NO: 2757; WAN024GL8; Start 263; Stop 287
gcaatactattagaccagttgaaga

SEQ ID NO: 335846 - DNA, 25 bp, Artificial
  probe
  misc_feature (1)..(25): SEQ ID NO: 2757; WAN024GL8; Start 156; Stop 180
aatagccatcatagccataatactt

SEQ ID NO: 335847 - DNA, 25 bp, Artificial
  probe
  misc_feature (1)..(25): SEQ ID NO: 2757; WAN024GL8; Start 277; Stop 301
ccagttgaagaagagtgtaccgtat

SEQ ID NO: 335848 - DNA, 25 bp, Artificial
  probe
  misc_feature (1)..(25): SEQ ID NO: 2757; WAN024GL8; Start 158; Stop 182
tagccatcatagccataatacttgg

SEQ ID NO: 335849 - DNA, 25 bp, Artificial
  probe
  misc_feature (1)..(25): SEQ ID NO: 2757; WAN024GL8; Start 58; Stop 82
gtttaccttagcagcatattccttg

SEQ ID NO: 335850 - DNA, 25 bp, Artificial
  probe
  misc_feature (1)..(25): SEQ ID NO: 2757; WAN024GL8; Start 279; Stop 303
agttgaagaagagtgtaccgtatac

SEQ ID NO: 335851 - DNA, 25 bp, Artificial
  probe
  misc_feature (1)..(25): SEQ ID NO: 2757; WAN024GL8; Start 267; Stop 291
tactattagaccagttgaagaagag

SEQ ID NO: 335852 - DNA, 25 bp, Artificial
  probe
  misc_feature (1)..(25): SEQ ID NO: 2757; WAN024GL8; Start 123; Stop 147
taaccaaatctccagttgtttcttg

SEQ ID NO: 335853 - DNA, 25 bp, Artificial
  probe
  misc_feature (1)..(25): SEQ ID NO: 2757; WAN024GL8; Start 57; Stop 81
ggtttaccttagcagcatattcctt

SEQ ID NO: 335854 - DNA, 25 bp, Artificial
  probe
  misc_feature (1)..(25): SEQ ID NO: 2757; WAN024GL8; Start 54; Stop 78
gatggtttaccttagcagcatattc

SEQ ID NO: 335855 - DNA, 25 bp, Artificial
  probe
  misc_feature (1)..(25): SEQ ID NO: 2757; WAN024GL8; Start 47; Stop 71
ttgattggatggtttaccttagcag

SEQ ID NO: 335856 - DNA, 25 bp, Artificial
  probe
  misc_feature (1)..(25): SEQ ID NO: 2757; WAN024GL8; Start 46; Stop 70
cttgattggatggtttaccttagca

SEQ ID NO: 335857 - DNA, 25 bp, Artificial
  probe
  misc_feature (1)..(25): SEQ ID NO: 2757; WAN024GL8; Start 45; Stop 69
acttgattggatggtttaccttagc

SEQ ID NO: 335858 - DNA, 25 bp, Artificial
  probe
  misc_feature (1)..(25): SEQ ID NO: 2757; WAN024GL8; Start 120; Stop 144
gtttaaccaaatctccagttgtttc

SEQ ID NO: 335859 - DNA, 25 bp, Artificial
  probe
  misc_feature (1)..(25): SEQ ID NO: 2757; WAN024GL8; Start 122; Stop 146
ttaaccaaatctccagttgtttctt

SEQ ID NO: 335860 - DNA, 25 bp, Artificial
  probe
  misc_feature (1)..(25): SEQ ID NO: 2757; WAN024GL8; Start 121; Stop 145
tttaaccaaatctccagttgtttct

SEQ ID NO: 335861 - DNA, 25 bp, Artificial
  probe
  misc_feature (1)..(25): SEQ ID NO: 2757; WAN024GL8; Start 41; Stop 65
gaatacttgattggatggtttacct

SEQ ID NO: 335862 - DNA, 25 bp, Artificial
  probe
  misc_feature (1)..(25): SEQ ID NO: 2757; WAN024GL8; Start 40; Stop 64
agaatacttgattggatggtttacc

SEQ ID NO: 335863 - DNA, 25 bp, Artificial
  probe
  misc_feature (1)..(25): SEQ ID NO: 2757; WAN024GL8; Start 55; Stop 79
atggtttaccttagcagcatattcc

SEQ ID NO: 335864 - DNA, 25 bp, Artificial
  probe
  misc_feature (1)..(25): SEQ ID NO: 2757; WAN024GL8; Start 53; Stop 77
ggatggtttaccttagcagcatatt

SEQ ID NO: 335865 - DNA, 25 bp, Artificial
  probe
  misc_feature (1)..(25): SEQ ID NO: 2757; WAN024GL8; Start 327; Stop 351
catcaataacgtcaggagttggtac

SEQ ID NO: 335866 - DNA, 25 bp, Artificial
  probe
  misc_feature (1)..(25): SEQ ID NO: 2757; WAN024GL8; Start 14; Stop 38
tagttataggtcatggcatcgtacc

SEQ ID NO: 335867 - DNA, 25 bp, Artificial
  probe
  misc_feature (1)..(25): SEQ ID NO: 2757; WAN024GL8; Start 262; Stop 286
tgcaatactattagaccagttgaag

SEQ ID NO: 335868 - DNA, 25 bp, Artificial
  probe
  misc_feature (1)..(25): SEQ ID NO: 2758; WAN024F34; Start 341; Stop 365
ccttgaatgctgtagtaatcacctt

SEQ ID NO: 335869 - DNA, 25 bp, Artificial
  probe
  misc_feature (1)..(25): SEQ ID NO: 2758; WAN024F34; Start 402; Stop 426
gagacttactaccgactgttccatc

SEQ ID NO: 335870 - DNA, 25 bp, Artificial
  probe
  misc_feature (1)..(25): SEQ ID NO: 2758; WAN024F34; Start 399; Stop 423
cttgagacttactaccgactgttcc

SEQ ID NO: 335871 - DNA, 25 bp, Artificial
  probe
  misc_feature (1)..(25): SEQ ID NO: 2758; WAN024F34; Start 398; Stop 422
ccttgagacttactaccgactgttc

SEQ ID NO: 335872 - DNA, 25 bp, Artificial
  probe
  misc_feature (1)..(25): SEQ ID NO: 2758; WAN024F34; Start 397; Stop 421
tccttgagacttactaccgactgtt

SEQ ID NO: 335873 - DNA, 25 bp, Artificial
  probe
  misc_feature (1)..(25): SEQ ID NO: 2758; WAN024F34; Start 403; Stop 427
agacttactaccgactgttccatca

SEQ ID NO: 335874 - DNA, 25 bp, Artificial
  probe
  misc_feature (1)..(25): SEQ ID NO: 2758; WAN024F34; Start 401; Stop 425
tgagacttactaccgactgttccat

SEQ ID NO: 335875 - DNA, 25 bp, Artificial
  probe
  misc_feature (1)..(25): SEQ ID NO: 2758; WAN024F34; Start 439; Stop 463
ctgttctgtcttagtttctccatct

SEQ ID NO: 335876 - DNA, 25 bp, Artificial
  probe
  misc_feature (1)..(25): SEQ ID NO: 2758; WAN024F34; Start 438; Stop 462
tctgttctgtcttagtttctccatc

SEQ ID NO: 335877 - DNA, 25 bp, Artificial
  probe
  misc_feature (1)..(25): SEQ ID NO: 2758; WAN024F34; Start 437; Stop 461
gtctgttctgtcttagtttctccat

SEQ ID NO: 335878 - DNA, 25 bp, Artificial
  probe
  misc_feature (1)..(25): SEQ ID NO: 2758; WAN024F34; Start 364; Stop 388
tttattgaccacttctgctttcttc

SEQ ID NO: 335879 - DNA, 25 bp, Artificial
  probe
  misc_feature (1)..(25): SEQ ID NO: 2758; WAN024F34; Start 363; Stop 387
ctttattgaccacttctgctttctt

SEQ ID NO: 335880 - DNA, 25 bp, Artificial
  probe
  misc_feature (1)..(25): SEQ ID NO: 2758; WAN024F34; Start 440; Stop 464
tgttctgtcttagtttctccatctt

SEQ ID NO: 335881 - DNA, 25 bp, Artificial
  probe
  misc_feature (1)..(25): SEQ ID NO: 2758; WAN024F34; Start 365; Stop 389
ttattgaccacttctgctttcttct

SEQ ID NO: 335882 - DNA, 25 bp, Artificial
  probe
  misc_feature (1)..(25): SEQ ID NO: 2758; WAN024F34; Start 442; Stop 466
ttctgtcttagtttctccatcttca

SEQ ID NO: 335883 - DNA, 25 bp, Artificial
  probe
  misc_feature (1)..(25): SEQ ID NO: 2758; WAN024F34; Start 443; Stop 467
tctgtcttagtttctccatcttcat

SEQ ID NO: 335884 - DNA, 25 bp, Artificial
  probe
  misc_feature (1)..(25): SEQ ID NO: 2758; WAN024F34; Start 435; Stop 459
ctgtctgttctgtcttagtttctcc

SEQ ID NO: 335885 - DNA, 25 bp, Artificial
  probe
  misc_feature (1)..(25): SEQ ID NO: 2758; WAN024F34; Start 400; Stop 424
ttgagacttactaccgactgttcca

SEQ ID NO: 335886 - DNA, 25 bp, Artificial
  probe
  misc_feature (1)..(25): SEQ ID NO: 2758; WAN024F34; Start 304; Stop 328
atagtgtttgttggctacgatgatt

SEQ ID NO: 335887 - DNA, 25 bp, Artificial
  probe
  misc_feature (1)..(25): SEQ ID NO: 2758; WAN024F34; Start 441; Stop 465
gttctgtcttagtttctccatcttc

SEQ ID NO: 335888 - DNA, 25 bp, Artificial
  probe
  misc_feature (1)..(25): SEQ ID NO: 2758; WAN024F34; Start 366; Stop 390
tattgaccacttctgctttcttctg

SEQ ID NO: 335889 - DNA, 25 bp, Artificial
  probe
  misc_feature (1)..(25): SEQ ID NO: 2758; WAN024F34; Start 305; Stop 329
tagtgtttgttggctacgatgattt

SEQ ID NO: 335890 - DNA, 25 bp, Artificial
  probe
  misc_feature (1)..(25): SEQ ID NO: 2758; WAN024F34; Start 333; Stop 357
cgtatttcccttgaatgctgtagta

SEQ ID NO: 335891 - DNA, 25 bp, Artificial
  probe
  misc_feature (1)..(25): SEQ ID NO: 2758; WAN024F34; Start 362; Stop 386
cctttattgaccacttctgctttct

SEQ ID NO: 335892 - DNA, 25 bp, Artificial
  probe
  misc_feature (1)..(25): SEQ ID NO: 2758; WAN024F34; Start 303; Stop 327
gatagtgtttgttggctacgatgat

SEQ ID NO: 335893 - DNA, 25 bp, Artificial
  probe
  misc_feature (1)..(25): SEQ ID NO: 2758; WAN024F34; Start 436; Stop 460
tgtctgttctgtcttagtttctcca

SEQ ID NO: 335894 - DNA, 25 bp, Artificial
  probe
  misc_feature (1)..(25): SEQ ID NO: 2758; WAN024F34; Start 434; Stop 458
gctgtctgttctgtcttagtttctc

SEQ ID NO: 335895 - DNA, 25 bp, Artificial
  probe
  misc_feature (1)..(25): SEQ ID NO: 2758; WAN024F34; Start 336; Stop 360
atttcccttgaatgctgtagtaatc

SEQ ID NO: 335896 - DNA, 25 bp, Artificial
  probe
  misc_feature (1)..(25): SEQ ID NO: 2758; WAN024F34; Start 331; Stop 355
atcgtatttcccttgaatgctgtag

SEQ ID NO: 335897 - DNA, 25 bp, Artificial
  probe
  misc_feature (1)..(25): SEQ ID NO: 2758; WAN024F34; Start 361; Stop 385
acctttattgaccacttctgctttc

SEQ ID NO: 335898 - DNA, 25 bp, Artificial
  probe
  misc_feature (1)..(25): SEQ ID NO: 2758; WAN024F34; Start 404; Stop 428
gacttactaccgactgttccatcag

SEQ ID NO: 335899 - DNA, 25 bp, Artificial
  probe
  misc_feature (1)..(25): SEQ ID NO: 2758; WAN024F34; Start 444; Stop 468
ctgtcttagtttctccatcttcatt

SEQ ID NO: 335900 - DNA, 25 bp, Artificial
  probe
  misc_feature (1)..(25): SEQ ID NO: 2758; WAN024F34; Start 337; Stop 361
tttcccttgaatgctgtagtaatca

SEQ ID NO: 335901 - DNA, 25 bp, Artificial
  probe
  misc_feature (1)..(25): SEQ ID NO: 2759; WAN024CI4; Start 175; Stop 199
ctcactcaagttcgcatcctctata

SEQ ID NO: 335902 - DNA, 25 bp, Artificial
  probe
  misc_feature (1)..(25): SEQ ID NO: 2759; WAN024CI4; Start 112; Stop 136
actacacatgacacaaggttcaatg

SEQ ID NO: 335903 - DNA, 25 bp, Artificial
  probe
  misc_feature (1)..(25): SEQ ID NO: 2759; WAN024CI4; Start 111; Stop 135
cactacacatgacacaaggttcaat

SEQ ID NO: 335904 - DNA, 25 bp, Artificial
  probe
  misc_feature (1)..(25): SEQ ID NO: 2759; WAN024CI4; Start 184; Stop 208
gttcgcatcctctatagccataatt

SEQ ID NO: 335905 - DNA, 25 bp, Artificial
  probe
  misc_feature (1)..(25): SEQ ID NO: 2759; WAN024CI4; Start 183; Stop 207
agttcgcatcctctatagccataat

SEQ ID NO: 335906 - DNA, 25 bp, Artificial
  probe
  misc_feature (1)..(25): SEQ ID NO: 2759; WAN024CI4; Start 301; Stop 325
aatttcatcgtgttcaagagcaatc

SEQ ID NO: 335907 - DNA, 25 bp, Artificial
  probe
  misc_feature (1)..(25): SEQ ID NO: 2759; WAN024CI4; Start 182; Stop 206
aagttcgcatcctctatagccataa

SEQ ID NO: 335908 - DNA, 25 bp, Artificial
  probe
  misc_feature (1)..(25): SEQ ID NO: 2759; WAN024CI4; Start 113; Stop 137
ctacacatgacacaaggttcaatgg

SEQ ID NO: 335909 - DNA, 25 bp, Artificial
  probe
  misc_feature (1)..(25): SEQ ID NO: 2759; WAN024CI4; Start 300; Stop 324
gaatttcatcgtgttcaagagcaat

SEQ ID NO: 335910 - DNA, 25 bp, Artificial
  probe
  misc_feature (1)..(25): SEQ ID NO: 2759; WAN024CI4; Start 296; Stop 320
attggaatttcatcgtgttcaagag

SEQ ID NO: 335911 - DNA, 25 bp, Artificial
  probe
  misc_feature (1)..(25): SEQ ID NO: 2759; WAN024CI4; Start 295; Stop 319
aattggaatttcatcgtgttcaaga

SEQ ID NO: 335912 - DNA, 25 bp, Artificial
  probe
  misc_feature (1)..(25): SEQ ID NO: 2759; WAN024CI4; Start 176; Stop 200
tcactcaagttcgcatcctctatag

SEQ ID NO: 335913 - DNA, 25 bp, Artificial
  probe
  misc_feature (1)..(25): SEQ ID NO: 2759; WAN024CI4; Start 304; Stop 328
ttcatcgtgttcaagagcaatctca

SEQ ID NO: 335914 - DNA, 25 bp, Artificial
  probe
  misc_feature (1)..(25): SEQ ID NO: 2759; WAN024CI4; Start 274; Stop 298
atctttgacaatcacacaaccaatt

SEQ ID NO: 335915 - DNA, 25 bp, Artificial
  probe
  misc_feature (1)..(25): SEQ ID NO: 2759; WAN024CI4; Start 273; Stop 297
catctttgacaatcacacaaccaat

SEQ ID NO: 335916 - DNA, 25 bp, Artificial
  probe
  misc_feature (1)..(25): SEQ ID NO: 2759; WAN024CI4; Start 302; Stop 326
atttcatcgtgttcaagagcaatct

SEQ ID NO: 335917 - DNA, 25 bp, Artificial
  probe
  misc_feature (1)..(25): SEQ ID NO: 2759; WAN024CI4; Start 181; Stop 205
caagttcgcatcctctatagccata

SEQ ID NO: 335918 - DNA, 25 bp, Artificial
  probe
  misc_feature (1)..(25): SEQ ID NO: 2759; WAN024CI4; Start 114; Stop 138
tacacatgacacaaggttcaatggt

SEQ ID NO: 335919 - DNA, 25 bp, Artificial
  probe
  misc_feature (1)..(25): SEQ ID NO: 2759; WAN024CI4; Start 305; Stop 329
tcatcgtgttcaagagcaatctcag

SEQ ID NO: 335920 - DNA, 25 bp, Artificial
  probe
  misc_feature (1)..(25): SEQ ID NO: 2759; WAN024CI4; Start 338; Stop 362
aaagcctccctcataaagacttctt

SEQ ID NO: 335921 - DNA, 25 bp, Artificial
  probe
  misc_feature (1)..(25): SEQ ID NO: 2759; WAN024CI4; Start 336; Stop 360
tcaaagcctccctcataaagacttc

SEQ ID NO: 335922 - DNA, 25 bp, Artificial
  probe
  misc_feature (1)..(25): SEQ ID NO: 2759; WAN024CI4; Start 335; Stop 359
ctcaaagcctccctcataaagactt

SEQ ID NO: 335923 - DNA, 25 bp, Artificial
  probe
  misc_feature (1)..(25): SEQ ID NO: 2759; WAN024CI4; Start 337; Stop 361
caaagcctccctcataaagacttct

SEQ ID NO: 335924 - DNA, 25 bp, Artificial
  probe
  misc_feature (1)..(25): SEQ ID NO: 2759; WAN024CI4; Start 331; Stop 355
ctctctcaaagcctccctcataaag

SEQ ID NO: 335925 - DNA, 25 bp, Artificial
  probe
  misc_feature (1)..(25): SEQ ID NO: 2759; WAN024CI4; Start 303; Stop 327
tttcatcgtgttcaagagcaatctc

SEQ ID NO: 335926 - DNA, 25 bp, Artificial
  probe
  misc_feature (1)..(25): SEQ ID NO: 2759; WAN024CI4; Start 272; Stop 296
ccatctttgacaatcacacaaccaa

SEQ ID NO: 335927 - DNA, 25 bp, Artificial
  probe
  misc_feature (1)..(25): SEQ ID NO: 2759; WAN024CI4; Start 299; Stop 323
ggaatttcatcgtgttcaagagcaa

SEQ ID NO: 335928 - DNA, 25 bp, Artificial
  probe
  misc_feature (1)..(25): SEQ ID NO: 2759; WAN024CI4; Start 110; Stop 134
ccactacacatgacacaaggttcaa

SEQ ID NO: 335929 - DNA, 25 bp, Artificial
  probe
  misc_feature (1)..(25): SEQ ID NO: 2759; WAN024CI4; Start 185; Stop 209
ttcgcatcctctatagccataattt

SEQ ID NO: 335930 - DNA, 25 bp, Artificial
  probe
  misc_feature (1)..(25): SEQ ID NO: 2759; WAN024CI4; Start 186; Stop 210
tcgcatcctctatagccataatttc

SEQ ID NO: 335931 - DNA, 25 bp, Artificial
  probe
  misc_feature (1)..(25): SEQ ID NO: 2759; WAN024CI4; Start 297; Stop 321
ttggaatttcatcgtgttcaagagc

SEQ ID NO: 335932 - DNA, 25 bp, Artificial
  probe
  misc_feature (1)..(25): SEQ ID NO: 2759; WAN024CI4; Start 174; Stop 198
cctcactcaagttcgcatcctctat

SEQ ID NO: 335933 - DNA, 25 bp, Artificial
  probe
  misc_feature (1)..(25): SEQ ID NO: 2759; WAN024CI4; Start 333; Stop 357
ctctcaaagcctccctcataaagac

SEQ ID NO: 335934 - DNA, 25 bp, Artificial
  probe
  misc_feature (1)..(25): SEQ ID NO: 2760; WAN024G2L; Start 331; Stop 355
tactgtaccttgttcaaccttatcg

SEQ ID NO: 335935 - DNA, 25 bp, Artificial
  probe
  misc_feature (1)..(25): SEQ ID NO: 2760; WAN024G2L; Start 327; Stop 351
actatactgtaccttgttcaacctt

SEQ ID NO: 335936 - DNA, 25 bp, Artificial
  probe
  misc_feature (1)..(25): SEQ ID NO: 2760; WAN024G2L; Start 326; Stop 350
tactatactgtaccttgttcaacct

SEQ ID NO: 335937 - DNA, 25 bp, Artificial
  probe
  misc_feature (1)..(25): SEQ ID NO: 2760; WAN024G2L; Start 397; Stop 421
tatgcgaatctgacacacgatagtt

SEQ ID NO: 335938 - DNA, 25 bp, Artificial
  probe
  misc_feature (1)..(25): SEQ ID NO: 2760; WAN024G2L; Start 330; Stop 354
atactgtaccttgttcaaccttatc

SEQ ID NO: 335939 - DNA, 25 bp, Artificial
  probe
  misc_feature (1)..(25): SEQ ID NO: 2760; WAN024G2L; Start 325; Stop 349
ttactatactgtaccttgttcaacc

SEQ ID NO: 335940 - DNA, 25 bp, Artificial
  probe
  misc_feature (1)..(25): SEQ ID NO: 2760; WAN024G2L; Start 262; Stop 286
atgatgttcttgactgctggtagtt

SEQ ID NO: 335941 - DNA, 25 bp, Artificial
  probe
  misc_feature (1)..(25): SEQ ID NO: 2760; WAN024G2L; Start 334; Stop 358
tgtaccttgttcaaccttatcggag

SEQ ID NO: 335942 - DNA, 25 bp, Artificial
  probe
  misc_feature (1)..(25): SEQ ID NO: 2760; WAN024G2L; Start 333; Stop 357
ctgtaccttgttcaaccttatcgga

SEQ ID NO: 335943 - DNA, 25 bp, Artificial
  probe
  misc_feature (1)..(25): SEQ ID NO: 2760; WAN024G2L; Start 328; Stop 352
ctatactgtaccttgttcaacctta

SEQ ID NO: 335944 - DNA, 25 bp, Artificial
  probe
  misc_feature (1)..(25): SEQ ID NO: 2760; WAN024G2L; Start 332; Stop 356
actgtaccttgttcaaccttatcgg

SEQ ID NO: 335945 - DNA, 25 bp, Artificial
  probe
  misc_feature (1)..(25): SEQ ID NO: 2760; WAN024G2L; Start 396; Stop 420
ctatgcgaatctgacacacgatagt

SEQ ID NO: 335946 - DNA, 25 bp, Artificial
  probe
  misc_feature (1)..(25): SEQ ID NO: 2760; WAN024G2L; Start 586; Stop 610
gtattcttaacaaacgagcacattg

SEQ ID NO: 335947 - DNA, 25 bp, Artificial
  probe
  misc_feature (1)..(25): SEQ ID NO: 2760; WAN024G2L; Start 403; Stop 427
aatctgacacacgatagtttcatct

SEQ ID NO: 335948 - DNA, 25 bp, Artificial
  probe
  misc_feature (1)..(25): SEQ ID NO: 2760; WAN024G2L; Start 402; Stop 426
gaatctgacacacgatagtttcatc

SEQ ID NO: 335949 - DNA, 25 bp, Artificial
  probe
  misc_feature (1)..(25): SEQ ID NO: 2760; WAN024G2L; Start 749; Stop 773
gtcttccatatgccttcctcaataa

SEQ ID NO: 335950 - DNA, 25 bp, Artificial
  probe
  misc_feature (1)..(25): SEQ ID NO: 2760; WAN024G2L; Start 404; Stop 428
atctgacacacgatagtttcatctc

SEQ ID NO: 335951 - DNA, 25 bp, Artificial
  probe
  misc_feature (1)..(25): SEQ ID NO: 2760; WAN024G2L; Start 329; Stop 353
tatactgtaccttgttcaaccttat

SEQ ID NO: 335952 - DNA, 25 bp, Artificial
  probe
  misc_feature (1)..(25): SEQ ID NO: 2760; WAN024G2L; Start 585; Stop 609
tgtattcttaacaaacgagcacatt

SEQ ID NO: 335953 - DNA, 25 bp, Artificial
  probe
  misc_feature (1)..(25): SEQ ID NO: 2760; WAN024G2L; Start 401; Stop 425
cgaatctgacacacgatagtttcat

SEQ ID NO: 335954 - DNA, 25 bp, Artificial
  probe
  misc_feature (1)..(25): SEQ ID NO: 2760; WAN024G2L; Start 405; Stop 429
tctgacacacgatagtttcatctca

SEQ ID NO: 335955 - DNA, 25 bp, Artificial
  probe
  misc_feature (1)..(25): SEQ ID NO: 2760; WAN024G2L; Start 261; Stop 285
catgatgttcttgactgctggtagt

SEQ ID NO: 335956 - DNA, 25 bp, Artificial
  probe
  misc_feature (1)..(25): SEQ ID NO: 2760; WAN024G2L; Start 670; Stop 694
aacttcggtgttggaaatatgcttc

SEQ ID NO: 335957 - DNA, 25 bp, Artificial
  probe
  misc_feature (1)..(25): SEQ ID NO: 2760; WAN024G2L; Start 395; Stop 419
cctatgcgaatctgacacacgatag

SEQ ID NO: 335958 - DNA, 25 bp, Artificial
  probe
  misc_feature (1)..(25): SEQ ID NO: 2760; WAN024G2L; Start 748; Stop 772
ggtcttccatatgccttcctcaata

SEQ ID NO: 335959 - DNA, 25 bp, Artificial
  probe
  misc_feature (1)..(25): SEQ ID NO: 2760; WAN024G2L; Start 260; Stop 284
acatgatgttcttgactgctggtag

SEQ ID NO: 335960 - DNA, 25 bp, Artificial
  probe
  misc_feature (1)..(25): SEQ ID NO: 2760; WAN024G2L; Start 335; Stop 359
gtaccttgttcaaccttatcggagc

SEQ ID NO: 335961 - DNA, 25 bp, Artificial
  probe
  misc_feature (1)..(25): SEQ ID NO: 2760; WAN024G2L; Start 712; Stop 736
ttcatcggaaactttatcggaggag

SEQ ID NO: 335962 - DNA, 25 bp, Artificial
  probe
  misc_feature (1)..(25): SEQ ID NO: 2760; WAN024G2L; Start 407; Stop 431
tgacacacgatagtttcatctcagg

SEQ ID NO: 335963 - DNA, 25 bp, Artificial
  probe
  misc_feature (1)..(25): SEQ ID NO: 2760; WAN024G2L; Start 263; Stop 287
tgatgttcttgactgctggtagttt

SEQ ID NO: 335964 - DNA, 25 bp, Artificial
  probe
  misc_feature (1)..(25): SEQ ID NO: 2760; WAN024G2L; Start 77; Stop 101
ttaagtatgcgattcgttcgatgtt

SEQ ID NO: 335965 - DNA, 25 bp, Artificial
  probe
  misc_feature (1)..(25): SEQ ID NO: 2760; WAN024G2L; Start 398; Stop 422
atgcgaatctgacacacgatagttt

SEQ ID NO: 335966 - DNA, 25 bp, Artificial
  probe
  misc_feature (1)..(25): SEQ ID NO: 2760; WAN024G2L; Start 339; Stop 363
cttgttcaaccttatcggagccttg

SEQ ID NO: 335967 - DNA, 25 bp, Artificial
  probe
  misc_feature (1)..(25): SEQ ID NO: 2761; WAN024DFB; Start 184; Stop 208
gaagtgagtgacattggacaattat

SEQ ID NO: 335968 - DNA, 25 bp, Artificial
  probe
  misc_feature (1)..(25): SEQ ID NO: 2761; WAN024DFB; Start 185; Stop 209
aagtgagtgacattggacaattatg

SEQ ID NO: 335969 - DNA, 25 bp, Artificial
  probe
  misc_feature (1)..(25): SEQ ID NO: 2761; WAN024DFB; Start 77; Stop 101
ttactcctcaagaacaatctaccgt

SEQ ID NO: 335970 - DNA, 25 bp, Artificial
  probe
  misc_feature (1)..(25): SEQ ID NO: 2761; WAN024DFB; Start 183; Stop 207
cgaagtgagtgacattggacaatta

SEQ ID NO: 335971 - DNA, 25 bp, Artificial
  probe
  misc_feature (1)..(25): SEQ ID NO: 2761; WAN024DFB; Start 78; Stop 102
tactcctcaagaacaatctaccgtg

SEQ ID NO: 335972 - DNA, 25 bp, Artificial
  probe
  misc_feature (1)..(25): SEQ ID NO: 2761; WAN024DFB; Start 338; Stop 362
gaatcgagtgtacgcaattaatctt

SEQ ID NO: 335973 - DNA, 25 bp, Artificial
  probe
  misc_feature (1)..(25): SEQ ID NO: 2761; WAN024DFB; Start 344; Stop 368
agtgtacgcaattaatcttggactt

SEQ ID NO: 335974 - DNA, 25 bp, Artificial
  probe
  misc_feature (1)..(25): SEQ ID NO: 2761; WAN024DFB; Start 339; Stop 363
aatcgagtgtacgcaattaatcttg

SEQ ID NO: 335975 - DNA, 25 bp, Artificial
  probe
  misc_feature (1)..(25): SEQ ID NO: 2761; WAN024DFB; Start 343; Stop 367
gagtgtacgcaattaatcttggact

SEQ ID NO: 335976 - DNA, 25 bp, Artificial
  probe
  misc_feature (1)..(25): SEQ ID NO: 2761; WAN024DFB; Start 337; Stop 361
ggaatcgagtgtacgcaattaatct

SEQ ID NO: 335977 - DNA, 25 bp, Artificial
  probe
  misc_feature (1)..(25): SEQ ID NO: 2761; WAN024DFB; Start 390; Stop 414
ctttgagattgatgatttgtggacc

SEQ ID NO: 335978 - DNA, 25 bp, Artificial
  probe
  misc_feature (1)..(25): SEQ ID NO: 2761; WAN024DFB; Start 336; Stop 360
tggaatcgagtgtacgcaattaatc

SEQ ID NO: 335979 - DNA, 25 bp, Artificial
  probe
  misc_feature (1)..(25): SEQ ID NO: 2761; WAN024DFB; Start 335; Stop 359
ttggaatcgagtgtacgcaattaat

SEQ ID NO: 335980 - DNA, 25 bp, Artificial
  probe
  misc_feature (1)..(25): SEQ ID NO: 2761; WAN024DFB; Start 76; Stop 100
tttactcctcaagaacaatctaccg

SEQ ID NO: 335981 - DNA, 25 bp, Artificial
  probe
  misc_feature (1)..(25): SEQ ID NO: 2761; WAN024DFB; Start 73; Stop 97
tgctttactcctcaagaacaatcta

SEQ ID NO: 335982 - DNA, 25 bp, Artificial
  probe
  misc_feature (1)..(25): SEQ ID NO: 2761; WAN024DFB; Start 389; Stop 413
tctttgagattgatgatttgtggac

SEQ ID NO: 335983 - DNA, 25 bp, Artificial
  probe
  misc_feature (1)..(25): SEQ ID NO: 2761; WAN024DFB; Start 388; Stop 412
gtctttgagattgatgatttgtgga

SEQ ID NO: 335984 - DNA, 25 bp, Artificial
  probe
  misc_feature (1)..(25): SEQ ID NO: 2761; WAN024DFB; Start 74; Stop 98
gctttactcctcaagaacaatctac

SEQ ID NO: 335985 - DNA, 25 bp, Artificial
  probe
  misc_feature (1)..(25): SEQ ID NO: 2761; WAN024DFB; Start 387; Stop 411
cgtctttgagattgatgatttgtgg

SEQ ID NO: 335986 - DNA, 25 bp, Artificial
  probe
  misc_feature (1)..(25): SEQ ID NO: 2761; WAN024DFB; Start 71; Stop 95
tttgctttactcctcaagaacaatc

SEQ ID NO: 335987 - DNA, 25 bp, Artificial
  probe
  misc_feature (1)..(25): SEQ ID NO: 2761; WAN024DFB; Start 72; Stop 96
ttgctttactcctcaagaacaatct

SEQ ID NO: 335988 - DNA, 25 bp, Artificial
  probe
  misc_feature (1)..(25): SEQ ID NO: 2761; WAN024DFB; Start 340; Stop 364
atcgagtgtacgcaattaatcttgg

SEQ ID NO: 335989 - DNA, 25 bp, Artificial
  probe
  misc_feature (1)..(25): SEQ ID NO: 2761; WAN024DFB; Start 391; Stop 415
tttgagattgatgatttgtggacca

SEQ ID NO: 335990 - DNA, 25 bp, Artificial
  probe
  misc_feature (1)..(25): SEQ ID NO: 2761; WAN024DFB; Start 75; Stop 99
ctttactcctcaagaacaatctacc

SEQ ID NO: 335991 - DNA, 25 bp, Artificial
  probe
  misc_feature (1)..(25): SEQ ID NO: 2761; WAN024DFB; Start 334; Stop 358
cttggaatcgagtgtacgcaattaa

SEQ ID NO: 335992 - DNA, 25 bp, Artificial
  probe
  misc_feature (1)..(25): SEQ ID NO: 2761; WAN024DFB; Start 386; Stop 410
gcgtctttgagattgatgatttgtg

SEQ ID NO: 335993 - DNA, 25 bp, Artificial
  probe
  misc_feature (1)..(25): SEQ ID NO: 2761; WAN024DFB; Start 392; Stop 416
ttgagattgatgatttgtggaccaa

SEQ ID NO: 335994 - DNA, 25 bp, Artificial
  probe
  misc_feature (1)..(25): SEQ ID NO: 2761; WAN024DFB; Start 342; Stop 366
cgagtgtacgcaattaatcttggac

SEQ ID NO: 335995 - DNA, 25 bp, Artificial
  probe
  misc_feature (1)..(25): SEQ ID NO: 2761; WAN024DFB; Start 325; Stop 349
cttgtgagtcttggaatcgagtgta

SEQ ID NO: 335996 - DNA, 25 bp, Artificial
  probe
  misc_feature (1)..(25): SEQ ID NO: 2761; WAN024DFB; Start 109; Stop 133
ggaactccaggtattcagcatcttg

SEQ ID NO: 335997 - DNA, 25 bp, Artificial
  probe
  misc_feature (1)..(25): SEQ ID NO: 2761; WAN024DFB; Start 326; Stop 350
ttgtgagtcttggaatcgagtgtac

SEQ ID NO: 335998 - DNA, 25 bp, Artificial
  probe
  misc_feature (1)..(25): SEQ ID NO: 2761; WAN024DFB; Start 191; Stop 215
gtgacattggacaattatgttggat

SEQ ID NO: 335999 - DNA, 25 bp, Artificial
  probe
  misc_feature (1)..(25): SEQ ID NO: 2761; WAN024DFB; Start 188; Stop 212
tgagtgacattggacaattatgttg

SEQ ID NO: 336000 - DNA, 25 bp, Artificial
  probe
  misc_feature (1)..(25): SEQ ID NO: 2762; WAN024CH3; Start 81; Stop 105
aataggtcaacttagcagcatctgg

SEQ ID NO: 336001 - DNA, 25 bp, Artificial
  probe
  misc_feature (1)..(25): SEQ ID NO: 2762; WAN024CH3; Start 125; Stop 149
acaccacattcttcattaagagatt

SEQ ID NO: 336002 - DNA, 25 bp, Artificial
  probe
  misc_feature (1)..(25): SEQ ID NO: 2762; WAN024CH3; Start 124; Stop 148
aacaccacattcttcattaagagat

SEQ ID NO: 336003 - DNA, 25 bp, Artificial
  probe
  misc_feature (1)..(25): SEQ ID NO: 2762; WAN024CH3; Start 80; Stop 104
aaataggtcaacttagcagcatctg

SEQ ID NO: 336004 - DNA, 25 bp, Artificial
  probe
  misc_feature (1)..(25): SEQ ID NO: 2762; WAN024CH3; Start 83; Stop 107
taggtcaacttagcagcatctggat

SEQ ID NO: 336005 - DNA, 25 bp, Artificial
  probe
  misc_feature (1)..(25): SEQ ID NO: 2762; WAN024CH3; Start 82; Stop 106
ataggtcaacttagcagcatctgga

SEQ ID NO: 336006 - DNA, 25 bp, Artificial
  probe
  misc_feature (1)..(25): SEQ ID NO: 2762; WAN024CH3; Start 193; Stop 217
catcaagagctagatttacatgact

SEQ ID NO: 336007 - DNA, 25 bp, Artificial
  probe
  misc_feature (1)..(25): SEQ ID NO: 2762; WAN024CH3; Start 79; Stop 103
aaaataggtcaacttagcagcatct

SEQ ID NO: 336008 - DNA, 25 bp, Artificial
  probe
  misc_feature (1)..(25): SEQ ID NO: 2762; WAN024CH3; Start 78; Stop 102
caaaataggtcaacttagcagcatc

SEQ ID NO: 336009 - DNA, 25 bp, Artificial
  probe
  misc_feature (1)..(25): SEQ ID NO: 2762; WAN024CH3; Start 86; Stop 110
gtcaacttagcagcatctggatgtc

SEQ ID NO: 336010 - DNA, 25 bp, Artificial
  probe
  misc_feature (1)..(25): SEQ ID NO: 2762; WAN024CH3; Start 195; Stop 219
tcaagagctagatttacatgacttt

SEQ ID NO: 336011 - DNA, 25 bp, Artificial
  probe
  misc_feature (1)..(25): SEQ ID NO: 2762; WAN024CH3; Start 114; Stop 138
aaataccgaaaacaccacattcttc

SEQ ID NO: 336012 - DNA, 25 bp, Artificial
  probe
  misc_feature (1)..(25): SEQ ID NO: 2762; WAN024CH3; Start 182; Stop 206
tcatttgtaatcatcaagagctaga

SEQ ID NO: 336013 - DNA, 25 bp, Artificial
  probe
  misc_feature (1)..(25): SEQ ID NO: 2762; WAN024CH3; Start 123; Stop 147
aaacaccacattcttcattaagaga

SEQ ID NO: 336014 - DNA, 25 bp, Artificial
  probe
  misc_feature (1)..(25): SEQ ID NO: 2762; WAN024CH3; Start 119; Stop 143
ccgaaaacaccacattcttcattaa

SEQ ID NO: 336015 - DNA, 25 bp, Artificial
  probe
  misc_feature (1)..(25): SEQ ID NO: 2762; WAN024CH3; Start 113; Stop 137
caaataccgaaaacaccacattctt

SEQ ID NO: 336016 - DNA, 25 bp, Artificial
  probe
  misc_feature (1)..(25): SEQ ID NO: 2762; WAN024CH3; Start 194; Stop 218
atcaagagctagatttacatgactt

SEQ ID NO: 336017 - DNA, 25 bp, Artificial
  probe
  misc_feature (1)..(25): SEQ ID NO: 2762; WAN024CH3; Start 120; Stop 144
cgaaaacaccacattcttcattaag

SEQ ID NO: 336018 - DNA, 25 bp, Artificial
  probe
  misc_feature (1)..(25): SEQ ID NO: 2762; WAN024CH3; Start 116; Stop 140
ataccgaaaacaccacattcttcat

SEQ ID NO: 336019 - DNA, 25 bp, Artificial
  probe
  misc_feature (1)..(25): SEQ ID NO: 2762; WAN024CH3; Start 118; Stop 142
accgaaaacaccacattcttcatta

SEQ ID NO: 336020 - DNA, 25 bp, Artificial
  probe
  misc_feature (1)..(25): SEQ ID NO: 2762; WAN024CH3; Start 117; Stop 141
taccgaaaacaccacattcttcatt

SEQ ID NO: 336021 - DNA, 25 bp, Artificial
  probe
  misc_feature (1)..(25): SEQ ID NO: 2762; WAN024CH3; Start 115; Stop 139
aataccgaaaacaccacattcttca

SEQ ID NO: 336022 - DNA, 25 bp, Artificial
  probe
  misc_feature (1)..(25): SEQ ID NO: 2762; WAN024CH3; Start 77; Stop 101
ccaaaataggtcaacttagcagcat

SEQ ID NO: 336023 - DNA, 25 bp, Artificial
  probe
  misc_feature (1)..(25): SEQ ID NO: 2762; WAN024CH3; Start 74; Stop 98
agtccaaaataggtcaacttagcag

SEQ ID NO: 336024 - DNA, 25 bp, Artificial
  probe
  misc_feature (1)..(25): SEQ ID NO: 2762; WAN024CH3; Start 73; Stop 97
gagtccaaaataggtcaacttagca

SEQ ID NO: 336025 - DNA, 25 bp, Artificial
  probe
  misc_feature (1)..(25): SEQ ID NO: 2762; WAN024CH3; Start 7; Stop 31
cttcagttgtccttgatcattggag

SEQ ID NO: 336026 - DNA, 25 bp, Artificial
  probe
  misc_feature (1)..(25): SEQ ID NO: 2762; WAN024CH3; Start 181; Stop 205
ttcatttgtaatcatcaagagctag

SEQ ID NO: 336027 - DNA, 25 bp, Artificial
  probe
  misc_feature (1)..(25): SEQ ID NO: 2762; WAN024CH3; Start 75; Stop 99
gtccaaaataggtcaacttagcagc

SEQ ID NO: 336028 - DNA, 25 bp, Artificial
  probe
  misc_feature (1)..(25): SEQ ID NO: 2762; WAN024CH3; Start 72; Stop 96
ggagtccaaaataggtcaacttagc

SEQ ID NO: 336029 - DNA, 25 bp, Artificial
  probe
  misc_feature (1)..(25): SEQ ID NO: 2762; WAN024CH3; Start 126; Stop 150
caccacattcttcattaagagattt

SEQ ID NO: 336030 - DNA, 25 bp, Artificial
  probe
  misc_feature (1)..(25): SEQ ID NO: 2762; WAN024CH3; Start 112; Stop 136
ccaaataccgaaaacaccacattct

SEQ ID NO: 336031 - DNA, 25 bp, Artificial
  probe
  misc_feature (1)..(25): SEQ ID NO: 2762; WAN024CH3; Start 8; Stop 32
ttcagttgtccttgatcattggaga

SEQ ID NO: 336032 - DNA, 25 bp, Artificial
  probe
  misc_feature (1)..(25): SEQ ID NO: 2762; WAN024CH3; Start 183; Stop 207
catttgtaatcatcaagagctagat

SEQ ID NO: 336033 - DNA, 25 bp, Artificial
  probe
  misc_feature (1)..(25): SEQ ID NO: 2763; WAN024F83; Start 211; Stop 235
cgaatagatcatatccaacacgctt

SEQ ID NO: 336034 - DNA, 25 bp, Artificial
  probe
  misc_feature (1)..(25): SEQ ID NO: 2763; WAN024F83; Start 209; Stop 233
aacgaatagatcatatccaacacgc

SEQ ID NO: 336035 - DNA, 25 bp, Artificial
  probe
  misc_feature (1)..(25): SEQ ID NO: 2763; WAN024F83; Start 212; Stop 236
gaatagatcatatccaacacgctta

SEQ ID NO: 336036 - DNA, 25 bp, Artificial
  probe
  misc_feature (1)..(25): SEQ ID NO: 2763; WAN024F83; Start 213; Stop 237
aatagatcatatccaacacgcttat

SEQ ID NO: 336037 - DNA, 25 bp, Artificial
  probe
  misc_feature (1)..(25): SEQ ID NO: 2763; WAN024F83; Start 210; Stop 234
acgaatagatcatatccaacacgct

SEQ ID NO: 336038 - DNA, 25 bp, Artificial
  probe
  misc_feature (1)..(25): SEQ ID NO: 2763; WAN024F83; Start 214; Stop 238
atagatcatatccaacacgcttata

SEQ ID NO: 336039 - DNA, 25 bp, Artificial
  probe
  misc_feature (1)..(25): SEQ ID NO: 2763; WAN024F83; Start 215; Stop 239
tagatcatatccaacacgcttataa

SEQ ID NO: 336040 - DNA, 25 bp, Artificial
  probe
  misc_feature (1)..(25): SEQ ID NO: 2763; WAN024F83; Start 208; Stop 232
aaacgaatagatcatatccaacacg

SEQ ID NO: 336041 - DNA, 25 bp, Artificial
  probe
  misc_feature (1)..(25): SEQ ID NO: 2763; WAN024F83; Start 164; Stop 188
caacccttcaacgacaagaattagt

SEQ ID NO: 336042 - DNA, 25 bp, Artificial
  probe
  misc_feature (1)..(25): SEQ ID NO: 2763; WAN024F83; Start 165; Stop 189
aacccttcaacgacaagaattagtc

SEQ ID NO: 336043 - DNA, 25 bp, Artificial
  probe
  misc_feature (1)..(25): SEQ ID NO: 2763; WAN024F83; Start 166; Stop 190
acccttcaacgacaagaattagtct

SEQ ID NO: 336044 - DNA, 25 bp, Artificial
  probe
  misc_feature (1)..(25): SEQ ID NO: 2763; WAN024F83; Start 163; Stop 187
gcaacccttcaacgacaagaattag

SEQ ID NO: 336045 - DNA, 25 bp, Artificial
  probe
  misc_feature (1)..(25): SEQ ID NO: 2763; WAN024F83; Start 162; Stop 186
agcaacccttcaacgacaagaatta

SEQ ID NO: 336046 - DNA, 25 bp, Artificial
  probe
  misc_feature (1)..(25): SEQ ID NO: 2763; WAN024F83; Start 168; Stop 192
ccttcaacgacaagaattagtcttt

SEQ ID NO: 336047 - DNA, 25 bp, Artificial
  probe
  misc_feature (1)..(25): SEQ ID NO: 2763; WAN024F83; Start 177; Stop 201
acaagaattagtctttattcctgcg

SEQ ID NO: 336048 - DNA, 25 bp, Artificial
  probe
  misc_feature (1)..(25): SEQ ID NO: 2763; WAN024F83; Start 167; Stop 191
cccttcaacgacaagaattagtctt

SEQ ID NO: 336049 - DNA, 25 bp, Artificial
  probe
  misc_feature (1)..(25): SEQ ID NO: 2763; WAN024F83; Start 151; Stop 175
aaagagattggagcaacccttcaac

SEQ ID NO: 336050 - DNA, 25 bp, Artificial
  probe
  misc_feature (1)..(25): SEQ ID NO: 2763; WAN024F83; Start 217; Stop 241
gatcatatccaacacgcttataagt

SEQ ID NO: 336051 - DNA, 25 bp, Artificial
  probe
  misc_feature (1)..(25): SEQ ID NO: 2763; WAN024F83; Start 176; Stop 200
gacaagaattagtctttattcctgc

SEQ ID NO: 336052 - DNA, 25 bp, Artificial
  probe
  misc_feature (1)..(25): SEQ ID NO: 2763; WAN024F83; Start 174; Stop 198
acgacaagaattagtctttattcct

SEQ ID NO: 336053 - DNA, 25 bp, Artificial
  probe
  misc_feature (1)..(25): SEQ ID NO: 2763; WAN024F83; Start 216; Stop 240
agatcatatccaacacgcttataag

SEQ ID NO: 336054 - DNA, 25 bp, Artificial
  probe
  misc_feature (1)..(25): SEQ ID NO: 2763; WAN024F83; Start 175; Stop 199
cgacaagaattagtctttattcctg

SEQ ID NO: 336055 - DNA, 25 bp, Artificial
  probe
  misc_feature (1)..(25): SEQ ID NO: 2763; WAN024F83; Start 148; Stop 172
ctaaaagagattggagcaacccttc

SEQ ID NO: 336056 - DNA, 25 bp, Artificial
  probe
  misc_feature (1)..(25): SEQ ID NO: 2763; WAN024F83; Start 147; Stop 171
tctaaaagagattggagcaaccctt

SEQ ID NO: 336057 - DNA, 25 bp, Artificial
  probe
  misc_feature (1)..(25): SEQ ID NO: 2763; WAN024F83; Start 161; Stop 185
gagcaacccttcaacgacaagaatt

SEQ ID NO: 336058 - DNA, 25 bp, Artificial
  probe
  misc_feature (1)..(25): SEQ ID NO: 2763; WAN024F83; Start 173; Stop 197
aacgacaagaattagtctttattcc

SEQ ID NO: 336059 - DNA, 25 bp, Artificial
  probe
  misc_feature (1)..(25): SEQ ID NO: 2763; WAN024F83; Start 169; Stop 193
cttcaacgacaagaattagtcttta

SEQ ID NO: 336060 - DNA, 25 bp, Artificial
  probe
  misc_feature (1)..(25): SEQ ID NO: 2763; WAN024F83; Start 149; Stop 173
taaaagagattggagcaacccttca

SEQ ID NO: 336061 - DNA, 25 bp, Artificial
  probe
  misc_feature (1)..(25): SEQ ID NO: 2763; WAN024F83; Start 218; Stop 242
atcatatccaacacgcttataagtg

SEQ ID NO: 336062 - DNA, 25 bp, Artificial
  probe
  misc_feature (1)..(25): SEQ ID NO: 2763; WAN024F83; Start 219; Stop 243
tcatatccaacacgcttataagtgc

SEQ ID NO: 336063 - DNA, 25 bp, Artificial
  probe
  misc_feature (1)..(25): SEQ ID NO: 2763; WAN024F83; Start 207; Stop 231
aaaacgaatagatcatatccaacac

SEQ ID NO: 336064 - DNA, 25 bp, Artificial
  probe
  misc_feature (1)..(25): SEQ ID NO: 2763; WAN024F83; Start 171; Stop 195
tcaacgacaagaattagtctttatt

SEQ ID NO: 336065 - DNA, 25 bp, Artificial
  probe
  misc_feature (1)..(25): SEQ ID NO: 2763; WAN024F83; Start 170; Stop 194
ttcaacgacaagaattagtctttat

SEQ ID NO: 336066 - DNA, 25 bp, Artificial
  probe
  misc_feature (1)..(25): SEQ ID NO: 2764; WAN0249VO; Start 2; Stop 26
tgtaaaagactagaaaataggtggg

SEQ ID NO: 336067 - DNA, 25 bp, Artificial
  probe
  misc_feature (1)..(25): SEQ ID NO: 2764; WAN0249VO; Start 39; Stop 63
aaagctctagcccaatcttgtaaaa

SEQ ID NO: 336068 - DNA, 25 bp, Artificial
  probe
  misc_feature (1)..(25): SEQ ID NO: 2764; WAN0249VO; Start 38; Stop 62
aaaagctctagcccaatcttgtaaa

SEQ ID NO: 336069 - DNA, 25 bp, Artificial
  probe
  misc_feature (1)..(25): SEQ ID NO: 2764; WAN0249VO; Start 40; Stop 64
aagctctagcccaatcttgtaaaag

SEQ ID NO: 336070 - DNA, 25 bp, Artificial
  probe
  misc_feature (1)..(25): SEQ ID NO: 2764; WAN0249VO; Start 37; Stop 61
gaaaagctctagcccaatcttgtaa

SEQ ID NO: 336071 - DNA, 25 bp, Artificial
  probe
  misc_feature (1)..(25): SEQ ID NO: 2764; WAN0249VO; Start 53; Stop 77
atcttgtaaaagaagggagaaggag

SEQ ID NO: 336072 - DNA, 25 bp, Artificial
  probe
  misc_feature (1)..(25): SEQ ID NO: 2764; WAN0249VO; Start 36; Stop 60
tgaaaagctctagcccaatcttgta

SEQ ID NO: 336073 - DNA, 25 bp, Artificial
  probe
  misc_feature (1)..(25): SEQ ID NO: 2764; WAN0249VO; Start 52; Stop 76
aatcttgtaaaagaagggagaagga

SEQ ID NO: 336074 - DNA, 25 bp, Artificial
  probe
  misc_feature (1)..(25): SEQ ID NO: 2764; WAN0249VO; Start 51; Stop 75
caatcttgtaaaagaagggagaagg

SEQ ID NO: 336075 - DNA, 25 bp, Artificial
  probe
  misc_feature (1)..(25): SEQ ID NO: 2764; WAN0249VO; Start 50; Stop 74
ccaatcttgtaaaagaagggagaag

SEQ ID NO: 336076 - DNA, 25 bp, Artificial
  probe
  misc_feature (1)..(25): SEQ ID NO: 2764; WAN0249VO; Start 44; Stop 68
tctagcccaatcttgtaaaagaagg

SEQ ID NO: 336077 - DNA, 25 bp, Artificial
  probe
  misc_feature (1)..(25): SEQ ID NO: 2764; WAN0249VO; Start 43; Stop 67
ctctagcccaatcttgtaaaagaag

SEQ ID NO: 336078 - DNA, 25 bp, Artificial
  probe
  misc_feature (1)..(25): SEQ ID NO: 2764; WAN0249VO; Start 54; Stop 78
tcttgtaaaagaagggagaaggaga

SEQ ID NO: 336079 - DNA, 25 bp, Artificial
  probe
  misc_feature (1)..(25): SEQ ID NO: 2764; WAN0249VO; Start 42; Stop 66
gctctagcccaatcttgtaaaagaa

SEQ ID NO: 336080 - DNA, 25 bp, Artificial
  probe
  misc_feature (1)..(25): SEQ ID NO: 2764; WAN0249VO; Start 49; Stop 73
cccaatcttgtaaaagaagggagaa

SEQ ID NO: 336081 - DNA, 25 bp, Artificial
  probe
  misc_feature (1)..(25): SEQ ID NO: 2764; WAN0249VO; Start 1; Stop 25
atgtaaaagactagaaaataggtgg

SEQ ID NO: 336082 - DNA, 25 bp, Artificial
  probe
  misc_feature (1)..(25): SEQ ID NO: 2764; WAN0249VO; Start 45; Stop 69
ctagcccaatcttgtaaaagaaggg

SEQ ID NO: 336083 - DNA, 25 bp, Artificial
  probe
  misc_feature (1)..(25): SEQ ID NO: 2764; WAN0249VO; Start 46; Stop 70
tagcccaatcttgtaaaagaaggga

SEQ ID NO: 336084 - DNA, 25 bp, Artificial
  probe
  misc_feature (1)..(25): SEQ ID NO: 2764; WAN0249VO; Start 35; Stop 59
ctgaaaagctctagcccaatcttgt

SEQ ID NO: 336085 - DNA, 25 bp, Artificial
  probe
  misc_feature (1)..(25): SEQ ID NO: 2764; WAN0249VO; Start 41; Stop 65
agctctagcccaatcttgtaaaaga

SEQ ID NO: 336086 - DNA, 25 bp, Artificial
  probe
  misc_feature (1)..(25): SEQ ID NO: 2764; WAN0249VO; Start 48; Stop 72
gcccaatcttgtaaaagaagggaga

SEQ ID NO: 336087 - DNA, 25 bp, Artificial
  probe
  misc_feature (1)..(25): SEQ ID NO: 2764; WAN0249VO; Start 47; Stop 71
agcccaatcttgtaaaagaagggag

SEQ ID NO: 336088 - DNA, 25 bp, Artificial
  probe
  misc_feature (1)..(25): SEQ ID NO: 2764; WAN0249VO; Start 34; Stop 58
gctgaaaagctctagcccaatcttg

SEQ ID NO: 336089 - DNA, 25 bp, Artificial
  probe
  misc_feature (1)..(25): SEQ ID NO: 2764; WAN0249VO; Start 33; Stop 57
agctgaaaagctctagcccaatctt

SEQ ID NO: 336090 - DNA, 25 bp, Artificial
  probe
  misc_feature (1)..(25): SEQ ID NO: 2765; WAN024D32; Start 226; Stop 250
tatcgtattgaaggagatgctgatt

SEQ ID NO: 336091 - DNA, 25 bp, Artificial
  probe
  misc_feature (1)..(25): SEQ ID NO: 2765; WAN024D32; Start 225; Stop 249
ttatcgtattgaaggagatgctgat

SEQ ID NO: 336092 - DNA, 25 bp, Artificial
  probe
  misc_feature (1)..(25): SEQ ID NO: 2765; WAN024D32; Start 229; Stop 253
cgtattgaaggagatgctgattcta

SEQ ID NO: 336093 - DNA, 25 bp, Artificial
  probe
  misc_feature (1)..(25): SEQ ID NO: 2765; WAN024D32; Start 232; Stop 256
attgaaggagatgctgattctatcg

SEQ ID NO: 336094 - DNA, 25 bp, Artificial
  probe
  misc_feature (1)..(25): SEQ ID NO: 2765; WAN024D32; Start 227; Stop 251
atcgtattgaaggagatgctgattc

SEQ ID NO: 336095 - DNA, 25 bp, Artificial
  probe
  misc_feature (1)..(25): SEQ ID NO: 2765; WAN024D32; Start 175; Stop 199
actatcgtgagagagtatgaaggtc

SEQ ID NO: 336096 - DNA, 25 bp, Artificial
  probe
  misc_feature (1)..(25): SEQ ID NO: 2765; WAN024D32; Start 176; Stop 200
ctatcgtgagagagtatgaaggtcg

SEQ ID NO: 336097 - DNA, 25 bp, Artificial
  probe
  misc_feature (1)..(25): SEQ ID NO: 2765; WAN024D32; Start 228; Stop 252
tcgtattgaaggagatgctgattct

SEQ ID NO: 336098 - DNA, 25 bp, Artificial
  probe
  misc_feature (1)..(25): SEQ ID NO: 2765; WAN024D32; Start 230; Stop 254
gtattgaaggagatgctgattctat

SEQ ID NO: 336099 - DNA, 25 bp, Artificial
  probe
  misc_feature (1)..(25): SEQ ID NO: 2765; WAN024D32; Start 231; Stop 255
tattgaaggagatgctgattctatc

SEQ ID NO: 336100 - DNA, 25 bp, Artificial
  probe
  misc_feature (1)..(25): SEQ ID NO: 2765; WAN024D32; Start 417; Stop 441
gttagaggagcttcaatatggagta

SEQ ID NO: 336101 - DNA, 25 bp, Artificial
  probe
  misc_feature (1)..(25): SEQ ID NO: 2765; WAN024D32; Start 416; Stop 440
tgttagaggagcttcaatatggagt

SEQ ID NO: 336102 - DNA, 25 bp, Artificial
  probe
  misc_feature (1)..(25): SEQ ID NO: 2765; WAN024D32; Start 174; Stop 198
tactatcgtgagagagtatgaaggt

SEQ ID NO: 336103 - DNA, 25 bp, Artificial
  probe
  misc_feature (1)..(25): SEQ ID NO: 2765; WAN024D32; Start 415; Stop 439
ttgttagaggagcttcaatatggag

SEQ ID NO: 336104 - DNA, 25 bp, Artificial
  probe
  misc_feature (1)..(25): SEQ ID NO: 2765; WAN024D32; Start 245; Stop 269
ctgattctatcgacttggatgagtt

SEQ ID NO: 336105 - DNA, 25 bp, Artificial
  probe
  misc_feature (1)..(25): SEQ ID NO: 2765; WAN024D32; Start 224; Stop 248
tttatcgtattgaaggagatgctga

SEQ ID NO: 336106 - DNA, 25 bp, Artificial
  probe
  misc_feature (1)..(25): SEQ ID NO: 2765; WAN024D32; Start 223; Stop 247
gtttatcgtattgaaggagatgctg

SEQ ID NO: 336107 - DNA, 25 bp, Artificial
  probe
  misc_feature (1)..(25): SEQ ID NO: 2765; WAN024D32; Start 222; Stop 246
tgtttatcgtattgaaggagatgct

SEQ ID NO: 336108 - DNA, 25 bp, Artificial
  probe
  misc_feature (1)..(25): SEQ ID NO: 2765; WAN024D32; Start 241; Stop 265
gatgctgattctatcgacttggatg

SEQ ID NO: 336109 - DNA, 25 bp, Artificial
  probe
  misc_feature (1)..(25): SEQ ID NO: 2765; WAN024D32; Start 221; Stop 245
atgtttatcgtattgaaggagatgc

SEQ ID NO: 336110 - DNA, 25 bp, Artificial
  probe
  misc_feature (1)..(25): SEQ ID NO: 2765; WAN024D32; Start 323; Stop 347
ccttgccagatgcttatttagaatt

SEQ ID NO: 336111 - DNA, 25 bp, Artificial
  probe
  misc_feature (1)..(25): SEQ ID NO: 2765; WAN024D32; Start 236; Stop 260
aaggagatgctgattctatcgactt

SEQ ID NO: 336112 - DNA, 25 bp, Artificial
  probe
  misc_feature (1)..(25): SEQ ID NO: 2765; WAN024D32; Start 242; Stop 266
atgctgattctatcgacttggatga

SEQ ID NO: 336113 - DNA, 25 bp, Artificial
  probe
  misc_feature (1)..(25): SEQ ID NO: 2765; WAN024D32; Start 240; Stop 264
agatgctgattctatcgacttggat

SEQ ID NO: 336114 - DNA, 25 bp, Artificial
  probe
  misc_feature (1)..(25): SEQ ID NO: 2765; WAN024D32; Start 233; Stop 257
ttgaaggagatgctgattctatcga

SEQ ID NO: 336115 - DNA, 25 bp, Artificial
  probe
  misc_feature (1)..(25): SEQ ID NO: 2765; WAN024D32; Start 200; Stop 224
gacttccactttatcacctagatgt

SEQ ID NO: 336116 - DNA, 25 bp, Artificial
  probe
  misc_feature (1)..(25): SEQ ID NO: 2765; WAN024D32; Start 324; Stop 348
cttgccagatgcttatttagaattg

SEQ ID NO: 336117 - DNA, 25 bp, Artificial
  probe
  misc_feature (1)..(25): SEQ ID NO: 2765; WAN024D32; Start 256; Stop 280
gacttggatgagtttatctttggtg

SEQ ID NO: 336118 - DNA, 25 bp, Artificial
  probe
  misc_feature (1)..(25): SEQ ID NO: 2765; WAN024D32; Start 201; Stop 225
acttccactttatcacctagatgtt

SEQ ID NO: 336119 - DNA, 25 bp, Artificial
  probe
  misc_feature (1)..(25): SEQ ID NO: 2765; WAN024D32; Start 235; Stop 259
gaaggagatgctgattctatcgact

SEQ ID NO: 336120 - DNA, 25 bp, Artificial
  probe
  misc_feature (1)..(25): SEQ ID NO: 2765; WAN024D32; Start 199; Stop 223
cgacttccactttatcacctagatg

SEQ ID NO: 336121 - DNA, 25 bp, Artificial
  probe
  misc_feature (1)..(25): SEQ ID NO: 2765; WAN024D32; Start 322; Stop 346
gccttgccagatgcttatttagaat

SEQ ID NO: 336122 - DNA, 25 bp, Artificial
  probe
  misc_feature (1)..(25): SEQ ID NO: 2765; WAN024D32; Start 257; Stop 281
acttggatgagtttatctttggtgg

SEQ ID NO: 336123 - DNA, 25 bp, Artificial
  probe
  misc_feature (1)..(25): SEQ ID NO: 2766; WAN024GI9; Start 181; Stop 205
attacggcattgtggtttagtattc

SEQ ID NO: 336124 - DNA, 25 bp, Artificial
  probe
  misc_feature (1)..(25): SEQ ID NO: 2766; WAN024GI9; Start 180; Stop 204
aattacggcattgtggtttagtatt

SEQ ID NO: 336125 - DNA, 25 bp, Artificial
  probe
  misc_feature (1)..(25): SEQ ID NO: 2766; WAN024GI9; Start 182; Stop 206
ttacggcattgtggtttagtattcg

SEQ ID NO: 336126 - DNA, 25 bp, Artificial
  probe
  misc_feature (1)..(25): SEQ ID NO: 2766; WAN024GI9; Start 185; Stop 209
cggcattgtggtttagtattcgttt

SEQ ID NO: 336127 - DNA, 25 bp, Artificial
  probe
  misc_feature (1)..(25): SEQ ID NO: 2766; WAN024GI9; Start 179; Stop 203
caattacggcattgtggtttagtat

SEQ ID NO: 336128 - DNA, 25 bp, Artificial
  probe
  misc_feature (1)..(25): SEQ ID NO: 2766; WAN024GI9; Start 186; Stop 210
ggcattgtggtttagtattcgtttt

SEQ ID NO: 336129 - DNA, 25 bp, Artificial
  probe
  misc_feature (1)..(25): SEQ ID NO: 2766; WAN024GI9; Start 178; Stop 202
gcaattacggcattgtggtttagta

SEQ ID NO: 336130 - DNA, 25 bp, Artificial
  probe
  misc_feature (1)..(25): SEQ ID NO: 2766; WAN024GI9; Start 33; Stop 57
catctctgtaaaacgggtcatatta

SEQ ID NO: 336131 - DNA, 25 bp, Artificial
  probe
  misc_feature (1)..(25): SEQ ID NO: 2766; WAN024GI9; Start 187; Stop 211
gcattgtggtttagtattcgtttta

SEQ ID NO: 336132 - DNA, 25 bp, Artificial
  probe
  misc_feature (1)..(25): SEQ ID NO: 2766; WAN024GI9; Start 38; Stop 62
ctgtaaaacgggtcatattatctct

SEQ ID NO: 336133 - DNA, 25 bp, Artificial
  probe
  misc_feature (1)..(25): SEQ ID NO: 2766; WAN024GI9; Start 37; Stop 61
tctgtaaaacgggtcatattatctc

SEQ ID NO: 336134 - DNA, 25 bp, Artificial
  probe
  misc_feature (1)..(25): SEQ ID NO: 2766; WAN024GI9; Start 36; Stop 60
ctctgtaaaacgggtcatattatct

SEQ ID NO: 336135 - DNA, 25 bp, Artificial
  probe
  misc_feature (1)..(25): SEQ ID NO: 2766; WAN024GI9; Start 35; Stop 59
tctctgtaaaacgggtcatattatc

SEQ ID NO: 336136 - DNA, 25 bp, Artificial
  probe
  misc_feature (1)..(25): SEQ ID NO: 2766; WAN024GI9; Start 32; Stop 56
acatctctgtaaaacgggtcatatt

SEQ ID NO: 336137 - DNA, 25 bp, Artificial
  probe
  misc_feature (1)..(25): SEQ ID NO: 2766; WAN024GI9; Start 31; Stop 55
aacatctctgtaaaacgggtcatat

SEQ ID NO: 336138 - DNA, 25 bp, Artificial
  probe
  misc_feature (1)..(25): SEQ ID NO: 2766; WAN024GI9; Start 30; Stop 54
aaacatctctgtaaaacgggtcata

SEQ ID NO: 336139 - DNA, 25 bp, Artificial
  probe
  misc_feature (1)..(25): SEQ ID NO: 2766; WAN024GI9; Start 29; Stop 53
taaacatctctgtaaaacgggtcat

SEQ ID NO: 336140 - DNA, 25 bp, Artificial
  probe
  misc_feature (1)..(25): SEQ ID NO: 2766; WAN024GI9; Start 28; Stop 52
ataaacatctctgtaaaacgggtca

SEQ ID NO: 336141 - DNA, 25 bp, Artificial
  probe
  misc_feature (1)..(25): SEQ ID NO: 2766; WAN024GI9; Start 27; Stop 51
aataaacatctctgtaaaacgggtc

SEQ ID NO: 336142 - DNA, 25 bp, Artificial
  probe
  misc_feature (1)..(25): SEQ ID NO: 2766; WAN024GI9; Start 34; Stop 58
atctctgtaaaacgggtcatattat

SEQ ID NO: 336143 - DNA, 25 bp, Artificial
  probe
  misc_feature (1)..(25): SEQ ID NO: 2766; WAN024GI9; Start 26; Stop 50
taataaacatctctgtaaaacgggt

SEQ ID NO: 336144 - DNA, 25 bp, Artificial
  probe
  misc_feature (1)..(25): SEQ ID NO: 2766; WAN024GI9; Start 183; Stop 207
tacggcattgtggtttagtattcgt

SEQ ID NO: 336145 - DNA, 25 bp, Artificial
  probe
  misc_feature (1)..(25): SEQ ID NO: 2766; WAN024GI9; Start 118; Stop 142
tttcttccaaaagctattccccttc

SEQ ID NO: 336146 - DNA, 25 bp, Artificial
  probe
  misc_feature (1)..(25): SEQ ID NO: 2766; WAN024GI9; Start 39; Stop 63
tgtaaaacgggtcatattatctcta

SEQ ID NO: 336147 - DNA, 25 bp, Artificial
  probe
  misc_feature (1)..(25): SEQ ID NO: 2766; WAN024GI9; Start 190; Stop 214
ttgtggtttagtattcgttttatga

SEQ ID NO: 336148 - DNA, 25 bp, Artificial
  probe
  misc_feature (1)..(25): SEQ ID NO: 2766; WAN024GI9; Start 191; Stop 215
tgtggtttagtattcgttttatgat

SEQ ID NO: 336149 - DNA, 25 bp, Artificial
  probe
  misc_feature (1)..(25): SEQ ID NO: 2766; WAN024GI9; Start 25; Stop 49
ttaataaacatctctgtaaaacggg

SEQ ID NO: 336150 - DNA, 25 bp, Artificial
  probe
  misc_feature (1)..(25): SEQ ID NO: 2766; WAN024GI9; Start 117; Stop 141
ttttcttccaaaagctattcccctt

SEQ ID NO: 336151 - DNA, 25 bp, Artificial
  probe
  misc_feature (1)..(25): SEQ ID NO: 2766; WAN024GI9; Start 184; Stop 208
acggcattgtggtttagtattcgtt

SEQ ID NO: 336152 - DNA, 25 bp, Artificial
  probe
  misc_feature (1)..(25): SEQ ID NO: 2766; WAN024GI9; Start 123; Stop 147
tccaaaagctattccccttccaaaa

SEQ ID NO: 336153 - DNA, 25 bp, Artificial
  probe
  misc_feature (1)..(25): SEQ ID NO: 2766; WAN024GI9; Start 122; Stop 146
ttccaaaagctattccccttccaaa

SEQ ID NO: 336154 - DNA, 25 bp, Artificial
  probe
  misc_feature (1)..(25): SEQ ID NO: 2766; WAN024GI9; Start 14; Stop 38
ccaaaggaacgttaataaacatctc

SEQ ID NO: 336155 - DNA, 25 bp, Artificial
  probe
  misc_feature (1)..(25): SEQ ID NO: 2766; WAN024GI9; Start 119; Stop 143
ttcttccaaaagctattccccttcc

SEQ ID NO: 336156 - DNA, 25 bp, Artificial
  probe
  misc_feature (1)..(25): SEQ ID NO: 2767; WAN024G6T; Start 166; Stop 190
acagactacctattggaattgacag

SEQ ID NO: 336157 - DNA, 25 bp, Artificial
  probe
  misc_feature (1)..(25): SEQ ID NO: 2767; WAN024G6T; Start 167; Stop 191
cagactacctattggaattgacaga

SEQ ID NO: 336158 - DNA, 25 bp, Artificial
  probe
  misc_feature (1)..(25): SEQ ID NO: 2767; WAN024G6T; Start 122; Stop 146
cagcagatgtattggtaactctctc

SEQ ID NO: 336159 - DNA, 25 bp, Artificial
  probe
  misc_feature (1)..(25): SEQ ID NO: 2767; WAN024G6T; Start 168; Stop 192
agactacctattggaattgacagat

SEQ ID NO: 336160 - DNA, 25 bp, Artificial
  probe
  misc_feature (1)..(25): SEQ ID NO: 2767; WAN024G6T; Start 165; Stop 189
tacagactacctattggaattgaca

SEQ ID NO: 336161 - DNA, 25 bp, Artificial
  probe
  misc_feature (1)..(25): SEQ ID NO: 2767; WAN024G6T; Start 124; Stop 148
gcagatgtattggtaactctctcaa

SEQ ID NO: 336162 - DNA, 25 bp, Artificial
  probe
  misc_feature (1)..(25): SEQ ID NO: 2767; WAN024G6T; Start 123; Stop 147
agcagatgtattggtaactctctca

SEQ ID NO: 336163 - DNA, 25 bp, Artificial
  probe
  misc_feature (1)..(25): SEQ ID NO: 2767; WAN024G6T; Start 169; Stop 193
gactacctattggaattgacagatt

SEQ ID NO: 336164 - DNA, 25 bp, Artificial
  probe
  misc_feature (1)..(25): SEQ ID NO: 2767; WAN024G6T; Start 119; Stop 143
taacagcagatgtattggtaactct

SEQ ID NO: 336165 - DNA, 25 bp, Artificial
  probe
  misc_feature (1)..(25): SEQ ID NO: 2767; WAN024G6T; Start 120; Stop 144
aacagcagatgtattggtaactctc

SEQ ID NO: 336166 - DNA, 25 bp, Artificial
  probe
  misc_feature (1)..(25): SEQ ID NO: 2767; WAN024G6T; Start 164; Stop 188
gtacagactacctattggaattgac

SEQ ID NO: 336167 - DNA, 25 bp, Artificial
  probe
  misc_feature (1)..(25): SEQ ID NO: 2767; WAN024G6T; Start 118; Stop 142
ttaacagcagatgtattggtaactc

SEQ ID NO: 336168 - DNA, 25 bp, Artificial
  probe
  misc_feature (1)..(25): SEQ ID NO: 2767; WAN024G6T; Start 121; Stop 145
acagcagatgtattggtaactctct

SEQ ID NO: 336169 - DNA, 25 bp, Artificial
  probe
  misc_feature (1)..(25): SEQ ID NO: 2767; WAN024G6T; Start 158; Stop 182
atgtcagtacagactacctattgga

SEQ ID NO: 336170 - DNA, 25 bp, Artificial
  probe
  misc_feature (1)..(25): SEQ ID NO: 2767; WAN024G6T; Start 157; Stop 181
gatgtcagtacagactacctattgg

SEQ ID NO: 336171 - DNA, 25 bp, Artificial
  probe
  misc_feature (1)..(25): SEQ ID NO: 2767; WAN024G6T; Start 154; Stop 178
tacgatgtcagtacagactacctat

SEQ ID NO: 336172 - DNA, 25 bp, Artificial
  probe
  misc_feature (1)..(25): SEQ ID NO: 2767; WAN024G6T; Start 153; Stop 177
ttacgatgtcagtacagactaccta

SEQ ID NO: 336173 - DNA, 25 bp, Artificial
  probe
  misc_feature (1)..(25): SEQ ID NO: 2767; WAN024G6T; Start 163; Stop 187
agtacagactacctattggaattga

SEQ ID NO: 336174 - DNA, 25 bp, Artificial
  probe
  misc_feature (1)..(25): SEQ ID NO: 2767; WAN024G6T; Start 162; Stop 186
cagtacagactacctattggaattg

SEQ ID NO: 336175 - DNA, 25 bp, Artificial
  probe
  misc_feature (1)..(25): SEQ ID NO: 2767; WAN024G6T; Start 161; Stop 185
tcagtacagactacctattggaatt

SEQ ID NO: 336176 - DNA, 25 bp, Artificial
  probe
  misc_feature (1)..(25): SEQ ID NO: 2767; WAN024G6T; Start 156; Stop 180
cgatgtcagtacagactacctattg

SEQ ID NO: 336177 - DNA, 25 bp, Artificial
  probe
  misc_feature (1)..(25): SEQ ID NO: 2767; WAN024G6T; Start 159; Stop 183
tgtcagtacagactacctattggaa

SEQ ID NO: 336178 - DNA, 25 bp, Artificial
  probe
  misc_feature (1)..(25): SEQ ID NO: 2767; WAN024G6T; Start 155; Stop 179
acgatgtcagtacagactacctatt

SEQ ID NO: 336179 - DNA, 25 bp, Artificial
  probe
  misc_feature (1)..(25): SEQ ID NO: 2767; WAN024G6T; Start 160; Stop 184
gtcagtacagactacctattggaat

SEQ ID NO: 336180 - DNA, 25 bp, Artificial
  probe
  misc_feature (1)..(25): SEQ ID NO: 2767; WAN024G6T; Start 127; Stop 151
gatgtattggtaactctctcaaact

SEQ ID NO: 336181 - DNA, 25 bp, Artificial
  probe
  misc_feature (1)..(25): SEQ ID NO: 2767; WAN024G6T; Start 126; Stop 150
agatgtattggtaactctctcaaac

SEQ ID NO: 336182 - DNA, 25 bp, Artificial
  probe
  misc_feature (1)..(25): SEQ ID NO: 2767; WAN024G6T; Start 125; Stop 149
cagatgtattggtaactctctcaaa

SEQ ID NO: 336183 - DNA, 25 bp, Artificial
  probe
  misc_feature (1)..(25): SEQ ID NO: 2767; WAN024G6T; Start 12; Stop 36
tttgagagatttgagggaagatcac

SEQ ID NO: 336184 - DNA, 25 bp, Artificial
  probe
  misc_feature (1)..(25): SEQ ID NO: 2767; WAN024G6T; Start 11; Stop 35
gtttgagagatttgagggaagatca

SEQ ID NO: 336185 - DNA, 25 bp, Artificial
  probe
  misc_feature (1)..(25): SEQ ID NO: 2767; WAN024G6T; Start 10; Stop 34
cgtttgagagatttgagggaagatc

SEQ ID NO: 336186 - DNA, 25 bp, Artificial
  probe
  misc_feature (1)..(25): SEQ ID NO: 2767; WAN024G6T; Start 62; Stop 86
aaatactttcgtttacaaactcagc

SEQ ID NO: 336187 - DNA, 25 bp, Artificial
  probe
  misc_feature (1)..(25): SEQ ID NO: 2767; WAN024G6T; Start 170; Stop 194
actacctattggaattgacagattt

SEQ ID NO: 336188 - DNA, 25 bp, Artificial
  probe
  misc_feature (1)..(25): SEQ ID NO: 2767; WAN024G6T; Start 17; Stop 41
gagatttgagggaagatcacgattt

SEQ ID NO: 336189 - DNA, 25 bp, Artificial
  probe
  misc_feature (1)..(25): SEQ ID NO: 2768; WAN024E2C; Start 32; Stop 56
tgaatagagttcctgaagtgatgac

SEQ ID NO: 336190 - DNA, 25 bp, Artificial
  probe
  misc_feature (1)..(25): SEQ ID NO: 2768; WAN024E2C; Start 148; Stop 172
tggaagattgagaggaacttaggta

SEQ ID NO: 336191 - DNA, 25 bp, Artificial
  probe
  misc_feature (1)..(25): SEQ ID NO: 2768; WAN024E2C; Start 149; Stop 173
ggaagattgagaggaacttaggtaa

SEQ ID NO: 336192 - DNA, 25 bp, Artificial
  probe
  misc_feature (1)..(25): SEQ ID NO: 2768; WAN024E2C; Start 31; Stop 55
ttgaatagagttcctgaagtgatga

SEQ ID NO: 336193 - DNA, 25 bp, Artificial
  probe
  misc_feature (1)..(25): SEQ ID NO: 2768; WAN024E2C; Start 33; Stop 57
gaatagagttcctgaagtgatgact

SEQ ID NO: 336194 - DNA, 25 bp, Artificial
  probe
  misc_feature (1)..(25): SEQ ID NO: 2768; WAN024E2C; Start 144; Stop 168
atcgtggaagattgagaggaactta

SEQ ID NO: 336195 - DNA, 25 bp, Artificial
  probe
  misc_feature (1)..(25): SEQ ID NO: 2768; WAN024E2C; Start 143; Stop 167
tatcgtggaagattgagaggaactt

SEQ ID NO: 336196 - DNA, 25 bp, Artificial
  probe
  misc_feature (1)..(25): SEQ ID NO: 2768; WAN024E2C; Start 30; Stop 54
attgaatagagttcctgaagtgatg

SEQ ID NO: 336197 - DNA, 25 bp, Artificial
  probe
  misc_feature (1)..(25): SEQ ID NO: 2768; WAN024E2C; Start 137; Stop 161
caactgtatcgtggaagattgagag

SEQ ID NO: 336198 - DNA, 25 bp, Artificial
  probe
  misc_feature (1)..(25): SEQ ID NO: 2768; WAN024E2C; Start 135; Stop 159
aacaactgtatcgtggaagattgag

SEQ ID NO: 336199 - DNA, 25 bp, Artificial
  probe
  misc_feature (1)..(25): SEQ ID NO: 2768; WAN024E2C; Start 29; Stop 53
gattgaatagagttcctgaagtgat

SEQ ID NO: 336200 - DNA, 25 bp, Artificial
  probe
  misc_feature (1)..(25): SEQ ID NO: 2768; WAN024E2C; Start 142; Stop 166
gtatcgtggaagattgagaggaact

SEQ ID NO: 336201 - DNA, 25 bp, Artificial
  probe
  misc_feature (1)..(25): SEQ ID NO: 2768; WAN024E2C; Start 140; Stop 164
ctgtatcgtggaagattgagaggaa

SEQ ID NO: 336202 - DNA, 25 bp, Artificial
  probe
  misc_feature (1)..(25): SEQ ID NO: 2768; WAN024E2C; Start 147; Stop 171
gtggaagattgagaggaacttaggt

SEQ ID NO: 336203 - DNA, 25 bp, Artificial
  probe
  misc_feature (1)..(25): SEQ ID NO: 2768; WAN024E2C; Start 134; Stop 158
caacaactgtatcgtggaagattga

SEQ ID NO: 336204 - DNA, 25 bp, Artificial
  probe
  misc_feature (1)..(25): SEQ ID NO: 2768; WAN024E2C; Start 145; Stop 169
tcgtggaagattgagaggaacttag

SEQ ID NO: 336205 - DNA, 25 bp, Artificial
  probe
  misc_feature (1)..(25): SEQ ID NO: 2768; WAN024E2C; Start 141; Stop 165
tgtatcgtggaagattgagaggaac

SEQ ID NO: 336206 - DNA, 25 bp, Artificial
  probe
  misc_feature (1)..(25): SEQ ID NO: 2768; WAN024E2C; Start 138; Stop 162
aactgtatcgtggaagattgagagg

SEQ ID NO: 336207 - DNA, 25 bp, Artificial
  probe
  misc_feature (1)..(25): SEQ ID NO: 2768; WAN024E2C; Start 136; Stop 160
acaactgtatcgtggaagattgaga

SEQ ID NO: 336208 - DNA, 25 bp, Artificial
  probe
  misc_feature (1)..(25): SEQ ID NO: 2768; WAN024E2C; Start 150; Stop 174
gaagattgagaggaacttaggtaat

SEQ ID NO: 336209 - DNA, 25 bp, Artificial
  probe
  misc_feature (1)..(25): SEQ ID NO: 2768; WAN024E2C; Start 28; Stop 52
ggattgaatagagttcctgaagtga

SEQ ID NO: 336210 - DNA, 25 bp, Artificial
  probe
  misc_feature (1)..(25): SEQ ID NO: 2768; WAN024E2C; Start 108; Stop 132
gaatacgagcatcaaggtagcagat

SEQ ID NO: 336211 - DNA, 25 bp, Artificial
  probe
  misc_feature (1)..(25): SEQ ID NO: 2768; WAN024E2C; Start 106; Stop 130
aagaatacgagcatcaaggtagcag

SEQ ID NO: 336212 - DNA, 25 bp, Artificial
  probe
  misc_feature (1)..(25): SEQ ID NO: 2768; WAN024E2C; Start 105; Stop 129
gaagaatacgagcatcaaggtagca

SEQ ID NO: 336213 - DNA, 25 bp, Artificial
  probe
  misc_feature (1)..(25): SEQ ID NO: 2768; WAN024E2C; Start 146; Stop 170
cgtggaagattgagaggaacttagg

SEQ ID NO: 336214 - DNA, 25 bp, Artificial
  probe
  misc_feature (1)..(25): SEQ ID NO: 2768; WAN024E2C; Start 139; Stop 163
actgtatcgtggaagattgagagga

SEQ ID NO: 336215 - DNA, 25 bp, Artificial
  probe
  misc_feature (1)..(25): SEQ ID NO: 2768; WAN024E2C; Start 212; Stop 236
gtcctgctactttatctacaaacca

SEQ ID NO: 336216 - DNA, 25 bp, Artificial
  probe
  misc_feature (1)..(25): SEQ ID NO: 2768; WAN024E2C; Start 151; Stop 175
aagattgagaggaacttaggtaatt

SEQ ID NO: 336217 - DNA, 25 bp, Artificial
  probe
  misc_feature (1)..(25): SEQ ID NO: 2768; WAN024E2C; Start 103; Stop 127
ccgaagaatacgagcatcaaggtag

SEQ ID NO: 336218 - DNA, 25 bp, Artificial
  probe
  misc_feature (1)..(25): SEQ ID NO: 2768; WAN024E2C; Start 17; Stop 41
cttgtttagcaggattgaatagagt

SEQ ID NO: 336219 - DNA, 25 bp, Artificial
  probe
  misc_feature (1)..(25): SEQ ID NO: 2768; WAN024E2C; Start 211; Stop 235
cgtcctgctactttatctacaaacc

SEQ ID NO: 336220 - DNA, 25 bp, Artificial
  probe
  misc_feature (1)..(25): SEQ ID NO: 2768; WAN024E2C; Start 133; Stop 157
gcaacaactgtatcgtggaagattg

SEQ ID NO: 336221 - DNA, 25 bp, Artificial
  probe
  misc_feature (1)..(25): SEQ ID NO: 2768; WAN024E2C; Start 19; Stop 43
tgtttagcaggattgaatagagttc

SEQ ID NO: 336222 - DNA, 25 bp, Artificial
  probe
  misc_feature (1)..(25): SEQ ID NO: 2769; WAN024GDO; Start 55; Stop 79
catcactatgacaagataggactct

SEQ ID NO: 336223 - DNA, 25 bp, Artificial
  probe
  misc_feature (1)..(25): SEQ ID NO: 2769; WAN024GDO; Start 398; Stop 422
cggtagagaaatatggtcaagaagt

SEQ ID NO: 336224 - DNA, 25 bp, Artificial
  probe
  misc_feature (1)..(25): SEQ ID NO: 2769; WAN024GDO; Start 202; Stop 226
aaggaagaaaggacagatttattgc

SEQ ID NO: 336225 - DNA, 25 bp, Artificial
  probe
  misc_feature (1)..(25): SEQ ID NO: 2769; WAN024GDO; Start 203; Stop 227
aggaagaaaggacagatttattgcc

SEQ ID NO: 336226 - DNA, 25 bp, Artificial
  probe
  misc_feature (1)..(25): SEQ ID NO: 2769; WAN024GDO; Start 583; Stop 607
acttatggatttgactgctctattg

SEQ ID NO: 336227 - DNA, 25 bp, Artificial
  probe
  misc_feature (1)..(25): SEQ ID NO: 2769; WAN024GDO; Start 582; Stop 606
cacttatggatttgactgctctatt

SEQ ID NO: 336228 - DNA, 25 bp, Artificial
  probe
  misc_feature (1)..(25): SEQ ID NO: 2769; WAN024GDO; Start 637; Stop 661
gtctacaacccagagtttaaggaaa

SEQ ID NO: 336229 - DNA, 25 bp, Artificial
  probe
  misc_feature (1)..(25): SEQ ID NO: 2769; WAN024GDO; Start 137; Stop 161
gccttcaggtcattctttactacaa

SEQ ID NO: 336230 - DNA, 25 bp, Artificial
  probe
  misc_feature (1)..(25): SEQ ID NO: 2769; WAN024GDO; Start 584; Stop 608
cttatggatttgactgctctattga

SEQ ID NO: 336231 - DNA, 25 bp, Artificial
  probe
  misc_feature (1)..(25): SEQ ID NO: 2769; WAN024GDO; Start 399; Stop 423
ggtagagaaatatggtcaagaagtc

SEQ ID NO: 336232 - DNA, 25 bp, Artificial
  probe
  misc_feature (1)..(25): SEQ ID NO: 2769; WAN024GDO; Start 397; Stop 421
gcggtagagaaatatggtcaagaag

SEQ ID NO: 336233 - DNA, 25 bp, Artificial
  probe
  misc_feature (1)..(25): SEQ ID NO: 2769; WAN024GDO; Start 394; Stop 418
gaagcggtagagaaatatggtcaag

SEQ ID NO: 336234 - DNA, 25 bp, Artificial
  probe
  misc_feature (1)..(25): SEQ ID NO: 2769; WAN024GDO; Start 391; Stop 415
caagaagcggtagagaaatatggtc

SEQ ID NO: 336235 - DNA, 25 bp, Artificial
  probe
  misc_feature (1)..(25): SEQ ID NO: 2769; WAN024GDO; Start 396; Stop 420
agcggtagagaaatatggtcaagaa

SEQ ID NO: 336236 - DNA, 25 bp, Artificial
  probe
  misc_feature (1)..(25): SEQ ID NO: 2769; WAN024GDO; Start 395; Stop 419
aagcggtagagaaatatggtcaaga

SEQ ID NO: 336237 - DNA, 25 bp, Artificial
  probe
  misc_feature (1)..(25): SEQ ID NO: 2769; WAN024GDO; Start 393; Stop 417
agaagcggtagagaaatatggtcaa

SEQ ID NO: 336238 - DNA, 25 bp, Artificial
  probe
  misc_feature (1)..(25): SEQ ID NO: 2769; WAN024GDO; Start 392; Stop 416
aagaagcggtagagaaatatggtca

SEQ ID NO: 336239 - DNA, 25 bp, Artificial
  probe
  misc_feature (1)..(25): SEQ ID NO: 2769; WAN024GDO; Start 138; Stop 162
ccttcaggtcattctttactacaaa

SEQ ID NO: 336240 - DNA, 25 bp, Artificial
  probe
  misc_feature (1)..(25): SEQ ID NO: 2769; WAN024GDO; Start 204; Stop 228
ggaagaaaggacagatttattgccc

SEQ ID NO: 336241 - DNA, 25 bp, Artificial
  probe
  misc_feature (1)..(25): SEQ ID NO: 2769; WAN024GDO; Start 400; Stop 424
gtagagaaatatggtcaagaagtca

SEQ ID NO: 336242 - DNA, 25 bp, Artificial
  probe
  misc_feature (1)..(25): SEQ ID NO: 2769; WAN024GDO; Start 405; Stop 429
gaaatatggtcaagaagtcatggga

SEQ ID NO: 336243 - DNA, 25 bp, Artificial
  probe
  misc_feature (1)..(25): SEQ ID NO: 2769; WAN024GDO; Start 404; Stop 428
agaaatatggtcaagaagtcatggg

SEQ ID NO: 336244 - DNA, 25 bp, Artificial
  probe
  misc_feature (1)..(25): SEQ ID NO: 2769; WAN024GDO; Start 403; Stop 427
gagaaatatggtcaagaagtcatgg

SEQ ID NO: 336245 - DNA, 25 bp, Artificial
  probe
  misc_feature (1)..(25): SEQ ID NO: 2769; WAN024GDO; Start 585; Stop 609
ttatggatttgactgctctattgag

SEQ ID NO: 336246 - DNA, 25 bp, Artificial
  probe
  misc_feature (1)..(25): SEQ ID NO: 2769; WAN024GDO; Start 56; Stop 80
atcactatgacaagataggactctt

SEQ ID NO: 336247 - DNA, 25 bp, Artificial
  probe
  misc_feature (1)..(25): SEQ ID NO: 2769; WAN024GDO; Start 134; Stop 158
aacgccttcaggtcattctttacta

SEQ ID NO: 336248 - DNA, 25 bp, Artificial
  probe
  misc_feature (1)..(25): SEQ ID NO: 2769; WAN024GDO; Start 266; Stop 290
ggcaacatctggataccttgatttc

SEQ ID NO: 336249 - DNA, 25 bp, Artificial
  probe
  misc_feature (1)..(25): SEQ ID NO: 2769; WAN024GDO; Start 197; Stop 221
tgttaaaggaagaaaggacagattt

SEQ ID NO: 336250 - DNA, 25 bp, Artificial
  probe
  misc_feature (1)..(25): SEQ ID NO: 2769; WAN024GDO; Start 402; Stop 426
agagaaatatggtcaagaagtcatg

SEQ ID NO: 336251 - DNA, 25 bp, Artificial
  probe
  misc_feature (1)..(25): SEQ ID NO: 2769; WAN024GDO; Start 636; Stop 660
cgtctacaacccagagtttaaggaa

SEQ ID NO: 336252 - DNA, 25 bp, Artificial
  probe
  misc_feature (1)..(25): SEQ ID NO: 2769; WAN024GDO; Start 201; Stop 225
aaaggaagaaaggacagatttattg

SEQ ID NO: 336253 - DNA, 25 bp, Artificial
  probe
  misc_feature (1)..(25): SEQ ID NO: 2769; WAN024GDO; Start 474; Stop 498
cgcctttaaccaagtctttcaaact

SEQ ID NO: 336254 - DNA, 25 bp, Artificial
  probe
  misc_feature (1)..(25): SEQ ID NO: 2769; WAN024GDO; Start 136; Stop 160
cgccttcaggtcattctttactaca

SEQ ID NO: 336255 - DNA, 25 bp, Artificial
  probe
  misc_feature (1)..(25): SEQ ID NO: 2770; WAN024DH2; Start 869; Stop 893
atatagatgtaggtcaagcgagagt

SEQ ID NO: 336256 - DNA, 25 bp, Artificial
  probe
  misc_feature (1)..(25): SEQ ID NO: 2770; WAN024DH2; Start 870; Stop 894
tatagatgtaggtcaagcgagagtt

SEQ ID NO: 336257 - DNA, 25 bp, Artificial
  probe
  misc_feature (1)..(25): SEQ ID NO: 2770; WAN024DH2; Start 871; Stop 895
atagatgtaggtcaagcgagagttc

SEQ ID NO: 336258 - DNA, 25 bp, Artificial
  probe
  misc_feature (1)..(25): SEQ ID NO: 2770; WAN024DH2; Start 868; Stop 892
tatatagatgtaggtcaagcgagag

SEQ ID NO: 336259 - DNA, 25 bp, Artificial
  probe
  misc_feature (1)..(25): SEQ ID NO: 2770; WAN024DH2; Start 864; Stop 888
ggaatatatagatgtaggtcaagcg

SEQ ID NO: 336260 - DNA, 25 bp, Artificial
  probe
  misc_feature (1)..(25): SEQ ID NO: 2770; WAN024DH2; Start 867; Stop 891
atatatagatgtaggtcaagcgaga

SEQ ID NO: 336261 - DNA, 25 bp, Artificial
  probe
  misc_feature (1)..(25): SEQ ID NO: 2770; WAN024DH2; Start 447; Stop 471
agacaccattcaacctcgtattcag

SEQ ID NO: 336262 - DNA, 25 bp, Artificial
  probe
  misc_feature (1)..(25): SEQ ID NO: 2770; WAN024DH2; Start 838; Stop 862
ttgttagaggaattgaccttcttgc

SEQ ID NO: 336263 - DNA, 25 bp, Artificial
  probe
  misc_feature (1)..(25): SEQ ID NO: 2770; WAN024DH2; Start 865; Stop 889
gaatatatagatgtaggtcaagcga

SEQ ID NO: 336264 - DNA, 25 bp, Artificial
  probe
  misc_feature (1)..(25): SEQ ID NO: 2770; WAN024DH2; Start 866; Stop 890
aatatatagatgtaggtcaagcgag

SEQ ID NO: 336265 - DNA, 25 bp, Artificial
  probe
  misc_feature (1)..(25): SEQ ID NO: 2770; WAN024DH2; Start 1111; Stop 1135
acgattgaagaatacttgggtgaat

SEQ ID NO: 336266 - DNA, 25 bp, Artificial
  probe
  misc_feature (1)..(25): SEQ ID NO: 2770; WAN024DH2; Start 943; Stop 967
atatatgctggtatggatgatgatt

SEQ ID NO: 336267 - DNA, 25 bp, Artificial
  probe
  misc_feature (1)..(25): SEQ ID NO: 2770; WAN024DH2; Start 861; Stop 885
gcaggaatatatagatgtaggtcaa

SEQ ID NO: 336268 - DNA, 25 bp, Artificial
  probe
  misc_feature (1)..(25): SEQ ID NO: 2770; WAN024DH2; Start 446; Stop 470
gagacaccattcaacctcgtattca

SEQ ID NO: 336269 - DNA, 25 bp, Artificial
  probe
  misc_feature (1)..(25): SEQ ID NO: 2770; WAN024DH2; Start 1110; Stop 1134
aacgattgaagaatacttgggtgaa

SEQ ID NO: 336270 - DNA, 25 bp, Artificial
  probe
  misc_feature (1)..(25): SEQ ID NO: 2770; WAN024DH2; Start 1112; Stop 1136
cgattgaagaatacttgggtgaatt

SEQ ID NO: 336271 - DNA, 25 bp, Artificial
  probe
  misc_feature (1)..(25): SEQ ID NO: 2770; WAN024DH2; Start 1121; Stop 1145
aatacttgggtgaatttacaatgcc

SEQ ID NO: 336272 - DNA, 25 bp, Artificial
  probe
  misc_feature (1)..(25): SEQ ID NO: 2770; WAN024DH2; Start 863; Stop 887
aggaatatatagatgtaggtcaagc

SEQ ID NO: 336273 - DNA, 25 bp, Artificial
  probe
  misc_feature (1)..(25): SEQ ID NO: 2770; WAN024DH2; Start 860; Stop 884
tgcaggaatatatagatgtaggtca

SEQ ID NO: 336274 - DNA, 25 bp, Artificial
  probe
  misc_feature (1)..(25): SEQ ID NO: 2770; WAN024DH2; Start 1120; Stop 1144
gaatacttgggtgaatttacaatgc

SEQ ID NO: 336275 - DNA, 25 bp, Artificial
  probe
  misc_feature (1)..(25): SEQ ID NO: 2770; WAN024DH2; Start 872; Stop 896
tagatgtaggtcaagcgagagttcc

SEQ ID NO: 336276 - DNA, 25 bp, Artificial
  probe
  misc_feature (1)..(25): SEQ ID NO: 2770; WAN024DH2; Start 1109; Stop 1133
caacgattgaagaatacttgggtga

SEQ ID NO: 336277 - DNA, 25 bp, Artificial
  probe
  misc_feature (1)..(25): SEQ ID NO: 2770; WAN024DH2; Start 1116; Stop 1140
tgaagaatacttgggtgaatttaca

SEQ ID NO: 336278 - DNA, 25 bp, Artificial
  probe
  misc_feature (1)..(25): SEQ ID NO: 2770; WAN024DH2; Start 445; Stop 469
ggagacaccattcaacctcgtattc

SEQ ID NO: 336279 - DNA, 25 bp, Artificial
  probe
  misc_feature (1)..(25): SEQ ID NO: 2770; WAN024DH2; Start 847; Stop 871
gaattgaccttcttgcaggaatata

SEQ ID NO: 336280 - DNA, 25 bp, Artificial
  probe
  misc_feature (1)..(25): SEQ ID NO: 2770; WAN024DH2; Start 846; Stop 870
ggaattgaccttcttgcaggaatat

SEQ ID NO: 336281 - DNA, 25 bp, Artificial
  probe
  misc_feature (1)..(25): SEQ ID NO: 2770; WAN024DH2; Start 851; Stop 875
tgaccttcttgcaggaatatataga

SEQ ID NO: 336282 - DNA, 25 bp, Artificial
  probe
  misc_feature (1)..(25): SEQ ID NO: 2770; WAN024DH2; Start 1104; Stop 1128
taatccaacgattgaagaatacttg

SEQ ID NO: 336283 - DNA, 25 bp, Artificial
  probe
  misc_feature (1)..(25): SEQ ID NO: 2770; WAN024DH2; Start 837; Stop 861
tttgttagaggaattgaccttcttg

SEQ ID NO: 336284 - DNA, 25 bp, Artificial
  probe
  misc_feature (1)..(25): SEQ ID NO: 2770; WAN024DH2; Start 836; Stop 860
gtttgttagaggaattgaccttctt

SEQ ID NO: 336285 - DNA, 25 bp, Artificial
  probe
  misc_feature (1)..(25): SEQ ID NO: 2770; WAN024DH2; Start 942; Stop 966
tatatatgctggtatggatgatgat

SEQ ID NO: 336286 - DNA, 25 bp, Artificial
  probe
  misc_feature (1)..(25): SEQ ID NO: 2770; WAN024DH2; Start 859; Stop 883
ttgcaggaatatatagatgtaggtc

SEQ ID NO: 336287 - DNA, 25 bp, Artificial
  probe
  misc_feature (1)..(25): SEQ ID NO: 2770; WAN024DH2; Start 858; Stop 882
cttgcaggaatatatagatgtaggt

SEQ ID NO: 336288 - DNA, 25 bp, Artificial
  probe
  misc_feature (1)..(25): SEQ ID NO: 2771; WAN024DGY; Start 930; Stop 954
ctacctctgtcaatctatatgctgg

SEQ ID NO: 336289 - DNA, 25 bp, Artificial
  probe
  misc_feature (1)..(25): SEQ ID NO: 2771; WAN024DGY; Start 929; Stop 953
actacctctgtcaatctatatgctg

SEQ ID NO: 336290 - DNA, 25 bp, Artificial
  probe
  misc_feature (1)..(25): SEQ ID NO: 2771; WAN024DGY; Start 928; Stop 952
tactacctctgtcaatctatatgct

SEQ ID NO: 336291 - DNA, 25 bp, Artificial
  probe
  misc_feature (1)..(25): SEQ ID NO: 2771; WAN024DGY; Start 927; Stop 951
gtactacctctgtcaatctatatgc

SEQ ID NO: 336292 - DNA, 25 bp, Artificial
  probe
  misc_feature (1)..(25): SEQ ID NO: 2771; WAN024DGY; Start 9; Stop 33
ttatcaaattggcattcccgcatta

SEQ ID NO: 336293 - DNA, 25 bp, Artificial
  probe
  misc_feature (1)..(25): SEQ ID NO: 2771; WAN024DGY; Start 10; Stop 34
tatcaaattggcattcccgcattag

SEQ ID NO: 336294 - DNA, 25 bp, Artificial
  probe
  misc_feature (1)..(25): SEQ ID NO: 2771; WAN024DGY; Start 924; Stop 948
ttggtactacctctgtcaatctata

SEQ ID NO: 336295 - DNA, 25 bp, Artificial
  probe
  misc_feature (1)..(25): SEQ ID NO: 2771; WAN024DGY; Start 925; Stop 949
tggtactacctctgtcaatctatat

SEQ ID NO: 336296 - DNA, 25 bp, Artificial
  probe
  misc_feature (1)..(25): SEQ ID NO: 2771; WAN024DGY; Start 926; Stop 950
ggtactacctctgtcaatctatatg

SEQ ID NO: 336297 - DNA, 25 bp, Artificial
  probe
  misc_feature (1)..(25): SEQ ID NO: 2771; WAN024DGY; Start 44; Stop 68
agtttgtcaaagaccatgaattagc

SEQ ID NO: 336298 - DNA, 25 bp, Artificial
  probe
  misc_feature (1)..(25): SEQ ID NO: 2771; WAN024DGY; Start 40; Stop 64
gatcagtttgtcaaagaccatgaat

SEQ ID NO: 336299 - DNA, 25 bp, Artificial
  probe
  misc_feature (1)..(25): SEQ ID NO: 2771; WAN024DGY; Start 41; Stop 65
atcagtttgtcaaagaccatgaatt

SEQ ID NO: 336300 - DNA, 25 bp, Artificial
  probe
  misc_feature (1)..(25): SEQ ID NO: 2771; WAN024DGY; Start 42; Stop 66
tcagtttgtcaaagaccatgaatta

SEQ ID NO: 336301 - DNA, 25 bp, Artificial
  probe
  misc_feature (1)..(25): SEQ ID NO: 2771; WAN024DGY; Start 15; Stop 39
aattggcattcccgcattagaatat

SEQ ID NO: 336302 - DNA, 25 bp, Artificial
  probe
  misc_feature (1)..(25): SEQ ID NO: 2771; WAN024DGY; Start 43; Stop 67
cagtttgtcaaagaccatgaattag

SEQ ID NO: 336303 - DNA, 25 bp, Artificial
  probe
  misc_feature (1)..(25): SEQ ID NO: 2771; WAN024DGY; Start 14; Stop 38
aaattggcattcccgcattagaata

SEQ ID NO: 336304 - DNA, 25 bp, Artificial
  probe
  misc_feature (1)..(25): SEQ ID NO: 2771; WAN024DGY; Start 919; Stop 943
ggaatttggtactacctctgtcaat

SEQ ID NO: 336305 - DNA, 25 bp, Artificial
  probe
  misc_feature (1)..(25): SEQ ID NO: 2771; WAN024DGY; Start 916; Stop 940
tttggaatttggtactacctctgtc

SEQ ID NO: 336306 - DNA, 25 bp, Artificial
  probe
  misc_feature (1)..(25): SEQ ID NO: 2771; WAN024DGY; Start 921; Stop 945
aatttggtactacctctgtcaatct

SEQ ID NO: 336307 - DNA, 25 bp, Artificial
  probe
  misc_feature (1)..(25): SEQ ID NO: 2771; WAN024DGY; Start 920; Stop 944
gaatttggtactacctctgtcaatc

SEQ ID NO: 336308 - DNA, 25 bp, Artificial
  probe
  misc_feature (1)..(25): SEQ ID NO: 2771; WAN024DGY; Start 8; Stop 32
gttatcaaattggcattcccgcatt

SEQ ID NO: 336309 - DNA, 25 bp, Artificial
  probe
  misc_feature (1)..(25): SEQ ID NO: 2771; WAN024DGY; Start 332; Stop 356
gtctatctcaacatttggttaatca

SEQ ID NO: 336310 - DNA, 25 bp, Artificial
  probe
  misc_feature (1)..(25): SEQ ID NO: 2771; WAN024DGY; Start 16; Stop 40
attggcattcccgcattagaatatg

SEQ ID NO: 336311 - DNA, 25 bp, Artificial
  probe
  misc_feature (1)..(25): SEQ ID NO: 2771; WAN024DGY; Start 923; Stop 947
tttggtactacctctgtcaatctat

SEQ ID NO: 336312 - DNA, 25 bp, Artificial
  probe
  misc_feature (1)..(25): SEQ ID NO: 2771; WAN024DGY; Start 922; Stop 946
atttggtactacctctgtcaatcta

SEQ ID NO: 336313 - DNA, 25 bp, Artificial
  probe
  misc_feature (1)..(25): SEQ ID NO: 2771; WAN024DGY; Start 918; Stop 942
tggaatttggtactacctctgtcaa

SEQ ID NO: 336314 - DNA, 25 bp, Artificial
  probe
  misc_feature (1)..(25): SEQ ID NO: 2771; WAN024DGY; Start 917; Stop 941
ttggaatttggtactacctctgtca

SEQ ID NO: 336315 - DNA, 25 bp, Artificial
  probe
  misc_feature (1)..(25): SEQ ID NO: 2771; WAN024DGY; Start 326; Stop 350
gtatttgtctatctcaacatttggt

SEQ ID NO: 336316 - DNA, 25 bp, Artificial
  probe
  misc_feature (1)..(25): SEQ ID NO: 2771; WAN024DGY; Start 19; Stop 43
ggcattcccgcattagaatatgatc

SEQ ID NO: 336317 - DNA, 25 bp, Artificial
  probe
  misc_feature (1)..(25): SEQ ID NO: 2771; WAN024DGY; Start 11; Stop 35
atcaaattggcattcccgcattaga

SEQ ID NO: 336318 - DNA, 25 bp, Artificial
  probe
  misc_feature (1)..(25): SEQ ID NO: 2771; WAN024DGY; Start 331; Stop 355
tgtctatctcaacatttggttaatc

SEQ ID NO: 336319 - DNA, 25 bp, Artificial
  probe
  misc_feature (1)..(25): SEQ ID NO: 2771; WAN024DGY; Start 325; Stop 349
agtatttgtctatctcaacatttgg

SEQ ID NO: 336320 - DNA, 25 bp, Artificial
  probe
  misc_feature (1)..(25): SEQ ID NO: 2771; WAN024DGY; Start 322; Stop 346
ccaagtatttgtctatctcaacatt

SEQ ID NO: 336321 - DNA, 25 bp, Artificial
  probe
  misc_feature (1)..(25): SEQ ID NO: 2772; WAN024DGX; Start 944; Stop 968
ctatacgcaggaatggatgaagatt

SEQ ID NO: 336322 - DNA, 25 bp, Artificial
  probe
  misc_feature (1)..(25): SEQ ID NO: 2772; WAN024DGX; Start 941; Stop 965
aatctatacgcaggaatggatgaag

SEQ ID NO: 336323 - DNA, 25 bp, Artificial
  probe
  misc_feature (1)..(25): SEQ ID NO: 2772; WAN024DGX; Start 940; Stop 964
caatctatacgcaggaatggatgaa

SEQ ID NO: 336324 - DNA, 25 bp, Artificial
  probe
  misc_feature (1)..(25): SEQ ID NO: 2772; WAN024DGX; Start 733; Stop 757
gcaagaattagaagaacagttagcg

SEQ ID NO: 336325 - DNA, 25 bp, Artificial
  probe
  misc_feature (1)..(25): SEQ ID NO: 2772; WAN024DGX; Start 732; Stop 756
cgcaagaattagaagaacagttagc

SEQ ID NO: 336326 - DNA, 25 bp, Artificial
  probe
  misc_feature (1)..(25): SEQ ID NO: 2772; WAN024DGX; Start 734; Stop 758
caagaattagaagaacagttagcga

SEQ ID NO: 336327 - DNA, 25 bp, Artificial
  probe
  misc_feature (1)..(25): SEQ ID NO: 2772; WAN024DGX; Start 731; Stop 755
tcgcaagaattagaagaacagttag

SEQ ID NO: 336328 - DNA, 25 bp, Artificial
  probe
  misc_feature (1)..(25): SEQ ID NO: 2772; WAN024DGX; Start 938; Stop 962
gtcaatctatacgcaggaatggatg

SEQ ID NO: 336329 - DNA, 25 bp, Artificial
  probe
  misc_feature (1)..(25): SEQ ID NO: 2772; WAN024DGX; Start 274; Stop 298
tattaagtcctatgctcgcagtaag

SEQ ID NO: 336330 - DNA, 25 bp, Artificial
  probe
  misc_feature (1)..(25): SEQ ID NO: 2772; WAN024DGX; Start 273; Stop 297
ctattaagtcctatgctcgcagtaa

SEQ ID NO: 336331 - DNA, 25 bp, Artificial
  probe
  misc_feature (1)..(25): SEQ ID NO: 2772; WAN024DGX; Start 943; Stop 967
tctatacgcaggaatggatgaagat

SEQ ID NO: 336332 - DNA, 25 bp, Artificial
  probe
  misc_feature (1)..(25): SEQ ID NO: 2772; WAN024DGX; Start 942; Stop 966
atctatacgcaggaatggatgaaga

SEQ ID NO: 336333 - DNA, 25 bp, Artificial
  probe
  misc_feature (1)..(25): SEQ ID NO: 2772; WAN024DGX; Start 730; Stop 754
ttcgcaagaattagaagaacagtta

SEQ ID NO: 336334 - DNA, 25 bp, Artificial
  probe
  misc_feature (1)..(25): SEQ ID NO: 2772; WAN024DGX; Start 937; Stop 961
tgtcaatctatacgcaggaatggat

SEQ ID NO: 336335 - DNA, 25 bp, Artificial
  probe
  misc_feature (1)..(25): SEQ ID NO: 2772; WAN024DGX; Start 735; Stop 759
aagaattagaagaacagttagcgaa

SEQ ID NO: 336336 - DNA, 25 bp, Artificial
  probe
  misc_feature (1)..(25): SEQ ID NO: 2772; WAN024DGX; Start 572; Stop 596
ggtggaactgaattattggagtctt

SEQ ID NO: 336337 - DNA, 25 bp, Artificial
  probe
  misc_feature (1)..(25): SEQ ID NO: 2772; WAN024DGX; Start 272; Stop 296
tctattaagtcctatgctcgcagta

SEQ ID NO: 336338 - DNA, 25 bp, Artificial
  probe
  misc_feature (1)..(25): SEQ ID NO: 2772; WAN024DGX; Start 570; Stop 594
ttggtggaactgaattattggagtc

SEQ ID NO: 336339 - DNA, 25 bp, Artificial
  probe
  misc_feature (1)..(25): SEQ ID NO: 2772; WAN024DGX; Start 939; Stop 963
tcaatctatacgcaggaatggatga

SEQ ID NO: 336340 - DNA, 25 bp, Artificial
  probe
  misc_feature (1)..(25): SEQ ID NO: 2772; WAN024DGX; Start 933; Stop 957
cttctgtcaatctatacgcaggaat

SEQ ID NO: 336341 - DNA, 25 bp, Artificial
  probe
  misc_feature (1)..(25): SEQ ID NO: 2772; WAN024DGX; Start 275; Stop 299
attaagtcctatgctcgcagtaaga

SEQ ID NO: 336342 - DNA, 25 bp, Artificial
  probe
  misc_feature (1)..(25): SEQ ID NO: 2772; WAN024DGX; Start 934; Stop 958
ttctgtcaatctatacgcaggaatg

SEQ ID NO: 336343 - DNA, 25 bp, Artificial
  probe
  misc_feature (1)..(25): SEQ ID NO: 2772; WAN024DGX; Start 571; Stop 595
tggtggaactgaattattggagtct

SEQ ID NO: 336344 - DNA, 25 bp, Artificial
  probe
  misc_feature (1)..(25): SEQ ID NO: 2772; WAN024DGX; Start 270; Stop 294
agtctattaagtcctatgctcgcag

SEQ ID NO: 336345 - DNA, 25 bp, Artificial
  probe
  misc_feature (1)..(25): SEQ ID NO: 2772; WAN024DGX; Start 932; Stop 956
acttctgtcaatctatacgcaggaa

SEQ ID NO: 336346 - DNA, 25 bp, Artificial
  probe
  misc_feature (1)..(25): SEQ ID NO: 2772; WAN024DGX; Start 931; Stop 955
aacttctgtcaatctatacgcagga

SEQ ID NO: 336347 - DNA, 25 bp, Artificial
  probe
  misc_feature (1)..(25): SEQ ID NO: 2772; WAN024DGX; Start 271; Stop 295
gtctattaagtcctatgctcgcagt

SEQ ID NO: 336348 - DNA, 25 bp, Artificial
  probe
  misc_feature (1)..(25): SEQ ID NO: 2772; WAN024DGX; Start 269; Stop 293
cagtctattaagtcctatgctcgca

SEQ ID NO: 336349 - DNA, 25 bp, Artificial
  probe
  misc_feature (1)..(25): SEQ ID NO: 2772; WAN024DGX; Start 945; Stop 969
tatacgcaggaatggatgaagattt

SEQ ID NO: 336350 - DNA, 25 bp, Artificial
  probe
  misc_feature (1)..(25): SEQ ID NO: 2772; WAN024DGX; Start 276; Stop 300
ttaagtcctatgctcgcagtaagag

SEQ ID NO: 336351 - DNA, 25 bp, Artificial
  probe
  misc_feature (1)..(25): SEQ ID NO: 2772; WAN024DGX; Start 568; Stop 592
atttggtggaactgaattattggag

SEQ ID NO: 336352 - DNA, 25 bp, Artificial
  probe
  misc_feature (1)..(25): SEQ ID NO: 2772; WAN024DGX; Start 1147; Stop 1171
tacccatcctctctatcctctgtta

SEQ ID NO: 336353 - DNA, 25 bp, Artificial
  probe
  misc_feature (1)..(25): SEQ ID NO: 2772; WAN024DGX; Start 936; Stop 960
ctgtcaatctatacgcaggaatgga

SEQ ID NO: 336354 - DNA, 25 bp, Artificial
  probe
  misc_feature (1)..(25): SEQ ID NO: 2773; WAN024AXP; Start 980; Stop 1004
aagaagcagtacagaatgataaggt

SEQ ID NO: 336355 - DNA, 25 bp, Artificial
  probe
  misc_feature (1)..(25): SEQ ID NO: 2773; WAN024AXP; Start 824; Stop 848
cttatactcgcattattgagcacaa

SEQ ID NO: 336356 - DNA, 25 bp, Artificial
  probe
  misc_feature (1)..(25): SEQ ID NO: 2773; WAN024AXP; Start 979; Stop 1003
gaagaagcagtacagaatgataagg

SEQ ID NO: 336357 - DNA, 25 bp, Artificial
  probe
  misc_feature (1)..(25): SEQ ID NO: 2773; WAN024AXP; Start 822; Stop 846
tccttatactcgcattattgagcac

SEQ ID NO: 336358 - DNA, 25 bp, Artificial
  probe
  misc_feature (1)..(25): SEQ ID NO: 2773; WAN024AXP; Start 981; Stop 1005
agaagcagtacagaatgataaggta

SEQ ID NO: 336359 - DNA, 25 bp, Artificial
  probe
  misc_feature (1)..(25): SEQ ID NO: 2773; WAN024AXP; Start 823; Stop 847
ccttatactcgcattattgagcaca

SEQ ID NO: 336360 - DNA, 25 bp, Artificial
  probe
  misc_feature (1)..(25): SEQ ID NO: 2773; WAN024AXP; Start 975; Stop 999
tcaagaagaagcagtacagaatgat

SEQ ID NO: 336361 - DNA, 25 bp, Artificial
  probe
  misc_feature (1)..(25): SEQ ID NO: 2773; WAN024AXP; Start 974; Stop 998
atcaagaagaagcagtacagaatga

SEQ ID NO: 336362 - DNA, 25 bp, Artificial
  probe
  misc_feature (1)..(25): SEQ ID NO: 2773; WAN024AXP; Start 976; Stop 1000
caagaagaagcagtacagaatgata

SEQ ID NO: 336363 - DNA, 25 bp, Artificial
  probe
  misc_feature (1)..(25): SEQ ID NO: 2773; WAN024AXP; Start 973; Stop 997
tatcaagaagaagcagtacagaatg

SEQ ID NO: 336364 - DNA, 25 bp, Artificial
  probe
  misc_feature (1)..(25): SEQ ID NO: 2773; WAN024AXP; Start 978; Stop 1002
agaagaagcagtacagaatgataag

SEQ ID NO: 336365 - DNA, 25 bp, Artificial
  probe
  misc_feature (1)..(25): SEQ ID NO: 2773; WAN024AXP; Start 982; Stop 1006
gaagcagtacagaatgataaggtaa

SEQ ID NO: 336366 - DNA, 25 bp, Artificial
  probe
  misc_feature (1)..(25): SEQ ID NO: 2773; WAN024AXP; Start 977; Stop 1001
aagaagaagcagtacagaatgataa

SEQ ID NO: 336367 - DNA, 25 bp, Artificial
  probe
  misc_feature (1)..(25): SEQ ID NO: 2773; WAN024AXP; Start 971; Stop 995
aatatcaagaagaagcagtacagaa

SEQ ID NO: 336368 - DNA, 25 bp, Artificial
  probe
  misc_feature (1)..(25): SEQ ID NO: 2773; WAN024AXP; Start 564; Stop 588
tattccaatcggtggctataatgtc

SEQ ID NO: 336369 - DNA, 25 bp, Artificial
  probe
  misc_feature (1)..(25): SEQ ID NO: 2773; WAN024AXP; Start 972; Stop 996
atatcaagaagaagcagtacagaat

SEQ ID NO: 336370 - DNA, 25 bp, Artificial
  probe
  misc_feature (1)..(25): SEQ ID NO: 2773; WAN024AXP; Start 563; Stop 587
gtattccaatcggtggctataatgt

SEQ ID NO: 336371 - DNA, 25 bp, Artificial
  probe
  misc_feature (1)..(25): SEQ ID NO: 2773; WAN024AXP; Start 984; Stop 1008
agcagtacagaatgataaggtaatt

SEQ ID NO: 336372 - DNA, 25 bp, Artificial
  probe
  misc_feature (1)..(25): SEQ ID NO: 2773; WAN024AXP; Start 983; Stop 1007
aagcagtacagaatgataaggtaat

SEQ ID NO: 336373 - DNA, 25 bp, Artificial
  probe
  misc_feature (1)..(25): SEQ ID NO: 2773; WAN024AXP; Start 562; Stop 586
ggtattccaatcggtggctataatg

SEQ ID NO: 336374 - DNA, 25 bp, Artificial
  probe
  misc_feature (1)..(25): SEQ ID NO: 2773; WAN024AXP; Start 105; Stop 129
cattggtggaaatatctactgtgag

SEQ ID NO: 336375 - DNA, 25 bp, Artificial
  probe
  misc_feature (1)..(25): SEQ ID NO: 2773; WAN024AXP; Start 561; Stop 585
aggtattccaatcggtggctataat

SEQ ID NO: 336376 - DNA, 25 bp, Artificial
  probe
  misc_feature (1)..(25): SEQ ID NO: 2773; WAN024AXP; Start 545; Stop 569
ttaatgaccgttaccaaggtattcc

SEQ ID NO: 336377 - DNA, 25 bp, Artificial
  probe
  misc_feature (1)..(25): SEQ ID NO: 2773; WAN024AXP; Start 539; Stop 563
actactttaatgaccgttaccaagg

SEQ ID NO: 336378 - DNA, 25 bp, Artificial
  probe
  misc_feature (1)..(25): SEQ ID NO: 2773; WAN024AXP; Start 601; Stop 625
atgctgaaagatgttgaagtagaac

SEQ ID NO: 336379 - DNA, 25 bp, Artificial
  probe
  misc_feature (1)..(25): SEQ ID NO: 2773; WAN024AXP; Start 107; Stop 131
ttggtggaaatatctactgtgagaa

SEQ ID NO: 336380 - DNA, 25 bp, Artificial
  probe
  misc_feature (1)..(25): SEQ ID NO: 2773; WAN024AXP; Start 568; Stop 592
ccaatcggtggctataatgtcatta

SEQ ID NO: 336381 - DNA, 25 bp, Artificial
  probe
  misc_feature (1)..(25): SEQ ID NO: 2773; WAN024AXP; Start 727; Stop 751
gagctagaataccgtagtcttcgtt

SEQ ID NO: 336382 - DNA, 25 bp, Artificial
  probe
  misc_feature (1)..(25): SEQ ID NO: 2773; WAN024AXP; Start 108; Stop 132
tggtggaaatatctactgtgagaat

SEQ ID NO: 336383 - DNA, 25 bp, Artificial
  probe
  misc_feature (1)..(25): SEQ ID NO: 2773; WAN024AXP; Start 106; Stop 130
attggtggaaatatctactgtgaga

SEQ ID NO: 336384 - DNA, 25 bp, Artificial
  probe
  misc_feature (1)..(25): SEQ ID NO: 2773; WAN024AXP; Start 780; Stop 804
ttatcaaggaaatgccgttgttaat

SEQ ID NO: 336385 - DNA, 25 bp, Artificial
  probe
  misc_feature (1)..(25): SEQ ID NO: 2773; WAN024AXP; Start 779; Stop 803
attatcaaggaaatgccgttgttaa

SEQ ID NO: 336386 - DNA, 25 bp, Artificial
  probe
  misc_feature (1)..(25): SEQ ID NO: 2773; WAN024AXP; Start 777; Stop 801
aaattatcaaggaaatgccgttgtt

SEQ ID NO: 336387 - DNA, 25 bp, Artificial
  probe
  misc_feature (1)..(25): SEQ ID NO: 2774; WAN024FQC; Start 110; Stop 134
ttgaagtgattgttgttaatgacgg

SEQ ID NO: 336388 - DNA, 25 bp, Artificial
  probe
  misc_feature (1)..(25): SEQ ID NO: 2774; WAN024FQC; Start 113; Stop 137
aagtgattgttgttaatgacggtag

SEQ ID NO: 336389 - DNA, 25 bp, Artificial
  probe
  misc_feature (1)..(25): SEQ ID NO: 2774; WAN024FQC; Start 112; Stop 136
gaagtgattgttgttaatgacggta

SEQ ID NO: 336390 - DNA, 25 bp, Artificial
  probe
  misc_feature (1)..(25): SEQ ID NO: 2774; WAN024FQC; Start 114; Stop 138
agtgattgttgttaatgacggtagt

SEQ ID NO: 336391 - DNA, 25 bp, Artificial
  probe
  misc_feature (1)..(25): SEQ ID NO: 2774; WAN024FQC; Start 115; Stop 139
gtgattgttgttaatgacggtagta

SEQ ID NO: 336392 - DNA, 25 bp, Artificial
  probe
  misc_feature (1)..(25): SEQ ID NO: 2774; WAN024FQC; Start 111; Stop 135
tgaagtgattgttgttaatgacggt

SEQ ID NO: 336393 - DNA, 25 bp, Artificial
  probe
  misc_feature (1)..(25): SEQ ID NO: 2774; WAN024FQC; Start 121; Stop 145
gttgttaatgacggtagtacggata

SEQ ID NO: 336394 - DNA, 25 bp, Artificial
  probe
  misc_feature (1)..(25): SEQ ID NO: 2774; WAN024FQC; Start 117; Stop 141
gattgttgttaatgacggtagtacg

SEQ ID NO: 336395 - DNA, 25 bp, Artificial
  probe
  misc_feature (1)..(25): SEQ ID NO: 2774; WAN024FQC; Start 122; Stop 146
ttgttaatgacggtagtacggataa

SEQ ID NO: 336396 - DNA, 25 bp, Artificial
  probe
  misc_feature (1)..(25): SEQ ID NO: 2774; WAN024FQC; Start 116; Stop 140
tgattgttgttaatgacggtagtac

SEQ ID NO: 336397 - DNA, 25 bp, Artificial
  probe
  misc_feature (1)..(25): SEQ ID NO: 2774; WAN024FQC; Start 779; Stop 803
acttaatcaacaagcaatgtcagtt

SEQ ID NO: 336398 - DNA, 25 bp, Artificial
  probe
  misc_feature (1)..(25): SEQ ID NO: 2774; WAN024FQC; Start 118; Stop 142
attgttgttaatgacggtagtacgg

SEQ ID NO: 336399 - DNA, 25 bp, Artificial
  probe
  misc_feature (1)..(25): SEQ ID NO: 2774; WAN024FQC; Start 134; Stop 158
gtagtacggataactcacttcaagt

SEQ ID NO: 336400 - DNA, 25 bp, Artificial
  probe
  misc_feature (1)..(25): SEQ ID NO: 2774; WAN024FQC; Start 125; Stop 149
ttaatgacggtagtacggataactc

SEQ ID NO: 336401 - DNA, 25 bp, Artificial
  probe
  misc_feature (1)..(25): SEQ ID NO: 2774; WAN024FQC; Start 133; Stop 157
ggtagtacggataactcacttcaag

SEQ ID NO: 336402 - DNA, 25 bp, Artificial
  probe
  misc_feature (1)..(25): SEQ ID NO: 2774; WAN024FQC; Start 778; Stop 802
tacttaatcaacaagcaatgtcagt

SEQ ID NO: 336403 - DNA, 25 bp, Artificial
  probe
  misc_feature (1)..(25): SEQ ID NO: 2774; WAN024FQC; Start 126; Stop 150
taatgacggtagtacggataactca

SEQ ID NO: 336404 - DNA, 25 bp, Artificial
  probe
  misc_feature (1)..(25): SEQ ID NO: 2774; WAN024FQC; Start 773; Stop 797
tgacatacttaatcaacaagcaatg

SEQ ID NO: 336405 - DNA, 25 bp, Artificial
  probe
  misc_feature (1)..(25): SEQ ID NO: 2774; WAN024FQC; Start 120; Stop 144
tgttgttaatgacggtagtacggat

SEQ ID NO: 336406 - DNA, 25 bp, Artificial
  probe
  misc_feature (1)..(25): SEQ ID NO: 2774; WAN024FQC; Start 119; Stop 143
ttgttgttaatgacggtagtacgga

SEQ ID NO: 336407 - DNA, 25 bp, Artificial
  probe
  misc_feature (1)..(25): SEQ ID NO: 2774; WAN024FQC; Start 776; Stop 800
catacttaatcaacaagcaatgtca

SEQ ID NO: 336408 - DNA, 25 bp, Artificial
  probe
  misc_feature (1)..(25): SEQ ID NO: 2774; WAN024FQC; Start 124; Stop 148
gttaatgacggtagtacggataact

SEQ ID NO: 336409 - DNA, 25 bp, Artificial
  probe
  misc_feature (1)..(25): SEQ ID NO: 2774; WAN024FQC; Start 123; Stop 147
tgttaatgacggtagtacggataac

SEQ ID NO: 336410 - DNA, 25 bp, Artificial
  probe
  misc_feature (1)..(25): SEQ ID NO: 2774; WAN024FQC; Start 777; Stop 801
atacttaatcaacaagcaatgtcag

SEQ ID NO: 336411 - DNA, 25 bp, Artificial
  probe
  misc_feature (1)..(25): SEQ ID NO: 2774; WAN024FQC; Start 132; Stop 156
cggtagtacggataactcacttcaa

SEQ ID NO: 336412 - DNA, 25 bp, Artificial
  probe
  misc_feature (1)..(25): SEQ ID NO: 2774; WAN024FQC; Start 127; Stop 151
aatgacggtagtacggataactcac

SEQ ID NO: 336413 - DNA, 25 bp, Artificial
  probe
  misc_feature (1)..(25): SEQ ID NO: 2774; WAN024FQC; Start 109; Stop 133
tttgaagtgattgttgttaatgacg

SEQ ID NO: 336414 - DNA, 25 bp, Artificial
  probe
  misc_feature (1)..(25): SEQ ID NO: 2774; WAN024FQC; Start 130; Stop 154
gacggtagtacggataactcacttc

SEQ ID NO: 336415 - DNA, 25 bp, Artificial
  probe
  misc_feature (1)..(25): SEQ ID NO: 2774; WAN024FQC; Start 128; Stop 152
atgacggtagtacggataactcact

SEQ ID NO: 336416 - DNA, 25 bp, Artificial
  probe
  misc_feature (1)..(25): SEQ ID NO: 2774; WAN024FQC; Start 827; Stop 851
aggaagcgagccgattatttagtta

SEQ ID NO: 336417 - DNA, 25 bp, Artificial
  probe
  misc_feature (1)..(25): SEQ ID NO: 2774; WAN024FQC; Start 131; Stop 155
acggtagtacggataactcacttca

SEQ ID NO: 336418 - DNA, 25 bp, Artificial
  probe
  misc_feature (1)..(25): SEQ ID NO: 2774; WAN024FQC; Start 129; Stop 153
tgacggtagtacggataactcactt

SEQ ID NO: 336419 - DNA, 25 bp, Artificial
  probe
  misc_feature (1)..(25): SEQ ID NO: 2774; WAN024FQC; Start 136; Stop 160
agtacggataactcacttcaagttg

SEQ ID NO: 336420 - DNA, 25 bp, Artificial
  probe
  misc_feature (1)..(25): SEQ ID NO: 2775; WAN024FOQ; Start 485; Stop 509
ttgctaagactgttaccattgttca

SEQ ID NO: 336421 - DNA, 25 bp, Artificial
  probe
  misc_feature (1)..(25): SEQ ID NO: 2775; WAN024FOQ; Start 486; Stop 510
tgctaagactgttaccattgttcac

SEQ ID NO: 336422 - DNA, 25 bp, Artificial
  probe
  misc_feature (1)..(25): SEQ ID NO: 2775; WAN024FOQ; Start 103; Stop 127
ccaggtggtcagatgaataatacat

SEQ ID NO: 336423 - DNA, 25 bp, Artificial
  probe
  misc_feature (1)..(25): SEQ ID NO: 2775; WAN024FOQ; Start 488; Stop 512
ctaagactgttaccattgttcaccg

SEQ ID NO: 336424 - DNA, 25 bp, Artificial
  probe
  misc_feature (1)..(25): SEQ ID NO: 2775; WAN024FOQ; Start 427; Stop 451
ttattggtagttggtggtggagatt

SEQ ID NO: 336425 - DNA, 25 bp, Artificial
  probe
  misc_feature (1)..(25): SEQ ID NO: 2775; WAN024FOQ; Start 158; Stop 182
atattagtggacctgaattggctga

SEQ ID NO: 336426 - DNA, 25 bp, Artificial
  probe
  misc_feature (1)..(25): SEQ ID NO: 2775; WAN024FOQ; Start 487; Stop 511
gctaagactgttaccattgttcacc

SEQ ID NO: 336427 - DNA, 25 bp, Artificial
  probe
  misc_feature (1)..(25): SEQ ID NO: 2775; WAN024FOQ; Start 159; Stop 183
tattagtggacctgaattggctgaa

SEQ ID NO: 336428 - DNA, 25 bp, Artificial
  probe
  misc_feature (1)..(25): SEQ ID NO: 2775; WAN024FOQ; Start 428; Stop 452
tattggtagttggtggtggagattc

SEQ ID NO: 336429 - DNA, 25 bp, Artificial
  probe
  misc_feature (1)..(25): SEQ ID NO: 2775; WAN024FOQ; Start 729; Stop 753
agaattgaatatccaagatcaggca

SEQ ID NO: 336430 - DNA, 25 bp, Artificial
  probe
  misc_feature (1)..(25): SEQ ID NO: 2775; WAN024FOQ; Start 730; Stop 754
gaattgaatatccaagatcaggcag

SEQ ID NO: 336431 - DNA, 25 bp, Artificial
  probe
  misc_feature (1)..(25): SEQ ID NO: 2775; WAN024FOQ; Start 489; Stop 513
taagactgttaccattgttcaccgt

SEQ ID NO: 336432 - DNA, 25 bp, Artificial
  probe
  misc_feature (1)..(25): SEQ ID NO: 2775; WAN024FOQ; Start 728; Stop 752
aagaattgaatatccaagatcaggc

SEQ ID NO: 336433 - DNA, 25 bp, Artificial
  probe
  misc_feature (1)..(25): SEQ ID NO: 2775; WAN024FOQ; Start 7; Stop 31
gatactattattatcggtgctggac

SEQ ID NO: 336434 - DNA, 25 bp, Artificial
  probe
  misc_feature (1)..(25): SEQ ID NO: 2775; WAN024FOQ; Start 731; Stop 755
aattgaatatccaagatcaggcagg

SEQ ID NO: 336435 - DNA, 25 bp, Artificial
  probe
  misc_feature (1)..(25): SEQ ID NO: 2775; WAN024FOQ; Start 157; Stop 181
aatattagtggacctgaattggctg

SEQ ID NO: 336436 - DNA, 25 bp, Artificial
  probe
  misc_feature (1)..(25): SEQ ID NO: 2775; WAN024FOQ; Start 102; Stop 126
gccaggtggtcagatgaataataca

SEQ ID NO: 336437 - DNA, 25 bp, Artificial
  probe
  misc_feature (1)..(25): SEQ ID NO: 2775; WAN024FOQ; Start 101; Stop 125
tgccaggtggtcagatgaataatac

SEQ ID NO: 336438 - DNA, 25 bp, Artificial
  probe
  misc_feature (1)..(25): SEQ ID NO: 2775; WAN024FOQ; Start 8; Stop 32
atactattattatcggtgctggacc

SEQ ID NO: 336439 - DNA, 25 bp, Artificial
  probe
  misc_feature (1)..(25): SEQ ID NO: 2775; WAN024FOQ; Start 9; Stop 33
tactattattatcggtgctggacct

SEQ ID NO: 336440 - DNA, 25 bp, Artificial
  probe
  misc_feature (1)..(25): SEQ ID NO: 2775; WAN024FOQ; Start 484; Stop 508
tttgctaagactgttaccattgttc

SEQ ID NO: 336441 - DNA, 25 bp, Artificial
  probe
  misc_feature (1)..(25): SEQ ID NO: 2775; WAN024FOQ; Start 675; Stop 699
cttcggtggtgtctttatctatgtt

SEQ ID NO: 336442 - DNA, 25 bp, Artificial
  probe
  misc_feature (1)..(25): SEQ ID NO: 2775; WAN024FOQ; Start 676; Stop 700
ttcggtggtgtctttatctatgttg

SEQ ID NO: 336443 - DNA, 25 bp, Artificial
  probe
  misc_feature (1)..(25): SEQ ID NO: 2775; WAN024FOQ; Start 422; Stop 446
aagatttattggtagttggtggtgg

SEQ ID NO: 336444 - DNA, 25 bp, Artificial
  probe
  misc_feature (1)..(25): SEQ ID NO: 2775; WAN024FOQ; Start 308; Stop 332
ttatcgtagcaactggttctaaaca

SEQ ID NO: 336445 - DNA, 25 bp, Artificial
  probe
  misc_feature (1)..(25): SEQ ID NO: 2775; WAN024FOQ; Start 307; Stop 331
gttatcgtagcaactggttctaaac

SEQ ID NO: 336446 - DNA, 25 bp, Artificial
  probe
  misc_feature (1)..(25): SEQ ID NO: 2775; WAN024FOQ; Start 100; Stop 124
ctgccaggtggtcagatgaataata

SEQ ID NO: 336447 - DNA, 25 bp, Artificial
  probe
  misc_feature (1)..(25): SEQ ID NO: 2775; WAN024FOQ; Start 424; Stop 448
gatttattggtagttggtggtggag

SEQ ID NO: 336448 - DNA, 25 bp, Artificial
  probe
  misc_feature (1)..(25): SEQ ID NO: 2775; WAN024FOQ; Start 421; Stop 445
caagatttattggtagttggtggtg

SEQ ID NO: 336449 - DNA, 25 bp, Artificial
  probe
  misc_feature (1)..(25): SEQ ID NO: 2775; WAN024FOQ; Start 309; Stop 333
tatcgtagcaactggttctaaacac

SEQ ID NO: 336450 - DNA, 25 bp, Artificial
  probe
  misc_feature (1)..(25): SEQ ID NO: 2775; WAN024FOQ; Start 270; Stop 294
agtgatgactgatgaccaaacatat

SEQ ID NO: 336451 - DNA, 25 bp, Artificial
  probe
  misc_feature (1)..(25): SEQ ID NO: 2775; WAN024FOQ; Start 264; Stop 288
taagaaagtgatgactgatgaccaa

SEQ ID NO: 336452 - DNA, 25 bp, Artificial
  probe
  misc_feature (1)..(25): SEQ ID NO: 2775; WAN024FOQ; Start 263; Stop 287
ttaagaaagtgatgactgatgacca

SEQ ID NO: 336453 - DNA, 25 bp, Artificial
  probe
  misc_feature (1)..(25): SEQ ID NO: 2776; WAN024AXM; Start 883; Stop 907
attactcgtgaatatccagcagatt

SEQ ID NO: 336454 - DNA, 25 bp, Artificial
  probe
  misc_feature (1)..(25): SEQ ID NO: 2776; WAN024AXM; Start 1068; Stop 1092
attggatgtggtagaagaagaacta

SEQ ID NO: 336455 - DNA, 25 bp, Artificial
  probe
  misc_feature (1)..(25): SEQ ID NO: 2776; WAN024AXM; Start 871; Stop 895
gacaagaccgttattactcgtgaat

SEQ ID NO: 336456 - DNA, 25 bp, Artificial
  probe
  misc_feature (1)..(25): SEQ ID NO: 2776; WAN024AXM; Start 884; Stop 908
ttactcgtgaatatccagcagattg

SEQ ID NO: 336457 - DNA, 25 bp, Artificial
  probe
  misc_feature (1)..(25): SEQ ID NO: 2776; WAN024AXM; Start 1067; Stop 1091
cattggatgtggtagaagaagaact

SEQ ID NO: 336458 - DNA, 25 bp, Artificial
  probe
  misc_feature (1)..(25): SEQ ID NO: 2776; WAN024AXM; Start 875; Stop 899
agaccgttattactcgtgaatatcc

SEQ ID NO: 336459 - DNA, 25 bp, Artificial
  probe
  misc_feature (1)..(25): SEQ ID NO: 2776; WAN024AXM; Start 872; Stop 896
acaagaccgttattactcgtgaata

SEQ ID NO: 336460 - DNA, 25 bp, Artificial
  probe
  misc_feature (1)..(25): SEQ ID NO: 2776; WAN024AXM; Start 877; Stop 901
accgttattactcgtgaatatccag

SEQ ID NO: 336461 - DNA, 25 bp, Artificial
  probe
  misc_feature (1)..(25): SEQ ID NO: 2776; WAN024AXM; Start 876; Stop 900
gaccgttattactcgtgaatatcca

SEQ ID NO: 336462 - DNA, 25 bp, Artificial
  probe
  misc_feature (1)..(25): SEQ ID NO: 2776; WAN024AXM; Start 881; Stop 905
ttattactcgtgaatatccagcaga

SEQ ID NO: 336463 - DNA, 25 bp, Artificial
  probe
  misc_feature (1)..(25): SEQ ID NO: 2776; WAN024AXM; Start 880; Stop 904
gttattactcgtgaatatccagcag

SEQ ID NO: 336464 - DNA, 25 bp, Artificial
  probe
  misc_feature (1)..(25): SEQ ID NO: 2776; WAN024AXM; Start 1069; Stop 1093
ttggatgtggtagaagaagaactag

SEQ ID NO: 336465 - DNA, 25 bp, Artificial
  probe
  misc_feature (1)..(25): SEQ ID NO: 2776; WAN024AXM; Start 392; Stop 416
tagaggaacaagccattaagttgat

SEQ ID NO: 336466 - DNA, 25 bp, Artificial
  probe
  misc_feature (1)..(25): SEQ ID NO: 2776; WAN024AXM; Start 882; Stop 906
tattactcgtgaatatccagcagat

SEQ ID NO: 336467 - DNA, 25 bp, Artificial
  probe
  misc_feature (1)..(25): SEQ ID NO: 2776; WAN024AXM; Start 879; Stop 903
cgttattactcgtgaatatccagca

SEQ ID NO: 336468 - DNA, 25 bp, Artificial
  probe
  misc_feature (1)..(25): SEQ ID NO: 2776; WAN024AXM; Start 394; Stop 418
gaggaacaagccattaagttgattg

SEQ ID NO: 336469 - DNA, 25 bp, Artificial
  probe
  misc_feature (1)..(25): SEQ ID NO: 2776; WAN024AXM; Start 393; Stop 417
agaggaacaagccattaagttgatt

SEQ ID NO: 336470 - DNA, 25 bp, Artificial
  probe
  misc_feature (1)..(25): SEQ ID NO: 2776; WAN024AXM; Start 958; Stop 982
gcaatctatgaacagtatctagcag

SEQ ID NO: 336471 - DNA, 25 bp, Artificial
  probe
  misc_feature (1)..(25): SEQ ID NO: 2776; WAN024AXM; Start 406; Stop 430
attaagttgattggtacggatgtct

SEQ ID NO: 336472 - DNA, 25 bp, Artificial
  probe
  misc_feature (1)..(25): SEQ ID NO: 2776; WAN024AXM; Start 962; Stop 986
tctatgaacagtatctagcagaagc

SEQ ID NO: 336473 - DNA, 25 bp, Artificial
  probe
  misc_feature (1)..(25): SEQ ID NO: 2776; WAN024AXM; Start 873; Stop 897
caagaccgttattactcgtgaatat

SEQ ID NO: 336474 - DNA, 25 bp, Artificial
  probe
  misc_feature (1)..(25): SEQ ID NO: 2776; WAN024AXM; Start 407; Stop 431
ttaagttgattggtacggatgtcta

SEQ ID NO: 336475 - DNA, 25 bp, Artificial
  probe
  misc_feature (1)..(25): SEQ ID NO: 2776; WAN024AXM; Start 644; Stop 668
ccaatcgtgaagagttagaagcatc

SEQ ID NO: 336476 - DNA, 25 bp, Artificial
  probe
  misc_feature (1)..(25): SEQ ID NO: 2776; WAN024AXM; Start 409; Stop 433
aagttgattggtacggatgtctatg

SEQ ID NO: 336477 - DNA, 25 bp, Artificial
  probe
  misc_feature (1)..(25): SEQ ID NO: 2776; WAN024AXM; Start 963; Stop 987
ctatgaacagtatctagcagaagcc

SEQ ID NO: 336478 - DNA, 25 bp, Artificial
  probe
  misc_feature (1)..(25): SEQ ID NO: 2776; WAN024AXM; Start 1070; Stop 1094
tggatgtggtagaagaagaactagg

SEQ ID NO: 336479 - DNA, 25 bp, Artificial
  probe
  misc_feature (1)..(25): SEQ ID NO: 2776; WAN024AXM; Start 646; Stop 670
aatcgtgaagagttagaagcatcag

SEQ ID NO: 336480 - DNA, 25 bp, Artificial
  probe
  misc_feature (1)..(25): SEQ ID NO: 2776; WAN024AXM; Start 411; Stop 435
gttgattggtacggatgtctatgaa

SEQ ID NO: 336481 - DNA, 25 bp, Artificial
  probe
  misc_feature (1)..(25): SEQ ID NO: 2776; WAN024AXM; Start 408; Stop 432
taagttgattggtacggatgtctat

SEQ ID NO: 336482 - DNA, 25 bp, Artificial
  probe
  misc_feature (1)..(25): SEQ ID NO: 2776; WAN024AXM; Start 878; Stop 902
ccgttattactcgtgaatatccagc

SEQ ID NO: 336483 - DNA, 25 bp, Artificial
  probe
  misc_feature (1)..(25): SEQ ID NO: 2776; WAN024AXM; Start 874; Stop 898
aagaccgttattactcgtgaatatc

SEQ ID NO: 336484 - DNA, 25 bp, Artificial
  probe
  misc_feature (1)..(25): SEQ ID NO: 2776; WAN024AXM; Start 405; Stop 429
cattaagttgattggtacggatgtc

SEQ ID NO: 336485 - DNA, 25 bp, Artificial
  probe
  misc_feature (1)..(25): SEQ ID NO: 2776; WAN024AXM; Start 391; Stop 415
ctagaggaacaagccattaagttga

SEQ ID NO: 336486 - DNA, 25 bp, Artificial
  probe
  misc_feature (1)..(25): SEQ ID NO: 2777; WAN024AXS; Start 145; Stop 169
ggtgctcatatcttccatacttctg

SEQ ID NO: 336487 - DNA, 25 bp, Artificial
  probe
  misc_feature (1)..(25): SEQ ID NO: 2777; WAN024AXS; Start 127; Stop 151
attcaagttcatcaatatggtgctc

SEQ ID NO: 336488 - DNA, 25 bp, Artificial
  probe
  misc_feature (1)..(25): SEQ ID NO: 2777; WAN024AXS; Start 129; Stop 153
tcaagttcatcaatatggtgctcat

SEQ ID NO: 336489 - DNA, 25 bp, Artificial
  probe
  misc_feature (1)..(25): SEQ ID NO: 2777; WAN024AXS; Start 209; Stop 233
ttaaccgttataccaattctcctgt

SEQ ID NO: 336490 - DNA, 25 bp, Artificial
  probe
  misc_feature (1)..(25): SEQ ID NO: 2777; WAN024AXS; Start 128; Stop 152
ttcaagttcatcaatatggtgctca

SEQ ID NO: 336491 - DNA, 25 bp, Artificial
  probe
  misc_feature (1)..(25): SEQ ID NO: 2777; WAN024AXS; Start 126; Stop 150
aattcaagttcatcaatatggtgct

SEQ ID NO: 336492 - DNA, 25 bp, Artificial
  probe
  misc_feature (1)..(25): SEQ ID NO: 2777; WAN024AXS; Start 210; Stop 234
taaccgttataccaattctcctgtt

SEQ ID NO: 336493 - DNA, 25 bp, Artificial
  probe
  misc_feature (1)..(25): SEQ ID NO: 2777; WAN024AXS; Start 146; Stop 170
gtgctcatatcttccatacttctga

SEQ ID NO: 336494 - DNA, 25 bp, Artificial
  probe
  misc_feature (1)..(25): SEQ ID NO: 2777; WAN024AXS; Start 104; Stop 128
tctatactcgtgaagaggaaggaat

SEQ ID NO: 336495 - DNA, 25 bp, Artificial
  probe
  misc_feature (1)..(25): SEQ ID NO: 2777; WAN024AXS; Start 103; Stop 127
atctatactcgtgaagaggaaggaa

SEQ ID NO: 336496 - DNA, 25 bp, Artificial
  probe
  misc_feature (1)..(25): SEQ ID NO: 2777; WAN024AXS; Start 102; Stop 126
tatctatactcgtgaagaggaagga

SEQ ID NO: 336497 - DNA, 25 bp, Artificial
  probe
  misc_feature (1)..(25): SEQ ID NO: 2777; WAN024AXS; Start 147; Stop 171
tgctcatatcttccatacttctgat

SEQ ID NO: 336498 - DNA, 25 bp, Artificial
  probe
  misc_feature (1)..(25): SEQ ID NO: 2777; WAN024AXS; Start 211; Stop 235
aaccgttataccaattctcctgttg

SEQ ID NO: 336499 - DNA, 25 bp, Artificial
  probe
  misc_feature (1)..(25): SEQ ID NO: 2777; WAN024AXS; Start 105; Stop 129
ctatactcgtgaagaggaaggaatt

SEQ ID NO: 336500 - DNA, 25 bp, Artificial
  probe
  misc_feature (1)..(25): SEQ ID NO: 2777; WAN024AXS; Start 711; Stop 735
tgagttagaatactgtagtcttcgt

SEQ ID NO: 336501 - DNA, 25 bp, Artificial
  probe
  misc_feature (1)..(25): SEQ ID NO: 2777; WAN024AXS; Start 710; Stop 734
gtgagttagaatactgtagtcttcg

SEQ ID NO: 336502 - DNA, 25 bp, Artificial
  probe
  misc_feature (1)..(25): SEQ ID NO: 2777; WAN024AXS; Start 708; Stop 732
tggtgagttagaatactgtagtctt

SEQ ID NO: 336503 - DNA, 25 bp, Artificial
  probe
  misc_feature (1)..(25): SEQ ID NO: 2777; WAN024AXS; Start 101; Stop 125
atatctatactcgtgaagaggaagg

SEQ ID NO: 336504 - DNA, 25 bp, Artificial
  probe
  misc_feature (1)..(25): SEQ ID NO: 2777; WAN024AXS; Start 707; Stop 731
atggtgagttagaatactgtagtct

SEQ ID NO: 336505 - DNA, 25 bp, Artificial
  probe
  misc_feature (1)..(25): SEQ ID NO: 2777; WAN024AXS; Start 709; Stop 733
ggtgagttagaatactgtagtcttc

SEQ ID NO: 336506 - DNA, 25 bp, Artificial
  probe
  misc_feature (1)..(25): SEQ ID NO: 2777; WAN024AXS; Start 130; Stop 154
caagttcatcaatatggtgctcata

SEQ ID NO: 336507 - DNA, 25 bp, Artificial
  probe
  misc_feature (1)..(25): SEQ ID NO: 2777; WAN024AXS; Start 712; Stop 736
gagttagaatactgtagtcttcgtt

SEQ ID NO: 336508 - DNA, 25 bp, Artificial
  probe
  misc_feature (1)..(25): SEQ ID NO: 2777; WAN024AXS; Start 705; Stop 729
acatggtgagttagaatactgtagt

SEQ ID NO: 336509 - DNA, 25 bp, Artificial
  probe
  misc_feature (1)..(25): SEQ ID NO: 2777; WAN024AXS; Start 706; Stop 730
catggtgagttagaatactgtagtc

SEQ ID NO: 336510 - DNA, 25 bp, Artificial
  probe
  misc_feature (1)..(25): SEQ ID NO: 2777; WAN024AXS; Start 144; Stop 168
tggtgctcatatcttccatacttct

SEQ ID NO: 336511 - DNA, 25 bp, Artificial
  probe
  misc_feature (1)..(25): SEQ ID NO: 2777; WAN024AXS; Start 807; Stop 831
cccatatactcgcattattgaacac

SEQ ID NO: 336512 - DNA, 25 bp, Artificial
  probe
  misc_feature (1)..(25): SEQ ID NO: 2777; WAN024AXS; Start 97; Stop 121
ggtaatatctatactcgtgaagagg

SEQ ID NO: 336513 - DNA, 25 bp, Artificial
  probe
  misc_feature (1)..(25): SEQ ID NO: 2777; WAN024AXS; Start 94; Stop 118
gcgggtaatatctatactcgtgaag

SEQ ID NO: 336514 - DNA, 25 bp, Artificial
  probe
  misc_feature (1)..(25): SEQ ID NO: 2777; WAN024AXS; Start 326; Stop 350
ctaagattgatgaacaacgtgctat

SEQ ID NO: 336515 - DNA, 25 bp, Artificial
  probe
  misc_feature (1)..(25): SEQ ID NO: 2777; WAN024AXS; Start 202; Stop 226
gcagagtttaaccgttataccaatt

SEQ ID NO: 336516 - DNA, 25 bp, Artificial
  probe
  misc_feature (1)..(25): SEQ ID NO: 2777; WAN024AXS; Start 155; Stop 179
tcttccatacttctgataaggagat

SEQ ID NO: 336517 - DNA, 25 bp, Artificial
  probe
  misc_feature (1)..(25): SEQ ID NO: 2777; WAN024AXS; Start 154; Stop 178
atcttccatacttctgataaggaga

SEQ ID NO: 336518 - DNA, 25 bp, Artificial
  probe
  misc_feature (1)..(25): SEQ ID NO: 2777; WAN024AXS; Start 327; Stop 351
taagattgatgaacaacgtgctatt

SEQ ID NO: 336519 - DNA, 25 bp, Artificial
  probe
  misc_feature (1)..(25): SEQ ID NO: 2778; WAN024AXR; Start 926; Stop 950
cttactatccgatcaacgatgagaa

SEQ ID NO: 336520 - DNA, 25 bp, Artificial
  probe
  misc_feature (1)..(25): SEQ ID NO: 2778; WAN024AXR; Start 925; Stop 949
ccttactatccgatcaacgatgaga

SEQ ID NO: 336521 - DNA, 25 bp, Artificial
  probe
  misc_feature (1)..(25): SEQ ID NO: 2778; WAN024AXR; Start 362; Stop 386
ctgatatgaaggatgttgagccgaa

SEQ ID NO: 336522 - DNA, 25 bp, Artificial
  probe
  misc_feature (1)..(25): SEQ ID NO: 2778; WAN024AXR; Start 160; Stop 184
ggtgcccatatctttcatacttcta

SEQ ID NO: 336523 - DNA, 25 bp, Artificial
  probe
  misc_feature (1)..(25): SEQ ID NO: 2778; WAN024AXR; Start 1076; Stop 1100
ttgtggagaaagagtttggatatga

SEQ ID NO: 336524 - DNA, 25 bp, Artificial
  probe
  misc_feature (1)..(25): SEQ ID NO: 2778; WAN024AXR; Start 1075; Stop 1099
gttgtggagaaagagtttggatatg

SEQ ID NO: 336525 - DNA, 25 bp, Artificial
  probe
  misc_feature (1)..(25): SEQ ID NO: 2778; WAN024AXR; Start 1078; Stop 1102
gtggagaaagagtttggatatgaca

SEQ ID NO: 336526 - DNA, 25 bp, Artificial
  probe
  misc_feature (1)..(25): SEQ ID NO: 2778; WAN024AXR; Start 1077; Stop 1101
tgtggagaaagagtttggatatgac

SEQ ID NO: 336527 - DNA, 25 bp, Artificial
  probe
  misc_feature (1)..(25): SEQ ID NO: 2778; WAN024AXR; Start 1074; Stop 1098
ggttgtggagaaagagtttggatat

SEQ ID NO: 336528 - DNA, 25 bp, Artificial
  probe
  misc_feature (1)..(25): SEQ ID NO: 2778; WAN024AXR; Start 105; Stop 129
cattggtgggaatatctactgtgag

SEQ ID NO: 336529 - DNA, 25 bp, Artificial
  probe
  misc_feature (1)..(25): SEQ ID NO: 2778; WAN024AXR; Start 1079; Stop 1103
tggagaaagagtttggatatgacaa

SEQ ID NO: 336530 - DNA, 25 bp, Artificial
  probe
  misc_feature (1)..(25): SEQ ID NO: 2778; WAN024AXR; Start 108; Stop 132
tggtgggaatatctactgtgagaat

SEQ ID NO: 336531 - DNA, 25 bp, Artificial
  probe
  misc_feature (1)..(25): SEQ ID NO: 2778; WAN024AXR; Start 106; Stop 130
attggtgggaatatctactgtgaga

SEQ ID NO: 336532 - DNA, 25 bp, Artificial
  probe
  misc_feature (1)..(25): SEQ ID NO: 2778; WAN024AXR; Start 107; Stop 131
ttggtgggaatatctactgtgagaa

SEQ ID NO: 336533 - DNA, 25 bp, Artificial
  probe
  misc_feature (1)..(25): SEQ ID NO: 2778; WAN024AXR; Start 1073; Stop 1097
aggttgtggagaaagagtttggata

SEQ ID NO: 336534 - DNA, 25 bp, Artificial
  probe
  misc_feature (1)..(25): SEQ ID NO: 2778; WAN024AXR; Start 161; Stop 185
gtgcccatatctttcatacttctaa

SEQ ID NO: 336535 - DNA, 25 bp, Artificial
  probe
  misc_feature (1)..(25): SEQ ID NO: 2778; WAN024AXR; Start 322; Stop 346
actcctcaagaagtcaaagataaga

SEQ ID NO: 336536 - DNA, 25 bp, Artificial
  probe
  misc_feature (1)..(25): SEQ ID NO: 2778; WAN024AXR; Start 922; Stop 946
gagccttactatccgatcaacgatg

SEQ ID NO: 336537 - DNA, 25 bp, Artificial
  probe
  misc_feature (1)..(25): SEQ ID NO: 2778; WAN024AXR; Start 323; Stop 347
ctcctcaagaagtcaaagataagat

SEQ ID NO: 336538 - DNA, 25 bp, Artificial
  probe
  misc_feature (1)..(25): SEQ ID NO: 2778; WAN024AXR; Start 927; Stop 951
ttactatccgatcaacgatgagaaa

SEQ ID NO: 336539 - DNA, 25 bp, Artificial
  probe
  misc_feature (1)..(25): SEQ ID NO: 2778; WAN024AXR; Start 1069; Stop 1093
cttgaggttgtggagaaagagtttg

SEQ ID NO: 336540 - DNA, 25 bp, Artificial
  probe
  misc_feature (1)..(25): SEQ ID NO: 2778; WAN024AXR; Start 321; Stop 345
aactcctcaagaagtcaaagataag

SEQ ID NO: 336541 - DNA, 25 bp, Artificial
  probe
  misc_feature (1)..(25): SEQ ID NO: 2778; WAN024AXR; Start 924; Stop 948
gccttactatccgatcaacgatgag

SEQ ID NO: 336542 - DNA, 25 bp, Artificial
  probe
  misc_feature (1)..(25): SEQ ID NO: 2778; WAN024AXR; Start 104; Stop 128
acattggtgggaatatctactgtga

SEQ ID NO: 336543 - DNA, 25 bp, Artificial
  probe
  misc_feature (1)..(25): SEQ ID NO: 2778; WAN024AXR; Start 363; Stop 387
tgatatgaaggatgttgagccgaaa

SEQ ID NO: 336544 - DNA, 25 bp, Artificial
  probe
  misc_feature (1)..(25): SEQ ID NO: 2778; WAN024AXR; Start 324; Stop 348
tcctcaagaagtcaaagataagatt

SEQ ID NO: 336545 - DNA, 25 bp, Artificial
  probe
  misc_feature (1)..(25): SEQ ID NO: 2778; WAN024AXR; Start 320; Stop 344
aaactcctcaagaagtcaaagataa

SEQ ID NO: 336546 - DNA, 25 bp, Artificial
  probe
  misc_feature (1)..(25): SEQ ID NO: 2778; WAN024AXR; Start 162; Stop 186
tgcccatatctttcatacttctaat

SEQ ID NO: 336547 - DNA, 25 bp, Artificial
  probe
  misc_feature (1)..(25): SEQ ID NO: 2778; WAN024AXR; Start 828; Stop 852
tactcgtattatcgaacacaagcat

SEQ ID NO: 336548 - DNA, 25 bp, Artificial
  probe
  misc_feature (1)..(25): SEQ ID NO: 2778; WAN024AXR; Start 827; Stop 851
atactcgtattatcgaacacaagca

SEQ ID NO: 336549 - DNA, 25 bp, Artificial
  probe
  misc_feature (1)..(25): SEQ ID NO: 2778; WAN024AXR; Start 923; Stop 947
agccttactatccgatcaacgatga

SEQ ID NO: 336550 - DNA, 25 bp, Artificial
  probe
  misc_feature (1)..(25): SEQ ID NO: 2778; WAN024AXR; Start 1072; Stop 1096
gaggttgtggagaaagagtttggat

SEQ ID NO: 336551 - DNA, 25 bp, Artificial
  probe
  misc_feature (1)..(25): SEQ ID NO: 2778; WAN024AXR; Start 211; Stop 235
caatttgctgaatttaacaactacg

SEQ ID NO: 336552 - DNA, 25 bp, Artificial
  probe
  misc_feature (1)..(25): SEQ ID NO: 2779; WAN024F53; Start 105; Stop 129
ctattcaggtcaggttaatcaggag

SEQ ID NO: 336553 - DNA, 25 bp, Artificial
  probe
  misc_feature (1)..(25): SEQ ID NO: 2779; WAN024F53; Start 106; Stop 130
tattcaggtcaggttaatcaggagg

SEQ ID NO: 336554 - DNA, 25 bp, Artificial
  probe
  misc_feature (1)..(25): SEQ ID NO: 2779; WAN024F53; Start 100; Stop 124
tatgcctattcaggtcaggttaatc

SEQ ID NO: 336555 - DNA, 25 bp, Artificial
  probe
  misc_feature (1)..(25): SEQ ID NO: 2779; WAN024F53; Start 98; Stop 122
cttatgcctattcaggtcaggttaa

SEQ ID NO: 336556 - DNA, 25 bp, Artificial
  probe
  misc_feature (1)..(25): SEQ ID NO: 2779; WAN024F53; Start 99; Stop 123
ttatgcctattcaggtcaggttaat

SEQ ID NO: 336557 - DNA, 25 bp, Artificial
  probe
  misc_feature (1)..(25): SEQ ID NO: 2779; WAN024F53; Start 93; Stop 117
caatccttatgcctattcaggtcag

SEQ ID NO: 336558 - DNA, 25 bp, Artificial
  probe
  misc_feature (1)..(25): SEQ ID NO: 2779; WAN024F53; Start 260; Stop 284
ctattatcgctgctgatgacaatgc

SEQ ID NO: 336559 - DNA, 25 bp, Artificial
  probe
  misc_feature (1)..(25): SEQ ID NO: 2779; WAN024F53; Start 259; Stop 283
gctattatcgctgctgatgacaatg

SEQ ID NO: 336560 - DNA, 25 bp, Artificial
  probe
  misc_feature (1)..(25): SEQ ID NO: 2779; WAN024F53; Start 104; Stop 128
cctattcaggtcaggttaatcagga

SEQ ID NO: 336561 - DNA, 25 bp, Artificial
  probe
  misc_feature (1)..(25): SEQ ID NO: 2779; WAN024F53; Start 451; Stop 475
caagaattggaagaagctatggaag

SEQ ID NO: 336562 - DNA, 25 bp, Artificial
  probe
  misc_feature (1)..(25): SEQ ID NO: 2779; WAN024F53; Start 101; Stop 125
atgcctattcaggtcaggttaatca

SEQ ID NO: 336563 - DNA, 25 bp, Artificial
  probe
  misc_feature (1)..(25): SEQ ID NO: 2779; WAN024F53; Start 97; Stop 121
ccttatgcctattcaggtcaggtta

SEQ ID NO: 336564 - DNA, 25 bp, Artificial
  probe
  misc_feature (1)..(25): SEQ ID NO: 2779; WAN024F53; Start 261; Stop 285
tattatcgctgctgatgacaatgct

SEQ ID NO: 336565 - DNA, 25 bp, Artificial
  probe
  misc_feature (1)..(25): SEQ ID NO: 2779; WAN024F53; Start 258; Stop 282
tgctattatcgctgctgatgacaat

SEQ ID NO: 336566 - DNA, 25 bp, Artificial
  probe
  misc_feature (1)..(25): SEQ ID NO: 2779; WAN024F53; Start 66; Stop 90
tggtattggttatatcctgcatgtg

SEQ ID NO: 336567 - DNA, 25 bp, Artificial
  probe
  misc_feature (1)..(25): SEQ ID NO: 2779; WAN024F53; Start 254; Stop 278
ctcttgctattatcgctgctgatga

SEQ ID NO: 336568 - DNA, 25 bp, Artificial
  probe
  misc_feature (1)..(25): SEQ ID NO: 2779; WAN024F53; Start 94; Stop 118
aatccttatgcctattcaggtcagg

SEQ ID NO: 336569 - DNA, 25 bp, Artificial
  probe
  misc_feature (1)..(25): SEQ ID NO: 2779; WAN024F53; Start 65; Stop 89
atggtattggttatatcctgcatgt

SEQ ID NO: 336570 - DNA, 25 bp, Artificial
  probe
  misc_feature (1)..(25): SEQ ID NO: 2779; WAN024F53; Start 102; Stop 126
tgcctattcaggtcaggttaatcag

SEQ ID NO: 336571 - DNA, 25 bp, Artificial
  probe
  misc_feature (1)..(25): SEQ ID NO: 2779; WAN024F53; Start 525; Stop 549
attctttgaaggaacgacagataca

SEQ ID NO: 336572 - DNA, 25 bp, Artificial
  probe
  misc_feature (1)..(25): SEQ ID NO: 2779; WAN024F53; Start 67; Stop 91
ggtattggttatatcctgcatgtgg

SEQ ID NO: 336573 - DNA, 25 bp, Artificial
  probe
  misc_feature (1)..(25): SEQ ID NO: 2779; WAN024F53; Start 64; Stop 88
aatggtattggttatatcctgcatg

SEQ ID NO: 336574 - DNA, 25 bp, Artificial
  probe
  misc_feature (1)..(25): SEQ ID NO: 2779; WAN024F53; Start 255; Stop 279
tcttgctattatcgctgctgatgac

SEQ ID NO: 336575 - DNA, 25 bp, Artificial
  probe
  misc_feature (1)..(25): SEQ ID NO: 2779; WAN024F53; Start 92; Stop 116
ccaatccttatgcctattcaggtca

SEQ ID NO: 336576 - DNA, 25 bp, Artificial
  probe
  misc_feature (1)..(25): SEQ ID NO: 2779; WAN024F53; Start 170; Stop 194
atttgctttatggatttcgctcaga

SEQ ID NO: 336577 - DNA, 25 bp, Artificial
  probe
  misc_feature (1)..(25): SEQ ID NO: 2779; WAN024F53; Start 522; Stop 546
gaaattctttgaaggaacgacagat

SEQ ID NO: 336578 - DNA, 25 bp, Artificial
  probe
  misc_feature (1)..(25): SEQ ID NO: 2779; WAN024F53; Start 526; Stop 550
ttctttgaaggaacgacagatacag

SEQ ID NO: 336579 - DNA, 25 bp, Artificial
  probe
  misc_feature (1)..(25): SEQ ID NO: 2779; WAN024F53; Start 524; Stop 548
aattctttgaaggaacgacagatac

SEQ ID NO: 336580 - DNA, 25 bp, Artificial
  probe
  misc_feature (1)..(25): SEQ ID NO: 2779; WAN024F53; Start 37; Stop 61
actgccaaatacattgttcttgaaa

SEQ ID NO: 336581 - DNA, 25 bp, Artificial
  probe
  misc_feature (1)..(25): SEQ ID NO: 2779; WAN024F53; Start 38; Stop 62
ctgccaaatacattgttcttgaaac

SEQ ID NO: 336582 - DNA, 25 bp, Artificial
  probe
  misc_feature (1)..(25): SEQ ID NO: 2779; WAN024F53; Start 257; Stop 281
ttgctattatcgctgctgatgacaa

SEQ ID NO: 336583 - DNA, 25 bp, Artificial
  probe
  misc_feature (1)..(25): SEQ ID NO: 2779; WAN024F53; Start 169; Stop 193
catttgctttatggatttcgctcag

SEQ ID NO: 336584 - DNA, 25 bp, Artificial
  probe
  misc_feature (1)..(25): SEQ ID NO: 2779; WAN024F53; Start 40; Stop 64
gccaaatacattgttcttgaaacca

SEQ ID NO: 336585 - DNA, 25 bp, Artificial
  probe
  misc_feature (1)..(25): SEQ ID NO: 2780; WAN024FAH; Start 323; Stop 347
aattgtggacctatattcagcagaa

SEQ ID NO: 336586 - DNA, 25 bp, Artificial
  probe
  misc_feature (1)..(25): SEQ ID NO: 2780; WAN024FAH; Start 224; Stop 248
tgcgagaatatctgctgaatcatat

SEQ ID NO: 336587 - DNA, 25 bp, Artificial
  probe
  misc_feature (1)..(25): SEQ ID NO: 2780; WAN024FAH; Start 223; Stop 247
atgcgagaatatctgctgaatcata

SEQ ID NO: 336588 - DNA, 25 bp, Artificial
  probe
  misc_feature (1)..(25): SEQ ID NO: 2780; WAN024FAH; Start 222; Stop 246
aatgcgagaatatctgctgaatcat

SEQ ID NO: 336589 - DNA, 25 bp, Artificial
  probe
  misc_feature (1)..(25): SEQ ID NO: 2780; WAN024FAH; Start 121; Stop 145
tctgtcaatgagcaagtgatgatta

SEQ ID NO: 336590 - DNA, 25 bp, Artificial
  probe
  misc_feature (1)..(25): SEQ ID NO: 2780; WAN024FAH; Start 125; Stop 149
tcaatgagcaagtgatgattaagtg

SEQ ID NO: 336591 - DNA, 25 bp, Artificial
  probe
  misc_feature (1)..(25): SEQ ID NO: 2780; WAN024FAH; Start 124; Stop 148
gtcaatgagcaagtgatgattaagt

SEQ ID NO: 336592 - DNA, 25 bp, Artificial
  probe
  misc_feature (1)..(25): SEQ ID NO: 2780; WAN024FAH; Start 123; Stop 147
tgtcaatgagcaagtgatgattaag

SEQ ID NO: 336593 - DNA, 25 bp, Artificial
  probe
  misc_feature (1)..(25): SEQ ID NO: 2780; WAN024FAH; Start 122; Stop 146
ctgtcaatgagcaagtgatgattaa

SEQ ID NO: 336594 - DNA, 25 bp, Artificial
  probe
  misc_feature (1)..(25): SEQ ID NO: 2780; WAN024FAH; Start 120; Stop 144
gtctgtcaatgagcaagtgatgatt

SEQ ID NO: 336595 - DNA, 25 bp, Artificial
  probe
  misc_feature (1)..(25): SEQ ID NO: 2780; WAN024FAH; Start 119; Stop 143
agtctgtcaatgagcaagtgatgat

SEQ ID NO: 336596 - DNA, 25 bp, Artificial
  probe
  misc_feature (1)..(25): SEQ ID NO: 2780; WAN024FAH; Start 362; Stop 386
ttcaggctattcgtaagaccatgtt

SEQ ID NO: 336597 - DNA, 25 bp, Artificial
  probe
  misc_feature (1)..(25): SEQ ID NO: 2780; WAN024FAH; Start 436; Stop 460
gtcgtctatcaaatcaccaaatctg

SEQ ID NO: 336598 - DNA, 25 bp, Artificial
  probe
  misc_feature (1)..(25): SEQ ID NO: 2780; WAN024FAH; Start 432; Stop 456
caatgtcgtctatcaaatcaccaaa

SEQ ID NO: 336599 - DNA, 25 bp, Artificial
  probe
  misc_feature (1)..(25): SEQ ID NO: 2780; WAN024FAH; Start 437; Stop 461
tcgtctatcaaatcaccaaatctgt

SEQ ID NO: 336600 - DNA, 25 bp, Artificial
  probe
  misc_feature (1)..(25): SEQ ID NO: 2780; WAN024FAH; Start 435; Stop 459
tgtcgtctatcaaatcaccaaatct

SEQ ID NO: 336601 - DNA, 25 bp, Artificial
  probe
  misc_feature (1)..(25): SEQ ID NO: 2780; WAN024FAH; Start 438; Stop 462
cgtctatcaaatcaccaaatctgtt

SEQ ID NO: 336602 - DNA, 25 bp, Artificial
  probe
  misc_feature (1)..(25): SEQ ID NO: 2780; WAN024FAH; Start 434; Stop 458
atgtcgtctatcaaatcaccaaatc

SEQ ID NO: 336603 - DNA, 25 bp, Artificial
  probe
  misc_feature (1)..(25): SEQ ID NO: 2780; WAN024FAH; Start 425; Stop 449
aactgtccaatgtcgtctatcaaat

SEQ ID NO: 336604 - DNA, 25 bp, Artificial
  probe
  misc_feature (1)..(25): SEQ ID NO: 2780; WAN024FAH; Start 86; Stop 110
atttctatcgttatttgattgggcg

SEQ ID NO: 336605 - DNA, 25 bp, Artificial
  probe
  misc_feature (1)..(25): SEQ ID NO: 2780; WAN024FAH; Start 424; Stop 448
aaactgtccaatgtcgtctatcaaa

SEQ ID NO: 336606 - DNA, 25 bp, Artificial
  probe
  misc_feature (1)..(25): SEQ ID NO: 2780; WAN024FAH; Start 225; Stop 249
gcgagaatatctgctgaatcatatt

SEQ ID NO: 336607 - DNA, 25 bp, Artificial
  probe
  misc_feature (1)..(25): SEQ ID NO: 2780; WAN024FAH; Start 433; Stop 457
aatgtcgtctatcaaatcaccaaat

SEQ ID NO: 336608 - DNA, 25 bp, Artificial
  probe
  misc_feature (1)..(25): SEQ ID NO: 2780; WAN024FAH; Start 427; Stop 451
ctgtccaatgtcgtctatcaaatca

SEQ ID NO: 336609 - DNA, 25 bp, Artificial
  probe
  misc_feature (1)..(25): SEQ ID NO: 2780; WAN024FAH; Start 426; Stop 450
actgtccaatgtcgtctatcaaatc

SEQ ID NO: 336610 - DNA, 25 bp, Artificial
  probe
  misc_feature (1)..(25): SEQ ID NO: 2780; WAN024FAH; Start 324; Stop 348
attgtggacctatattcagcagaaa

SEQ ID NO: 336611 - DNA, 25 bp, Artificial
  probe
  misc_feature (1)..(25): SEQ ID NO: 2780; WAN024FAH; Start 348; Stop 372
aaatccagaagtctttcaggctatt

SEQ ID NO: 336612 - DNA, 25 bp, Artificial
  probe
  misc_feature (1)..(25): SEQ ID NO: 2780; WAN024FAH; Start 354; Stop 378
agaagtctttcaggctattcgtaag

SEQ ID NO: 336613 - DNA, 25 bp, Artificial
  probe
  misc_feature (1)..(25): SEQ ID NO: 2780; WAN024FAH; Start 428; Stop 452
tgtccaatgtcgtctatcaaatcac

SEQ ID NO: 336614 - DNA, 25 bp, Artificial
  probe
  misc_feature (1)..(25): SEQ ID NO: 2780; WAN024FAH; Start 349; Stop 373
aatccagaagtctttcaggctattc

SEQ ID NO: 336615 - DNA, 25 bp, Artificial
  probe
  misc_feature (1)..(25): SEQ ID NO: 2780; WAN024FAH; Start 365; Stop 389
aggctattcgtaagaccatgttgag

SEQ ID NO: 336616 - DNA, 25 bp, Artificial
  probe
  misc_feature (1)..(25): SEQ ID NO: 2780; WAN024FAH; Start 353; Stop 377
cagaagtctttcaggctattcgtaa

SEQ ID NO: 336617 - DNA, 25 bp, Artificial
  probe
  misc_feature (1)..(25): SEQ ID NO: 2780; WAN024FAH; Start 134; Stop 158
aagtgatgattaagtgcattgacca

SEQ ID NO: 336618 - DNA, 25 bp, Artificial
  probe
  misc_feature (1)..(25): SEQ ID NO: 2781; WAN024CDI; Start 105; Stop 129
cgctaatatcaaagaatccacactc

SEQ ID NO: 336619 - DNA, 25 bp, Artificial
  probe
  misc_feature (1)..(25): SEQ ID NO: 2781; WAN024CDI; Start 104; Stop 128
tcgctaatatcaaagaatccacact

SEQ ID NO: 336620 - DNA, 25 bp, Artificial
  probe
  misc_feature (1)..(25): SEQ ID NO: 2781; WAN024CDI; Start 103; Stop 127
atcgctaatatcaaagaatccacac

SEQ ID NO: 336621 - DNA, 25 bp, Artificial
  probe
  misc_feature (1)..(25): SEQ ID NO: 2781; WAN024CDI; Start 58; Stop 82
cagggtgattcttatggttatgaga

SEQ ID NO: 336622 - DNA, 25 bp, Artificial
  probe
  misc_feature (1)..(25): SEQ ID NO: 2781; WAN024CDI; Start 205; Stop 229
aaatactactccttgacaaacggtg

SEQ ID NO: 336623 - DNA, 25 bp, Artificial
  probe
  misc_feature (1)..(25): SEQ ID NO: 2781; WAN024CDI; Start 120; Stop 144
atccacactctatcccattctcaaa

SEQ ID NO: 336624 - DNA, 25 bp, Artificial
  probe
  misc_feature (1)..(25): SEQ ID NO: 2781; WAN024CDI; Start 119; Stop 143
aatccacactctatcccattctcaa

SEQ ID NO: 336625 - DNA, 25 bp, Artificial
  probe
  misc_feature (1)..(25): SEQ ID NO: 2781; WAN024CDI; Start 111; Stop 135
tatcaaagaatccacactctatccc

SEQ ID NO: 336626 - DNA, 25 bp, Artificial
  probe
  misc_feature (1)..(25): SEQ ID NO: 2781; WAN024CDI; Start 57; Stop 81
gcagggtgattcttatggttatgag

SEQ ID NO: 336627 - DNA, 25 bp, Artificial
  probe
  misc_feature (1)..(25): SEQ ID NO: 2781; WAN024CDI; Start 55; Stop 79
gagcagggtgattcttatggttatg

SEQ ID NO: 336628 - DNA, 25 bp, Artificial
  probe
  misc_feature (1)..(25): SEQ ID NO: 2781; WAN024CDI; Start 285; Stop 309
caatggcatcatagaagggagtatc

SEQ ID NO: 336629 - DNA, 25 bp, Artificial
  probe
  misc_feature (1)..(25): SEQ ID NO: 2781; WAN024CDI; Start 114; Stop 138
caaagaatccacactctatcccatt

SEQ ID NO: 336630 - DNA, 25 bp, Artificial
  probe
  misc_feature (1)..(25): SEQ ID NO: 2781; WAN024CDI; Start 76; Stop 100
tatgagattagccaaaccattaagc

SEQ ID NO: 336631 - DNA, 25 bp, Artificial
  probe
  misc_feature (1)..(25): SEQ ID NO: 2781; WAN024CDI; Start 64; Stop 88
gattcttatggttatgagattagcc

SEQ ID NO: 336632 - DNA, 25 bp, Artificial
  probe
  misc_feature (1)..(25): SEQ ID NO: 2781; WAN024CDI; Start 284; Stop 308
tcaatggcatcatagaagggagtat

SEQ ID NO: 336633 - DNA, 25 bp, Artificial
  probe
  misc_feature (1)..(25): SEQ ID NO: 2781; WAN024CDI; Start 283; Stop 307
atcaatggcatcatagaagggagta

SEQ ID NO: 336634 - DNA, 25 bp, Artificial
  probe
  misc_feature (1)..(25): SEQ ID NO: 2781; WAN024CDI; Start 266; Stop 290
cactctatacagacaccatcaatgg

SEQ ID NO: 336635 - DNA, 25 bp, Artificial
  probe
  misc_feature (1)..(25): SEQ ID NO: 2781; WAN024CDI; Start 59; Stop 83
agggtgattcttatggttatgagat

SEQ ID NO: 336636 - DNA, 25 bp, Artificial
  probe
  misc_feature (1)..(25): SEQ ID NO: 2781; WAN024CDI; Start 56; Stop 80
agcagggtgattcttatggttatga

SEQ ID NO: 336637 - DNA, 25 bp, Artificial
  probe
  misc_feature (1)..(25): SEQ ID NO: 2781; WAN024CDI; Start 21; Stop 45
tgccttgattgaatttctcatcttg

SEQ ID NO: 336638 - DNA, 25 bp, Artificial
  probe
  misc_feature (1)..(25): SEQ ID NO: 2781; WAN024CDI; Start 20; Stop 44
ctgccttgattgaatttctcatctt

SEQ ID NO: 336639 - DNA, 25 bp, Artificial
  probe
  misc_feature (1)..(25): SEQ ID NO: 2781; WAN024CDI; Start 204; Stop 228
caaatactactccttgacaaacggt

SEQ ID NO: 336640 - DNA, 25 bp, Artificial
  probe
  misc_feature (1)..(25): SEQ ID NO: 2781; WAN024CDI; Start 113; Stop 137
tcaaagaatccacactctatcccat

SEQ ID NO: 336641 - DNA, 25 bp, Artificial
  probe
  misc_feature (1)..(25): SEQ ID NO: 2781; WAN024CDI; Start 112; Stop 136
atcaaagaatccacactctatccca

SEQ ID NO: 336642 - DNA, 25 bp, Artificial
  probe
  misc_feature (1)..(25): SEQ ID NO: 2781; WAN024CDI; Start 19; Stop 43
tctgccttgattgaatttctcatct

SEQ ID NO: 336643 - DNA, 25 bp, Artificial
  probe
  misc_feature (1)..(25): SEQ ID NO: 2781; WAN024CDI; Start 106; Stop 130
gctaatatcaaagaatccacactct

SEQ ID NO: 336644 - DNA, 25 bp, Artificial
  probe
  misc_feature (1)..(25): SEQ ID NO: 2781; WAN024CDI; Start 23; Stop 47
ccttgattgaatttctcatcttggc

SEQ ID NO: 336645 - DNA, 25 bp, Artificial
  probe
  misc_feature (1)..(25): SEQ ID NO: 2781; WAN024CDI; Start 22; Stop 46
gccttgattgaatttctcatcttgg

SEQ ID NO: 336646 - DNA, 25 bp, Artificial
  probe
  misc_feature (1)..(25): SEQ ID NO: 2781; WAN024CDI; Start 270; Stop 294
ctatacagacaccatcaatggcatc

SEQ ID NO: 336647 - DNA, 25 bp, Artificial
  probe
  misc_feature (1)..(25): SEQ ID NO: 2781; WAN024CDI; Start 211; Stop 235
tactccttgacaaacggtggtatag

SEQ ID NO: 336648 - DNA, 25 bp, Artificial
  probe
  misc_feature (1)..(25): SEQ ID NO: 2781; WAN024CDI; Start 210; Stop 234
ctactccttgacaaacggtggtata

SEQ ID NO: 336649 - DNA, 25 bp, Artificial
  probe
  misc_feature (1)..(25): SEQ ID NO: 2781; WAN024CDI; Start 60; Stop 84
gggtgattcttatggttatgagatt

SEQ ID NO: 336650 - DNA, 25 bp, Artificial
  probe
  misc_feature (1)..(25): SEQ ID NO: 2781; WAN024CDI; Start 269; Stop 293
tctatacagacaccatcaatggcat

SEQ ID NO: 336651 - DNA, 25 bp, Artificial
  probe
  misc_feature (1)..(25): SEQ ID NO: 2782; WAN0249XE; Start 59; Stop 83
tttagggtataatagttgctgttcg

SEQ ID NO: 336652 - DNA, 25 bp, Artificial
  probe
  misc_feature (1)..(25): SEQ ID NO: 2782; WAN0249XE; Start 102; Stop 126
agaatagtgaatgatgataaggaga

SEQ ID NO: 336653 - DNA, 25 bp, Artificial
  probe
  misc_feature (1)..(25): SEQ ID NO: 2782; WAN0249XE; Start 106; Stop 130
tagtgaatgatgataaggagaaacc

SEQ ID NO: 336654 - DNA, 25 bp, Artificial
  probe
  misc_feature (1)..(25): SEQ ID NO: 2782; WAN0249XE; Start 61; Stop 85
tagggtataatagttgctgttcgag

SEQ ID NO: 336655 - DNA, 25 bp, Artificial
  probe
  misc_feature (1)..(25): SEQ ID NO: 2782; WAN0249XE; Start 63; Stop 87
gggtataatagttgctgttcgagaa

SEQ ID NO: 336656 - DNA, 25 bp, Artificial
  probe
  misc_feature (1)..(25): SEQ ID NO: 2782; WAN0249XE; Start 103; Stop 127
gaatagtgaatgatgataaggagaa

SEQ ID NO: 336657 - DNA, 25 bp, Artificial
  probe
  misc_feature (1)..(25): SEQ ID NO: 2782; WAN0249XE; Start 101; Stop 125
aagaatagtgaatgatgataaggag

SEQ ID NO: 336658 - DNA, 25 bp, Artificial
  probe
  misc_feature (1)..(25): SEQ ID NO: 2782; WAN0249XE; Start 60; Stop 84
ttagggtataatagttgctgttcga

SEQ ID NO: 336659 - DNA, 25 bp, Artificial
  probe
  misc_feature (1)..(25): SEQ ID NO: 2782; WAN0249XE; Start 64; Stop 88
ggtataatagttgctgttcgagaaa

SEQ ID NO: 336660 - DNA, 25 bp, Artificial
  probe
  misc_feature (1)..(25): SEQ ID NO: 2782; WAN0249XE; Start 62; Stop 86
agggtataatagttgctgttcgaga

SEQ ID NO: 336661 - DNA, 25 bp, Artificial
  probe
  misc_feature (1)..(25): SEQ ID NO: 2782; WAN0249XE; Start 105; Stop 129
atagtgaatgatgataaggagaaac

SEQ ID NO: 336662 - DNA, 25 bp, Artificial
  probe
  misc_feature (1)..(25): SEQ ID NO: 2782; WAN0249XE; Start 65; Stop 89
gtataatagttgctgttcgagaaat

SEQ ID NO: 336663 - DNA, 25 bp, Artificial
  probe
  misc_feature (1)..(25): SEQ ID NO: 2782; WAN0249XE; Start 67; Stop 91
ataatagttgctgttcgagaaattt

SEQ ID NO: 336664 - DNA, 25 bp, Artificial
  probe
  misc_feature (1)..(25): SEQ ID NO: 2782; WAN0249XE; Start 53; Stop 77
gctgattttagggtataatagttgc

SEQ ID NO: 336665 - DNA, 25 bp, Artificial
  probe
  misc_feature (1)..(25): SEQ ID NO: 2782; WAN0249XE; Start 1; Stop 25
atgtagaaaagccgatagattgata

SEQ ID NO: 336666 - DNA, 25 bp, Artificial
  probe
  misc_feature (1)..(25): SEQ ID NO: 2782; WAN0249XE; Start 2; Stop 26
tgtagaaaagccgatagattgatat

SEQ ID NO: 336667 - DNA, 25 bp, Artificial
  probe
  misc_feature (1)..(25): SEQ ID NO: 2782; WAN0249XE; Start 99; Stop 123
caaagaatagtgaatgatgataagg

SEQ ID NO: 336668 - DNA, 25 bp, Artificial
  probe
  misc_feature (1)..(25): SEQ ID NO: 2782; WAN0249XE; Start 66; Stop 90
tataatagttgctgttcgagaaatt

SEQ ID NO: 336669 - DNA, 25 bp, Artificial
  probe
  misc_feature (1)..(25): SEQ ID NO: 2782; WAN0249XE; Start 72; Stop 96
agttgctgttcgagaaattttgatt

SEQ ID NO: 336670 - DNA, 25 bp, Artificial
  probe
  misc_feature (1)..(25): SEQ ID NO: 2782; WAN0249XE; Start 71; Stop 95
tagttgctgttcgagaaattttgat

SEQ ID NO: 336671 - DNA, 25 bp, Artificial
  probe
  misc_feature (1)..(25): SEQ ID NO: 2782; WAN0249XE; Start 70; Stop 94
atagttgctgttcgagaaattttga

SEQ ID NO: 336672 - DNA, 25 bp, Artificial
  probe
  misc_feature (1)..(25): SEQ ID NO: 2782; WAN0249XE; Start 104; Stop 128
aatagtgaatgatgataaggagaaa

SEQ ID NO: 336673 - DNA, 25 bp, Artificial
  probe
  misc_feature (1)..(25): SEQ ID NO: 2782; WAN0249XE; Start 100; Stop 124
aaagaatagtgaatgatgataagga

SEQ ID NO: 336674 - DNA, 25 bp, Artificial
  probe
  misc_feature (1)..(25): SEQ ID NO: 2782; WAN0249XE; Start 69; Stop 93
aatagttgctgttcgagaaattttg

SEQ ID NO: 336675 - DNA, 25 bp, Artificial
  probe
  misc_feature (1)..(25): SEQ ID NO: 2782; WAN0249XE; Start 58; Stop 82
ttttagggtataatagttgctgttc

SEQ ID NO: 336676 - DNA, 25 bp, Artificial
  probe
  misc_feature (1)..(25): SEQ ID NO: 2782; WAN0249XE; Start 73; Stop 97
gttgctgttcgagaaattttgattt

SEQ ID NO: 336677 - DNA, 25 bp, Artificial
  probe
  misc_feature (1)..(25): SEQ ID NO: 2782; WAN0249XE; Start 74; Stop 98
ttgctgttcgagaaattttgatttt

SEQ ID NO: 336678 - DNA, 25 bp, Artificial
  probe
  misc_feature (1)..(25): SEQ ID NO: 2782; WAN0249XE; Start 56; Stop 80
gattttagggtataatagttgctgt

SEQ ID NO: 336679 - DNA, 25 bp, Artificial
  probe
  misc_feature (1)..(25): SEQ ID NO: 2782; WAN0249XE; Start 55; Stop 79
tgattttagggtataatagttgctg

SEQ ID NO: 336680 - DNA, 25 bp, Artificial
  probe
  misc_feature (1)..(25): SEQ ID NO: 2782; WAN0249XE; Start 52; Stop 76
tgctgattttagggtataatagttg

SEQ ID NO: 336681 - DNA, 25 bp, Artificial
  probe
  misc_feature (1)..(25): SEQ ID NO: 2782; WAN0249XE; Start 54; Stop 78
ctgattttagggtataatagttgct

SEQ ID NO: 336682 - DNA, 25 bp, Artificial
  probe
  misc_feature (1)..(25): SEQ ID NO: 2782; WAN0249XE; Start 68; Stop 92
taatagttgctgttcgagaaatttt

SEQ ID NO: 336683 - DNA, 25 bp, Artificial
  probe
  misc_feature (1)..(25): SEQ ID NO: 2782; WAN0249XE; Start 57; Stop 81
attttagggtataatagttgctgtt

SEQ ID NO: 336684 - DNA, 25 bp, Artificial
  probe
  misc_feature (1)..(25): SEQ ID NO: 2783; WAN024F7L; Start 53; Stop 77
cctatattctagtcttggcttctga

SEQ ID NO: 336685 - DNA, 25 bp, Artificial
  probe
  misc_feature (1)..(25): SEQ ID NO: 2783; WAN024F7L; Start 56; Stop 80
atattctagtcttggcttctgacac

SEQ ID NO: 336686 - DNA, 25 bp, Artificial
  probe
  misc_feature (1)..(25): SEQ ID NO: 2783; WAN024F7L; Start 55; Stop 79
tatattctagtcttggcttctgaca

SEQ ID NO: 336687 - DNA, 25 bp, Artificial
  probe
  misc_feature (1)..(25): SEQ ID NO: 2783; WAN024F7L; Start 54; Stop 78
ctatattctagtcttggcttctgac

SEQ ID NO: 336688 - DNA, 25 bp, Artificial
  probe
  misc_feature (1)..(25): SEQ ID NO: 2783; WAN024F7L; Start 57; Stop 81
tattctagtcttggcttctgacacc

SEQ ID NO: 336689 - DNA, 25 bp, Artificial
  probe
  misc_feature (1)..(25): SEQ ID NO: 2783; WAN024F7L; Start 52; Stop 76
ccctatattctagtcttggcttctg

SEQ ID NO: 336690 - DNA, 25 bp, Artificial
  probe
  misc_feature (1)..(25): SEQ ID NO: 2783; WAN024F7L; Start 51; Stop 75
accctatattctagtcttggcttct

SEQ ID NO: 336691 - DNA, 25 bp, Artificial
  probe
  misc_feature (1)..(25): SEQ ID NO: 2783; WAN024F7L; Start 50; Stop 74
caccctatattctagtcttggcttc

SEQ ID NO: 336692 - DNA, 25 bp, Artificial
  probe
  misc_feature (1)..(25): SEQ ID NO: 2783; WAN024F7L; Start 49; Stop 73
acaccctatattctagtcttggctt

SEQ ID NO: 336693 - DNA, 25 bp, Artificial
  probe
  misc_feature (1)..(25): SEQ ID NO: 2783; WAN024F7L; Start 46; Stop 70
ttgacaccctatattctagtcttgg

SEQ ID NO: 336694 - DNA, 25 bp, Artificial
  probe
  misc_feature (1)..(25): SEQ ID NO: 2783; WAN024F7L; Start 48; Stop 72
gacaccctatattctagtcttggct

SEQ ID NO: 336695 - DNA, 25 bp, Artificial
  probe
  misc_feature (1)..(25): SEQ ID NO: 2783; WAN024F7L; Start 47; Stop 71
tgacaccctatattctagtcttggc

SEQ ID NO: 336696 - DNA, 25 bp, Artificial
  probe
  misc_feature (1)..(25): SEQ ID NO: 2783; WAN024F7L; Start 45; Stop 69
gttgacaccctatattctagtcttg

SEQ ID NO: 336697 - DNA, 25 bp, Artificial
  probe
  misc_feature (1)..(25): SEQ ID NO: 2783; WAN024F7L; Start 41; Stop 65
atcggttgacaccctatattctagt

SEQ ID NO: 336698 - DNA, 25 bp, Artificial
  probe
  misc_feature (1)..(25): SEQ ID NO: 2783; WAN024F7L; Start 44; Stop 68
ggttgacaccctatattctagtctt

SEQ ID NO: 336699 - DNA, 25 bp, Artificial
  probe
  misc_feature (1)..(25): SEQ ID NO: 2783; WAN024F7L; Start 40; Stop 64
gatcggttgacaccctatattctag

SEQ ID NO: 336700 - DNA, 25 bp, Artificial
  probe
  misc_feature (1)..(25): SEQ ID NO: 2783; WAN024F7L; Start 39; Stop 63
agatcggttgacaccctatattcta

SEQ ID NO: 336701 - DNA, 25 bp, Artificial
  probe
  misc_feature (1)..(25): SEQ ID NO: 2783; WAN024F7L; Start 38; Stop 62
tagatcggttgacaccctatattct

SEQ ID NO: 336702 - DNA, 25 bp, Artificial
  probe
  misc_feature (1)..(25): SEQ ID NO: 2783; WAN024F7L; Start 37; Stop 61
ttagatcggttgacaccctatattc

SEQ ID NO: 336703 - DNA, 25 bp, Artificial
  probe
  misc_feature (1)..(25): SEQ ID NO: 2783; WAN024F7L; Start 35; Stop 59
ctttagatcggttgacaccctatat

SEQ ID NO: 336704 - DNA, 25 bp, Artificial
  probe
  misc_feature (1)..(25): SEQ ID NO: 2783; WAN024F7L; Start 43; Stop 67
cggttgacaccctatattctagtct

SEQ ID NO: 336705 - DNA, 25 bp, Artificial
  probe
  misc_feature (1)..(25): SEQ ID NO: 2783; WAN024F7L; Start 42; Stop 66
tcggttgacaccctatattctagtc

SEQ ID NO: 336706 - DNA, 25 bp, Artificial
  probe
  misc_feature (1)..(25): SEQ ID NO: 2783; WAN024F7L; Start 36; Stop 60
tttagatcggttgacaccctatatt

SEQ ID NO: 336707 - DNA, 25 bp, Artificial
  probe
  misc_feature (1)..(25): SEQ ID NO: 2783; WAN024F7L; Start 34; Stop 58
actttagatcggttgacaccctata

SEQ ID NO: 336708 - DNA, 25 bp, Artificial
  probe
  misc_feature (1)..(25): SEQ ID NO: 2783; WAN024F7L; Start 33; Stop 57
aactttagatcggttgacaccctat

SEQ ID NO: 336709 - DNA, 25 bp, Artificial
  probe
  misc_feature (1)..(25): SEQ ID NO: 2783; WAN024F7L; Start 61; Stop 85
ctagtcttggcttctgacaccattg

SEQ ID NO: 336710 - DNA, 25 bp, Artificial
  probe
  misc_feature (1)..(25): SEQ ID NO: 2783; WAN024F7L; Start 32; Stop 56
aaactttagatcggttgacacccta

SEQ ID NO: 336711 - DNA, 25 bp, Artificial
  probe
  misc_feature (1)..(25): SEQ ID NO: 2783; WAN024F7L; Start 60; Stop 84
tctagtcttggcttctgacaccatt

SEQ ID NO: 336712 - DNA, 25 bp, Artificial
  probe
  misc_feature (1)..(25): SEQ ID NO: 2783; WAN024F7L; Start 59; Stop 83
ttctagtcttggcttctgacaccat

SEQ ID NO: 336713 - DNA, 25 bp, Artificial
  probe
  misc_feature (1)..(25): SEQ ID NO: 2783; WAN024F7L; Start 58; Stop 82
attctagtcttggcttctgacacca

SEQ ID NO: 336714 - DNA, 25 bp, Artificial
  probe
  misc_feature (1)..(25): SEQ ID NO: 2783; WAN024F7L; Start 185; Stop 209
tggtcggattttggttactaatact

SEQ ID NO: 336715 - DNA, 25 bp, Artificial
  probe
  misc_feature (1)..(25): SEQ ID NO: 2783; WAN024F7L; Start 184; Stop 208
gtggtcggattttggttactaatac

SEQ ID NO: 336716 - DNA, 25 bp, Artificial
  probe
  misc_feature (1)..(25): SEQ ID NO: 2783; WAN024F7L; Start 183; Stop 207
tgtggtcggattttggttactaata

SEQ ID NO: 336717 - DNA, 25 bp, Artificial
  probe
  misc_feature (1)..(25): SEQ ID NO: 2784; WAN024CKM; Start 476; Stop 500
ttgatggctactatgtgaagaactg

SEQ ID NO: 336718 - DNA, 25 bp, Artificial
  probe
  misc_feature (1)..(25): SEQ ID NO: 2784; WAN024CKM; Start 478; Stop 502
gatggctactatgtgaagaactgtt

SEQ ID NO: 336719 - DNA, 25 bp, Artificial
  probe
  misc_feature (1)..(25): SEQ ID NO: 2784; WAN024CKM; Start 477; Stop 501
tgatggctactatgtgaagaactgt

SEQ ID NO: 336720 - DNA, 25 bp, Artificial
  probe
  misc_feature (1)..(25): SEQ ID NO: 2784; WAN024CKM; Start 176; Stop 200
ttagaacgatgagaattgacactcc

SEQ ID NO: 336721 - DNA, 25 bp, Artificial
  probe
  misc_feature (1)..(25): SEQ ID NO: 2784; WAN024CKM; Start 479; Stop 503
atggctactatgtgaagaactgttc

SEQ ID NO: 336722 - DNA, 25 bp, Artificial
  probe
  misc_feature (1)..(25): SEQ ID NO: 2784; WAN024CKM; Start 177; Stop 201
tagaacgatgagaattgacactcct

SEQ ID NO: 336723 - DNA, 25 bp, Artificial
  probe
  misc_feature (1)..(25): SEQ ID NO: 2784; WAN024CKM; Start 179; Stop 203
gaacgatgagaattgacactccttc

SEQ ID NO: 336724 - DNA, 25 bp, Artificial
  probe
  misc_feature (1)..(25): SEQ ID NO: 2784; WAN024CKM; Start 178; Stop 202
agaacgatgagaattgacactcctt

SEQ ID NO: 336725 - DNA, 25 bp, Artificial
  probe
  misc_feature (1)..(25): SEQ ID NO: 2784; WAN024CKM; Start 180; Stop 204
aacgatgagaattgacactccttca

SEQ ID NO: 336726 - DNA, 25 bp, Artificial
  probe
  misc_feature (1)..(25): SEQ ID NO: 2784; WAN024CKM; Start 475; Stop 499
tttgatggctactatgtgaagaact

SEQ ID NO: 336727 - DNA, 25 bp, Artificial
  probe
  misc_feature (1)..(25): SEQ ID NO: 2784; WAN024CKM; Start 474; Stop 498
atttgatggctactatgtgaagaac

SEQ ID NO: 336728 - DNA, 25 bp, Artificial
  probe
  misc_feature (1)..(25): SEQ ID NO: 2784; WAN024CKM; Start 181; Stop 205
acgatgagaattgacactccttcag

SEQ ID NO: 336729 - DNA, 25 bp, Artificial
  probe
  misc_feature (1)..(25): SEQ ID NO: 2784; WAN024CKM; Start 451; Stop 475
ttatctattccagtcaaagccaaat

SEQ ID NO: 336730 - DNA, 25 bp, Artificial
  probe
  misc_feature (1)..(25): SEQ ID NO: 2784; WAN024CKM; Start 450; Stop 474
attatctattccagtcaaagccaaa

SEQ ID NO: 336731 - DNA, 25 bp, Artificial
  probe
  misc_feature (1)..(25): SEQ ID NO: 2784; WAN024CKM; Start 427; Stop 451
gcacaaatcaatggaagagatgaat

SEQ ID NO: 336732 - DNA, 25 bp, Artificial
  probe
  misc_feature (1)..(25): SEQ ID NO: 2784; WAN024CKM; Start 269; Stop 293
gtagaacctctctggatgaattgcc

SEQ ID NO: 336733 - DNA, 25 bp, Artificial
  probe
  misc_feature (1)..(25): SEQ ID NO: 2784; WAN024CKM; Start 174; Stop 198
atttagaacgatgagaattgacact

SEQ ID NO: 336734 - DNA, 25 bp, Artificial
  probe
  misc_feature (1)..(25): SEQ ID NO: 2784; WAN024CKM; Start 473; Stop 497
aatttgatggctactatgtgaagaa

SEQ ID NO: 336735 - DNA, 25 bp, Artificial
  probe
  misc_feature (1)..(25): SEQ ID NO: 2784; WAN024CKM; Start 452; Stop 476
tatctattccagtcaaagccaaatt

SEQ ID NO: 336736 - DNA, 25 bp, Artificial
  probe
  misc_feature (1)..(25): SEQ ID NO: 2784; WAN024CKM; Start 449; Stop 473
aattatctattccagtcaaagccaa

SEQ ID NO: 336737 - DNA, 25 bp, Artificial
  probe
  misc_feature (1)..(25): SEQ ID NO: 2784; WAN024CKM; Start 175; Stop 199
tttagaacgatgagaattgacactc

SEQ ID NO: 336738 - DNA, 25 bp, Artificial
  probe
  misc_feature (1)..(25): SEQ ID NO: 2784; WAN024CKM; Start 234; Stop 258
ttatcaatggattacaaaggttggt

SEQ ID NO: 336739 - DNA, 25 bp, Artificial
  probe
  misc_feature (1)..(25): SEQ ID NO: 2784; WAN024CKM; Start 268; Stop 292
cgtagaacctctctggatgaattgc

SEQ ID NO: 336740 - DNA, 25 bp, Artificial
  probe
  misc_feature (1)..(25): SEQ ID NO: 2784; WAN024CKM; Start 233; Stop 257
cttatcaatggattacaaaggttgg

SEQ ID NO: 336741 - DNA, 25 bp, Artificial
  probe
  misc_feature (1)..(25): SEQ ID NO: 2784; WAN024CKM; Start 545; Stop 569
tagtatttaagagatatgggcatcg

SEQ ID NO: 336742 - DNA, 25 bp, Artificial
  probe
  misc_feature (1)..(25): SEQ ID NO: 2784; WAN024CKM; Start 267; Stop 291
acgtagaacctctctggatgaattg

SEQ ID NO: 336743 - DNA, 25 bp, Artificial
  probe
  misc_feature (1)..(25): SEQ ID NO: 2784; WAN024CKM; Start 426; Stop 450
ggcacaaatcaatggaagagatgaa

SEQ ID NO: 336744 - DNA, 25 bp, Artificial
  probe
  misc_feature (1)..(25): SEQ ID NO: 2784; WAN024CKM; Start 241; Stop 265
tggattacaaaggttggtaaagtct

SEQ ID NO: 336745 - DNA, 25 bp, Artificial
  probe
  misc_feature (1)..(25): SEQ ID NO: 2784; WAN024CKM; Start 481; Stop 505
ggctactatgtgaagaactgttcat

SEQ ID NO: 336746 - DNA, 25 bp, Artificial
  probe
  misc_feature (1)..(25): SEQ ID NO: 2784; WAN024CKM; Start 45; Stop 69
gctaggaattgtattattatcacca

SEQ ID NO: 336747 - DNA, 25 bp, Artificial
  probe
  misc_feature (1)..(25): SEQ ID NO: 2784; WAN024CKM; Start 44; Stop 68
tgctaggaattgtattattatcacc

SEQ ID NO: 336748 - DNA, 25 bp, Artificial
  probe
  misc_feature (1)..(25): SEQ ID NO: 2784; WAN024CKM; Start 428; Stop 452
cacaaatcaatggaagagatgaatt

SEQ ID NO: 336749 - DNA, 25 bp, Artificial
  probe
  misc_feature (1)..(25): SEQ ID NO: 2784; WAN024CKM; Start 235; Stop 259
tatcaatggattacaaaggttggta

SEQ ID NO: 336750 - DNA, 25 bp, Artificial
  probe
  misc_feature (1)..(25): SEQ ID NO: 2785; WAN024EZF; Start 32; Stop 56
tattatctgttgtgattgtgattgc

SEQ ID NO: 336751 - DNA, 25 bp, Artificial
  probe
  misc_feature (1)..(25): SEQ ID NO: 2785; WAN024EZF; Start 33; Stop 57
attatctgttgtgattgtgattgca

SEQ ID NO: 336752 - DNA, 25 bp, Artificial
  probe
  misc_feature (1)..(25): SEQ ID NO: 2785; WAN024EZF; Start 79; Stop 103
aaccaatccagcaatgtatttgatg

SEQ ID NO: 336753 - DNA, 25 bp, Artificial
  probe
  misc_feature (1)..(25): SEQ ID NO: 2785; WAN024EZF; Start 78; Stop 102
aaaccaatccagcaatgtatttgat

SEQ ID NO: 336754 - DNA, 25 bp, Artificial
  probe
  misc_feature (1)..(25): SEQ ID NO: 2785; WAN024EZF; Start 112; Stop 136
ggtgatttgtttgaacgcagtaaag

SEQ ID NO: 336755 - DNA, 25 bp, Artificial
  probe
  misc_feature (1)..(25): SEQ ID NO: 2785; WAN024EZF; Start 95; Stop 119
tatttgatgccagttcaggtgattt

SEQ ID NO: 336756 - DNA, 25 bp, Artificial
  probe
  misc_feature (1)..(25): SEQ ID NO: 2785; WAN024EZF; Start 111; Stop 135
aggtgatttgtttgaacgcagtaaa

SEQ ID NO: 336757 - DNA, 25 bp, Artificial
  probe
  misc_feature (1)..(25): SEQ ID NO: 2785; WAN024EZF; Start 31; Stop 55
gtattatctgttgtgattgtgattg

SEQ ID NO: 336758 - DNA, 25 bp, Artificial
  probe
  misc_feature (1)..(25): SEQ ID NO: 2785; WAN024EZF; Start 113; Stop 137
gtgatttgtttgaacgcagtaaagc

SEQ ID NO: 336759 - DNA, 25 bp, Artificial
  probe
  misc_feature (1)..(25): SEQ ID NO: 2785; WAN024EZF; Start 30; Stop 54
agtattatctgttgtgattgtgatt

SEQ ID NO: 336760 - DNA, 25 bp, Artificial
  probe
  misc_feature (1)..(25): SEQ ID NO: 2785; WAN024EZF; Start 94; Stop 118
gtatttgatgccagttcaggtgatt

SEQ ID NO: 336761 - DNA, 25 bp, Artificial
  probe
  misc_feature (1)..(25): SEQ ID NO: 2785; WAN024EZF; Start 207; Stop 231
agcattgacggtattatcaagtaga

SEQ ID NO: 336762 - DNA, 25 bp, Artificial
  probe
  misc_feature (1)..(25): SEQ ID NO: 2785; WAN024EZF; Start 203; Stop 227
ccttagcattgacggtattatcaag

SEQ ID NO: 336763 - DNA, 25 bp, Artificial
  probe
  misc_feature (1)..(25): SEQ ID NO: 2785; WAN024EZF; Start 199; Stop 223
attgccttagcattgacggtattat

SEQ ID NO: 336764 - DNA, 25 bp, Artificial
  probe
  misc_feature (1)..(25): SEQ ID NO: 2785; WAN024EZF; Start 91; Stop 115
aatgtatttgatgccagttcaggtg

SEQ ID NO: 336765 - DNA, 25 bp, Artificial
  probe
  misc_feature (1)..(25): SEQ ID NO: 2785; WAN024EZF; Start 90; Stop 114
caatgtatttgatgccagttcaggt

SEQ ID NO: 336766 - DNA, 25 bp, Artificial
  probe
  misc_feature (1)..(25): SEQ ID NO: 2785; WAN024EZF; Start 204; Stop 228
cttagcattgacggtattatcaagt

SEQ ID NO: 336767 - DNA, 25 bp, Artificial
  probe
  misc_feature (1)..(25): SEQ ID NO: 2785; WAN024EZF; Start 208; Stop 232
gcattgacggtattatcaagtagat

SEQ ID NO: 336768 - DNA, 25 bp, Artificial
  probe
  misc_feature (1)..(25): SEQ ID NO: 2785; WAN024EZF; Start 202; Stop 226
gccttagcattgacggtattatcaa

SEQ ID NO: 336769 - DNA, 25 bp, Artificial
  probe
  misc_feature (1)..(25): SEQ ID NO: 2785; WAN024EZF; Start 200; Stop 224
ttgccttagcattgacggtattatc

SEQ ID NO: 336770 - DNA, 25 bp, Artificial
  probe
  misc_feature (1)..(25): SEQ ID NO: 2785; WAN024EZF; Start 110; Stop 134
caggtgatttgtttgaacgcagtaa

SEQ ID NO: 336771 - DNA, 25 bp, Artificial
  probe
  misc_feature (1)..(25): SEQ ID NO: 2785; WAN024EZF; Start 198; Stop 222
cattgccttagcattgacggtatta

SEQ ID NO: 336772 - DNA, 25 bp, Artificial
  probe
  misc_feature (1)..(25): SEQ ID NO: 2785; WAN024EZF; Start 96; Stop 120
atttgatgccagttcaggtgatttg

SEQ ID NO: 336773 - DNA, 25 bp, Artificial
  probe
  misc_feature (1)..(25): SEQ ID NO: 2785; WAN024EZF; Start 206; Stop 230
tagcattgacggtattatcaagtag

SEQ ID NO: 336774 - DNA, 25 bp, Artificial
  probe
  misc_feature (1)..(25): SEQ ID NO: 2785; WAN024EZF; Start 93; Stop 117
tgtatttgatgccagttcaggtgat

SEQ ID NO: 336775 - DNA, 25 bp, Artificial
  probe
  misc_feature (1)..(25): SEQ ID NO: 2785; WAN024EZF; Start 92; Stop 116
atgtatttgatgccagttcaggtga

SEQ ID NO: 336776 - DNA, 25 bp, Artificial
  probe
  misc_feature (1)..(25): SEQ ID NO: 2785; WAN024EZF; Start 28; Stop 52
ttagtattatctgttgtgattgtga

SEQ ID NO: 336777 - DNA, 25 bp, Artificial
  probe
  misc_feature (1)..(25): SEQ ID NO: 2785; WAN024EZF; Start 115; Stop 139
gatttgtttgaacgcagtaaagctc

SEQ ID NO: 336778 - DNA, 25 bp, Artificial
  probe
  misc_feature (1)..(25): SEQ ID NO: 2785; WAN024EZF; Start 205; Stop 229
ttagcattgacggtattatcaagta

SEQ ID NO: 336779 - DNA, 25 bp, Artificial
  probe
  misc_feature (1)..(25): SEQ ID NO: 2785; WAN024EZF; Start 201; Stop 225
tgccttagcattgacggtattatca

SEQ ID NO: 336780 - DNA, 25 bp, Artificial
  probe
  misc_feature (1)..(25): SEQ ID NO: 2785; WAN024EZF; Start 100; Stop 124
gatgccagttcaggtgatttgtttg

SEQ ID NO: 336781 - DNA, 25 bp, Artificial
  probe
  misc_feature (1)..(25): SEQ ID NO: 2785; WAN024EZF; Start 29; Stop 53
tagtattatctgttgtgattgtgat

SEQ ID NO: 336782 - DNA, 25 bp, Artificial
  probe
  misc_feature (1)..(25): SEQ ID NO: 2785; WAN024EZF; Start 114; Stop 138
tgatttgtttgaacgcagtaaagct

SEQ ID NO: 336783 - DNA, 25 bp, Artificial
  probe
  misc_feature (1)..(25): SEQ ID NO: 2786; WAN024G5Q; Start 33; Stop 57
tcgtaagaatggagaatatgacact

SEQ ID NO: 336784 - DNA, 25 bp, Artificial
  probe
  misc_feature (1)..(25): SEQ ID NO: 2786; WAN024G5Q; Start 544; Stop 568
aatcataaggacaatacaatcggtg

SEQ ID NO: 336785 - DNA, 25 bp, Artificial
  probe
  misc_feature (1)..(25): SEQ ID NO: 2786; WAN024G5Q; Start 37; Stop 61
aagaatggagaatatgacacttgct

SEQ ID NO: 336786 - DNA, 25 bp, Artificial
  probe
  misc_feature (1)..(25): SEQ ID NO: 2786; WAN024G5Q; Start 1138; Stop 1162
attggagtcattatggatgtagtct

SEQ ID NO: 336787 - DNA, 25 bp, Artificial
  probe
  misc_feature (1)..(25): SEQ ID NO: 2786; WAN024G5Q; Start 36; Stop 60
taagaatggagaatatgacacttgc

SEQ ID NO: 336788 - DNA, 25 bp, Artificial
  probe
  misc_feature (1)..(25): SEQ ID NO: 2786; WAN024G5Q; Start 1926; Stop 1950
ctataatgctcctgacagtgtgaac

SEQ ID NO: 336789 - DNA, 25 bp, Artificial
  probe
  misc_feature (1)..(25): SEQ ID NO: 2786; WAN024G5Q; Start 32; Stop 56
atcgtaagaatggagaatatgacac

SEQ ID NO: 336790 - DNA, 25 bp, Artificial
  probe
  misc_feature (1)..(25): SEQ ID NO: 2786; WAN024G5Q; Start 1164; Stop 1188
taaccataccttctcagttgttgat

SEQ ID NO: 336791 - DNA, 25 bp, Artificial
  probe
  misc_feature (1)..(25): SEQ ID NO: 2786; WAN024G5Q; Start 1163; Stop 1187
ataaccataccttctcagttgttga

SEQ ID NO: 336792 - DNA, 25 bp, Artificial
  probe
  misc_feature (1)..(25): SEQ ID NO: 2786; WAN024G5Q; Start 34; Stop 58
cgtaagaatggagaatatgacactt

SEQ ID NO: 336793 - DNA, 25 bp, Artificial
  probe
  misc_feature (1)..(25): SEQ ID NO: 2786; WAN024G5Q; Start 1135; Stop 1159
ggtattggagtcattatggatgtag

SEQ ID NO: 336794 - DNA, 25 bp, Artificial
  probe
  misc_feature (1)..(25): SEQ ID NO: 2786; WAN024G5Q; Start 1160; Stop 1184
tctataaccataccttctcagttgt

SEQ ID NO: 336795 - DNA, 25 bp, Artificial
  probe
  misc_feature (1)..(25): SEQ ID NO: 2786; WAN024G5Q; Start 1139; Stop 1163
ttggagtcattatggatgtagtcta

SEQ ID NO: 336796 - DNA, 25 bp, Artificial
  probe
  misc_feature (1)..(25): SEQ ID NO: 2786; WAN024G5Q; Start 31; Stop 55
catcgtaagaatggagaatatgaca

SEQ ID NO: 336797 - DNA, 25 bp, Artificial
  probe
  misc_feature (1)..(25): SEQ ID NO: 2786; WAN024G5Q; Start 1165; Stop 1189
aaccataccttctcagttgttgatg

SEQ ID NO: 336798 - DNA, 25 bp, Artificial
  probe
  misc_feature (1)..(25): SEQ ID NO: 2786; WAN024G5Q; Start 38; Stop 62
agaatggagaatatgacacttgctc

SEQ ID NO: 336799 - DNA, 25 bp, Artificial
  probe
  misc_feature (1)..(25): SEQ ID NO: 2786; WAN024G5Q; Start 1159; Stop 1183
gtctataaccataccttctcagttg

SEQ ID NO: 336800 - DNA, 25 bp, Artificial
  probe
  misc_feature (1)..(25): SEQ ID NO: 2786; WAN024G5Q; Start 545; Stop 569
atcataaggacaatacaatcggtgt

SEQ ID NO: 336801 - DNA, 25 bp, Artificial
  probe
  misc_feature (1)..(25): SEQ ID NO: 2786; WAN024G5Q; Start 1681; Stop 1705
aatcaggtgcttaactatgtagaag

SEQ ID NO: 336802 - DNA, 25 bp, Artificial
  probe
  misc_feature (1)..(25): SEQ ID NO: 2786; WAN024G5Q; Start 1140; Stop 1164
tggagtcattatggatgtagtctat

SEQ ID NO: 336803 - DNA, 25 bp, Artificial
  probe
  misc_feature (1)..(25): SEQ ID NO: 2786; WAN024G5Q; Start 1158; Stop 1182
agtctataaccataccttctcagtt

SEQ ID NO: 336804 - DNA, 25 bp, Artificial
  probe
  misc_feature (1)..(25): SEQ ID NO: 2786; WAN024G5Q; Start 1162; Stop 1186
tataaccataccttctcagttgttg

SEQ ID NO: 336805 - DNA, 25 bp, Artificial
  probe
  misc_feature (1)..(25): SEQ ID NO: 2786; WAN024G5Q; Start 1155; Stop 1179
tgtagtctataaccataccttctca

SEQ ID NO: 336806 - DNA, 25 bp, Artificial
  probe
  misc_feature (1)..(25): SEQ ID NO: 2786; WAN024G5Q; Start 1954; Stop 1978
gtgaactggaacttgattaatgagc

SEQ ID NO: 336807 - DNA, 25 bp, Artificial
  probe
  misc_feature (1)..(25): SEQ ID NO: 2786; WAN024G5Q; Start 543; Stop 567
taatcataaggacaatacaatcggt

SEQ ID NO: 336808 - DNA, 25 bp, Artificial
  probe
  misc_feature (1)..(25): SEQ ID NO: 2786; WAN024G5Q; Start 1299; Stop 1323
tcgcaagtatatgattgattctctt

SEQ ID NO: 336809 - DNA, 25 bp, Artificial
  probe
  misc_feature (1)..(25): SEQ ID NO: 2786; WAN024G5Q; Start 1298; Stop 1322
ttcgcaagtatatgattgattctct

SEQ ID NO: 336810 - DNA, 25 bp, Artificial
  probe
  misc_feature (1)..(25): SEQ ID NO: 2786; WAN024G5Q; Start 1707; Stop 1731
ccatgacaattacaatcttcacgat

SEQ ID NO: 336811 - DNA, 25 bp, Artificial
  probe
  misc_feature (1)..(25): SEQ ID NO: 2786; WAN024G5Q; Start 1161; Stop 1185
ctataaccataccttctcagttgtt

SEQ ID NO: 336812 - DNA, 25 bp, Artificial
  probe
  misc_feature (1)..(25): SEQ ID NO: 2786; WAN024G5Q; Start 1157; Stop 1181
tagtctataaccataccttctcagt

SEQ ID NO: 336813 - DNA, 25 bp, Artificial
  probe
  misc_feature (1)..(25): SEQ ID NO: 2786; WAN024G5Q; Start 1136; Stop 1160
gtattggagtcattatggatgtagt

SEQ ID NO: 336814 - DNA, 25 bp, Artificial
  probe
  misc_feature (1)..(25): SEQ ID NO: 2786; WAN024G5Q; Start 1335; Stop 1359
gcaggaatataatattgacggcttc

SEQ ID NO: 336815 - DNA, 25 bp, Artificial
  probe
  misc_feature (1)..(25): SEQ ID NO: 2786; WAN024G5Q; Start 1300; Stop 1324
cgcaagtatatgattgattctcttc

SEQ ID NO: 336816 - DNA, 25 bp, Artificial
  probe
  misc_feature (1)..(25): SEQ ID NO: 2787; WAN024CBK; Start 255; Stop 279
agagatagtagatttacgacacgaa

SEQ ID NO: 336817 - DNA, 25 bp, Artificial
  probe
  misc_feature (1)..(25): SEQ ID NO: 2787; WAN024CBK; Start 242; Stop 266
tgtttgggaatgtagagatagtaga

SEQ ID NO: 336818 - DNA, 25 bp, Artificial
  probe
  misc_feature (1)..(25): SEQ ID NO: 2787; WAN024CBK; Start 256; Stop 280
gagatagtagatttacgacacgaaa

SEQ ID NO: 336819 - DNA, 25 bp, Artificial
  probe
  misc_feature (1)..(25): SEQ ID NO: 2787; WAN024CBK; Start 253; Stop 277
gtagagatagtagatttacgacacg

SEQ ID NO: 336820 - DNA, 25 bp, Artificial
  probe
  misc_feature (1)..(25): SEQ ID NO: 2787; WAN024CBK; Start 254; Stop 278
tagagatagtagatttacgacacga

SEQ ID NO: 336821 - DNA, 25 bp, Artificial
  probe
  misc_feature (1)..(25): SEQ ID NO: 2787; WAN024CBK; Start 241; Stop 265
ttgtttgggaatgtagagatagtag

SEQ ID NO: 336822 - DNA, 25 bp, Artificial
  probe
  misc_feature (1)..(25): SEQ ID NO: 2787; WAN024CBK; Start 243; Stop 267
gtttgggaatgtagagatagtagat

SEQ ID NO: 336823 - DNA, 25 bp, Artificial
  probe
  misc_feature (1)..(25): SEQ ID NO: 2787; WAN024CBK; Start 240; Stop 264
tttgtttgggaatgtagagatagta

SEQ ID NO: 336824 - DNA, 25 bp, Artificial
  probe
  misc_feature (1)..(25): SEQ ID NO: 2787; WAN024CBK; Start 171; Stop 195
gacctatgtcgtttggtttgtattt

SEQ ID NO: 336825 - DNA, 25 bp, Artificial
  probe
  misc_feature (1)..(25): SEQ ID NO: 2787; WAN024CBK; Start 170; Stop 194
tgacctatgtcgtttggtttgtatt

SEQ ID NO: 336826 - DNA, 25 bp, Artificial
  probe
  misc_feature (1)..(25): SEQ ID NO: 2787; WAN024CBK; Start 291; Stop 315
atctatcaagatgaggtggtctttg

SEQ ID NO: 336827 - DNA, 25 bp, Artificial
  probe
  misc_feature (1)..(25): SEQ ID NO: 2787; WAN024CBK; Start 252; Stop 276
tgtagagatagtagatttacgacac

SEQ ID NO: 336828 - DNA, 25 bp, Artificial
  probe
  misc_feature (1)..(25): SEQ ID NO: 2787; WAN024CBK; Start 245; Stop 269
ttgggaatgtagagatagtagattt

SEQ ID NO: 336829 - DNA, 25 bp, Artificial
  probe
  misc_feature (1)..(25): SEQ ID NO: 2787; WAN024CBK; Start 244; Stop 268
tttgggaatgtagagatagtagatt

SEQ ID NO: 336830 - DNA, 25 bp, Artificial
  probe
  misc_feature (1)..(25): SEQ ID NO: 2787; WAN024CBK; Start 277; Stop 301
gaaaattccaccccatctatcaaga

SEQ ID NO: 336831 - DNA, 25 bp, Artificial
  probe
  misc_feature (1)..(25): SEQ ID NO: 2787; WAN024CBK; Start 276; Stop 300
cgaaaattccaccccatctatcaag

SEQ ID NO: 336832 - DNA, 25 bp, Artificial
  probe
  misc_feature (1)..(25): SEQ ID NO: 2787; WAN024CBK; Start 263; Stop 287
tagatttacgacacgaaaattccac

SEQ ID NO: 336833 - DNA, 25 bp, Artificial
  probe
  misc_feature (1)..(25): SEQ ID NO: 2787; WAN024CBK; Start 262; Stop 286
gtagatttacgacacgaaaattcca

SEQ ID NO: 336834 - DNA, 25 bp, Artificial
  probe
  misc_feature (1)..(25): SEQ ID NO: 2787; WAN024CBK; Start 239; Stop 263
ttttgtttgggaatgtagagatagt

SEQ ID NO: 336835 - DNA, 25 bp, Artificial
  probe
  misc_feature (1)..(25): SEQ ID NO: 2787; WAN024CBK; Start 261; Stop 285
agtagatttacgacacgaaaattcc

SEQ ID NO: 336836 - DNA, 25 bp, Artificial
  probe
  misc_feature (1)..(25): SEQ ID NO: 2787; WAN024CBK; Start 248; Stop 272
ggaatgtagagatagtagatttacg

SEQ ID NO: 336837 - DNA, 25 bp, Artificial
  probe
  misc_feature (1)..(25): SEQ ID NO: 2787; WAN024CBK; Start 177; Stop 201
tgtcgtttggtttgtattttacttt

SEQ ID NO: 336838 - DNA, 25 bp, Artificial
  probe
  misc_feature (1)..(25): SEQ ID NO: 2787; WAN024CBK; Start 178; Stop 202
gtcgtttggtttgtattttactttg

SEQ ID NO: 336839 - DNA, 25 bp, Artificial
  probe
  misc_feature (1)..(25): SEQ ID NO: 2787; WAN024CBK; Start 292; Stop 316
tctatcaagatgaggtggtctttgc

SEQ ID NO: 336840 - DNA, 25 bp, Artificial
  probe
  misc_feature (1)..(25): SEQ ID NO: 2787; WAN024CBK; Start 173; Stop 197
cctatgtcgtttggtttgtatttta

SEQ ID NO: 336841 - DNA, 25 bp, Artificial
  probe
  misc_feature (1)..(25): SEQ ID NO: 2787; WAN024CBK; Start 257; Stop 281
agatagtagatttacgacacgaaaa

SEQ ID NO: 336842 - DNA, 25 bp, Artificial
  probe
  misc_feature (1)..(25): SEQ ID NO: 2787; WAN024CBK; Start 176; Stop 200
atgtcgtttggtttgtattttactt

SEQ ID NO: 336843 - DNA, 25 bp, Artificial
  probe
  misc_feature (1)..(25): SEQ ID NO: 2787; WAN024CBK; Start 246; Stop 270
tgggaatgtagagatagtagattta

SEQ ID NO: 336844 - DNA, 25 bp, Artificial
  probe
  misc_feature (1)..(25): SEQ ID NO: 2787; WAN024CBK; Start 275; Stop 299
acgaaaattccaccccatctatcaa

SEQ ID NO: 336845 - DNA, 25 bp, Artificial
  probe
  misc_feature (1)..(25): SEQ ID NO: 2787; WAN024CBK; Start 251; Stop 275
atgtagagatagtagatttacgaca

SEQ ID NO: 336846 - DNA, 25 bp, Artificial
  probe
  misc_feature (1)..(25): SEQ ID NO: 2787; WAN024CBK; Start 264; Stop 288
agatttacgacacgaaaattccacc

SEQ ID NO: 336847 - DNA, 25 bp, Artificial
  probe
  misc_feature (1)..(25): SEQ ID NO: 2787; WAN024CBK; Start 247; Stop 271
gggaatgtagagatagtagatttac

SEQ ID NO: 336848 - DNA, 25 bp, Artificial
  probe
  misc_feature (1)..(25): SEQ ID NO: 2787; WAN024CBK; Start 172; Stop 196
acctatgtcgtttggtttgtatttt

SEQ ID NO: 336849 - DNA, 25 bp, Artificial
  probe
  misc_feature (1)..(25): SEQ ID NO: 2788; WAN024G4G; Start 131; Stop 155
ctatggacttggctggtgtatctat

SEQ ID NO: 336850 - DNA, 25 bp, Artificial
  probe
  misc_feature (1)..(25): SEQ ID NO: 2788; WAN024G4G; Start 132; Stop 156
tatggacttggctggtgtatctatg

SEQ ID NO: 336851 - DNA, 25 bp, Artificial
  probe
  misc_feature (1)..(25): SEQ ID NO: 2788; WAN024G4G; Start 1251; Stop 1275
ttcttactggatcggcttgattatt

SEQ ID NO: 336852 - DNA, 25 bp, Artificial
  probe
  misc_feature (1)..(25): SEQ ID NO: 2788; WAN024G4G; Start 1250; Stop 1274
attcttactggatcggcttgattat

SEQ ID NO: 336853 - DNA, 25 bp, Artificial
  probe
  misc_feature (1)..(25): SEQ ID NO: 2788; WAN024G4G; Start 1248; Stop 1272
ttattcttactggatcggcttgatt

SEQ ID NO: 336854 - DNA, 25 bp, Artificial
  probe
  misc_feature (1)..(25): SEQ ID NO: 2788; WAN024G4G; Start 1247; Stop 1271
cttattcttactggatcggcttgat

SEQ ID NO: 336855 - DNA, 25 bp, Artificial
  probe
  misc_feature (1)..(25): SEQ ID NO: 2788; WAN024G4G; Start 1252; Stop 1276
tcttactggatcggcttgattatta

SEQ ID NO: 336856 - DNA, 25 bp, Artificial
  probe
  misc_feature (1)..(25): SEQ ID NO: 2788; WAN024G4G; Start 1249; Stop 1273
tattcttactggatcggcttgatta

SEQ ID NO: 336857 - DNA, 25 bp, Artificial
  probe
  misc_feature (1)..(25): SEQ ID NO: 2788; WAN024G4G; Start 1253; Stop 1277
cttactggatcggcttgattattag

SEQ ID NO: 336858 - DNA, 25 bp, Artificial
  probe
  misc_feature (1)..(25): SEQ ID NO: 2788; WAN024G4G; Start 876; Stop 900
tatctcatcggctatggctattgtc

SEQ ID NO: 336859 - DNA, 25 bp, Artificial
  probe
  misc_feature (1)..(25): SEQ ID NO: 2788; WAN024G4G; Start 874; Stop 898
agtatctcatcggctatggctattg

SEQ ID NO: 336860 - DNA, 25 bp, Artificial
  probe
  misc_feature (1)..(25): SEQ ID NO: 2788; WAN024G4G; Start 1255; Stop 1279
tactggatcggcttgattattagtt

SEQ ID NO: 336861 - DNA, 25 bp, Artificial
  probe
  misc_feature (1)..(25): SEQ ID NO: 2788; WAN024G4G; Start 1254; Stop 1278
ttactggatcggcttgattattagt

SEQ ID NO: 336862 - DNA, 25 bp, Artificial
  probe
  misc_feature (1)..(25): SEQ ID NO: 2788; WAN024G4G; Start 117; Stop 141
aggtcaatacaacactatggacttg

SEQ ID NO: 336863 - DNA, 25 bp, Artificial
  probe
  misc_feature (1)..(25): SEQ ID NO: 2788; WAN024G4G; Start 116; Stop 140
caggtcaatacaacactatggactt

SEQ ID NO: 336864 - DNA, 25 bp, Artificial
  probe
  misc_feature (1)..(25): SEQ ID NO: 2788; WAN024G4G; Start 875; Stop 899
gtatctcatcggctatggctattgt

SEQ ID NO: 336865 - DNA, 25 bp, Artificial
  probe
  misc_feature (1)..(25): SEQ ID NO: 2788; WAN024G4G; Start 121; Stop 145
caatacaacactatggacttggctg

SEQ ID NO: 336866 - DNA, 25 bp, Artificial
  probe
  misc_feature (1)..(25): SEQ ID NO: 2788; WAN024G4G; Start 120; Stop 144
tcaatacaacactatggacttggct

SEQ ID NO: 336867 - DNA, 25 bp, Artificial
  probe
  misc_feature (1)..(25): SEQ ID NO: 2788; WAN024G4G; Start 873; Stop 897
gagtatctcatcggctatggctatt

SEQ ID NO: 336868 - DNA, 25 bp, Artificial
  probe
  misc_feature (1)..(25): SEQ ID NO: 2788; WAN024G4G; Start 114; Stop 138
gacaggtcaatacaacactatggac

SEQ ID NO: 336869 - DNA, 25 bp, Artificial
  probe
  misc_feature (1)..(25): SEQ ID NO: 2788; WAN024G4G; Start 118; Stop 142
ggtcaatacaacactatggacttgg

SEQ ID NO: 336870 - DNA, 25 bp, Artificial
  probe
  misc_feature (1)..(25): SEQ ID NO: 2788; WAN024G4G; Start 946; Stop 970
tatattggtctaggaagatggactg

SEQ ID NO: 336871 - DNA, 25 bp, Artificial
  probe
  misc_feature (1)..(25): SEQ ID NO: 2788; WAN024G4G; Start 115; Stop 139
acaggtcaatacaacactatggact

SEQ ID NO: 336872 - DNA, 25 bp, Artificial
  probe
  misc_feature (1)..(25): SEQ ID NO: 2788; WAN024G4G; Start 130; Stop 154
actatggacttggctggtgtatcta

SEQ ID NO: 336873 - DNA, 25 bp, Artificial
  probe
  misc_feature (1)..(25): SEQ ID NO: 2788; WAN024G4G; Start 112; Stop 136
atgacaggtcaatacaacactatgg

SEQ ID NO: 336874 - DNA, 25 bp, Artificial
  probe
  misc_feature (1)..(25): SEQ ID NO: 2788; WAN024G4G; Start 945; Stop 969
ctatattggtctaggaagatggact

SEQ ID NO: 336875 - DNA, 25 bp, Artificial
  probe
  misc_feature (1)..(25): SEQ ID NO: 2788; WAN024G4G; Start 111; Stop 135
aatgacaggtcaatacaacactatg

SEQ ID NO: 336876 - DNA, 25 bp, Artificial
  probe
  misc_feature (1)..(25): SEQ ID NO: 2788; WAN024G4G; Start 110; Stop 134
caatgacaggtcaatacaacactat

SEQ ID NO: 336877 - DNA, 25 bp, Artificial
  probe
  misc_feature (1)..(25): SEQ ID NO: 2788; WAN024G4G; Start 947; Stop 971
atattggtctaggaagatggactgc

SEQ ID NO: 336878 - DNA, 25 bp, Artificial
  probe
  misc_feature (1)..(25): SEQ ID NO: 2788; WAN024G4G; Start 146; Stop 170
gtgtatctatggcaaccagtatctg

SEQ ID NO: 336879 - DNA, 25 bp, Artificial
  probe
  misc_feature (1)..(25): SEQ ID NO: 2788; WAN024G4G; Start 887; Stop 911
ctatggctattgtcgtttcctatga

SEQ ID NO: 336880 - DNA, 25 bp, Artificial
  probe
  misc_feature (1)..(25): SEQ ID NO: 2788; WAN024G4G; Start 119; Stop 143
gtcaatacaacactatggacttggc

SEQ ID NO: 336881 - DNA, 25 bp, Artificial
  probe
  misc_feature (1)..(25): SEQ ID NO: 2788; WAN024G4G; Start 109; Stop 133
gcaatgacaggtcaatacaacacta

SEQ ID NO: 336882 - DNA, 25 bp, Artificial
  probe
  misc_feature (1)..(25): SEQ ID NO: 2789; WAN024CTD; Start 199; Stop 223
aaaggtagtctcatttccgttgatg

SEQ ID NO: 336883 - DNA, 25 bp, Artificial
  probe
  misc_feature (1)..(25): SEQ ID NO: 2789; WAN024CTD; Start 198; Stop 222
caaaggtagtctcatttccgttgat

SEQ ID NO: 336884 - DNA, 25 bp, Artificial
  probe
  misc_feature (1)..(25): SEQ ID NO: 2789; WAN024CTD; Start 200; Stop 224
aaggtagtctcatttccgttgatgg

SEQ ID NO: 336885 - DNA, 25 bp, Artificial
  probe
  misc_feature (1)..(25): SEQ ID NO: 2789; WAN024CTD; Start 197; Stop 221
ccaaaggtagtctcatttccgttga

SEQ ID NO: 336886 - DNA, 25 bp, Artificial
  probe
  misc_feature (1)..(25): SEQ ID NO: 2789; WAN024CTD; Start 195; Stop 219
aaccaaaggtagtctcatttccgtt

SEQ ID NO: 336887 - DNA, 25 bp, Artificial
  probe
  misc_feature (1)..(25): SEQ ID NO: 2789; WAN024CTD; Start 190; Stop 214
tacgcaaccaaaggtagtctcattt

SEQ ID NO: 336888 - DNA, 25 bp, Artificial
  probe
  misc_feature (1)..(25): SEQ ID NO: 2789; WAN024CTD; Start 208; Stop 232
ctcatttccgttgatggagaattgc

SEQ ID NO: 336889 - DNA, 25 bp, Artificial
  probe
  misc_feature (1)..(25): SEQ ID NO: 2789; WAN024CTD; Start 202; Stop 226
ggtagtctcatttccgttgatggag

SEQ ID NO: 336890 - DNA, 25 bp, Artificial
  probe
  misc_feature (1)..(25): SEQ ID NO: 2789; WAN024CTD; Start 196; Stop 220
accaaaggtagtctcatttccgttg

SEQ ID NO: 336891 - DNA, 25 bp, Artificial
  probe
  misc_feature (1)..(25): SEQ ID NO: 2789; WAN024CTD; Start 194; Stop 218
caaccaaaggtagtctcatttccgt

SEQ ID NO: 336892 - DNA, 25 bp, Artificial
  probe
  misc_feature (1)..(25): SEQ ID NO: 2789; WAN024CTD; Start 211; Stop 235
atttccgttgatggagaattgcgta

SEQ ID NO: 336893 - DNA, 25 bp, Artificial
  probe
  misc_feature (1)..(25): SEQ ID NO: 2789; WAN024CTD; Start 201; Stop 225
aggtagtctcatttccgttgatgga

SEQ ID NO: 336894 - DNA, 25 bp, Artificial
  probe
  misc_feature (1)..(25): SEQ ID NO: 2789; WAN024CTD; Start 189; Stop 213
ctacgcaaccaaaggtagtctcatt

SEQ ID NO: 336895 - DNA, 25 bp, Artificial
  probe
  misc_feature (1)..(25): SEQ ID NO: 2789; WAN024CTD; Start 207; Stop 231
tctcatttccgttgatggagaattg

SEQ ID NO: 336896 - DNA, 25 bp, Artificial
  probe
  misc_feature (1)..(25): SEQ ID NO: 2789; WAN024CTD; Start 206; Stop 230
gtctcatttccgttgatggagaatt

SEQ ID NO: 336897 - DNA, 25 bp, Artificial
  probe
  misc_feature (1)..(25): SEQ ID NO: 2789; WAN024CTD; Start 204; Stop 228
tagtctcatttccgttgatggagaa

SEQ ID NO: 336898 - DNA, 25 bp, Artificial
  probe
  misc_feature (1)..(25): SEQ ID NO: 2789; WAN024CTD; Start 191; Stop 215
acgcaaccaaaggtagtctcatttc

SEQ ID NO: 336899 - DNA, 25 bp, Artificial
  probe
  misc_feature (1)..(25): SEQ ID NO: 2789; WAN024CTD; Start 205; Stop 229
agtctcatttccgttgatggagaat

SEQ ID NO: 336900 - DNA, 25 bp, Artificial
  probe
  misc_feature (1)..(25): SEQ ID NO: 2789; WAN024CTD; Start 203; Stop 227
gtagtctcatttccgttgatggaga

SEQ ID NO: 336901 - DNA, 25 bp, Artificial
  probe
  misc_feature (1)..(25): SEQ ID NO: 2789; WAN024CTD; Start 212; Stop 236
tttccgttgatggagaattgcgtac

SEQ ID NO: 336902 - DNA, 25 bp, Artificial
  probe
  misc_feature (1)..(25): SEQ ID NO: 2789; WAN024CTD; Start 165; Stop 189
cagactagcagaaactttggcaagc

SEQ ID NO: 336903 - DNA, 25 bp, Artificial
  probe
  misc_feature (1)..(25): SEQ ID NO: 2789; WAN024CTD; Start 164; Stop 188
gcagactagcagaaactttggcaag

SEQ ID NO: 336904 - DNA, 25 bp, Artificial
  probe
  misc_feature (1)..(25): SEQ ID NO: 2789; WAN024CTD; Start 209; Stop 233
tcatttccgttgatggagaattgcg

SEQ ID NO: 336905 - DNA, 25 bp, Artificial
  probe
  misc_feature (1)..(25): SEQ ID NO: 2789; WAN024CTD; Start 193; Stop 217
gcaaccaaaggtagtctcatttccg

SEQ ID NO: 336906 - DNA, 25 bp, Artificial
  probe
  misc_feature (1)..(25): SEQ ID NO: 2789; WAN024CTD; Start 192; Stop 216
cgcaaccaaaggtagtctcatttcc

SEQ ID NO: 336907 - DNA, 25 bp, Artificial
  probe
  misc_feature (1)..(25): SEQ ID NO: 2789; WAN024CTD; Start 210; Stop 234
catttccgttgatggagaattgcgt

SEQ ID NO: 336908 - DNA, 25 bp, Artificial
  probe
  misc_feature (1)..(25): SEQ ID NO: 2789; WAN024CTD; Start 38; Stop 62
ctacaccagaattgcacaaaaccaa

SEQ ID NO: 336909 - DNA, 25 bp, Artificial
  probe
  misc_feature (1)..(25): SEQ ID NO: 2789; WAN024CTD; Start 158; Stop 182
tatggggcagactagcagaaacttt

SEQ ID NO: 336910 - DNA, 25 bp, Artificial
  probe
  misc_feature (1)..(25): SEQ ID NO: 2789; WAN024CTD; Start 39; Stop 63
tacaccagaattgcacaaaaccaac

SEQ ID NO: 336911 - DNA, 25 bp, Artificial
  probe
  misc_feature (1)..(25): SEQ ID NO: 2789; WAN024CTD; Start 36; Stop 60
gtctacaccagaattgcacaaaacc

SEQ ID NO: 336912 - DNA, 25 bp, Artificial
  probe
  misc_feature (1)..(25): SEQ ID NO: 2789; WAN024CTD; Start 49; Stop 73
ttgcacaaaaccaacaatgacaagt

SEQ ID NO: 336913 - DNA, 25 bp, Artificial
  probe
  misc_feature (1)..(25): SEQ ID NO: 2789; WAN024CTD; Start 333; Stop 357
tgaaaataatgcaggccaagatttg

SEQ ID NO: 336914 - DNA, 25 bp, Artificial
  probe
  misc_feature (1)..(25): SEQ ID NO: 2789; WAN024CTD; Start 332; Stop 356
gtgaaaataatgcaggccaagattt

SEQ ID NO: 336915 - DNA, 25 bp, Artificial
  probe
  misc_feature (1)..(25): SEQ ID NO: 2790; WAN024FWA; Start 406; Stop 430
gattcgcagagtgatattacagttc

SEQ ID NO: 336916 - DNA, 25 bp, Artificial
  probe
  misc_feature (1)..(25): SEQ ID NO: 2790; WAN024FWA; Start 133; Stop 157
agttgtagtgtaagtgatgagaagt

SEQ ID NO: 336917 - DNA, 25 bp, Artificial
  probe
  misc_feature (1)..(25): SEQ ID NO: 2790; WAN024FWA; Start 405; Stop 429
ggattcgcagagtgatattacagtt

SEQ ID NO: 336918 - DNA, 25 bp, Artificial
  probe
  misc_feature (1)..(25): SEQ ID NO: 2790; WAN024FWA; Start 132; Stop 156
cagttgtagtgtaagtgatgagaag

SEQ ID NO: 336919 - DNA, 25 bp, Artificial
  probe
  misc_feature (1)..(25): SEQ ID NO: 2790; WAN024FWA; Start 401; Stop 425
atgtggattcgcagagtgatattac

SEQ ID NO: 336920 - DNA, 25 bp, Artificial
  probe
  misc_feature (1)..(25): SEQ ID NO: 2790; WAN024FWA; Start 433; Stop 457
gtagatagtgatacagtatggacgc

SEQ ID NO: 336921 - DNA, 25 bp, Artificial
  probe
  misc_feature (1)..(25): SEQ ID NO: 2790; WAN024FWA; Start 407; Stop 431
attcgcagagtgatattacagttct

SEQ ID NO: 336922 - DNA, 25 bp, Artificial
  probe
  misc_feature (1)..(25): SEQ ID NO: 2790; WAN024FWA; Start 1190; Stop 1214
aggctattaggacttatgagatgtt

SEQ ID NO: 336923 - DNA, 25 bp, Artificial
  probe
  misc_feature (1)..(25): SEQ ID NO: 2790; WAN024FWA; Start 134; Stop 158
gttgtagtgtaagtgatgagaagtt

SEQ ID NO: 336924 - DNA, 25 bp, Artificial
  probe
  misc_feature (1)..(25): SEQ ID NO: 2790; WAN024FWA; Start 408; Stop 432
ttcgcagagtgatattacagttcta

SEQ ID NO: 336925 - DNA, 25 bp, Artificial
  probe
  misc_feature (1)..(25): SEQ ID NO: 2790; WAN024FWA; Start 403; Stop 427
gtggattcgcagagtgatattacag

SEQ ID NO: 336926 - DNA, 25 bp, Artificial
  probe
  misc_feature (1)..(25): SEQ ID NO: 2790; WAN024FWA; Start 1191; Stop 1215
ggctattaggacttatgagatgttc

SEQ ID NO: 336927 - DNA, 25 bp, Artificial
  probe
  misc_feature (1)..(25): SEQ ID NO: 2790; WAN024FWA; Start 436; Stop 460
gatagtgatacagtatggacgccta

SEQ ID NO: 336928 - DNA, 25 bp, Artificial
  probe
  misc_feature (1)..(25): SEQ ID NO: 2790; WAN024FWA; Start 434; Stop 458
tagatagtgatacagtatggacgcc

SEQ ID NO: 336929 - DNA, 25 bp, Artificial
  probe
  misc_feature (1)..(25): SEQ ID NO: 2790; WAN024FWA; Start 1198; Stop 1222
aggacttatgagatgttctgatgat

SEQ ID NO: 336930 - DNA, 25 bp, Artificial
  probe
  misc_feature (1)..(25): SEQ ID NO: 2790; WAN024FWA; Start 893; Stop 917
aagatgactccttggatgattagaa

SEQ ID NO: 336931 - DNA, 25 bp, Artificial
  probe
  misc_feature (1)..(25): SEQ ID NO: 2790; WAN024FWA; Start 432; Stop 456
agtagatagtgatacagtatggacg

SEQ ID NO: 336932 - DNA, 25 bp, Artificial
  probe
  misc_feature (1)..(25): SEQ ID NO: 2790; WAN024FWA; Start 437; Stop 461
atagtgatacagtatggacgcctag

SEQ ID NO: 336933 - DNA, 25 bp, Artificial
  probe
  misc_feature (1)..(25): SEQ ID NO: 2790; WAN024FWA; Start 410; Stop 434
cgcagagtgatattacagttctagt

SEQ ID NO: 336934 - DNA, 25 bp, Artificial
  probe
  misc_feature (1)..(25): SEQ ID NO: 2790; WAN024FWA; Start 409; Stop 433
tcgcagagtgatattacagttctag

SEQ ID NO: 336935 - DNA, 25 bp, Artificial
  probe
  misc_feature (1)..(25): SEQ ID NO: 2790; WAN024FWA; Start 404; Stop 428
tggattcgcagagtgatattacagt

SEQ ID NO: 336936 - DNA, 25 bp, Artificial
  probe
  misc_feature (1)..(25): SEQ ID NO: 2790; WAN024FWA; Start 866; Stop 890
gcagaaggttctcagtataacaatc

SEQ ID NO: 336937 - DNA, 25 bp, Artificial
  probe
  misc_feature (1)..(25): SEQ ID NO: 2790; WAN024FWA; Start 865; Stop 889
ggcagaaggttctcagtataacaat

SEQ ID NO: 336938 - DNA, 25 bp, Artificial
  probe
  misc_feature (1)..(25): SEQ ID NO: 2790; WAN024FWA; Start 1197; Stop 1221
taggacttatgagatgttctgatga

SEQ ID NO: 336939 - DNA, 25 bp, Artificial
  probe
  misc_feature (1)..(25): SEQ ID NO: 2790; WAN024FWA; Start 343; Stop 367
caatgttattacactcctgttcctg

SEQ ID NO: 336940 - DNA, 25 bp, Artificial
  probe
  misc_feature (1)..(25): SEQ ID NO: 2790; WAN024FWA; Start 342; Stop 366
tcaatgttattacactcctgttcct

SEQ ID NO: 336941 - DNA, 25 bp, Artificial
  probe
  misc_feature (1)..(25): SEQ ID NO: 2790; WAN024FWA; Start 131; Stop 155
acagttgtagtgtaagtgatgagaa

SEQ ID NO: 336942 - DNA, 25 bp, Artificial
  probe
  misc_feature (1)..(25): SEQ ID NO: 2790; WAN024FWA; Start 108; Stop 132
tcatgctgtcagatataagtcctac

SEQ ID NO: 336943 - DNA, 25 bp, Artificial
  probe
  misc_feature (1)..(25): SEQ ID NO: 2790; WAN024FWA; Start 344; Stop 368
aatgttattacactcctgttcctgg

SEQ ID NO: 336944 - DNA, 25 bp, Artificial
  probe
  misc_feature (1)..(25): SEQ ID NO: 2790; WAN024FWA; Start 1199; Stop 1223
ggacttatgagatgttctgatgatt

SEQ ID NO: 336945 - DNA, 25 bp, Artificial
  probe
  misc_feature (1)..(25): SEQ ID NO: 2790; WAN024FWA; Start 1189; Stop 1213
taggctattaggacttatgagatgt

SEQ ID NO: 336946 - DNA, 25 bp, Artificial
  probe
  misc_feature (1)..(25): SEQ ID NO: 2790; WAN024FWA; Start 400; Stop 424
catgtggattcgcagagtgatatta

SEQ ID NO: 336947 - DNA, 25 bp, Artificial
  probe
  misc_feature (1)..(25): SEQ ID NO: 2790; WAN024FWA; Start 341; Stop 365
ttcaatgttattacactcctgttcc

SEQ ID NO: 336948 - DNA, 25 bp, Artificial
  probe
  misc_feature (1)..(25): SEQ ID NO: 2791; WAN024CKN; Start 401; Stop 425
atgtcttacctggattaactggatg

SEQ ID NO: 336949 - DNA, 25 bp, Artificial
  probe
  misc_feature (1)..(25): SEQ ID NO: 2791; WAN024CKN; Start 400; Stop 424
gatgtcttacctggattaactggat

SEQ ID NO: 336950 - DNA, 25 bp, Artificial
  probe
  misc_feature (1)..(25): SEQ ID NO: 2791; WAN024CKN; Start 398; Stop 422
atgatgtcttacctggattaactgg

SEQ ID NO: 336951 - DNA, 25 bp, Artificial
  probe
  misc_feature (1)..(25): SEQ ID NO: 2791; WAN024CKN; Start 395; Stop 419
cgaatgatgtcttacctggattaac

SEQ ID NO: 336952 - DNA, 25 bp, Artificial
  probe
  misc_feature (1)..(25): SEQ ID NO: 2791; WAN024CKN; Start 470; Stop 494
cagaagcagatggttattatgtgaa

SEQ ID NO: 336953 - DNA, 25 bp, Artificial
  probe
  misc_feature (1)..(25): SEQ ID NO: 2791; WAN024CKN; Start 465; Stop 489
gaaggcagaagcagatggttattat

SEQ ID NO: 336954 - DNA, 25 bp, Artificial
  probe
  misc_feature (1)..(25): SEQ ID NO: 2791; WAN024CKN; Start 399; Stop 423
tgatgtcttacctggattaactgga

SEQ ID NO: 336955 - DNA, 25 bp, Artificial
  probe
  misc_feature (1)..(25): SEQ ID NO: 2791; WAN024CKN; Start 394; Stop 418
gcgaatgatgtcttacctggattaa

SEQ ID NO: 336956 - DNA, 25 bp, Artificial
  probe
  misc_feature (1)..(25): SEQ ID NO: 2791; WAN024CKN; Start 466; Stop 490
aaggcagaagcagatggttattatg

SEQ ID NO: 336957 - DNA, 25 bp, Artificial
  probe
  misc_feature (1)..(25): SEQ ID NO: 2791; WAN024CKN; Start 469; Stop 493
gcagaagcagatggttattatgtga

SEQ ID NO: 336958 - DNA, 25 bp, Artificial
  probe
  misc_feature (1)..(25): SEQ ID NO: 2791; WAN024CKN; Start 313; Stop 337
attggtaatatgagcattgtaggac

SEQ ID NO: 336959 - DNA, 25 bp, Artificial
  probe
  misc_feature (1)..(25): SEQ ID NO: 2791; WAN024CKN; Start 397; Stop 421
aatgatgtcttacctggattaactg

SEQ ID NO: 336960 - DNA, 25 bp, Artificial
  probe
  misc_feature (1)..(25): SEQ ID NO: 2791; WAN024CKN; Start 456; Stop 480
aatagagatgaaggcagaagcagat

SEQ ID NO: 336961 - DNA, 25 bp, Artificial
  probe
  misc_feature (1)..(25): SEQ ID NO: 2791; WAN024CKN; Start 451; Stop 475
ttgtcaatagagatgaaggcagaag

SEQ ID NO: 336962 - DNA, 25 bp, Artificial
  probe
  misc_feature (1)..(25): SEQ ID NO: 2791; WAN024CKN; Start 402; Stop 426
tgtcttacctggattaactggatgg

SEQ ID NO: 336963 - DNA, 25 bp, Artificial
  probe
  misc_feature (1)..(25): SEQ ID NO: 2791; WAN024CKN; Start 396; Stop 420
gaatgatgtcttacctggattaact

SEQ ID NO: 336964 - DNA, 25 bp, Artificial
  probe
  misc_feature (1)..(25): SEQ ID NO: 2791; WAN024CKN; Start 393; Stop 417
tgcgaatgatgtcttacctggatta

SEQ ID NO: 336965 - DNA, 25 bp, Artificial
  probe
  misc_feature (1)..(25): SEQ ID NO: 2791; WAN024CKN; Start 468; Stop 492
ggcagaagcagatggttattatgtg

SEQ ID NO: 336966 - DNA, 25 bp, Artificial
  probe
  misc_feature (1)..(25): SEQ ID NO: 2791; WAN024CKN; Start 467; Stop 491
aggcagaagcagatggttattatgt

SEQ ID NO: 336967 - DNA, 25 bp, Artificial
  probe
  misc_feature (1)..(25): SEQ ID NO: 2791; WAN024CKN; Start 464; Stop 488
tgaaggcagaagcagatggttatta

SEQ ID NO: 336968 - DNA, 25 bp, Artificial
  probe
  misc_feature (1)..(25): SEQ ID NO: 2791; WAN024CKN; Start 457; Stop 481
atagagatgaaggcagaagcagatg

SEQ ID NO: 336969 - DNA, 25 bp, Artificial
  probe
  misc_feature (1)..(25): SEQ ID NO: 2791; WAN024CKN; Start 317; Stop 341
gtaatatgagcattgtaggacctag

SEQ ID NO: 336970 - DNA, 25 bp, Artificial
  probe
  misc_feature (1)..(25): SEQ ID NO: 2791; WAN024CKN; Start 455; Stop 479
caatagagatgaaggcagaagcaga

SEQ ID NO: 336971 - DNA, 25 bp, Artificial
  probe
  misc_feature (1)..(25): SEQ ID NO: 2791; WAN024CKN; Start 463; Stop 487
atgaaggcagaagcagatggttatt

SEQ ID NO: 336972 - DNA, 25 bp, Artificial
  probe
  misc_feature (1)..(25): SEQ ID NO: 2791; WAN024CKN; Start 499; Stop 523
atgtcgttaagcatggatcttagat

SEQ ID NO: 336973 - DNA, 25 bp, Artificial
  probe
  misc_feature (1)..(25): SEQ ID NO: 2791; WAN024CKN; Start 314; Stop 338
ttggtaatatgagcattgtaggacc

SEQ ID NO: 336974 - DNA, 25 bp, Artificial
  probe
  misc_feature (1)..(25): SEQ ID NO: 2791; WAN024CKN; Start 502; Stop 526
tcgttaagcatggatcttagatgta

SEQ ID NO: 336975 - DNA, 25 bp, Artificial
  probe
  misc_feature (1)..(25): SEQ ID NO: 2791; WAN024CKN; Start 498; Stop 522
tatgtcgttaagcatggatcttaga

SEQ ID NO: 336976 - DNA, 25 bp, Artificial
  probe
  misc_feature (1)..(25): SEQ ID NO: 2791; WAN024CKN; Start 501; Stop 525
gtcgttaagcatggatcttagatgt

SEQ ID NO: 336977 - DNA, 25 bp, Artificial
  probe
  misc_feature (1)..(25): SEQ ID NO: 2791; WAN024CKN; Start 500; Stop 524
tgtcgttaagcatggatcttagatg

SEQ ID NO: 336978 - DNA, 25 bp, Artificial
  probe
  misc_feature (1)..(25): SEQ ID NO: 2791; WAN024CKN; Start 284; Stop 308
acgaactgccacaattatggaatat

SEQ ID NO: 336979 - DNA, 25 bp, Artificial
  probe
  misc_feature (1)..(25): SEQ ID NO: 2791; WAN024CKN; Start 315; Stop 339
tggtaatatgagcattgtaggacct

SEQ ID NO: 336980 - DNA, 25 bp, Artificial
  probe
  misc_feature (1)..(25): SEQ ID NO: 2791; WAN024CKN; Start 454; Stop 478
tcaatagagatgaaggcagaagcag

SEQ ID NO: 336981 - DNA, 25 bp, Artificial
  probe
  misc_feature (1)..(25): SEQ ID NO: 2792; WAN024CKO; Start 462; Stop 486
gatgaaggcagagatagatggttat

SEQ ID NO: 336982 - DNA, 25 bp, Artificial
  probe
  misc_feature (1)..(25): SEQ ID NO: 2792; WAN024CKO; Start 309; Stop 333
tcttgttggtgatatgagtgttgta

SEQ ID NO: 336983 - DNA, 25 bp, Artificial
  probe
  misc_feature (1)..(25): SEQ ID NO: 2792; WAN024CKO; Start 310; Stop 334
cttgttggtgatatgagtgttgtag

SEQ ID NO: 336984 - DNA, 25 bp, Artificial
  probe
  misc_feature (1)..(25): SEQ ID NO: 2792; WAN024CKO; Start 461; Stop 485
agatgaaggcagagatagatggtta

SEQ ID NO: 336985 - DNA, 25 bp, Artificial
  probe
  misc_feature (1)..(25): SEQ ID NO: 2792; WAN024CKO; Start 307; Stop 331
attcttgttggtgatatgagtgttg

SEQ ID NO: 336986 - DNA, 25 bp, Artificial
  probe
  misc_feature (1)..(25): SEQ ID NO: 2792; WAN024CKO; Start 463; Stop 487
atgaaggcagagatagatggttatt

SEQ ID NO: 336987 - DNA, 25 bp, Artificial
  probe
  misc_feature (1)..(25): SEQ ID NO: 2792; WAN024CKO; Start 308; Stop 332
ttcttgttggtgatatgagtgttgt

SEQ ID NO: 336988 - DNA, 25 bp, Artificial
  probe
  misc_feature (1)..(25): SEQ ID NO: 2792; WAN024CKO; Start 311; Stop 335
ttgttggtgatatgagtgttgtagg

SEQ ID NO: 336989 - DNA, 25 bp, Artificial
  probe
  misc_feature (1)..(25): SEQ ID NO: 2792; WAN024CKO; Start 456; Stop 480
aacagagatgaaggcagagatagat

SEQ ID NO: 336990 - DNA, 25 bp, Artificial
  probe
  misc_feature (1)..(25): SEQ ID NO: 2792; WAN024CKO; Start 306; Stop 330
cattcttgttggtgatatgagtgtt

SEQ ID NO: 336991 - DNA, 25 bp, Artificial
  probe
  misc_feature (1)..(25): SEQ ID NO: 2792; WAN024CKO; Start 313; Stop 337
gttggtgatatgagtgttgtaggac

SEQ ID NO: 336992 - DNA, 25 bp, Artificial
  probe
  misc_feature (1)..(25): SEQ ID NO: 2792; WAN024CKO; Start 467; Stop 491
aggcagagatagatggttattatgt

SEQ ID NO: 336993 - DNA, 25 bp, Artificial
  probe
  misc_feature (1)..(25): SEQ ID NO: 2792; WAN024CKO; Start 464; Stop 488
tgaaggcagagatagatggttatta

SEQ ID NO: 336994 - DNA, 25 bp, Artificial
  probe
  misc_feature (1)..(25): SEQ ID NO: 2792; WAN024CKO; Start 380; Stop 404
gagaacagtatggtgccaatgatat

SEQ ID NO: 336995 - DNA, 25 bp, Artificial
  probe
  misc_feature (1)..(25): SEQ ID NO: 2792; WAN024CKO; Start 457; Stop 481
acagagatgaaggcagagatagatg

SEQ ID NO: 336996 - DNA, 25 bp, Artificial
  probe
  misc_feature (1)..(25): SEQ ID NO: 2792; WAN024CKO; Start 312; Stop 336
tgttggtgatatgagtgttgtagga

SEQ ID NO: 336997 - DNA, 25 bp, Artificial
  probe
  misc_feature (1)..(25): SEQ ID NO: 2792; WAN024CKO; Start 317; Stop 341
gtgatatgagtgttgtaggacctag

SEQ ID NO: 336998 - DNA, 25 bp, Artificial
  probe
  misc_feature (1)..(25): SEQ ID NO: 2792; WAN024CKO; Start 460; Stop 484
gagatgaaggcagagatagatggtt

SEQ ID NO: 336999 - DNA, 25 bp, Artificial
  probe
  misc_feature (1)..(25): SEQ ID NO: 2792; WAN024CKO; Start 455; Stop 479
caacagagatgaaggcagagataga

SEQ ID NO: 337000 - DNA, 25 bp, Artificial
  probe
  misc_feature (1)..(25): SEQ ID NO: 2792; WAN024CKO; Start 379; Stop 403
agagaacagtatggtgccaatgata

SEQ ID NO: 337001 - DNA, 25 bp, Artificial
  probe
  misc_feature (1)..(25): SEQ ID NO: 2792; WAN024CKO; Start 305; Stop 329
acattcttgttggtgatatgagtgt

SEQ ID NO: 337002 - DNA, 25 bp, Artificial
  probe
  misc_feature (1)..(25): SEQ ID NO: 2792; WAN024CKO; Start 466; Stop 490
aaggcagagatagatggttattatg

SEQ ID NO: 337003 - DNA, 25 bp, Artificial
  probe
  misc_feature (1)..(25): SEQ ID NO: 2792; WAN024CKO; Start 458; Stop 482
cagagatgaaggcagagatagatgg

SEQ ID NO: 337004 - DNA, 25 bp, Artificial
  probe
  misc_feature (1)..(25): SEQ ID NO: 2792; WAN024CKO; Start 454; Stop 478
tcaacagagatgaaggcagagatag

SEQ ID NO: 337005 - DNA, 25 bp, Artificial
  probe
  misc_feature (1)..(25): SEQ ID NO: 2792; WAN024CKO; Start 465; Stop 489
gaaggcagagatagatggttattat

SEQ ID NO: 337006 - DNA, 25 bp, Artificial
  probe
  misc_feature (1)..(25): SEQ ID NO: 2792; WAN024CKO; Start 459; Stop 483
agagatgaaggcagagatagatggt

SEQ ID NO: 337007 - DNA, 25 bp, Artificial
  probe
  misc_feature (1)..(25): SEQ ID NO: 2792; WAN024CKO; Start 453; Stop 477
gtcaacagagatgaaggcagagata

SEQ ID NO: 337008 - DNA, 25 bp, Artificial
  probe
  misc_feature (1)..(25): SEQ ID NO: 2792; WAN024CKO; Start 468; Stop 492
ggcagagatagatggttattatgta

SEQ ID NO: 337009 - DNA, 25 bp, Artificial
  probe
  misc_feature (1)..(25): SEQ ID NO: 2792; WAN024CKO; Start 378; Stop 402
aagagaacagtatggtgccaatgat

SEQ ID NO: 337010 - DNA, 25 bp, Artificial
  probe
  misc_feature (1)..(25): SEQ ID NO: 2792; WAN024CKO; Start 383; Stop 407
aacagtatggtgccaatgatatctt

SEQ ID NO: 337011 - DNA, 25 bp, Artificial
  probe
  misc_feature (1)..(25): SEQ ID NO: 2792; WAN024CKO; Start 384; Stop 408
acagtatggtgccaatgatatctta

SEQ ID NO: 337012 - DNA, 25 bp, Artificial
  probe
  misc_feature (1)..(25): SEQ ID NO: 2792; WAN024CKO; Start 155; Stop 179
aatcgttctatgtcttgaagtttcg

SEQ ID NO: 337013 - DNA, 25 bp, Artificial
  probe
  misc_feature (1)..(25): SEQ ID NO: 2792; WAN024CKO; Start 132; Stop 156
aaagcgatttggacttcataagaaa

SEQ ID NO: 337014 - DNA, 25 bp, Artificial
  probe
  misc_feature (1)..(25): SEQ ID NO: 2793; WAN024FP5; Start 476; Stop 500
cctatggactcacaagacaataact

SEQ ID NO: 337015 - DNA, 25 bp, Artificial
  probe
  misc_feature (1)..(25): SEQ ID NO: 2793; WAN024FP5; Start 475; Stop 499
gcctatggactcacaagacaataac

SEQ ID NO: 337016 - DNA, 25 bp, Artificial
  probe
  misc_feature (1)..(25): SEQ ID NO: 2793; WAN024FP5; Start 474; Stop 498
agcctatggactcacaagacaataa

SEQ ID NO: 337017 - DNA, 25 bp, Artificial
  probe
  misc_feature (1)..(25): SEQ ID NO: 2793; WAN024FP5; Start 479; Stop 503
atggactcacaagacaataactaat

SEQ ID NO: 337018 - DNA, 25 bp, Artificial
  probe
  misc_feature (1)..(25): SEQ ID NO: 2793; WAN024FP5; Start 477; Stop 501
ctatggactcacaagacaataacta

SEQ ID NO: 337019 - DNA, 25 bp, Artificial
  probe
  misc_feature (1)..(25): SEQ ID NO: 2793; WAN024FP5; Start 473; Stop 497
cagcctatggactcacaagacaata

SEQ ID NO: 337020 - DNA, 25 bp, Artificial
  probe
  misc_feature (1)..(25): SEQ ID NO: 2793; WAN024FP5; Start 185; Stop 209
cagatgtcatcagccttgagtataa

SEQ ID NO: 337021 - DNA, 25 bp, Artificial
  probe
  misc_feature (1)..(25): SEQ ID NO: 2793; WAN024FP5; Start 184; Stop 208
acagatgtcatcagccttgagtata

SEQ ID NO: 337022 - DNA, 25 bp, Artificial
  probe
  misc_feature (1)..(25): SEQ ID NO: 2793; WAN024FP5; Start 478; Stop 502
tatggactcacaagacaataactaa

SEQ ID NO: 337023 - DNA, 25 bp, Artificial
  probe
  misc_feature (1)..(25): SEQ ID NO: 2793; WAN024FP5; Start 271; Stop 295
atgatgtctgagtttgatgcctata

SEQ ID NO: 337024 - DNA, 25 bp, Artificial
  probe
  misc_feature (1)..(25): SEQ ID NO: 2793; WAN024FP5; Start 272; Stop 296
tgatgtctgagtttgatgcctatat

SEQ ID NO: 337025 - DNA, 25 bp, Artificial
  probe
  misc_feature (1)..(25): SEQ ID NO: 2793; WAN024FP5; Start 275; Stop 299
tgtctgagtttgatgcctatattgg

SEQ ID NO: 337026 - DNA, 25 bp, Artificial
  probe
  misc_feature (1)..(25): SEQ ID NO: 2793; WAN024FP5; Start 270; Stop 294
gatgatgtctgagtttgatgcctat

SEQ ID NO: 337027 - DNA, 25 bp, Artificial
  probe
  misc_feature (1)..(25): SEQ ID NO: 2793; WAN024FP5; Start 7; Stop 31
attgaaatggtagatgaaactggtc

SEQ ID NO: 337028 - DNA, 25 bp, Artificial
  probe
  misc_feature (1)..(25): SEQ ID NO: 2793; WAN024FP5; Start 195; Stop 219
cagccttgagtataaaccagaattg

SEQ ID NO: 337029 - DNA, 25 bp, Artificial
  probe
  misc_feature (1)..(25): SEQ ID NO: 2793; WAN024FP5; Start 274; Stop 298
atgtctgagtttgatgcctatattg

SEQ ID NO: 337030 - DNA, 25 bp, Artificial
  probe
  misc_feature (1)..(25): SEQ ID NO: 2793; WAN024FP5; Start 276; Stop 300
gtctgagtttgatgcctatattggg

SEQ ID NO: 337031 - DNA, 25 bp, Artificial
  probe
  misc_feature (1)..(25): SEQ ID NO: 2793; WAN024FP5; Start 273; Stop 297
gatgtctgagtttgatgcctatatt

SEQ ID NO: 337032 - DNA, 25 bp, Artificial
  probe
  misc_feature (1)..(25): SEQ ID NO: 2793; WAN024FP5; Start 10; Stop 34
gaaatggtagatgaaactggtcaag

SEQ ID NO: 337033 - DNA, 25 bp, Artificial
  probe
  misc_feature (1)..(25): SEQ ID NO: 2793; WAN024FP5; Start 193; Stop 217
atcagccttgagtataaaccagaat

SEQ ID NO: 337034 - DNA, 25 bp, Artificial
  probe
  misc_feature (1)..(25): SEQ ID NO: 2793; WAN024FP5; Start 11; Stop 35
aaatggtagatgaaactggtcaagt

SEQ ID NO: 337035 - DNA, 25 bp, Artificial
  probe
  misc_feature (1)..(25): SEQ ID NO: 2793; WAN024FP5; Start 9; Stop 33
tgaaatggtagatgaaactggtcaa

SEQ ID NO: 337036 - DNA, 25 bp, Artificial
  probe
  misc_feature (1)..(25): SEQ ID NO: 2793; WAN024FP5; Start 8; Stop 32
ttgaaatggtagatgaaactggtca

SEQ ID NO: 337037 - DNA, 25 bp, Artificial
  probe
  misc_feature (1)..(25): SEQ ID NO: 2793; WAN024FP5; Start 194; Stop 218
tcagccttgagtataaaccagaatt

SEQ ID NO: 337038 - DNA, 25 bp, Artificial
  probe
  misc_feature (1)..(25): SEQ ID NO: 2793; WAN024FP5; Start 192; Stop 216
catcagccttgagtataaaccagaa

SEQ ID NO: 337039 - DNA, 25 bp, Artificial
  probe
  misc_feature (1)..(25): SEQ ID NO: 2793; WAN024FP5; Start 188; Stop 212
atgtcatcagccttgagtataaacc

SEQ ID NO: 337040 - DNA, 25 bp, Artificial
  probe
  misc_feature (1)..(25): SEQ ID NO: 2793; WAN024FP5; Start 6; Stop 30
tattgaaatggtagatgaaactggt

SEQ ID NO: 337041 - DNA, 25 bp, Artificial
  probe
  misc_feature (1)..(25): SEQ ID NO: 2793; WAN024FP5; Start 229; Stop 253
tttgacgaagaggatttgcttgaaa

SEQ ID NO: 337042 - DNA, 25 bp, Artificial
  probe
  misc_feature (1)..(25): SEQ ID NO: 2793; WAN024FP5; Start 269; Stop 293
agatgatgtctgagtttgatgccta

SEQ ID NO: 337043 - DNA, 25 bp, Artificial
  probe
  misc_feature (1)..(25): SEQ ID NO: 2793; WAN024FP5; Start 191; Stop 215
tcatcagccttgagtataaaccaga

SEQ ID NO: 337044 - DNA, 25 bp, Artificial
  probe
  misc_feature (1)..(25): SEQ ID NO: 2793; WAN024FP5; Start 190; Stop 214
gtcatcagccttgagtataaaccag

SEQ ID NO: 337045 - DNA, 25 bp, Artificial
  probe
  misc_feature (1)..(25): SEQ ID NO: 2793; WAN024FP5; Start 183; Stop 207
gacagatgtcatcagccttgagtat

SEQ ID NO: 337046 - DNA, 25 bp, Artificial
  probe
  misc_feature (1)..(25): SEQ ID NO: 2793; WAN024FP5; Start 187; Stop 211
gatgtcatcagccttgagtataaac

SEQ ID NO: 337047 - DNA, 25 bp, Artificial
  probe
  misc_feature (1)..(25): SEQ ID NO: 2794; WAN024F24; Start 1636; Stop 1660
gtgaaggtagaggaagactaactaa

SEQ ID NO: 337048 - DNA, 25 bp, Artificial
  probe
  misc_feature (1)..(25): SEQ ID NO: 2794; WAN024F24; Start 1634; Stop 1658
aagtgaaggtagaggaagactaact

SEQ ID NO: 337049 - DNA, 25 bp, Artificial
  probe
  misc_feature (1)..(25): SEQ ID NO: 2794; WAN024F24; Start 1635; Stop 1659
agtgaaggtagaggaagactaacta

SEQ ID NO: 337050 - DNA, 25 bp, Artificial
  probe
  misc_feature (1)..(25): SEQ ID NO: 2794; WAN024F24; Start 1637; Stop 1661
tgaaggtagaggaagactaactaat

SEQ ID NO: 337051 - DNA, 25 bp, Artificial
  probe
  misc_feature (1)..(25): SEQ ID NO: 2794; WAN024F24; Start 427; Stop 451
gaagaaccaacacagaatgtagtct

SEQ ID NO: 337052 - DNA, 25 bp, Artificial
  probe
  misc_feature (1)..(25): SEQ ID NO: 2794; WAN024F24; Start 477; Stop 501
caagattcctgctactattctatcc

SEQ ID NO: 337053 - DNA, 25 bp, Artificial
  probe
  misc_feature (1)..(25): SEQ ID NO: 2794; WAN024F24; Start 366; Stop 390
tatcatagatgaggttcacatgctg

SEQ ID NO: 337054 - DNA, 25 bp, Artificial
  probe
  misc_feature (1)..(25): SEQ ID NO: 2794; WAN024F24; Start 46; Stop 70
cagttagttggtcaagaagttgtgg

SEQ ID NO: 337055 - DNA, 25 bp, Artificial
  probe
  misc_feature (1)..(25): SEQ ID NO: 2794; WAN024F24; Start 365; Stop 389
atatcatagatgaggttcacatgct

SEQ ID NO: 337056 - DNA, 25 bp, Artificial
  probe
  misc_feature (1)..(25): SEQ ID NO: 2794; WAN024F24; Start 475; Stop 499
cacaagattcctgctactattctat

SEQ ID NO: 337057 - DNA, 25 bp, Artificial
  probe
  misc_feature (1)..(25): SEQ ID NO: 2794; WAN024F24; Start 50; Stop 74
tagttggtcaagaagttgtggctaa

SEQ ID NO: 337058 - DNA, 25 bp, Artificial
  probe
  misc_feature (1)..(25): SEQ ID NO: 2794; WAN024F24; Start 49; Stop 73
ttagttggtcaagaagttgtggcta

SEQ ID NO: 337059 - DNA, 25 bp, Artificial
  probe
  misc_feature (1)..(25): SEQ ID NO: 2794; WAN024F24; Start 426; Stop 450
ggaagaaccaacacagaatgtagtc

SEQ ID NO: 337060 - DNA, 25 bp, Artificial
  probe
  misc_feature (1)..(25): SEQ ID NO: 2794; WAN024F24; Start 1381; Stop 1405
aatgaacaccatgctattcttgctt

SEQ ID NO: 337061 - DNA, 25 bp, Artificial
  probe
  misc_feature (1)..(25): SEQ ID NO: 2794; WAN024F24; Start 476; Stop 500
acaagattcctgctactattctatc

SEQ ID NO: 337062 - DNA, 25 bp, Artificial
  probe
  misc_feature (1)..(25): SEQ ID NO: 2794; WAN024F24; Start 1407; Stop 1431
tgagtctaacttcaatgctggtcaa

SEQ ID NO: 337063 - DNA, 25 bp, Artificial
  probe
  misc_feature (1)..(25): SEQ ID NO: 2794; WAN024F24; Start 1411; Stop 1435
tctaacttcaatgctggtcaaacta

SEQ ID NO: 337064 - DNA, 25 bp, Artificial
  probe
  misc_feature (1)..(25): SEQ ID NO: 2794; WAN024F24; Start 1413; Stop 1437
taacttcaatgctggtcaaactatg

SEQ ID NO: 337065 - DNA, 25 bp, Artificial
  probe
  misc_feature (1)..(25): SEQ ID NO: 2794; WAN024F24; Start 1629; Stop 1653
tgataaagtgaaggtagaggaagac

SEQ ID NO: 337066 - DNA, 25 bp, Artificial
  probe
  misc_feature (1)..(25): SEQ ID NO: 2794; WAN024F24; Start 1623; Stop 1647
tttggctgataaagtgaaggtagag

SEQ ID NO: 337067 - DNA, 25 bp, Artificial
  probe
  misc_feature (1)..(25): SEQ ID NO: 2794; WAN024F24; Start 532; Stop 556
aagacacaggatattaaggaacata

SEQ ID NO: 337068 - DNA, 25 bp, Artificial
  probe
  misc_feature (1)..(25): SEQ ID NO: 2794; WAN024F24; Start 531; Stop 555
taagacacaggatattaaggaacat

SEQ ID NO: 337069 - DNA, 25 bp, Artificial
  probe
  misc_feature (1)..(25): SEQ ID NO: 2794; WAN024F24; Start 1628; Stop 1652
ctgataaagtgaaggtagaggaaga

SEQ ID NO: 337070 - DNA, 25 bp, Artificial
  probe
  misc_feature (1)..(25): SEQ ID NO: 2794; WAN024F24; Start 1627; Stop 1651
gctgataaagtgaaggtagaggaag

SEQ ID NO: 337071 - DNA, 25 bp, Artificial
  probe
  misc_feature (1)..(25): SEQ ID NO: 2794; WAN024F24; Start 1412; Stop 1436
ctaacttcaatgctggtcaaactat

SEQ ID NO: 337072 - DNA, 25 bp, Artificial
  probe
  misc_feature (1)..(25): SEQ ID NO: 2794; WAN024F24; Start 248; Stop 272
acggtagtttagaagatgtcattga

SEQ ID NO: 337073 - DNA, 25 bp, Artificial
  probe
  misc_feature (1)..(25): SEQ ID NO: 2794; WAN024F24; Start 790; Stop 814
gctttgtcttgcttgaatcttcttt

SEQ ID NO: 337074 - DNA, 25 bp, Artificial
  probe
  misc_feature (1)..(25): SEQ ID NO: 2794; WAN024F24; Start 530; Stop 554
ttaagacacaggatattaaggaaca

SEQ ID NO: 337075 - DNA, 25 bp, Artificial
  probe
  misc_feature (1)..(25): SEQ ID NO: 2794; WAN024F24; Start 364; Stop 388
tatatcatagatgaggttcacatgc

SEQ ID NO: 337076 - DNA, 25 bp, Artificial
  probe
  misc_feature (1)..(25): SEQ ID NO: 2794; WAN024F24; Start 424; Stop 448
ctggaagaaccaacacagaatgtag

SEQ ID NO: 337077 - DNA, 25 bp, Artificial
  probe
  misc_feature (1)..(25): SEQ ID NO: 2794; WAN024F24; Start 370; Stop 394
atagatgaggttcacatgctgtcta

SEQ ID NO: 337078 - DNA, 25 bp, Artificial
  probe
  misc_feature (1)..(25): SEQ ID NO: 2794; WAN024F24; Start 1380; Stop 1404
caatgaacaccatgctattcttgct

SEQ ID NO: 337079 - DNA, 25 bp, Artificial
  probe
  misc_feature (1)..(25): SEQ ID NO: 2794; WAN024F24; Start 710; Stop 734
ctgaagaaattactggcaccattag

SEQ ID NO: 337080 - DNA, 25 bp, Artificial
  probe
  misc_feature (1)..(25): SEQ ID NO: 2795; WAN024CIQ; Start 69; Stop 93
aaaggctaatcgttgggaaattaca

SEQ ID NO: 337081 - DNA, 25 bp, Artificial
  probe
  misc_feature (1)..(25): SEQ ID NO: 2795; WAN024CIQ; Start 70; Stop 94
aaggctaatcgttgggaaattacac

SEQ ID NO: 337082 - DNA, 25 bp, Artificial
  probe
  misc_feature (1)..(25): SEQ ID NO: 2795; WAN024CIQ; Start 68; Stop 92
aaaaggctaatcgttgggaaattac

SEQ ID NO: 337083 - DNA, 25 bp, Artificial
  probe
  misc_feature (1)..(25): SEQ ID NO: 2795; WAN024CIQ; Start 144; Stop 168
catgatggggcgatatgattttgag

SEQ ID NO: 337084 - DNA, 25 bp, Artificial
  probe
  misc_feature (1)..(25): SEQ ID NO: 2795; WAN024CIQ; Start 93; Stop 117
acgtgtaggagcagatatcaaaata

SEQ ID NO: 337085 - DNA, 25 bp, Artificial
  probe
  misc_feature (1)..(25): SEQ ID NO: 2795; WAN024CIQ; Start 94; Stop 118
cgtgtaggagcagatatcaaaataa

SEQ ID NO: 337086 - DNA, 25 bp, Artificial
  probe
  misc_feature (1)..(25): SEQ ID NO: 2795; WAN024CIQ; Start 126; Stop 150
taattgtgagcatgttgtcatgatg

SEQ ID NO: 337087 - DNA, 25 bp, Artificial
  probe
  misc_feature (1)..(25): SEQ ID NO: 2795; WAN024CIQ; Start 125; Stop 149
gtaattgtgagcatgttgtcatgat

SEQ ID NO: 337088 - DNA, 25 bp, Artificial
  probe
  misc_feature (1)..(25): SEQ ID NO: 2795; WAN024CIQ; Start 7; Stop 31
caagttggaaattttgttgagatga

SEQ ID NO: 337089 - DNA, 25 bp, Artificial
  probe
  misc_feature (1)..(25): SEQ ID NO: 2795; WAN024CIQ; Start 9; Stop 33
agttggaaattttgttgagatgaaa

SEQ ID NO: 337090 - DNA, 25 bp, Artificial
  probe
  misc_feature (1)..(25): SEQ ID NO: 2795; WAN024CIQ; Start 8; Stop 32
aagttggaaattttgttgagatgaa

SEQ ID NO: 337091 - DNA, 25 bp, Artificial
  probe
  misc_feature (1)..(25): SEQ ID NO: 2795; WAN024CIQ; Start 124; Stop 148
agtaattgtgagcatgttgtcatga

SEQ ID NO: 337092 - DNA, 25 bp, Artificial
  probe
  misc_feature (1)..(25): SEQ ID NO: 2795; WAN024CIQ; Start 145; Stop 169
atgatggggcgatatgattttgagc

SEQ ID NO: 337093 - DNA, 25 bp, Artificial
  probe
  misc_feature (1)..(25): SEQ ID NO: 2795; WAN024CIQ; Start 71; Stop 95
aggctaatcgttgggaaattacacg

SEQ ID NO: 337094 - DNA, 25 bp, Artificial
  probe
  misc_feature (1)..(25): SEQ ID NO: 2795; WAN024CIQ; Start 127; Stop 151
aattgtgagcatgttgtcatgatgg

SEQ ID NO: 337095 - DNA, 25 bp, Artificial
  probe
  misc_feature (1)..(25): SEQ ID NO: 2795; WAN024CIQ; Start 10; Stop 34
gttggaaattttgttgagatgaaaa

SEQ ID NO: 337096 - DNA, 25 bp, Artificial
  probe
  misc_feature (1)..(25): SEQ ID NO: 2795; WAN024CIQ; Start 1; Stop 25
atgtatcaagttggaaattttgttg

SEQ ID NO: 337097 - DNA, 25 bp, Artificial
  probe
  misc_feature (1)..(25): SEQ ID NO: 2795; WAN024CIQ; Start 95; Stop 119
gtgtaggagcagatatcaaaataaa

SEQ ID NO: 337098 - DNA, 25 bp, Artificial
  probe
  misc_feature (1)..(25): SEQ ID NO: 2795; WAN024CIQ; Start 6; Stop 30
tcaagttggaaattttgttgagatg

SEQ ID NO: 337099 - DNA, 25 bp, Artificial
  probe
  misc_feature (1)..(25): SEQ ID NO: 2795; WAN024CIQ; Start 72; Stop 96
ggctaatcgttgggaaattacacgt

SEQ ID NO: 337100 - DNA, 25 bp, Artificial
  probe
  misc_feature (1)..(25): SEQ ID NO: 2795; WAN024CIQ; Start 5; Stop 29
atcaagttggaaattttgttgagat

SEQ ID NO: 337101 - DNA, 25 bp, Artificial
  probe
  misc_feature (1)..(25): SEQ ID NO: 2795; WAN024CIQ; Start 150; Stop 174
ggggcgatatgattttgagcgaaaa

SEQ ID NO: 337102 - DNA, 25 bp, Artificial
  probe
  misc_feature (1)..(25): SEQ ID NO: 2795; WAN024CIQ; Start 2; Stop 26
tgtatcaagttggaaattttgttga

SEQ ID NO: 337103 - DNA, 25 bp, Artificial
  probe
  misc_feature (1)..(25): SEQ ID NO: 2795; WAN024CIQ; Start 96; Stop 120
tgtaggagcagatatcaaaataaaa

SEQ ID NO: 337104 - DNA, 25 bp, Artificial
  probe
  misc_feature (1)..(25): SEQ ID NO: 2795; WAN024CIQ; Start 3; Stop 27
gtatcaagttggaaattttgttgag

SEQ ID NO: 337105 - DNA, 25 bp, Artificial
  probe
  misc_feature (1)..(25): SEQ ID NO: 2795; WAN024CIQ; Start 148; Stop 172
atggggcgatatgattttgagcgaa

SEQ ID NO: 337106 - DNA, 25 bp, Artificial
  probe
  misc_feature (1)..(25): SEQ ID NO: 2795; WAN024CIQ; Start 4; Stop 28
tatcaagttggaaattttgttgaga

SEQ ID NO: 337107 - DNA, 25 bp, Artificial
  probe
  misc_feature (1)..(25): SEQ ID NO: 2795; WAN024CIQ; Start 142; Stop 166
gtcatgatggggcgatatgattttg

SEQ ID NO: 337108 - DNA, 25 bp, Artificial
  probe
  misc_feature (1)..(25): SEQ ID NO: 2795; WAN024CIQ; Start 143; Stop 167
tcatgatggggcgatatgattttga

SEQ ID NO: 337109 - DNA, 25 bp, Artificial
  probe
  misc_feature (1)..(25): SEQ ID NO: 2795; WAN024CIQ; Start 141; Stop 165
tgtcatgatggggcgatatgatttt

SEQ ID NO: 337110 - DNA, 25 bp, Artificial
  probe
  misc_feature (1)..(25): SEQ ID NO: 2795; WAN024CIQ; Start 140; Stop 164
ttgtcatgatggggcgatatgattt

SEQ ID NO: 337111 - DNA, 25 bp, Artificial
  probe
  misc_feature (1)..(25): SEQ ID NO: 2795; WAN024CIQ; Start 98; Stop 122
taggagcagatatcaaaataaaatg

SEQ ID NO: 337112 - DNA, 25 bp, Artificial
  probe
  misc_feature (1)..(25): SEQ ID NO: 2795; WAN024CIQ; Start 97; Stop 121
gtaggagcagatatcaaaataaaat

SEQ ID NO: 337113 - DNA, 25 bp, Artificial
  probe
  misc_feature (1)..(25): SEQ ID NO: 2796; WAN024CSW; Start 1187; Stop 1211
cctatacatacatcaagaagacggt

SEQ ID NO: 337114 - DNA, 25 bp, Artificial
  probe
  misc_feature (1)..(25): SEQ ID NO: 2796; WAN024CSW; Start 1186; Stop 1210
acctatacatacatcaagaagacgg

SEQ ID NO: 337115 - DNA, 25 bp, Artificial
  probe
  misc_feature (1)..(25): SEQ ID NO: 2796; WAN024CSW; Start 1179; Stop 1203
ccatccgacctatacatacatcaag

SEQ ID NO: 337116 - DNA, 25 bp, Artificial
  probe
  misc_feature (1)..(25): SEQ ID NO: 2796; WAN024CSW; Start 1176; Stop 1200
gttccatccgacctatacatacatc

SEQ ID NO: 337117 - DNA, 25 bp, Artificial
  probe
  misc_feature (1)..(25): SEQ ID NO: 2796; WAN024CSW; Start 1133; Stop 1157
cttatgatggtgtggatattagcga

SEQ ID NO: 337118 - DNA, 25 bp, Artificial
  probe
  misc_feature (1)..(25): SEQ ID NO: 2796; WAN024CSW; Start 1183; Stop 1207
ccgacctatacatacatcaagaaga

SEQ ID NO: 337119 - DNA, 25 bp, Artificial
  probe
  misc_feature (1)..(25): SEQ ID NO: 2796; WAN024CSW; Start 1182; Stop 1206
tccgacctatacatacatcaagaag

SEQ ID NO: 337120 - DNA, 25 bp, Artificial
  probe
  misc_feature (1)..(25): SEQ ID NO: 2796; WAN024CSW; Start 1180; Stop 1204
catccgacctatacatacatcaaga

SEQ ID NO: 337121 - DNA, 25 bp, Artificial
  probe
  misc_feature (1)..(25): SEQ ID NO: 2796; WAN024CSW; Start 1178; Stop 1202
tccatccgacctatacatacatcaa

SEQ ID NO: 337122 - DNA, 25 bp, Artificial
  probe
  misc_feature (1)..(25): SEQ ID NO: 2796; WAN024CSW; Start 1177; Stop 1201
ttccatccgacctatacatacatca

SEQ ID NO: 337123 - DNA, 25 bp, Artificial
  probe
  misc_feature (1)..(25): SEQ ID NO: 2796; WAN024CSW; Start 1134; Stop 1158
ttatgatggtgtggatattagcgac

SEQ ID NO: 337124 - DNA, 25 bp, Artificial
  probe
  misc_feature (1)..(25): SEQ ID NO: 2796; WAN024CSW; Start 1132; Stop 1156
acttatgatggtgtggatattagcg

SEQ ID NO: 337125 - DNA, 25 bp, Artificial
  probe
  misc_feature (1)..(25): SEQ ID NO: 2796; WAN024CSW; Start 1181; Stop 1205
atccgacctatacatacatcaagaa

SEQ ID NO: 337126 - DNA, 25 bp, Artificial
  probe
  misc_feature (1)..(25): SEQ ID NO: 2796; WAN024CSW; Start 1402; Stop 1426
aagatggacttgattgataagatgc

SEQ ID NO: 337127 - DNA, 25 bp, Artificial
  probe
  misc_feature (1)..(25): SEQ ID NO: 2796; WAN024CSW; Start 1190; Stop 1214
atacatacatcaagaagacggttcg

SEQ ID NO: 337128 - DNA, 25 bp, Artificial
  probe
  misc_feature (1)..(25): SEQ ID NO: 2796; WAN024CSW; Start 1185; Stop 1209
gacctatacatacatcaagaagacg

SEQ ID NO: 337129 - DNA, 25 bp, Artificial
  probe
  misc_feature (1)..(25): SEQ ID NO: 2796; WAN024CSW; Start 1184; Stop 1208
cgacctatacatacatcaagaagac

SEQ ID NO: 337130 - DNA, 25 bp, Artificial
  probe
  misc_feature (1)..(25): SEQ ID NO: 2796; WAN024CSW; Start 1403; Stop 1427
agatggacttgattgataagatgcg

SEQ ID NO: 337131 - DNA, 25 bp, Artificial
  probe
  misc_feature (1)..(25): SEQ ID NO: 2796; WAN024CSW; Start 1188; Stop 1212
ctatacatacatcaagaagacggtt

SEQ ID NO: 337132 - DNA, 25 bp, Artificial
  probe
  misc_feature (1)..(25): SEQ ID NO: 2796; WAN024CSW; Start 1189; Stop 1213
tatacatacatcaagaagacggttc

SEQ ID NO: 337133 - DNA, 25 bp, Artificial
  probe
  misc_feature (1)..(25): SEQ ID NO: 2796; WAN024CSW; Start 1175; Stop 1199
tgttccatccgacctatacatacat

SEQ ID NO: 337134 - DNA, 25 bp, Artificial
  probe
  misc_feature (1)..(25): SEQ ID NO: 2796; WAN024CSW; Start 1131; Stop 1155
cacttatgatggtgtggatattagc

SEQ ID NO: 337135 - DNA, 25 bp, Artificial
  probe
  misc_feature (1)..(25): SEQ ID NO: 2796; WAN024CSW; Start 1135; Stop 1159
tatgatggtgtggatattagcgaca

SEQ ID NO: 337136 - DNA, 25 bp, Artificial
  probe
  misc_feature (1)..(25): SEQ ID NO: 2796; WAN024CSW; Start 1136; Stop 1160
atgatggtgtggatattagcgacat

SEQ ID NO: 337137 - DNA, 25 bp, Artificial
  probe
  misc_feature (1)..(25): SEQ ID NO: 2796; WAN024CSW; Start 1021; Stop 1045
cgcaatacgattaagctgtctaata

SEQ ID NO: 337138 - DNA, 25 bp, Artificial
  probe
  misc_feature (1)..(25): SEQ ID NO: 2796; WAN024CSW; Start 671; Stop 695
gtgtctttcttgtggatacctatga

SEQ ID NO: 337139 - DNA, 25 bp, Artificial
  probe
  misc_feature (1)..(25): SEQ ID NO: 2796; WAN024CSW; Start 611; Stop 635
tacaggtttatggcaatgactatga

SEQ ID NO: 337140 - DNA, 25 bp, Artificial
  probe
  misc_feature (1)..(25): SEQ ID NO: 2796; WAN024CSW; Start 670; Stop 694
tgtgtctttcttgtggatacctatg

SEQ ID NO: 337141 - DNA, 25 bp, Artificial
  probe
  misc_feature (1)..(25): SEQ ID NO: 2796; WAN024CSW; Start 669; Stop 693
ttgtgtctttcttgtggatacctat

SEQ ID NO: 337142 - DNA, 25 bp, Artificial
  probe
  misc_feature (1)..(25): SEQ ID NO: 2796; WAN024CSW; Start 668; Stop 692
attgtgtctttcttgtggataccta

SEQ ID NO: 337143 - DNA, 25 bp, Artificial
  probe
  misc_feature (1)..(25): SEQ ID NO: 2796; WAN024CSW; Start 667; Stop 691
aattgtgtctttcttgtggatacct

SEQ ID NO: 337144 - DNA, 25 bp, Artificial
  probe
  misc_feature (1)..(25): SEQ ID NO: 2796; WAN024CSW; Start 666; Stop 690
aaattgtgtctttcttgtggatacc

SEQ ID NO: 337145 - DNA, 25 bp, Artificial
  probe
  misc_feature (1)..(25): SEQ ID NO: 2796; WAN024CSW; Start 213; Stop 237
ctatttggagtcgcttggttatcat

SEQ ID NO: 337146 - DNA, 25 bp, Artificial
  probe
  misc_feature (1)..(25): SEQ ID NO: 2797; WAN024DAF; Start 324; Stop 348
tctaactcaaggaaggtacaaggat

SEQ ID NO: 337147 - DNA, 25 bp, Artificial
  probe
  misc_feature (1)..(25): SEQ ID NO: 2797; WAN024DAF; Start 335; Stop 359
gaaggtacaaggatagtaatctgcc

SEQ ID NO: 337148 - DNA, 25 bp, Artificial
  probe
  misc_feature (1)..(25): SEQ ID NO: 2797; WAN024DAF; Start 334; Stop 358
ggaaggtacaaggatagtaatctgc

SEQ ID NO: 337149 - DNA, 25 bp, Artificial
  probe
  misc_feature (1)..(25): SEQ ID NO: 2797; WAN024DAF; Start 326; Stop 350
taactcaaggaaggtacaaggatag

SEQ ID NO: 337150 - DNA, 25 bp, Artificial
  probe
  misc_feature (1)..(25): SEQ ID NO: 2797; WAN024DAF; Start 325; Stop 349
ctaactcaaggaaggtacaaggata

SEQ ID NO: 337151 - DNA, 25 bp, Artificial
  probe
  misc_feature (1)..(25): SEQ ID NO: 2797; WAN024DAF; Start 329; Stop 353
ctcaaggaaggtacaaggatagtaa

SEQ ID NO: 337152 - DNA, 25 bp, Artificial
  probe
  misc_feature (1)..(25): SEQ ID NO: 2797; WAN024DAF; Start 333; Stop 357
aggaaggtacaaggatagtaatctg

SEQ ID NO: 337153 - DNA, 25 bp, Artificial
  probe
  misc_feature (1)..(25): SEQ ID NO: 2797; WAN024DAF; Start 323; Stop 347
ctctaactcaaggaaggtacaagga

SEQ ID NO: 337154 - DNA, 25 bp, Artificial
  probe
  misc_feature (1)..(25): SEQ ID NO: 2797; WAN024DAF; Start 328; Stop 352
actcaaggaaggtacaaggatagta

SEQ ID NO: 337155 - DNA, 25 bp, Artificial
  probe
  misc_feature (1)..(25): SEQ ID NO: 2797; WAN024DAF; Start 330; Stop 354
tcaaggaaggtacaaggatagtaat

SEQ ID NO: 337156 - DNA, 25 bp, Artificial
  probe
  misc_feature (1)..(25): SEQ ID NO: 2797; WAN024DAF; Start 327; Stop 351
aactcaaggaaggtacaaggatagt

SEQ ID NO: 337157 - DNA, 25 bp, Artificial
  probe
  misc_feature (1)..(25): SEQ ID NO: 2797; WAN024DAF; Start 332; Stop 356
aaggaaggtacaaggatagtaatct

SEQ ID NO: 337158 - DNA, 25 bp, Artificial
  probe
  misc_feature (1)..(25): SEQ ID NO: 2797; WAN024DAF; Start 331; Stop 355
caaggaaggtacaaggatagtaatc

SEQ ID NO: 337159 - DNA, 25 bp, Artificial
  probe
  misc_feature (1)..(25): SEQ ID NO: 2797; WAN024DAF; Start 16; Stop 40
aatccaatgaatcacaatgtctcgc

SEQ ID NO: 337160 - DNA, 25 bp, Artificial
  probe
  misc_feature (1)..(25): SEQ ID NO: 2797; WAN024DAF; Start 315; Stop 339
ttatcaagctctaactcaaggaagg

SEQ ID NO: 337161 - DNA, 25 bp, Artificial
  probe
  misc_feature (1)..(25): SEQ ID NO: 2797; WAN024DAF; Start 317; Stop 341
atcaagctctaactcaaggaaggta

SEQ ID NO: 337162 - DNA, 25 bp, Artificial
  probe
  misc_feature (1)..(25): SEQ ID NO: 2797; WAN024DAF; Start 316; Stop 340
tatcaagctctaactcaaggaaggt

SEQ ID NO: 337163 - DNA, 25 bp, Artificial
  probe
  misc_feature (1)..(25): SEQ ID NO: 2797; WAN024DAF; Start 275; Stop 299
agtatctctatgtaaccttgacaga

SEQ ID NO: 337164 - DNA, 25 bp, Artificial
  probe
  misc_feature (1)..(25): SEQ ID NO: 2797; WAN024DAF; Start 279; Stop 303
tctctatgtaaccttgacagatcat

SEQ ID NO: 337165 - DNA, 25 bp, Artificial
  probe
  misc_feature (1)..(25): SEQ ID NO: 2797; WAN024DAF; Start 672; Stop 696
taaccaatcacttctggatatggaa

SEQ ID NO: 337166 - DNA, 25 bp, Artificial
  probe
  misc_feature (1)..(25): SEQ ID NO: 2797; WAN024DAF; Start 313; Stop 337
tcttatcaagctctaactcaaggaa

SEQ ID NO: 337167 - DNA, 25 bp, Artificial
  probe
  misc_feature (1)..(25): SEQ ID NO: 2797; WAN024DAF; Start 312; Stop 336
ttcttatcaagctctaactcaagga

SEQ ID NO: 337168 - DNA, 25 bp, Artificial
  probe
  misc_feature (1)..(25): SEQ ID NO: 2797; WAN024DAF; Start 308; Stop 332
actgttcttatcaagctctaactca

SEQ ID NO: 337169 - DNA, 25 bp, Artificial
  probe
  misc_feature (1)..(25): SEQ ID NO: 2797; WAN024DAF; Start 671; Stop 695
ataaccaatcacttctggatatgga

SEQ ID NO: 337170 - DNA, 25 bp, Artificial
  probe
  misc_feature (1)..(25): SEQ ID NO: 2797; WAN024DAF; Start 311; Stop 335
gttcttatcaagctctaactcaagg

SEQ ID NO: 337171 - DNA, 25 bp, Artificial
  probe
  misc_feature (1)..(25): SEQ ID NO: 2797; WAN024DAF; Start 274; Stop 298
gagtatctctatgtaaccttgacag

SEQ ID NO: 337172 - DNA, 25 bp, Artificial
  probe
  misc_feature (1)..(25): SEQ ID NO: 2797; WAN024DAF; Start 320; Stop 344
aagctctaactcaaggaaggtacaa

SEQ ID NO: 337173 - DNA, 25 bp, Artificial
  probe
  misc_feature (1)..(25): SEQ ID NO: 2797; WAN024DAF; Start 314; Stop 338
cttatcaagctctaactcaaggaag

SEQ ID NO: 337174 - DNA, 25 bp, Artificial
  probe
  misc_feature (1)..(25): SEQ ID NO: 2797; WAN024DAF; Start 258; Stop 282
tcattatccgattcaagagtatctc

SEQ ID NO: 337175 - DNA, 25 bp, Artificial
  probe
  misc_feature (1)..(25): SEQ ID NO: 2797; WAN024DAF; Start 670; Stop 694
gataaccaatcacttctggatatgg

SEQ ID NO: 337176 - DNA, 25 bp, Artificial
  probe
  misc_feature (1)..(25): SEQ ID NO: 2797; WAN024DAF; Start 47; Stop 71
gaaatgataagggagaagaggtgat

SEQ ID NO: 337177 - DNA, 25 bp, Artificial
  probe
  misc_feature (1)..(25): SEQ ID NO: 2797; WAN024DAF; Start 48; Stop 72
aaatgataagggagaagaggtgatt

SEQ ID NO: 337178 - DNA, 25 bp, Artificial
  probe
  misc_feature (1)..(25): SEQ ID NO: 2797; WAN024DAF; Start 46; Stop 70
agaaatgataagggagaagaggtga

SEQ ID NO: 337179 - DNA, 25 bp, Artificial
  probe
  misc_feature (1)..(25): SEQ ID NO: 2798; WAN024D6O; Start 137; Stop 161
atggatacgagaatgttcagttagc

SEQ ID NO: 337180 - DNA, 25 bp, Artificial
  probe
  misc_feature (1)..(25): SEQ ID NO: 2798; WAN024D6O; Start 136; Stop 160
aatggatacgagaatgttcagttag

SEQ ID NO: 337181 - DNA, 25 bp, Artificial
  probe
  misc_feature (1)..(25): SEQ ID NO: 2798; WAN024D6O; Start 139; Stop 163
ggatacgagaatgttcagttagctt

SEQ ID NO: 337182 - DNA, 25 bp, Artificial
  probe
  misc_feature (1)..(25): SEQ ID NO: 2798; WAN024D6O; Start 138; Stop 162
tggatacgagaatgttcagttagct

SEQ ID NO: 337183 - DNA, 25 bp, Artificial
  probe
  misc_feature (1)..(25): SEQ ID NO: 2798; WAN024D6O; Start 46; Stop 70
tggaaggataatagaagtttgtgga

SEQ ID NO: 337184 - DNA, 25 bp, Artificial
  probe
  misc_feature (1)..(25): SEQ ID NO: 2798; WAN024D6O; Start 170; Stop 194
tatttgcctttgtcttacttccttt

SEQ ID NO: 337185 - DNA, 25 bp, Artificial
  probe
  misc_feature (1)..(25): SEQ ID NO: 2798; WAN024D6O; Start 45; Stop 69
ttggaaggataatagaagtttgtgg

SEQ ID NO: 337186 - DNA, 25 bp, Artificial
  probe
  misc_feature (1)..(25): SEQ ID NO: 2798; WAN024D6O; Start 47; Stop 71
ggaaggataatagaagtttgtggaa

SEQ ID NO: 337187 - DNA, 25 bp, Artificial
  probe
  misc_feature (1)..(25): SEQ ID NO: 2798; WAN024D6O; Start 135; Stop 159
aaatggatacgagaatgttcagtta

SEQ ID NO: 337188 - DNA, 25 bp, Artificial
  probe
  misc_feature (1)..(25): SEQ ID NO: 2798; WAN024D6O; Start 140; Stop 164
gatacgagaatgttcagttagcttt

SEQ ID NO: 337189 - DNA, 25 bp, Artificial
  probe
  misc_feature (1)..(25): SEQ ID NO: 2798; WAN024D6O; Start 44; Stop 68
tttggaaggataatagaagtttgtg

SEQ ID NO: 337190 - DNA, 25 bp, Artificial
  probe
  misc_feature (1)..(25): SEQ ID NO: 2798; WAN024D6O; Start 48; Stop 72
gaaggataatagaagtttgtggaat

SEQ ID NO: 337191 - DNA, 25 bp, Artificial
  probe
  misc_feature (1)..(25): SEQ ID NO: 2798; WAN024D6O; Start 49; Stop 73
aaggataatagaagtttgtggaatc

SEQ ID NO: 337192 - DNA, 25 bp, Artificial
  probe
  misc_feature (1)..(25): SEQ ID NO: 2798; WAN024D6O; Start 171; Stop 195
atttgcctttgtcttacttcctttt

SEQ ID NO: 337193 - DNA, 25 bp, Artificial
  probe
  misc_feature (1)..(25): SEQ ID NO: 2798; WAN024D6O; Start 134; Stop 158
aaaatggatacgagaatgttcagtt

SEQ ID NO: 337194 - DNA, 25 bp, Artificial
  probe
  misc_feature (1)..(25): SEQ ID NO: 2798; WAN024D6O; Start 27; Stop 51
agcctttatagtgtcattttggaag

SEQ ID NO: 337195 - DNA, 25 bp, Artificial
  probe
  misc_feature (1)..(25): SEQ ID NO: 2798; WAN024D6O; Start 26; Stop 50
tagcctttatagtgtcattttggaa

SEQ ID NO: 337196 - DNA, 25 bp, Artificial
  probe
  misc_feature (1)..(25): SEQ ID NO: 2798; WAN024D6O; Start 25; Stop 49
ttagcctttatagtgtcattttgga

SEQ ID NO: 337197 - DNA, 25 bp, Artificial
  probe
  misc_feature (1)..(25): SEQ ID NO: 2798; WAN024D6O; Start 58; Stop 82
agaagtttgtggaatccagtattat

SEQ ID NO: 337198 - DNA, 25 bp, Artificial
  probe
  misc_feature (1)..(25): SEQ ID NO: 2798; WAN024D6O; Start 56; Stop 80
atagaagtttgtggaatccagtatt

SEQ ID NO: 337199 - DNA, 25 bp, Artificial
  probe
  misc_feature (1)..(25): SEQ ID NO: 2798; WAN024D6O; Start 55; Stop 79
aatagaagtttgtggaatccagtat

SEQ ID NO: 337200 - DNA, 25 bp, Artificial
  probe
  misc_feature (1)..(25): SEQ ID NO: 2798; WAN024D6O; Start 53; Stop 77
ataatagaagtttgtggaatccagt

SEQ ID NO: 337201 - DNA, 25 bp, Artificial
  probe
  misc_feature (1)..(25): SEQ ID NO: 2798; WAN024D6O; Start 21; Stop 45
tgtattagcctttatagtgtcattt

SEQ ID NO: 337202 - DNA, 25 bp, Artificial
  probe
  misc_feature (1)..(25): SEQ ID NO: 2798; WAN024D6O; Start 20; Stop 44
ttgtattagcctttatagtgtcatt

SEQ ID NO: 337203 - DNA, 25 bp, Artificial
  probe
  misc_feature (1)..(25): SEQ ID NO: 2798; WAN024D6O; Start 36; Stop 60
agtgtcattttggaaggataataga

SEQ ID NO: 337204 - DNA, 25 bp, Artificial
  probe
  misc_feature (1)..(25): SEQ ID NO: 2798; WAN024D6O; Start 18; Stop 42
aattgtattagcctttatagtgtca

SEQ ID NO: 337205 - DNA, 25 bp, Artificial
  probe
  misc_feature (1)..(25): SEQ ID NO: 2798; WAN024D6O; Start 52; Stop 76
gataatagaagtttgtggaatccag

SEQ ID NO: 337206 - DNA, 25 bp, Artificial
  probe
  misc_feature (1)..(25): SEQ ID NO: 2798; WAN024D6O; Start 57; Stop 81
tagaagtttgtggaatccagtatta

SEQ ID NO: 337207 - DNA, 25 bp, Artificial
  probe
  misc_feature (1)..(25): SEQ ID NO: 2798; WAN024D6O; Start 54; Stop 78
taatagaagtttgtggaatccagta

SEQ ID NO: 337208 - DNA, 25 bp, Artificial
  probe
  misc_feature (1)..(25): SEQ ID NO: 2798; WAN024D6O; Start 24; Stop 48
attagcctttatagtgtcattttgg

SEQ ID NO: 337209 - DNA, 25 bp, Artificial
  probe
  misc_feature (1)..(25): SEQ ID NO: 2798; WAN024D6O; Start 19; Stop 43
attgtattagcctttatagtgtcat

SEQ ID NO: 337210 - DNA, 25 bp, Artificial
  probe
  misc_feature (1)..(25): SEQ ID NO: 2798; WAN024D6O; Start 59; Stop 83
gaagtttgtggaatccagtattatt

SEQ ID NO: 337211 - DNA, 25 bp, Artificial
  probe
  misc_feature (1)..(25): SEQ ID NO: 2798; WAN024D6O; Start 141; Stop 165
atacgagaatgttcagttagctttt

SEQ ID NO: 337212 - DNA, 25 bp, Artificial
  probe
  misc_feature (1)..(25): SEQ ID NO: 2799; WAN024FQU; Start 212; Stop 236
ccgcaataggtatggatacattctt

SEQ ID NO: 337213 - DNA, 25 bp, Artificial
  probe
  misc_feature (1)..(25): SEQ ID NO: 2799; WAN024FQU; Start 207; Stop 231
cataaccgcaataggtatggataca

SEQ ID NO: 337214 - DNA, 25 bp, Artificial
  probe
  misc_feature (1)..(25): SEQ ID NO: 2799; WAN024FQU; Start 206; Stop 230
acataaccgcaataggtatggatac

SEQ ID NO: 337215 - DNA, 25 bp, Artificial
  probe
  misc_feature (1)..(25): SEQ ID NO: 2799; WAN024FQU; Start 209; Stop 233
taaccgcaataggtatggatacatt

SEQ ID NO: 337216 - DNA, 25 bp, Artificial
  probe
  misc_feature (1)..(25): SEQ ID NO: 2799; WAN024FQU; Start 205; Stop 229
aacataaccgcaataggtatggata

SEQ ID NO: 337217 - DNA, 25 bp, Artificial
  probe
  misc_feature (1)..(25): SEQ ID NO: 2799; WAN024FQU; Start 208; Stop 232
ataaccgcaataggtatggatacat

SEQ ID NO: 337218 - DNA, 25 bp, Artificial
  probe
  misc_feature (1)..(25): SEQ ID NO: 2799; WAN024FQU; Start 210; Stop 234
aaccgcaataggtatggatacattc

SEQ ID NO: 337219 - DNA, 25 bp, Artificial
  probe
  misc_feature (1)..(25): SEQ ID NO: 2799; WAN024FQU; Start 138; Stop 162
tatccctcttactctcatagccatt

SEQ ID NO: 337220 - DNA, 25 bp, Artificial
  probe
  misc_feature (1)..(25): SEQ ID NO: 2799; WAN024FQU; Start 137; Stop 161
ttatccctcttactctcatagccat

SEQ ID NO: 337221 - DNA, 25 bp, Artificial
  probe
  misc_feature (1)..(25): SEQ ID NO: 2799; WAN024FQU; Start 194; Stop 218
ggaagaatctaaacataaccgcaat

SEQ ID NO: 337222 - DNA, 25 bp, Artificial
  probe
  misc_feature (1)..(25): SEQ ID NO: 2799; WAN024FQU; Start 139; Stop 163
atccctcttactctcatagccattt

SEQ ID NO: 337223 - DNA, 25 bp, Artificial
  probe
  misc_feature (1)..(25): SEQ ID NO: 2799; WAN024FQU; Start 211; Stop 235
accgcaataggtatggatacattct

SEQ ID NO: 337224 - DNA, 25 bp, Artificial
  probe
  misc_feature (1)..(25): SEQ ID NO: 2799; WAN024FQU; Start 190; Stop 214
gatgggaagaatctaaacataaccg

SEQ ID NO: 337225 - DNA, 25 bp, Artificial
  probe
  misc_feature (1)..(25): SEQ ID NO: 2799; WAN024FQU; Start 197; Stop 221
agaatctaaacataaccgcaatagg

SEQ ID NO: 337226 - DNA, 25 bp, Artificial
  probe
  misc_feature (1)..(25): SEQ ID NO: 2799; WAN024FQU; Start 73; Stop 97
ttagatgatataatgagtagtggca

SEQ ID NO: 337227 - DNA, 25 bp, Artificial
  probe
  misc_feature (1)..(25): SEQ ID NO: 2799; WAN024FQU; Start 193; Stop 217
gggaagaatctaaacataaccgcaa

SEQ ID NO: 337228 - DNA, 25 bp, Artificial
  probe
  misc_feature (1)..(25): SEQ ID NO: 2799; WAN024FQU; Start 191; Stop 215
atgggaagaatctaaacataaccgc

SEQ ID NO: 337229 - DNA, 25 bp, Artificial
  probe
  misc_feature (1)..(25): SEQ ID NO: 2799; WAN024FQU; Start 213; Stop 237
cgcaataggtatggatacattcttt

SEQ ID NO: 337230 - DNA, 25 bp, Artificial
  probe
  misc_feature (1)..(25): SEQ ID NO: 2799; WAN024FQU; Start 192; Stop 216
tgggaagaatctaaacataaccgca

SEQ ID NO: 337231 - DNA, 25 bp, Artificial
  probe
  misc_feature (1)..(25): SEQ ID NO: 2799; WAN024FQU; Start 274; Stop 298
cctacatccgaggtctttatcataa

SEQ ID NO: 337232 - DNA, 25 bp, Artificial
  probe
  misc_feature (1)..(25): SEQ ID NO: 2799; WAN024FQU; Start 196; Stop 220
aagaatctaaacataaccgcaatag

SEQ ID NO: 337233 - DNA, 25 bp, Artificial
  probe
  misc_feature (1)..(25): SEQ ID NO: 2799; WAN024FQU; Start 195; Stop 219
gaagaatctaaacataaccgcaata

SEQ ID NO: 337234 - DNA, 25 bp, Artificial
  probe
  misc_feature (1)..(25): SEQ ID NO: 2799; WAN024FQU; Start 214; Stop 238
gcaataggtatggatacattctttg

SEQ ID NO: 337235 - DNA, 25 bp, Artificial
  probe
  misc_feature (1)..(25): SEQ ID NO: 2799; WAN024FQU; Start 204; Stop 228
aaacataaccgcaataggtatggat

SEQ ID NO: 337236 - DNA, 25 bp, Artificial
  probe
  misc_feature (1)..(25): SEQ ID NO: 2799; WAN024FQU; Start 203; Stop 227
taaacataaccgcaataggtatgga

SEQ ID NO: 337237 - DNA, 25 bp, Artificial
  probe
  misc_feature (1)..(25): SEQ ID NO: 2799; WAN024FQU; Start 202; Stop 226
ctaaacataaccgcaataggtatgg

SEQ ID NO: 337238 - DNA, 25 bp, Artificial
  probe
  misc_feature (1)..(25): SEQ ID NO: 2799; WAN024FQU; Start 273; Stop 297
gcctacatccgaggtctttatcata

SEQ ID NO: 337239 - DNA, 25 bp, Artificial
  probe
  misc_feature (1)..(25): SEQ ID NO: 2799; WAN024FQU; Start 275; Stop 299
ctacatccgaggtctttatcataaa

SEQ ID NO: 337240 - DNA, 25 bp, Artificial
  probe
  misc_feature (1)..(25): SEQ ID NO: 2799; WAN024FQU; Start 198; Stop 222
gaatctaaacataaccgcaataggt

SEQ ID NO: 337241 - DNA, 25 bp, Artificial
  probe
  misc_feature (1)..(25): SEQ ID NO: 2799; WAN024FQU; Start 201; Stop 225
tctaaacataaccgcaataggtatg

SEQ ID NO: 337242 - DNA, 25 bp, Artificial
  probe
  misc_feature (1)..(25): SEQ ID NO: 2799; WAN024FQU; Start 199; Stop 223
aatctaaacataaccgcaataggta

SEQ ID NO: 337243 - DNA, 25 bp, Artificial
  probe
  misc_feature (1)..(25): SEQ ID NO: 2799; WAN024FQU; Start 1; Stop 25
atgtatctggtcttggcaattggat

SEQ ID NO: 337244 - DNA, 25 bp, Artificial
  probe
  misc_feature (1)..(25): SEQ ID NO: 2799; WAN024FQU; Start 23; Stop 47
gattttctattgcctttgtttctgc

SEQ ID NO: 337245 - DNA, 25 bp, Artificial
  probe
  misc_feature (1)..(25): SEQ ID NO: 2800; WAN024ETW; Start 248; Stop 272
gtaagacttggagactatggttgaa

SEQ ID NO: 337246 - DNA, 25 bp, Artificial
  probe
  misc_feature (1)..(25): SEQ ID NO: 2800; WAN024ETW; Start 249; Stop 273
taagacttggagactatggttgaag

SEQ ID NO: 337247 - DNA, 25 bp, Artificial
  probe
  misc_feature (1)..(25): SEQ ID NO: 2800; WAN024ETW; Start 40; Stop 64
attgttgaaggaattacggaatggt

SEQ ID NO: 337248 - DNA, 25 bp, Artificial
  probe
  misc_feature (1)..(25): SEQ ID NO: 2800; WAN024ETW; Start 245; Stop 269
ttcgtaagacttggagactatggtt

SEQ ID NO: 337249 - DNA, 25 bp, Artificial
  probe
  misc_feature (1)..(25): SEQ ID NO: 2800; WAN024ETW; Start 41; Stop 65
ttgttgaaggaattacggaatggtt

SEQ ID NO: 337250 - DNA, 25 bp, Artificial
  probe
  misc_feature (1)..(25): SEQ ID NO: 2800; WAN024ETW; Start 247; Stop 271
cgtaagacttggagactatggttga

SEQ ID NO: 337251 - DNA, 25 bp, Artificial
  probe
  misc_feature (1)..(25): SEQ ID NO: 2800; WAN024ETW; Start 246; Stop 270
tcgtaagacttggagactatggttg

SEQ ID NO: 337252 - DNA, 25 bp, Artificial
  probe
  misc_feature (1)..(25): SEQ ID NO: 2800; WAN024ETW; Start 244; Stop 268
gttcgtaagacttggagactatggt

SEQ ID NO: 337253 - DNA, 25 bp, Artificial
  probe
  misc_feature (1)..(25): SEQ ID NO: 2800; WAN024ETW; Start 42; Stop 66
tgttgaaggaattacggaatggttg

SEQ ID NO: 337254 - DNA, 25 bp, Artificial
  probe
  misc_feature (1)..(25): SEQ ID NO: 2800; WAN024ETW; Start 250; Stop 274
aagacttggagactatggttgaagg

SEQ ID NO: 337255 - DNA, 25 bp, Artificial
  probe
  misc_feature (1)..(25): SEQ ID NO: 2800; WAN024ETW; Start 243; Stop 267
agttcgtaagacttggagactatgg

SEQ ID NO: 337256 - DNA, 25 bp, Artificial
  probe
  misc_feature (1)..(25): SEQ ID NO: 2800; WAN024ETW; Start 355; Stop 379
gttgctctcatgttgattatctacg

SEQ ID NO: 337257 - DNA, 25 bp, Artificial
  probe
  misc_feature (1)..(25): SEQ ID NO: 2800; WAN024ETW; Start 352; Stop 376
tcagttgctctcatgttgattatct

SEQ ID NO: 337258 - DNA, 25 bp, Artificial
  probe
  misc_feature (1)..(25): SEQ ID NO: 2800; WAN024ETW; Start 351; Stop 375
ttcagttgctctcatgttgattatc

SEQ ID NO: 337259 - DNA, 25 bp, Artificial
  probe
  misc_feature (1)..(25): SEQ ID NO: 2800; WAN024ETW; Start 356; Stop 380
ttgctctcatgttgattatctacgg

SEQ ID NO: 337260 - DNA, 25 bp, Artificial
  probe
  misc_feature (1)..(25): SEQ ID NO: 2800; WAN024ETW; Start 473; Stop 497
tctatatcggactcttccaagttct

SEQ ID NO: 337261 - DNA, 25 bp, Artificial
  probe
  misc_feature (1)..(25): SEQ ID NO: 2800; WAN024ETW; Start 472; Stop 496
ttctatatcggactcttccaagttc

SEQ ID NO: 337262 - DNA, 25 bp, Artificial
  probe
  misc_feature (1)..(25): SEQ ID NO: 2800; WAN024ETW; Start 474; Stop 498
ctatatcggactcttccaagttctt

SEQ ID NO: 337263 - DNA, 25 bp, Artificial
  probe
  misc_feature (1)..(25): SEQ ID NO: 2800; WAN024ETW; Start 354; Stop 378
agttgctctcatgttgattatctac

SEQ ID NO: 337264 - DNA, 25 bp, Artificial
  probe
  misc_feature (1)..(25): SEQ ID NO: 2800; WAN024ETW; Start 353; Stop 377
cagttgctctcatgttgattatcta

SEQ ID NO: 337265 - DNA, 25 bp, Artificial
  probe
  misc_feature (1)..(25): SEQ ID NO: 2800; WAN024ETW; Start 260; Stop 284
gactatggttgaaggtcttgattgc

SEQ ID NO: 337266 - DNA, 25 bp, Artificial
  probe
  misc_feature (1)..(25): SEQ ID NO: 2800; WAN024ETW; Start 454; Stop 478
cttccttatacgaccgctttctata

SEQ ID NO: 337267 - DNA, 25 bp, Artificial
  probe
  misc_feature (1)..(25): SEQ ID NO: 2800; WAN024ETW; Start 475; Stop 499
tatatcggactcttccaagttcttg

SEQ ID NO: 337268 - DNA, 25 bp, Artificial
  probe
  misc_feature (1)..(25): SEQ ID NO: 2800; WAN024ETW; Start 456; Stop 480
tccttatacgaccgctttctatatc

SEQ ID NO: 337269 - DNA, 25 bp, Artificial
  probe
  misc_feature (1)..(25): SEQ ID NO: 2800; WAN024ETW; Start 455; Stop 479
ttccttatacgaccgctttctatat

SEQ ID NO: 337270 - DNA, 25 bp, Artificial
  probe
  misc_feature (1)..(25): SEQ ID NO: 2800; WAN024ETW; Start 251; Stop 275
agacttggagactatggttgaaggt

SEQ ID NO: 337271 - DNA, 25 bp, Artificial
  probe
  misc_feature (1)..(25): SEQ ID NO: 2800; WAN024ETW; Start 43; Stop 67
gttgaaggaattacggaatggttgc

SEQ ID NO: 337272 - DNA, 25 bp, Artificial
  probe
  misc_feature (1)..(25): SEQ ID NO: 2800; WAN024ETW; Start 566; Stop 590
gttcagttgtgacagaatttacctt

SEQ ID NO: 337273 - DNA, 25 bp, Artificial
  probe
  misc_feature (1)..(25): SEQ ID NO: 2800; WAN024ETW; Start 252; Stop 276
gacttggagactatggttgaaggtc

SEQ ID NO: 337274 - DNA, 25 bp, Artificial
  probe
  misc_feature (1)..(25): SEQ ID NO: 2800; WAN024ETW; Start 567; Stop 591
ttcagttgtgacagaatttaccttc

SEQ ID NO: 337275 - DNA, 25 bp, Artificial
  probe
  misc_feature (1)..(25): SEQ ID NO: 2800; WAN024ETW; Start 535; Stop 559
attgtcggtggtttgttaaatggaa

SEQ ID NO: 337276 - DNA, 25 bp, Artificial
  probe
  misc_feature (1)..(25): SEQ ID NO: 2800; WAN024ETW; Start 139; Stop 163
atgtccatgtttaatgtcgtgattc

SEQ ID NO: 337277 - DNA, 25 bp, Artificial
  probe
  misc_feature (1)..(25): SEQ ID NO: 2800; WAN024ETW; Start 134; Stop 158
cctttatgtccatgtttaatgtcgt

SEQ ID NO: 337278 - DNA, 25 bp, Artificial
  probe
  misc_feature (1)..(25): SEQ ID NO: 2801; WAN024AZU; Start 1; Stop 25
atgtatgaagaaccagaagtagctc

SEQ ID NO: 337279 - DNA, 25 bp, Artificial
  probe
  misc_feature (1)..(25): SEQ ID NO: 2801; WAN024AZU; Start 3; Stop 27
gtatgaagaaccagaagtagctcca

SEQ ID NO: 337280 - DNA, 25 bp, Artificial
  probe
  misc_feature (1)..(25): SEQ ID NO: 2801; WAN024AZU; Start 2; Stop 26
tgtatgaagaaccagaagtagctcc

SEQ ID NO: 337281 - DNA, 25 bp, Artificial
  probe
  misc_feature (1)..(25): SEQ ID NO: 2801; WAN024AZU; Start 47; Stop 71
caccagctacagaaactgttgattc

SEQ ID NO: 337282 - DNA, 25 bp, Artificial
  probe
  misc_feature (1)..(25): SEQ ID NO: 2801; WAN024AZU; Start 48; Stop 72
accagctacagaaactgttgattca

SEQ ID NO: 337283 - DNA, 25 bp, Artificial
  probe
  misc_feature (1)..(25): SEQ ID NO: 2801; WAN024AZU; Start 46; Stop 70
acaccagctacagaaactgttgatt

SEQ ID NO: 337284 - DNA, 25 bp, Artificial
  probe
  misc_feature (1)..(25): SEQ ID NO: 2801; WAN024AZU; Start 45; Stop 69
aacaccagctacagaaactgttgat

SEQ ID NO: 337285 - DNA, 25 bp, Artificial
  probe
  misc_feature (1)..(25): SEQ ID NO: 2801; WAN024AZU; Start 42; Stop 66
tccaacaccagctacagaaactgtt

SEQ ID NO: 337286 - DNA, 25 bp, Artificial
  probe
  misc_feature (1)..(25): SEQ ID NO: 2801; WAN024AZU; Start 41; Stop 65
gtccaacaccagctacagaaactgt

SEQ ID NO: 337287 - DNA, 25 bp, Artificial
  probe
  misc_feature (1)..(25): SEQ ID NO: 2802; WAN024DQR; Start 24; Stop 48
tgagactgttgccattatcacattc

SEQ ID NO: 337288 - DNA, 25 bp, Artificial
  probe
  misc_feature (1)..(25): SEQ ID NO: 2802; WAN024DQR; Start 25; Stop 49
gagactgttgccattatcacattcg

SEQ ID NO: 337289 - DNA, 25 bp, Artificial
  probe
  misc_feature (1)..(25): SEQ ID NO: 2802; WAN024DQR; Start 17; Stop 41
tctttagtgagactgttgccattat

SEQ ID NO: 337290 - DNA, 25 bp, Artificial
  probe
  misc_feature (1)..(25): SEQ ID NO: 2802; WAN024DQR; Start 16; Stop 40
ttctttagtgagactgttgccatta

SEQ ID NO: 337291 - DNA, 25 bp, Artificial
  probe
  misc_feature (1)..(25): SEQ ID NO: 2802; WAN024DQR; Start 19; Stop 43
tttagtgagactgttgccattatca

SEQ ID NO: 337292 - DNA, 25 bp, Artificial
  probe
  misc_feature (1)..(25): SEQ ID NO: 2802; WAN024DQR; Start 18; Stop 42
ctttagtgagactgttgccattatc

SEQ ID NO: 337293 - DNA, 25 bp, Artificial
  probe
  misc_feature (1)..(25): SEQ ID NO: 2802; WAN024DQR; Start 11; Stop 35
ttcatttctttagtgagactgttgc

SEQ ID NO: 337294 - DNA, 25 bp, Artificial
  probe
  misc_feature (1)..(25): SEQ ID NO: 2802; WAN024DQR; Start 14; Stop 38
atttctttagtgagactgttgccat

SEQ ID NO: 337295 - DNA, 25 bp, Artificial
  probe
  misc_feature (1)..(25): SEQ ID NO: 2802; WAN024DQR; Start 15; Stop 39
tttctttagtgagactgttgccatt

SEQ ID NO: 337296 - DNA, 25 bp, Artificial
  probe
  misc_feature (1)..(25): SEQ ID NO: 2802; WAN024DQR; Start 12; Stop 36
tcatttctttagtgagactgttgcc

SEQ ID NO: 337297 - DNA, 25 bp, Artificial
  probe
  misc_feature (1)..(25): SEQ ID NO: 2802; WAN024DQR; Start 13; Stop 37
catttctttagtgagactgttgcca

SEQ ID NO: 337298 - DNA, 25 bp, Artificial
  probe
  misc_feature (1)..(25): SEQ ID NO: 2802; WAN024DQR; Start 10; Stop 34
tttcatttctttagtgagactgttg

SEQ ID NO: 337299 - DNA, 25 bp, Artificial
  probe
  misc_feature (1)..(25): SEQ ID NO: 2802; WAN024DQR; Start 26; Stop 50
agactgttgccattatcacattcga

SEQ ID NO: 337300 - DNA, 25 bp, Artificial
  probe
  misc_feature (1)..(25): SEQ ID NO: 2802; WAN024DQR; Start 20; Stop 44
ttagtgagactgttgccattatcac

SEQ ID NO: 337301 - DNA, 25 bp, Artificial
  probe
  misc_feature (1)..(25): SEQ ID NO: 2802; WAN024DQR; Start 23; Stop 47
gtgagactgttgccattatcacatt

SEQ ID NO: 337302 - DNA, 25 bp, Artificial
  probe
  misc_feature (1)..(25): SEQ ID NO: 2802; WAN024DQR; Start 21; Stop 45
tagtgagactgttgccattatcaca

SEQ ID NO: 337303 - DNA, 25 bp, Artificial
  probe
  misc_feature (1)..(25): SEQ ID NO: 2802; WAN024DQR; Start 27; Stop 51
gactgttgccattatcacattcgaa

SEQ ID NO: 337304 - DNA, 25 bp, Artificial
  probe
  misc_feature (1)..(25): SEQ ID NO: 2802; WAN024DQR; Start 22; Stop 46
agtgagactgttgccattatcacat

SEQ ID NO: 337305 - DNA, 25 bp, Artificial
  probe
  misc_feature (1)..(25): SEQ ID NO: 2802; WAN024DQR; Start 9; Stop 33
ttttcatttctttagtgagactgtt

SEQ ID NO: 337306 - DNA, 25 bp, Artificial
  probe
  misc_feature (1)..(25): SEQ ID NO: 2802; WAN024DQR; Start 8; Stop 32
attttcatttctttagtgagactgt

SEQ ID NO: 337307 - DNA, 25 bp, Artificial
  probe
  misc_feature (1)..(25): SEQ ID NO: 2802; WAN024DQR; Start 6; Stop 30
tgattttcatttctttagtgagact

SEQ ID NO: 337308 - DNA, 25 bp, Artificial
  probe
  misc_feature (1)..(25): SEQ ID NO: 2802; WAN024DQR; Start 7; Stop 31
gattttcatttctttagtgagactg

SEQ ID NO: 337309 - DNA, 25 bp, Artificial
  probe
  misc_feature (1)..(25): SEQ ID NO: 2802; WAN024DQR; Start 5; Stop 29
atgattttcatttctttagtgagac

SEQ ID NO: 337310 - DNA, 25 bp, Artificial
  probe
  misc_feature (1)..(25): SEQ ID NO: 2802; WAN024DQR; Start 2; Stop 26
tgtatgattttcatttctttagtga

SEQ ID NO: 337311 - DNA, 25 bp, Artificial
  probe
  misc_feature (1)..(25): SEQ ID NO: 2803; WAN024DGA; Start 27; Stop 51
cgctgattacgatataatagaacca

SEQ ID NO: 337312 - DNA, 25 bp, Artificial
  probe
  misc_feature (1)..(25): SEQ ID NO: 2803; WAN024DGA; Start 12; Stop 36
gaggaaacttattgtcgctgattac

SEQ ID NO: 337313 - DNA, 25 bp, Artificial
  probe
  misc_feature (1)..(25): SEQ ID NO: 2803; WAN024DGA; Start 131; Stop 155
acaagtataattcagatgttcaggt

SEQ ID NO: 337314 - DNA, 25 bp, Artificial
  probe
  misc_feature (1)..(25): SEQ ID NO: 2803; WAN024DGA; Start 11; Stop 35
tgaggaaacttattgtcgctgatta

SEQ ID NO: 337315 - DNA, 25 bp, Artificial
  probe
  misc_feature (1)..(25): SEQ ID NO: 2803; WAN024DGA; Start 374; Stop 398
cttgctttggttgtcggaatataaa

SEQ ID NO: 337316 - DNA, 25 bp, Artificial
  probe
  misc_feature (1)..(25): SEQ ID NO: 2803; WAN024DGA; Start 205; Stop 229
gttgcggaatatgggagtatagatt

SEQ ID NO: 337317 - DNA, 25 bp, Artificial
  probe
  misc_feature (1)..(25): SEQ ID NO: 2803; WAN024DGA; Start 206; Stop 230
ttgcggaatatgggagtatagattt

SEQ ID NO: 337318 - DNA, 25 bp, Artificial
  probe
  misc_feature (1)..(25): SEQ ID NO: 2803; WAN024DGA; Start 202; Stop 226
attgttgcggaatatgggagtatag

SEQ ID NO: 337319 - DNA, 25 bp, Artificial
  probe
  misc_feature (1)..(25): SEQ ID NO: 2803; WAN024DGA; Start 130; Stop 154
cacaagtataattcagatgttcagg

SEQ ID NO: 337320 - DNA, 25 bp, Artificial
  probe
  misc_feature (1)..(25): SEQ ID NO: 2803; WAN024DGA; Start 90; Stop 114
tgttggtaaggagaagattaatgtt

SEQ ID NO: 337321 - DNA, 25 bp, Artificial
  probe
  misc_feature (1)..(25): SEQ ID NO: 2803; WAN024DGA; Start 373; Stop 397
tcttgctttggttgtcggaatataa

SEQ ID NO: 337322 - DNA, 25 bp, Artificial
  probe
  misc_feature (1)..(25): SEQ ID NO: 2803; WAN024DGA; Start 316; Stop 340
ggagggtttaatggatgctatctta

SEQ ID NO: 337323 - DNA, 25 bp, Artificial
  probe
  misc_feature (1)..(25): SEQ ID NO: 2803; WAN024DGA; Start 201; Stop 225
aattgttgcggaatatgggagtata

SEQ ID NO: 337324 - DNA, 25 bp, Artificial
  probe
  misc_feature (1)..(25): SEQ ID NO: 2803; WAN024DGA; Start 308; Stop 332
acatatcaggagggtttaatggatg

SEQ ID NO: 337325 - DNA, 25 bp, Artificial
  probe
  misc_feature (1)..(25): SEQ ID NO: 2803; WAN024DGA; Start 311; Stop 335
tatcaggagggtttaatggatgcta

SEQ ID NO: 337326 - DNA, 25 bp, Artificial
  probe
  misc_feature (1)..(25): SEQ ID NO: 2803; WAN024DGA; Start 89; Stop 113
atgttggtaaggagaagattaatgt

SEQ ID NO: 337327 - DNA, 25 bp, Artificial
  probe
  misc_feature (1)..(25): SEQ ID NO: 2803; WAN024DGA; Start 375; Stop 399
ttgctttggttgtcggaatataaac

SEQ ID NO: 337328 - DNA, 25 bp, Artificial
  probe
  misc_feature (1)..(25): SEQ ID NO: 2803; WAN024DGA; Start 372; Stop 396
ttcttgctttggttgtcggaatata

SEQ ID NO: 337329 - DNA, 25 bp, Artificial
  probe
  misc_feature (1)..(25): SEQ ID NO: 2803; WAN024DGA; Start 204; Stop 228
tgttgcggaatatgggagtatagat

SEQ ID NO: 337330 - DNA, 25 bp, Artificial
  probe
  misc_feature (1)..(25): SEQ ID NO: 2803; WAN024DGA; Start 200; Stop 224
aaattgttgcggaatatgggagtat

SEQ ID NO: 337331 - DNA, 25 bp, Artificial
  probe
  misc_feature (1)..(25): SEQ ID NO: 2803; WAN024DGA; Start 306; Stop 330
ctacatatcaggagggtttaatgga

SEQ ID NO: 337332 - DNA, 25 bp, Artificial
  probe
  misc_feature (1)..(25): SEQ ID NO: 2803; WAN024DGA; Start 203; Stop 227
ttgttgcggaatatgggagtataga

SEQ ID NO: 337333 - DNA, 25 bp, Artificial
  probe
  misc_feature (1)..(25): SEQ ID NO: 2803; WAN024DGA; Start 134; Stop 158
agtataattcagatgttcaggtagt

SEQ ID NO: 337334 - DNA, 25 bp, Artificial
  probe
  misc_feature (1)..(25): SEQ ID NO: 2803; WAN024DGA; Start 13; Stop 37
aggaaacttattgtcgctgattacg

SEQ ID NO: 337335 - DNA, 25 bp, Artificial
  probe
  misc_feature (1)..(25): SEQ ID NO: 2803; WAN024DGA; Start 315; Stop 339
aggagggtttaatggatgctatctt

SEQ ID NO: 337336 - DNA, 25 bp, Artificial
  probe
  misc_feature (1)..(25): SEQ ID NO: 2803; WAN024DGA; Start 312; Stop 336
atcaggagggtttaatggatgctat

SEQ ID NO: 337337 - DNA, 25 bp, Artificial
  probe
  misc_feature (1)..(25): SEQ ID NO: 2803; WAN024DGA; Start 310; Stop 334
atatcaggagggtttaatggatgct

SEQ ID NO: 337338 - DNA, 25 bp, Artificial
  probe
  misc_feature (1)..(25): SEQ ID NO: 2803; WAN024DGA; Start 4; Stop 28
tatggagtgaggaaacttattgtcg

SEQ ID NO: 337339 - DNA, 25 bp, Artificial
  probe
  misc_feature (1)..(25): SEQ ID NO: 2803; WAN024DGA; Start 2; Stop 26
tgtatggagtgaggaaacttattgt

SEQ ID NO: 337340 - DNA, 25 bp, Artificial
  probe
  misc_feature (1)..(25): SEQ ID NO: 2803; WAN024DGA; Start 10; Stop 34
gtgaggaaacttattgtcgctgatt

SEQ ID NO: 337341 - DNA, 25 bp, Artificial
  probe
  misc_feature (1)..(25): SEQ ID NO: 2803; WAN024DGA; Start 309; Stop 333
catatcaggagggtttaatggatgc

SEQ ID NO: 337342 - DNA, 25 bp, Artificial
  probe
  misc_feature (1)..(25): SEQ ID NO: 2803; WAN024DGA; Start 307; Stop 331
tacatatcaggagggtttaatggat

SEQ ID NO: 337343 - DNA, 25 bp, Artificial
  probe
  misc_feature (1)..(25): SEQ ID NO: 2803; WAN024DGA; Start 91; Stop 115
gttggtaaggagaagattaatgttc

SEQ ID NO: 337344 - DNA, 25 bp, Artificial
  probe
  misc_feature (1)..(25): SEQ ID NO: 2804; WAN024CIE; Start 43; Stop 67
atgacttcagttgttgttgtaggta

SEQ ID NO: 337345 - DNA, 25 bp, Artificial
  probe
  misc_feature (1)..(25): SEQ ID NO: 2804; WAN024CIE; Start 42; Stop 66
tatgacttcagttgttgttgtaggt

SEQ ID NO: 337346 - DNA, 25 bp, Artificial
  probe
  misc_feature (1)..(25): SEQ ID NO: 2804; WAN024CIE; Start 304; Stop 328
gaggaaggtgtaacaactgataact

SEQ ID NO: 337347 - DNA, 25 bp, Artificial
  probe
  misc_feature (1)..(25): SEQ ID NO: 2804; WAN024CIE; Start 302; Stop 326
atgaggaaggtgtaacaactgataa

SEQ ID NO: 337348 - DNA, 25 bp, Artificial
  probe
  misc_feature (1)..(25): SEQ ID NO: 2804; WAN024CIE; Start 303; Stop 327
tgaggaaggtgtaacaactgataac

SEQ ID NO: 337349 - DNA, 25 bp, Artificial
  probe
  misc_feature (1)..(25): SEQ ID NO: 2804; WAN024CIE; Start 41; Stop 65
ttatgacttcagttgttgttgtagg

SEQ ID NO: 337350 - DNA, 25 bp, Artificial
  probe
  misc_feature (1)..(25): SEQ ID NO: 2804; WAN024CIE; Start 305; Stop 329
aggaaggtgtaacaactgataactt

SEQ ID NO: 337351 - DNA, 25 bp, Artificial
  probe
  misc_feature (1)..(25): SEQ ID NO: 2804; WAN024CIE; Start 1145; Stop 1169
ctatctatgaagagttgccaggttg

SEQ ID NO: 337352 - DNA, 25 bp, Artificial
  probe
  misc_feature (1)..(25): SEQ ID NO: 2804; WAN024CIE; Start 311; Stop 335
gtgtaacaactgataacttgcgtat

SEQ ID NO: 337353 - DNA, 25 bp, Artificial
  probe
  misc_feature (1)..(25): SEQ ID NO: 2804; WAN024CIE; Start 306; Stop 330
ggaaggtgtaacaactgataacttg

SEQ ID NO: 337354 - DNA, 25 bp, Artificial
  probe
  misc_feature (1)..(25): SEQ ID NO: 2804; WAN024CIE; Start 307; Stop 331
gaaggtgtaacaactgataacttgc

SEQ ID NO: 337355 - DNA, 25 bp, Artificial
  probe
  misc_feature (1)..(25): SEQ ID NO: 2804; WAN024CIE; Start 312; Stop 336
tgtaacaactgataacttgcgtatt

SEQ ID NO: 337356 - DNA, 25 bp, Artificial
  probe
  misc_feature (1)..(25): SEQ ID NO: 2804; WAN024CIE; Start 44; Stop 68
tgacttcagttgttgttgtaggtac

SEQ ID NO: 337357 - DNA, 25 bp, Artificial
  probe
  misc_feature (1)..(25): SEQ ID NO: 2804; WAN024CIE; Start 301; Stop 325
catgaggaaggtgtaacaactgata

SEQ ID NO: 337358 - DNA, 25 bp, Artificial
  probe
  misc_feature (1)..(25): SEQ ID NO: 2804; WAN024CIE; Start 310; Stop 334
ggtgtaacaactgataacttgcgta

SEQ ID NO: 337359 - DNA, 25 bp, Artificial
  probe
  misc_feature (1)..(25): SEQ ID NO: 2804; WAN024CIE; Start 308; Stop 332
aaggtgtaacaactgataacttgcg

SEQ ID NO: 337360 - DNA, 25 bp, Artificial
  probe
  misc_feature (1)..(25): SEQ ID NO: 2804; WAN024CIE; Start 1141; Stop 1165
aagcctatctatgaagagttgccag

SEQ ID NO: 337361 - DNA, 25 bp, Artificial
  probe
  misc_feature (1)..(25): SEQ ID NO: 2804; WAN024CIE; Start 815; Stop 839
ttgacaaggttgtaggtgtatgtaa

SEQ ID NO: 337362 - DNA, 25 bp, Artificial
  probe
  misc_feature (1)..(25): SEQ ID NO: 2804; WAN024CIE; Start 811; Stop 835
aagattgacaaggttgtaggtgtat

SEQ ID NO: 337363 - DNA, 25 bp, Artificial
  probe
  misc_feature (1)..(25): SEQ ID NO: 2804; WAN024CIE; Start 814; Stop 838
attgacaaggttgtaggtgtatgta

SEQ ID NO: 337364 - DNA, 25 bp, Artificial
  probe
  misc_feature (1)..(25): SEQ ID NO: 2804; WAN024CIE; Start 812; Stop 836
agattgacaaggttgtaggtgtatg

SEQ ID NO: 337365 - DNA, 25 bp, Artificial
  probe
  misc_feature (1)..(25): SEQ ID NO: 2804; WAN024CIE; Start 1227; Stop 1251
ctatgttcgtcgtgtgagtgaattg

SEQ ID NO: 337366 - DNA, 25 bp, Artificial
  probe
  misc_feature (1)..(25): SEQ ID NO: 2804; WAN024CIE; Start 1224; Stop 1248
taactatgttcgtcgtgtgagtgaa

SEQ ID NO: 337367 - DNA, 25 bp, Artificial
  probe
  misc_feature (1)..(25): SEQ ID NO: 2804; WAN024CIE; Start 40; Stop 64
attatgacttcagttgttgttgtag

SEQ ID NO: 337368 - DNA, 25 bp, Artificial
  probe
  misc_feature (1)..(25): SEQ ID NO: 2804; WAN024CIE; Start 813; Stop 837
gattgacaaggttgtaggtgtatgt

SEQ ID NO: 337369 - DNA, 25 bp, Artificial
  probe
  misc_feature (1)..(25): SEQ ID NO: 2804; WAN024CIE; Start 810; Stop 834
caagattgacaaggttgtaggtgta

SEQ ID NO: 337370 - DNA, 25 bp, Artificial
  probe
  misc_feature (1)..(25): SEQ ID NO: 2804; WAN024CIE; Start 358; Stop 382
ttgccttatcatatcgagttggatc

SEQ ID NO: 337371 - DNA, 25 bp, Artificial
  probe
  misc_feature (1)..(25): SEQ ID NO: 2804; WAN024CIE; Start 1140; Stop 1164
caagcctatctatgaagagttgcca

SEQ ID NO: 337372 - DNA, 25 bp, Artificial
  probe
  misc_feature (1)..(25): SEQ ID NO: 2804; WAN024CIE; Start 725; Stop 749
atatcgaccaaggtacttatccatt

SEQ ID NO: 337373 - DNA, 25 bp, Artificial
  probe
  misc_feature (1)..(25): SEQ ID NO: 2804; WAN024CIE; Start 76; Stop 100
ggtgatgaaggtaaagggaagatta

SEQ ID NO: 337374 - DNA, 25 bp, Artificial
  probe
  misc_feature (1)..(25): SEQ ID NO: 2804; WAN024CIE; Start 1094; Stop 1118
aacgtattgactactatccagctag

SEQ ID NO: 337375 - DNA, 25 bp, Artificial
  probe
  misc_feature (1)..(25): SEQ ID NO: 2804; WAN024CIE; Start 1144; Stop 1168
cctatctatgaagagttgccaggtt

SEQ ID NO: 337376 - DNA, 25 bp, Artificial
  probe
  misc_feature (1)..(25): SEQ ID NO: 2804; WAN024CIE; Start 244; Stop 268
attgggaatggtatggttgtaaatc

SEQ ID NO: 337377 - DNA, 25 bp, Artificial
  probe
  misc_feature (1)..(25): SEQ ID NO: 2805; WAN024EVP; Start 12; Stop 36
gtgcttttcacaagattttccatct

SEQ ID NO: 337378 - DNA, 25 bp, Artificial
  probe
  misc_feature (1)..(25): SEQ ID NO: 2805; WAN024EVP; Start 19; Stop 43
tcacaagattttccatctaccattg

SEQ ID NO: 337379 - DNA, 25 bp, Artificial
  probe
  misc_feature (1)..(25): SEQ ID NO: 2805; WAN024EVP; Start 13; Stop 37
tgcttttcacaagattttccatcta

SEQ ID NO: 337380 - DNA, 25 bp, Artificial
  probe
  misc_feature (1)..(25): SEQ ID NO: 2805; WAN024EVP; Start 14; Stop 38
gcttttcacaagattttccatctac

SEQ ID NO: 337381 - DNA, 25 bp, Artificial
  probe
  misc_feature (1)..(25): SEQ ID NO: 2805; WAN024EVP; Start 16; Stop 40
ttttcacaagattttccatctacca

SEQ ID NO: 337382 - DNA, 25 bp, Artificial
  probe
  misc_feature (1)..(25): SEQ ID NO: 2805; WAN024EVP; Start 24; Stop 48
agattttccatctaccattgtagcg

SEQ ID NO: 337383 - DNA, 25 bp, Artificial
  probe
  misc_feature (1)..(25): SEQ ID NO: 2805; WAN024EVP; Start 23; Stop 47
aagattttccatctaccattgtagc

SEQ ID NO: 337384 - DNA, 25 bp, Artificial
  probe
  misc_feature (1)..(25): SEQ ID NO: 2805; WAN024EVP; Start 18; Stop 42
ttcacaagattttccatctaccatt

SEQ ID NO: 337385 - DNA, 25 bp, Artificial
  probe
  misc_feature (1)..(25): SEQ ID NO: 2805; WAN024EVP; Start 17; Stop 41
tttcacaagattttccatctaccat

SEQ ID NO: 337386 - DNA, 25 bp, Artificial
  probe
  misc_feature (1)..(25): SEQ ID NO: 2805; WAN024EVP; Start 15; Stop 39
cttttcacaagattttccatctacc

SEQ ID NO: 337387 - DNA, 25 bp, Artificial
  probe
  misc_feature (1)..(25): SEQ ID NO: 2805; WAN024EVP; Start 22; Stop 46
caagattttccatctaccattgtag

SEQ ID NO: 337388 - DNA, 25 bp, Artificial
  probe
  misc_feature (1)..(25): SEQ ID NO: 2805; WAN024EVP; Start 20; Stop 44
cacaagattttccatctaccattgt

SEQ ID NO: 337389 - DNA, 25 bp, Artificial
  probe
  misc_feature (1)..(25): SEQ ID NO: 2805; WAN024EVP; Start 21; Stop 45
acaagattttccatctaccattgta

SEQ ID NO: 337390 - DNA, 25 bp, Artificial
  probe
  misc_feature (1)..(25): SEQ ID NO: 2805; WAN024EVP; Start 11; Stop 35
tgtgcttttcacaagattttccatc

SEQ ID NO: 337391 - DNA, 25 bp, Artificial
  probe
  misc_feature (1)..(25): SEQ ID NO: 2805; WAN024EVP; Start 25; Stop 49
gattttccatctaccattgtagcgc

SEQ ID NO: 337392 - DNA, 25 bp, Artificial
  probe
  misc_feature (1)..(25): SEQ ID NO: 2806; WAN024CI5; Start 186; Stop 210
tatagaggatgcgaacttgagtgag

SEQ ID NO: 337393 - DNA, 25 bp, Artificial
  probe
  misc_feature (1)..(25): SEQ ID NO: 2806; WAN024CI5; Start 250; Stop 274
attgaaccttgtgtcatgtgtagtg

SEQ ID NO: 337394 - DNA, 25 bp, Artificial
  probe
  misc_feature (1)..(25): SEQ ID NO: 2806; WAN024CI5; Start 249; Stop 273
cattgaaccttgtgtcatgtgtagt

SEQ ID NO: 337395 - DNA, 25 bp, Artificial
  probe
  misc_feature (1)..(25): SEQ ID NO: 2806; WAN024CI5; Start 60; Stop 84
gattgctcttgaacacgatgaaatt

SEQ ID NO: 337396 - DNA, 25 bp, Artificial
  probe
  misc_feature (1)..(25): SEQ ID NO: 2806; WAN024CI5; Start 248; Stop 272
ccattgaaccttgtgtcatgtgtag

SEQ ID NO: 337397 - DNA, 25 bp, Artificial
  probe
  misc_feature (1)..(25): SEQ ID NO: 2806; WAN024CI5; Start 61; Stop 85
attgctcttgaacacgatgaaattc

SEQ ID NO: 337398 - DNA, 25 bp, Artificial
  probe
  misc_feature (1)..(25): SEQ ID NO: 2806; WAN024CI5; Start 65; Stop 89
ctcttgaacacgatgaaattccaat

SEQ ID NO: 337399 - DNA, 25 bp, Artificial
  probe
  misc_feature (1)..(25): SEQ ID NO: 2806; WAN024CI5; Start 66; Stop 90
tcttgaacacgatgaaattccaatt

SEQ ID NO: 337400 - DNA, 25 bp, Artificial
  probe
  misc_feature (1)..(25): SEQ ID NO: 2806; WAN024CI5; Start 185; Stop 209
ctatagaggatgcgaacttgagtga

SEQ ID NO: 337401 - DNA, 25 bp, Artificial
  probe
  misc_feature (1)..(25): SEQ ID NO: 2806; WAN024CI5; Start 57; Stop 81
tgagattgctcttgaacacgatgaa

SEQ ID NO: 337402 - DNA, 25 bp, Artificial
  probe
  misc_feature (1)..(25): SEQ ID NO: 2806; WAN024CI5; Start 88; Stop 112
attggttgtgtgattgtcaaagatg

SEQ ID NO: 337403 - DNA, 25 bp, Artificial
  probe
  misc_feature (1)..(25): SEQ ID NO: 2806; WAN024CI5; Start 87; Stop 111
aattggttgtgtgattgtcaaagat

SEQ ID NO: 337404 - DNA, 25 bp, Artificial
  probe
  misc_feature (1)..(25): SEQ ID NO: 2806; WAN024CI5; Start 59; Stop 83
agattgctcttgaacacgatgaaat

SEQ ID NO: 337405 - DNA, 25 bp, Artificial
  probe
  misc_feature (1)..(25): SEQ ID NO: 2806; WAN024CI5; Start 247; Stop 271
accattgaaccttgtgtcatgtgta

SEQ ID NO: 337406 - DNA, 25 bp, Artificial
  probe
  misc_feature (1)..(25): SEQ ID NO: 2806; WAN024CI5; Start 56; Stop 80
ctgagattgctcttgaacacgatga

SEQ ID NO: 337407 - DNA, 25 bp, Artificial
  probe
  misc_feature (1)..(25): SEQ ID NO: 2806; WAN024CI5; Start 23; Stop 47
aagaagtctttatgagggaggcttt

SEQ ID NO: 337408 - DNA, 25 bp, Artificial
  probe
  misc_feature (1)..(25): SEQ ID NO: 2806; WAN024CI5; Start 26; Stop 50
aagtctttatgagggaggctttgag

SEQ ID NO: 337409 - DNA, 25 bp, Artificial
  probe
  misc_feature (1)..(25): SEQ ID NO: 2806; WAN024CI5; Start 25; Stop 49
gaagtctttatgagggaggctttga

SEQ ID NO: 337410 - DNA, 25 bp, Artificial
  probe
  misc_feature (1)..(25): SEQ ID NO: 2806; WAN024CI5; Start 30; Stop 54
ctttatgagggaggctttgagagag

SEQ ID NO: 337411 - DNA, 25 bp, Artificial
  probe
  misc_feature (1)..(25): SEQ ID NO: 2806; WAN024CI5; Start 24; Stop 48
agaagtctttatgagggaggctttg

SEQ ID NO: 337412 - DNA, 25 bp, Artificial
  probe
  misc_feature (1)..(25): SEQ ID NO: 2806; WAN024CI5; Start 58; Stop 82
gagattgctcttgaacacgatgaaa

SEQ ID NO: 337413 - DNA, 25 bp, Artificial
  probe
  misc_feature (1)..(25): SEQ ID NO: 2806; WAN024CI5; Start 89; Stop 113
ttggttgtgtgattgtcaaagatgg

SEQ ID NO: 337414 - DNA, 25 bp, Artificial
  probe
  misc_feature (1)..(25): SEQ ID NO: 2806; WAN024CI5; Start 62; Stop 86
ttgctcttgaacacgatgaaattcc

SEQ ID NO: 337415 - DNA, 25 bp, Artificial
  probe
  misc_feature (1)..(25): SEQ ID NO: 2806; WAN024CI5; Start 251; Stop 275
ttgaaccttgtgtcatgtgtagtgg

SEQ ID NO: 337416 - DNA, 25 bp, Artificial
  probe
  misc_feature (1)..(25): SEQ ID NO: 2806; WAN024CI5; Start 64; Stop 88
gctcttgaacacgatgaaattccaa

SEQ ID NO: 337417 - DNA, 25 bp, Artificial
  probe
  misc_feature (1)..(25): SEQ ID NO: 2806; WAN024CI5; Start 187; Stop 211
atagaggatgcgaacttgagtgagg

SEQ ID NO: 337418 - DNA, 25 bp, Artificial
  probe
  misc_feature (1)..(25): SEQ ID NO: 2806; WAN024CI5; Start 29; Stop 53
tctttatgagggaggctttgagaga

SEQ ID NO: 337419 - DNA, 25 bp, Artificial
  probe
  misc_feature (1)..(25): SEQ ID NO: 2806; WAN024CI5; Start 28; Stop 52
gtctttatgagggaggctttgagag

SEQ ID NO: 337420 - DNA, 25 bp, Artificial
  probe
  misc_feature (1)..(25): SEQ ID NO: 2806; WAN024CI5; Start 184; Stop 208
gctatagaggatgcgaacttgagtg

SEQ ID NO: 337421 - DNA, 25 bp, Artificial
  probe
  misc_feature (1)..(25): SEQ ID NO: 2806; WAN024CI5; Start 27; Stop 51
agtctttatgagggaggctttgaga

SEQ ID NO: 337422 - DNA, 25 bp, Artificial
  probe
  misc_feature (1)..(25): SEQ ID NO: 2806; WAN024CI5; Start 181; Stop 205
atggctatagaggatgcgaacttga

SEQ ID NO: 337423 - DNA, 25 bp, Artificial
  probe
  misc_feature (1)..(25): SEQ ID NO: 2806; WAN024CI5; Start 63; Stop 87
tgctcttgaacacgatgaaattcca

SEQ ID NO: 337424 - DNA, 25 bp, Artificial
  probe
  misc_feature (1)..(25): SEQ ID NO: 2806; WAN024CI5; Start 246; Stop 270
gaccattgaaccttgtgtcatgtgt

SEQ ID NO: 337425 - DNA, 25 bp, Artificial
  probe
  misc_feature (1)..(25): SEQ ID NO: 2807; WAN024CC4; Start 935; Stop 959
aatacggctctccaataacatcaag

SEQ ID NO: 337426 - DNA, 25 bp, Artificial
  probe
  misc_feature (1)..(25): SEQ ID NO: 2807; WAN024CC4; Start 934; Stop 958
gaatacggctctccaataacatcaa

SEQ ID NO: 337427 - DNA, 25 bp, Artificial
  probe
  misc_feature (1)..(25): SEQ ID NO: 2807; WAN024CC4; Start 927; Stop 951
tagaacagaatacggctctccaata

SEQ ID NO: 337428 - DNA, 25 bp, Artificial
  probe
  misc_feature (1)..(25): SEQ ID NO: 2807; WAN024CC4; Start 932; Stop 956
cagaatacggctctccaataacatc

SEQ ID NO: 337429 - DNA, 25 bp, Artificial
  probe
  misc_feature (1)..(25): SEQ ID NO: 2807; WAN024CC4; Start 929; Stop 953
gaacagaatacggctctccaataac

SEQ ID NO: 337430 - DNA, 25 bp, Artificial
  probe
  misc_feature (1)..(25): SEQ ID NO: 2807; WAN024CC4; Start 928; Stop 952
agaacagaatacggctctccaataa

SEQ ID NO: 337431 - DNA, 25 bp, Artificial
  probe
  misc_feature (1)..(25): SEQ ID NO: 2807; WAN024CC4; Start 926; Stop 950
ttagaacagaatacggctctccaat

SEQ ID NO: 337432 - DNA, 25 bp, Artificial
  probe
  misc_feature (1)..(25): SEQ ID NO: 2807; WAN024CC4; Start 933; Stop 957
agaatacggctctccaataacatca

SEQ ID NO: 337433 - DNA, 25 bp, Artificial
  probe
  misc_feature (1)..(25): SEQ ID NO: 2807; WAN024CC4; Start 931; Stop 955
acagaatacggctctccaataacat

SEQ ID NO: 337434 - DNA, 25 bp, Artificial
  probe
  misc_feature (1)..(25): SEQ ID NO: 2807; WAN024CC4; Start 641; Stop 665
tagtattgttgcttacaggtattcg

SEQ ID NO: 337435 - DNA, 25 bp, Artificial
  probe
  misc_feature (1)..(25): SEQ ID NO: 2807; WAN024CC4; Start 930; Stop 954
aacagaatacggctctccaataaca

SEQ ID NO: 337436 - DNA, 25 bp, Artificial
  probe
  misc_feature (1)..(25): SEQ ID NO: 2807; WAN024CC4; Start 341; Stop 365
tagacaggattactccacttctgat

SEQ ID NO: 337437 - DNA, 25 bp, Artificial
  probe
  misc_feature (1)..(25): SEQ ID NO: 2807; WAN024CC4; Start 340; Stop 364
ttagacaggattactccacttctga

SEQ ID NO: 337438 - DNA, 25 bp, Artificial
  probe
  misc_feature (1)..(25): SEQ ID NO: 2807; WAN024CC4; Start 344; Stop 368
acaggattactccacttctgatgaa

SEQ ID NO: 337439 - DNA, 25 bp, Artificial
  probe
  misc_feature (1)..(25): SEQ ID NO: 2807; WAN024CC4; Start 788; Stop 812
cactcaattcaattagagaagtagc

SEQ ID NO: 337440 - DNA, 25 bp, Artificial
  probe
  misc_feature (1)..(25): SEQ ID NO: 2807; WAN024CC4; Start 1353; Stop 1377
cttgttacatcttagtccacgttac

SEQ ID NO: 337441 - DNA, 25 bp, Artificial
  probe
  misc_feature (1)..(25): SEQ ID NO: 2807; WAN024CC4; Start 1436; Stop 1460
accacccacagtttgatataaagat

SEQ ID NO: 337442 - DNA, 25 bp, Artificial
  probe
  misc_feature (1)..(25): SEQ ID NO: 2807; WAN024CC4; Start 343; Stop 367
gacaggattactccacttctgatga

SEQ ID NO: 337443 - DNA, 25 bp, Artificial
  probe
  misc_feature (1)..(25): SEQ ID NO: 2807; WAN024CC4; Start 342; Stop 366
agacaggattactccacttctgatg

SEQ ID NO: 337444 - DNA, 25 bp, Artificial
  probe
  misc_feature (1)..(25): SEQ ID NO: 2807; WAN024CC4; Start 1435; Stop 1459
taccacccacagtttgatataaaga

SEQ ID NO: 337445 - DNA, 25 bp, Artificial
  probe
  misc_feature (1)..(25): SEQ ID NO: 2807; WAN024CC4; Start 1151; Stop 1175
agacaacaatgggctatacacataa

SEQ ID NO: 337446 - DNA, 25 bp, Artificial
  probe
  misc_feature (1)..(25): SEQ ID NO: 2807; WAN024CC4; Start 1150; Stop 1174
gagacaacaatgggctatacacata

SEQ ID NO: 337447 - DNA, 25 bp, Artificial
  probe
  misc_feature (1)..(25): SEQ ID NO: 2807; WAN024CC4; Start 74; Stop 98
taacaggaaagtggaaatcagtaac

SEQ ID NO: 337448 - DNA, 25 bp, Artificial
  probe
  misc_feature (1)..(25): SEQ ID NO: 2807; WAN024CC4; Start 1437; Stop 1461
ccacccacagtttgatataaagatt

SEQ ID NO: 337449 - DNA, 25 bp, Artificial
  probe
  misc_feature (1)..(25): SEQ ID NO: 2807; WAN024CC4; Start 642; Stop 666
agtattgttgcttacaggtattcga

SEQ ID NO: 337450 - DNA, 25 bp, Artificial
  probe
  misc_feature (1)..(25): SEQ ID NO: 2807; WAN024CC4; Start 923; Stop 947
tatttagaacagaatacggctctcc

SEQ ID NO: 337451 - DNA, 25 bp, Artificial
  probe
  misc_feature (1)..(25): SEQ ID NO: 2807; WAN024CC4; Start 271; Stop 295
ccacaaacaattcagagagaactac

SEQ ID NO: 337452 - DNA, 25 bp, Artificial
  probe
  misc_feature (1)..(25): SEQ ID NO: 2807; WAN024CC4; Start 270; Stop 294
accacaaacaattcagagagaacta

SEQ ID NO: 337453 - DNA, 25 bp, Artificial
  probe
  misc_feature (1)..(25): SEQ ID NO: 2807; WAN024CC4; Start 268; Stop 292
aaaccacaaacaattcagagagaac

SEQ ID NO: 337454 - DNA, 25 bp, Artificial
  probe
  misc_feature (1)..(25): SEQ ID NO: 2807; WAN024CC4; Start 1152; Stop 1176
gacaacaatgggctatacacataat

SEQ ID NO: 337455 - DNA, 25 bp, Artificial
  probe
  misc_feature (1)..(25): SEQ ID NO: 2807; WAN024CC4; Start 1357; Stop 1381
ttacatcttagtccacgttactcac

SEQ ID NO: 337456 - DNA, 25 bp, Artificial
  probe
  misc_feature (1)..(25): SEQ ID NO: 2807; WAN024CC4; Start 1356; Stop 1380
gttacatcttagtccacgttactca

SEQ ID NO: 337457 - DNA, 25 bp, Artificial
  probe
  misc_feature (1)..(25): SEQ ID NO: 2807; WAN024CC4; Start 1355; Stop 1379
tgttacatcttagtccacgttactc

SEQ ID NO: 337458 - DNA, 25 bp, Artificial
  probe
  misc_feature (1)..(25): SEQ ID NO: 2808; WAN024COI; Start 1493; Stop 1517
ttgataagattaaggagcacacagg

SEQ ID NO: 337459 - DNA, 25 bp, Artificial
  probe
  misc_feature (1)..(25): SEQ ID NO: 2808; WAN024COI; Start 689; Stop 713
ttatgcttccttctcattctcatca

SEQ ID NO: 337460 - DNA, 25 bp, Artificial
  probe
  misc_feature (1)..(25): SEQ ID NO: 2808; WAN024COI; Start 690; Stop 714
tatgcttccttctcattctcatcat

SEQ ID NO: 337461 - DNA, 25 bp, Artificial
  probe
  misc_feature (1)..(25): SEQ ID NO: 2808; WAN024COI; Start 1438; Stop 1462
gcacattattacacagataggttga

SEQ ID NO: 337462 - DNA, 25 bp, Artificial
  probe
  misc_feature (1)..(25): SEQ ID NO: 2808; WAN024COI; Start 1495; Stop 1519
gataagattaaggagcacacaggac

SEQ ID NO: 337463 - DNA, 25 bp, Artificial
  probe
  misc_feature (1)..(25): SEQ ID NO: 2808; WAN024COI; Start 1492; Stop 1516
attgataagattaaggagcacacag

SEQ ID NO: 337464 - DNA, 25 bp, Artificial
  probe
  misc_feature (1)..(25): SEQ ID NO: 2808; WAN024COI; Start 1444; Stop 1468
tattacacagataggttgaaggagt

SEQ ID NO: 337465 - DNA, 25 bp, Artificial
  probe
  misc_feature (1)..(25): SEQ ID NO: 2808; WAN024COI; Start 1494; Stop 1518
tgataagattaaggagcacacagga

SEQ ID NO: 337466 - DNA, 25 bp, Artificial
  probe
  misc_feature (1)..(25): SEQ ID NO: 2808; WAN024COI; Start 1452; Stop 1476
agataggttgaaggagtggaatgag

SEQ ID NO: 337467 - DNA, 25 bp, Artificial
  probe
  misc_feature (1)..(25): SEQ ID NO: 2808; WAN024COI; Start 1496; Stop 1520
ataagattaaggagcacacaggaca

SEQ ID NO: 337468 - DNA, 25 bp, Artificial
  probe
  misc_feature (1)..(25): SEQ ID NO: 2808; WAN024COI; Start 1497; Stop 1521
taagattaaggagcacacaggacaa

SEQ ID NO: 337469 - DNA, 25 bp, Artificial
  probe
  misc_feature (1)..(25): SEQ ID NO: 2808; WAN024COI; Start 1454; Stop 1478
ataggttgaaggagtggaatgagtc

SEQ ID NO: 337470 - DNA, 25 bp, Artificial
  probe
  misc_feature (1)..(25): SEQ ID NO: 2808; WAN024COI; Start 1453; Stop 1477
gataggttgaaggagtggaatgagt

SEQ ID NO: 337471 - DNA, 25 bp, Artificial
  probe
  misc_feature (1)..(25): SEQ ID NO: 2808; WAN024COI; Start 1451; Stop 1475
cagataggttgaaggagtggaatga

SEQ ID NO: 337472 - DNA, 25 bp, Artificial
  probe
  misc_feature (1)..(25): SEQ ID NO: 2808; WAN024COI; Start 1491; Stop 1515
aattgataagattaaggagcacaca

SEQ ID NO: 337473 - DNA, 25 bp, Artificial
  probe
  misc_feature (1)..(25): SEQ ID NO: 2808; WAN024COI; Start 123; Stop 147
tcaagagcaagatatagattctcgt

SEQ ID NO: 337474 - DNA, 25 bp, Artificial
  probe
  misc_feature (1)..(25): SEQ ID NO: 2808; WAN024COI; Start 124; Stop 148
caagagcaagatatagattctcgtc

SEQ ID NO: 337475 - DNA, 25 bp, Artificial
  probe
  misc_feature (1)..(25): SEQ ID NO: 2808; WAN024COI; Start 1450; Stop 1474
acagataggttgaaggagtggaatg

SEQ ID NO: 337476 - DNA, 25 bp, Artificial
  probe
  misc_feature (1)..(25): SEQ ID NO: 2808; WAN024COI; Start 125; Stop 149
aagagcaagatatagattctcgtct

SEQ ID NO: 337477 - DNA, 25 bp, Artificial
  probe
  misc_feature (1)..(25): SEQ ID NO: 2808; WAN024COI; Start 382; Stop 406
gaaggcttcatcagtgatatacagt

SEQ ID NO: 337478 - DNA, 25 bp, Artificial
  probe
  misc_feature (1)..(25): SEQ ID NO: 2808; WAN024COI; Start 1443; Stop 1467
ttattacacagataggttgaaggag

SEQ ID NO: 337479 - DNA, 25 bp, Artificial
  probe
  misc_feature (1)..(25): SEQ ID NO: 2808; WAN024COI; Start 691; Stop 715
atgcttccttctcattctcatcatg

SEQ ID NO: 337480 - DNA, 25 bp, Artificial
  probe
  misc_feature (1)..(25): SEQ ID NO: 2808; WAN024COI; Start 1445; Stop 1469
attacacagataggttgaaggagtg

SEQ ID NO: 337481 - DNA, 25 bp, Artificial
  probe
  misc_feature (1)..(25): SEQ ID NO: 2808; WAN024COI; Start 383; Stop 407
aaggcttcatcagtgatatacagta

SEQ ID NO: 337482 - DNA, 25 bp, Artificial
  probe
  misc_feature (1)..(25): SEQ ID NO: 2808; WAN024COI; Start 384; Stop 408
aggcttcatcagtgatatacagtat

SEQ ID NO: 337483 - DNA, 25 bp, Artificial
  probe
  misc_feature (1)..(25): SEQ ID NO: 2808; WAN024COI; Start 122; Stop 146
ttcaagagcaagatatagattctcg

SEQ ID NO: 337484 - DNA, 25 bp, Artificial
  probe
  misc_feature (1)..(25): SEQ ID NO: 2808; WAN024COI; Start 1301; Stop 1325
atagacatcctcatctctacacaca

SEQ ID NO: 337485 - DNA, 25 bp, Artificial
  probe
  misc_feature (1)..(25): SEQ ID NO: 2808; WAN024COI; Start 1303; Stop 1327
agacatcctcatctctacacacaga

SEQ ID NO: 337486 - DNA, 25 bp, Artificial
  probe
  misc_feature (1)..(25): SEQ ID NO: 2808; WAN024COI; Start 1300; Stop 1324
aatagacatcctcatctctacacac

SEQ ID NO: 337487 - DNA, 25 bp, Artificial
  probe
  misc_feature (1)..(25): SEQ ID NO: 2808; WAN024COI; Start 1302; Stop 1326
tagacatcctcatctctacacacag

SEQ ID NO: 337488 - DNA, 25 bp, Artificial
  probe
  misc_feature (1)..(25): SEQ ID NO: 2808; WAN024COI; Start 362; Stop 386
ctaaggttgaacatggagttgaagg

SEQ ID NO: 337489 - DNA, 25 bp, Artificial
  probe
  misc_feature (1)..(25): SEQ ID NO: 2808; WAN024COI; Start 1501; Stop 1525
attaaggagcacacaggacaacaat

SEQ ID NO: 337490 - DNA, 25 bp, Artificial
  probe
  misc_feature (1)..(25): SEQ ID NO: 2808; WAN024COI; Start 385; Stop 409
ggcttcatcagtgatatacagtatt

SEQ ID NO: 337491 - DNA, 25 bp, Artificial
  probe
  misc_feature (1)..(25): SEQ ID NO: 2809; WAN024CO6; Start 35; Stop 59
ggacagtcatcaataacaagagttt

SEQ ID NO: 337492 - DNA, 25 bp, Artificial
  probe
  misc_feature (1)..(25): SEQ ID NO: 2809; WAN024CO6; Start 34; Stop 58
gggacagtcatcaataacaagagtt

SEQ ID NO: 337493 - DNA, 25 bp, Artificial
  probe
  misc_feature (1)..(25): SEQ ID NO: 2809; WAN024CO6; Start 87; Stop 111
aacttgcttcgctttgctattcata

SEQ ID NO: 337494 - DNA, 25 bp, Artificial
  probe
  misc_feature (1)..(25): SEQ ID NO: 2809; WAN024CO6; Start 88; Stop 112
acttgcttcgctttgctattcatag

SEQ ID NO: 337495 - DNA, 25 bp, Artificial
  probe
  misc_feature (1)..(25): SEQ ID NO: 2809; WAN024CO6; Start 86; Stop 110
aaacttgcttcgctttgctattcat

SEQ ID NO: 337496 - DNA, 25 bp, Artificial
  probe
  misc_feature (1)..(25): SEQ ID NO: 2809; WAN024CO6; Start 84; Stop 108
agaaacttgcttcgctttgctattc

SEQ ID NO: 337497 - DNA, 25 bp, Artificial
  probe
  misc_feature (1)..(25): SEQ ID NO: 2809; WAN024CO6; Start 83; Stop 107
gagaaacttgcttcgctttgctatt

SEQ ID NO: 337498 - DNA, 25 bp, Artificial
  probe
  misc_feature (1)..(25): SEQ ID NO: 2809; WAN024CO6; Start 85; Stop 109
gaaacttgcttcgctttgctattca

SEQ ID NO: 337499 - DNA, 25 bp, Artificial
  probe
  misc_feature (1)..(25): SEQ ID NO: 2809; WAN024CO6; Start 82; Stop 106
agagaaacttgcttcgctttgctat

SEQ ID NO: 337500 - DNA, 25 bp, Artificial
  probe
  misc_feature (1)..(25): SEQ ID NO: 2809; WAN024CO6; Start 81; Stop 105
aagagaaacttgcttcgctttgcta

SEQ ID NO: 337501 - DNA, 25 bp, Artificial
  probe
  misc_feature (1)..(25): SEQ ID NO: 2809; WAN024CO6; Start 59; Stop 83
tttgtttcttgattctttcccaaag

SEQ ID NO: 337502 - DNA, 25 bp, Artificial
  probe
  misc_feature (1)..(25): SEQ ID NO: 2809; WAN024CO6; Start 33; Stop 57
ggggacagtcatcaataacaagagt

SEQ ID NO: 337503 - DNA, 25 bp, Artificial
  probe
  misc_feature (1)..(25): SEQ ID NO: 2809; WAN024CO6; Start 73; Stop 97
ctttcccaaagagaaacttgcttcg

SEQ ID NO: 337504 - DNA, 25 bp, Artificial
  probe
  misc_feature (1)..(25): SEQ ID NO: 2809; WAN024CO6; Start 36; Stop 60
gacagtcatcaataacaagagtttt

SEQ ID NO: 337505 - DNA, 25 bp, Artificial
  probe
  misc_feature (1)..(25): SEQ ID NO: 2809; WAN024CO6; Start 32; Stop 56
cggggacagtcatcaataacaagag

SEQ ID NO: 337506 - DNA, 25 bp, Artificial
  probe
  misc_feature (1)..(25): SEQ ID NO: 2809; WAN024CO6; Start 160; Stop 184
cttggcgctgtctctttatttcttt

SEQ ID NO: 337507 - DNA, 25 bp, Artificial
  probe
  misc_feature (1)..(25): SEQ ID NO: 2809; WAN024CO6; Start 58; Stop 82
ttttgtttcttgattctttcccaaa

SEQ ID NO: 337508 - DNA, 25 bp, Artificial
  probe
  misc_feature (1)..(25): SEQ ID NO: 2809; WAN024CO6; Start 80; Stop 104
aaagagaaacttgcttcgctttgct

SEQ ID NO: 337509 - DNA, 25 bp, Artificial
  probe
  misc_feature (1)..(25): SEQ ID NO: 2809; WAN024CO6; Start 68; Stop 92
tgattctttcccaaagagaaacttg

SEQ ID NO: 337510 - DNA, 25 bp, Artificial
  probe
  misc_feature (1)..(25): SEQ ID NO: 2809; WAN024CO6; Start 61; Stop 85
tgtttcttgattctttcccaaagag

SEQ ID NO: 337511 - DNA, 25 bp, Artificial
  probe
  misc_feature (1)..(25): SEQ ID NO: 2809; WAN024CO6; Start 66; Stop 90
cttgattctttcccaaagagaaact

SEQ ID NO: 337512 - DNA, 25 bp, Artificial
  probe
  misc_feature (1)..(25): SEQ ID NO: 2809; WAN024CO6; Start 65; Stop 89
tcttgattctttcccaaagagaaac

SEQ ID NO: 337513 - DNA, 25 bp, Artificial
  probe
  misc_feature (1)..(25): SEQ ID NO: 2809; WAN024CO6; Start 62; Stop 86
gtttcttgattctttcccaaagaga

SEQ ID NO: 337514 - DNA, 25 bp, Artificial
  probe
  misc_feature (1)..(25): SEQ ID NO: 2809; WAN024CO6; Start 69; Stop 93
gattctttcccaaagagaaacttgc

SEQ ID NO: 337515 - DNA, 25 bp, Artificial
  probe
  misc_feature (1)..(25): SEQ ID NO: 2809; WAN024CO6; Start 60; Stop 84
ttgtttcttgattctttcccaaaga

SEQ ID NO: 337516 - DNA, 25 bp, Artificial
  probe
  misc_feature (1)..(25): SEQ ID NO: 2809; WAN024CO6; Start 77; Stop 101
cccaaagagaaacttgcttcgcttt

SEQ ID NO: 337517 - DNA, 25 bp, Artificial
  probe
  misc_feature (1)..(25): SEQ ID NO: 2809; WAN024CO6; Start 74; Stop 98
tttcccaaagagaaacttgcttcgc

SEQ ID NO: 337518 - DNA, 25 bp, Artificial
  probe
  misc_feature (1)..(25): SEQ ID NO: 2809; WAN024CO6; Start 70; Stop 94
attctttcccaaagagaaacttgct

SEQ ID NO: 337519 - DNA, 25 bp, Artificial
  probe
  misc_feature (1)..(25): SEQ ID NO: 2809; WAN024CO6; Start 67; Stop 91
ttgattctttcccaaagagaaactt

SEQ ID NO: 337520 - DNA, 25 bp, Artificial
  probe
  misc_feature (1)..(25): SEQ ID NO: 2809; WAN024CO6; Start 26; Stop 50
ctaaaccggggacagtcatcaataa

SEQ ID NO: 337521 - DNA, 25 bp, Artificial
  probe
  misc_feature (1)..(25): SEQ ID NO: 2809; WAN024CO6; Start 71; Stop 95
ttctttcccaaagagaaacttgctt

SEQ ID NO: 337522 - DNA, 25 bp, Artificial
  probe
  misc_feature (1)..(25): SEQ ID NO: 2809; WAN024CO6; Start 64; Stop 88
ttcttgattctttcccaaagagaaa

SEQ ID NO: 337523 - DNA, 25 bp, Artificial
  probe
  misc_feature (1)..(25): SEQ ID NO: 2809; WAN024CO6; Start 63; Stop 87
tttcttgattctttcccaaagagaa

SEQ ID NO: 337524 - DNA, 25 bp, Artificial
  probe
  misc_feature (1)..(25): SEQ ID NO: 2810; WAN024D2Z-5; Start 573; Stop 597
agaggacattatctacgagttggat

SEQ ID NO: 337525 - DNA, 25 bp, Artificial
  probe
  misc_feature (1)..(25): SEQ ID NO: 2810; WAN024D2Z-5; Start 236; Stop 260
ctgtagttgtgactctggataatca

SEQ ID NO: 337526 - DNA, 25 bp, Artificial
  probe
  misc_feature (1)..(25): SEQ ID NO: 2810; WAN024D2Z-5; Start 233; Stop 257
cttctgtagttgtgactctggataa

SEQ ID NO: 337527 - DNA, 25 bp, Artificial
  probe
  misc_feature (1)..(25): SEQ ID NO: 2810; WAN024D2Z-5; Start 227; Stop 251
attatgcttctgtagttgtgactct

SEQ ID NO: 337528 - DNA, 25 bp, Artificial
  probe
  misc_feature (1)..(25): SEQ ID NO: 2810; WAN024D2Z-5; Start 235; Stop 259
tctgtagttgtgactctggataatc

SEQ ID NO: 337529 - DNA, 25 bp, Artificial
  probe
  misc_feature (1)..(25): SEQ ID NO: 2810; WAN024D2Z-5; Start 228; Stop 252
ttatgcttctgtagttgtgactctg

SEQ ID NO: 337530 - DNA, 25 bp, Artificial
  probe
  misc_feature (1)..(25): SEQ ID NO: 2810; WAN024D2Z-5; Start 237; Stop 261
tgtagttgtgactctggataatcat

SEQ ID NO: 337531 - DNA, 25 bp, Artificial
  probe
  misc_feature (1)..(25): SEQ ID NO: 2810; WAN024D2Z-5; Start 234; Stop 258
ttctgtagttgtgactctggataat

SEQ ID NO: 337532 - DNA, 25 bp, Artificial
  probe
  misc_feature (1)..(25): SEQ ID NO: 2810; WAN024D2Z-5; Start 226; Stop 250
aattatgcttctgtagttgtgactc

SEQ ID NO: 337533 - DNA, 25 bp, Artificial
  probe
  misc_feature (1)..(25): SEQ ID NO: 2810; WAN024D2Z-5; Start 574; Stop 598
gaggacattatctacgagttggata

SEQ ID NO: 337534 - DNA, 25 bp, Artificial
  probe
  misc_feature (1)..(25): SEQ ID NO: 2810; WAN024D2Z-5; Start 232; Stop 256
gcttctgtagttgtgactctggata

SEQ ID NO: 337535 - DNA, 25 bp, Artificial
  probe
  misc_feature (1)..(25): SEQ ID NO: 2810; WAN024D2Z-5; Start 572; Stop 596
tagaggacattatctacgagttgga

SEQ ID NO: 337536 - DNA, 25 bp, Artificial
  probe
  misc_feature (1)..(25): SEQ ID NO: 2810; WAN024D2Z-5; Start 569; Stop 593
gcttagaggacattatctacgagtt

SEQ ID NO: 337537 - DNA, 25 bp, Artificial
  probe
  misc_feature (1)..(25): SEQ ID NO: 2810; WAN024D2Z-5; Start 238; Stop 262
gtagttgtgactctggataatcatg

SEQ ID NO: 337538 - DNA, 25 bp, Artificial
  probe
  misc_feature (1)..(25): SEQ ID NO: 2810; WAN024D2Z-5; Start 571; Stop 595
ttagaggacattatctacgagttgg

SEQ ID NO: 337539 - DNA, 25 bp, Artificial
  probe
  misc_feature (1)..(25): SEQ ID NO: 2810; WAN024D2Z-5; Start 229; Stop 253
tatgcttctgtagttgtgactctgg

SEQ ID NO: 337540 - DNA, 25 bp, Artificial
  probe
  misc_feature (1)..(25): SEQ ID NO: 2810; WAN024D2Z-5; Start 1514; Stop 1538
caggtgttaagagtgttctccaaga

SEQ ID NO: 337541 - DNA, 25 bp, Artificial
  probe
  misc_feature (1)..(25): SEQ ID NO: 2810; WAN024D2Z-5; Start 568; Stop 592
cgcttagaggacattatctacgagt

SEQ ID NO: 337542 - DNA, 25 bp, Artificial
  probe
  misc_feature (1)..(25): SEQ ID NO: 2810; WAN024D2Z-5; Start 1165; Stop 1189
ttacaagaagaagcggatgtctcaa

SEQ ID NO: 337543 - DNA, 25 bp, Artificial
  probe
  misc_feature (1)..(25): SEQ ID NO: 2810; WAN024D2Z-5; Start 570; Stop 594
cttagaggacattatctacgagttg

SEQ ID NO: 337544 - DNA, 25 bp, Artificial
  probe
  misc_feature (1)..(25): SEQ ID NO: 2810; WAN024D2Z-5; Start 560; Stop 584
atctggaccgcttagaggacattat

SEQ ID NO: 337545 - DNA, 25 bp, Artificial
  probe
  misc_feature (1)..(25): SEQ ID NO: 2810; WAN024D2Z-5; Start 557; Stop 581
ataatctggaccgcttagaggacat

SEQ ID NO: 337546 - DNA, 25 bp, Artificial
  probe
  misc_feature (1)..(25): SEQ ID NO: 2810; WAN024D2Z-5; Start 590; Stop 614
agttggataatcaaatcaagcctct

SEQ ID NO: 337547 - DNA, 25 bp, Artificial
  probe
  misc_feature (1)..(25): SEQ ID NO: 2810; WAN024D2Z-5; Start 591; Stop 615
gttggataatcaaatcaagcctctt

SEQ ID NO: 337548 - DNA, 25 bp, Artificial
  probe
  misc_feature (1)..(25): SEQ ID NO: 2810; WAN024D2Z-5; Start 586; Stop 610
tacgagttggataatcaaatcaagc

SEQ ID NO: 337549 - DNA, 25 bp, Artificial
  probe
  misc_feature (1)..(25): SEQ ID NO: 2810; WAN024D2Z-5; Start 564; Stop 588
ggaccgcttagaggacattatctac

SEQ ID NO: 337550 - DNA, 25 bp, Artificial
  probe
  misc_feature (1)..(25): SEQ ID NO: 2810; WAN024D2Z-5; Start 567; Stop 591
ccgcttagaggacattatctacgag

SEQ ID NO: 337551 - DNA, 25 bp, Artificial
  probe
  misc_feature (1)..(25): SEQ ID NO: 2810; WAN024D2Z-5; Start 559; Stop 583
aatctggaccgcttagaggacatta

SEQ ID NO: 337552 - DNA, 25 bp, Artificial
  probe
  misc_feature (1)..(25): SEQ ID NO: 2810; WAN024D2Z-5; Start 558; Stop 582
taatctggaccgcttagaggacatt

SEQ ID NO: 337553 - DNA, 25 bp, Artificial
  probe
  misc_feature (1)..(25): SEQ ID NO: 2810; WAN024D2Z-5; Start 1715; Stop 1739
caacctttcttcctttgaccactat

SEQ ID NO: 337554 - DNA, 25 bp, Artificial
  probe
  misc_feature (1)..(25): SEQ ID NO: 2810; WAN024D2Z-5; Start 1509; Stop 1533
ttatgcaggtgttaagagtgttctc

SEQ ID NO: 337555 - DNA, 25 bp, Artificial
  probe
  misc_feature (1)..(25): SEQ ID NO: 2810; WAN024D2Z-5; Start 589; Stop 613
gagttggataatcaaatcaagcctc

SEQ ID NO: 337556 - DNA, 25 bp, Artificial
  probe
  misc_feature (1)..(25): SEQ ID NO: 2810; WAN024D2Z-5; Start 563; Stop 587
tggaccgcttagaggacattatcta

SEQ ID NO: 337557 - DNA, 25 bp, Artificial
  probe
  misc_feature (1)..(25): SEQ ID NO: 2811; WAN024CY3; Start 808; Stop 832
catcgcattcttcctcttcatacta

SEQ ID NO: 337558 - DNA, 25 bp, Artificial
  probe
  misc_feature (1)..(25): SEQ ID NO: 2811; WAN024CY3; Start 763; Stop 787
gttgaggatggtgagatgatgatat

SEQ ID NO: 337559 - DNA, 25 bp, Artificial
  probe
  misc_feature (1)..(25): SEQ ID NO: 2811; WAN024CY3; Start 1014; Stop 1038
ccagttagagaatcgtcatccatat

SEQ ID NO: 337560 - DNA, 25 bp, Artificial
  probe
  misc_feature (1)..(25): SEQ ID NO: 2811; WAN024CY3; Start 765; Stop 789
tgaggatggtgagatgatgatattc

SEQ ID NO: 337561 - DNA, 25 bp, Artificial
  probe
  misc_feature (1)..(25): SEQ ID NO: 2811; WAN024CY3; Start 809; Stop 833
atcgcattcttcctcttcatactat

SEQ ID NO: 337562 - DNA, 25 bp, Artificial
  probe
  misc_feature (1)..(25): SEQ ID NO: 2811; WAN024CY3; Start 764; Stop 788
ttgaggatggtgagatgatgatatt

SEQ ID NO: 337563 - DNA, 25 bp, Artificial
  probe
  misc_feature (1)..(25): SEQ ID NO: 2811; WAN024CY3; Start 1013; Stop 1037
accagttagagaatcgtcatccata

SEQ ID NO: 337564 - DNA, 25 bp, Artificial
  probe
  misc_feature (1)..(25): SEQ ID NO: 2811; WAN024CY3; Start 1012; Stop 1036
taccagttagagaatcgtcatccat

SEQ ID NO: 337565 - DNA, 25 bp, Artificial
  probe
  misc_feature (1)..(25): SEQ ID NO: 2811; WAN024CY3; Start 961; Stop 985
tgtgctcaagtctatctctataagg

SEQ ID NO: 337566 - DNA, 25 bp, Artificial
  probe
  misc_feature (1)..(25): SEQ ID NO: 2811; WAN024CY3; Start 762; Stop 786
agttgaggatggtgagatgatgata

SEQ ID NO: 337567 - DNA, 25 bp, Artificial
  probe
  misc_feature (1)..(25): SEQ ID NO: 2811; WAN024CY3; Start 802; Stop 826
ctatctcatcgcattcttcctcttc

SEQ ID NO: 337568 - DNA, 25 bp, Artificial
  probe
  misc_feature (1)..(25): SEQ ID NO: 2811; WAN024CY3; Start 766; Stop 790
gaggatggtgagatgatgatattct

SEQ ID NO: 337569 - DNA, 25 bp, Artificial
  probe
  misc_feature (1)..(25): SEQ ID NO: 2811; WAN024CY3; Start 806; Stop 830
ctcatcgcattcttcctcttcatac

SEQ ID NO: 337570 - DNA, 25 bp, Artificial
  probe
  misc_feature (1)..(25): SEQ ID NO: 2811; WAN024CY3; Start 810; Stop 834
tcgcattcttcctcttcatactatg

SEQ ID NO: 337571 - DNA, 25 bp, Artificial
  probe
  misc_feature (1)..(25): SEQ ID NO: 2811; WAN024CY3; Start 805; Stop 829
tctcatcgcattcttcctcttcata

SEQ ID NO: 337572 - DNA, 25 bp, Artificial
  probe
  misc_feature (1)..(25): SEQ ID NO: 2811; WAN024CY3; Start 803; Stop 827
tatctcatcgcattcttcctcttca

SEQ ID NO: 337573 - DNA, 25 bp, Artificial
  probe
  misc_feature (1)..(25): SEQ ID NO: 2811; WAN024CY3; Start 767; Stop 791
aggatggtgagatgatgatattctt

SEQ ID NO: 337574 - DNA, 25 bp, Artificial
  probe
  misc_feature (1)..(25): SEQ ID NO: 2811; WAN024CY3; Start 768; Stop 792
ggatggtgagatgatgatattcttc

SEQ ID NO: 337575 - DNA, 25 bp, Artificial
  probe
  misc_feature (1)..(25): SEQ ID NO: 2811; WAN024CY3; Start 1009; Stop 1033
aagtaccagttagagaatcgtcatc

SEQ ID NO: 337576 - DNA, 25 bp, Artificial
  probe
  misc_feature (1)..(25): SEQ ID NO: 2811; WAN024CY3; Start 1008; Stop 1032
caagtaccagttagagaatcgtcat

SEQ ID NO: 337577 - DNA, 25 bp, Artificial
  probe
  misc_feature (1)..(25): SEQ ID NO: 2811; WAN024CY3; Start 807; Stop 831
tcatcgcattcttcctcttcatact

SEQ ID NO: 337578 - DNA, 25 bp, Artificial
  probe
  misc_feature (1)..(25): SEQ ID NO: 2811; WAN024CY3; Start 1006; Stop 1030
tacaagtaccagttagagaatcgtc

SEQ ID NO: 337579 - DNA, 25 bp, Artificial
  probe
  misc_feature (1)..(25): SEQ ID NO: 2811; WAN024CY3; Start 1005; Stop 1029
ctacaagtaccagttagagaatcgt

SEQ ID NO: 337580 - DNA, 25 bp, Artificial
  probe
  misc_feature (1)..(25): SEQ ID NO: 2811; WAN024CY3; Start 811; Stop 835
cgcattcttcctcttcatactatgg

SEQ ID NO: 337581 - DNA, 25 bp, Artificial
  probe
  misc_feature (1)..(25): SEQ ID NO: 2811; WAN024CY3; Start 1015; Stop 1039
cagttagagaatcgtcatccatatt

SEQ ID NO: 337582 - DNA, 25 bp, Artificial
  probe
  misc_feature (1)..(25): SEQ ID NO: 2811; WAN024CY3; Start 1004; Stop 1028
gctacaagtaccagttagagaatcg

SEQ ID NO: 337583 - DNA, 25 bp, Artificial
  probe
  misc_feature (1)..(25): SEQ ID NO: 2811; WAN024CY3; Start 1003; Stop 1027
cgctacaagtaccagttagagaatc

SEQ ID NO: 337584 - DNA, 25 bp, Artificial
  probe
  misc_feature (1)..(25): SEQ ID NO: 2811; WAN024CY3; Start 1002; Stop 1026
tcgctacaagtaccagttagagaat

SEQ ID NO: 337585 - DNA, 25 bp, Artificial
  probe
  misc_feature (1)..(25): SEQ ID NO: 2811; WAN024CY3; Start 1001; Stop 1025
atcgctacaagtaccagttagagaa

SEQ ID NO: 337586 - DNA, 25 bp, Artificial
  probe
  misc_feature (1)..(25): SEQ ID NO: 2811; WAN024CY3; Start 804; Stop 828
atctcatcgcattcttcctcttcat

SEQ ID NO: 337587 - DNA, 25 bp, Artificial
  probe
  misc_feature (1)..(25): SEQ ID NO: 2811; WAN024CY3; Start 761; Stop 785
gagttgaggatggtgagatgatgat

SEQ ID NO: 337588 - DNA, 25 bp, Artificial
  probe
  misc_feature (1)..(25): SEQ ID NO: 2811; WAN024CY3; Start 1007; Stop 1031
acaagtaccagttagagaatcgtca

SEQ ID NO: 337589 - DNA, 25 bp, Artificial
  probe
  misc_feature (1)..(25): SEQ ID NO: 2811; WAN024CY3; Start 801; Stop 825
cctatctcatcgcattcttcctctt

SEQ ID NO: 337590 - DNA, 25 bp, Artificial
  probe
  misc_feature (1)..(25): SEQ ID NO: 2812; WAN024DGZ; Start 270; Stop 294
agtctattaagtcttatgctcgcag

SEQ ID NO: 337591 - DNA, 25 bp, Artificial
  probe
  misc_feature (1)..(25): SEQ ID NO: 2812; WAN024DGZ; Start 271; Stop 295
gtctattaagtcttatgctcgcagt

SEQ ID NO: 337592 - DNA, 25 bp, Artificial
  probe
  misc_feature (1)..(25): SEQ ID NO: 2812; WAN024DGZ; Start 269; Stop 293
cagtctattaagtcttatgctcgca

SEQ ID NO: 337593 - DNA, 25 bp, Artificial
  probe
  misc_feature (1)..(25): SEQ ID NO: 2812; WAN024DGZ; Start 272; Stop 296
tctattaagtcttatgctcgcagta

SEQ ID NO: 337594 - DNA, 25 bp, Artificial
  probe
  misc_feature (1)..(25): SEQ ID NO: 2812; WAN024DGZ; Start 273; Stop 297
ctattaagtcttatgctcgcagtaa

SEQ ID NO: 337595 - DNA, 25 bp, Artificial
  probe
  misc_feature (1)..(25): SEQ ID NO: 2812; WAN024DGZ; Start 274; Stop 298
tattaagtcttatgctcgcagtaag

SEQ ID NO: 337596 - DNA, 25 bp, Artificial
  probe
  misc_feature (1)..(25): SEQ ID NO: 2812; WAN024DGZ; Start 726; Stop 750
agcgtttaagagaattagaagaaca

SEQ ID NO: 337597 - DNA, 25 bp, Artificial
  probe
  misc_feature (1)..(25): SEQ ID NO: 2812; WAN024DGZ; Start 630; Stop 654
aagagattcatttaagaaacgaagc

SEQ ID NO: 337598 - DNA, 25 bp, Artificial
  probe
  misc_feature (1)..(25): SEQ ID NO: 2812; WAN024DGZ; Start 400; Stop 424
tttagggcaattaggagtgaagtgg

SEQ ID NO: 337599 - DNA, 25 bp, Artificial
  probe
  misc_feature (1)..(25): SEQ ID NO: 2812; WAN024DGZ; Start 725; Stop 749
aagcgtttaagagaattagaagaac

SEQ ID NO: 337600 - DNA, 25 bp, Artificial
  probe
  misc_feature (1)..(25): SEQ ID NO: 2812; WAN024DGZ; Start 268; Stop 292
gcagtctattaagtcttatgctcgc

SEQ ID NO: 337601 - DNA, 25 bp, Artificial
  probe
  misc_feature (1)..(25): SEQ ID NO: 2812; WAN024DGZ; Start 631; Stop 655
agagattcatttaagaaacgaagct

SEQ ID NO: 337602 - DNA, 25 bp, Artificial
  probe
  misc_feature (1)..(25): SEQ ID NO: 2812; WAN024DGZ; Start 267; Stop 291
tgcagtctattaagtcttatgctcg

SEQ ID NO: 337603 - DNA, 25 bp, Artificial
  probe
  misc_feature (1)..(25): SEQ ID NO: 2812; WAN024DGZ; Start 180; Stop 204
aatctctgcctttggggtataaaat

SEQ ID NO: 337604 - DNA, 25 bp, Artificial
  probe
  misc_feature (1)..(25): SEQ ID NO: 2812; WAN024DGZ; Start 179; Stop 203
aaatctctgcctttggggtataaaa

SEQ ID NO: 337605 - DNA, 25 bp, Artificial
  probe
  misc_feature (1)..(25): SEQ ID NO: 2812; WAN024DGZ; Start 178; Stop 202
aaaatctctgcctttggggtataaa

SEQ ID NO: 337606 - DNA, 25 bp, Artificial
  probe
  misc_feature (1)..(25): SEQ ID NO: 2812; WAN024DGZ; Start 177; Stop 201
taaaatctctgcctttggggtataa

SEQ ID NO: 337607 - DNA, 25 bp, Artificial
  probe
  misc_feature (1)..(25): SEQ ID NO: 2812; WAN024DGZ; Start 176; Stop 200
ataaaatctctgcctttggggtata

SEQ ID NO: 337608 - DNA, 25 bp, Artificial
  probe
  misc_feature (1)..(25): SEQ ID NO: 2812; WAN024DGZ; Start 401; Stop 425
ttagggcaattaggagtgaagtggt

SEQ ID NO: 337609 - DNA, 25 bp, Artificial
  probe
  misc_feature (1)..(25): SEQ ID NO: 2812; WAN024DGZ; Start 398; Stop 422
attttagggcaattaggagtgaagt

SEQ ID NO: 337610 - DNA, 25 bp, Artificial
  probe
  misc_feature (1)..(25): SEQ ID NO: 2812; WAN024DGZ; Start 184; Stop 208
tctgcctttggggtataaaatgttt

SEQ ID NO: 337611 - DNA, 25 bp, Artificial
  probe
  misc_feature (1)..(25): SEQ ID NO: 2812; WAN024DGZ; Start 181; Stop 205
atctctgcctttggggtataaaatg

SEQ ID NO: 337612 - DNA, 25 bp, Artificial
  probe
  misc_feature (1)..(25): SEQ ID NO: 2812; WAN024DGZ; Start 397; Stop 421
gattttagggcaattaggagtgaag

SEQ ID NO: 337613 - DNA, 25 bp, Artificial
  probe
  misc_feature (1)..(25): SEQ ID NO: 2812; WAN024DGZ; Start 185; Stop 209
ctgcctttggggtataaaatgtttt

SEQ ID NO: 337614 - DNA, 25 bp, Artificial
  probe
  misc_feature (1)..(25): SEQ ID NO: 2812; WAN024DGZ; Start 183; Stop 207
ctctgcctttggggtataaaatgtt

SEQ ID NO: 337615 - DNA, 25 bp, Artificial
  probe
  misc_feature (1)..(25): SEQ ID NO: 2812; WAN024DGZ; Start 399; Stop 423
ttttagggcaattaggagtgaagtg

SEQ ID NO: 337616 - DNA, 25 bp, Artificial
  probe
  misc_feature (1)..(25): SEQ ID NO: 2812; WAN024DGZ; Start 133; Stop 157
tgtctatgaaggggagaacttactg

SEQ ID NO: 337617 - DNA, 25 bp, Artificial
  probe
  misc_feature (1)..(25): SEQ ID NO: 2812; WAN024DGZ; Start 132; Stop 156
gtgtctatgaaggggagaacttact

SEQ ID NO: 337618 - DNA, 25 bp, Artificial
  probe
  misc_feature (1)..(25): SEQ ID NO: 2812; WAN024DGZ; Start 724; Stop 748
taagcgtttaagagaattagaagaa

SEQ ID NO: 337619 - DNA, 25 bp, Artificial
  probe
  misc_feature (1)..(25): SEQ ID NO: 2812; WAN024DGZ; Start 402; Stop 426
tagggcaattaggagtgaagtggtc

SEQ ID NO: 337620 - DNA, 25 bp, Artificial
  probe
  misc_feature (1)..(25): SEQ ID NO: 2812; WAN024DGZ; Start 182; Stop 206
tctctgcctttggggtataaaatgt

SEQ ID NO: 337621 - DNA, 25 bp, Artificial
  probe
  misc_feature (1)..(25): SEQ ID NO: 2812; WAN024DGZ; Start 723; Stop 747
ctaagcgtttaagagaattagaaga

SEQ ID NO: 337622 - DNA, 25 bp, Artificial
  probe
  misc_feature (1)..(25): SEQ ID NO: 2812; WAN024DGZ; Start 186; Stop 210
tgcctttggggtataaaatgtttta

SEQ ID NO: 337623 - DNA, 25 bp, Artificial
  probe
  misc_feature (1)..(25): SEQ ID NO: 2813; WAN024AXQ; Start 329; Stop 353
aagaagtgaaggataagattgctga

SEQ ID NO: 337624 - DNA, 25 bp, Artificial
  probe
  misc_feature (1)..(25): SEQ ID NO: 2813; WAN024AXQ; Start 330; Stop 354
agaagtgaaggataagattgctgag

SEQ ID NO: 337625 - DNA, 25 bp, Artificial
  probe
  misc_feature (1)..(25): SEQ ID NO: 2813; WAN024AXQ; Start 328; Stop 352
caagaagtgaaggataagattgctg

SEQ ID NO: 337626 - DNA, 25 bp, Artificial
  probe
  misc_feature (1)..(25): SEQ ID NO: 2813; WAN024AXQ; Start 327; Stop 351
acaagaagtgaaggataagattgct

SEQ ID NO: 337627 - DNA, 25 bp, Artificial
  probe
  misc_feature (1)..(25): SEQ ID NO: 2813; WAN024AXQ; Start 331; Stop 355
gaagtgaaggataagattgctgagc

SEQ ID NO: 337628 - DNA, 25 bp, Artificial
  probe
  misc_feature (1)..(25): SEQ ID NO: 2813; WAN024AXQ; Start 326; Stop 350
cacaagaagtgaaggataagattgc

SEQ ID NO: 337629 - DNA, 25 bp, Artificial
  probe
  misc_feature (1)..(25): SEQ ID NO: 2813; WAN024AXQ; Start 325; Stop 349
ccacaagaagtgaaggataagattg

SEQ ID NO: 337630 - DNA, 25 bp, Artificial
  probe
  misc_feature (1)..(25): SEQ ID NO: 2813; WAN024AXQ; Start 323; Stop 347
ctccacaagaagtgaaggataagat

SEQ ID NO: 337631 - DNA, 25 bp, Artificial
  probe
  misc_feature (1)..(25): SEQ ID NO: 2813; WAN024AXQ; Start 324; Stop 348
tccacaagaagtgaaggataagatt

SEQ ID NO: 337632 - DNA, 25 bp, Artificial
  probe
  misc_feature (1)..(25): SEQ ID NO: 2813; WAN024AXQ; Start 321; Stop 345
aactccacaagaagtgaaggataag

SEQ ID NO: 337633 - DNA, 25 bp, Artificial
  probe
  misc_feature (1)..(25): SEQ ID NO: 2813; WAN024AXQ; Start 322; Stop 346
actccacaagaagtgaaggataaga

SEQ ID NO: 337634 - DNA, 25 bp, Artificial
  probe
  misc_feature (1)..(25): SEQ ID NO: 2813; WAN024AXQ; Start 685; Stop 709
ttcacaggaatgatcgaccaatatt

SEQ ID NO: 337635 - DNA, 25 bp, Artificial
  probe
  misc_feature (1)..(25): SEQ ID NO: 2813; WAN024AXQ; Start 601; Stop 625
atgctgaaagatgtagaagttgaac

SEQ ID NO: 337636 - DNA, 25 bp, Artificial
  probe
  misc_feature (1)..(25): SEQ ID NO: 2813; WAN024AXQ; Start 684; Stop 708
cttcacaggaatgatcgaccaatat

SEQ ID NO: 337637 - DNA, 25 bp, Artificial
  probe
  misc_feature (1)..(25): SEQ ID NO: 2813; WAN024AXQ; Start 564; Stop 588
gattcctattggtggttacaatgtc

SEQ ID NO: 337638 - DNA, 25 bp, Artificial
  probe
  misc_feature (1)..(25): SEQ ID NO: 2813; WAN024AXQ; Start 544; Stop 568
tttaatgaccgttaccaagggattc

SEQ ID NO: 337639 - DNA, 25 bp, Artificial
  probe
  misc_feature (1)..(25): SEQ ID NO: 2813; WAN024AXQ; Start 563; Stop 587
ggattcctattggtggttacaatgt

SEQ ID NO: 337640 - DNA, 25 bp, Artificial
  probe
  misc_feature (1)..(25): SEQ ID NO: 2813; WAN024AXQ; Start 248; Stop 272
tcgcaaactataagggaagtcttta

SEQ ID NO: 337641 - DNA, 25 bp, Artificial
  probe
  misc_feature (1)..(25): SEQ ID NO: 2813; WAN024AXQ; Start 683; Stop 707
tcttcacaggaatgatcgaccaata

SEQ ID NO: 337642 - DNA, 25 bp, Artificial
  probe
  misc_feature (1)..(25): SEQ ID NO: 2813; WAN024AXQ; Start 600; Stop 624
tatgctgaaagatgtagaagttgaa

SEQ ID NO: 337643 - DNA, 25 bp, Artificial
  probe
  misc_feature (1)..(25): SEQ ID NO: 2813; WAN024AXQ; Start 249; Stop 273
cgcaaactataagggaagtctttat

SEQ ID NO: 337644 - DNA, 25 bp, Artificial
  probe
  misc_feature (1)..(25): SEQ ID NO: 2813; WAN024AXQ; Start 247; Stop 271
gtcgcaaactataagggaagtcttt

SEQ ID NO: 337645 - DNA, 25 bp, Artificial
  probe
  misc_feature (1)..(25): SEQ ID NO: 2813; WAN024AXQ; Start 237; Stop 261
caactcacctgtcgcaaactataag

SEQ ID NO: 337646 - DNA, 25 bp, Artificial
  probe
  misc_feature (1)..(25): SEQ ID NO: 2813; WAN024AXQ; Start 599; Stop 623
atatgctgaaagatgtagaagttga

SEQ ID NO: 337647 - DNA, 25 bp, Artificial
  probe
  misc_feature (1)..(25): SEQ ID NO: 2813; WAN024AXQ; Start 602; Stop 626
tgctgaaagatgtagaagttgaact

SEQ ID NO: 337648 - DNA, 25 bp, Artificial
  probe
  misc_feature (1)..(25): SEQ ID NO: 2813; WAN024AXQ; Start 675; Stop 699
caaagttgtcttcacaggaatgatc

SEQ ID NO: 337649 - DNA, 25 bp, Artificial
  probe
  misc_feature (1)..(25): SEQ ID NO: 2813; WAN024AXQ; Start 320; Stop 344
aaactccacaagaagtgaaggataa

SEQ ID NO: 337650 - DNA, 25 bp, Artificial
  probe
  misc_feature (1)..(25): SEQ ID NO: 2813; WAN024AXQ; Start 246; Stop 270
tgtcgcaaactataagggaagtctt

SEQ ID NO: 337651 - DNA, 25 bp, Artificial
  probe
  misc_feature (1)..(25): SEQ ID NO: 2813; WAN024AXQ; Start 672; Stop 696
taacaaagttgtcttcacaggaatg

SEQ ID NO: 337652 - DNA, 25 bp, Artificial
  probe
  misc_feature (1)..(25): SEQ ID NO: 2813; WAN024AXQ; Start 671; Stop 695
ctaacaaagttgtcttcacaggaat

SEQ ID NO: 337653 - DNA, 25 bp, Artificial
  probe
  misc_feature (1)..(25): SEQ ID NO: 2813; WAN024AXQ; Start 665; Stop 689
catctgctaacaaagttgtcttcac

SEQ ID NO: 337654 - DNA, 25 bp, Artificial
  probe
  misc_feature (1)..(25): SEQ ID NO: 2813; WAN024AXQ; Start 674; Stop 698
acaaagttgtcttcacaggaatgat

SEQ ID NO: 337655 - DNA, 25 bp, Artificial
  probe
  misc_feature (1)..(25): SEQ ID NO: 2813; WAN024AXQ; Start 666; Stop 690
atctgctaacaaagttgtcttcaca

SEQ ID NO: 337656 - DNA, 25 bp, Artificial
  probe
  misc_feature (1)..(25): SEQ ID NO: 2814; WAN024G2Y; Start 75; Stop 99
aattgctctggaagatgcgattact

SEQ ID NO: 337657 - DNA, 25 bp, Artificial
  probe
  misc_feature (1)..(25): SEQ ID NO: 2814; WAN024G2Y; Start 182; Stop 206
aagaagacggaacagaaagtgattt

SEQ ID NO: 337658 - DNA, 25 bp, Artificial
  probe
  misc_feature (1)..(25): SEQ ID NO: 2814; WAN024G2Y; Start 181; Stop 205
caagaagacggaacagaaagtgatt

SEQ ID NO: 337659 - DNA, 25 bp, Artificial
  probe
  misc_feature (1)..(25): SEQ ID NO: 2814; WAN024G2Y; Start 66; Stop 90
aaatggtgaaattgctctggaagat

SEQ ID NO: 337660 - DNA, 25 bp, Artificial
  probe
  misc_feature (1)..(25): SEQ ID NO: 2814; WAN024G2Y; Start 76; Stop 100
attgctctggaagatgcgattactg

SEQ ID NO: 337661 - DNA, 25 bp, Artificial
  probe
  misc_feature (1)..(25): SEQ ID NO: 2814; WAN024G2Y; Start 73; Stop 97
gaaattgctctggaagatgcgatta

SEQ ID NO: 337662 - DNA, 25 bp, Artificial
  probe
  misc_feature (1)..(25): SEQ ID NO: 2814; WAN024G2Y; Start 67; Stop 91
aatggtgaaattgctctggaagatg

SEQ ID NO: 337663 - DNA, 25 bp, Artificial
  probe
  misc_feature (1)..(25): SEQ ID NO: 2814; WAN024G2Y; Start 85; Stop 109
gaagatgcgattactgcctttcaaa

SEQ ID NO: 337664 - DNA, 25 bp, Artificial
  probe
  misc_feature (1)..(25): SEQ ID NO: 2814; WAN024G2Y; Start 74; Stop 98
aaattgctctggaagatgcgattac

SEQ ID NO: 337665 - DNA, 25 bp, Artificial
  probe
  misc_feature (1)..(25): SEQ ID NO: 2814; WAN024G2Y; Start 27; Stop 51
aaatctagcagaactggaaaccatt

SEQ ID NO: 337666 - DNA, 25 bp, Artificial
  probe
  misc_feature (1)..(25): SEQ ID NO: 2814; WAN024G2Y; Start 28; Stop 52
aatctagcagaactggaaaccattg

SEQ ID NO: 337667 - DNA, 25 bp, Artificial
  probe
  misc_feature (1)..(25): SEQ ID NO: 2814; WAN024G2Y; Start 29; Stop 53
atctagcagaactggaaaccattgt

SEQ ID NO: 337668 - DNA, 25 bp, Artificial
  probe
  misc_feature (1)..(25): SEQ ID NO: 2814; WAN024G2Y; Start 56; Stop 80
aaagtttggaaaatggtgaaattgc

SEQ ID NO: 337669 - DNA, 25 bp, Artificial
  probe
  misc_feature (1)..(25): SEQ ID NO: 2814; WAN024G2Y; Start 184; Stop 208
gaagacggaacagaaagtgattttg

SEQ ID NO: 337670 - DNA, 25 bp, Artificial
  probe
  misc_feature (1)..(25): SEQ ID NO: 2814; WAN024G2Y; Start 183; Stop 207
agaagacggaacagaaagtgatttt

SEQ ID NO: 337671 - DNA, 25 bp, Artificial
  probe
  misc_feature (1)..(25): SEQ ID NO: 2814; WAN024G2Y; Start 57; Stop 81
aagtttggaaaatggtgaaattgct

SEQ ID NO: 337672 - DNA, 25 bp, Artificial
  probe
  misc_feature (1)..(25): SEQ ID NO: 2814; WAN024G2Y; Start 186; Stop 210
agacggaacagaaagtgattttgaa

SEQ ID NO: 337673 - DNA, 25 bp, Artificial
  probe
  misc_feature (1)..(25): SEQ ID NO: 2814; WAN024G2Y; Start 185; Stop 209
aagacggaacagaaagtgattttga

SEQ ID NO: 337674 - DNA, 25 bp, Artificial
  probe
  misc_feature (1)..(25): SEQ ID NO: 2814; WAN024G2Y; Start 180; Stop 204
gcaagaagacggaacagaaagtgat

SEQ ID NO: 337675 - DNA, 25 bp, Artificial
  probe
  misc_feature (1)..(25): SEQ ID NO: 2814; WAN024G2Y; Start 60; Stop 84
tttggaaaatggtgaaattgctctg

SEQ ID NO: 337676 - DNA, 25 bp, Artificial
  probe
  misc_feature (1)..(25): SEQ ID NO: 2814; WAN024G2Y; Start 59; Stop 83
gtttggaaaatggtgaaattgctct

SEQ ID NO: 337677 - DNA, 25 bp, Artificial
  probe
  misc_feature (1)..(25): SEQ ID NO: 2814; WAN024G2Y; Start 58; Stop 82
agtttggaaaatggtgaaattgctc

SEQ ID NO: 337678 - DNA, 25 bp, Artificial
  probe
  misc_feature (1)..(25): SEQ ID NO: 2814; WAN024G2Y; Start 72; Stop 96
tgaaattgctctggaagatgcgatt

SEQ ID NO: 337679 - DNA, 25 bp, Artificial
  probe
  misc_feature (1)..(25): SEQ ID NO: 2814; WAN024G2Y; Start 64; Stop 88
gaaaatggtgaaattgctctggaag

SEQ ID NO: 337680 - DNA, 25 bp, Artificial
  probe
  misc_feature (1)..(25): SEQ ID NO: 2814; WAN024G2Y; Start 84; Stop 108
ggaagatgcgattactgcctttcaa

SEQ ID NO: 337681 - DNA, 25 bp, Artificial
  probe
  misc_feature (1)..(25): SEQ ID NO: 2814; WAN024G2Y; Start 22; Stop 46
gaggaaaatctagcagaactggaaa

SEQ ID NO: 337682 - DNA, 25 bp, Artificial
  probe
  misc_feature (1)..(25): SEQ ID NO: 2814; WAN024G2Y; Start 65; Stop 89
aaaatggtgaaattgctctggaaga

SEQ ID NO: 337683 - DNA, 25 bp, Artificial
  probe
  misc_feature (1)..(25): SEQ ID NO: 2814; WAN024G2Y; Start 30; Stop 54
tctagcagaactggaaaccattgtc

SEQ ID NO: 337684 - DNA, 25 bp, Artificial
  probe
  misc_feature (1)..(25): SEQ ID NO: 2814; WAN024G2Y; Start 23; Stop 47
aggaaaatctagcagaactggaaac

SEQ ID NO: 337685 - DNA, 25 bp, Artificial
  probe
  misc_feature (1)..(25): SEQ ID NO: 2814; WAN024G2Y; Start 19; Stop 43
tttgaggaaaatctagcagaactgg

SEQ ID NO: 337686 - DNA, 25 bp, Artificial
  probe
  misc_feature (1)..(25): SEQ ID NO: 2814; WAN024G2Y; Start 80; Stop 104
ctctggaagatgcgattactgcctt

SEQ ID NO: 337687 - DNA, 25 bp, Artificial
  probe
  misc_feature (1)..(25): SEQ ID NO: 2814; WAN024G2Y; Start 86; Stop 110
aagatgcgattactgcctttcaaaa

SEQ ID NO: 337688 - DNA, 25 bp, Artificial
  probe
  misc_feature (1)..(25): SEQ ID NO: 2814; WAN024G2Y; Start 18; Stop 42
atttgaggaaaatctagcagaactg

SEQ ID NO: 337689 - DNA, 25 bp, Artificial
  probe
  misc_feature (1)..(25): SEQ ID NO: 2815; WAN024ESP; Start 102; Stop 126
gatgcttctctattacacggttctg

SEQ ID NO: 337690 - DNA, 25 bp, Artificial
  probe
  misc_feature (1)..(25): SEQ ID NO: 2815; WAN024ESP; Start 101; Stop 125
ggatgcttctctattacacggttct

SEQ ID NO: 337691 - DNA, 25 bp, Artificial
  probe
  misc_feature (1)..(25): SEQ ID NO: 2815; WAN024ESP; Start 107; Stop 131
ttctctattacacggttctgtccaa

SEQ ID NO: 337692 - DNA, 25 bp, Artificial
  probe
  misc_feature (1)..(25): SEQ ID NO: 2815; WAN024ESP; Start 106; Stop 130
cttctctattacacggttctgtcca

SEQ ID NO: 337693 - DNA, 25 bp, Artificial
  probe
  misc_feature (1)..(25): SEQ ID NO: 2815; WAN024ESP; Start 103; Stop 127
atgcttctctattacacggttctgt

SEQ ID NO: 337694 - DNA, 25 bp, Artificial
  probe
  misc_feature (1)..(25): SEQ ID NO: 2815; WAN024ESP; Start 108; Stop 132
tctctattacacggttctgtccaac

SEQ ID NO: 337695 - DNA, 25 bp, Artificial
  probe
  misc_feature (1)..(25): SEQ ID NO: 2815; WAN024ESP; Start 605; Stop 629
agcaaatcaagagaaagtcatccta

SEQ ID NO: 337696 - DNA, 25 bp, Artificial
  probe
  misc_feature (1)..(25): SEQ ID NO: 2815; WAN024ESP; Start 602; Stop 626
tcaagcaaatcaagagaaagtcatc

SEQ ID NO: 337697 - DNA, 25 bp, Artificial
  probe
  misc_feature (1)..(25): SEQ ID NO: 2815; WAN024ESP; Start 252; Stop 276
ctgtgtgatttaccatttcctcttg

SEQ ID NO: 337698 - DNA, 25 bp, Artificial
  probe
  misc_feature (1)..(25): SEQ ID NO: 2815; WAN024ESP; Start 248; Stop 272
ttacctgtgtgatttaccatttcct

SEQ ID NO: 337699 - DNA, 25 bp, Artificial
  probe
  misc_feature (1)..(25): SEQ ID NO: 2815; WAN024ESP; Start 418; Stop 442
ccctttctgtatatgatgtttgctc

SEQ ID NO: 337700 - DNA, 25 bp, Artificial
  probe
  misc_feature (1)..(25): SEQ ID NO: 2815; WAN024ESP; Start 417; Stop 441
accctttctgtatatgatgtttgct

SEQ ID NO: 337701 - DNA, 25 bp, Artificial
  probe
  misc_feature (1)..(25): SEQ ID NO: 2815; WAN024ESP; Start 249; Stop 273
tacctgtgtgatttaccatttcctc

SEQ ID NO: 337702 - DNA, 25 bp, Artificial
  probe
  misc_feature (1)..(25): SEQ ID NO: 2815; WAN024ESP; Start 604; Stop 628
aagcaaatcaagagaaagtcatcct

SEQ ID NO: 337703 - DNA, 25 bp, Artificial
  probe
  misc_feature (1)..(25): SEQ ID NO: 2815; WAN024ESP; Start 603; Stop 627
caagcaaatcaagagaaagtcatcc

SEQ ID NO: 337704 - DNA, 25 bp, Artificial
  probe
  misc_feature (1)..(25): SEQ ID NO: 2815; WAN024ESP; Start 606; Stop 630
gcaaatcaagagaaagtcatcctaa

SEQ ID NO: 337705 - DNA, 25 bp, Artificial
  probe
  misc_feature (1)..(25): SEQ ID NO: 2815; WAN024ESP; Start 247; Stop 271
attacctgtgtgatttaccatttcc

SEQ ID NO: 337706 - DNA, 25 bp, Artificial
  probe
  misc_feature (1)..(25): SEQ ID NO: 2815; WAN024ESP; Start 535; Stop 559
gttgtgtttaagtggtgtctgatta

SEQ ID NO: 337707 - DNA, 25 bp, Artificial
  probe
  misc_feature (1)..(25): SEQ ID NO: 2815; WAN024ESP; Start 601; Stop 625
atcaagcaaatcaagagaaagtcat

SEQ ID NO: 337708 - DNA, 25 bp, Artificial
  probe
  misc_feature (1)..(25): SEQ ID NO: 2815; WAN024ESP; Start 548; Stop 572
ggtgtctgattatctttgttgccta

SEQ ID NO: 337709 - DNA, 25 bp, Artificial
  probe
  misc_feature (1)..(25): SEQ ID NO: 2815; WAN024ESP; Start 310; Stop 334
aatttcctttgccactatatcgttc

SEQ ID NO: 337710 - DNA, 25 bp, Artificial
  probe
  misc_feature (1)..(25): SEQ ID NO: 2815; WAN024ESP; Start 251; Stop 275
cctgtgtgatttaccatttcctctt

SEQ ID NO: 337711 - DNA, 25 bp, Artificial
  probe
  misc_feature (1)..(25): SEQ ID NO: 2815; WAN024ESP; Start 549; Stop 573
gtgtctgattatctttgttgcctat

SEQ ID NO: 337712 - DNA, 25 bp, Artificial
  probe
  misc_feature (1)..(25): SEQ ID NO: 2815; WAN024ESP; Start 281; Stop 305
ccattgcgactaatttctataccct

SEQ ID NO: 337713 - DNA, 25 bp, Artificial
  probe
  misc_feature (1)..(25): SEQ ID NO: 2815; WAN024ESP; Start 533; Stop 557
atgttgtgtttaagtggtgtctgat

SEQ ID NO: 337714 - DNA, 25 bp, Artificial
  probe
  misc_feature (1)..(25): SEQ ID NO: 2815; WAN024ESP; Start 531; Stop 555
gaatgttgtgtttaagtggtgtctg

SEQ ID NO: 337715 - DNA, 25 bp, Artificial
  probe
  misc_feature (1)..(25): SEQ ID NO: 2815; WAN024ESP; Start 157; Stop 181
tatcttctaaaggttatgagccgtg

SEQ ID NO: 337716 - DNA, 25 bp, Artificial
  probe
  misc_feature (1)..(25): SEQ ID NO: 2815; WAN024ESP; Start 104; Stop 128
tgcttctctattacacggttctgtc

SEQ ID NO: 337717 - DNA, 25 bp, Artificial
  probe
  misc_feature (1)..(25): SEQ ID NO: 2815; WAN024ESP; Start 544; Stop 568
aagtggtgtctgattatctttgttg

SEQ ID NO: 337718 - DNA, 25 bp, Artificial
  probe
  misc_feature (1)..(25): SEQ ID NO: 2815; WAN024ESP; Start 156; Stop 180
ttatcttctaaaggttatgagccgt

SEQ ID NO: 337719 - DNA, 25 bp, Artificial
  probe
  misc_feature (1)..(25): SEQ ID NO: 2815; WAN024ESP; Start 537; Stop 561
tgtgtttaagtggtgtctgattatc

SEQ ID NO: 337720 - DNA, 25 bp, Artificial
  probe
  misc_feature (1)..(25): SEQ ID NO: 2815; WAN024ESP; Start 534; Stop 558
tgttgtgtttaagtggtgtctgatt

SEQ ID NO: 337721 - DNA, 25 bp, Artificial
  probe
  misc_feature (1)..(25): SEQ ID NO: 2815; WAN024ESP; Start 532; Stop 556
aatgttgtgtttaagtggtgtctga

SEQ ID NO: 337722 - DNA, 25 bp, Artificial
  probe
  misc_feature (1)..(25): SEQ ID NO: 2816; WAN024CQ8; Start 211; Stop 235
tcatcatccgaatcaatcttctcat

SEQ ID NO: 337723 - DNA, 25 bp, Artificial
  probe
  misc_feature (1)..(25): SEQ ID NO: 2816; WAN024CQ8; Start 210; Stop 234
ttcatcatccgaatcaatcttctca

SEQ ID NO: 337724 - DNA, 25 bp, Artificial
  probe
  misc_feature (1)..(25): SEQ ID NO: 2816; WAN024CQ8; Start 209; Stop 233
gttcatcatccgaatcaatcttctc

SEQ ID NO: 337725 - DNA, 25 bp, Artificial
  probe
  misc_feature (1)..(25): SEQ ID NO: 2816; WAN024CQ8; Start 206; Stop 230
taggttcatcatccgaatcaatctt

SEQ ID NO: 337726 - DNA, 25 bp, Artificial
  probe
  misc_feature (1)..(25): SEQ ID NO: 2816; WAN024CQ8; Start 212; Stop 236
catcatccgaatcaatcttctcatc

SEQ ID NO: 337727 - DNA, 25 bp, Artificial
  probe
  misc_feature (1)..(25): SEQ ID NO: 2816; WAN024CQ8; Start 213; Stop 237
atcatccgaatcaatcttctcatcc

SEQ ID NO: 337728 - DNA, 25 bp, Artificial
  probe
  misc_feature (1)..(25): SEQ ID NO: 2816; WAN024CQ8; Start 205; Stop 229
gtaggttcatcatccgaatcaatct

SEQ ID NO: 337729 - DNA, 25 bp, Artificial
  probe
  misc_feature (1)..(25): SEQ ID NO: 2816; WAN024CQ8; Start 208; Stop 232
ggttcatcatccgaatcaatcttct

SEQ ID NO: 337730 - DNA, 25 bp, Artificial
  probe
  misc_feature (1)..(25): SEQ ID NO: 2816; WAN024CQ8; Start 207; Stop 231
aggttcatcatccgaatcaatcttc

SEQ ID NO: 337731 - DNA, 25 bp, Artificial
  probe
  misc_feature (1)..(25): SEQ ID NO: 2816; WAN024CQ8; Start 219; Stop 243
cgaatcaatcttctcatccgtatgg

SEQ ID NO: 337732 - DNA, 25 bp, Artificial
  probe
  misc_feature (1)..(25): SEQ ID NO: 2816; WAN024CQ8; Start 218; Stop 242
ccgaatcaatcttctcatccgtatg

SEQ ID NO: 337733 - DNA, 25 bp, Artificial
  probe
  misc_feature (1)..(25): SEQ ID NO: 2816; WAN024CQ8; Start 217; Stop 241
tccgaatcaatcttctcatccgtat

SEQ ID NO: 337734 - DNA, 25 bp, Artificial
  probe
  misc_feature (1)..(25): SEQ ID NO: 2816; WAN024CQ8; Start 216; Stop 240
atccgaatcaatcttctcatccgta

SEQ ID NO: 337735 - DNA, 25 bp, Artificial
  probe
  misc_feature (1)..(25): SEQ ID NO: 2816; WAN024CQ8; Start 204; Stop 228
cgtaggttcatcatccgaatcaatc

SEQ ID NO: 337736 - DNA, 25 bp, Artificial
  probe
  misc_feature (1)..(25): SEQ ID NO: 2816; WAN024CQ8; Start 220; Stop 244
gaatcaatcttctcatccgtatgga

SEQ ID NO: 337737 - DNA, 25 bp, Artificial
  probe
  misc_feature (1)..(25): SEQ ID NO: 2816; WAN024CQ8; Start 194; Stop 218
gaatagctctcgtaggttcatcatc

SEQ ID NO: 337738 - DNA, 25 bp, Artificial
  probe
  misc_feature (1)..(25): SEQ ID NO: 2816; WAN024CQ8; Start 214; Stop 238
tcatccgaatcaatcttctcatccg

SEQ ID NO: 337739 - DNA, 25 bp, Artificial
  probe
  misc_feature (1)..(25): SEQ ID NO: 2816; WAN024CQ8; Start 215; Stop 239
catccgaatcaatcttctcatccgt

SEQ ID NO: 337740 - DNA, 25 bp, Artificial
  probe
  misc_feature (1)..(25): SEQ ID NO: 2816; WAN024CQ8; Start 195; Stop 219
aatagctctcgtaggttcatcatcc

SEQ ID NO: 337741 - DNA, 25 bp, Artificial
  probe
  misc_feature (1)..(25): SEQ ID NO: 2816; WAN024CQ8; Start 57; Stop 81
gatattcttgatacgacccacgatg

SEQ ID NO: 337742 - DNA, 25 bp, Artificial
  probe
  misc_feature (1)..(25): SEQ ID NO: 2816; WAN024CQ8; Start 58; Stop 82
atattcttgatacgacccacgatga

SEQ ID NO: 337743 - DNA, 25 bp, Artificial
  probe
  misc_feature (1)..(25): SEQ ID NO: 2816; WAN024CQ8; Start 261; Stop 285
tgtcgctgtcagatattgcttgatt

SEQ ID NO: 337744 - DNA, 25 bp, Artificial
  probe
  misc_feature (1)..(25): SEQ ID NO: 2816; WAN024CQ8; Start 59; Stop 83
tattcttgatacgacccacgatgaa

SEQ ID NO: 337745 - DNA, 25 bp, Artificial
  probe
  misc_feature (1)..(25): SEQ ID NO: 2816; WAN024CQ8; Start 46; Stop 70
ccaggacggtcgatattcttgatac

SEQ ID NO: 337746 - DNA, 25 bp, Artificial
  probe
  misc_feature (1)..(25): SEQ ID NO: 2816; WAN024CQ8; Start 45; Stop 69
tccaggacggtcgatattcttgata

SEQ ID NO: 337747 - DNA, 25 bp, Artificial
  probe
  misc_feature (1)..(25): SEQ ID NO: 2816; WAN024CQ8; Start 56; Stop 80
cgatattcttgatacgacccacgat

SEQ ID NO: 337748 - DNA, 25 bp, Artificial
  probe
  misc_feature (1)..(25): SEQ ID NO: 2816; WAN024CQ8; Start 203; Stop 227
tcgtaggttcatcatccgaatcaat

SEQ ID NO: 337749 - DNA, 25 bp, Artificial
  probe
  misc_feature (1)..(25): SEQ ID NO: 2816; WAN024CQ8; Start 184; Stop 208
ttcttattccgaatagctctcgtag

SEQ ID NO: 337750 - DNA, 25 bp, Artificial
  probe
  misc_feature (1)..(25): SEQ ID NO: 2816; WAN024CQ8; Start 262; Stop 286
gtcgctgtcagatattgcttgattt

SEQ ID NO: 337751 - DNA, 25 bp, Artificial
  probe
  misc_feature (1)..(25): SEQ ID NO: 2816; WAN024CQ8; Start 260; Stop 284
ctgtcgctgtcagatattgcttgat

SEQ ID NO: 337752 - DNA, 25 bp, Artificial
  probe
  misc_feature (1)..(25): SEQ ID NO: 2816; WAN024CQ8; Start 47; Stop 71
caggacggtcgatattcttgatacg

SEQ ID NO: 337753 - DNA, 25 bp, Artificial
  probe
  misc_feature (1)..(25): SEQ ID NO: 2816; WAN024CQ8; Start 187; Stop 211
ttattccgaatagctctcgtaggtt

SEQ ID NO: 337754 - DNA, 25 bp, Artificial
  probe
  misc_feature (1)..(25): SEQ ID NO: 2816; WAN024CQ8; Start 64; Stop 88
ttgatacgacccacgatgaagaatc

SEQ ID NO: 337755 - DNA, 25 bp, Artificial
  probe
  misc_feature (1)..(25): SEQ ID NO: 2817; WAN024GEJ; Start 548; Stop 572
cggattatacgattaaccttctgct

SEQ ID NO: 337756 - DNA, 25 bp, Artificial
  probe
  misc_feature (1)..(25): SEQ ID NO: 2817; WAN024GEJ; Start 533; Stop 557
caggcattcaggattcggattatac

SEQ ID NO: 337757 - DNA, 25 bp, Artificial
  probe
  misc_feature (1)..(25): SEQ ID NO: 2817; WAN024GEJ; Start 532; Stop 556
tcaggcattcaggattcggattata

SEQ ID NO: 337758 - DNA, 25 bp, Artificial
  probe
  misc_feature (1)..(25): SEQ ID NO: 2817; WAN024GEJ; Start 555; Stop 579
tacgattaaccttctgctagacaag

SEQ ID NO: 337759 - DNA, 25 bp, Artificial
  probe
  misc_feature (1)..(25): SEQ ID NO: 2817; WAN024GEJ; Start 554; Stop 578
atacgattaaccttctgctagacaa

SEQ ID NO: 337760 - DNA, 25 bp, Artificial
  probe
  misc_feature (1)..(25): SEQ ID NO: 2817; WAN024GEJ; Start 665; Stop 689
aggtcaaggaatatgatattgtggc

SEQ ID NO: 337761 - DNA, 25 bp, Artificial
  probe
  misc_feature (1)..(25): SEQ ID NO: 2817; WAN024GEJ; Start 553; Stop 577
tatacgattaaccttctgctagaca

SEQ ID NO: 337762 - DNA, 25 bp, Artificial
  probe
  misc_feature (1)..(25): SEQ ID NO: 2817; WAN024GEJ; Start 549; Stop 573
ggattatacgattaaccttctgcta

SEQ ID NO: 337763 - DNA, 25 bp, Artificial
  probe
  misc_feature (1)..(25): SEQ ID NO: 2817; WAN024GEJ; Start 531; Stop 555
ttcaggcattcaggattcggattat

SEQ ID NO: 337764 - DNA, 25 bp, Artificial
  probe
  misc_feature (1)..(25): SEQ ID NO: 2817; WAN024GEJ; Start 649; Stop 673
actaagttcactattaaggtcaagg

SEQ ID NO: 337765 - DNA, 25 bp, Artificial
  probe
  misc_feature (1)..(25): SEQ ID NO: 2817; WAN024GEJ; Start 650; Stop 674
ctaagttcactattaaggtcaagga

SEQ ID NO: 337766 - DNA, 25 bp, Artificial
  probe
  misc_feature (1)..(25): SEQ ID NO: 2817; WAN024GEJ; Start 664; Stop 688
aaggtcaaggaatatgatattgtgg

SEQ ID NO: 337767 - DNA, 25 bp, Artificial
  probe
  misc_feature (1)..(25): SEQ ID NO: 2817; WAN024GEJ; Start 652; Stop 676
aagttcactattaaggtcaaggaat

SEQ ID NO: 337768 - DNA, 25 bp, Artificial
  probe
  misc_feature (1)..(25): SEQ ID NO: 2817; WAN024GEJ; Start 534; Stop 558
aggcattcaggattcggattatacg

SEQ ID NO: 337769 - DNA, 25 bp, Artificial
  probe
  misc_feature (1)..(25): SEQ ID NO: 2817; WAN024GEJ; Start 218; Stop 242
attcagaatcagctaaggaagagtc

SEQ ID NO: 337770 - DNA, 25 bp, Artificial
  probe
  misc_feature (1)..(25): SEQ ID NO: 2817; WAN024GEJ; Start 552; Stop 576
ttatacgattaaccttctgctagac

SEQ ID NO: 337771 - DNA, 25 bp, Artificial
  probe
  misc_feature (1)..(25): SEQ ID NO: 2817; WAN024GEJ; Start 646; Stop 670
ccaactaagttcactattaaggtca

SEQ ID NO: 337772 - DNA, 25 bp, Artificial
  probe
  misc_feature (1)..(25): SEQ ID NO: 2817; WAN024GEJ; Start 530; Stop 554
cttcaggcattcaggattcggatta

SEQ ID NO: 337773 - DNA, 25 bp, Artificial
  probe
  misc_feature (1)..(25): SEQ ID NO: 2817; WAN024GEJ; Start 645; Stop 669
tccaactaagttcactattaaggtc

SEQ ID NO: 337774 - DNA, 25 bp, Artificial
  probe
  misc_feature (1)..(25): SEQ ID NO: 2817; WAN024GEJ; Start 219; Stop 243
ttcagaatcagctaaggaagagtct

SEQ ID NO: 337775 - DNA, 25 bp, Artificial
  probe
  misc_feature (1)..(25): SEQ ID NO: 2817; WAN024GEJ; Start 618; Stop 642
tgaatcagctcaacttgtctatcaa

SEQ ID NO: 337776 - DNA, 25 bp, Artificial
  probe
  misc_feature (1)..(25): SEQ ID NO: 2817; WAN024GEJ; Start 619; Stop 643
gaatcagctcaacttgtctatcaat

SEQ ID NO: 337777 - DNA, 25 bp, Artificial
  probe
  misc_feature (1)..(25): SEQ ID NO: 2817; WAN024GEJ; Start 48; Stop 72
gaaagagttatcagaatggcagaaa

SEQ ID NO: 337778 - DNA, 25 bp, Artificial
  probe
  misc_feature (1)..(25): SEQ ID NO: 2817; WAN024GEJ; Start 651; Stop 675
taagttcactattaaggtcaaggaa

SEQ ID NO: 337779 - DNA, 25 bp, Artificial
  probe
  misc_feature (1)..(25): SEQ ID NO: 2817; WAN024GEJ; Start 305; Stop 329
ctaaagagaaggaggaacaggataa

SEQ ID NO: 337780 - DNA, 25 bp, Artificial
  probe
  misc_feature (1)..(25): SEQ ID NO: 2817; WAN024GEJ; Start 472; Stop 496
atgaaagatattcgtgttgagggaa

SEQ ID NO: 337781 - DNA, 25 bp, Artificial
  probe
  misc_feature (1)..(25): SEQ ID NO: 2817; WAN024GEJ; Start 620; Stop 644
aatcagctcaacttgtctatcaatt

SEQ ID NO: 337782 - DNA, 25 bp, Artificial
  probe
  misc_feature (1)..(25): SEQ ID NO: 2817; WAN024GEJ; Start 304; Stop 328
tctaaagagaaggaggaacaggata

SEQ ID NO: 337783 - DNA, 25 bp, Artificial
  probe
  misc_feature (1)..(25): SEQ ID NO: 2817; WAN024GEJ; Start 714; Stop 738
ttatcctattctttccagtggtcag

SEQ ID NO: 337784 - DNA, 25 bp, Artificial
  probe
  misc_feature (1)..(25): SEQ ID NO: 2817; WAN024GEJ; Start 306; Stop 330
taaagagaaggaggaacaggataaa

SEQ ID NO: 337785 - DNA, 25 bp, Artificial
  probe
  misc_feature (1)..(25): SEQ ID NO: 2817; WAN024GEJ; Start 49; Stop 73
aaagagttatcagaatggcagaaac

SEQ ID NO: 337786 - DNA, 25 bp, Artificial
  probe
  misc_feature (1)..(25): SEQ ID NO: 2817; WAN024GEJ; Start 644; Stop 668
ttccaactaagttcactattaaggt

SEQ ID NO: 337787 - DNA, 25 bp, Artificial
  probe
  misc_feature (1)..(25): SEQ ID NO: 2817; WAN024GEJ; Start 66; Stop 90
gcagaaacgaaaccaagaatatcta

SEQ ID NO: 337788 - DNA, 25 bp, Artificial
  probe
  misc_feature (1)..(25): SEQ ID NO: 2818; WAN024D5U; Start 479; Stop 503
tcaatgagtcaggtatctacaagtg

SEQ ID NO: 337789 - DNA, 25 bp, Artificial
  probe
  misc_feature (1)..(25): SEQ ID NO: 2818; WAN024D5U; Start 478; Stop 502
gtcaatgagtcaggtatctacaagt

SEQ ID NO: 337790 - DNA, 25 bp, Artificial
  probe
  misc_feature (1)..(25): SEQ ID NO: 2818; WAN024D5U; Start 480; Stop 504
caatgagtcaggtatctacaagtgg

SEQ ID NO: 337791 - DNA, 25 bp, Artificial
  probe
  misc_feature (1)..(25): SEQ ID NO: 2818; WAN024D5U; Start 972; Stop 996
agactggatgagcaatgattatatc

SEQ ID NO: 337792 - DNA, 25 bp, Artificial
  probe
  misc_feature (1)..(25): SEQ ID NO: 2818; WAN024D5U; Start 372; Stop 396
aacaccacgctacatcaatgaatac

SEQ ID NO: 337793 - DNA, 25 bp, Artificial
  probe
  misc_feature (1)..(25): SEQ ID NO: 2818; WAN024D5U; Start 477; Stop 501
tgtcaatgagtcaggtatctacaag

SEQ ID NO: 337794 - DNA, 25 bp, Artificial
  probe
  misc_feature (1)..(25): SEQ ID NO: 2818; WAN024D5U; Start 218; Stop 242
gtccagaatcacatgagaattatcg

SEQ ID NO: 337795 - DNA, 25 bp, Artificial
  probe
  misc_feature (1)..(25): SEQ ID NO: 2818; WAN024D5U; Start 476; Stop 500
ctgtcaatgagtcaggtatctacaa

SEQ ID NO: 337796 - DNA, 25 bp, Artificial
  probe
  misc_feature (1)..(25): SEQ ID NO: 2818; WAN024D5U; Start 222; Stop 246
agaatcacatgagaattatcgccag

SEQ ID NO: 337797 - DNA, 25 bp, Artificial
  probe
  misc_feature (1)..(25): SEQ ID NO: 2818; WAN024D5U; Start 219; Stop 243
tccagaatcacatgagaattatcgc

SEQ ID NO: 337798 - DNA, 25 bp, Artificial
  probe
  misc_feature (1)..(25): SEQ ID NO: 2818; WAN024D5U; Start 224; Stop 248
aatcacatgagaattatcgccagtc

SEQ ID NO: 337799 - DNA, 25 bp, Artificial
  probe
  misc_feature (1)..(25): SEQ ID NO: 2818; WAN024D5U; Start 223; Stop 247
gaatcacatgagaattatcgccagt

SEQ ID NO: 337800 - DNA, 25 bp, Artificial
  probe
  misc_feature (1)..(25): SEQ ID NO: 2818; WAN024D5U; Start 221; Stop 245
cagaatcacatgagaattatcgcca

SEQ ID NO: 337801 - DNA, 25 bp, Artificial
  probe
  misc_feature (1)..(25): SEQ ID NO: 2818; WAN024D5U; Start 481; Stop 505
aatgagtcaggtatctacaagtggc

SEQ ID NO: 337802 - DNA, 25 bp, Artificial
  probe
  misc_feature (1)..(25): SEQ ID NO: 2818; WAN024D5U; Start 379; Stop 403
cgctacatcaatgaataccttggta

SEQ ID NO: 337803 - DNA, 25 bp, Artificial
  probe
  misc_feature (1)..(25): SEQ ID NO: 2818; WAN024D5U; Start 1203; Stop 1227
agttccaacagttcttgaagcattc

SEQ ID NO: 337804 - DNA, 25 bp, Artificial
  probe
  misc_feature (1)..(25): SEQ ID NO: 2818; WAN024D5U; Start 375; Stop 399
accacgctacatcaatgaatacctt

SEQ ID NO: 337805 - DNA, 25 bp, Artificial
  probe
  misc_feature (1)..(25): SEQ ID NO: 2818; WAN024D5U; Start 377; Stop 401
cacgctacatcaatgaataccttgg

SEQ ID NO: 337806 - DNA, 25 bp, Artificial
  probe
  misc_feature (1)..(25): SEQ ID NO: 2818; WAN024D5U; Start 376; Stop 400
ccacgctacatcaatgaataccttg

SEQ ID NO: 337807 - DNA, 25 bp, Artificial
  probe
  misc_feature (1)..(25): SEQ ID NO: 2818; WAN024D5U; Start 277; Stop 301
attgaccaactattagctgaaggaa

SEQ ID NO: 337808 - DNA, 25 bp, Artificial
  probe
  misc_feature (1)..(25): SEQ ID NO: 2818; WAN024D5U; Start 217; Stop 241
agtccagaatcacatgagaattatc

SEQ ID NO: 337809 - DNA, 25 bp, Artificial
  probe
  misc_feature (1)..(25): SEQ ID NO: 2818; WAN024D5U; Start 1202; Stop 1226
cagttccaacagttcttgaagcatt

SEQ ID NO: 337810 - DNA, 25 bp, Artificial
  probe
  misc_feature (1)..(25): SEQ ID NO: 2818; WAN024D5U; Start 492; Stop 516
tatctacaagtggcatgatatggtc

SEQ ID NO: 337811 - DNA, 25 bp, Artificial
  probe
  misc_feature (1)..(25): SEQ ID NO: 2818; WAN024D5U; Start 491; Stop 515
gtatctacaagtggcatgatatggt

SEQ ID NO: 337812 - DNA, 25 bp, Artificial
  probe
  misc_feature (1)..(25): SEQ ID NO: 2818; WAN024D5U; Start 489; Stop 513
aggtatctacaagtggcatgatatg

SEQ ID NO: 337813 - DNA, 25 bp, Artificial
  probe
  misc_feature (1)..(25): SEQ ID NO: 2818; WAN024D5U; Start 488; Stop 512
caggtatctacaagtggcatgatat

SEQ ID NO: 337814 - DNA, 25 bp, Artificial
  probe
  misc_feature (1)..(25): SEQ ID NO: 2818; WAN024D5U; Start 220; Stop 244
ccagaatcacatgagaattatcgcc

SEQ ID NO: 337815 - DNA, 25 bp, Artificial
  probe
  misc_feature (1)..(25): SEQ ID NO: 2818; WAN024D5U; Start 490; Stop 514
ggtatctacaagtggcatgatatgg

SEQ ID NO: 337816 - DNA, 25 bp, Artificial
  probe
  misc_feature (1)..(25): SEQ ID NO: 2818; WAN024D5U; Start 487; Stop 511
tcaggtatctacaagtggcatgata

SEQ ID NO: 337817 - DNA, 25 bp, Artificial
  probe
  misc_feature (1)..(25): SEQ ID NO: 2818; WAN024D5U; Start 216; Stop 240
aagtccagaatcacatgagaattat

SEQ ID NO: 337818 - DNA, 25 bp, Artificial
  probe
  misc_feature (1)..(25): SEQ ID NO: 2818; WAN024D5U; Start 475; Stop 499
gctgtcaatgagtcaggtatctaca

SEQ ID NO: 337819 - DNA, 25 bp, Artificial
  probe
  misc_feature (1)..(25): SEQ ID NO: 2818; WAN024D5U; Start 493; Stop 517
atctacaagtggcatgatatggtca

SEQ ID NO: 337820 - DNA, 25 bp, Artificial
  probe
  misc_feature (1)..(25): SEQ ID NO: 2818; WAN024D5U; Start 494; Stop 518
tctacaagtggcatgatatggtcaa

SEQ ID NO: 337821 - DNA, 25 bp, Artificial
  probe
  misc_feature (1)..(25): SEQ ID NO: 2819; WAN024EZK; Start 170; Stop 194
caagtcatactcagatggatgctaa

SEQ ID NO: 337822 - DNA, 25 bp, Artificial
  probe
  misc_feature (1)..(25): SEQ ID NO: 2819; WAN024EZK; Start 549; Stop 573
cattgtcaagattgatgctagtctc

SEQ ID NO: 337823 - DNA, 25 bp, Artificial
  probe
  misc_feature (1)..(25): SEQ ID NO: 2819; WAN024EZK; Start 550; Stop 574
attgtcaagattgatgctagtctcc

SEQ ID NO: 337824 - DNA, 25 bp, Artificial
  probe
  misc_feature (1)..(25): SEQ ID NO: 2819; WAN024EZK; Start 333; Stop 357
cttagatattgaagccattgactgg

SEQ ID NO: 337825 - DNA, 25 bp, Artificial
  probe
  misc_feature (1)..(25): SEQ ID NO: 2819; WAN024EZK; Start 321; Stop 345
atttggtcgtggcttagatattgaa

SEQ ID NO: 337826 - DNA, 25 bp, Artificial
  probe
  misc_feature (1)..(25): SEQ ID NO: 2819; WAN024EZK; Start 199; Stop 223
gagctacttctctatattgccagtc

SEQ ID NO: 337827 - DNA, 25 bp, Artificial
  probe
  misc_feature (1)..(25): SEQ ID NO: 2819; WAN024EZK; Start 320; Stop 344
gatttggtcgtggcttagatattga

SEQ ID NO: 337828 - DNA, 25 bp, Artificial
  probe
  misc_feature (1)..(25): SEQ ID NO: 2819; WAN024EZK; Start 533; Stop 557
ataaagagggaaatcgcattgtcaa

SEQ ID NO: 337829 - DNA, 25 bp, Artificial
  probe
  misc_feature (1)..(25): SEQ ID NO: 2819; WAN024EZK; Start 169; Stop 193
ccaagtcatactcagatggatgcta

SEQ ID NO: 337830 - DNA, 25 bp, Artificial
  probe
  misc_feature (1)..(25): SEQ ID NO: 2819; WAN024EZK; Start 322; Stop 346
tttggtcgtggcttagatattgaag

SEQ ID NO: 337831 - DNA, 25 bp, Artificial
  probe
  misc_feature (1)..(25): SEQ ID NO: 2819; WAN024EZK; Start 532; Stop 556
gataaagagggaaatcgcattgtca

SEQ ID NO: 337832 - DNA, 25 bp, Artificial
  probe
  misc_feature (1)..(25): SEQ ID NO: 2819; WAN024EZK; Start 171; Stop 195
aagtcatactcagatggatgctaaa

SEQ ID NO: 337833 - DNA, 25 bp, Artificial
  probe
  misc_feature (1)..(25): SEQ ID NO: 2819; WAN024EZK; Start 200; Stop 224
agctacttctctatattgccagtcg

SEQ ID NO: 337834 - DNA, 25 bp, Artificial
  probe
  misc_feature (1)..(25): SEQ ID NO: 2819; WAN024EZK; Start 534; Stop 558
taaagagggaaatcgcattgtcaag

SEQ ID NO: 337835 - DNA, 25 bp, Artificial
  probe
  misc_feature (1)..(25): SEQ ID NO: 2819; WAN024EZK; Start 319; Stop 343
ggatttggtcgtggcttagatattg

SEQ ID NO: 337836 - DNA, 25 bp, Artificial
  probe
  misc_feature (1)..(25): SEQ ID NO: 2819; WAN024EZK; Start 201; Stop 225
gctacttctctatattgccagtcgc

SEQ ID NO: 337837 - DNA, 25 bp, Artificial
  probe
  misc_feature (1)..(25): SEQ ID NO: 2819; WAN024EZK; Start 531; Stop 555
ggataaagagggaaatcgcattgtc

SEQ ID NO: 337838 - DNA, 25 bp, Artificial
  probe
  misc_feature (1)..(25): SEQ ID NO: 2819; WAN024EZK; Start 529; Stop 553
ctggataaagagggaaatcgcattg

SEQ ID NO: 337839 - DNA, 25 bp, Artificial
  probe
  misc_feature (1)..(25): SEQ ID NO: 2819; WAN024EZK; Start 555; Stop 579
caagattgatgctagtctccctttg

SEQ ID NO: 337840 - DNA, 25 bp, Artificial
  probe
  misc_feature (1)..(25): SEQ ID NO: 2819; WAN024EZK; Start 528; Stop 552
tctggataaagagggaaatcgcatt

SEQ ID NO: 337841 - DNA, 25 bp, Artificial
  probe
  misc_feature (1)..(25): SEQ ID NO: 2819; WAN024EZK; Start 527; Stop 551
ttctggataaagagggaaatcgcat

SEQ ID NO: 337842 - DNA, 25 bp, Artificial
  probe
  misc_feature (1)..(25): SEQ ID NO: 2819; WAN024EZK; Start 513; Stop 537
aggctacctttctcttctggataaa

SEQ ID NO: 337843 - DNA, 25 bp, Artificial
  probe
  misc_feature (1)..(25): SEQ ID NO: 2819; WAN024EZK; Start 554; Stop 578
tcaagattgatgctagtctcccttt

SEQ ID NO: 337844 - DNA, 25 bp, Artificial
  probe
  misc_feature (1)..(25): SEQ ID NO: 2819; WAN024EZK; Start 299; Stop 323
atagttctgttgcctatcagggatt

SEQ ID NO: 337845 - DNA, 25 bp, Artificial
  probe
  misc_feature (1)..(25): SEQ ID NO: 2819; WAN024EZK; Start 530; Stop 554
tggataaagagggaaatcgcattgt

SEQ ID NO: 337846 - DNA, 25 bp, Artificial
  probe
  misc_feature (1)..(25): SEQ ID NO: 2819; WAN024EZK; Start 318; Stop 342
gggatttggtcgtggcttagatatt

SEQ ID NO: 337847 - DNA, 25 bp, Artificial
  probe
  misc_feature (1)..(25): SEQ ID NO: 2819; WAN024EZK; Start 460; Stop 484
gaggttaatcgtttggatttggaag

SEQ ID NO: 337848 - DNA, 25 bp, Artificial
  probe
  misc_feature (1)..(25): SEQ ID NO: 2819; WAN024EZK; Start 300; Stop 324
tagttctgttgcctatcagggattt

SEQ ID NO: 337849 - DNA, 25 bp, Artificial
  probe
  misc_feature (1)..(25): SEQ ID NO: 2819; WAN024EZK; Start 556; Stop 580
aagattgatgctagtctccctttgg

SEQ ID NO: 337850 - DNA, 25 bp, Artificial
  probe
  misc_feature (1)..(25): SEQ ID NO: 2819; WAN024EZK; Start 536; Stop 560
aagagggaaatcgcattgtcaagat

SEQ ID NO: 337851 - DNA, 25 bp, Artificial
  probe
  misc_feature (1)..(25): SEQ ID NO: 2819; WAN024EZK; Start 526; Stop 550
cttctggataaagagggaaatcgca

SEQ ID NO: 337852 - DNA, 25 bp, Artificial
  probe
  misc_feature (1)..(25): SEQ ID NO: 2819; WAN024EZK; Start 464; Stop 488
ttaatcgtttggatttggaagggtt

SEQ ID NO: 337853 - DNA, 25 bp, Artificial
  probe
  misc_feature (1)..(25): SEQ ID NO: 2819; WAN024EZK; Start 553; Stop 577
gtcaagattgatgctagtctccctt

SEQ ID NO: 337854 - DNA, 25 bp, Artificial
  probe
  misc_feature (1)..(25): SEQ ID NO: 2820; WAN024ETT; Start 507; Stop 531
tcgtaagtatcttcattcaggtgtt

SEQ ID NO: 337855 - DNA, 25 bp, Artificial
  probe
  misc_feature (1)..(25): SEQ ID NO: 2820; WAN024ETT; Start 506; Stop 530
ttcgtaagtatcttcattcaggtgt

SEQ ID NO: 337856 - DNA, 25 bp, Artificial
  probe
  misc_feature (1)..(25): SEQ ID NO: 2820; WAN024ETT; Start 1052; Stop 1076
ttatctggaagcaatggaagaagaa

SEQ ID NO: 337857 - DNA, 25 bp, Artificial
  probe
  misc_feature (1)..(25): SEQ ID NO: 2820; WAN024ETT; Start 1051; Stop 1075
attatctggaagcaatggaagaaga

SEQ ID NO: 337858 - DNA, 25 bp, Artificial
  probe
  misc_feature (1)..(25): SEQ ID NO: 2820; WAN024ETT; Start 1049; Stop 1073
tgattatctggaagcaatggaagaa

SEQ ID NO: 337859 - DNA, 25 bp, Artificial
  probe
  misc_feature (1)..(25): SEQ ID NO: 2820; WAN024ETT; Start 1050; Stop 1074
gattatctggaagcaatggaagaag

SEQ ID NO: 337860 - DNA, 25 bp, Artificial
  probe
  misc_feature (1)..(25): SEQ ID NO: 2820; WAN024ETT; Start 610; Stop 634
atgcttaatgaattggacaaggaat

SEQ ID NO: 337861 - DNA, 25 bp, Artificial
  probe
  misc_feature (1)..(25): SEQ ID NO: 2820; WAN024ETT; Start 505; Stop 529
attcgtaagtatcttcattcaggtg

SEQ ID NO: 337862 - DNA, 25 bp, Artificial
  probe
  misc_feature (1)..(25): SEQ ID NO: 2820; WAN024ETT; Start 504; Stop 528
gattcgtaagtatcttcattcaggt

SEQ ID NO: 337863 - DNA, 25 bp, Artificial
  probe
  misc_feature (1)..(25): SEQ ID NO: 2820; WAN024ETT; Start 508; Stop 532
cgtaagtatcttcattcaggtgtta

SEQ ID NO: 337864 - DNA, 25 bp, Artificial
  probe
  misc_feature (1)..(25): SEQ ID NO: 2820; WAN024ETT; Start 611; Stop 635
tgcttaatgaattggacaaggaatt

SEQ ID NO: 337865 - DNA, 25 bp, Artificial
  probe
  misc_feature (1)..(25): SEQ ID NO: 2820; WAN024ETT; Start 609; Stop 633
catgcttaatgaattggacaaggaa

SEQ ID NO: 337866 - DNA, 25 bp, Artificial
  probe
  misc_feature (1)..(25): SEQ ID NO: 2820; WAN024ETT; Start 663; Stop 687
ctacgcagatgattgtgtgattacg

SEQ ID NO: 337867 - DNA, 25 bp, Artificial
  probe
  misc_feature (1)..(25): SEQ ID NO: 2820; WAN024ETT; Start 503; Stop 527
tgattcgtaagtatcttcattcagg

SEQ ID NO: 337868 - DNA, 25 bp, Artificial
  probe
  misc_feature (1)..(25): SEQ ID NO: 2820; WAN024ETT; Start 662; Stop 686
gctacgcagatgattgtgtgattac

SEQ ID NO: 337869 - DNA, 25 bp, Artificial
  probe
  misc_feature (1)..(25): SEQ ID NO: 2820; WAN024ETT; Start 511; Stop 535
aagtatcttcattcaggtgttatca

SEQ ID NO: 337870 - DNA, 25 bp, Artificial
  probe
  misc_feature (1)..(25): SEQ ID NO: 2820; WAN024ETT; Start 512; Stop 536
agtatcttcattcaggtgttatcat

SEQ ID NO: 337871 - DNA, 25 bp, Artificial
  probe
  misc_feature (1)..(25): SEQ ID NO: 2820; WAN024ETT; Start 468; Stop 492
acataacattatcgaagacggagat

SEQ ID NO: 337872 - DNA, 25 bp, Artificial
  probe
  misc_feature (1)..(25): SEQ ID NO: 2820; WAN024ETT; Start 467; Stop 491
tacataacattatcgaagacggaga

SEQ ID NO: 337873 - DNA, 25 bp, Artificial
  probe
  misc_feature (1)..(25): SEQ ID NO: 2820; WAN024ETT; Start 466; Stop 490
gtacataacattatcgaagacggag

SEQ ID NO: 337874 - DNA, 25 bp, Artificial
  probe
  misc_feature (1)..(25): SEQ ID NO: 2820; WAN024ETT; Start 1224; Stop 1248
actggtttcgtgtttggattattac

SEQ ID NO: 337875 - DNA, 25 bp, Artificial
  probe
  misc_feature (1)..(25): SEQ ID NO: 2820; WAN024ETT; Start 612; Stop 636
gcttaatgaattggacaaggaatta

SEQ ID NO: 337876 - DNA, 25 bp, Artificial
  probe
  misc_feature (1)..(25): SEQ ID NO: 2820; WAN024ETT; Start 1223; Stop 1247
gactggtttcgtgtttggattatta

SEQ ID NO: 337877 - DNA, 25 bp, Artificial
  probe
  misc_feature (1)..(25): SEQ ID NO: 2820; WAN024ETT; Start 381; Stop 405
cttaaatgacggctatgagtggata

SEQ ID NO: 337878 - DNA, 25 bp, Artificial
  probe
  misc_feature (1)..(25): SEQ ID NO: 2820; WAN024ETT; Start 1228; Stop 1252
gtttcgtgtttggattattaccttg

SEQ ID NO: 337879 - DNA, 25 bp, Artificial
  probe
  misc_feature (1)..(25): SEQ ID NO: 2820; WAN024ETT; Start 1229; Stop 1253
tttcgtgtttggattattaccttga

SEQ ID NO: 337880 - DNA, 25 bp, Artificial
  probe
  misc_feature (1)..(25): SEQ ID NO: 2820; WAN024ETT; Start 1053; Stop 1077
tatctggaagcaatggaagaagaaa

SEQ ID NO: 337881 - DNA, 25 bp, Artificial
  probe
  misc_feature (1)..(25): SEQ ID NO: 2820; WAN024ETT; Start 471; Stop 495
taacattatcgaagacggagatacg

SEQ ID NO: 337882 - DNA, 25 bp, Artificial
  probe
  misc_feature (1)..(25): SEQ ID NO: 2820; WAN024ETT; Start 1054; Stop 1078
atctggaagcaatggaagaagaaat

SEQ ID NO: 337883 - DNA, 25 bp, Artificial
  probe
  misc_feature (1)..(25): SEQ ID NO: 2820; WAN024ETT; Start 513; Stop 537
gtatcttcattcaggtgttatcatt

SEQ ID NO: 337884 - DNA, 25 bp, Artificial
  probe
  misc_feature (1)..(25): SEQ ID NO: 2820; WAN024ETT; Start 1230; Stop 1254
ttcgtgtttggattattaccttgaa

SEQ ID NO: 337885 - DNA, 25 bp, Artificial
  probe
  misc_feature (1)..(25): SEQ ID NO: 2820; WAN024ETT; Start 664; Stop 688
tacgcagatgattgtgtgattacgg

SEQ ID NO: 337886 - DNA, 25 bp, Artificial
  probe
  misc_feature (1)..(25): SEQ ID NO: 2820; WAN024ETT; Start 1222; Stop 1246
ggactggtttcgtgtttggattatt

SEQ ID NO: 337887 - DNA, 25 bp, Artificial
  probe
  misc_feature (1)..(25): SEQ ID NO: 2821; WAN024FDA; Start 341; Stop 365
tgactgacttggaaattgttgaaat

SEQ ID NO: 337888 - DNA, 25 bp, Artificial
  probe
  misc_feature (1)..(25): SEQ ID NO: 2821; WAN024FDA; Start 340; Stop 364
atgactgacttggaaattgttgaaa

SEQ ID NO: 337889 - DNA, 25 bp, Artificial
  probe
  misc_feature (1)..(25): SEQ ID NO: 2821; WAN024FDA; Start 339; Stop 363
aatgactgacttggaaattgttgaa

SEQ ID NO: 337890 - DNA, 25 bp, Artificial
  probe
  misc_feature (1)..(25): SEQ ID NO: 2821; WAN024FDA; Start 338; Stop 362
aaatgactgacttggaaattgttga

SEQ ID NO: 337891 - DNA, 25 bp, Artificial
  probe
  misc_feature (1)..(25): SEQ ID NO: 2821; WAN024FDA; Start 154; Stop 178
gatggtggtttcttctcaaatctta

SEQ ID NO: 337892 - DNA, 25 bp, Artificial
  probe
  misc_feature (1)..(25): SEQ ID NO: 2821; WAN024FDA; Start 342; Stop 366
gactgacttggaaattgttgaaatc

SEQ ID NO: 337893 - DNA, 25 bp, Artificial
  probe
  misc_feature (1)..(25): SEQ ID NO: 2821; WAN024FDA; Start 156; Stop 180
tggtggtttcttctcaaatcttaaa

SEQ ID NO: 337894 - DNA, 25 bp, Artificial
  probe
  misc_feature (1)..(25): SEQ ID NO: 2821; WAN024FDA; Start 155; Stop 179
atggtggtttcttctcaaatcttaa

SEQ ID NO: 337895 - DNA, 25 bp, Artificial
  probe
  misc_feature (1)..(25): SEQ ID NO: 2821; WAN024FDA; Start 153; Stop 177
cgatggtggtttcttctcaaatctt

SEQ ID NO: 337896 - DNA, 25 bp, Artificial
  probe
  misc_feature (1)..(25): SEQ ID NO: 2821; WAN024FDA; Start 343; Stop 367
actgacttggaaattgttgaaatca

SEQ ID NO: 337897 - DNA, 25 bp, Artificial
  probe
  misc_feature (1)..(25): SEQ ID NO: 2821; WAN024FDA; Start 492; Stop 516
taaatctggtcttggatctggtttc

SEQ ID NO: 337898 - DNA, 25 bp, Artificial
  probe
  misc_feature (1)..(25): SEQ ID NO: 2821; WAN024FDA; Start 491; Stop 515
ctaaatctggtcttggatctggttt

SEQ ID NO: 337899 - DNA, 25 bp, Artificial
  probe
  misc_feature (1)..(25): SEQ ID NO: 2821; WAN024FDA; Start 410; Stop 434
cagactcagtaagccttcaagatcg

SEQ ID NO: 337900 - DNA, 25 bp, Artificial
  probe
  misc_feature (1)..(25): SEQ ID NO: 2821; WAN024FDA; Start 311; Stop 335
gagaaatcgtatcttcagaagttgc

SEQ ID NO: 337901 - DNA, 25 bp, Artificial
  probe
  misc_feature (1)..(25): SEQ ID NO: 2821; WAN024FDA; Start 312; Stop 336
agaaatcgtatcttcagaagttgct

SEQ ID NO: 337902 - DNA, 25 bp, Artificial
  probe
  misc_feature (1)..(25): SEQ ID NO: 2821; WAN024FDA; Start 157; Stop 181
ggtggtttcttctcaaatcttaaag

SEQ ID NO: 337903 - DNA, 25 bp, Artificial
  probe
  misc_feature (1)..(25): SEQ ID NO: 2821; WAN024FDA; Start 408; Stop 432
agcagactcagtaagccttcaagat

SEQ ID NO: 337904 - DNA, 25 bp, Artificial
  probe
  misc_feature (1)..(25): SEQ ID NO: 2821; WAN024FDA; Start 506; Stop 530
gatctggtttctcaactgttcaaga

SEQ ID NO: 337905 - DNA, 25 bp, Artificial
  probe
  misc_feature (1)..(25): SEQ ID NO: 2821; WAN024FDA; Start 409; Stop 433
gcagactcagtaagccttcaagatc

SEQ ID NO: 337906 - DNA, 25 bp, Artificial
  probe
  misc_feature (1)..(25): SEQ ID NO: 2821; WAN024FDA; Start 308; Stop 332
tcagagaaatcgtatcttcagaagt

SEQ ID NO: 337907 - DNA, 25 bp, Artificial
  probe
  misc_feature (1)..(25): SEQ ID NO: 2821; WAN024FDA; Start 313; Stop 337
gaaatcgtatcttcagaagttgcta

SEQ ID NO: 337908 - DNA, 25 bp, Artificial
  probe
  misc_feature (1)..(25): SEQ ID NO: 2821; WAN024FDA; Start 453; Stop 477
atcaacaggagaattcacttcagaa

SEQ ID NO: 337909 - DNA, 25 bp, Artificial
  probe
  misc_feature (1)..(25): SEQ ID NO: 2821; WAN024FDA; Start 452; Stop 476
aatcaacaggagaattcacttcaga

SEQ ID NO: 337910 - DNA, 25 bp, Artificial
  probe
  misc_feature (1)..(25): SEQ ID NO: 2821; WAN024FDA; Start 389; Stop 413
aaactaaagaacagcatgaagcaga

SEQ ID NO: 337911 - DNA, 25 bp, Artificial
  probe
  misc_feature (1)..(25): SEQ ID NO: 2821; WAN024FDA; Start 457; Stop 481
acaggagaattcacttcagaacaat

SEQ ID NO: 337912 - DNA, 25 bp, Artificial
  probe
  misc_feature (1)..(25): SEQ ID NO: 2821; WAN024FDA; Start 456; Stop 480
aacaggagaattcacttcagaacaa

SEQ ID NO: 337913 - DNA, 25 bp, Artificial
  probe
  misc_feature (1)..(25): SEQ ID NO: 2821; WAN024FDA; Start 454; Stop 478
tcaacaggagaattcacttcagaac

SEQ ID NO: 337914 - DNA, 25 bp, Artificial
  probe
  misc_feature (1)..(25): SEQ ID NO: 2821; WAN024FDA; Start 315; Stop 339
aatcgtatcttcagaagttgctaaa

SEQ ID NO: 337915 - DNA, 25 bp, Artificial
  probe
  misc_feature (1)..(25): SEQ ID NO: 2821; WAN024FDA; Start 314; Stop 338
aaatcgtatcttcagaagttgctaa

SEQ ID NO: 337916 - DNA, 25 bp, Artificial
  probe
  misc_feature (1)..(25): SEQ ID NO: 2821; WAN024FDA; Start 310; Stop 334
agagaaatcgtatcttcagaagttg

SEQ ID NO: 337917 - DNA, 25 bp, Artificial
  probe
  misc_feature (1)..(25): SEQ ID NO: 2821; WAN024FDA; Start 309; Stop 333
cagagaaatcgtatcttcagaagtt

SEQ ID NO: 337918 - DNA, 25 bp, Artificial
  probe
  misc_feature (1)..(25): SEQ ID NO: 2821; WAN024FDA; Start 212; Stop 236
gtggtgttaacgtagaagttggtaa

SEQ ID NO: 337919 - DNA, 25 bp, Artificial
  probe
  misc_feature (1)..(25): SEQ ID NO: 2821; WAN024FDA; Start 493; Stop 517
aaatctggtcttggatctggtttct

SEQ ID NO: 337920 - DNA, 25 bp, Artificial
  probe
  misc_feature (1)..(25): SEQ ID NO: 2822; WAN024DHM; Start 271; Stop 295
tatgatgaaggaatcaagtctgctt

SEQ ID NO: 337921 - DNA, 25 bp, Artificial
  probe
  misc_feature (1)..(25): SEQ ID NO: 2822; WAN024DHM; Start 270; Stop 294
ctatgatgaaggaatcaagtctgct

SEQ ID NO: 337922 - DNA, 25 bp, Artificial
  probe
  misc_feature (1)..(25): SEQ ID NO: 2822; WAN024DHM; Start 269; Stop 293
tctatgatgaaggaatcaagtctgc

SEQ ID NO: 337923 - DNA, 25 bp, Artificial
  probe
  misc_feature (1)..(25): SEQ ID NO: 2822; WAN024DHM; Start 376; Stop 400
aatggcatcaagttcaagtaactaa

SEQ ID NO: 337924 - DNA, 25 bp, Artificial
  probe
  misc_feature (1)..(25): SEQ ID NO: 2822; WAN024DHM; Start 268; Stop 292
ttctatgatgaaggaatcaagtctg

SEQ ID NO: 337925 - DNA, 25 bp, Artificial
  probe
  misc_feature (1)..(25): SEQ ID NO: 2822; WAN024DHM; Start 377; Stop 401
atggcatcaagttcaagtaactaat

SEQ ID NO: 337926 - DNA, 25 bp, Artificial
  probe
  misc_feature (1)..(25): SEQ ID NO: 2822; WAN024DHM; Start 272; Stop 296
atgatgaaggaatcaagtctgcttc

SEQ ID NO: 337927 - DNA, 25 bp, Artificial
  probe
  misc_feature (1)..(25): SEQ ID NO: 2822; WAN024DHM; Start 158; Stop 182
aagttgaacaagcagtagaagctac

SEQ ID NO: 337928 - DNA, 25 bp, Artificial
  probe
  misc_feature (1)..(25): SEQ ID NO: 2822; WAN024DHM; Start 73; Stop 97
gtgactaaggttgtagatgagacaa

SEQ ID NO: 337929 - DNA, 25 bp, Artificial
  probe
  misc_feature (1)..(25): SEQ ID NO: 2822; WAN024DHM; Start 161; Stop 185
ttgaacaagcagtagaagctaccaa

SEQ ID NO: 337930 - DNA, 25 bp, Artificial
  probe
  misc_feature (1)..(25): SEQ ID NO: 2822; WAN024DHM; Start 277; Stop 301
gaaggaatcaagtctgcttcagatt

SEQ ID NO: 337931 - DNA, 25 bp, Artificial
  probe
  misc_feature (1)..(25): SEQ ID NO: 2822; WAN024DHM; Start 370; Stop 394
aaagaaaatggcatcaagttcaagt

SEQ ID NO: 337932 - DNA, 25 bp, Artificial
  probe
  misc_feature (1)..(25): SEQ ID NO: 2822; WAN024DHM; Start 369; Stop 393
gaaagaaaatggcatcaagttcaag

SEQ ID NO: 337933 - DNA, 25 bp, Artificial
  probe
  misc_feature (1)..(25): SEQ ID NO: 2822; WAN024DHM; Start 372; Stop 396
agaaaatggcatcaagttcaagtaa

SEQ ID NO: 337934 - DNA, 25 bp, Artificial
  probe
  misc_feature (1)..(25): SEQ ID NO: 2822; WAN024DHM; Start 371; Stop 395
aagaaaatggcatcaagttcaagta

SEQ ID NO: 337935 - DNA, 25 bp, Artificial
  probe
  misc_feature (1)..(25): SEQ ID NO: 2822; WAN024DHM; Start 373; Stop 397
gaaaatggcatcaagttcaagtaac

SEQ ID NO: 337936 - DNA, 25 bp, Artificial
  probe
  misc_feature (1)..(25): SEQ ID NO: 2822; WAN024DHM; Start 159; Stop 183
agttgaacaagcagtagaagctacc

SEQ ID NO: 337937 - DNA, 25 bp, Artificial
  probe
  misc_feature (1)..(25): SEQ ID NO: 2822; WAN024DHM; Start 375; Stop 399
aaatggcatcaagttcaagtaacta

SEQ ID NO: 337938 - DNA, 25 bp, Artificial
  probe
  misc_feature (1)..(25): SEQ ID NO: 2822; WAN024DHM; Start 157; Stop 181
aaagttgaacaagcagtagaagcta

SEQ ID NO: 337939 - DNA, 25 bp, Artificial
  probe
  misc_feature (1)..(25): SEQ ID NO: 2822; WAN024DHM; Start 160; Stop 184
gttgaacaagcagtagaagctacca

SEQ ID NO: 337940 - DNA, 25 bp, Artificial
  probe
  misc_feature (1)..(25): SEQ ID NO: 2822; WAN024DHM; Start 352; Stop 376
gctaccatcaagaaattgaaagaaa

SEQ ID NO: 337941 - DNA, 25 bp, Artificial
  probe
  misc_feature (1)..(25): SEQ ID NO: 2822; WAN024DHM; Start 74; Stop 98
tgactaaggttgtagatgagacaaa

SEQ ID NO: 337942 - DNA, 25 bp, Artificial
  probe
  misc_feature (1)..(25): SEQ ID NO: 2822; WAN024DHM; Start 361; Stop 385
aagaaattgaaagaaaatggcatca

SEQ ID NO: 337943 - DNA, 25 bp, Artificial
  probe
  misc_feature (1)..(25): SEQ ID NO: 2822; WAN024DHM; Start 350; Stop 374
cagctaccatcaagaaattgaaaga

SEQ ID NO: 337944 - DNA, 25 bp, Artificial
  probe
  misc_feature (1)..(25): SEQ ID NO: 2822; WAN024DHM; Start 349; Stop 373
ccagctaccatcaagaaattgaaag

SEQ ID NO: 337945 - DNA, 25 bp, Artificial
  probe
  misc_feature (1)..(25): SEQ ID NO: 2822; WAN024DHM; Start 360; Stop 384
caagaaattgaaagaaaatggcatc

SEQ ID NO: 337946 - DNA, 25 bp, Artificial
  probe
  misc_feature (1)..(25): SEQ ID NO: 2822; WAN024DHM; Start 1; Stop 25
atgtcaaagaaactcaatcgtaaaa

SEQ ID NO: 337947 - DNA, 25 bp, Artificial
  probe
  misc_feature (1)..(25): SEQ ID NO: 2822; WAN024DHM; Start 267; Stop 291
tttctatgatgaaggaatcaagtct

SEQ ID NO: 337948 - DNA, 25 bp, Artificial
  probe
  misc_feature (1)..(25): SEQ ID NO: 2822; WAN024DHM; Start 265; Stop 289
actttctatgatgaaggaatcaagt

SEQ ID NO: 337949 - DNA, 25 bp, Artificial
  probe
  misc_feature (1)..(25): SEQ ID NO: 2822; WAN024DHM; Start 351; Stop 375
agctaccatcaagaaattgaaagaa

SEQ ID NO: 337950 - DNA, 25 bp, Artificial
  probe
  misc_feature (1)..(25): SEQ ID NO: 2822; WAN024DHM; Start 163; Stop 187
gaacaagcagtagaagctaccaaag

SEQ ID NO: 337951 - DNA, 25 bp, Artificial
  probe
  misc_feature (1)..(25): SEQ ID NO: 2822; WAN024DHM; Start 266; Stop 290
ctttctatgatgaaggaatcaagtc

SEQ ID NO: 337952 - DNA, 25 bp, Artificial
  probe
  misc_feature (1)..(25): SEQ ID NO: 2822; WAN024DHM; Start 348; Stop 372
cccagctaccatcaagaaattgaaa

SEQ ID NO: 337953 - DNA, 25 bp, Artificial
  probe
  misc_feature (1)..(25): SEQ ID NO: 2823; WAN024FKS; Start 619; Stop 643
gaagatgctgaattgcgtaagatta

SEQ ID NO: 337954 - DNA, 25 bp, Artificial
  probe
  misc_feature (1)..(25): SEQ ID NO: 2823; WAN024FKS; Start 620; Stop 644
aagatgctgaattgcgtaagattac

SEQ ID NO: 337955 - DNA, 25 bp, Artificial
  probe
  misc_feature (1)..(25): SEQ ID NO: 2823; WAN024FKS; Start 608; Stop 632
ttgtctatggtgaagatgctgaatt

SEQ ID NO: 337956 - DNA, 25 bp, Artificial
  probe
  misc_feature (1)..(25): SEQ ID NO: 2823; WAN024FKS; Start 618; Stop 642
tgaagatgctgaattgcgtaagatt

SEQ ID NO: 337957 - DNA, 25 bp, Artificial
  probe
  misc_feature (1)..(25): SEQ ID NO: 2823; WAN024FKS; Start 609; Stop 633
tgtctatggtgaagatgctgaattg

SEQ ID NO: 337958 - DNA, 25 bp, Artificial
  probe
  misc_feature (1)..(25): SEQ ID NO: 2823; WAN024FKS; Start 371; Stop 395
tcttgtctcacattacagataccag

SEQ ID NO: 337959 - DNA, 25 bp, Artificial
  probe
  misc_feature (1)..(25): SEQ ID NO: 2823; WAN024FKS; Start 370; Stop 394
gtcttgtctcacattacagatacca

SEQ ID NO: 337960 - DNA, 25 bp, Artificial
  probe
  misc_feature (1)..(25): SEQ ID NO: 2823; WAN024FKS; Start 369; Stop 393
tgtcttgtctcacattacagatacc

SEQ ID NO: 337961 - DNA, 25 bp, Artificial
  probe
  misc_feature (1)..(25): SEQ ID NO: 2823; WAN024FKS; Start 357; Stop 381
tatgttgtctcatgtcttgtctcac

SEQ ID NO: 337962 - DNA, 25 bp, Artificial
  probe
  misc_feature (1)..(25): SEQ ID NO: 2823; WAN024FKS; Start 356; Stop 380
gtatgttgtctcatgtcttgtctca

SEQ ID NO: 337963 - DNA, 25 bp, Artificial
  probe
  misc_feature (1)..(25): SEQ ID NO: 2823; WAN024FKS; Start 617; Stop 641
gtgaagatgctgaattgcgtaagat

SEQ ID NO: 337964 - DNA, 25 bp, Artificial
  probe
  misc_feature (1)..(25): SEQ ID NO: 2823; WAN024FKS; Start 355; Stop 379
ggtatgttgtctcatgtcttgtctc

SEQ ID NO: 337965 - DNA, 25 bp, Artificial
  probe
  misc_feature (1)..(25): SEQ ID NO: 2823; WAN024FKS; Start 493; Stop 517
ccagaatactctattatcaccaaca

SEQ ID NO: 337966 - DNA, 25 bp, Artificial
  probe
  misc_feature (1)..(25): SEQ ID NO: 2823; WAN024FKS; Start 354; Stop 378
aggtatgttgtctcatgtcttgtct

SEQ ID NO: 337967 - DNA, 25 bp, Artificial
  probe
  misc_feature (1)..(25): SEQ ID NO: 2823; WAN024FKS; Start 353; Stop 377
caggtatgttgtctcatgtcttgtc

SEQ ID NO: 337968 - DNA, 25 bp, Artificial
  probe
  misc_feature (1)..(25): SEQ ID NO: 2823; WAN024FKS; Start 610; Stop 634
gtctatggtgaagatgctgaattgc

SEQ ID NO: 337969 - DNA, 25 bp, Artificial
  probe
  misc_feature (1)..(25): SEQ ID NO: 2823; WAN024FKS; Start 500; Stop 524
actctattatcaccaacattgactt

SEQ ID NO: 337970 - DNA, 25 bp, Artificial
  probe
  misc_feature (1)..(25): SEQ ID NO: 2823; WAN024FKS; Start 613; Stop 637
tatggtgaagatgctgaattgcgta

SEQ ID NO: 337971 - DNA, 25 bp, Artificial
  probe
  misc_feature (1)..(25): SEQ ID NO: 2823; WAN024FKS; Start 832; Stop 856
ctttacacagcaggatttgatttga

SEQ ID NO: 337972 - DNA, 25 bp, Artificial
  probe
  misc_feature (1)..(25): SEQ ID NO: 2823; WAN024FKS; Start 831; Stop 855
tctttacacagcaggatttgatttg

SEQ ID NO: 337973 - DNA, 25 bp, Artificial
  probe
  misc_feature (1)..(25): SEQ ID NO: 2823; WAN024FKS; Start 829; Stop 853
cttctttacacagcaggatttgatt

SEQ ID NO: 337974 - DNA, 25 bp, Artificial
  probe
  misc_feature (1)..(25): SEQ ID NO: 2823; WAN024FKS; Start 820; Stop 844
gttattggtcttctttacacagcag

SEQ ID NO: 337975 - DNA, 25 bp, Artificial
  probe
  misc_feature (1)..(25): SEQ ID NO: 2823; WAN024FKS; Start 834; Stop 858
ttacacagcaggatttgatttgaac

SEQ ID NO: 337976 - DNA, 25 bp, Artificial
  probe
  misc_feature (1)..(25): SEQ ID NO: 2823; WAN024FKS; Start 515; Stop 539
acattgactttgaccatccagatta

SEQ ID NO: 337977 - DNA, 25 bp, Artificial
  probe
  misc_feature (1)..(25): SEQ ID NO: 2823; WAN024FKS; Start 833; Stop 857
tttacacagcaggatttgatttgaa

SEQ ID NO: 337978 - DNA, 25 bp, Artificial
  probe
  misc_feature (1)..(25): SEQ ID NO: 2823; WAN024FKS; Start 828; Stop 852
tcttctttacacagcaggatttgat

SEQ ID NO: 337979 - DNA, 25 bp, Artificial
  probe
  misc_feature (1)..(25): SEQ ID NO: 2823; WAN024FKS; Start 830; Stop 854
ttctttacacagcaggatttgattt

SEQ ID NO: 337980 - DNA, 25 bp, Artificial
  probe
  misc_feature (1)..(25): SEQ ID NO: 2823; WAN024FKS; Start 569; Stop 593
cctttaacgactatgccaaacaaat

SEQ ID NO: 337981 - DNA, 25 bp, Artificial
  probe
  misc_feature (1)..(25): SEQ ID NO: 2823; WAN024FKS; Start 185; Stop 209
atatggaaattatcgctggaaatgc

SEQ ID NO: 337982 - DNA, 25 bp, Artificial
  probe
  misc_feature (1)..(25): SEQ ID NO: 2823; WAN024FKS; Start 835; Stop 859
tacacagcaggatttgatttgaact

SEQ ID NO: 337983 - DNA, 25 bp, Artificial
  probe
  misc_feature (1)..(25): SEQ ID NO: 2823; WAN024FKS; Start 519; Stop 543
tgactttgaccatccagattatttc

SEQ ID NO: 337984 - DNA, 25 bp, Artificial
  probe
  misc_feature (1)..(25): SEQ ID NO: 2823; WAN024FKS; Start 516; Stop 540
cattgactttgaccatccagattat

SEQ ID NO: 337985 - DNA, 25 bp, Artificial
  probe
  misc_feature (1)..(25): SEQ ID NO: 2823; WAN024FKS; Start 514; Stop 538
aacattgactttgaccatccagatt

SEQ ID NO: 337986 - DNA, 25 bp, Artificial
  probe
  misc_feature (1)..(25): SEQ ID NO: 2824; WAN024AWQ; Start 109; Stop 133
cttcgtcaggcaattcaatatcagg

SEQ ID NO: 337987 - DNA, 25 bp, Artificial
  probe
  misc_feature (1)..(25): SEQ ID NO: 2824; WAN024AWQ; Start 106; Stop 130
ttccttcgtcaggcaattcaatatc

SEQ ID NO: 337988 - DNA, 25 bp, Artificial
  probe
  misc_feature (1)..(25): SEQ ID NO: 2824; WAN024AWQ; Start 76; Stop 100
ggaatggatatgacaacagctatta

SEQ ID NO: 337989 - DNA, 25 bp, Artificial
  probe
  misc_feature (1)..(25): SEQ ID NO: 2824; WAN024AWQ; Start 69; Stop 93
taatctgggaatggatatgacaaca

SEQ ID NO: 337990 - DNA, 25 bp, Artificial
  probe
  misc_feature (1)..(25): SEQ ID NO: 2824; WAN024AWQ; Start 115; Stop 139
caggcaattcaatatcagggattac

SEQ ID NO: 337991 - DNA, 25 bp, Artificial
  probe
  misc_feature (1)..(25): SEQ ID NO: 2824; WAN024AWQ; Start 114; Stop 138
tcaggcaattcaatatcagggatta

SEQ ID NO: 337992 - DNA, 25 bp, Artificial
  probe
  misc_feature (1)..(25): SEQ ID NO: 2824; WAN024AWQ; Start 108; Stop 132
ccttcgtcaggcaattcaatatcag

SEQ ID NO: 337993 - DNA, 25 bp, Artificial
  probe
  misc_feature (1)..(25): SEQ ID NO: 2824; WAN024AWQ; Start 116; Stop 140
aggcaattcaatatcagggattacc

SEQ ID NO: 337994 - DNA, 25 bp, Artificial
  probe
  misc_feature (1)..(25): SEQ ID NO: 2824; WAN024AWQ; Start 245; Stop 269
tggaggacttacgtgcttaactaat

SEQ ID NO: 337995 - DNA, 25 bp, Artificial
  probe
  misc_feature (1)..(25): SEQ ID NO: 2824; WAN024AWQ; Start 244; Stop 268
atggaggacttacgtgcttaactaa

SEQ ID NO: 337996 - DNA, 25 bp, Artificial
  probe
  misc_feature (1)..(25): SEQ ID NO: 2824; WAN024AWQ; Start 113; Stop 137
gtcaggcaattcaatatcagggatt

SEQ ID NO: 337997 - DNA, 25 bp, Artificial
  probe
  misc_feature (1)..(25): SEQ ID NO: 2824; WAN024AWQ; Start 107; Stop 131
tccttcgtcaggcaattcaatatca

SEQ ID NO: 337998 - DNA, 25 bp, Artificial
  probe
  misc_feature (1)..(25): SEQ ID NO: 2824; WAN024AWQ; Start 243; Stop 267
gatggaggacttacgtgcttaacta

SEQ ID NO: 337999 - DNA, 25 bp, Artificial
  probe
  misc_feature (1)..(25): SEQ ID NO: 2824; WAN024AWQ; Start 70; Stop 94
aatctgggaatggatatgacaacag

SEQ ID NO: 338000 - DNA, 25 bp, Artificial
  probe
  misc_feature (1)..(25): SEQ ID NO: 2824; WAN024AWQ; Start 232; Stop 256
gtctcagatttgatggaggacttac

SEQ ID NO: 338001 - DNA, 25 bp, Artificial
  probe
  misc_feature (1)..(25): SEQ ID NO: 2824; WAN024AWQ; Start 117; Stop 141
ggcaattcaatatcagggattacct

SEQ ID NO: 338002 - DNA, 25 bp, Artificial
  probe
  misc_feature (1)..(25): SEQ ID NO: 2824; WAN024AWQ; Start 118; Stop 142
gcaattcaatatcagggattacctt

SEQ ID NO: 338003 - DNA, 25 bp, Artificial
  probe
  misc_feature (1)..(25): SEQ ID NO: 2824; WAN024AWQ; Start 105; Stop 129
tttccttcgtcaggcaattcaatat

SEQ ID NO: 338004 - DNA, 25 bp, Artificial
  probe
  misc_feature (1)..(25): SEQ ID NO: 2824; WAN024AWQ; Start 233; Stop 257
tctcagatttgatggaggacttacg

SEQ ID NO: 338005 - DNA, 25 bp, Artificial
  probe
  misc_feature (1)..(25): SEQ ID NO: 2824; WAN024AWQ; Start 75; Stop 99
gggaatggatatgacaacagctatt

SEQ ID NO: 338006 - DNA, 25 bp, Artificial
  probe
  misc_feature (1)..(25): SEQ ID NO: 2824; WAN024AWQ; Start 77; Stop 101
gaatggatatgacaacagctattaa

SEQ ID NO: 338007 - DNA, 25 bp, Artificial
  probe
  misc_feature (1)..(25): SEQ ID NO: 2824; WAN024AWQ; Start 241; Stop 265
ttgatggaggacttacgtgcttaac

SEQ ID NO: 338008 - DNA, 25 bp, Artificial
  probe
  misc_feature (1)..(25): SEQ ID NO: 2824; WAN024AWQ; Start 74; Stop 98
tgggaatggatatgacaacagctat

SEQ ID NO: 338009 - DNA, 25 bp, Artificial
  probe
  misc_feature (1)..(25): SEQ ID NO: 2824; WAN024AWQ; Start 112; Stop 136
cgtcaggcaattcaatatcagggat

SEQ ID NO: 338010 - DNA, 25 bp, Artificial
  probe
  misc_feature (1)..(25): SEQ ID NO: 2824; WAN024AWQ; Start 110; Stop 134
ttcgtcaggcaattcaatatcaggg

SEQ ID NO: 338011 - DNA, 25 bp, Artificial
  probe
  misc_feature (1)..(25): SEQ ID NO: 2824; WAN024AWQ; Start 71; Stop 95
atctgggaatggatatgacaacagc

SEQ ID NO: 338012 - DNA, 25 bp, Artificial
  probe
  misc_feature (1)..(25): SEQ ID NO: 2824; WAN024AWQ; Start 203; Stop 227
atcgtaatatgagccagtcttttga

SEQ ID NO: 338013 - DNA, 25 bp, Artificial
  probe
  misc_feature (1)..(25): SEQ ID NO: 2824; WAN024AWQ; Start 194; Stop 218
tagaccaaaatcgtaatatgagcca

SEQ ID NO: 338014 - DNA, 25 bp, Artificial
  probe
  misc_feature (1)..(25): SEQ ID NO: 2824; WAN024AWQ; Start 204; Stop 228
tcgtaatatgagccagtcttttgaa

SEQ ID NO: 338015 - DNA, 25 bp, Artificial
  probe
  misc_feature (1)..(25): SEQ ID NO: 2824; WAN024AWQ; Start 242; Stop 266
tgatggaggacttacgtgcttaact

SEQ ID NO: 338016 - DNA, 25 bp, Artificial
  probe
  misc_feature (1)..(25): SEQ ID NO: 2824; WAN024AWQ; Start 224; Stop 248
ttgaatcagtctcagatttgatgga

SEQ ID NO: 338017 - DNA, 25 bp, Artificial
  probe
  misc_feature (1)..(25): SEQ ID NO: 2824; WAN024AWQ; Start 205; Stop 229
cgtaatatgagccagtcttttgaat

SEQ ID NO: 338018 - DNA, 25 bp, Artificial
  probe
  misc_feature (1)..(25): SEQ ID NO: 2824; WAN024AWQ; Start 202; Stop 226
aatcgtaatatgagccagtcttttg

SEQ ID NO: 338019 - DNA, 25 bp, Artificial
  probe
  misc_feature (1)..(25): SEQ ID NO: 2825; WAN024COJ; Start 1441; Stop 1465
ggacgacacaatgatgatacagata

SEQ ID NO: 338020 - DNA, 25 bp, Artificial
  probe
  misc_feature (1)..(25): SEQ ID NO: 2825; WAN024COJ; Start 1444; Stop 1468
cgacacaatgatgatacagatacca

SEQ ID NO: 338021 - DNA, 25 bp, Artificial
  probe
  misc_feature (1)..(25): SEQ ID NO: 2825; WAN024COJ; Start 1443; Stop 1467
acgacacaatgatgatacagatacc

SEQ ID NO: 338022 - DNA, 25 bp, Artificial
  probe
  misc_feature (1)..(25): SEQ ID NO: 2825; WAN024COJ; Start 1442; Stop 1466
gacgacacaatgatgatacagatac

SEQ ID NO: 338023 - DNA, 25 bp, Artificial
  probe
  misc_feature (1)..(25): SEQ ID NO: 2825; WAN024COJ; Start 529; Stop 553
attgagttgtggcttgaatatgaga

SEQ ID NO: 338024 - DNA, 25 bp, Artificial
  probe
  misc_feature (1)..(25): SEQ ID NO: 2825; WAN024COJ; Start 530; Stop 554
ttgagttgtggcttgaatatgagaa

SEQ ID NO: 338025 - DNA, 25 bp, Artificial
  probe
  misc_feature (1)..(25): SEQ ID NO: 2825; WAN024COJ; Start 1367; Stop 1391
atccacaagcctatgaacaattagt

SEQ ID NO: 338026 - DNA, 25 bp, Artificial
  probe
  misc_feature (1)..(25): SEQ ID NO: 2825; WAN024COJ; Start 526; Stop 550
cctattgagttgtggcttgaatatg

SEQ ID NO: 338027 - DNA, 25 bp, Artificial
  probe
  misc_feature (1)..(25): SEQ ID NO: 2825; WAN024COJ; Start 1445; Stop 1469
gacacaatgatgatacagataccaa

SEQ ID NO: 338028 - DNA, 25 bp, Artificial
  probe
  misc_feature (1)..(25): SEQ ID NO: 2825; WAN024COJ; Start 535; Stop 559
ttgtggcttgaatatgagaaggaag

SEQ ID NO: 338029 - DNA, 25 bp, Artificial
  probe
  misc_feature (1)..(25): SEQ ID NO: 2825; WAN024COJ; Start 531; Stop 555
tgagttgtggcttgaatatgagaag

SEQ ID NO: 338030 - DNA, 25 bp, Artificial
  probe
  misc_feature (1)..(25): SEQ ID NO: 2825; WAN024COJ; Start 528; Stop 552
tattgagttgtggcttgaatatgag

SEQ ID NO: 338031 - DNA, 25 bp, Artificial
  probe
  misc_feature (1)..(25): SEQ ID NO: 2825; WAN024COJ; Start 527; Stop 551
ctattgagttgtggcttgaatatga

SEQ ID NO: 338032 - DNA, 25 bp, Artificial
  probe
  misc_feature (1)..(25): SEQ ID NO: 2825; WAN024COJ; Start 1366; Stop 1390
gatccacaagcctatgaacaattag

SEQ ID NO: 338033 - DNA, 25 bp, Artificial
  probe
  misc_feature (1)..(25): SEQ ID NO: 2825; WAN024COJ; Start 541; Stop 565
cttgaatatgagaaggaaggcaatt

SEQ ID NO: 338034 - DNA, 25 bp, Artificial
  probe
  misc_feature (1)..(25): SEQ ID NO: 2825; WAN024COJ; Start 534; Stop 558
gttgtggcttgaatatgagaaggaa

SEQ ID NO: 338035 - DNA, 25 bp, Artificial
  probe
  misc_feature (1)..(25): SEQ ID NO: 2825; WAN024COJ; Start 1257; Stop 1281
aagttctcaagatatgacggagttg

SEQ ID NO: 338036 - DNA, 25 bp, Artificial
  probe
  misc_feature (1)..(25): SEQ ID NO: 2825; WAN024COJ; Start 1256; Stop 1280
caagttctcaagatatgacggagtt

SEQ ID NO: 338037 - DNA, 25 bp, Artificial
  probe
  misc_feature (1)..(25): SEQ ID NO: 2825; WAN024COJ; Start 1440; Stop 1464
tggacgacacaatgatgatacagat

SEQ ID NO: 338038 - DNA, 25 bp, Artificial
  probe
  misc_feature (1)..(25): SEQ ID NO: 2825; WAN024COJ; Start 532; Stop 556
gagttgtggcttgaatatgagaagg

SEQ ID NO: 338039 - DNA, 25 bp, Artificial
  probe
  misc_feature (1)..(25): SEQ ID NO: 2825; WAN024COJ; Start 1371; Stop 1395
acaagcctatgaacaattagtgtct

SEQ ID NO: 338040 - DNA, 25 bp, Artificial
  probe
  misc_feature (1)..(25): SEQ ID NO: 2825; WAN024COJ; Start 1446; Stop 1470
acacaatgatgatacagataccaat

SEQ ID NO: 338041 - DNA, 25 bp, Artificial
  probe
  misc_feature (1)..(25): SEQ ID NO: 2825; WAN024COJ; Start 540; Stop 564
gcttgaatatgagaaggaaggcaat

SEQ ID NO: 338042 - DNA, 25 bp, Artificial
  probe
  misc_feature (1)..(25): SEQ ID NO: 2825; WAN024COJ; Start 1254; Stop 1278
gacaagttctcaagatatgacggag

SEQ ID NO: 338043 - DNA, 25 bp, Artificial
  probe
  misc_feature (1)..(25): SEQ ID NO: 2825; WAN024COJ; Start 1372; Stop 1396
caagcctatgaacaattagtgtctt

SEQ ID NO: 338044 - DNA, 25 bp, Artificial
  probe
  misc_feature (1)..(25): SEQ ID NO: 2825; WAN024COJ; Start 533; Stop 557
agttgtggcttgaatatgagaagga

SEQ ID NO: 338045 - DNA, 25 bp, Artificial
  probe
  misc_feature (1)..(25): SEQ ID NO: 2825; WAN024COJ; Start 1260; Stop 1284
ttctcaagatatgacggagttggat

SEQ ID NO: 338046 - DNA, 25 bp, Artificial
  probe
  misc_feature (1)..(25): SEQ ID NO: 2825; WAN024COJ; Start 796; Stop 820
aatatcctacatgattccaagcgtg

SEQ ID NO: 338047 - DNA, 25 bp, Artificial
  probe
  misc_feature (1)..(25): SEQ ID NO: 2825; WAN024COJ; Start 1370; Stop 1394
cacaagcctatgaacaattagtgtc

SEQ ID NO: 338048 - DNA, 25 bp, Artificial
  probe
  misc_feature (1)..(25): SEQ ID NO: 2825; WAN024COJ; Start 1255; Stop 1279
acaagttctcaagatatgacggagt

SEQ ID NO: 338049 - DNA, 25 bp, Artificial
  probe
  misc_feature (1)..(25): SEQ ID NO: 2825; WAN024COJ; Start 1368; Stop 1392
tccacaagcctatgaacaattagtg

SEQ ID NO: 338050 - DNA, 25 bp, Artificial
  probe
  misc_feature (1)..(25): SEQ ID NO: 2825; WAN024COJ; Start 798; Stop 822
tatcctacatgattccaagcgtgat

SEQ ID NO: 338051 - DNA, 25 bp, Artificial
  probe
  misc_feature (1)..(25): SEQ ID NO: 2825; WAN024COJ; Start 797; Stop 821
atatcctacatgattccaagcgtga

SEQ ID NO: 338052 - DNA, 25 bp, Artificial
  probe
  misc_feature (1)..(25): SEQ ID NO: 2826; WAN024FGA; Start 97; Stop 121
caacttgaagcaccatctatcttag

SEQ ID NO: 338053 - DNA, 25 bp, Artificial
  probe
  misc_feature (1)..(25): SEQ ID NO: 2826; WAN024FGA; Start 96; Stop 120
ccaacttgaagcaccatctatctta

SEQ ID NO: 338054 - DNA, 25 bp, Artificial
  probe
  misc_feature (1)..(25): SEQ ID NO: 2826; WAN024FGA; Start 98; Stop 122
aacttgaagcaccatctatcttagc

SEQ ID NO: 338055 - DNA, 25 bp, Artificial
  probe
  misc_feature (1)..(25): SEQ ID NO: 2826; WAN024FGA; Start 100; Stop 124
cttgaagcaccatctatcttagcag

SEQ ID NO: 338056 - DNA, 25 bp, Artificial
  probe
  misc_feature (1)..(25): SEQ ID NO: 2826; WAN024FGA; Start 99; Stop 123
acttgaagcaccatctatcttagca

SEQ ID NO: 338057 - DNA, 25 bp, Artificial
  probe
  misc_feature (1)..(25): SEQ ID NO: 2826; WAN024FGA; Start 36; Stop 60
aacaactagaagtcctacaaccact

SEQ ID NO: 338058 - DNA, 25 bp, Artificial
  probe
  misc_feature (1)..(25): SEQ ID NO: 2826; WAN024FGA; Start 114; Stop 138
tatcttagcagcctcaaattgttct

SEQ ID NO: 338059 - DNA, 25 bp, Artificial
  probe
  misc_feature (1)..(25): SEQ ID NO: 2826; WAN024FGA; Start 113; Stop 137
ctatcttagcagcctcaaattgttc

SEQ ID NO: 338060 - DNA, 25 bp, Artificial
  probe
  misc_feature (1)..(25): SEQ ID NO: 2826; WAN024FGA; Start 112; Stop 136
tctatcttagcagcctcaaattgtt

SEQ ID NO: 338061 - DNA, 25 bp, Artificial
  probe
  misc_feature (1)..(25): SEQ ID NO: 2826; WAN024FGA; Start 111; Stop 135
atctatcttagcagcctcaaattgt

SEQ ID NO: 338062 - DNA, 25 bp, Artificial
  probe
  misc_feature (1)..(25): SEQ ID NO: 2826; WAN024FGA; Start 110; Stop 134
catctatcttagcagcctcaaattg

SEQ ID NO: 338063 - DNA, 25 bp, Artificial
  probe
  misc_feature (1)..(25): SEQ ID NO: 2826; WAN024FGA; Start 203; Stop 227
tgataaacaccaaacataggaatgc

SEQ ID NO: 338064 - DNA, 25 bp, Artificial
  probe
  misc_feature (1)..(25): SEQ ID NO: 2826; WAN024FGA; Start 66; Stop 90
atgtggaaagacgataaacttgaac

SEQ ID NO: 338065 - DNA, 25 bp, Artificial
  probe
  misc_feature (1)..(25): SEQ ID NO: 2826; WAN024FGA; Start 204; Stop 228
gataaacaccaaacataggaatgcc

SEQ ID NO: 338066 - DNA, 25 bp, Artificial
  probe
  misc_feature (1)..(25): SEQ ID NO: 2826; WAN024FGA; Start 71; Stop 95
gaaagacgataaacttgaacacctg

SEQ ID NO: 338067 - DNA, 25 bp, Artificial
  probe
  misc_feature (1)..(25): SEQ ID NO: 2826; WAN024FGA; Start 109; Stop 133
ccatctatcttagcagcctcaaatt

SEQ ID NO: 338068 - DNA, 25 bp, Artificial
  probe
  misc_feature (1)..(25): SEQ ID NO: 2826; WAN024FGA; Start 115; Stop 139
atcttagcagcctcaaattgttctt

SEQ ID NO: 338069 - DNA, 25 bp, Artificial
  probe
  misc_feature (1)..(25): SEQ ID NO: 2826; WAN024FGA; Start 101; Stop 125
ttgaagcaccatctatcttagcagc

SEQ ID NO: 338070 - DNA, 25 bp, Artificial
  probe
  misc_feature (1)..(25): SEQ ID NO: 2826; WAN024FGA; Start 186; Stop 210
tgctccaaaccaaatgttgataaac

SEQ ID NO: 338071 - DNA, 25 bp, Artificial
  probe
  misc_feature (1)..(25): SEQ ID NO: 2826; WAN024FGA; Start 185; Stop 209
gtgctccaaaccaaatgttgataaa

SEQ ID NO: 338072 - DNA, 25 bp, Artificial
  probe
  misc_feature (1)..(25): SEQ ID NO: 2826; WAN024FGA; Start 108; Stop 132
accatctatcttagcagcctcaaat

SEQ ID NO: 338073 - DNA, 25 bp, Artificial
  probe
  misc_feature (1)..(25): SEQ ID NO: 2826; WAN024FGA; Start 70; Stop 94
ggaaagacgataaacttgaacacct

SEQ ID NO: 338074 - DNA, 25 bp, Artificial
  probe
  misc_feature (1)..(25): SEQ ID NO: 2826; WAN024FGA; Start 129; Stop 153
aaattgttcttctggtactgtttgc

SEQ ID NO: 338075 - DNA, 25 bp, Artificial
  probe
  misc_feature (1)..(25): SEQ ID NO: 2826; WAN024FGA; Start 126; Stop 150
ctcaaattgttcttctggtactgtt

SEQ ID NO: 338076 - DNA, 25 bp, Artificial
  probe
  misc_feature (1)..(25): SEQ ID NO: 2826; WAN024FGA; Start 117; Stop 141
cttagcagcctcaaattgttcttct

SEQ ID NO: 338077 - DNA, 25 bp, Artificial
  probe
  misc_feature (1)..(25): SEQ ID NO: 2826; WAN024FGA; Start 116; Stop 140
tcttagcagcctcaaattgttcttc

SEQ ID NO: 338078 - DNA, 25 bp, Artificial
  probe
  misc_feature (1)..(25): SEQ ID NO: 2826; WAN024FGA; Start 205; Stop 229
ataaacaccaaacataggaatgccc

SEQ ID NO: 338079 - DNA, 25 bp, Artificial
  probe
  misc_feature (1)..(25): SEQ ID NO: 2826; WAN024FGA; Start 69; Stop 93
tggaaagacgataaacttgaacacc

SEQ ID NO: 338080 - DNA, 25 bp, Artificial
  probe
  misc_feature (1)..(25): SEQ ID NO: 2826; WAN024FGA; Start 65; Stop 89
tatgtggaaagacgataaacttgaa

SEQ ID NO: 338081 - DNA, 25 bp, Artificial
  probe
  misc_feature (1)..(25): SEQ ID NO: 2826; WAN024FGA; Start 125; Stop 149
cctcaaattgttcttctggtactgt

SEQ ID NO: 338082 - DNA, 25 bp, Artificial
  probe
  misc_feature (1)..(25): SEQ ID NO: 2826; WAN024FGA; Start 127; Stop 151
tcaaattgttcttctggtactgttt

SEQ ID NO: 338083 - DNA, 25 bp, Artificial
  probe
  misc_feature (1)..(25): SEQ ID NO: 2826; WAN024FGA; Start 35; Stop 59
aaacaactagaagtcctacaaccac

SEQ ID NO: 338084 - DNA, 25 bp, Artificial
  probe
  misc_feature (1)..(25): SEQ ID NO: 2826; WAN024FGA; Start 64; Stop 88
atatgtggaaagacgataaacttga

SEQ ID NO: 338085 - DNA, 25 bp, Artificial
  probe
  misc_feature (1)..(25): SEQ ID NO: 2827; WAN024C77-5; Start 1314; Stop 1338
ctataatgacttgattcaggttgcg

SEQ ID NO: 338086 - DNA, 25 bp, Artificial
  probe
  misc_feature (1)..(25): SEQ ID NO: 2827; WAN024C77-5; Start 83; Stop 107
atattgagcgagttgtggttcataa

SEQ ID NO: 338087 - DNA, 25 bp, Artificial
  probe
  misc_feature (1)..(25): SEQ ID NO: 2827; WAN024C77-5; Start 1313; Stop 1337
tctataatgacttgattcaggttgc

SEQ ID NO: 338088 - DNA, 25 bp, Artificial
  probe
  misc_feature (1)..(25): SEQ ID NO: 2827; WAN024C77-5; Start 1315; Stop 1339
tataatgacttgattcaggttgcgg

SEQ ID NO: 338089 - DNA, 25 bp, Artificial
  probe
  misc_feature (1)..(25): SEQ ID NO: 2827; WAN024C77-5; Start 1586; Stop 1610
agattagtcagccagttattgatac

SEQ ID NO: 338090 - DNA, 25 bp, Artificial
  probe
  misc_feature (1)..(25): SEQ ID NO: 2827; WAN024C77-5; Start 2144; Stop 2168
aggaactccagaccattatcaagag

SEQ ID NO: 338091 - DNA, 25 bp, Artificial
  probe
  misc_feature (1)..(25): SEQ ID NO: 2827; WAN024C77-5; Start 2143; Stop 2167
gaggaactccagaccattatcaaga

SEQ ID NO: 338092 - DNA, 25 bp, Artificial
  probe
  misc_feature (1)..(25): SEQ ID NO: 2827; WAN024C77-5; Start 683; Stop 707
agattactcctatgatcgaagtgac

SEQ ID NO: 338093 - DNA, 25 bp, Artificial
  probe
  misc_feature (1)..(25): SEQ ID NO: 2827; WAN024C77-5; Start 1585; Stop 1609
aagattagtcagccagttattgata

SEQ ID NO: 338094 - DNA, 25 bp, Artificial
  probe
  misc_feature (1)..(25): SEQ ID NO: 2827; WAN024C77-5; Start 684; Stop 708
gattactcctatgatcgaagtgacg

SEQ ID NO: 338095 - DNA, 25 bp, Artificial
  probe
  misc_feature (1)..(25): SEQ ID NO: 2827; WAN024C77-5; Start 116; Stop 140
aggtatgggagtttcatttcgtatt

SEQ ID NO: 338096 - DNA, 25 bp, Artificial
  probe
  misc_feature (1)..(25): SEQ ID NO: 2827; WAN024C77-5; Start 115; Stop 139
aaggtatgggagtttcatttcgtat

SEQ ID NO: 338097 - DNA, 25 bp, Artificial
  probe
  misc_feature (1)..(25): SEQ ID NO: 2827; WAN024C77-5; Start 114; Stop 138
taaggtatgggagtttcatttcgta

SEQ ID NO: 338098 - DNA, 25 bp, Artificial
  probe
  misc_feature (1)..(25): SEQ ID NO: 2827; WAN024C77-5; Start 682; Stop 706
gagattactcctatgatcgaagtga

SEQ ID NO: 338099 - DNA, 25 bp, Artificial
  probe
  misc_feature (1)..(25): SEQ ID NO: 2827; WAN024C77-5; Start 117; Stop 141
ggtatgggagtttcatttcgtattt

SEQ ID NO: 338100 - DNA, 25 bp, Artificial
  probe
  misc_feature (1)..(25): SEQ ID NO: 2827; WAN024C77-5; Start 112; Stop 136
agtaaggtatgggagtttcatttcg

SEQ ID NO: 338101 - DNA, 25 bp, Artificial
  probe
  misc_feature (1)..(25): SEQ ID NO: 2827; WAN024C77-5; Start 113; Stop 137
gtaaggtatgggagtttcatttcgt

SEQ ID NO: 338102 - DNA, 25 bp, Artificial
  probe
  misc_feature (1)..(25): SEQ ID NO: 2827; WAN024C77-5; Start 1582; Stop 1606
ccaaagattagtcagccagttattg

SEQ ID NO: 338103 - DNA, 25 bp, Artificial
  probe
  misc_feature (1)..(25): SEQ ID NO: 2827; WAN024C77-5; Start 84; Stop 108
tattgagcgagttgtggttcataaa

SEQ ID NO: 338104 - DNA, 25 bp, Artificial
  probe
  misc_feature (1)..(25): SEQ ID NO: 2827; WAN024C77-5; Start 1583; Stop 1607
caaagattagtcagccagttattga

SEQ ID NO: 338105 - DNA, 25 bp, Artificial
  probe
  misc_feature (1)..(25): SEQ ID NO: 2827; WAN024C77-5; Start 1379; Stop 1403
atgaatttatcaatcctgggcatcc

SEQ ID NO: 338106 - DNA, 25 bp, Artificial
  probe
  misc_feature (1)..(25): SEQ ID NO: 2827; WAN024C77-5; Start 967; Stop 991
gttgttcactatgagcggaaggatt

SEQ ID NO: 338107 - DNA, 25 bp, Artificial
  probe
  misc_feature (1)..(25): SEQ ID NO: 2827; WAN024C77-5; Start 905; Stop 929
ggaatgtggagatgaataacttcac

SEQ ID NO: 338108 - DNA, 25 bp, Artificial
  probe
  misc_feature (1)..(25): SEQ ID NO: 2827; WAN024C77-5; Start 111; Stop 135
tagtaaggtatgggagtttcatttc

SEQ ID NO: 338109 - DNA, 25 bp, Artificial
  probe
  misc_feature (1)..(25): SEQ ID NO: 2827; WAN024C77-5; Start 1312; Stop 1336
atctataatgacttgattcaggttg

SEQ ID NO: 338110 - DNA, 25 bp, Artificial
  probe
  misc_feature (1)..(25): SEQ ID NO: 2827; WAN024C77-5; Start 1584; Stop 1608
aaagattagtcagccagttattgat

SEQ ID NO: 338111 - DNA, 25 bp, Artificial
  probe
  misc_feature (1)..(25): SEQ ID NO: 2827; WAN024C77-5; Start 971; Stop 995
ttcactatgagcggaaggatttgat

SEQ ID NO: 338112 - DNA, 25 bp, Artificial
  probe
  misc_feature (1)..(25): SEQ ID NO: 2827; WAN024C77-5; Start 1892; Stop 1916
tctttaagctggtttccttgtctaa

SEQ ID NO: 338113 - DNA, 25 bp, Artificial
  probe
  misc_feature (1)..(25): SEQ ID NO: 2827; WAN024C77-5; Start 1891; Stop 1915
atctttaagctggtttccttgtcta

SEQ ID NO: 338114 - DNA, 25 bp, Artificial
  probe
  misc_feature (1)..(25): SEQ ID NO: 2827; WAN024C77-5; Start 1890; Stop 1914
tatctttaagctggtttccttgtct

SEQ ID NO: 338115 - DNA, 25 bp, Artificial
  probe
  misc_feature (1)..(25): SEQ ID NO: 2827; WAN024C77-5; Start 107; Stop 131
aaattagtaaggtatgggagtttca

SEQ ID NO: 338116 - DNA, 25 bp, Artificial
  probe
  misc_feature (1)..(25): SEQ ID NO: 2827; WAN024C77-5; Start 110; Stop 134
ttagtaaggtatgggagtttcattt

SEQ ID NO: 338117 - DNA, 25 bp, Artificial
  probe
  misc_feature (1)..(25): SEQ ID NO: 2827; WAN024C77-5; Start 1893; Stop 1917
ctttaagctggtttccttgtctaat

SEQ ID NO: 338118 - DNA, 25 bp, Artificial
  probe
  misc_feature (1)..(25): SEQ ID NO: 2828; WAN024E2T; Start 716; Stop 740
ttgaagtgaagacggttattggata

SEQ ID NO: 338119 - DNA, 25 bp, Artificial
  probe
  misc_feature (1)..(25): SEQ ID NO: 2828; WAN024E2T; Start 715; Stop 739
attgaagtgaagacggttattggat

SEQ ID NO: 338120 - DNA, 25 bp, Artificial
  probe
  misc_feature (1)..(25): SEQ ID NO: 2828; WAN024E2T; Start 1055; Stop 1079
caactcgtaattcaagtcaagatgc

SEQ ID NO: 338121 - DNA, 25 bp, Artificial
  probe
  misc_feature (1)..(25): SEQ ID NO: 2828; WAN024E2T; Start 1054; Stop 1078
gcaactcgtaattcaagtcaagatg

SEQ ID NO: 338122 - DNA, 25 bp, Artificial
  probe
  misc_feature (1)..(25): SEQ ID NO: 2828; WAN024E2T; Start 1053; Stop 1077
agcaactcgtaattcaagtcaagat

SEQ ID NO: 338123 - DNA, 25 bp, Artificial
  probe
  misc_feature (1)..(25): SEQ ID NO: 2828; WAN024E2T; Start 1052; Stop 1076
aagcaactcgtaattcaagtcaaga

SEQ ID NO: 338124 - DNA, 25 bp, Artificial
  probe
  misc_feature (1)..(25): SEQ ID NO: 2828; WAN024E2T; Start 1051; Stop 1075
caagcaactcgtaattcaagtcaag

SEQ ID NO: 338125 - DNA, 25 bp, Artificial
  probe
  misc_feature (1)..(25): SEQ ID NO: 2828; WAN024E2T; Start 1047; Stop 1071
ttctcaagcaactcgtaattcaagt

SEQ ID NO: 338126 - DNA, 25 bp, Artificial
  probe
  misc_feature (1)..(25): SEQ ID NO: 2828; WAN024E2T; Start 1058; Stop 1082
ctcgtaattcaagtcaagatgcctt

SEQ ID NO: 338127 - DNA, 25 bp, Artificial
  probe
  misc_feature (1)..(25): SEQ ID NO: 2828; WAN024E2T; Start 1050; Stop 1074
tcaagcaactcgtaattcaagtcaa

SEQ ID NO: 338128 - DNA, 25 bp, Artificial
  probe
  misc_feature (1)..(25): SEQ ID NO: 2828; WAN024E2T; Start 1048; Stop 1072
tctcaagcaactcgtaattcaagtc

SEQ ID NO: 338129 - DNA, 25 bp, Artificial
  probe
  misc_feature (1)..(25): SEQ ID NO: 2828; WAN024E2T; Start 1056; Stop 1080
aactcgtaattcaagtcaagatgcc

SEQ ID NO: 338130 - DNA, 25 bp, Artificial
  probe
  misc_feature (1)..(25): SEQ ID NO: 2828; WAN024E2T; Start 1049; Stop 1073
ctcaagcaactcgtaattcaagtca

SEQ ID NO: 338131 - DNA, 25 bp, Artificial
  probe
  misc_feature (1)..(25): SEQ ID NO: 2828; WAN024E2T; Start 1292; Stop 1316
tcttcgtcttctctgactatgtgaa

SEQ ID NO: 338132 - DNA, 25 bp, Artificial
  probe
  misc_feature (1)..(25): SEQ ID NO: 2828; WAN024E2T; Start 1291; Stop 1315
ttcttcgtcttctctgactatgtga

SEQ ID NO: 338133 - DNA, 25 bp, Artificial
  probe
  misc_feature (1)..(25): SEQ ID NO: 2828; WAN024E2T; Start 124; Stop 148
caacttcatatcaatccagctcaac

SEQ ID NO: 338134 - DNA, 25 bp, Artificial
  probe
  misc_feature (1)..(25): SEQ ID NO: 2828; WAN024E2T; Start 123; Stop 147
acaacttcatatcaatccagctcaa

SEQ ID NO: 338135 - DNA, 25 bp, Artificial
  probe
  misc_feature (1)..(25): SEQ ID NO: 2828; WAN024E2T; Start 122; Stop 146
aacaacttcatatcaatccagctca

SEQ ID NO: 338136 - DNA, 25 bp, Artificial
  probe
  misc_feature (1)..(25): SEQ ID NO: 2828; WAN024E2T; Start 127; Stop 151
cttcatatcaatccagctcaaccaa

SEQ ID NO: 338137 - DNA, 25 bp, Artificial
  probe
  misc_feature (1)..(25): SEQ ID NO: 2828; WAN024E2T; Start 125; Stop 149
aacttcatatcaatccagctcaacc

SEQ ID NO: 338138 - DNA, 25 bp, Artificial
  probe
  misc_feature (1)..(25): SEQ ID NO: 2828; WAN024E2T; Start 850; Stop 874
attccagaacaagtatatgctgatt

SEQ ID NO: 338139 - DNA, 25 bp, Artificial
  probe
  misc_feature (1)..(25): SEQ ID NO: 2828; WAN024E2T; Start 849; Stop 873
aattccagaacaagtatatgctgat

SEQ ID NO: 338140 - DNA, 25 bp, Artificial
  probe
  misc_feature (1)..(25): SEQ ID NO: 2828; WAN024E2T; Start 1057; Stop 1081
actcgtaattcaagtcaagatgcct

SEQ ID NO: 338141 - DNA, 25 bp, Artificial
  probe
  misc_feature (1)..(25): SEQ ID NO: 2828; WAN024E2T; Start 1339; Stop 1363
ttacaaggacttcctgtgacttatg

SEQ ID NO: 338142 - DNA, 25 bp, Artificial
  probe
  misc_feature (1)..(25): SEQ ID NO: 2828; WAN024E2T; Start 1338; Stop 1362
cttacaaggacttcctgtgacttat

SEQ ID NO: 338143 - DNA, 25 bp, Artificial
  probe
  misc_feature (1)..(25): SEQ ID NO: 2828; WAN024E2T; Start 1046; Stop 1070
tttctcaagcaactcgtaattcaag

SEQ ID NO: 338144 - DNA, 25 bp, Artificial
  probe
  misc_feature (1)..(25): SEQ ID NO: 2828; WAN024E2T; Start 50; Stop 74
ttaataaagccaactcaggtcatcc

SEQ ID NO: 338145 - DNA, 25 bp, Artificial
  probe
  misc_feature (1)..(25): SEQ ID NO: 2828; WAN024E2T; Start 835; Stop 859
tacgaaccatttgaaattccagaac

SEQ ID NO: 338146 - DNA, 25 bp, Artificial
  probe
  misc_feature (1)..(25): SEQ ID NO: 2828; WAN024E2T; Start 834; Stop 858
ctacgaaccatttgaaattccagaa

SEQ ID NO: 338147 - DNA, 25 bp, Artificial
  probe
  misc_feature (1)..(25): SEQ ID NO: 2828; WAN024E2T; Start 1913; Stop 1937
aagtattggcagaatatggctttac

SEQ ID NO: 338148 - DNA, 25 bp, Artificial
  probe
  misc_feature (1)..(25): SEQ ID NO: 2828; WAN024E2T; Start 832; Stop 856
gactacgaaccatttgaaattccag

SEQ ID NO: 338149 - DNA, 25 bp, Artificial
  probe
  misc_feature (1)..(25): SEQ ID NO: 2828; WAN024E2T; Start 748; Stop 772
ccaaacaaacaaggaactaatgctg

SEQ ID NO: 338150 - DNA, 25 bp, Artificial
  probe
  misc_feature (1)..(25): SEQ ID NO: 2828; WAN024E2T; Start 1340; Stop 1364
tacaaggacttcctgtgacttatgt

SEQ ID NO: 338151 - DNA, 25 bp, Artificial
  probe
  misc_feature (1)..(25): SEQ ID NO: 2829; WAN024BH9; Start 69; Stop 93
taggaagtcattcatagcagtgttg

SEQ ID NO: 338152 - DNA, 25 bp, Artificial
  probe
  misc_feature (1)..(25): SEQ ID NO: 2829; WAN024BH9; Start 73; Stop 97
aagtcattcatagcagtgttgattg

SEQ ID NO: 338153 - DNA, 25 bp, Artificial
  probe
  misc_feature (1)..(25): SEQ ID NO: 2829; WAN024BH9; Start 68; Stop 92
ctaggaagtcattcatagcagtgtt

SEQ ID NO: 338154 - DNA, 25 bp, Artificial
  probe
  misc_feature (1)..(25): SEQ ID NO: 2829; WAN024BH9; Start 72; Stop 96
gaagtcattcatagcagtgttgatt

SEQ ID NO: 338155 - DNA, 25 bp, Artificial
  probe
  misc_feature (1)..(25): SEQ ID NO: 2829; WAN024BH9; Start 131; Stop 155
atcctgtcaagattgttccaagaag

SEQ ID NO: 338156 - DNA, 25 bp, Artificial
  probe
  misc_feature (1)..(25): SEQ ID NO: 2829; WAN024BH9; Start 71; Stop 95
ggaagtcattcatagcagtgttgat

SEQ ID NO: 338157 - DNA, 25 bp, Artificial
  probe
  misc_feature (1)..(25): SEQ ID NO: 2829; WAN024BH9; Start 133; Stop 157
cctgtcaagattgttccaagaagtg

SEQ ID NO: 338158 - DNA, 25 bp, Artificial
  probe
  misc_feature (1)..(25): SEQ ID NO: 2829; WAN024BH9; Start 132; Stop 156
tcctgtcaagattgttccaagaagt

SEQ ID NO: 338159 - DNA, 25 bp, Artificial
  probe
  misc_feature (1)..(25): SEQ ID NO: 2829; WAN024BH9; Start 70; Stop 94
aggaagtcattcatagcagtgttga

SEQ ID NO: 338160 - DNA, 25 bp, Artificial
  probe
  misc_feature (1)..(25): SEQ ID NO: 2829; WAN024BH9; Start 130; Stop 154
aatcctgtcaagattgttccaagaa

SEQ ID NO: 338161 - DNA, 25 bp, Artificial
  probe
  misc_feature (1)..(25): SEQ ID NO: 2829; WAN024BH9; Start 143; Stop 167
ttgttccaagaagtggcaatagaag

SEQ ID NO: 338162 - DNA, 25 bp, Artificial
  probe
  misc_feature (1)..(25): SEQ ID NO: 2829; WAN024BH9; Start 151; Stop 175
agaagtggcaatagaaggattgatt

SEQ ID NO: 338163 - DNA, 25 bp, Artificial
  probe
  misc_feature (1)..(25): SEQ ID NO: 2829; WAN024BH9; Start 150; Stop 174
aagaagtggcaatagaaggattgat

SEQ ID NO: 338164 - DNA, 25 bp, Artificial
  probe
  misc_feature (1)..(25): SEQ ID NO: 2829; WAN024BH9; Start 142; Stop 166
attgttccaagaagtggcaatagaa

SEQ ID NO: 338165 - DNA, 25 bp, Artificial
  probe
  misc_feature (1)..(25): SEQ ID NO: 2829; WAN024BH9; Start 139; Stop 163
aagattgttccaagaagtggcaata

SEQ ID NO: 338166 - DNA, 25 bp, Artificial
  probe
  misc_feature (1)..(25): SEQ ID NO: 2829; WAN024BH9; Start 149; Stop 173
caagaagtggcaatagaaggattga

SEQ ID NO: 338167 - DNA, 25 bp, Artificial
  probe
  misc_feature (1)..(25): SEQ ID NO: 2829; WAN024BH9; Start 147; Stop 171
tccaagaagtggcaatagaaggatt

SEQ ID NO: 338168 - DNA, 25 bp, Artificial
  probe
  misc_feature (1)..(25): SEQ ID NO: 2829; WAN024BH9; Start 146; Stop 170
ttccaagaagtggcaatagaaggat

SEQ ID NO: 338169 - DNA, 25 bp, Artificial
  probe
  misc_feature (1)..(25): SEQ ID NO: 2829; WAN024BH9; Start 141; Stop 165
gattgttccaagaagtggcaataga

SEQ ID NO: 338170 - DNA, 25 bp, Artificial
  probe
  misc_feature (1)..(25): SEQ ID NO: 2829; WAN024BH9; Start 140; Stop 164
agattgttccaagaagtggcaatag

SEQ ID NO: 338171 - DNA, 25 bp, Artificial
  probe
  misc_feature (1)..(25): SEQ ID NO: 2829; WAN024BH9; Start 134; Stop 158
ctgtcaagattgttccaagaagtgg

SEQ ID NO: 338172 - DNA, 25 bp, Artificial
  probe
  misc_feature (1)..(25): SEQ ID NO: 2829; WAN024BH9; Start 148; Stop 172
ccaagaagtggcaatagaaggattg

SEQ ID NO: 338173 - DNA, 25 bp, Artificial
  probe
  misc_feature (1)..(25): SEQ ID NO: 2829; WAN024BH9; Start 119; Stop 143
ctagcataacaaatcctgtcaagat

SEQ ID NO: 338174 - DNA, 25 bp, Artificial
  probe
  misc_feature (1)..(25): SEQ ID NO: 2829; WAN024BH9; Start 138; Stop 162
caagattgttccaagaagtggcaat

SEQ ID NO: 338175 - DNA, 25 bp, Artificial
  probe
  misc_feature (1)..(25): SEQ ID NO: 2829; WAN024BH9; Start 145; Stop 169
gttccaagaagtggcaatagaagga

SEQ ID NO: 338176 - DNA, 25 bp, Artificial
  probe
  misc_feature (1)..(25): SEQ ID NO: 2829; WAN024BH9; Start 121; Stop 145
agcataacaaatcctgtcaagattg

SEQ ID NO: 338177 - DNA, 25 bp, Artificial
  probe
  misc_feature (1)..(25): SEQ ID NO: 2829; WAN024BH9; Start 129; Stop 153
aaatcctgtcaagattgttccaaga

SEQ ID NO: 338178 - DNA, 25 bp, Artificial
  probe
  misc_feature (1)..(25): SEQ ID NO: 2829; WAN024BH9; Start 128; Stop 152
caaatcctgtcaagattgttccaag

SEQ ID NO: 338179 - DNA, 25 bp, Artificial
  probe
  misc_feature (1)..(25): SEQ ID NO: 2829; WAN024BH9; Start 144; Stop 168
tgttccaagaagtggcaatagaagg

SEQ ID NO: 338180 - DNA, 25 bp, Artificial
  probe
  misc_feature (1)..(25): SEQ ID NO: 2829; WAN024BH9; Start 198; Stop 222
aactttaacgtatttcttgatggca

SEQ ID NO: 338181 - DNA, 25 bp, Artificial
  probe
  misc_feature (1)..(25): SEQ ID NO: 2829; WAN024BH9; Start 137; Stop 161
tcaagattgttccaagaagtggcaa

SEQ ID NO: 338182 - DNA, 25 bp, Artificial
  probe
  misc_feature (1)..(25): SEQ ID NO: 2829; WAN024BH9; Start 74; Stop 98
agtcattcatagcagtgttgattgc

SEQ ID NO: 338183 - DNA, 25 bp, Artificial
  probe
  misc_feature (1)..(25): SEQ ID NO: 2829; WAN024BH9; Start 193; Stop 217
cgaggaactttaacgtatttcttga

SEQ ID NO: 338184 - DNA, 25 bp, Artificial
  probe
  misc_feature (1)..(25): SEQ ID NO: 2830; WAN024FNK; Start 769; Stop 793
ctgataactgtgattaccgctattg

SEQ ID NO: 338185 - DNA, 25 bp, Artificial
  probe
  misc_feature (1)..(25): SEQ ID NO: 2830; WAN024FNK; Start 772; Stop 796
ataactgtgattaccgctattggag

SEQ ID NO: 338186 - DNA, 25 bp, Artificial
  probe
  misc_feature (1)..(25): SEQ ID NO: 2830; WAN024FNK; Start 771; Stop 795
gataactgtgattaccgctattgga

SEQ ID NO: 338187 - DNA, 25 bp, Artificial
  probe
  misc_feature (1)..(25): SEQ ID NO: 2830; WAN024FNK; Start 770; Stop 794
tgataactgtgattaccgctattgg

SEQ ID NO: 338188 - DNA, 25 bp, Artificial
  probe
  misc_feature (1)..(25): SEQ ID NO: 2830; WAN024FNK; Start 698; Stop 722
ctatgattggtgctatggtaggaac

SEQ ID NO: 338189 - DNA, 25 bp, Artificial
  probe
  misc_feature (1)..(25): SEQ ID NO: 2830; WAN024FNK; Start 768; Stop 792
gctgataactgtgattaccgctatt

SEQ ID NO: 338190 - DNA, 25 bp, Artificial
  probe
  misc_feature (1)..(25): SEQ ID NO: 2830; WAN024FNK; Start 697; Stop 721
actatgattggtgctatggtaggaa

SEQ ID NO: 338191 - DNA, 25 bp, Artificial
  probe
  misc_feature (1)..(25): SEQ ID NO: 2830; WAN024FNK; Start 716; Stop 740
taggaacgactgaggtaggttatta

SEQ ID NO: 338192 - DNA, 25 bp, Artificial
  probe
  misc_feature (1)..(25): SEQ ID NO: 2830; WAN024FNK; Start 717; Stop 741
aggaacgactgaggtaggttattat

SEQ ID NO: 338193 - DNA, 25 bp, Artificial
  probe
  misc_feature (1)..(25): SEQ ID NO: 2830; WAN024FNK; Start 721; Stop 745
acgactgaggtaggttattatacaa

SEQ ID NO: 338194 - DNA, 25 bp, Artificial
  probe
  misc_feature (1)..(25): SEQ ID NO: 2830; WAN024FNK; Start 718; Stop 742
ggaacgactgaggtaggttattata

SEQ ID NO: 338195 - DNA, 25 bp, Artificial
  probe
  misc_feature (1)..(25): SEQ ID NO: 2830; WAN024FNK; Start 720; Stop 744
aacgactgaggtaggttattataca

SEQ ID NO: 338196 - DNA, 25 bp, Artificial
  probe
  misc_feature (1)..(25): SEQ ID NO: 2830; WAN024FNK; Start 715; Stop 739
gtaggaacgactgaggtaggttatt

SEQ ID NO: 338197 - DNA, 25 bp, Artificial
  probe
  misc_feature (1)..(25): SEQ ID NO: 2830; WAN024FNK; Start 273; Stop 297
tggattgtctacattactgtgttct

SEQ ID NO: 338198 - DNA, 25 bp, Artificial
  probe
  misc_feature (1)..(25): SEQ ID NO: 2830; WAN024FNK; Start 767; Stop 791
tgctgataactgtgattaccgctat

SEQ ID NO: 338199 - DNA, 25 bp, Artificial
  probe
  misc_feature (1)..(25): SEQ ID NO: 2830; WAN024FNK; Start 719; Stop 743
gaacgactgaggtaggttattatac

SEQ ID NO: 338200 - DNA, 25 bp, Artificial
  probe
  misc_feature (1)..(25): SEQ ID NO: 2830; WAN024FNK; Start 764; Stop 788
aattgctgataactgtgattaccgc

SEQ ID NO: 338201 - DNA, 25 bp, Artificial
  probe
  misc_feature (1)..(25): SEQ ID NO: 2830; WAN024FNK; Start 773; Stop 797
taactgtgattaccgctattggagg

SEQ ID NO: 338202 - DNA, 25 bp, Artificial
  probe
  misc_feature (1)..(25): SEQ ID NO: 2830; WAN024FNK; Start 766; Stop 790
ttgctgataactgtgattaccgcta

SEQ ID NO: 338203 - DNA, 25 bp, Artificial
  probe
  misc_feature (1)..(25): SEQ ID NO: 2830; WAN024FNK; Start 272; Stop 296
atggattgtctacattactgtgttc

SEQ ID NO: 338204 - DNA, 25 bp, Artificial
  probe
  misc_feature (1)..(25): SEQ ID NO: 2830; WAN024FNK; Start 699; Stop 723
tatgattggtgctatggtaggaacg

SEQ ID NO: 338205 - DNA, 25 bp, Artificial
  probe
  misc_feature (1)..(25): SEQ ID NO: 2830; WAN024FNK; Start 765; Stop 789
attgctgataactgtgattaccgct

SEQ ID NO: 338206 - DNA, 25 bp, Artificial
  probe
  misc_feature (1)..(25): SEQ ID NO: 2830; WAN024FNK; Start 682; Stop 706
actatgctggataccactatgattg

SEQ ID NO: 338207 - DNA, 25 bp, Artificial
  probe
  misc_feature (1)..(25): SEQ ID NO: 2830; WAN024FNK; Start 1124; Stop 1148
taattctgattccagtaatggctca

SEQ ID NO: 338208 - DNA, 25 bp, Artificial
  probe
  misc_feature (1)..(25): SEQ ID NO: 2830; WAN024FNK; Start 1122; Stop 1146
cctaattctgattccagtaatggct

SEQ ID NO: 338209 - DNA, 25 bp, Artificial
  probe
  misc_feature (1)..(25): SEQ ID NO: 2830; WAN024FNK; Start 1125; Stop 1149
aattctgattccagtaatggctcaa

SEQ ID NO: 338210 - DNA, 25 bp, Artificial
  probe
  misc_feature (1)..(25): SEQ ID NO: 2830; WAN024FNK; Start 71; Stop 95
ttccattagtatccgcaacatatac

SEQ ID NO: 338211 - DNA, 25 bp, Artificial
  probe
  misc_feature (1)..(25): SEQ ID NO: 2830; WAN024FNK; Start 274; Stop 298
ggattgtctacattactgtgttcta

SEQ ID NO: 338212 - DNA, 25 bp, Artificial
  probe
  misc_feature (1)..(25): SEQ ID NO: 2830; WAN024FNK; Start 1121; Stop 1145
acctaattctgattccagtaatggc

SEQ ID NO: 338213 - DNA, 25 bp, Artificial
  probe
  misc_feature (1)..(25): SEQ ID NO: 2830; WAN024FNK; Start 683; Stop 707
ctatgctggataccactatgattgg

SEQ ID NO: 338214 - DNA, 25 bp, Artificial
  probe
  misc_feature (1)..(25): SEQ ID NO: 2830; WAN024FNK; Start 1123; Stop 1147
ctaattctgattccagtaatggctc

SEQ ID NO: 338215 - DNA, 25 bp, Artificial
  probe
  misc_feature (1)..(25): SEQ ID NO: 2830; WAN024FNK; Start 696; Stop 720
cactatgattggtgctatggtagga

SEQ ID NO: 338216 - DNA, 25 bp, Artificial
  probe
  misc_feature (1)..(25): SEQ ID NO: 2830; WAN024FNK; Start 1285; Stop 1309
ggtggagctatatatgtagtaatgc

SEQ ID NO: 338217 - DNA, 25 bp, Artificial
  probe
  misc_feature (1)..(25): SEQ ID NO: 2831; WAN024G4L; Start 517; Stop 541
attaacaacggttacggtatctctg

SEQ ID NO: 338218 - DNA, 25 bp, Artificial
  probe
  misc_feature (1)..(25): SEQ ID NO: 2831; WAN024G4L; Start 516; Stop 540
cattaacaacggttacggtatctct

SEQ ID NO: 338219 - DNA, 25 bp, Artificial
  probe
  misc_feature (1)..(25): SEQ ID NO: 2831; WAN024G4L; Start 560; Stop 584
ccaatatagaacatatccatcaacg

SEQ ID NO: 338220 - DNA, 25 bp, Artificial
  probe
  misc_feature (1)..(25): SEQ ID NO: 2831; WAN024G4L; Start 339; Stop 363
caatggtatcgtaggtggtggtatg

SEQ ID NO: 338221 - DNA, 25 bp, Artificial
  probe
  misc_feature (1)..(25): SEQ ID NO: 2831; WAN024G4L; Start 157; Stop 181
atgttagctctcaatccagatgatc

SEQ ID NO: 338222 - DNA, 25 bp, Artificial
  probe
  misc_feature (1)..(25): SEQ ID NO: 2831; WAN024G4L; Start 155; Stop 179
ctatgttagctctcaatccagatga

SEQ ID NO: 338223 - DNA, 25 bp, Artificial
  probe
  misc_feature (1)..(25): SEQ ID NO: 2831; WAN024G4L; Start 565; Stop 589
atagaacatatccatcaacgtagcg

SEQ ID NO: 338224 - DNA, 25 bp, Artificial
  probe
  misc_feature (1)..(25): SEQ ID NO: 2831; WAN024G4L; Start 250; Stop 274
gctgaaatccttggtaaatacactg

SEQ ID NO: 338225 - DNA, 25 bp, Artificial
  probe
  misc_feature (1)..(25): SEQ ID NO: 2831; WAN024G4L; Start 84; Stop 108
attagtaaagaaagggaaagtgcca

SEQ ID NO: 338226 - DNA, 25 bp, Artificial
  probe
  misc_feature (1)..(25): SEQ ID NO: 2831; WAN024G4L; Start 251; Stop 275
ctgaaatccttggtaaatacactgg

SEQ ID NO: 338227 - DNA, 25 bp, Artificial
  probe
  misc_feature (1)..(25): SEQ ID NO: 2831; WAN024G4L; Start 247; Stop 271
atggctgaaatccttggtaaataca

SEQ ID NO: 338228 - DNA, 25 bp, Artificial
  probe
  misc_feature (1)..(25): SEQ ID NO: 2831; WAN024G4L; Start 246; Stop 270
gatggctgaaatccttggtaaatac

SEQ ID NO: 338229 - DNA, 25 bp, Artificial
  probe
  misc_feature (1)..(25): SEQ ID NO: 2831; WAN024G4L; Start 245; Stop 269
tgatggctgaaatccttggtaaata

SEQ ID NO: 338230 - DNA, 25 bp, Artificial
  probe
  misc_feature (1)..(25): SEQ ID NO: 2831; WAN024G4L; Start 156; Stop 180
tatgttagctctcaatccagatgat

SEQ ID NO: 338231 - DNA, 25 bp, Artificial
  probe
  misc_feature (1)..(25): SEQ ID NO: 2831; WAN024G4L; Start 244; Stop 268
atgatggctgaaatccttggtaaat

SEQ ID NO: 338232 - DNA, 25 bp, Artificial
  probe
  misc_feature (1)..(25): SEQ ID NO: 2831; WAN024G4L; Start 158; Stop 182
tgttagctctcaatccagatgatct

SEQ ID NO: 338233 - DNA, 25 bp, Artificial
  probe
  misc_feature (1)..(25): SEQ ID NO: 2831; WAN024G4L; Start 85; Stop 109
ttagtaaagaaagggaaagtgccag

SEQ ID NO: 338234 - DNA, 25 bp, Artificial
  probe
  misc_feature (1)..(25): SEQ ID NO: 2831; WAN024G4L; Start 692; Stop 716
gtccagtcttgattgaaagtgtaac

SEQ ID NO: 338235 - DNA, 25 bp, Artificial
  probe
  misc_feature (1)..(25): SEQ ID NO: 2831; WAN024G4L; Start 249; Stop 273
ggctgaaatccttggtaaatacact

SEQ ID NO: 338236 - DNA, 25 bp, Artificial
  probe
  misc_feature (1)..(25): SEQ ID NO: 2831; WAN024G4L; Start 83; Stop 107
aattagtaaagaaagggaaagtgcc

SEQ ID NO: 338237 - DNA, 25 bp, Artificial
  probe
  misc_feature (1)..(25): SEQ ID NO: 2831; WAN024G4L; Start 243; Stop 267
aatgatggctgaaatccttggtaaa

SEQ ID NO: 338238 - DNA, 25 bp, Artificial
  probe
  misc_feature (1)..(25): SEQ ID NO: 2831; WAN024G4L; Start 691; Stop 715
ggtccagtcttgattgaaagtgtaa

SEQ ID NO: 338239 - DNA, 25 bp, Artificial
  probe
  misc_feature (1)..(25): SEQ ID NO: 2831; WAN024G4L; Start 739; Stop 763
tcatctgaccctggtaaatatcgta

SEQ ID NO: 338240 - DNA, 25 bp, Artificial
  probe
  misc_feature (1)..(25): SEQ ID NO: 2831; WAN024G4L; Start 248; Stop 272
tggctgaaatccttggtaaatacac

SEQ ID NO: 338241 - DNA, 25 bp, Artificial
  probe
  misc_feature (1)..(25): SEQ ID NO: 2831; WAN024G4L; Start 737; Stop 761
catcatctgaccctggtaaatatcg

SEQ ID NO: 338242 - DNA, 25 bp, Artificial
  probe
  misc_feature (1)..(25): SEQ ID NO: 2831; WAN024G4L; Start 242; Stop 266
gaatgatggctgaaatccttggtaa

SEQ ID NO: 338243 - DNA, 25 bp, Artificial
  probe
  misc_feature (1)..(25): SEQ ID NO: 2831; WAN024G4L; Start 515; Stop 539
gcattaacaacggttacggtatctc

SEQ ID NO: 338244 - DNA, 25 bp, Artificial
  probe
  misc_feature (1)..(25): SEQ ID NO: 2831; WAN024G4L; Start 693; Stop 717
tccagtcttgattgaaagtgtaact

SEQ ID NO: 338245 - DNA, 25 bp, Artificial
  probe
  misc_feature (1)..(25): SEQ ID NO: 2831; WAN024G4L; Start 24; Stop 48
tttgctagaaatgttccgtaagatg

SEQ ID NO: 338246 - DNA, 25 bp, Artificial
  probe
  misc_feature (1)..(25): SEQ ID NO: 2831; WAN024G4L; Start 471; Stop 495
agtgaacatggcttctatctggaac

SEQ ID NO: 338247 - DNA, 25 bp, Artificial
  probe
  misc_feature (1)..(25): SEQ ID NO: 2831; WAN024G4L; Start 738; Stop 762
atcatctgaccctggtaaatatcgt

SEQ ID NO: 338248 - DNA, 25 bp, Artificial
  probe
  misc_feature (1)..(25): SEQ ID NO: 2831; WAN024G4L; Start 82; Stop 106
caattagtaaagaaagggaaagtgc

SEQ ID NO: 338249 - DNA, 25 bp, Artificial
  probe
  misc_feature (1)..(25): SEQ ID NO: 2831; WAN024G4L; Start 79; Stop 103
gcacaattagtaaagaaagggaaag

SEQ ID NO: 338250 - DNA, 25 bp, Artificial
  probe
  misc_feature (1)..(25): SEQ ID NO: 2832; WAN024E24; Start 584; Stop 608
atgttataggtcgcagtggattatt

SEQ ID NO: 338251 - DNA, 25 bp, Artificial
  probe
  misc_feature (1)..(25): SEQ ID NO: 2832; WAN024E24; Start 582; Stop 606
ttatgttataggtcgcagtggatta

SEQ ID NO: 338252 - DNA, 25 bp, Artificial
  probe
  misc_feature (1)..(25): SEQ ID NO: 2832; WAN024E24; Start 486; Stop 510
gcttagagttcagaatggttatcac

SEQ ID NO: 338253 - DNA, 25 bp, Artificial
  probe
  misc_feature (1)..(25): SEQ ID NO: 2832; WAN024E24; Start 583; Stop 607
tatgttataggtcgcagtggattat

SEQ ID NO: 338254 - DNA, 25 bp, Artificial
  probe
  misc_feature (1)..(25): SEQ ID NO: 2832; WAN024E24; Start 493; Stop 517
gttcagaatggttatcactacatca

SEQ ID NO: 338255 - DNA, 25 bp, Artificial
  probe
  misc_feature (1)..(25): SEQ ID NO: 2832; WAN024E24; Start 490; Stop 514
agagttcagaatggttatcactaca

SEQ ID NO: 338256 - DNA, 25 bp, Artificial
  probe
  misc_feature (1)..(25): SEQ ID NO: 2832; WAN024E24; Start 492; Stop 516
agttcagaatggttatcactacatc

SEQ ID NO: 338257 - DNA, 25 bp, Artificial
  probe
  misc_feature (1)..(25): SEQ ID NO: 2832; WAN024E24; Start 491; Stop 515
gagttcagaatggttatcactacat

SEQ ID NO: 338258 - DNA, 25 bp, Artificial
  probe
  misc_feature (1)..(25): SEQ ID NO: 2832; WAN024E24; Start 494; Stop 518
ttcagaatggttatcactacatcat

SEQ ID NO: 338259 - DNA, 25 bp, Artificial
  probe
  misc_feature (1)..(25): SEQ ID NO: 2832; WAN024E24; Start 487; Stop 511
cttagagttcagaatggttatcact

SEQ ID NO: 338260 - DNA, 25 bp, Artificial
  probe
  misc_feature (1)..(25): SEQ ID NO: 2832; WAN024E24; Start 485; Stop 509
agcttagagttcagaatggttatca

SEQ ID NO: 338261 - DNA, 25 bp, Artificial
  probe
  misc_feature (1)..(25): SEQ ID NO: 2832; WAN024E24; Start 483; Stop 507
tcagcttagagttcagaatggttat

SEQ ID NO: 338262 - DNA, 25 bp, Artificial
  probe
  misc_feature (1)..(25): SEQ ID NO: 2832; WAN024E24; Start 484; Stop 508
cagcttagagttcagaatggttatc

SEQ ID NO: 338263 - DNA, 25 bp, Artificial
  probe
  misc_feature (1)..(25): SEQ ID NO: 2832; WAN024E24; Start 132; Stop 156
tattaccttgtctccttggttcatt

SEQ ID NO: 338264 - DNA, 25 bp, Artificial
  probe
  misc_feature (1)..(25): SEQ ID NO: 2832; WAN024E24; Start 131; Stop 155
atattaccttgtctccttggttcat

SEQ ID NO: 338265 - DNA, 25 bp, Artificial
  probe
  misc_feature (1)..(25): SEQ ID NO: 2832; WAN024E24; Start 133; Stop 157
attaccttgtctccttggttcattc

SEQ ID NO: 338266 - DNA, 25 bp, Artificial
  probe
  misc_feature (1)..(25): SEQ ID NO: 2832; WAN024E24; Start 586; Stop 610
gttataggtcgcagtggattatttg

SEQ ID NO: 338267 - DNA, 25 bp, Artificial
  probe
  misc_feature (1)..(25): SEQ ID NO: 2832; WAN024E24; Start 585; Stop 609
tgttataggtcgcagtggattattt

SEQ ID NO: 338268 - DNA, 25 bp, Artificial
  probe
  misc_feature (1)..(25): SEQ ID NO: 2832; WAN024E24; Start 581; Stop 605
tttatgttataggtcgcagtggatt

SEQ ID NO: 338269 - DNA, 25 bp, Artificial
  probe
  misc_feature (1)..(25): SEQ ID NO: 2832; WAN024E24; Start 580; Stop 604
atttatgttataggtcgcagtggat

SEQ ID NO: 338270 - DNA, 25 bp, Artificial
  probe
  misc_feature (1)..(25): SEQ ID NO: 2832; WAN024E24; Start 605; Stop 629
tatttggtttggatgacgatattgc

SEQ ID NO: 338271 - DNA, 25 bp, Artificial
  probe
  misc_feature (1)..(25): SEQ ID NO: 2832; WAN024E24; Start 597; Stop 621
cagtggattatttggtttggatgac

SEQ ID NO: 338272 - DNA, 25 bp, Artificial
  probe
  misc_feature (1)..(25): SEQ ID NO: 2832; WAN024E24; Start 500; Stop 524
atggttatcactacatcattgagat

SEQ ID NO: 338273 - DNA, 25 bp, Artificial
  probe
  misc_feature (1)..(25): SEQ ID NO: 2832; WAN024E24; Start 489; Stop 513
tagagttcagaatggttatcactac

SEQ ID NO: 338274 - DNA, 25 bp, Artificial
  probe
  misc_feature (1)..(25): SEQ ID NO: 2832; WAN024E24; Start 579; Stop 603
tatttatgttataggtcgcagtgga

SEQ ID NO: 338275 - DNA, 25 bp, Artificial
  probe
  misc_feature (1)..(25): SEQ ID NO: 2832; WAN024E24; Start 406; Stop 430
actattatgactgtagatccaggtt

SEQ ID NO: 338276 - DNA, 25 bp, Artificial
  probe
  misc_feature (1)..(25): SEQ ID NO: 2832; WAN024E24; Start 405; Stop 429
aactattatgactgtagatccaggt

SEQ ID NO: 338277 - DNA, 25 bp, Artificial
  probe
  misc_feature (1)..(25): SEQ ID NO: 2832; WAN024E24; Start 587; Stop 611
ttataggtcgcagtggattatttgg

SEQ ID NO: 338278 - DNA, 25 bp, Artificial
  probe
  misc_feature (1)..(25): SEQ ID NO: 2832; WAN024E24; Start 601; Stop 625
ggattatttggtttggatgacgata

SEQ ID NO: 338279 - DNA, 25 bp, Artificial
  probe
  misc_feature (1)..(25): SEQ ID NO: 2832; WAN024E24; Start 600; Stop 624
tggattatttggtttggatgacgat

SEQ ID NO: 338280 - DNA, 25 bp, Artificial
  probe
  misc_feature (1)..(25): SEQ ID NO: 2832; WAN024E24; Start 44; Stop 68
tggacaaattcaaagagcagattac

SEQ ID NO: 338281 - DNA, 25 bp, Artificial
  probe
  misc_feature (1)..(25): SEQ ID NO: 2832; WAN024E24; Start 45; Stop 69
ggacaaattcaaagagcagattact

SEQ ID NO: 338282 - DNA, 25 bp, Artificial
  probe
  misc_feature (1)..(25): SEQ ID NO: 2832; WAN024E24; Start 268; Stop 292
catgctgaagttctgaatggtcttg

SEQ ID NO: 338283 - DNA, 25 bp, Artificial
  probe
  misc_feature (1)..(25): SEQ ID NO: 2833; WAN024F5V; Start 180; Stop 204
cgccattctattctcctacattcta

SEQ ID NO: 338284 - DNA, 25 bp, Artificial
  probe
  misc_feature (1)..(25): SEQ ID NO: 2833; WAN024F5V; Start 178; Stop 202
ttcgccattctattctcctacattc

SEQ ID NO: 338285 - DNA, 25 bp, Artificial
  probe
  misc_feature (1)..(25): SEQ ID NO: 2833; WAN024F5V; Start 179; Stop 203
tcgccattctattctcctacattct

SEQ ID NO: 338286 - DNA, 25 bp, Artificial
  probe
  misc_feature (1)..(25): SEQ ID NO: 2833; WAN024F5V; Start 194; Stop 218
cctacattctaatgatcctcagacc

SEQ ID NO: 338287 - DNA, 25 bp, Artificial
  probe
  misc_feature (1)..(25): SEQ ID NO: 2833; WAN024F5V; Start 181; Stop 205
gccattctattctcctacattctaa

SEQ ID NO: 338288 - DNA, 25 bp, Artificial
  probe
  misc_feature (1)..(25): SEQ ID NO: 2833; WAN024F5V; Start 195; Stop 219
ctacattctaatgatcctcagacct

SEQ ID NO: 338289 - DNA, 25 bp, Artificial
  probe
  misc_feature (1)..(25): SEQ ID NO: 2833; WAN024F5V; Start 193; Stop 217
tcctacattctaatgatcctcagac

SEQ ID NO: 338290 - DNA, 25 bp, Artificial
  probe
  misc_feature (1)..(25): SEQ ID NO: 2833; WAN024F5V; Start 192; Stop 216
ctcctacattctaatgatcctcaga

SEQ ID NO: 338291 - DNA, 25 bp, Artificial
  probe
  misc_feature (1)..(25): SEQ ID NO: 2833; WAN024F5V; Start 191; Stop 215
tctcctacattctaatgatcctcag

SEQ ID NO: 338292 - DNA, 25 bp, Artificial
  probe
  misc_feature (1)..(25): SEQ ID NO: 2833; WAN024F5V; Start 197; Stop 221
acattctaatgatcctcagacctat

SEQ ID NO: 338293 - DNA, 25 bp, Artificial
  probe
  misc_feature (1)..(25): SEQ ID NO: 2833; WAN024F5V; Start 190; Stop 214
ttctcctacattctaatgatcctca

SEQ ID NO: 338294 - DNA, 25 bp, Artificial
  probe
  misc_feature (1)..(25): SEQ ID NO: 2833; WAN024F5V; Start 202; Stop 226
ctaatgatcctcagacctatctact

SEQ ID NO: 338295 - DNA, 25 bp, Artificial
  probe
  misc_feature (1)..(25): SEQ ID NO: 2833; WAN024F5V; Start 201; Stop 225
tctaatgatcctcagacctatctac

SEQ ID NO: 338296 - DNA, 25 bp, Artificial
  probe
  misc_feature (1)..(25): SEQ ID NO: 2833; WAN024F5V; Start 177; Stop 201
tttcgccattctattctcctacatt

SEQ ID NO: 338297 - DNA, 25 bp, Artificial
  probe
  misc_feature (1)..(25): SEQ ID NO: 2833; WAN024F5V; Start 198; Stop 222
cattctaatgatcctcagacctatc

SEQ ID NO: 338298 - DNA, 25 bp, Artificial
  probe
  misc_feature (1)..(25): SEQ ID NO: 2833; WAN024F5V; Start 199; Stop 223
attctaatgatcctcagacctatct

SEQ ID NO: 338299 - DNA, 25 bp, Artificial
  probe
  misc_feature (1)..(25): SEQ ID NO: 2833; WAN024F5V; Start 196; Stop 220
tacattctaatgatcctcagaccta

SEQ ID NO: 338300 - DNA, 25 bp, Artificial
  probe
  misc_feature (1)..(25): SEQ ID NO: 2833; WAN024F5V; Start 97; Stop 121
atcaatttaagagcgtcattcaagg

SEQ ID NO: 338301 - DNA, 25 bp, Artificial
  probe
  misc_feature (1)..(25): SEQ ID NO: 2833; WAN024F5V; Start 94; Stop 118
tcaatcaatttaagagcgtcattca

SEQ ID NO: 338302 - DNA, 25 bp, Artificial
  probe
  misc_feature (1)..(25): SEQ ID NO: 2833; WAN024F5V; Start 189; Stop 213
attctcctacattctaatgatcctc

SEQ ID NO: 338303 - DNA, 25 bp, Artificial
  probe
  misc_feature (1)..(25): SEQ ID NO: 2833; WAN024F5V; Start 95; Stop 119
caatcaatttaagagcgtcattcaa

SEQ ID NO: 338304 - DNA, 25 bp, Artificial
  probe
  misc_feature (1)..(25): SEQ ID NO: 2833; WAN024F5V; Start 205; Stop 229
atgatcctcagacctatctactatt

SEQ ID NO: 338305 - DNA, 25 bp, Artificial
  probe
  misc_feature (1)..(25): SEQ ID NO: 2833; WAN024F5V; Start 204; Stop 228
aatgatcctcagacctatctactat

SEQ ID NO: 338306 - DNA, 25 bp, Artificial
  probe
  misc_feature (1)..(25): SEQ ID NO: 2833; WAN024F5V; Start 200; Stop 224
ttctaatgatcctcagacctatcta

SEQ ID NO: 338307 - DNA, 25 bp, Artificial
  probe
  misc_feature (1)..(25): SEQ ID NO: 2833; WAN024F5V; Start 96; Stop 120
aatcaatttaagagcgtcattcaag

SEQ ID NO: 338308 - DNA, 25 bp, Artificial
  probe
  misc_feature (1)..(25): SEQ ID NO: 2833; WAN024F5V; Start 90; Stop 114
tttctcaatcaatttaagagcgtca

SEQ ID NO: 338309 - DNA, 25 bp, Artificial
  probe
  misc_feature (1)..(25): SEQ ID NO: 2833; WAN024F5V; Start 92; Stop 116
tctcaatcaatttaagagcgtcatt

SEQ ID NO: 338310 - DNA, 25 bp, Artificial
  probe
  misc_feature (1)..(25): SEQ ID NO: 2833; WAN024F5V; Start 91; Stop 115
ttctcaatcaatttaagagcgtcat

SEQ ID NO: 338311 - DNA, 25 bp, Artificial
  probe
  misc_feature (1)..(25): SEQ ID NO: 2833; WAN024F5V; Start 93; Stop 117
ctcaatcaatttaagagcgtcattc

SEQ ID NO: 338312 - DNA, 25 bp, Artificial
  probe
  misc_feature (1)..(25): SEQ ID NO: 2833; WAN024F5V; Start 89; Stop 113
ctttctcaatcaatttaagagcgtc

SEQ ID NO: 338313 - DNA, 25 bp, Artificial
  probe
  misc_feature (1)..(25): SEQ ID NO: 2833; WAN024F5V; Start 98; Stop 122
tcaatttaagagcgtcattcaaggc

SEQ ID NO: 338314 - DNA, 25 bp, Artificial
  probe
  misc_feature (1)..(25): SEQ ID NO: 2833; WAN024F5V; Start 206; Stop 230
tgatcctcagacctatctactatta

SEQ ID NO: 338315 - DNA, 25 bp, Artificial
  probe
  misc_feature (1)..(25): SEQ ID NO: 2833; WAN024F5V; Start 203; Stop 227
taatgatcctcagacctatctacta

SEQ ID NO: 338316 - DNA, 25 bp, Artificial
  probe
  misc_feature (1)..(25): SEQ ID NO: 2834; WAN024DM9; Start 115; Stop 139
cttctcgtatccattgtaatcagtg

SEQ ID NO: 338317 - DNA, 25 bp, Artificial
  probe
  misc_feature (1)..(25): SEQ ID NO: 2834; WAN024DM9; Start 114; Stop 138
tcttctcgtatccattgtaatcagt

SEQ ID NO: 338318 - DNA, 25 bp, Artificial
  probe
  misc_feature (1)..(25): SEQ ID NO: 2834; WAN024DM9; Start 112; Stop 136
agtcttctcgtatccattgtaatca

SEQ ID NO: 338319 - DNA, 25 bp, Artificial
  probe
  misc_feature (1)..(25): SEQ ID NO: 2834; WAN024DM9; Start 113; Stop 137
gtcttctcgtatccattgtaatcag

SEQ ID NO: 338320 - DNA, 25 bp, Artificial
  probe
  misc_feature (1)..(25): SEQ ID NO: 2834; WAN024DM9; Start 116; Stop 140
ttctcgtatccattgtaatcagtgc

SEQ ID NO: 338321 - DNA, 25 bp, Artificial
  probe
  misc_feature (1)..(25): SEQ ID NO: 2834; WAN024DM9; Start 155; Stop 179
aatatctgcctggtctaattgaaga

SEQ ID NO: 338322 - DNA, 25 bp, Artificial
  probe
  misc_feature (1)..(25): SEQ ID NO: 2834; WAN024DM9; Start 111; Stop 135
aagtcttctcgtatccattgtaatc

SEQ ID NO: 338323 - DNA, 25 bp, Artificial
  probe
  misc_feature (1)..(25): SEQ ID NO: 2834; WAN024DM9; Start 887; Stop 911
ttagtctagcattgttaccgatcac

SEQ ID NO: 338324 - DNA, 25 bp, Artificial
  probe
  misc_feature (1)..(25): SEQ ID NO: 2834; WAN024DM9; Start 430; Stop 454
aatgtggctattattcaacaaggtg

SEQ ID NO: 338325 - DNA, 25 bp, Artificial
  probe
  misc_feature (1)..(25): SEQ ID NO: 2834; WAN024DM9; Start 429; Stop 453
caatgtggctattattcaacaaggt

SEQ ID NO: 338326 - DNA, 25 bp, Artificial
  probe
  misc_feature (1)..(25): SEQ ID NO: 2834; WAN024DM9; Start 428; Stop 452
acaatgtggctattattcaacaagg

SEQ ID NO: 338327 - DNA, 25 bp, Artificial
  probe
  misc_feature (1)..(25): SEQ ID NO: 2834; WAN024DM9; Start 431; Stop 455
atgtggctattattcaacaaggtga

SEQ ID NO: 338328 - DNA, 25 bp, Artificial
  probe
  misc_feature (1)..(25): SEQ ID NO: 2834; WAN024DM9; Start 51; Stop 75
aattatgatagaatggtggaaggaa

SEQ ID NO: 338329 - DNA, 25 bp, Artificial
  probe
  misc_feature (1)..(25): SEQ ID NO: 2834; WAN024DM9; Start 427; Stop 451
aacaatgtggctattattcaacaag

SEQ ID NO: 338330 - DNA, 25 bp, Artificial
  probe
  misc_feature (1)..(25): SEQ ID NO: 2834; WAN024DM9; Start 426; Stop 450
gaacaatgtggctattattcaacaa

SEQ ID NO: 338331 - DNA, 25 bp, Artificial
  probe
  misc_feature (1)..(25): SEQ ID NO: 2834; WAN024DM9; Start 891; Stop 915
tctagcattgttaccgatcacattc

SEQ ID NO: 338332 - DNA, 25 bp, Artificial
  probe
  misc_feature (1)..(25): SEQ ID NO: 2834; WAN024DM9; Start 890; Stop 914
gtctagcattgttaccgatcacatt

SEQ ID NO: 338333 - DNA, 25 bp, Artificial
  probe
  misc_feature (1)..(25): SEQ ID NO: 2834; WAN024DM9; Start 888; Stop 912
tagtctagcattgttaccgatcaca

SEQ ID NO: 338334 - DNA, 25 bp, Artificial
  probe
  misc_feature (1)..(25): SEQ ID NO: 2834; WAN024DM9; Start 745; Stop 769
cagtatattcgaccaacattcaaga

SEQ ID NO: 338335 - DNA, 25 bp, Artificial
  probe
  misc_feature (1)..(25): SEQ ID NO: 2834; WAN024DM9; Start 744; Stop 768
tcagtatattcgaccaacattcaag

SEQ ID NO: 338336 - DNA, 25 bp, Artificial
  probe
  misc_feature (1)..(25): SEQ ID NO: 2834; WAN024DM9; Start 119; Stop 143
tcgtatccattgtaatcagtgcata

SEQ ID NO: 338337 - DNA, 25 bp, Artificial
  probe
  misc_feature (1)..(25): SEQ ID NO: 2834; WAN024DM9; Start 631; Stop 655
cagaaggttggtttagtaaatgagc

SEQ ID NO: 338338 - DNA, 25 bp, Artificial
  probe
  misc_feature (1)..(25): SEQ ID NO: 2834; WAN024DM9; Start 632; Stop 656
agaaggttggtttagtaaatgagca

SEQ ID NO: 338339 - DNA, 25 bp, Artificial
  probe
  misc_feature (1)..(25): SEQ ID NO: 2834; WAN024DM9; Start 993; Stop 1017
aaatggatttctaattgtgatgccc

SEQ ID NO: 338340 - DNA, 25 bp, Artificial
  probe
  misc_feature (1)..(25): SEQ ID NO: 2834; WAN024DM9; Start 889; Stop 913
agtctagcattgttaccgatcacat

SEQ ID NO: 338341 - DNA, 25 bp, Artificial
  probe
  misc_feature (1)..(25): SEQ ID NO: 2834; WAN024DM9; Start 118; Stop 142
ctcgtatccattgtaatcagtgcat

SEQ ID NO: 338342 - DNA, 25 bp, Artificial
  probe
  misc_feature (1)..(25): SEQ ID NO: 2834; WAN024DM9; Start 106; Stop 130
gttgaaagtcttctcgtatccattg

SEQ ID NO: 338343 - DNA, 25 bp, Artificial
  probe
  misc_feature (1)..(25): SEQ ID NO: 2834; WAN024DM9; Start 104; Stop 128
atgttgaaagtcttctcgtatccat

SEQ ID NO: 338344 - DNA, 25 bp, Artificial
  probe
  misc_feature (1)..(25): SEQ ID NO: 2834; WAN024DM9; Start 107; Stop 131
ttgaaagtcttctcgtatccattgt

SEQ ID NO: 338345 - DNA, 25 bp, Artificial
  probe
  misc_feature (1)..(25): SEQ ID NO: 2834; WAN024DM9; Start 105; Stop 129
tgttgaaagtcttctcgtatccatt

SEQ ID NO: 338346 - DNA, 25 bp, Artificial
  probe
  misc_feature (1)..(25): SEQ ID NO: 2834; WAN024DM9; Start 103; Stop 127
aatgttgaaagtcttctcgtatcca

SEQ ID NO: 338347 - DNA, 25 bp, Artificial
  probe
  misc_feature (1)..(25): SEQ ID NO: 2834; WAN024DM9; Start 743; Stop 767
atcagtatattcgaccaacattcaa

SEQ ID NO: 338348 - DNA, 25 bp, Artificial
  probe
  misc_feature (1)..(25): SEQ ID NO: 2834; WAN024DM9; Start 108; Stop 132
tgaaagtcttctcgtatccattgta

SEQ ID NO: 338349 - DNA, 25 bp, Artificial
  probe
  misc_feature (1)..(25): SEQ ID NO: 2835; WAN024CV8; Start 528; Stop 552
tcagatgatggacacagagattatt

SEQ ID NO: 338350 - DNA, 25 bp, Artificial
  probe
  misc_feature (1)..(25): SEQ ID NO: 2835; WAN024CV8; Start 523; Stop 547
gaatatcagatgatggacacagaga

SEQ ID NO: 338351 - DNA, 25 bp, Artificial
  probe
  misc_feature (1)..(25): SEQ ID NO: 2835; WAN024CV8; Start 522; Stop 546
agaatatcagatgatggacacagag

SEQ ID NO: 338352 - DNA, 25 bp, Artificial
  probe
  misc_feature (1)..(25): SEQ ID NO: 2835; WAN024CV8; Start 527; Stop 551
atcagatgatggacacagagattat

SEQ ID NO: 338353 - DNA, 25 bp, Artificial
  probe
  misc_feature (1)..(25): SEQ ID NO: 2835; WAN024CV8; Start 525; Stop 549
atatcagatgatggacacagagatt

SEQ ID NO: 338354 - DNA, 25 bp, Artificial
  probe
  misc_feature (1)..(25): SEQ ID NO: 2835; WAN024CV8; Start 524; Stop 548
aatatcagatgatggacacagagat

SEQ ID NO: 338355 - DNA, 25 bp, Artificial
  probe
  misc_feature (1)..(25): SEQ ID NO: 2835; WAN024CV8; Start 526; Stop 550
tatcagatgatggacacagagatta

SEQ ID NO: 338356 - DNA, 25 bp, Artificial
  probe
  misc_feature (1)..(25): SEQ ID NO: 2835; WAN024CV8; Start 521; Stop 545
tagaatatcagatgatggacacaga

SEQ ID NO: 338357 - DNA, 25 bp, Artificial
  probe
  misc_feature (1)..(25): SEQ ID NO: 2835; WAN024CV8; Start 520; Stop 544
gtagaatatcagatgatggacacag

SEQ ID NO: 338358 - DNA, 25 bp, Artificial
  probe
  misc_feature (1)..(25): SEQ ID NO: 2835; WAN024CV8; Start 519; Stop 543
tgtagaatatcagatgatggacaca

SEQ ID NO: 338359 - DNA, 25 bp, Artificial
  probe
  misc_feature (1)..(25): SEQ ID NO: 2835; WAN024CV8; Start 518; Stop 542
ttgtagaatatcagatgatggacac

SEQ ID NO: 338360 - DNA, 25 bp, Artificial
  probe
  misc_feature (1)..(25): SEQ ID NO: 2835; WAN024CV8; Start 623; Stop 647
cgattcctacctttaataaacgctt

SEQ ID NO: 338361 - DNA, 25 bp, Artificial
  probe
  misc_feature (1)..(25): SEQ ID NO: 2835; WAN024CV8; Start 622; Stop 646
ccgattcctacctttaataaacgct

SEQ ID NO: 338362 - DNA, 25 bp, Artificial
  probe
  misc_feature (1)..(25): SEQ ID NO: 2835; WAN024CV8; Start 621; Stop 645
tccgattcctacctttaataaacgc

SEQ ID NO: 338363 - DNA, 25 bp, Artificial
  probe
  misc_feature (1)..(25): SEQ ID NO: 2835; WAN024CV8; Start 529; Stop 553
cagatgatggacacagagattattt

SEQ ID NO: 338364 - DNA, 25 bp, Artificial
  probe
  misc_feature (1)..(25): SEQ ID NO: 2835; WAN024CV8; Start 620; Stop 644
atccgattcctacctttaataaacg

SEQ ID NO: 338365 - DNA, 25 bp, Artificial
  probe
  misc_feature (1)..(25): SEQ ID NO: 2835; WAN024CV8; Start 509; Stop 533
gccaggaaattgtagaatatcagat

SEQ ID NO: 338366 - DNA, 25 bp, Artificial
  probe
  misc_feature (1)..(25): SEQ ID NO: 2835; WAN024CV8; Start 617; Stop 641
gcgatccgattcctacctttaataa

SEQ ID NO: 338367 - DNA, 25 bp, Artificial
  probe
  misc_feature (1)..(25): SEQ ID NO: 2835; WAN024CV8; Start 616; Stop 640
tgcgatccgattcctacctttaata

SEQ ID NO: 338368 - DNA, 25 bp, Artificial
  probe
  misc_feature (1)..(25): SEQ ID NO: 2835; WAN024CV8; Start 517; Stop 541
attgtagaatatcagatgatggaca

SEQ ID NO: 338369 - DNA, 25 bp, Artificial
  probe
  misc_feature (1)..(25): SEQ ID NO: 2835; WAN024CV8; Start 618; Stop 642
cgatccgattcctacctttaataaa

SEQ ID NO: 338370 - DNA, 25 bp, Artificial
  probe
  misc_feature (1)..(25): SEQ ID NO: 2835; WAN024CV8; Start 722; Stop 746
ttacgaaagaaggacaatctgtatc

SEQ ID NO: 338371 - DNA, 25 bp, Artificial
  probe
  misc_feature (1)..(25): SEQ ID NO: 2835; WAN024CV8; Start 607; Stop 631
ttgataacctgcgatccgattccta

SEQ ID NO: 338372 - DNA, 25 bp, Artificial
  probe
  misc_feature (1)..(25): SEQ ID NO: 2835; WAN024CV8; Start 721; Stop 745
tttacgaaagaaggacaatctgtat

SEQ ID NO: 338373 - DNA, 25 bp, Artificial
  probe
  misc_feature (1)..(25): SEQ ID NO: 2835; WAN024CV8; Start 479; Stop 503
aagttggagatgctctttattatga

SEQ ID NO: 338374 - DNA, 25 bp, Artificial
  probe
  misc_feature (1)..(25): SEQ ID NO: 2835; WAN024CV8; Start 516; Stop 540
aattgtagaatatcagatgatggac

SEQ ID NO: 338375 - DNA, 25 bp, Artificial
  probe
  misc_feature (1)..(25): SEQ ID NO: 2835; WAN024CV8; Start 793; Stop 817
gcatttctgggaatcctgtttgttt

SEQ ID NO: 338376 - DNA, 25 bp, Artificial
  probe
  misc_feature (1)..(25): SEQ ID NO: 2835; WAN024CV8; Start 480; Stop 504
agttggagatgctctttattatgat

SEQ ID NO: 338377 - DNA, 25 bp, Artificial
  probe
  misc_feature (1)..(25): SEQ ID NO: 2835; WAN024CV8; Start 834; Stop 858
tttactacgagggaaactaactaat

SEQ ID NO: 338378 - DNA, 25 bp, Artificial
  probe
  misc_feature (1)..(25): SEQ ID NO: 2835; WAN024CV8; Start 510; Stop 534
ccaggaaattgtagaatatcagatg

SEQ ID NO: 338379 - DNA, 25 bp, Artificial
  probe
  misc_feature (1)..(25): SEQ ID NO: 2835; WAN024CV8; Start 615; Stop 639
ctgcgatccgattcctacctttaat

SEQ ID NO: 338380 - DNA, 25 bp, Artificial
  probe
  misc_feature (1)..(25): SEQ ID NO: 2835; WAN024CV8; Start 619; Stop 643
gatccgattcctacctttaataaac

SEQ ID NO: 338381 - DNA, 25 bp, Artificial
  probe
  misc_feature (1)..(25): SEQ ID NO: 2835; WAN024CV8; Start 624; Stop 648
gattcctacctttaataaacgctta

SEQ ID NO: 338382 - DNA, 25 bp, Artificial
  probe
  misc_feature (1)..(25): SEQ ID NO: 2836; WAN024AWM; Start 731; Stop 755
atatccttgaagaaagtgggtttga

SEQ ID NO: 338383 - DNA, 25 bp, Artificial
  probe
  misc_feature (1)..(25): SEQ ID NO: 2836; WAN024AWM; Start 732; Stop 756
tatccttgaagaaagtgggtttgaa

SEQ ID NO: 338384 - DNA, 25 bp, Artificial
  probe
  misc_feature (1)..(25): SEQ ID NO: 2836; WAN024AWM; Start 730; Stop 754
aatatccttgaagaaagtgggtttg

SEQ ID NO: 338385 - DNA, 25 bp, Artificial
  probe
  misc_feature (1)..(25): SEQ ID NO: 2836; WAN024AWM; Start 715; Stop 739
aagcgatttgtcatcaatatccttg

SEQ ID NO: 338386 - DNA, 25 bp, Artificial
  probe
  misc_feature (1)..(25): SEQ ID NO: 2836; WAN024AWM; Start 714; Stop 738
caagcgatttgtcatcaatatcctt

SEQ ID NO: 338387 - DNA, 25 bp, Artificial
  probe
  misc_feature (1)..(25): SEQ ID NO: 2836; WAN024AWM; Start 443; Stop 467
ctagttcgcttatcttccctcattt

SEQ ID NO: 338388 - DNA, 25 bp, Artificial
  probe
  misc_feature (1)..(25): SEQ ID NO: 2836; WAN024AWM; Start 729; Stop 753
caatatccttgaagaaagtgggttt

SEQ ID NO: 338389 - DNA, 25 bp, Artificial
  probe
  misc_feature (1)..(25): SEQ ID NO: 2836; WAN024AWM; Start 733; Stop 757
atccttgaagaaagtgggtttgaag

SEQ ID NO: 338390 - DNA, 25 bp, Artificial
  probe
  misc_feature (1)..(25): SEQ ID NO: 2836; WAN024AWM; Start 739; Stop 763
gaagaaagtgggtttgaagtcaatc

SEQ ID NO: 338391 - DNA, 25 bp, Artificial
  probe
  misc_feature (1)..(25): SEQ ID NO: 2836; WAN024AWM; Start 736; Stop 760
cttgaagaaagtgggtttgaagtca

SEQ ID NO: 338392 - DNA, 25 bp, Artificial
  probe
  misc_feature (1)..(25): SEQ ID NO: 2836; WAN024AWM; Start 513; Stop 537
aacattgccaatcgaagacttgatg

SEQ ID NO: 338393 - DNA, 25 bp, Artificial
  probe
  misc_feature (1)..(25): SEQ ID NO: 2836; WAN024AWM; Start 442; Stop 466
cctagttcgcttatcttccctcatt

SEQ ID NO: 338394 - DNA, 25 bp, Artificial
  probe
  misc_feature (1)..(25): SEQ ID NO: 2836; WAN024AWM; Start 738; Stop 762
tgaagaaagtgggtttgaagtcaat

SEQ ID NO: 338395 - DNA, 25 bp, Artificial
  probe
  misc_feature (1)..(25): SEQ ID NO: 2836; WAN024AWM; Start 735; Stop 759
ccttgaagaaagtgggtttgaagtc

SEQ ID NO: 338396 - DNA, 25 bp, Artificial
  probe
  misc_feature (1)..(25): SEQ ID NO: 2836; WAN024AWM; Start 740; Stop 764
aagaaagtgggtttgaagtcaatcc

SEQ ID NO: 338397 - DNA, 25 bp, Artificial
  probe
  misc_feature (1)..(25): SEQ ID NO: 2836; WAN024AWM; Start 734; Stop 758
tccttgaagaaagtgggtttgaagt

SEQ ID NO: 338398 - DNA, 25 bp, Artificial
  probe
  misc_feature (1)..(25): SEQ ID NO: 2836; WAN024AWM; Start 439; Stop 463
catcctagttcgcttatcttccctc

SEQ ID NO: 338399 - DNA, 25 bp, Artificial
  probe
  misc_feature (1)..(25): SEQ ID NO: 2836; WAN024AWM; Start 435; Stop 459
tcagcatcctagttcgcttatcttc

SEQ ID NO: 338400 - DNA, 25 bp, Artificial
  probe
  misc_feature (1)..(25): SEQ ID NO: 2836; WAN024AWM; Start 434; Stop 458
ctcagcatcctagttcgcttatctt

SEQ ID NO: 338401 - DNA, 25 bp, Artificial
  probe
  misc_feature (1)..(25): SEQ ID NO: 2836; WAN024AWM; Start 750; Stop 774
gtttgaagtcaatcctgagacagag

SEQ ID NO: 338402 - DNA, 25 bp, Artificial
  probe
  misc_feature (1)..(25): SEQ ID NO: 2836; WAN024AWM; Start 441; Stop 465
tcctagttcgcttatcttccctcat

SEQ ID NO: 338403 - DNA, 25 bp, Artificial
  probe
  misc_feature (1)..(25): SEQ ID NO: 2836; WAN024AWM; Start 440; Stop 464
atcctagttcgcttatcttccctca

SEQ ID NO: 338404 - DNA, 25 bp, Artificial
  probe
  misc_feature (1)..(25): SEQ ID NO: 2836; WAN024AWM; Start 529; Stop 553
gacttgatggtggctttctttgaac

SEQ ID NO: 338405 - DNA, 25 bp, Artificial
  probe
  misc_feature (1)..(25): SEQ ID NO: 2836; WAN024AWM; Start 742; Stop 766
gaaagtgggtttgaagtcaatcctg

SEQ ID NO: 338406 - DNA, 25 bp, Artificial
  probe
  misc_feature (1)..(25): SEQ ID NO: 2836; WAN024AWM; Start 741; Stop 765
agaaagtgggtttgaagtcaatcct

SEQ ID NO: 338407 - DNA, 25 bp, Artificial
  probe
  misc_feature (1)..(25): SEQ ID NO: 2836; WAN024AWM; Start 528; Stop 552
agacttgatggtggctttctttgaa

SEQ ID NO: 338408 - DNA, 25 bp, Artificial
  probe
  misc_feature (1)..(25): SEQ ID NO: 2836; WAN024AWM; Start 406; Stop 430
atcatgtttaacccagttatggctc

SEQ ID NO: 338409 - DNA, 25 bp, Artificial
  probe
  misc_feature (1)..(25): SEQ ID NO: 2836; WAN024AWM; Start 743; Stop 767
aaagtgggtttgaagtcaatcctga

SEQ ID NO: 338410 - DNA, 25 bp, Artificial
  probe
  misc_feature (1)..(25): SEQ ID NO: 2836; WAN024AWM; Start 512; Stop 536
aaacattgccaatcgaagacttgat

SEQ ID NO: 338411 - DNA, 25 bp, Artificial
  probe
  misc_feature (1)..(25): SEQ ID NO: 2836; WAN024AWM; Start 507; Stop 531
ctttgaaacattgccaatcgaagac

SEQ ID NO: 338412 - DNA, 25 bp, Artificial
  probe
  misc_feature (1)..(25): SEQ ID NO: 2836; WAN024AWM; Start 754; Stop 778
gaagtcaatcctgagacagagcttg

SEQ ID NO: 338413 - DNA, 25 bp, Artificial
  probe
  misc_feature (1)..(25): SEQ ID NO: 2836; WAN024AWM; Start 444; Stop 468
tagttcgcttatcttccctcatttt

SEQ ID NO: 338414 - DNA, 25 bp, Artificial
  probe
  misc_feature (1)..(25): SEQ ID NO: 2836; WAN024AWM; Start 451; Stop 475
cttatcttccctcattttggctttg

SEQ ID NO: 338415 - DNA, 25 bp, Artificial
  probe
  misc_feature (1)..(25): SEQ ID NO: 2837; WAN024AXU; Start 82; Stop 106
ctttgtcaacaaatttactttcttg

SEQ ID NO: 338416 - DNA, 25 bp, Artificial
  probe
  misc_feature (1)..(25): SEQ ID NO: 2837; WAN024AXU; Start 81; Stop 105
tctttgtcaacaaatttactttctt

SEQ ID NO: 338417 - DNA, 25 bp, Artificial
  probe
  misc_feature (1)..(25): SEQ ID NO: 2837; WAN024AXU; Start 80; Stop 104
ttctttgtcaacaaatttactttct

SEQ ID NO: 338418 - DNA, 25 bp, Artificial
  probe
  misc_feature (1)..(25): SEQ ID NO: 2837; WAN024AXU; Start 78; Stop 102
tcttctttgtcaacaaatttacttt

SEQ ID NO: 338419 - DNA, 25 bp, Artificial
  probe
  misc_feature (1)..(25): SEQ ID NO: 2837; WAN024AXU; Start 83; Stop 107
tttgtcaacaaatttactttcttgt

SEQ ID NO: 338420 - DNA, 25 bp, Artificial
  probe
  misc_feature (1)..(25): SEQ ID NO: 2837; WAN024AXU; Start 79; Stop 103
cttctttgtcaacaaatttactttc

SEQ ID NO: 338421 - DNA, 25 bp, Artificial
  probe
  misc_feature (1)..(25): SEQ ID NO: 2837; WAN024AXU; Start 77; Stop 101
atcttctttgtcaacaaatttactt

SEQ ID NO: 338422 - DNA, 25 bp, Artificial
  probe
  misc_feature (1)..(25): SEQ ID NO: 2837; WAN024AXU; Start 76; Stop 100
aatcttctttgtcaacaaatttact

SEQ ID NO: 338423 - DNA, 25 bp, Artificial
  probe
  misc_feature (1)..(25): SEQ ID NO: 2837; WAN024AXU; Start 75; Stop 99
aaatcttctttgtcaacaaatttac

SEQ ID NO: 338424 - DNA, 25 bp, Artificial
  probe
  misc_feature (1)..(25): SEQ ID NO: 2837; WAN024AXU; Start 95; Stop 119
tttactttcttgttttaaacatgct

SEQ ID NO: 338425 - DNA, 25 bp, Artificial
  probe
  misc_feature (1)..(25): SEQ ID NO: 2837; WAN024AXU; Start 96; Stop 120
ttactttcttgttttaaacatgcta

SEQ ID NO: 338426 - DNA, 25 bp, Artificial
  probe
  misc_feature (1)..(25): SEQ ID NO: 2837; WAN024AXU; Start 94; Stop 118
atttactttcttgttttaaacatgc

SEQ ID NO: 338427 - DNA, 25 bp, Artificial
  probe
  misc_feature (1)..(25): SEQ ID NO: 2838; WAN024B3E; Start 224; Stop 248
tcgttgtattattactggcatggtt

SEQ ID NO: 338428 - DNA, 25 bp, Artificial
  probe
  misc_feature (1)..(25): SEQ ID NO: 2838; WAN024B3E; Start 223; Stop 247
ttcgttgtattattactggcatggt

SEQ ID NO: 338429 - DNA, 25 bp, Artificial
  probe
  misc_feature (1)..(25): SEQ ID NO: 2838; WAN024B3E; Start 219; Stop 243
tgatttcgttgtattattactggca

SEQ ID NO: 338430 - DNA, 25 bp, Artificial
  probe
  misc_feature (1)..(25): SEQ ID NO: 2838; WAN024B3E; Start 218; Stop 242
ctgatttcgttgtattattactggc

SEQ ID NO: 338431 - DNA, 25 bp, Artificial
  probe
  misc_feature (1)..(25): SEQ ID NO: 2838; WAN024B3E; Start 557; Stop 581
tactggctctaaacatgacatcaat

SEQ ID NO: 338432 - DNA, 25 bp, Artificial
  probe
  misc_feature (1)..(25): SEQ ID NO: 2838; WAN024B3E; Start 556; Stop 580
atactggctctaaacatgacatcaa

SEQ ID NO: 338433 - DNA, 25 bp, Artificial
  probe
  misc_feature (1)..(25): SEQ ID NO: 2838; WAN024B3E; Start 555; Stop 579
aatactggctctaaacatgacatca

SEQ ID NO: 338434 - DNA, 25 bp, Artificial
  probe
  misc_feature (1)..(25): SEQ ID NO: 2838; WAN024B3E; Start 225; Stop 249
cgttgtattattactggcatggttt

SEQ ID NO: 338435 - DNA, 25 bp, Artificial
  probe
  misc_feature (1)..(25): SEQ ID NO: 2838; WAN024B3E; Start 222; Stop 246
tttcgttgtattattactggcatgg

SEQ ID NO: 338436 - DNA, 25 bp, Artificial
  probe
  misc_feature (1)..(25): SEQ ID NO: 2838; WAN024B3E; Start 561; Stop 585
ggctctaaacatgacatcaattaca

SEQ ID NO: 338437 - DNA, 25 bp, Artificial
  probe
  misc_feature (1)..(25): SEQ ID NO: 2838; WAN024B3E; Start 560; Stop 584
tggctctaaacatgacatcaattac

SEQ ID NO: 338438 - DNA, 25 bp, Artificial
  probe
  misc_feature (1)..(25): SEQ ID NO: 2838; WAN024B3E; Start 558; Stop 582
actggctctaaacatgacatcaatt

SEQ ID NO: 338439 - DNA, 25 bp, Artificial
  probe
  misc_feature (1)..(25): SEQ ID NO: 2838; WAN024B3E; Start 436; Stop 460
gcattatctgggatttcattgattt

SEQ ID NO: 338440 - DNA, 25 bp, Artificial
  probe
  misc_feature (1)..(25): SEQ ID NO: 2838; WAN024B3E; Start 559; Stop 583
ctggctctaaacatgacatcaatta

SEQ ID NO: 338441 - DNA, 25 bp, Artificial
  probe
  misc_feature (1)..(25): SEQ ID NO: 2838; WAN024B3E; Start 220; Stop 244
gatttcgttgtattattactggcat

SEQ ID NO: 338442 - DNA, 25 bp, Artificial
  probe
  misc_feature (1)..(25): SEQ ID NO: 2838; WAN024B3E; Start 385; Stop 409
ggaatagtagctgctcatttaaacg

SEQ ID NO: 338443 - DNA, 25 bp, Artificial
  probe
  misc_feature (1)..(25): SEQ ID NO: 2838; WAN024B3E; Start 387; Stop 411
aatagtagctgctcatttaaacgac

SEQ ID NO: 338444 - DNA, 25 bp, Artificial
  probe
  misc_feature (1)..(25): SEQ ID NO: 2838; WAN024B3E; Start 562; Stop 586
gctctaaacatgacatcaattacag

SEQ ID NO: 338445 - DNA, 25 bp, Artificial
  probe
  misc_feature (1)..(25): SEQ ID NO: 2838; WAN024B3E; Start 386; Stop 410
gaatagtagctgctcatttaaacga

SEQ ID NO: 338446 - DNA, 25 bp, Artificial
  probe
  misc_feature (1)..(25): SEQ ID NO: 2838; WAN024B3E; Start 279; Stop 303
agtagatgggaacttagccagatat

SEQ ID NO: 338447 - DNA, 25 bp, Artificial
  probe
  misc_feature (1)..(25): SEQ ID NO: 2838; WAN024B3E; Start 384; Stop 408
aggaatagtagctgctcatttaaac

SEQ ID NO: 338448 - DNA, 25 bp, Artificial
  probe
  misc_feature (1)..(25): SEQ ID NO: 2838; WAN024B3E; Start 221; Stop 245
atttcgttgtattattactggcatg

SEQ ID NO: 338449 - DNA, 25 bp, Artificial
  probe
  misc_feature (1)..(25): SEQ ID NO: 2838; WAN024B3E; Start 564; Stop 588
tctaaacatgacatcaattacagga

SEQ ID NO: 338450 - DNA, 25 bp, Artificial
  probe
  misc_feature (1)..(25): SEQ ID NO: 2838; WAN024B3E; Start 388; Stop 412
atagtagctgctcatttaaacgact

SEQ ID NO: 338451 - DNA, 25 bp, Artificial
  probe
  misc_feature (1)..(25): SEQ ID NO: 2838; WAN024B3E; Start 278; Stop 302
gagtagatgggaacttagccagata

SEQ ID NO: 338452 - DNA, 25 bp, Artificial
  probe
  misc_feature (1)..(25): SEQ ID NO: 2838; WAN024B3E; Start 434; Stop 458
gtgcattatctgggatttcattgat

SEQ ID NO: 338453 - DNA, 25 bp, Artificial
  probe
  misc_feature (1)..(25): SEQ ID NO: 2838; WAN024B3E; Start 217; Stop 241
actgatttcgttgtattattactgg

SEQ ID NO: 338454 - DNA, 25 bp, Artificial
  probe
  misc_feature (1)..(25): SEQ ID NO: 2838; WAN024B3E; Start 389; Stop 413
tagtagctgctcatttaaacgactc

SEQ ID NO: 338455 - DNA, 25 bp, Artificial
  probe
  misc_feature (1)..(25): SEQ ID NO: 2838; WAN024B3E; Start 563; Stop 587
ctctaaacatgacatcaattacagg

SEQ ID NO: 338456 - DNA, 25 bp, Artificial
  probe
  misc_feature (1)..(25): SEQ ID NO: 2838; WAN024B3E; Start 485; Stop 509
atatcaatacagtagctcaagatga

SEQ ID NO: 338457 - DNA, 25 bp, Artificial
  probe
  misc_feature (1)..(25): SEQ ID NO: 2838; WAN024B3E; Start 435; Stop 459
tgcattatctgggatttcattgatt

SEQ ID NO: 338458 - DNA, 25 bp, Artificial
  probe
  misc_feature (1)..(25): SEQ ID NO: 2838; WAN024B3E; Start 396; Stop 420
tgctcatttaaacgactcagatatc

SEQ ID NO: 338459 - DNA, 25 bp, Artificial
  probe
  misc_feature (1)..(25): SEQ ID NO: 2838; WAN024B3E; Start 433; Stop 457
ggtgcattatctgggatttcattga

SEQ ID NO: 338460 - DNA, 25 bp, Artificial
  probe
  misc_feature (1)..(25): SEQ ID NO: 2839; WAN024GKQ; Start 375; Stop 399
gttacgccaagtcatcaatgttatt

SEQ ID NO: 338461 - DNA, 25 bp, Artificial
  probe
  misc_feature (1)..(25): SEQ ID NO: 2839; WAN024GKQ; Start 224; Stop 248
tattgacaggcgatgaattacttga

SEQ ID NO: 338462 - DNA, 25 bp, Artificial
  probe
  misc_feature (1)..(25): SEQ ID NO: 2839; WAN024GKQ; Start 223; Stop 247
gtattgacaggcgatgaattacttg

SEQ ID NO: 338463 - DNA, 25 bp, Artificial
  probe
  misc_feature (1)..(25): SEQ ID NO: 2839; WAN024GKQ; Start 374; Stop 398
tgttacgccaagtcatcaatgttat

SEQ ID NO: 338464 - DNA, 25 bp, Artificial
  probe
  misc_feature (1)..(25): SEQ ID NO: 2839; WAN024GKQ; Start 225; Stop 249
attgacaggcgatgaattacttgat

SEQ ID NO: 338465 - DNA, 25 bp, Artificial
  probe
  misc_feature (1)..(25): SEQ ID NO: 2839; WAN024GKQ; Start 226; Stop 250
ttgacaggcgatgaattacttgatt

SEQ ID NO: 338466 - DNA, 25 bp, Artificial
  probe
  misc_feature (1)..(25): SEQ ID NO: 2839; WAN024GKQ; Start 222; Stop 246
ggtattgacaggcgatgaattactt

SEQ ID NO: 338467 - DNA, 25 bp, Artificial
  probe
  misc_feature (1)..(25): SEQ ID NO: 2839; WAN024GKQ; Start 138; Stop 162
ggaattagaagaagacgagtatgag

SEQ ID NO: 338468 - DNA, 25 bp, Artificial
  probe
  misc_feature (1)..(25): SEQ ID NO: 2839; WAN024GKQ; Start 338; Stop 362
ttgaagatgcgaacaactatatgaa

SEQ ID NO: 338469 - DNA, 25 bp, Artificial
  probe
  misc_feature (1)..(25): SEQ ID NO: 2839; WAN024GKQ; Start 373; Stop 397
ttgttacgccaagtcatcaatgtta

SEQ ID NO: 338470 - DNA, 25 bp, Artificial
  probe
  misc_feature (1)..(25): SEQ ID NO: 2839; WAN024GKQ; Start 144; Stop 168
agaagaagacgagtatgagtcaatt

SEQ ID NO: 338471 - DNA, 25 bp, Artificial
  probe
  misc_feature (1)..(25): SEQ ID NO: 2839; WAN024GKQ; Start 139; Stop 163
gaattagaagaagacgagtatgagt

SEQ ID NO: 338472 - DNA, 25 bp, Artificial
  probe
  misc_feature (1)..(25): SEQ ID NO: 2839; WAN024GKQ; Start 1289; Stop 1313
ctagtgaattggctgagttgaatta

SEQ ID NO: 338473 - DNA, 25 bp, Artificial
  probe
  misc_feature (1)..(25): SEQ ID NO: 2839; WAN024GKQ; Start 142; Stop 166
ttagaagaagacgagtatgagtcaa

SEQ ID NO: 338474 - DNA, 25 bp, Artificial
  probe
  misc_feature (1)..(25): SEQ ID NO: 2839; WAN024GKQ; Start 1043; Stop 1067
cgattattaggttgcctcatagtgt

SEQ ID NO: 338475 - DNA, 25 bp, Artificial
  probe
  misc_feature (1)..(25): SEQ ID NO: 2839; WAN024GKQ; Start 1042; Stop 1066
acgattattaggttgcctcatagtg

SEQ ID NO: 338476 - DNA, 25 bp, Artificial
  probe
  misc_feature (1)..(25): SEQ ID NO: 2839; WAN024GKQ; Start 1046; Stop 1070
ttattaggttgcctcatagtgtctt

SEQ ID NO: 338477 - DNA, 25 bp, Artificial
  probe
  misc_feature (1)..(25): SEQ ID NO: 2839; WAN024GKQ; Start 148; Stop 172
gaagacgagtatgagtcaattatcc

SEQ ID NO: 338478 - DNA, 25 bp, Artificial
  probe
  misc_feature (1)..(25): SEQ ID NO: 2839; WAN024GKQ; Start 1045; Stop 1069
attattaggttgcctcatagtgtct

SEQ ID NO: 338479 - DNA, 25 bp, Artificial
  probe
  misc_feature (1)..(25): SEQ ID NO: 2839; WAN024GKQ; Start 143; Stop 167
tagaagaagacgagtatgagtcaat

SEQ ID NO: 338480 - DNA, 25 bp, Artificial
  probe
  misc_feature (1)..(25): SEQ ID NO: 2839; WAN024GKQ; Start 141; Stop 165
attagaagaagacgagtatgagtca

SEQ ID NO: 338481 - DNA, 25 bp, Artificial
  probe
  misc_feature (1)..(25): SEQ ID NO: 2839; WAN024GKQ; Start 810; Stop 834
tgacattattatgatgaatccacct

SEQ ID NO: 338482 - DNA, 25 bp, Artificial
  probe
  misc_feature (1)..(25): SEQ ID NO: 2839; WAN024GKQ; Start 1291; Stop 1315
agtgaattggctgagttgaattata

SEQ ID NO: 338483 - DNA, 25 bp, Artificial
  probe
  misc_feature (1)..(25): SEQ ID NO: 2839; WAN024GKQ; Start 1290; Stop 1314
tagtgaattggctgagttgaattat

SEQ ID NO: 338484 - DNA, 25 bp, Artificial
  probe
  misc_feature (1)..(25): SEQ ID NO: 2839; WAN024GKQ; Start 1044; Stop 1068
gattattaggttgcctcatagtgtc

SEQ ID NO: 338485 - DNA, 25 bp, Artificial
  probe
  misc_feature (1)..(25): SEQ ID NO: 2839; WAN024GKQ; Start 1041; Stop 1065
tacgattattaggttgcctcatagt

SEQ ID NO: 338486 - DNA, 25 bp, Artificial
  probe
  misc_feature (1)..(25): SEQ ID NO: 2839; WAN024GKQ; Start 1287; Stop 1311
acctagtgaattggctgagttgaat

SEQ ID NO: 338487 - DNA, 25 bp, Artificial
  probe
  misc_feature (1)..(25): SEQ ID NO: 2839; WAN024GKQ; Start 1288; Stop 1312
cctagtgaattggctgagttgaatt

SEQ ID NO: 338488 - DNA, 25 bp, Artificial
  probe
  misc_feature (1)..(25): SEQ ID NO: 2839; WAN024GKQ; Start 1080; Stop 1104
tacaggaatccatacgaacattctt

SEQ ID NO: 338489 - DNA, 25 bp, Artificial
  probe
  misc_feature (1)..(25): SEQ ID NO: 2839; WAN024GKQ; Start 1079; Stop 1103
atacaggaatccatacgaacattct

SEQ ID NO: 338490 - DNA, 25 bp, Artificial
  probe
  misc_feature (1)..(25): SEQ ID NO: 2839; WAN024GKQ; Start 145; Stop 169
gaagaagacgagtatgagtcaatta

SEQ ID NO: 338491 - DNA, 25 bp, Artificial
  probe
  misc_feature (1)..(25): SEQ ID NO: 2839; WAN024GKQ; Start 1039; Stop 1063
catacgattattaggttgcctcata

SEQ ID NO: 338492 - DNA, 25 bp, Artificial
  probe
  misc_feature (1)..(25): SEQ ID NO: 2839; WAN024GKQ; Start 113; Stop 137
tttatgatagccgtgaaatggtttg

SEQ ID NO: 338493 - DNA, 25 bp, Artificial
  probe
  misc_feature (1)..(25): SEQ ID NO: 2840; WAN024G56; Start 1004; Stop 1028
gtgctgctaactcaatccttatcaa

SEQ ID NO: 338494 - DNA, 25 bp, Artificial
  probe
  misc_feature (1)..(25): SEQ ID NO: 2840; WAN024G56; Start 864; Stop 888
cactattgaagatggtatggatgaa

SEQ ID NO: 338495 - DNA, 25 bp, Artificial
  probe
  misc_feature (1)..(25): SEQ ID NO: 2840; WAN024G56; Start 863; Stop 887
tcactattgaagatggtatggatga

SEQ ID NO: 338496 - DNA, 25 bp, Artificial
  probe
  misc_feature (1)..(25): SEQ ID NO: 2840; WAN024G56; Start 862; Stop 886
atcactattgaagatggtatggatg

SEQ ID NO: 338497 - DNA, 25 bp, Artificial
  probe
  misc_feature (1)..(25): SEQ ID NO: 2840; WAN024G56; Start 1256; Stop 1280
aagtagctgaatatcgtggattgaa

SEQ ID NO: 338498 - DNA, 25 bp, Artificial
  probe
  misc_feature (1)..(25): SEQ ID NO: 2840; WAN024G56; Start 1255; Stop 1279
gaagtagctgaatatcgtggattga

SEQ ID NO: 338499 - DNA, 25 bp, Artificial
  probe
  misc_feature (1)..(25): SEQ ID NO: 2840; WAN024G56; Start 1254; Stop 1278
tgaagtagctgaatatcgtggattg

SEQ ID NO: 338500 - DNA, 25 bp, Artificial
  probe
  misc_feature (1)..(25): SEQ ID NO: 2840; WAN024G56; Start 1253; Stop 1277
gtgaagtagctgaatatcgtggatt

SEQ ID NO: 338501 - DNA, 25 bp, Artificial
  probe
  misc_feature (1)..(25): SEQ ID NO: 2840; WAN024G56; Start 1003; Stop 1027
ggtgctgctaactcaatccttatca

SEQ ID NO: 338502 - DNA, 25 bp, Artificial
  probe
  misc_feature (1)..(25): SEQ ID NO: 2840; WAN024G56; Start 217; Stop 241
aacatcattgctgaagctatcattg

SEQ ID NO: 338503 - DNA, 25 bp, Artificial
  probe
  misc_feature (1)..(25): SEQ ID NO: 2840; WAN024G56; Start 216; Stop 240
caacatcattgctgaagctatcatt

SEQ ID NO: 338504 - DNA, 25 bp, Artificial
  probe
  misc_feature (1)..(25): SEQ ID NO: 2840; WAN024G56; Start 956; Stop 980
acttcttcgtaacaaacactgacta

SEQ ID NO: 338505 - DNA, 25 bp, Artificial
  probe
  misc_feature (1)..(25): SEQ ID NO: 2840; WAN024G56; Start 368; Stop 392
ctgactaccttgaaatcccacttta

SEQ ID NO: 338506 - DNA, 25 bp, Artificial
  probe
  misc_feature (1)..(25): SEQ ID NO: 2840; WAN024G56; Start 957; Stop 981
cttcttcgtaacaaacactgactac

SEQ ID NO: 338507 - DNA, 25 bp, Artificial
  probe
  misc_feature (1)..(25): SEQ ID NO: 2840; WAN024G56; Start 371; Stop 395
actaccttgaaatcccactttacag

SEQ ID NO: 338508 - DNA, 25 bp, Artificial
  probe
  misc_feature (1)..(25): SEQ ID NO: 2840; WAN024G56; Start 370; Stop 394
gactaccttgaaatcccactttaca

SEQ ID NO: 338509 - DNA, 25 bp, Artificial
  probe
  misc_feature (1)..(25): SEQ ID NO: 2840; WAN024G56; Start 369; Stop 393
tgactaccttgaaatcccactttac

SEQ ID NO: 338510 - DNA, 25 bp, Artificial
  probe
  misc_feature (1)..(25): SEQ ID NO: 2840; WAN024G56; Start 1005; Stop 1029
tgctgctaactcaatccttatcaaa

SEQ ID NO: 338511 - DNA, 25 bp, Artificial
  probe
  misc_feature (1)..(25): SEQ ID NO: 2840; WAN024G56; Start 1127; Stop 1151
ctgaagattcaacaatcgctgatat

SEQ ID NO: 338512 - DNA, 25 bp, Artificial
  probe
  misc_feature (1)..(25): SEQ ID NO: 2840; WAN024G56; Start 1126; Stop 1150
actgaagattcaacaatcgctgata

SEQ ID NO: 338513 - DNA, 25 bp, Artificial
  probe
  misc_feature (1)..(25): SEQ ID NO: 2840; WAN024G56; Start 644; Stop 668
ctgaagatggtgttgaaactatcct

SEQ ID NO: 338514 - DNA, 25 bp, Artificial
  probe
  misc_feature (1)..(25): SEQ ID NO: 2840; WAN024G56; Start 6; Stop 30
aattattactgatgtttacgctcgc

SEQ ID NO: 338515 - DNA, 25 bp, Artificial
  probe
  misc_feature (1)..(25): SEQ ID NO: 2840; WAN024G56; Start 1006; Stop 1030
gctgctaactcaatccttatcaaag

SEQ ID NO: 338516 - DNA, 25 bp, Artificial
  probe
  misc_feature (1)..(25): SEQ ID NO: 2840; WAN024G56; Start 1249; Stop 1273
cttggtgaagtagctgaatatcgtg

SEQ ID NO: 338517 - DNA, 25 bp, Artificial
  probe
  misc_feature (1)..(25): SEQ ID NO: 2840; WAN024G56; Start 646; Stop 670
gaagatggtgttgaaactatccttg

SEQ ID NO: 338518 - DNA, 25 bp, Artificial
  probe
  misc_feature (1)..(25): SEQ ID NO: 2840; WAN024G56; Start 645; Stop 669
tgaagatggtgttgaaactatcctt

SEQ ID NO: 338519 - DNA, 25 bp, Artificial
  probe
  misc_feature (1)..(25): SEQ ID NO: 2840; WAN024G56; Start 643; Stop 667
actgaagatggtgttgaaactatcc

SEQ ID NO: 338520 - DNA, 25 bp, Artificial
  probe
  misc_feature (1)..(25): SEQ ID NO: 2840; WAN024G56; Start 215; Stop 239
acaacatcattgctgaagctatcat

SEQ ID NO: 338521 - DNA, 25 bp, Artificial
  probe
  misc_feature (1)..(25): SEQ ID NO: 2840; WAN024G56; Start 1172; Stop 1196
gacaaatcaagactggttcactttc

SEQ ID NO: 338522 - DNA, 25 bp, Artificial
  probe
  misc_feature (1)..(25): SEQ ID NO: 2840; WAN024G56; Start 960; Stop 984
cttcgtaacaaacactgactacctt

SEQ ID NO: 338523 - DNA, 25 bp, Artificial
  probe
  misc_feature (1)..(25): SEQ ID NO: 2840; WAN024G56; Start 958; Stop 982
ttcttcgtaacaaacactgactacc

SEQ ID NO: 338524 - DNA, 25 bp, Artificial
  probe
  misc_feature (1)..(25): SEQ ID NO: 2840; WAN024G56; Start 955; Stop 979
gacttcttcgtaacaaacactgact

SEQ ID NO: 338525 - DNA, 25 bp, Artificial
  probe
  misc_feature (1)..(25): SEQ ID NO: 2840; WAN024G56; Start 1174; Stop 1198
caaatcaagactggttcactttcac

SEQ ID NO: 338526 - DNA, 25 bp, Artificial
  probe
  misc_feature (1)..(25): SEQ ID NO: 2841; WAN024DH9; Start 583; Stop 607
gcgactcataatagccagattgtaa

SEQ ID NO: 338527 - DNA, 25 bp, Artificial
  probe
  misc_feature (1)..(25): SEQ ID NO: 2841; WAN024DH9; Start 139; Stop 163
attcgttctctgtatcgtgaagtaa

SEQ ID NO: 338528 - DNA, 25 bp, Artificial
  probe
  misc_feature (1)..(25): SEQ ID NO: 2841; WAN024DH9; Start 137; Stop 161
ttattcgttctctgtatcgtgaagt

SEQ ID NO: 338529 - DNA, 25 bp, Artificial
  probe
  misc_feature (1)..(25): SEQ ID NO: 2841; WAN024DH9; Start 138; Stop 162
tattcgttctctgtatcgtgaagta

SEQ ID NO: 338530 - DNA, 25 bp, Artificial
  probe
  misc_feature (1)..(25): SEQ ID NO: 2841; WAN024DH9; Start 382; Stop 406
ggattgaagcataaggttcgttctt

SEQ ID NO: 338531 - DNA, 25 bp, Artificial
  probe
  misc_feature (1)..(25): SEQ ID NO: 2841; WAN024DH9; Start 668; Stop 692
aaggagagtatggatacgatgatta

SEQ ID NO: 338532 - DNA, 25 bp, Artificial
  probe
  misc_feature (1)..(25): SEQ ID NO: 2841; WAN024DH9; Start 376; Stop 400
ttggttggattgaagcataaggttc

SEQ ID NO: 338533 - DNA, 25 bp, Artificial
  probe
  misc_feature (1)..(25): SEQ ID NO: 2841; WAN024DH9; Start 375; Stop 399
cttggttggattgaagcataaggtt

SEQ ID NO: 338534 - DNA, 25 bp, Artificial
  probe
  misc_feature (1)..(25): SEQ ID NO: 2841; WAN024DH9; Start 380; Stop 404
ttggattgaagcataaggttcgttc

SEQ ID NO: 338535 - DNA, 25 bp, Artificial
  probe
  misc_feature (1)..(25): SEQ ID NO: 2841; WAN024DH9; Start 379; Stop 403
gttggattgaagcataaggttcgtt

SEQ ID NO: 338536 - DNA, 25 bp, Artificial
  probe
  misc_feature (1)..(25): SEQ ID NO: 2841; WAN024DH9; Start 373; Stop 397
gacttggttggattgaagcataagg

SEQ ID NO: 338537 - DNA, 25 bp, Artificial
  probe
  misc_feature (1)..(25): SEQ ID NO: 2841; WAN024DH9; Start 372; Stop 396
ggacttggttggattgaagcataag

SEQ ID NO: 338538 - DNA, 25 bp, Artificial
  probe
  misc_feature (1)..(25): SEQ ID NO: 2841; WAN024DH9; Start 381; Stop 405
tggattgaagcataaggttcgttct

SEQ ID NO: 338539 - DNA, 25 bp, Artificial
  probe
  misc_feature (1)..(25): SEQ ID NO: 2841; WAN024DH9; Start 303; Stop 327
tattgcttacgctatggaagtaatc

SEQ ID NO: 338540 - DNA, 25 bp, Artificial
  probe
  misc_feature (1)..(25): SEQ ID NO: 2841; WAN024DH9; Start 304; Stop 328
attgcttacgctatggaagtaatcg

SEQ ID NO: 338541 - DNA, 25 bp, Artificial
  probe
  misc_feature (1)..(25): SEQ ID NO: 2841; WAN024DH9; Start 374; Stop 398
acttggttggattgaagcataaggt

SEQ ID NO: 338542 - DNA, 25 bp, Artificial
  probe
  misc_feature (1)..(25): SEQ ID NO: 2841; WAN024DH9; Start 371; Stop 395
tggacttggttggattgaagcataa

SEQ ID NO: 338543 - DNA, 25 bp, Artificial
  probe
  misc_feature (1)..(25): SEQ ID NO: 2841; WAN024DH9; Start 370; Stop 394
ttggacttggttggattgaagcata

SEQ ID NO: 338544 - DNA, 25 bp, Artificial
  probe
  misc_feature (1)..(25): SEQ ID NO: 2841; WAN024DH9; Start 592; Stop 616
aatagccagattgtaaataccttgc

SEQ ID NO: 338545 - DNA, 25 bp, Artificial
  probe
  misc_feature (1)..(25): SEQ ID NO: 2841; WAN024DH9; Start 534; Stop 558
tatgaatctcttggaacggattaac

SEQ ID NO: 338546 - DNA, 25 bp, Artificial
  probe
  misc_feature (1)..(25): SEQ ID NO: 2841; WAN024DH9; Start 528; Stop 552
ggaaattatgaatctcttggaacgg

SEQ ID NO: 338547 - DNA, 25 bp, Artificial
  probe
  misc_feature (1)..(25): SEQ ID NO: 2841; WAN024DH9; Start 527; Stop 551
gggaaattatgaatctcttggaacg

SEQ ID NO: 338548 - DNA, 25 bp, Artificial
  probe
  misc_feature (1)..(25): SEQ ID NO: 2841; WAN024DH9; Start 384; Stop 408
attgaagcataaggttcgttctttc

SEQ ID NO: 338549 - DNA, 25 bp, Artificial
  probe
  misc_feature (1)..(25): SEQ ID NO: 2841; WAN024DH9; Start 383; Stop 407
gattgaagcataaggttcgttcttt

SEQ ID NO: 338550 - DNA, 25 bp, Artificial
  probe
  misc_feature (1)..(25): SEQ ID NO: 2841; WAN024DH9; Start 140; Stop 164
ttcgttctctgtatcgtgaagtaaa

SEQ ID NO: 338551 - DNA, 25 bp, Artificial
  probe
  misc_feature (1)..(25): SEQ ID NO: 2841; WAN024DH9; Start 531; Stop 555
aattatgaatctcttggaacggatt

SEQ ID NO: 338552 - DNA, 25 bp, Artificial
  probe
  misc_feature (1)..(25): SEQ ID NO: 2841; WAN024DH9; Start 392; Stop 416
ataaggttcgttctttcccaaatga

SEQ ID NO: 338553 - DNA, 25 bp, Artificial
  probe
  misc_feature (1)..(25): SEQ ID NO: 2841; WAN024DH9; Start 391; Stop 415
cataaggttcgttctttcccaaatg

SEQ ID NO: 338554 - DNA, 25 bp, Artificial
  probe
  misc_feature (1)..(25): SEQ ID NO: 2841; WAN024DH9; Start 529; Stop 553
gaaattatgaatctcttggaacgga

SEQ ID NO: 338555 - DNA, 25 bp, Artificial
  probe
  misc_feature (1)..(25): SEQ ID NO: 2841; WAN024DH9; Start 302; Stop 326
atattgcttacgctatggaagtaat

SEQ ID NO: 338556 - DNA, 25 bp, Artificial
  probe
  misc_feature (1)..(25): SEQ ID NO: 2841; WAN024DH9; Start 584; Stop 608
cgactcataatagccagattgtaaa

SEQ ID NO: 338557 - DNA, 25 bp, Artificial
  probe
  misc_feature (1)..(25): SEQ ID NO: 2841; WAN024DH9; Start 593; Stop 617
atagccagattgtaaataccttgcg

SEQ ID NO: 338558 - DNA, 25 bp, Artificial
  probe
  misc_feature (1)..(25): SEQ ID NO: 2841; WAN024DH9; Start 393; Stop 417
taaggttcgttctttcccaaatgaa

SEQ ID NO: 338559 - DNA, 25 bp, Artificial
  probe
  misc_feature (1)..(25): SEQ ID NO: 2842; WAN024CZE; Start 125; Stop 149
atccgtcagtaagttcattgttcaa

SEQ ID NO: 338560 - DNA, 25 bp, Artificial
  probe
  misc_feature (1)..(25): SEQ ID NO: 2842; WAN024CZE; Start 123; Stop 147
tcatccgtcagtaagttcattgttc

SEQ ID NO: 338561 - DNA, 25 bp, Artificial
  probe
  misc_feature (1)..(25): SEQ ID NO: 2842; WAN024CZE; Start 122; Stop 146
ctcatccgtcagtaagttcattgtt

SEQ ID NO: 338562 - DNA, 25 bp, Artificial
  probe
  misc_feature (1)..(25): SEQ ID NO: 2842; WAN024CZE; Start 124; Stop 148
catccgtcagtaagttcattgttca

SEQ ID NO: 338563 - DNA, 25 bp, Artificial
  probe
  misc_feature (1)..(25): SEQ ID NO: 2842; WAN024CZE; Start 235; Stop 259
tttgtcttatttgtgattggtgctg

SEQ ID NO: 338564 - DNA, 25 bp, Artificial
  probe
  misc_feature (1)..(25): SEQ ID NO: 2842; WAN024CZE; Start 113; Stop 137
aagaattggctcatccgtcagtaag

SEQ ID NO: 338565 - DNA, 25 bp, Artificial
  probe
  misc_feature (1)..(25): SEQ ID NO: 2842; WAN024CZE; Start 112; Stop 136
gaagaattggctcatccgtcagtaa

SEQ ID NO: 338566 - DNA, 25 bp, Artificial
  probe
  misc_feature (1)..(25): SEQ ID NO: 2842; WAN024CZE; Start 126; Stop 150
tccgtcagtaagttcattgttcaaa

SEQ ID NO: 338567 - DNA, 25 bp, Artificial
  probe
  misc_feature (1)..(25): SEQ ID NO: 2842; WAN024CZE; Start 121; Stop 145
gctcatccgtcagtaagttcattgt

SEQ ID NO: 338568 - DNA, 25 bp, Artificial
  probe
  misc_feature (1)..(25): SEQ ID NO: 2842; WAN024CZE; Start 116; Stop 140
aattggctcatccgtcagtaagttc

SEQ ID NO: 338569 - DNA, 25 bp, Artificial
  probe
  misc_feature (1)..(25): SEQ ID NO: 2842; WAN024CZE; Start 115; Stop 139
gaattggctcatccgtcagtaagtt

SEQ ID NO: 338570 - DNA, 25 bp, Artificial
  probe
  misc_feature (1)..(25): SEQ ID NO: 2842; WAN024CZE; Start 177; Stop 201
aggagtctttctcttgtatgtcatt

SEQ ID NO: 338571 - DNA, 25 bp, Artificial
  probe
  misc_feature (1)..(25): SEQ ID NO: 2842; WAN024CZE; Start 172; Stop 196
ctgctaggagtctttctcttgtatg

SEQ ID NO: 338572 - DNA, 25 bp, Artificial
  probe
  misc_feature (1)..(25): SEQ ID NO: 2842; WAN024CZE; Start 171; Stop 195
tctgctaggagtctttctcttgtat

SEQ ID NO: 338573 - DNA, 25 bp, Artificial
  probe
  misc_feature (1)..(25): SEQ ID NO: 2842; WAN024CZE; Start 174; Stop 198
gctaggagtctttctcttgtatgtc

SEQ ID NO: 338574 - DNA, 25 bp, Artificial
  probe
  misc_feature (1)..(25): SEQ ID NO: 2842; WAN024CZE; Start 178; Stop 202
ggagtctttctcttgtatgtcattt

SEQ ID NO: 338575 - DNA, 25 bp, Artificial
  probe
  misc_feature (1)..(25): SEQ ID NO: 2842; WAN024CZE; Start 175; Stop 199
ctaggagtctttctcttgtatgtca

SEQ ID NO: 338576 - DNA, 25 bp, Artificial
  probe
  misc_feature (1)..(25): SEQ ID NO: 2842; WAN024CZE; Start 176; Stop 200
taggagtctttctcttgtatgtcat

SEQ ID NO: 338577 - DNA, 25 bp, Artificial
  probe
  misc_feature (1)..(25): SEQ ID NO: 2842; WAN024CZE; Start 173; Stop 197
tgctaggagtctttctcttgtatgt

SEQ ID NO: 338578 - DNA, 25 bp, Artificial
  probe
  misc_feature (1)..(25): SEQ ID NO: 2842; WAN024CZE; Start 170; Stop 194
ctctgctaggagtctttctcttgta

SEQ ID NO: 338579 - DNA, 25 bp, Artificial
  probe
  misc_feature (1)..(25): SEQ ID NO: 2842; WAN024CZE; Start 163; Stop 187
tataaggctctgctaggagtctttc

SEQ ID NO: 338580 - DNA, 25 bp, Artificial
  probe
  misc_feature (1)..(25): SEQ ID NO: 2842; WAN024CZE; Start 120; Stop 144
ggctcatccgtcagtaagttcattg

SEQ ID NO: 338581 - DNA, 25 bp, Artificial
  probe
  misc_feature (1)..(25): SEQ ID NO: 2842; WAN024CZE; Start 236; Stop 260
ttgtcttatttgtgattggtgctgc

SEQ ID NO: 338582 - DNA, 25 bp, Artificial
  probe
  misc_feature (1)..(25): SEQ ID NO: 2842; WAN024CZE; Start 160; Stop 184
atttataaggctctgctaggagtct

SEQ ID NO: 338583 - DNA, 25 bp, Artificial
  probe
  misc_feature (1)..(25): SEQ ID NO: 2842; WAN024CZE; Start 114; Stop 138
agaattggctcatccgtcagtaagt

SEQ ID NO: 338584 - DNA, 25 bp, Artificial
  probe
  misc_feature (1)..(25): SEQ ID NO: 2842; WAN024CZE; Start 162; Stop 186
ttataaggctctgctaggagtcttt

SEQ ID NO: 338585 - DNA, 25 bp, Artificial
  probe
  misc_feature (1)..(25): SEQ ID NO: 2842; WAN024CZE; Start 161; Stop 185
tttataaggctctgctaggagtctt

SEQ ID NO: 338586 - DNA, 25 bp, Artificial
  probe
  misc_feature (1)..(25): SEQ ID NO: 2842; WAN024CZE; Start 119; Stop 143
tggctcatccgtcagtaagttcatt

SEQ ID NO: 338587 - DNA, 25 bp, Artificial
  probe
  misc_feature (1)..(25): SEQ ID NO: 2842; WAN024CZE; Start 118; Stop 142
ttggctcatccgtcagtaagttcat

SEQ ID NO: 338588 - DNA, 25 bp, Artificial
  probe
  misc_feature (1)..(25): SEQ ID NO: 2842; WAN024CZE; Start 117; Stop 141
attggctcatccgtcagtaagttca

SEQ ID NO: 338589 - DNA, 25 bp, Artificial
  probe
  misc_feature (1)..(25): SEQ ID NO: 2842; WAN024CZE; Start 298; Stop 322
ttgaaacaaggtggatcagctattt

SEQ ID NO: 338590 - DNA, 25 bp, Artificial
  probe
  misc_feature (1)..(25): SEQ ID NO: 2842; WAN024CZE; Start 297; Stop 321
tttgaaacaaggtggatcagctatt

SEQ ID NO: 338591 - DNA, 25 bp, Artificial
  probe
  misc_feature (1)..(25): SEQ ID NO: 2842; WAN024CZE; Start 242; Stop 266
tatttgtgattggtgctgcgactta

SEQ ID NO: 338592 - DNA, 25 bp, Artificial
  probe
  misc_feature (1)..(25): SEQ ID NO: 2843; WAN024CNJ; Start 23; Stop 47
tgacaatggattcaactactgatgc

SEQ ID NO: 338593 - DNA, 25 bp, Artificial
  probe
  misc_feature (1)..(25): SEQ ID NO: 2843; WAN024CNJ; Start 71; Stop 95
gcttgtccaattcattgtcaattct

SEQ ID NO: 338594 - DNA, 25 bp, Artificial
  probe
  misc_feature (1)..(25): SEQ ID NO: 2843; WAN024CNJ; Start 26; Stop 50
caatggattcaactactgatgcgtc

SEQ ID NO: 338595 - DNA, 25 bp, Artificial
  probe
  misc_feature (1)..(25): SEQ ID NO: 2843; WAN024CNJ; Start 24; Stop 48
gacaatggattcaactactgatgcg

SEQ ID NO: 338596 - DNA, 25 bp, Artificial
  probe
  misc_feature (1)..(25): SEQ ID NO: 2843; WAN024CNJ; Start 28; Stop 52
atggattcaactactgatgcgtcaa

SEQ ID NO: 338597 - DNA, 25 bp, Artificial
  probe
  misc_feature (1)..(25): SEQ ID NO: 2843; WAN024CNJ; Start 27; Stop 51
aatggattcaactactgatgcgtca

SEQ ID NO: 338598 - DNA, 25 bp, Artificial
  probe
  misc_feature (1)..(25): SEQ ID NO: 2843; WAN024CNJ; Start 70; Stop 94
agcttgtccaattcattgtcaattc

SEQ ID NO: 338599 - DNA, 25 bp, Artificial
  probe
  misc_feature (1)..(25): SEQ ID NO: 2843; WAN024CNJ; Start 69; Stop 93
cagcttgtccaattcattgtcaatt

SEQ ID NO: 338600 - DNA, 25 bp, Artificial
  probe
  misc_feature (1)..(25): SEQ ID NO: 2843; WAN024CNJ; Start 73; Stop 97
ttgtccaattcattgtcaattctag

SEQ ID NO: 338601 - DNA, 25 bp, Artificial
  probe
  misc_feature (1)..(25): SEQ ID NO: 2843; WAN024CNJ; Start 72; Stop 96
cttgtccaattcattgtcaattcta

SEQ ID NO: 338602 - DNA, 25 bp, Artificial
  probe
  misc_feature (1)..(25): SEQ ID NO: 2843; WAN024CNJ; Start 32; Stop 56
attcaactactgatgcgtcaacctt

SEQ ID NO: 338603 - DNA, 25 bp, Artificial
  probe
  misc_feature (1)..(25): SEQ ID NO: 2843; WAN024CNJ; Start 25; Stop 49
acaatggattcaactactgatgcgt

SEQ ID NO: 338604 - DNA, 25 bp, Artificial
  probe
  misc_feature (1)..(25): SEQ ID NO: 2843; WAN024CNJ; Start 68; Stop 92
acagcttgtccaattcattgtcaat

SEQ ID NO: 338605 - DNA, 25 bp, Artificial
  probe
  misc_feature (1)..(25): SEQ ID NO: 2843; WAN024CNJ; Start 31; Stop 55
gattcaactactgatgcgtcaacct

SEQ ID NO: 338606 - DNA, 25 bp, Artificial
  probe
  misc_feature (1)..(25): SEQ ID NO: 2843; WAN024CNJ; Start 22; Stop 46
ttgacaatggattcaactactgatg

SEQ ID NO: 338607 - DNA, 25 bp, Artificial
  probe
  misc_feature (1)..(25): SEQ ID NO: 2843; WAN024CNJ; Start 29; Stop 53
tggattcaactactgatgcgtcaac

SEQ ID NO: 338608 - DNA, 25 bp, Artificial
  probe
  misc_feature (1)..(25): SEQ ID NO: 2843; WAN024CNJ; Start 21; Stop 45
cttgacaatggattcaactactgat

SEQ ID NO: 338609 - DNA, 25 bp, Artificial
  probe
  misc_feature (1)..(25): SEQ ID NO: 2843; WAN024CNJ; Start 20; Stop 44
gcttgacaatggattcaactactga

SEQ ID NO: 338610 - DNA, 25 bp, Artificial
  probe
  misc_feature (1)..(25): SEQ ID NO: 2843; WAN024CNJ; Start 19; Stop 43
tgcttgacaatggattcaactactg

SEQ ID NO: 338611 - DNA, 25 bp, Artificial
  probe
  misc_feature (1)..(25): SEQ ID NO: 2843; WAN024CNJ; Start 18; Stop 42
gtgcttgacaatggattcaactact

SEQ ID NO: 338612 - DNA, 25 bp, Artificial
  probe
  misc_feature (1)..(25): SEQ ID NO: 2843; WAN024CNJ; Start 17; Stop 41
tgtgcttgacaatggattcaactac

SEQ ID NO: 338613 - DNA, 25 bp, Artificial
  probe
  misc_feature (1)..(25): SEQ ID NO: 2843; WAN024CNJ; Start 16; Stop 40
ttgtgcttgacaatggattcaacta

SEQ ID NO: 338614 - DNA, 25 bp, Artificial
  probe
  misc_feature (1)..(25): SEQ ID NO: 2843; WAN024CNJ; Start 74; Stop 98
tgtccaattcattgtcaattctaga

SEQ ID NO: 338615 - DNA, 25 bp, Artificial
  probe
  misc_feature (1)..(25): SEQ ID NO: 2843; WAN024CNJ; Start 30; Stop 54
ggattcaactactgatgcgtcaacc

SEQ ID NO: 338616 - DNA, 25 bp, Artificial
  probe
  misc_feature (1)..(25): SEQ ID NO: 2843; WAN024CNJ; Start 76; Stop 100
tccaattcattgtcaattctagagt

SEQ ID NO: 338617 - DNA, 25 bp, Artificial
  probe
  misc_feature (1)..(25): SEQ ID NO: 2843; WAN024CNJ; Start 33; Stop 57
ttcaactactgatgcgtcaaccttt

SEQ ID NO: 338618 - DNA, 25 bp, Artificial
  probe
  misc_feature (1)..(25): SEQ ID NO: 2843; WAN024CNJ; Start 75; Stop 99
gtccaattcattgtcaattctagag

SEQ ID NO: 338619 - DNA, 25 bp, Artificial
  probe
  misc_feature (1)..(25): SEQ ID NO: 2843; WAN024CNJ; Start 15; Stop 39
cttgtgcttgacaatggattcaact

SEQ ID NO: 338620 - DNA, 25 bp, Artificial
  probe
  misc_feature (1)..(25): SEQ ID NO: 2843; WAN024CNJ; Start 14; Stop 38
tcttgtgcttgacaatggattcaac

SEQ ID NO: 338621 - DNA, 25 bp, Artificial
  probe
  misc_feature (1)..(25): SEQ ID NO: 2843; WAN024CNJ; Start 13; Stop 37
gtcttgtgcttgacaatggattcaa

SEQ ID NO: 338622 - DNA, 25 bp, Artificial
  probe
  misc_feature (1)..(25): SEQ ID NO: 2843; WAN024CNJ; Start 77; Stop 101
ccaattcattgtcaattctagagta

SEQ ID NO: 338623 - DNA, 25 bp, Artificial
  probe
  misc_feature (1)..(25): SEQ ID NO: 2843; WAN024CNJ; Start 67; Stop 91
gacagcttgtccaattcattgtcaa

SEQ ID NO: 338624 - DNA, 25 bp, Artificial
  probe
  misc_feature (1)..(25): SEQ ID NO: 2843; WAN024CNJ; Start 12; Stop 36
ggtcttgtgcttgacaatggattca

SEQ ID NO: 338625 - DNA, 25 bp, Artificial
  probe
  misc_feature (1)..(25): SEQ ID NO: 2844; WAN024FZL; Start 1047; Stop 1071
tgattcaatccgatacttcctaaca

SEQ ID NO: 338626 - DNA, 25 bp, Artificial
  probe
  misc_feature (1)..(25): SEQ ID NO: 2844; WAN024FZL; Start 1045; Stop 1069
gctgattcaatccgatacttcctaa

SEQ ID NO: 338627 - DNA, 25 bp, Artificial
  probe
  misc_feature (1)..(25): SEQ ID NO: 2844; WAN024FZL; Start 132; Stop 156
ttctggaagtgattgtaatggaacc

SEQ ID NO: 338628 - DNA, 25 bp, Artificial
  probe
  misc_feature (1)..(25): SEQ ID NO: 2844; WAN024FZL; Start 1046; Stop 1070
ctgattcaatccgatacttcctaac

SEQ ID NO: 338629 - DNA, 25 bp, Artificial
  probe
  misc_feature (1)..(25): SEQ ID NO: 2844; WAN024FZL; Start 1039; Stop 1063
tatgatgctgattcaatccgatact

SEQ ID NO: 338630 - DNA, 25 bp, Artificial
  probe
  misc_feature (1)..(25): SEQ ID NO: 2844; WAN024FZL; Start 1048; Stop 1072
gattcaatccgatacttcctaacaa

SEQ ID NO: 338631 - DNA, 25 bp, Artificial
  probe
  misc_feature (1)..(25): SEQ ID NO: 2844; WAN024FZL; Start 1044; Stop 1068
tgctgattcaatccgatacttccta

SEQ ID NO: 338632 - DNA, 25 bp, Artificial
  probe
  misc_feature (1)..(25): SEQ ID NO: 2844; WAN024FZL; Start 1040; Stop 1064
atgatgctgattcaatccgatactt

SEQ ID NO: 338633 - DNA, 25 bp, Artificial
  probe
  misc_feature (1)..(25): SEQ ID NO: 2844; WAN024FZL; Start 1049; Stop 1073
attcaatccgatacttcctaacaat

SEQ ID NO: 338634 - DNA, 25 bp, Artificial
  probe
  misc_feature (1)..(25): SEQ ID NO: 2844; WAN024FZL; Start 1042; Stop 1066
gatgctgattcaatccgatacttcc

SEQ ID NO: 338635 - DNA, 25 bp, Artificial
  probe
  misc_feature (1)..(25): SEQ ID NO: 2844; WAN024FZL; Start 1041; Stop 1065
tgatgctgattcaatccgatacttc

SEQ ID NO: 338636 - DNA, 25 bp, Artificial
  probe
  misc_feature (1)..(25): SEQ ID NO: 2844; WAN024FZL; Start 1038; Stop 1062
atatgatgctgattcaatccgatac

SEQ ID NO: 338637 - DNA, 25 bp, Artificial
  probe
  misc_feature (1)..(25): SEQ ID NO: 2844; WAN024FZL; Start 1043; Stop 1067
atgctgattcaatccgatacttcct

SEQ ID NO: 338638 - DNA, 25 bp, Artificial
  probe
  misc_feature (1)..(25): SEQ ID NO: 2844; WAN024FZL; Start 274; Stop 298
cgaacagattctccactacatcatg

SEQ ID NO: 338639 - DNA, 25 bp, Artificial
  probe
  misc_feature (1)..(25): SEQ ID NO: 2844; WAN024FZL; Start 1051; Stop 1075
tcaatccgatacttcctaacaataa

SEQ ID NO: 338640 - DNA, 25 bp, Artificial
  probe
  misc_feature (1)..(25): SEQ ID NO: 2844; WAN024FZL; Start 1050; Stop 1074
ttcaatccgatacttcctaacaata

SEQ ID NO: 338641 - DNA, 25 bp, Artificial
  probe
  misc_feature (1)..(25): SEQ ID NO: 2844; WAN024FZL; Start 1037; Stop 1061
aatatgatgctgattcaatccgata

SEQ ID NO: 338642 - DNA, 25 bp, Artificial
  probe
  misc_feature (1)..(25): SEQ ID NO: 2844; WAN024FZL; Start 1534; Stop 1558
aaccttcctaacaagctatcagatg

SEQ ID NO: 338643 - DNA, 25 bp, Artificial
  probe
  misc_feature (1)..(25): SEQ ID NO: 2844; WAN024FZL; Start 1061; Stop 1085
acttcctaacaataaatgctcctga

SEQ ID NO: 338644 - DNA, 25 bp, Artificial
  probe
  misc_feature (1)..(25): SEQ ID NO: 2844; WAN024FZL; Start 129; Stop 153
tgtttctggaagtgattgtaatgga

SEQ ID NO: 338645 - DNA, 25 bp, Artificial
  probe
  misc_feature (1)..(25): SEQ ID NO: 2844; WAN024FZL; Start 273; Stop 297
gcgaacagattctccactacatcat

SEQ ID NO: 338646 - DNA, 25 bp, Artificial
  probe
  misc_feature (1)..(25): SEQ ID NO: 2844; WAN024FZL; Start 128; Stop 152
atgtttctggaagtgattgtaatgg

SEQ ID NO: 338647 - DNA, 25 bp, Artificial
  probe
  misc_feature (1)..(25): SEQ ID NO: 2844; WAN024FZL; Start 1063; Stop 1087
ttcctaacaataaatgctcctgaga

SEQ ID NO: 338648 - DNA, 25 bp, Artificial
  probe
  misc_feature (1)..(25): SEQ ID NO: 2844; WAN024FZL; Start 1003; Stop 1027
aattgggctatatggcttaacgata

SEQ ID NO: 338649 - DNA, 25 bp, Artificial
  probe
  misc_feature (1)..(25): SEQ ID NO: 2844; WAN024FZL; Start 1002; Stop 1026
taattgggctatatggcttaacgat

SEQ ID NO: 338650 - DNA, 25 bp, Artificial
  probe
  misc_feature (1)..(25): SEQ ID NO: 2844; WAN024FZL; Start 1001; Stop 1025
ataattgggctatatggcttaacga

SEQ ID NO: 338651 - DNA, 25 bp, Artificial
  probe
  misc_feature (1)..(25): SEQ ID NO: 2844; WAN024FZL; Start 1065; Stop 1089
cctaacaataaatgctcctgagatg

SEQ ID NO: 338652 - DNA, 25 bp, Artificial
  probe
  misc_feature (1)..(25): SEQ ID NO: 2844; WAN024FZL; Start 1064; Stop 1088
tcctaacaataaatgctcctgagat

SEQ ID NO: 338653 - DNA, 25 bp, Artificial
  probe
  misc_feature (1)..(25): SEQ ID NO: 2844; WAN024FZL; Start 1062; Stop 1086
cttcctaacaataaatgctcctgag

SEQ ID NO: 338654 - DNA, 25 bp, Artificial
  probe
  misc_feature (1)..(25): SEQ ID NO: 2844; WAN024FZL; Start 1267; Stop 1291
acagtaggtaatttagttgagagcg

SEQ ID NO: 338655 - DNA, 25 bp, Artificial
  probe
  misc_feature (1)..(25): SEQ ID NO: 2844; WAN024FZL; Start 1004; Stop 1028
attgggctatatggcttaacgatat

SEQ ID NO: 338656 - DNA, 25 bp, Artificial
  probe
  misc_feature (1)..(25): SEQ ID NO: 2844; WAN024FZL; Start 1547; Stop 1571
agctatcagatgtatcaatgttgtt

SEQ ID NO: 338657 - DNA, 25 bp, Artificial
  probe
  misc_feature (1)..(25): SEQ ID NO: 2844; WAN024FZL; Start 1546; Stop 1570
aagctatcagatgtatcaatgttgt

SEQ ID NO: 338658 - DNA, 25 bp, Artificial
  probe
  misc_feature (1)..(25): SEQ ID NO: 2845; WAN024FBV; Start 237; Stop 261
tcatcaatatctgaatggtggagaa

SEQ ID NO: 338659 - DNA, 25 bp, Artificial
  probe
  misc_feature (1)..(25): SEQ ID NO: 2845; WAN024FBV; Start 239; Stop 263
atcaatatctgaatggtggagaagc

SEQ ID NO: 338660 - DNA, 25 bp, Artificial
  probe
  misc_feature (1)..(25): SEQ ID NO: 2845; WAN024FBV; Start 238; Stop 262
catcaatatctgaatggtggagaag

SEQ ID NO: 338661 - DNA, 25 bp, Artificial
  probe
  misc_feature (1)..(25): SEQ ID NO: 2845; WAN024FBV; Start 172; Stop 196
catccagagcgtcagattaagattg

SEQ ID NO: 338662 - DNA, 25 bp, Artificial
  probe
  misc_feature (1)..(25): SEQ ID NO: 2845; WAN024FBV; Start 171; Stop 195
tcatccagagcgtcagattaagatt

SEQ ID NO: 338663 - DNA, 25 bp, Artificial
  probe
  misc_feature (1)..(25): SEQ ID NO: 2845; WAN024FBV; Start 173; Stop 197
atccagagcgtcagattaagattgt

SEQ ID NO: 338664 - DNA, 25 bp, Artificial
  probe
  misc_feature (1)..(25): SEQ ID NO: 2845; WAN024FBV; Start 28; Stop 52
aacctatacatccatgccattcaag

SEQ ID NO: 338665 - DNA, 25 bp, Artificial
  probe
  misc_feature (1)..(25): SEQ ID NO: 2845; WAN024FBV; Start 27; Stop 51
caacctatacatccatgccattcaa

SEQ ID NO: 338666 - DNA, 25 bp, Artificial
  probe
  misc_feature (1)..(25): SEQ ID NO: 2845; WAN024FBV; Start 19; Stop 43
aatgctcacaacctatacatccatg

SEQ ID NO: 338667 - DNA, 25 bp, Artificial
  probe
  misc_feature (1)..(25): SEQ ID NO: 2845; WAN024FBV; Start 30; Stop 54
cctatacatccatgccattcaagac

SEQ ID NO: 338668 - DNA, 25 bp, Artificial
  probe
  misc_feature (1)..(25): SEQ ID NO: 2845; WAN024FBV; Start 186; Stop 210
gattaagattgtccgcaccattgag

SEQ ID NO: 338669 - DNA, 25 bp, Artificial
  probe
  misc_feature (1)..(25): SEQ ID NO: 2845; WAN024FBV; Start 170; Stop 194
gtcatccagagcgtcagattaagat

SEQ ID NO: 338670 - DNA, 25 bp, Artificial
  probe
  misc_feature (1)..(25): SEQ ID NO: 2845; WAN024FBV; Start 29; Stop 53
acctatacatccatgccattcaaga

SEQ ID NO: 338671 - DNA, 25 bp, Artificial
  probe
  misc_feature (1)..(25): SEQ ID NO: 2845; WAN024FBV; Start 523; Stop 547
attggacaaggaagtgctgcttata

SEQ ID NO: 338672 - DNA, 25 bp, Artificial
  probe
  misc_feature (1)..(25): SEQ ID NO: 2845; WAN024FBV; Start 31; Stop 55
ctatacatccatgccattcaagacg

SEQ ID NO: 338673 - DNA, 25 bp, Artificial
  probe
  misc_feature (1)..(25): SEQ ID NO: 2845; WAN024FBV; Start 174; Stop 198
tccagagcgtcagattaagattgtc

SEQ ID NO: 338674 - DNA, 25 bp, Artificial
  probe
  misc_feature (1)..(25): SEQ ID NO: 2845; WAN024FBV; Start 25; Stop 49
cacaacctatacatccatgccattc

SEQ ID NO: 338675 - DNA, 25 bp, Artificial
  probe
  misc_feature (1)..(25): SEQ ID NO: 2845; WAN024FBV; Start 330; Stop 354
cattgactactatcgaacacctgaa

SEQ ID NO: 338676 - DNA, 25 bp, Artificial
  probe
  misc_feature (1)..(25): SEQ ID NO: 2845; WAN024FBV; Start 185; Stop 209
agattaagattgtccgcaccattga

SEQ ID NO: 338677 - DNA, 25 bp, Artificial
  probe
  misc_feature (1)..(25): SEQ ID NO: 2845; WAN024FBV; Start 184; Stop 208
cagattaagattgtccgcaccattg

SEQ ID NO: 338678 - DNA, 25 bp, Artificial
  probe
  misc_feature (1)..(25): SEQ ID NO: 2845; WAN024FBV; Start 183; Stop 207
tcagattaagattgtccgcaccatt

SEQ ID NO: 338679 - DNA, 25 bp, Artificial
  probe
  misc_feature (1)..(25): SEQ ID NO: 2845; WAN024FBV; Start 469; Stop 493
ctagagcagtggagtgattatgtgg

SEQ ID NO: 338680 - DNA, 25 bp, Artificial
  probe
  misc_feature (1)..(25): SEQ ID NO: 2845; WAN024FBV; Start 26; Stop 50
acaacctatacatccatgccattca

SEQ ID NO: 338681 - DNA, 25 bp, Artificial
  probe
  misc_feature (1)..(25): SEQ ID NO: 2845; WAN024FBV; Start 24; Stop 48
tcacaacctatacatccatgccatt

SEQ ID NO: 338682 - DNA, 25 bp, Artificial
  probe
  misc_feature (1)..(25): SEQ ID NO: 2845; WAN024FBV; Start 484; Stop 508
gattatgtggcagacgatttgattc

SEQ ID NO: 338683 - DNA, 25 bp, Artificial
  probe
  misc_feature (1)..(25): SEQ ID NO: 2845; WAN024FBV; Start 552; Stop 576
ctatgtggctgaatatagtgtcact

SEQ ID NO: 338684 - DNA, 25 bp, Artificial
  probe
  misc_feature (1)..(25): SEQ ID NO: 2845; WAN024FBV; Start 694; Stop 718
attgtggagcattgggataataagg

SEQ ID NO: 338685 - DNA, 25 bp, Artificial
  probe
  misc_feature (1)..(25): SEQ ID NO: 2845; WAN024FBV; Start 553; Stop 577
tatgtggctgaatatagtgtcactt

SEQ ID NO: 338686 - DNA, 25 bp, Artificial
  probe
  misc_feature (1)..(25): SEQ ID NO: 2845; WAN024FBV; Start 591; Stop 615
ccaactcttaggacaaggaaactat

SEQ ID NO: 338687 - DNA, 25 bp, Artificial
  probe
  misc_feature (1)..(25): SEQ ID NO: 2845; WAN024FBV; Start 18; Stop 42
aaatgctcacaacctatacatccat

SEQ ID NO: 338688 - DNA, 25 bp, Artificial
  probe
  misc_feature (1)..(25): SEQ ID NO: 2845; WAN024FBV; Start 693; Stop 717
aattgtggagcattgggataataag

SEQ ID NO: 338689 - DNA, 25 bp, Artificial
  probe
  misc_feature (1)..(25): SEQ ID NO: 2845; WAN024FBV; Start 483; Stop 507
tgattatgtggcagacgatttgatt

SEQ ID NO: 338690 - DNA, 25 bp, Artificial
  probe
  misc_feature (1)..(25): SEQ ID NO: 2845; WAN024FBV; Start 329; Stop 353
tcattgactactatcgaacacctga

SEQ ID NO: 338691 - DNA, 25 bp, Artificial
  probe
  misc_feature (1)..(25): SEQ ID NO: 2846; WAN024DK7; Start 162; Stop 186
tacttcaactgtaggttcatacgac

SEQ ID NO: 338692 - DNA, 25 bp, Artificial
  probe
  misc_feature (1)..(25): SEQ ID NO: 2846; WAN024DK7; Start 161; Stop 185
ttacttcaactgtaggttcatacga

SEQ ID NO: 338693 - DNA, 25 bp, Artificial
  probe
  misc_feature (1)..(25): SEQ ID NO: 2846; WAN024DK7; Start 160; Stop 184
gttacttcaactgtaggttcatacg

SEQ ID NO: 338694 - DNA, 25 bp, Artificial
  probe
  misc_feature (1)..(25): SEQ ID NO: 2846; WAN024DK7; Start 163; Stop 187
acttcaactgtaggttcatacgacg

SEQ ID NO: 338695 - DNA, 25 bp, Artificial
  probe
  misc_feature (1)..(25): SEQ ID NO: 2846; WAN024DK7; Start 131; Stop 155
ttcgtcttgtcatcaaccaaccatt

SEQ ID NO: 338696 - DNA, 25 bp, Artificial
  probe
  misc_feature (1)..(25): SEQ ID NO: 2846; WAN024DK7; Start 142; Stop 166
atcaaccaaccattcgcagttactt

SEQ ID NO: 338697 - DNA, 25 bp, Artificial
  probe
  misc_feature (1)..(25): SEQ ID NO: 2846; WAN024DK7; Start 145; Stop 169
aaccaaccattcgcagttacttcaa

SEQ ID NO: 338698 - DNA, 25 bp, Artificial
  probe
  misc_feature (1)..(25): SEQ ID NO: 2846; WAN024DK7; Start 165; Stop 189
ttcaactgtaggttcatacgacgtt

SEQ ID NO: 338699 - DNA, 25 bp, Artificial
  probe
  misc_feature (1)..(25): SEQ ID NO: 2846; WAN024DK7; Start 132; Stop 156
tcgtcttgtcatcaaccaaccattc

SEQ ID NO: 338700 - DNA, 25 bp, Artificial
  probe
  misc_feature (1)..(25): SEQ ID NO: 2846; WAN024DK7; Start 130; Stop 154
cttcgtcttgtcatcaaccaaccat

SEQ ID NO: 338701 - DNA, 25 bp, Artificial
  probe
  misc_feature (1)..(25): SEQ ID NO: 2846; WAN024DK7; Start 362; Stop 386
ctcgtaaagcatcacaatttagtaa

SEQ ID NO: 338702 - DNA, 25 bp, Artificial
  probe
  misc_feature (1)..(25): SEQ ID NO: 2846; WAN024DK7; Start 143; Stop 167
tcaaccaaccattcgcagttacttc

SEQ ID NO: 338703 - DNA, 25 bp, Artificial
  probe
  misc_feature (1)..(25): SEQ ID NO: 2846; WAN024DK7; Start 141; Stop 165
catcaaccaaccattcgcagttact

SEQ ID NO: 338704 - DNA, 25 bp, Artificial
  probe
  misc_feature (1)..(25): SEQ ID NO: 2846; WAN024DK7; Start 164; Stop 188
cttcaactgtaggttcatacgacgt

SEQ ID NO: 338705 - DNA, 25 bp, Artificial
  probe
  misc_feature (1)..(25): SEQ ID NO: 2846; WAN024DK7; Start 159; Stop 183
agttacttcaactgtaggttcatac

SEQ ID NO: 338706 - DNA, 25 bp, Artificial
  probe
  misc_feature (1)..(25): SEQ ID NO: 2846; WAN024DK7; Start 140; Stop 164
tcatcaaccaaccattcgcagttac

SEQ ID NO: 338707 - DNA, 25 bp, Artificial
  probe
  misc_feature (1)..(25): SEQ ID NO: 2846; WAN024DK7; Start 139; Stop 163
gtcatcaaccaaccattcgcagtta

SEQ ID NO: 338708 - DNA, 25 bp, Artificial
  probe
  misc_feature (1)..(25): SEQ ID NO: 2846; WAN024DK7; Start 326; Stop 350
gtaaagttgaacgtaagaaaccagg

SEQ ID NO: 338709 - DNA, 25 bp, Artificial
  probe
  misc_feature (1)..(25): SEQ ID NO: 2846; WAN024DK7; Start 365; Stop 389
gtaaagcatcacaatttagtaaacg

SEQ ID NO: 338710 - DNA, 25 bp, Artificial
  probe
  misc_feature (1)..(25): SEQ ID NO: 2846; WAN024DK7; Start 364; Stop 388
cgtaaagcatcacaatttagtaaac

SEQ ID NO: 338711 - DNA, 25 bp, Artificial
  probe
  misc_feature (1)..(25): SEQ ID NO: 2846; WAN024DK7; Start 146; Stop 170
accaaccattcgcagttacttcaac

SEQ ID NO: 338712 - DNA, 25 bp, Artificial
  probe
  misc_feature (1)..(25): SEQ ID NO: 2846; WAN024DK7; Start 144; Stop 168
caaccaaccattcgcagttacttca

SEQ ID NO: 338713 - DNA, 25 bp, Artificial
  probe
  misc_feature (1)..(25): SEQ ID NO: 2846; WAN024DK7; Start 327; Stop 351
taaagttgaacgtaagaaaccaggt

SEQ ID NO: 338714 - DNA, 25 bp, Artificial
  probe
  misc_feature (1)..(25): SEQ ID NO: 2846; WAN024DK7; Start 363; Stop 387
tcgtaaagcatcacaatttagtaaa

SEQ ID NO: 338715 - DNA, 25 bp, Artificial
  probe
  misc_feature (1)..(25): SEQ ID NO: 2846; WAN024DK7; Start 361; Stop 385
gctcgtaaagcatcacaatttagta

SEQ ID NO: 338716 - DNA, 25 bp, Artificial
  probe
  misc_feature (1)..(25): SEQ ID NO: 2846; WAN024DK7; Start 328; Stop 352
aaagttgaacgtaagaaaccaggtc

SEQ ID NO: 338717 - DNA, 25 bp, Artificial
  probe
  misc_feature (1)..(25): SEQ ID NO: 2846; WAN024DK7; Start 127; Stop 151
gaccttcgtcttgtcatcaaccaac

SEQ ID NO: 338718 - DNA, 25 bp, Artificial
  probe
  misc_feature (1)..(25): SEQ ID NO: 2846; WAN024DK7; Start 166; Stop 190
tcaactgtaggttcatacgacgttt

SEQ ID NO: 338719 - DNA, 25 bp, Artificial
  probe
  misc_feature (1)..(25): SEQ ID NO: 2846; WAN024DK7; Start 359; Stop 383
aagctcgtaaagcatcacaatttag

SEQ ID NO: 338720 - DNA, 25 bp, Artificial
  probe
  misc_feature (1)..(25): SEQ ID NO: 2846; WAN024DK7; Start 358; Stop 382
aaagctcgtaaagcatcacaattta

SEQ ID NO: 338721 - DNA, 25 bp, Artificial
  probe
  misc_feature (1)..(25): SEQ ID NO: 2846; WAN024DK7; Start 329; Stop 353
aagttgaacgtaagaaaccaggtct

SEQ ID NO: 338722 - DNA, 25 bp, Artificial
  probe
  misc_feature (1)..(25): SEQ ID NO: 2846; WAN024DK7; Start 366; Stop 390
taaagcatcacaatttagtaaacgt

SEQ ID NO: 338723 - DNA, 25 bp, Artificial
  probe
  misc_feature (1)..(25): SEQ ID NO: 2846; WAN024DK7; Start 357; Stop 381
gaaagctcgtaaagcatcacaattt

SEQ ID NO: 338724 - DNA, 25 bp, Artificial
  probe
  misc_feature (1)..(25): SEQ ID NO: 2847; WAN024DSV; Start 258; Stop 282
cgaatggaacatgattgaagaagtc

SEQ ID NO: 338725 - DNA, 25 bp, Artificial
  probe
  misc_feature (1)..(25): SEQ ID NO: 2847; WAN024DSV; Start 256; Stop 280
gacgaatggaacatgattgaagaag

SEQ ID NO: 338726 - DNA, 25 bp, Artificial
  probe
  misc_feature (1)..(25): SEQ ID NO: 2847; WAN024DSV; Start 253; Stop 277
gaagacgaatggaacatgattgaag

SEQ ID NO: 338727 - DNA, 25 bp, Artificial
  probe
  misc_feature (1)..(25): SEQ ID NO: 2847; WAN024DSV; Start 245; Stop 269
aagactcagaagacgaatggaacat

SEQ ID NO: 338728 - DNA, 25 bp, Artificial
  probe
  misc_feature (1)..(25): SEQ ID NO: 2847; WAN024DSV; Start 259; Stop 283
gaatggaacatgattgaagaagtct

SEQ ID NO: 338729 - DNA, 25 bp, Artificial
  probe
  misc_feature (1)..(25): SEQ ID NO: 2847; WAN024DSV; Start 255; Stop 279
agacgaatggaacatgattgaagaa

SEQ ID NO: 338730 - DNA, 25 bp, Artificial
  probe
  misc_feature (1)..(25): SEQ ID NO: 2847; WAN024DSV; Start 254; Stop 278
aagacgaatggaacatgattgaaga

SEQ ID NO: 338731 - DNA, 25 bp, Artificial
  probe
  misc_feature (1)..(25): SEQ ID NO: 2847; WAN024DSV; Start 252; Stop 276
agaagacgaatggaacatgattgaa

SEQ ID NO: 338732 - DNA, 25 bp, Artificial
  probe
  misc_feature (1)..(25): SEQ ID NO: 2847; WAN024DSV; Start 257; Stop 281
acgaatggaacatgattgaagaagt

SEQ ID NO: 338733 - DNA, 25 bp, Artificial
  probe
  misc_feature (1)..(25): SEQ ID NO: 2847; WAN024DSV; Start 260; Stop 284
aatggaacatgattgaagaagtctt

SEQ ID NO: 338734 - DNA, 25 bp, Artificial
  probe
  misc_feature (1)..(25): SEQ ID NO: 2847; WAN024DSV; Start 243; Stop 267
agaagactcagaagacgaatggaac

SEQ ID NO: 338735 - DNA, 25 bp, Artificial
  probe
  misc_feature (1)..(25): SEQ ID NO: 2847; WAN024DSV; Start 242; Stop 266
cagaagactcagaagacgaatggaa

SEQ ID NO: 338736 - DNA, 25 bp, Artificial
  probe
  misc_feature (1)..(25): SEQ ID NO: 2847; WAN024DSV; Start 251; Stop 275
cagaagacgaatggaacatgattga

SEQ ID NO: 338737 - DNA, 25 bp, Artificial
  probe
  misc_feature (1)..(25): SEQ ID NO: 2847; WAN024DSV; Start 244; Stop 268
gaagactcagaagacgaatggaaca

SEQ ID NO: 338738 - DNA, 25 bp, Artificial
  probe
  misc_feature (1)..(25): SEQ ID NO: 2847; WAN024DSV; Start 249; Stop 273
ctcagaagacgaatggaacatgatt

SEQ ID NO: 338739 - DNA, 25 bp, Artificial
  probe
  misc_feature (1)..(25): SEQ ID NO: 2847; WAN024DSV; Start 250; Stop 274
tcagaagacgaatggaacatgattg

SEQ ID NO: 338740 - DNA, 25 bp, Artificial
  probe
  misc_feature (1)..(25): SEQ ID NO: 2847; WAN024DSV; Start 51; Stop 75
agtagatgagcaaggaaatgaaacc

SEQ ID NO: 338741 - DNA, 25 bp, Artificial
  probe
  misc_feature (1)..(25): SEQ ID NO: 2847; WAN024DSV; Start 50; Stop 74
tagtagatgagcaaggaaatgaaac

SEQ ID NO: 338742 - DNA, 25 bp, Artificial
  probe
  misc_feature (1)..(25): SEQ ID NO: 2847; WAN024DSV; Start 248; Stop 272
actcagaagacgaatggaacatgat

SEQ ID NO: 338743 - DNA, 25 bp, Artificial
  probe
  misc_feature (1)..(25): SEQ ID NO: 2847; WAN024DSV; Start 246; Stop 270
agactcagaagacgaatggaacatg

SEQ ID NO: 338744 - DNA, 25 bp, Artificial
  probe
  misc_feature (1)..(25): SEQ ID NO: 2847; WAN024DSV; Start 49; Stop 73
ctagtagatgagcaaggaaatgaaa

SEQ ID NO: 338745 - DNA, 25 bp, Artificial
  probe
  misc_feature (1)..(25): SEQ ID NO: 2847; WAN024DSV; Start 247; Stop 271
gactcagaagacgaatggaacatga

SEQ ID NO: 338746 - DNA, 25 bp, Artificial
  probe
  misc_feature (1)..(25): SEQ ID NO: 2847; WAN024DSV; Start 136; Stop 160
ctagtaccagttaacgcagaagaag

SEQ ID NO: 338747 - DNA, 25 bp, Artificial
  probe
  misc_feature (1)..(25): SEQ ID NO: 2847; WAN024DSV; Start 128; Stop 152
atgttcttctagtaccagttaacgc

SEQ ID NO: 338748 - DNA, 25 bp, Artificial
  probe
  misc_feature (1)..(25): SEQ ID NO: 2847; WAN024DSV; Start 137; Stop 161
tagtaccagttaacgcagaagaaga

SEQ ID NO: 338749 - DNA, 25 bp, Artificial
  probe
  misc_feature (1)..(25): SEQ ID NO: 2847; WAN024DSV; Start 52; Stop 76
gtagatgagcaaggaaatgaaacct

SEQ ID NO: 338750 - DNA, 25 bp, Artificial
  probe
  misc_feature (1)..(25): SEQ ID NO: 2847; WAN024DSV; Start 135; Stop 159
tctagtaccagttaacgcagaagaa

SEQ ID NO: 338751 - DNA, 25 bp, Artificial
  probe
  misc_feature (1)..(25): SEQ ID NO: 2847; WAN024DSV; Start 131; Stop 155
ttcttctagtaccagttaacgcaga

SEQ ID NO: 338752 - DNA, 25 bp, Artificial
  probe
  misc_feature (1)..(25): SEQ ID NO: 2847; WAN024DSV; Start 130; Stop 154
gttcttctagtaccagttaacgcag

SEQ ID NO: 338753 - DNA, 25 bp, Artificial
  probe
  misc_feature (1)..(25): SEQ ID NO: 2847; WAN024DSV; Start 154; Stop 178
gaagaagacgaagacggacaagttg

SEQ ID NO: 338754 - DNA, 25 bp, Artificial
  probe
  misc_feature (1)..(25): SEQ ID NO: 2847; WAN024DSV; Start 41; Stop 65
taatcacactagtagatgagcaagg

SEQ ID NO: 338755 - DNA, 25 bp, Artificial
  probe
  misc_feature (1)..(25): SEQ ID NO: 2847; WAN024DSV; Start 153; Stop 177
agaagaagacgaagacggacaagtt

SEQ ID NO: 338756 - DNA, 25 bp, Artificial
  probe
  misc_feature (1)..(25): SEQ ID NO: 2847; WAN024DSV; Start 129; Stop 153
tgttcttctagtaccagttaacgca

SEQ ID NO: 338757 - DNA, 25 bp, Artificial
  probe
  misc_feature (1)..(25): SEQ ID NO: 2848; WAN024FFA; Start 285; Stop 309
tatctacaactatatcggcatcgtg

SEQ ID NO: 338758 - DNA, 25 bp, Artificial
  probe
  misc_feature (1)..(25): SEQ ID NO: 2848; WAN024FFA; Start 284; Stop 308
ctatctacaactatatcggcatcgt

SEQ ID NO: 338759 - DNA, 25 bp, Artificial
  probe
  misc_feature (1)..(25): SEQ ID NO: 2848; WAN024FFA; Start 283; Stop 307
actatctacaactatatcggcatcg

SEQ ID NO: 338760 - DNA, 25 bp, Artificial
  probe
  misc_feature (1)..(25): SEQ ID NO: 2848; WAN024FFA; Start 281; Stop 305
ggactatctacaactatatcggcat

SEQ ID NO: 338761 - DNA, 25 bp, Artificial
  probe
  misc_feature (1)..(25): SEQ ID NO: 2848; WAN024FFA; Start 288; Stop 312
ctacaactatatcggcatcgtgatt

SEQ ID NO: 338762 - DNA, 25 bp, Artificial
  probe
  misc_feature (1)..(25): SEQ ID NO: 2848; WAN024FFA; Start 286; Stop 310
atctacaactatatcggcatcgtga

SEQ ID NO: 338763 - DNA, 25 bp, Artificial
  probe
  misc_feature (1)..(25): SEQ ID NO: 2848; WAN024FFA; Start 287; Stop 311
tctacaactatatcggcatcgtgat

SEQ ID NO: 338764 - DNA, 25 bp, Artificial
  probe
  misc_feature (1)..(25): SEQ ID NO: 2848; WAN024FFA; Start 289; Stop 313
tacaactatatcggcatcgtgattg

SEQ ID NO: 338765 - DNA, 25 bp, Artificial
  probe
  misc_feature (1)..(25): SEQ ID NO: 2848; WAN024FFA; Start 282; Stop 306
gactatctacaactatatcggcatc

SEQ ID NO: 338766 - DNA, 25 bp, Artificial
  probe
  misc_feature (1)..(25): SEQ ID NO: 2848; WAN024FFA; Start 272; Stop 296
acatcatcgggactatctacaacta

SEQ ID NO: 338767 - DNA, 25 bp, Artificial
  probe
  misc_feature (1)..(25): SEQ ID NO: 2848; WAN024FFA; Start 278; Stop 302
tcgggactatctacaactatatcgg

SEQ ID NO: 338768 - DNA, 25 bp, Artificial
  probe
  misc_feature (1)..(25): SEQ ID NO: 2848; WAN024FFA; Start 273; Stop 297
catcatcgggactatctacaactat

SEQ ID NO: 338769 - DNA, 25 bp, Artificial
  probe
  misc_feature (1)..(25): SEQ ID NO: 2848; WAN024FFA; Start 280; Stop 304
gggactatctacaactatatcggca

SEQ ID NO: 338770 - DNA, 25 bp, Artificial
  probe
  misc_feature (1)..(25): SEQ ID NO: 2848; WAN024FFA; Start 277; Stop 301
atcgggactatctacaactatatcg

SEQ ID NO: 338771 - DNA, 25 bp, Artificial
  probe
  misc_feature (1)..(25): SEQ ID NO: 2848; WAN024FFA; Start 532; Stop 556
atcatcattctgaccaaacccttta

SEQ ID NO: 338772 - DNA, 25 bp, Artificial
  probe
  misc_feature (1)..(25): SEQ ID NO: 2848; WAN024FFA; Start 41; Stop 65
tgcagcgagttatcaatatctcatc

SEQ ID NO: 338773 - DNA, 25 bp, Artificial
  probe
  misc_feature (1)..(25): SEQ ID NO: 2848; WAN024FFA; Start 290; Stop 314
acaactatatcggcatcgtgattgg

SEQ ID NO: 338774 - DNA, 25 bp, Artificial
  probe
  misc_feature (1)..(25): SEQ ID NO: 2848; WAN024FFA; Start 271; Stop 295
cacatcatcgggactatctacaact

SEQ ID NO: 338775 - DNA, 25 bp, Artificial
  probe
  misc_feature (1)..(25): SEQ ID NO: 2848; WAN024FFA; Start 533; Stop 557
tcatcattctgaccaaaccctttac

SEQ ID NO: 338776 - DNA, 25 bp, Artificial
  probe
  misc_feature (1)..(25): SEQ ID NO: 2848; WAN024FFA; Start 2; Stop 26
tgtcacaggataaacaaatgaaagc

SEQ ID NO: 338777 - DNA, 25 bp, Artificial
  probe
  misc_feature (1)..(25): SEQ ID NO: 2848; WAN024FFA; Start 279; Stop 303
cgggactatctacaactatatcggc

SEQ ID NO: 338778 - DNA, 25 bp, Artificial
  probe
  misc_feature (1)..(25): SEQ ID NO: 2848; WAN024FFA; Start 274; Stop 298
atcatcgggactatctacaactata

SEQ ID NO: 338779 - DNA, 25 bp, Artificial
  probe
  misc_feature (1)..(25): SEQ ID NO: 2848; WAN024FFA; Start 571; Stop 595
acctacggtctgacctatattattg

SEQ ID NO: 338780 - DNA, 25 bp, Artificial
  probe
  misc_feature (1)..(25): SEQ ID NO: 2848; WAN024FFA; Start 275; Stop 299
tcatcgggactatctacaactatat

SEQ ID NO: 338781 - DNA, 25 bp, Artificial
  probe
  misc_feature (1)..(25): SEQ ID NO: 2848; WAN024FFA; Start 575; Stop 599
acggtctgacctatattattgactt

SEQ ID NO: 338782 - DNA, 25 bp, Artificial
  probe
  misc_feature (1)..(25): SEQ ID NO: 2848; WAN024FFA; Start 572; Stop 596
cctacggtctgacctatattattga

SEQ ID NO: 338783 - DNA, 25 bp, Artificial
  probe
  misc_feature (1)..(25): SEQ ID NO: 2848; WAN024FFA; Start 534; Stop 558
catcattctgaccaaaccctttacc

SEQ ID NO: 338784 - DNA, 25 bp, Artificial
  probe
  misc_feature (1)..(25): SEQ ID NO: 2848; WAN024FFA; Start 276; Stop 300
catcgggactatctacaactatatc

SEQ ID NO: 338785 - DNA, 25 bp, Artificial
  probe
  misc_feature (1)..(25): SEQ ID NO: 2848; WAN024FFA; Start 42; Stop 66
gcagcgagttatcaatatctcatcg

SEQ ID NO: 338786 - DNA, 25 bp, Artificial
  probe
  misc_feature (1)..(25): SEQ ID NO: 2848; WAN024FFA; Start 43; Stop 67
cagcgagttatcaatatctcatcga

SEQ ID NO: 338787 - DNA, 25 bp, Artificial
  probe
  misc_feature (1)..(25): SEQ ID NO: 2848; WAN024FFA; Start 574; Stop 598
tacggtctgacctatattattgact

SEQ ID NO: 338788 - DNA, 25 bp, Artificial
  probe
  misc_feature (1)..(25): SEQ ID NO: 2848; WAN024FFA; Start 552; Stop 576
ctttaccctcgtggtttatacctac

SEQ ID NO: 338789 - DNA, 25 bp, Artificial
  probe
  misc_feature (1)..(25): SEQ ID NO: 2848; WAN024FFA; Start 1; Stop 25
atgtcacaggataaacaaatgaaag

SEQ ID NO: 338790 - DNA, 25 bp, Artificial
  probe
  misc_feature (1)..(25): SEQ ID NO: 2849; WAN024DZB; Start 358; Stop 382
tcaatctcatctacttaccttgctg

SEQ ID NO: 338791 - DNA, 25 bp, Artificial
  probe
  misc_feature (1)..(25): SEQ ID NO: 2849; WAN024DZB; Start 357; Stop 381
ctcaatctcatctacttaccttgct

SEQ ID NO: 338792 - DNA, 25 bp, Artificial
  probe
  misc_feature (1)..(25): SEQ ID NO: 2849; WAN024DZB; Start 356; Stop 380
actcaatctcatctacttaccttgc

SEQ ID NO: 338793 - DNA, 25 bp, Artificial
  probe
  misc_feature (1)..(25): SEQ ID NO: 2849; WAN024DZB; Start 818; Stop 842
actatgagccatcacttcaatactt

SEQ ID NO: 338794 - DNA, 25 bp, Artificial
  probe
  misc_feature (1)..(25): SEQ ID NO: 2849; WAN024DZB; Start 817; Stop 841
aactatgagccatcacttcaatact

SEQ ID NO: 338795 - DNA, 25 bp, Artificial
  probe
  misc_feature (1)..(25): SEQ ID NO: 2849; WAN024DZB; Start 360; Stop 384
aatctcatctacttaccttgctgac

SEQ ID NO: 338796 - DNA, 25 bp, Artificial
  probe
  misc_feature (1)..(25): SEQ ID NO: 2849; WAN024DZB; Start 359; Stop 383
caatctcatctacttaccttgctga

SEQ ID NO: 338797 - DNA, 25 bp, Artificial
  probe
  misc_feature (1)..(25): SEQ ID NO: 2849; WAN024DZB; Start 820; Stop 844
tatgagccatcacttcaatacttct

SEQ ID NO: 338798 - DNA, 25 bp, Artificial
  probe
  misc_feature (1)..(25): SEQ ID NO: 2849; WAN024DZB; Start 824; Stop 848
agccatcacttcaatacttctcaga

SEQ ID NO: 338799 - DNA, 25 bp, Artificial
  probe
  misc_feature (1)..(25): SEQ ID NO: 2849; WAN024DZB; Start 833; Stop 857
ttcaatacttctcagaatggtggaa

SEQ ID NO: 338800 - DNA, 25 bp, Artificial
  probe
  misc_feature (1)..(25): SEQ ID NO: 2849; WAN024DZB; Start 819; Stop 843
ctatgagccatcacttcaatacttc

SEQ ID NO: 338801 - DNA, 25 bp, Artificial
  probe
  misc_feature (1)..(25): SEQ ID NO: 2849; WAN024DZB; Start 361; Stop 385
atctcatctacttaccttgctgact

SEQ ID NO: 338802 - DNA, 25 bp, Artificial
  probe
  misc_feature (1)..(25): SEQ ID NO: 2849; WAN024DZB; Start 832; Stop 856
cttcaatacttctcagaatggtgga

SEQ ID NO: 338803 - DNA, 25 bp, Artificial
  probe
  misc_feature (1)..(25): SEQ ID NO: 2849; WAN024DZB; Start 829; Stop 853
tcacttcaatacttctcagaatggt

SEQ ID NO: 338804 - DNA, 25 bp, Artificial
  probe
  misc_feature (1)..(25): SEQ ID NO: 2849; WAN024DZB; Start 831; Stop 855
acttcaatacttctcagaatggtgg

SEQ ID NO: 338805 - DNA, 25 bp, Artificial
  probe
  misc_feature (1)..(25): SEQ ID NO: 2849; WAN024DZB; Start 363; Stop 387
ctcatctacttaccttgctgacttg

SEQ ID NO: 338806 - DNA, 25 bp, Artificial
  probe
  misc_feature (1)..(25): SEQ ID NO: 2849; WAN024DZB; Start 362; Stop 386
tctcatctacttaccttgctgactt

SEQ ID NO: 338807 - DNA, 25 bp, Artificial
  probe
  misc_feature (1)..(25): SEQ ID NO: 2849; WAN024DZB; Start 821; Stop 845
atgagccatcacttcaatacttctc

SEQ ID NO: 338808 - DNA, 25 bp, Artificial
  probe
  misc_feature (1)..(25): SEQ ID NO: 2849; WAN024DZB; Start 825; Stop 849
gccatcacttcaatacttctcagaa

SEQ ID NO: 338809 - DNA, 25 bp, Artificial
  probe
  misc_feature (1)..(25): SEQ ID NO: 2849; WAN024DZB; Start 376; Stop 400
cttgctgacttggtagagtatgttg

SEQ ID NO: 338810 - DNA, 25 bp, Artificial
  probe
  misc_feature (1)..(25): SEQ ID NO: 2849; WAN024DZB; Start 823; Stop 847
gagccatcacttcaatacttctcag

SEQ ID NO: 338811 - DNA, 25 bp, Artificial
  probe
  misc_feature (1)..(25): SEQ ID NO: 2849; WAN024DZB; Start 828; Stop 852
atcacttcaatacttctcagaatgg

SEQ ID NO: 338812 - DNA, 25 bp, Artificial
  probe
  misc_feature (1)..(25): SEQ ID NO: 2849; WAN024DZB; Start 826; Stop 850
ccatcacttcaatacttctcagaat

SEQ ID NO: 338813 - DNA, 25 bp, Artificial
  probe
  misc_feature (1)..(25): SEQ ID NO: 2849; WAN024DZB; Start 77; Stop 101
cacaagtaacagcagcagatgaatt

SEQ ID NO: 338814 - DNA, 25 bp, Artificial
  probe
  misc_feature (1)..(25): SEQ ID NO: 2849; WAN024DZB; Start 355; Stop 379
aactcaatctcatctacttaccttg

SEQ ID NO: 338815 - DNA, 25 bp, Artificial
  probe
  misc_feature (1)..(25): SEQ ID NO: 2849; WAN024DZB; Start 830; Stop 854
cacttcaatacttctcagaatggtg

SEQ ID NO: 338816 - DNA, 25 bp, Artificial
  probe
  misc_feature (1)..(25): SEQ ID NO: 2849; WAN024DZB; Start 497; Stop 521
aatacggtcaagaagaagctaacaa

SEQ ID NO: 338817 - DNA, 25 bp, Artificial
  probe
  misc_feature (1)..(25): SEQ ID NO: 2849; WAN024DZB; Start 364; Stop 388
tcatctacttaccttgctgacttgg

SEQ ID NO: 338818 - DNA, 25 bp, Artificial
  probe
  misc_feature (1)..(25): SEQ ID NO: 2849; WAN024DZB; Start 950; Stop 974
ttatccaagaaggaactcgtatcat

SEQ ID NO: 338819 - DNA, 25 bp, Artificial
  probe
  misc_feature (1)..(25): SEQ ID NO: 2849; WAN024DZB; Start 375; Stop 399
ccttgctgacttggtagagtatgtt

SEQ ID NO: 338820 - DNA, 25 bp, Artificial
  probe
  misc_feature (1)..(25): SEQ ID NO: 2849; WAN024DZB; Start 73; Stop 97
caatcacaagtaacagcagcagatg

SEQ ID NO: 338821 - DNA, 25 bp, Artificial
  probe
  misc_feature (1)..(25): SEQ ID NO: 2849; WAN024DZB; Start 827; Stop 851
catcacttcaatacttctcagaatg

SEQ ID NO: 338822 - DNA, 25 bp, Artificial
  probe
  misc_feature (1)..(25): SEQ ID NO: 2849; WAN024DZB; Start 63; Stop 87
ggaatacatgcaatcacaagtaaca

SEQ ID NO: 338823 - DNA, 25 bp, Artificial
  probe
  misc_feature (1)..(25): SEQ ID NO: 2850; WAN024C8D; Start 213; Stop 237
acgaagagagttaccaagagttgta

SEQ ID NO: 338824 - DNA, 25 bp, Artificial
  probe
  misc_feature (1)..(25): SEQ ID NO: 2850; WAN024C8D; Start 201; Stop 225
tagaagtacacgacgaagagagtta

SEQ ID NO: 338825 - DNA, 25 bp, Artificial
  probe
  misc_feature (1)..(25): SEQ ID NO: 2850; WAN024C8D; Start 426; Stop 450
atcacgaattgctgttacttcaaga

SEQ ID NO: 338826 - DNA, 25 bp, Artificial
  probe
  misc_feature (1)..(25): SEQ ID NO: 2850; WAN024C8D; Start 425; Stop 449
catcacgaattgctgttacttcaag

SEQ ID NO: 338827 - DNA, 25 bp, Artificial
  probe
  misc_feature (1)..(25): SEQ ID NO: 2850; WAN024C8D; Start 215; Stop 239
gaagagagttaccaagagttgtacc

SEQ ID NO: 338828 - DNA, 25 bp, Artificial
  probe
  misc_feature (1)..(25): SEQ ID NO: 2850; WAN024C8D; Start 214; Stop 238
cgaagagagttaccaagagttgtac

SEQ ID NO: 338829 - DNA, 25 bp, Artificial
  probe
  misc_feature (1)..(25): SEQ ID NO: 2850; WAN024C8D; Start 200; Stop 224
ctagaagtacacgacgaagagagtt

SEQ ID NO: 338830 - DNA, 25 bp, Artificial
  probe
  misc_feature (1)..(25): SEQ ID NO: 2850; WAN024C8D; Start 427; Stop 451
tcacgaattgctgttacttcaagac

SEQ ID NO: 338831 - DNA, 25 bp, Artificial
  probe
  misc_feature (1)..(25): SEQ ID NO: 2850; WAN024C8D; Start 424; Stop 448
acatcacgaattgctgttacttcaa

SEQ ID NO: 338832 - DNA, 25 bp, Artificial
  probe
  misc_feature (1)..(25): SEQ ID NO: 2850; WAN024C8D; Start 219; Stop 243
agagttaccaagagttgtaccgtag

SEQ ID NO: 338833 - DNA, 25 bp, Artificial
  probe
  misc_feature (1)..(25): SEQ ID NO: 2850; WAN024C8D; Start 218; Stop 242
gagagttaccaagagttgtaccgta

SEQ ID NO: 338834 - DNA, 25 bp, Artificial
  probe
  misc_feature (1)..(25): SEQ ID NO: 2850; WAN024C8D; Start 202; Stop 226
agaagtacacgacgaagagagttac

SEQ ID NO: 338835 - DNA, 25 bp, Artificial
  probe
  misc_feature (1)..(25): SEQ ID NO: 2850; WAN024C8D; Start 212; Stop 236
gacgaagagagttaccaagagttgt

SEQ ID NO: 338836 - DNA, 25 bp, Artificial
  probe
  misc_feature (1)..(25): SEQ ID NO: 2850; WAN024C8D; Start 422; Stop 446
tcacatcacgaattgctgttacttc

SEQ ID NO: 338837 - DNA, 25 bp, Artificial
  probe
  misc_feature (1)..(25): SEQ ID NO: 2850; WAN024C8D; Start 142; Stop 166
aactcatgtaacacaccatcaatgt

SEQ ID NO: 338838 - DNA, 25 bp, Artificial
  probe
  misc_feature (1)..(25): SEQ ID NO: 2850; WAN024C8D; Start 216; Stop 240
aagagagttaccaagagttgtaccg

SEQ ID NO: 338839 - DNA, 25 bp, Artificial
  probe
  misc_feature (1)..(25): SEQ ID NO: 2850; WAN024C8D; Start 423; Stop 447
cacatcacgaattgctgttacttca

SEQ ID NO: 338840 - DNA, 25 bp, Artificial
  probe
  misc_feature (1)..(25): SEQ ID NO: 2850; WAN024C8D; Start 421; Stop 445
gtcacatcacgaattgctgttactt

SEQ ID NO: 338841 - DNA, 25 bp, Artificial
  probe
  misc_feature (1)..(25): SEQ ID NO: 2850; WAN024C8D; Start 14; Stop 38
ttacttcagcaggaccttcaacatc

SEQ ID NO: 338842 - DNA, 25 bp, Artificial
  probe
  misc_feature (1)..(25): SEQ ID NO: 2850; WAN024C8D; Start 207; Stop 231
tacacgacgaagagagttaccaaga

SEQ ID NO: 338843 - DNA, 25 bp, Artificial
  probe
  misc_feature (1)..(25): SEQ ID NO: 2850; WAN024C8D; Start 187; Stop 211
cctggtagagaagctagaagtacac

SEQ ID NO: 338844 - DNA, 25 bp, Artificial
  probe
  misc_feature (1)..(25): SEQ ID NO: 2850; WAN024C8D; Start 428; Stop 452
cacgaattgctgttacttcaagacc

SEQ ID NO: 338845 - DNA, 25 bp, Artificial
  probe
  misc_feature (1)..(25): SEQ ID NO: 2850; WAN024C8D; Start 186; Stop 210
tcctggtagagaagctagaagtaca

SEQ ID NO: 338846 - DNA, 25 bp, Artificial
  probe
  misc_feature (1)..(25): SEQ ID NO: 2850; WAN024C8D; Start 419; Stop 443
gagtcacatcacgaattgctgttac

SEQ ID NO: 338847 - DNA, 25 bp, Artificial
  probe
  misc_feature (1)..(25): SEQ ID NO: 2850; WAN024C8D; Start 185; Stop 209
ctcctggtagagaagctagaagtac

SEQ ID NO: 338848 - DNA, 25 bp, Artificial
  probe
  misc_feature (1)..(25): SEQ ID NO: 2850; WAN024C8D; Start 430; Stop 454
cgaattgctgttacttcaagaccag

SEQ ID NO: 338849 - DNA, 25 bp, Artificial
  probe
  misc_feature (1)..(25): SEQ ID NO: 2850; WAN024C8D; Start 203; Stop 227
gaagtacacgacgaagagagttacc

SEQ ID NO: 338850 - DNA, 25 bp, Artificial
  probe
  misc_feature (1)..(25): SEQ ID NO: 2850; WAN024C8D; Start 190; Stop 214
ggtagagaagctagaagtacacgac

SEQ ID NO: 338851 - DNA, 25 bp, Artificial
  probe
  misc_feature (1)..(25): SEQ ID NO: 2850; WAN024C8D; Start 188; Stop 212
ctggtagagaagctagaagtacacg

SEQ ID NO: 338852 - DNA, 25 bp, Artificial
  probe
  misc_feature (1)..(25): SEQ ID NO: 2850; WAN024C8D; Start 429; Stop 453
acgaattgctgttacttcaagacca

SEQ ID NO: 338853 - DNA, 25 bp, Artificial
  probe
  misc_feature (1)..(25): SEQ ID NO: 2850; WAN024C8D; Start 13; Stop 37
gttacttcagcaggaccttcaacat

SEQ ID NO: 338854 - DNA, 25 bp, Artificial
  probe
  misc_feature (1)..(25): SEQ ID NO: 2850; WAN024C8D; Start 420; Stop 444
agtcacatcacgaattgctgttact

SEQ ID NO: 338855 - DNA, 25 bp, Artificial
  probe
  misc_feature (1)..(25): SEQ ID NO: 2850; WAN024C8D; Start 189; Stop 213
tggtagagaagctagaagtacacga

SEQ ID NO: 338856 - DNA, 25 bp, Artificial
  probe
  misc_feature (1)..(25): SEQ ID NO: 2851; WAN024ARE; Start 4; Stop 28
tcacctcaatatgctaaacaaactg

SEQ ID NO: 338857 - DNA, 25 bp, Artificial
  probe
  misc_feature (1)..(25): SEQ ID NO: 2851; WAN024ARE; Start 3; Stop 27
gtcacctcaatatgctaaacaaact

SEQ ID NO: 338858 - DNA, 25 bp, Artificial
  probe
  misc_feature (1)..(25): SEQ ID NO: 2851; WAN024ARE; Start 5; Stop 29
cacctcaatatgctaaacaaactga

SEQ ID NO: 338859 - DNA, 25 bp, Artificial
  probe
  misc_feature (1)..(25): SEQ ID NO: 2851; WAN024ARE; Start 2; Stop 26
tgtcacctcaatatgctaaacaaac

SEQ ID NO: 338860 - DNA, 25 bp, Artificial
  probe
  misc_feature (1)..(25): SEQ ID NO: 2851; WAN024ARE; Start 1; Stop 25
atgtcacctcaatatgctaaacaaa

SEQ ID NO: 338861 - DNA, 25 bp, Artificial
  probe
  misc_feature (1)..(25): SEQ ID NO: 2851; WAN024ARE; Start 9; Stop 33
tcaatatgctaaacaaactgagaat

SEQ ID NO: 338862 - DNA, 25 bp, Artificial
  probe
  misc_feature (1)..(25): SEQ ID NO: 2851; WAN024ARE; Start 14; Stop 38
atgctaaacaaactgagaataatct

SEQ ID NO: 338863 - DNA, 25 bp, Artificial
  probe
  misc_feature (1)..(25): SEQ ID NO: 2851; WAN024ARE; Start 10; Stop 34
caatatgctaaacaaactgagaata

SEQ ID NO: 338864 - DNA, 25 bp, Artificial
  probe
  misc_feature (1)..(25): SEQ ID NO: 2851; WAN024ARE; Start 6; Stop 30
acctcaatatgctaaacaaactgag

SEQ ID NO: 338865 - DNA, 25 bp, Artificial
  probe
  misc_feature (1)..(25): SEQ ID NO: 2851; WAN024ARE; Start 7; Stop 31
cctcaatatgctaaacaaactgaga

SEQ ID NO: 338866 - DNA, 25 bp, Artificial
  probe
  misc_feature (1)..(25): SEQ ID NO: 2851; WAN024ARE; Start 13; Stop 37
tatgctaaacaaactgagaataatc

SEQ ID NO: 338867 - DNA, 25 bp, Artificial
  probe
  misc_feature (1)..(25): SEQ ID NO: 2851; WAN024ARE; Start 15; Stop 39
tgctaaacaaactgagaataatctc

SEQ ID NO: 338868 - DNA, 25 bp, Artificial
  probe
  misc_feature (1)..(25): SEQ ID NO: 2851; WAN024ARE; Start 8; Stop 32
ctcaatatgctaaacaaactgagaa

SEQ ID NO: 338869 - DNA, 25 bp, Artificial
  probe
  misc_feature (1)..(25): SEQ ID NO: 2851; WAN024ARE; Start 11; Stop 35
aatatgctaaacaaactgagaataa

SEQ ID NO: 338870 - DNA, 25 bp, Artificial
  probe
  misc_feature (1)..(25): SEQ ID NO: 2852; WAN024GHL; Start 636; Stop 660
gacttgtgagaatatccatcttcca

SEQ ID NO: 338871 - DNA, 25 bp, Artificial
  probe
  misc_feature (1)..(25): SEQ ID NO: 2852; WAN024GHL; Start 635; Stop 659
agacttgtgagaatatccatcttcc

SEQ ID NO: 338872 - DNA, 25 bp, Artificial
  probe
  misc_feature (1)..(25): SEQ ID NO: 2852; WAN024GHL; Start 229; Stop 253
tatctaactaaggacaaggttgctg

SEQ ID NO: 338873 - DNA, 25 bp, Artificial
  probe
  misc_feature (1)..(25): SEQ ID NO: 2852; WAN024GHL; Start 228; Stop 252
ttatctaactaaggacaaggttgct

SEQ ID NO: 338874 - DNA, 25 bp, Artificial
  probe
  misc_feature (1)..(25): SEQ ID NO: 2852; WAN024GHL; Start 632; Stop 656
tgaagacttgtgagaatatccatct

SEQ ID NO: 338875 - DNA, 25 bp, Artificial
  probe
  misc_feature (1)..(25): SEQ ID NO: 2852; WAN024GHL; Start 631; Stop 655
ttgaagacttgtgagaatatccatc

SEQ ID NO: 338876 - DNA, 25 bp, Artificial
  probe
  misc_feature (1)..(25): SEQ ID NO: 2852; WAN024GHL; Start 630; Stop 654
cttgaagacttgtgagaatatccat

SEQ ID NO: 338877 - DNA, 25 bp, Artificial
  probe
  misc_feature (1)..(25): SEQ ID NO: 2852; WAN024GHL; Start 230; Stop 254
atctaactaaggacaaggttgctga

SEQ ID NO: 338878 - DNA, 25 bp, Artificial
  probe
  misc_feature (1)..(25): SEQ ID NO: 2852; WAN024GHL; Start 629; Stop 653
tcttgaagacttgtgagaatatcca

SEQ ID NO: 338879 - DNA, 25 bp, Artificial
  probe
  misc_feature (1)..(25): SEQ ID NO: 2852; WAN024GHL; Start 672; Stop 696
agccatcttagacaagtatgagcat

SEQ ID NO: 338880 - DNA, 25 bp, Artificial
  probe
  misc_feature (1)..(25): SEQ ID NO: 2852; WAN024GHL; Start 671; Stop 695
aagccatcttagacaagtatgagca

SEQ ID NO: 338881 - DNA, 25 bp, Artificial
  probe
  misc_feature (1)..(25): SEQ ID NO: 2852; WAN024GHL; Start 231; Stop 255
tctaactaaggacaaggttgctgaa

SEQ ID NO: 338882 - DNA, 25 bp, Artificial
  probe
  misc_feature (1)..(25): SEQ ID NO: 2852; WAN024GHL; Start 676; Stop 700
atcttagacaagtatgagcatgacc

SEQ ID NO: 338883 - DNA, 25 bp, Artificial
  probe
  misc_feature (1)..(25): SEQ ID NO: 2852; WAN024GHL; Start 674; Stop 698
ccatcttagacaagtatgagcatga

SEQ ID NO: 338884 - DNA, 25 bp, Artificial
  probe
  misc_feature (1)..(25): SEQ ID NO: 2852; WAN024GHL; Start 625; Stop 649
cgactcttgaagacttgtgagaata

SEQ ID NO: 338885 - DNA, 25 bp, Artificial
  probe
  misc_feature (1)..(25): SEQ ID NO: 2852; WAN024GHL; Start 675; Stop 699
catcttagacaagtatgagcatgac

SEQ ID NO: 338886 - DNA, 25 bp, Artificial
  probe
  misc_feature (1)..(25): SEQ ID NO: 2852; WAN024GHL; Start 637; Stop 661
acttgtgagaatatccatcttccac

SEQ ID NO: 338887 - DNA, 25 bp, Artificial
  probe
  misc_feature (1)..(25): SEQ ID NO: 2852; WAN024GHL; Start 628; Stop 652
ctcttgaagacttgtgagaatatcc

SEQ ID NO: 338888 - DNA, 25 bp, Artificial
  probe
  misc_feature (1)..(25): SEQ ID NO: 2852; WAN024GHL; Start 673; Stop 697
gccatcttagacaagtatgagcatg

SEQ ID NO: 338889 - DNA, 25 bp, Artificial
  probe
  misc_feature (1)..(25): SEQ ID NO: 2852; WAN024GHL; Start 847; Stop 871
aatcaccagtctctaggataactaa

SEQ ID NO: 338890 - DNA, 25 bp, Artificial
  probe
  misc_feature (1)..(25): SEQ ID NO: 2852; WAN024GHL; Start 845; Stop 869
ttaatcaccagtctctaggataact

SEQ ID NO: 338891 - DNA, 25 bp, Artificial
  probe
  misc_feature (1)..(25): SEQ ID NO: 2852; WAN024GHL; Start 638; Stop 662
cttgtgagaatatccatcttccacg

SEQ ID NO: 338892 - DNA, 25 bp, Artificial
  probe
  misc_feature (1)..(25): SEQ ID NO: 2852; WAN024GHL; Start 627; Stop 651
actcttgaagacttgtgagaatatc

SEQ ID NO: 338893 - DNA, 25 bp, Artificial
  probe
  misc_feature (1)..(25): SEQ ID NO: 2852; WAN024GHL; Start 626; Stop 650
gactcttgaagacttgtgagaatat

SEQ ID NO: 338894 - DNA, 25 bp, Artificial
  probe
  misc_feature (1)..(25): SEQ ID NO: 2852; WAN024GHL; Start 848; Stop 872
atcaccagtctctaggataactaat

SEQ ID NO: 338895 - DNA, 25 bp, Artificial
  probe
  misc_feature (1)..(25): SEQ ID NO: 2852; WAN024GHL; Start 783; Stop 807
tctctatacgatgaataatgctgat

SEQ ID NO: 338896 - DNA, 25 bp, Artificial
  probe
  misc_feature (1)..(25): SEQ ID NO: 2852; WAN024GHL; Start 782; Stop 806
atctctatacgatgaataatgctga

SEQ ID NO: 338897 - DNA, 25 bp, Artificial
  probe
  misc_feature (1)..(25): SEQ ID NO: 2852; WAN024GHL; Start 237; Stop 261
taaggacaaggttgctgaaactatt

SEQ ID NO: 338898 - DNA, 25 bp, Artificial
  probe
  misc_feature (1)..(25): SEQ ID NO: 2852; WAN024GHL; Start 142; Stop 166
tttaatatcaaggaaacgacggttc

SEQ ID NO: 338899 - DNA, 25 bp, Artificial
  probe
  misc_feature (1)..(25): SEQ ID NO: 2852; WAN024GHL; Start 140; Stop 164
aatttaatatcaaggaaacgacggt

SEQ ID NO: 338900 - DNA, 25 bp, Artificial
  probe
  misc_feature (1)..(25): SEQ ID NO: 2852; WAN024GHL; Start 840; Stop 864
cttgtttaatcaccagtctctagga

SEQ ID NO: 338901 - DNA, 25 bp, Artificial
  probe
  misc_feature (1)..(25): SEQ ID NO: 2852; WAN024GHL; Start 670; Stop 694
aaagccatcttagacaagtatgagc

SEQ ID NO: 338902 - DNA, 25 bp, Artificial
  probe
  misc_feature (1)..(25): SEQ ID NO: 2852; WAN024GHL; Start 846; Stop 870
taatcaccagtctctaggataacta

SEQ ID NO: 338903 - DNA, 25 bp, Artificial
  probe
  misc_feature (1)..(25): SEQ ID NO: 2853; WAN024C8S; Start 230; Stop 254
ttggtgtatcagaaggattcaagaa

SEQ ID NO: 338904 - DNA, 25 bp, Artificial
  probe
  misc_feature (1)..(25): SEQ ID NO: 2853; WAN024C8S; Start 227; Stop 251
ttgttggtgtatcagaaggattcaa

SEQ ID NO: 338905 - DNA, 25 bp, Artificial
  probe
  misc_feature (1)..(25): SEQ ID NO: 2853; WAN024C8S; Start 226; Stop 250
gttgttggtgtatcagaaggattca

SEQ ID NO: 338906 - DNA, 25 bp, Artificial
  probe
  misc_feature (1)..(25): SEQ ID NO: 2853; WAN024C8S; Start 229; Stop 253
gttggtgtatcagaaggattcaaga

SEQ ID NO: 338907 - DNA, 25 bp, Artificial
  probe
  misc_feature (1)..(25): SEQ ID NO: 2853; WAN024C8S; Start 228; Stop 252
tgttggtgtatcagaaggattcaag

SEQ ID NO: 338908 - DNA, 25 bp, Artificial
  probe
  misc_feature (1)..(25): SEQ ID NO: 2853; WAN024C8S; Start 225; Stop 249
ggttgttggtgtatcagaaggattc

SEQ ID NO: 338909 - DNA, 25 bp, Artificial
  probe
  misc_feature (1)..(25): SEQ ID NO: 2853; WAN024C8S; Start 223; Stop 247
atggttgttggtgtatcagaaggat

SEQ ID NO: 338910 - DNA, 25 bp, Artificial
  probe
  misc_feature (1)..(25): SEQ ID NO: 2853; WAN024C8S; Start 224; Stop 248
tggttgttggtgtatcagaaggatt

SEQ ID NO: 338911 - DNA, 25 bp, Artificial
  probe
  misc_feature (1)..(25): SEQ ID NO: 2853; WAN024C8S; Start 11; Stop 35
ttggtaataaagttatcgtgttgcc

SEQ ID NO: 338912 - DNA, 25 bp, Artificial
  probe
  misc_feature (1)..(25): SEQ ID NO: 2853; WAN024C8S; Start 13; Stop 37
ggtaataaagttatcgtgttgcctg

SEQ ID NO: 338913 - DNA, 25 bp, Artificial
  probe
  misc_feature (1)..(25): SEQ ID NO: 2853; WAN024C8S; Start 12; Stop 36
tggtaataaagttatcgtgttgcct

SEQ ID NO: 338914 - DNA, 25 bp, Artificial
  probe
  misc_feature (1)..(25): SEQ ID NO: 2853; WAN024C8S; Start 231; Stop 255
tggtgtatcagaaggattcaagaaa

SEQ ID NO: 338915 - DNA, 25 bp, Artificial
  probe
  misc_feature (1)..(25): SEQ ID NO: 2853; WAN024C8S; Start 15; Stop 39
taataaagttatcgtgttgcctgct

SEQ ID NO: 338916 - DNA, 25 bp, Artificial
  probe
  misc_feature (1)..(25): SEQ ID NO: 2853; WAN024C8S; Start 14; Stop 38
gtaataaagttatcgtgttgcctgc

SEQ ID NO: 338917 - DNA, 25 bp, Artificial
  probe
  misc_feature (1)..(25): SEQ ID NO: 2853; WAN024C8S; Start 232; Stop 256
ggtgtatcagaaggattcaagaaag

SEQ ID NO: 338918 - DNA, 25 bp, Artificial
  probe
  misc_feature (1)..(25): SEQ ID NO: 2853; WAN024C8S; Start 324; Stop 348
taaatctcatccagacgaagttgaa

SEQ ID NO: 338919 - DNA, 25 bp, Artificial
  probe
  misc_feature (1)..(25): SEQ ID NO: 2853; WAN024C8S; Start 323; Stop 347
gtaaatctcatccagacgaagttga

SEQ ID NO: 338920 - DNA, 25 bp, Artificial
  probe
  misc_feature (1)..(25): SEQ ID NO: 2853; WAN024C8S; Start 233; Stop 257
gtgtatcagaaggattcaagaaaga

SEQ ID NO: 338921 - DNA, 25 bp, Artificial
  probe
  misc_feature (1)..(25): SEQ ID NO: 2853; WAN024C8S; Start 222; Stop 246
catggttgttggtgtatcagaagga

SEQ ID NO: 338922 - DNA, 25 bp, Artificial
  probe
  misc_feature (1)..(25): SEQ ID NO: 2853; WAN024C8S; Start 340; Stop 364
gaagttgaagctccagaaggaatta

SEQ ID NO: 338923 - DNA, 25 bp, Artificial
  probe
  misc_feature (1)..(25): SEQ ID NO: 2853; WAN024C8S; Start 322; Stop 346
ggtaaatctcatccagacgaagttg

SEQ ID NO: 338924 - DNA, 25 bp, Artificial
  probe
  misc_feature (1)..(25): SEQ ID NO: 2853; WAN024C8S; Start 389; Stop 413
caatcgttgttagcggaatttcaaa

SEQ ID NO: 338925 - DNA, 25 bp, Artificial
  probe
  misc_feature (1)..(25): SEQ ID NO: 2853; WAN024C8S; Start 325; Stop 349
aaatctcatccagacgaagttgaag

SEQ ID NO: 338926 - DNA, 25 bp, Artificial
  probe
  misc_feature (1)..(25): SEQ ID NO: 2853; WAN024C8S; Start 10; Stop 34
attggtaataaagttatcgtgttgc

SEQ ID NO: 338927 - DNA, 25 bp, Artificial
  probe
  misc_feature (1)..(25): SEQ ID NO: 2853; WAN024C8S; Start 466; Stop 490
ccatataaaggtaaaggtatccgtt

SEQ ID NO: 338928 - DNA, 25 bp, Artificial
  probe
  misc_feature (1)..(25): SEQ ID NO: 2853; WAN024C8S; Start 343; Stop 367
gttgaagctccagaaggaattactt

SEQ ID NO: 338929 - DNA, 25 bp, Artificial
  probe
  misc_feature (1)..(25): SEQ ID NO: 2853; WAN024C8S; Start 341; Stop 365
aagttgaagctccagaaggaattac

SEQ ID NO: 338930 - DNA, 25 bp, Artificial
  probe
  misc_feature (1)..(25): SEQ ID NO: 2853; WAN024C8S; Start 237; Stop 261
atcagaaggattcaagaaagaactt

SEQ ID NO: 338931 - DNA, 25 bp, Artificial
  probe
  misc_feature (1)..(25): SEQ ID NO: 2853; WAN024C8S; Start 326; Stop 350
aatctcatccagacgaagttgaagc

SEQ ID NO: 338932 - DNA, 25 bp, Artificial
  probe
  misc_feature (1)..(25): SEQ ID NO: 2853; WAN024C8S; Start 16; Stop 40
aataaagttatcgtgttgcctgctg

SEQ ID NO: 338933 - DNA, 25 bp, Artificial
  probe
  misc_feature (1)..(25): SEQ ID NO: 2853; WAN024C8S; Start 342; Stop 366
agttgaagctccagaaggaattact

SEQ ID NO: 338934 - DNA, 25 bp, Artificial
  probe
  misc_feature (1)..(25): SEQ ID NO: 2853; WAN024C8S; Start 234; Stop 258
tgtatcagaaggattcaagaaagaa

SEQ ID NO: 338935 - DNA, 25 bp, Artificial
  probe
  misc_feature (1)..(25): SEQ ID NO: 2853; WAN024C8S; Start 368; Stop 392
ttgaacttccaaacccaacaacaat

SEQ ID NO: 338936 - DNA, 25 bp, Artificial
  probe
  misc_feature (1)..(25): SEQ ID NO: 2854; WAN024DME; Start 400; Stop 424
gtaactccaggtcaagtgatctcag

SEQ ID NO: 338937 - DNA, 25 bp, Artificial
  probe
  misc_feature (1)..(25): SEQ ID NO: 2854; WAN024DME; Start 124; Stop 148
tctaaattgtcagaatacggtttgc

SEQ ID NO: 338938 - DNA, 25 bp, Artificial
  probe
  misc_feature (1)..(25): SEQ ID NO: 2854; WAN024DME; Start 401; Stop 425
taactccaggtcaagtgatctcagt

SEQ ID NO: 338939 - DNA, 25 bp, Artificial
  probe
  misc_feature (1)..(25): SEQ ID NO: 2854; WAN024DME; Start 57; Stop 81
tacaggtacaggtaaagaattggca

SEQ ID NO: 338940 - DNA, 25 bp, Artificial
  probe
  misc_feature (1)..(25): SEQ ID NO: 2854; WAN024DME; Start 439; Stop 463
ttgaaagttccagcaatccttgaag

SEQ ID NO: 338941 - DNA, 25 bp, Artificial
  probe
  misc_feature (1)..(25): SEQ ID NO: 2854; WAN024DME; Start 1; Stop 25
atgtcacgttatacaggaccatctt

SEQ ID NO: 338942 - DNA, 25 bp, Artificial
  probe
  misc_feature (1)..(25): SEQ ID NO: 2854; WAN024DME; Start 247; Stop 271
ctaggtttcaactttatgcttcttt

SEQ ID NO: 338943 - DNA, 25 bp, Artificial
  probe
  misc_feature (1)..(25): SEQ ID NO: 2854; WAN024DME; Start 9; Stop 33
ttatacaggaccatcttggaaacaa

SEQ ID NO: 338944 - DNA, 25 bp, Artificial
  probe
  misc_feature (1)..(25): SEQ ID NO: 2854; WAN024DME; Start 8; Stop 32
gttatacaggaccatcttggaaaca

SEQ ID NO: 338945 - DNA, 25 bp, Artificial
  probe
  misc_feature (1)..(25): SEQ ID NO: 2854; WAN024DME; Start 48; Stop 72
cctttcacttacaggtacaggtaaa

SEQ ID NO: 338946 - DNA, 25 bp, Artificial
  probe
  misc_feature (1)..(25): SEQ ID NO: 2854; WAN024DME; Start 125; Stop 149
ctaaattgtcagaatacggtttgca

SEQ ID NO: 338947 - DNA, 25 bp, Artificial
  probe
  misc_feature (1)..(25): SEQ ID NO: 2854; WAN024DME; Start 56; Stop 80
ttacaggtacaggtaaagaattggc

SEQ ID NO: 338948 - DNA, 25 bp, Artificial
  probe
  misc_feature (1)..(25): SEQ ID NO: 2854; WAN024DME; Start 51; Stop 75
ttcacttacaggtacaggtaaagaa

SEQ ID NO: 338949 - DNA, 25 bp, Artificial
  probe
  misc_feature (1)..(25): SEQ ID NO: 2854; WAN024DME; Start 50; Stop 74
tttcacttacaggtacaggtaaaga

SEQ ID NO: 338950 - DNA, 25 bp, Artificial
  probe
  misc_feature (1)..(25): SEQ ID NO: 2854; WAN024DME; Start 55; Stop 79
cttacaggtacaggtaaagaattgg

SEQ ID NO: 338951 - DNA, 25 bp, Artificial
  probe
  misc_feature (1)..(25): SEQ ID NO: 2854; WAN024DME; Start 52; Stop 76
tcacttacaggtacaggtaaagaat

SEQ ID NO: 338952 - DNA, 25 bp, Artificial
  probe
  misc_feature (1)..(25): SEQ ID NO: 2854; WAN024DME; Start 2; Stop 26
tgtcacgttatacaggaccatcttg

SEQ ID NO: 338953 - DNA, 25 bp, Artificial
  probe
  misc_feature (1)..(25): SEQ ID NO: 2854; WAN024DME; Start 7; Stop 31
cgttatacaggaccatcttggaaac

SEQ ID NO: 338954 - DNA, 25 bp, Artificial
  probe
  misc_feature (1)..(25): SEQ ID NO: 2854; WAN024DME; Start 198; Stop 222
acaattccgtaacttgttcgtacaa

SEQ ID NO: 338955 - DNA, 25 bp, Artificial
  probe
  misc_feature (1)..(25): SEQ ID NO: 2854; WAN024DME; Start 408; Stop 432
aggtcaagtgatctcagttcgtgaa

SEQ ID NO: 338956 - DNA, 25 bp, Artificial
  probe
  misc_feature (1)..(25): SEQ ID NO: 2854; WAN024DME; Start 54; Stop 78
acttacaggtacaggtaaagaattg

SEQ ID NO: 338957 - DNA, 25 bp, Artificial
  probe
  misc_feature (1)..(25): SEQ ID NO: 2854; WAN024DME; Start 53; Stop 77
cacttacaggtacaggtaaagaatt

SEQ ID NO: 338958 - DNA, 25 bp, Artificial
  probe
  misc_feature (1)..(25): SEQ ID NO: 2854; WAN024DME; Start 69; Stop 93
taaagaattggcacgtcgtaactac

SEQ ID NO: 338959 - DNA, 25 bp, Artificial
  probe
  misc_feature (1)..(25): SEQ ID NO: 2854; WAN024DME; Start 68; Stop 92
gtaaagaattggcacgtcgtaacta

SEQ ID NO: 338960 - DNA, 25 bp, Artificial
  probe
  misc_feature (1)..(25): SEQ ID NO: 2854; WAN024DME; Start 574; Stop 598
gaagcacttgtcgttgaattctaca

SEQ ID NO: 338961 - DNA, 25 bp, Artificial
  probe
  misc_feature (1)..(25): SEQ ID NO: 2854; WAN024DME; Start 403; Stop 427
actccaggtcaagtgatctcagttc

SEQ ID NO: 338962 - DNA, 25 bp, Artificial
  probe
  misc_feature (1)..(25): SEQ ID NO: 2854; WAN024DME; Start 399; Stop 423
cgtaactccaggtcaagtgatctca

SEQ ID NO: 338963 - DNA, 25 bp, Artificial
  probe
  misc_feature (1)..(25): SEQ ID NO: 2854; WAN024DME; Start 435; Stop 459
atcattgaaagttccagcaatcctt

SEQ ID NO: 338964 - DNA, 25 bp, Artificial
  probe
  misc_feature (1)..(25): SEQ ID NO: 2854; WAN024DME; Start 49; Stop 73
ctttcacttacaggtacaggtaaag

SEQ ID NO: 338965 - DNA, 25 bp, Artificial
  probe
  misc_feature (1)..(25): SEQ ID NO: 2854; WAN024DME; Start 5; Stop 29
cacgttatacaggaccatcttggaa

SEQ ID NO: 338966 - DNA, 25 bp, Artificial
  probe
  misc_feature (1)..(25): SEQ ID NO: 2854; WAN024DME; Start 438; Stop 462
attgaaagttccagcaatccttgaa

SEQ ID NO: 338967 - DNA, 25 bp, Artificial
  probe
  misc_feature (1)..(25): SEQ ID NO: 2854; WAN024DME; Start 444; Stop 468
agttccagcaatccttgaagcagta

SEQ ID NO: 338968 - DNA, 25 bp, Artificial
  probe
  misc_feature (1)..(25): SEQ ID NO: 2854; WAN024DME; Start 58; Stop 82
acaggtacaggtaaagaattggcac

SEQ ID NO: 338969 - DNA, 25 bp, Artificial
  probe
  misc_feature (1)..(25): SEQ ID NO: 2855; WAN024E2S; Start 439; Stop 463
tatacttatgttatcgctggagacg

SEQ ID NO: 338970 - DNA, 25 bp, Artificial
  probe
  misc_feature (1)..(25): SEQ ID NO: 2855; WAN024E2S; Start 1938; Stop 1962
gaatatcgttgctcaagttaagtcc

SEQ ID NO: 338971 - DNA, 25 bp, Artificial
  probe
  misc_feature (1)..(25): SEQ ID NO: 2855; WAN024E2S; Start 1937; Stop 1961
agaatatcgttgctcaagttaagtc

SEQ ID NO: 338972 - DNA, 25 bp, Artificial
  probe
  misc_feature (1)..(25): SEQ ID NO: 2855; WAN024E2S; Start 32; Stop 56
ttcttggcgtagatgctattaacaa

SEQ ID NO: 338973 - DNA, 25 bp, Artificial
  probe
  misc_feature (1)..(25): SEQ ID NO: 2855; WAN024E2S; Start 195; Stop 219
atcaatgctactgtatgctctcttg

SEQ ID NO: 338974 - DNA, 25 bp, Artificial
  probe
  misc_feature (1)..(25): SEQ ID NO: 2855; WAN024E2S; Start 964; Stop 988
gctagtgagattgacgctattgtag

SEQ ID NO: 338975 - DNA, 25 bp, Artificial
  probe
  misc_feature (1)..(25): SEQ ID NO: 2855; WAN024E2S; Start 194; Stop 218
gatcaatgctactgtatgctctctt

SEQ ID NO: 338976 - DNA, 25 bp, Artificial
  probe
  misc_feature (1)..(25): SEQ ID NO: 2855; WAN024E2S; Start 1932; Stop 1956
ggtagagaatatcgttgctcaagtt

SEQ ID NO: 338977 - DNA, 25 bp, Artificial
  probe
  misc_feature (1)..(25): SEQ ID NO: 2855; WAN024E2S; Start 1936; Stop 1960
gagaatatcgttgctcaagttaagt

SEQ ID NO: 338978 - DNA, 25 bp, Artificial
  probe
  misc_feature (1)..(25): SEQ ID NO: 2855; WAN024E2S; Start 931; Stop 955
gtgtctgattacaaggttgcttatc

SEQ ID NO: 338979 - DNA, 25 bp, Artificial
  probe
  misc_feature (1)..(25): SEQ ID NO: 2855; WAN024E2S; Start 438; Stop 462
ttatacttatgttatcgctggagac

SEQ ID NO: 338980 - DNA, 25 bp, Artificial
  probe
  misc_feature (1)..(25): SEQ ID NO: 2855; WAN024E2S; Start 1935; Stop 1959
agagaatatcgttgctcaagttaag

SEQ ID NO: 338981 - DNA, 25 bp, Artificial
  probe
  misc_feature (1)..(25): SEQ ID NO: 2855; WAN024E2S; Start 440; Stop 464
atacttatgttatcgctggagacgg

SEQ ID NO: 338982 - DNA, 25 bp, Artificial
  probe
  misc_feature (1)..(25): SEQ ID NO: 2855; WAN024E2S; Start 1153; Stop 1177
atcaaggcagatggcttacaagata

SEQ ID NO: 338983 - DNA, 25 bp, Artificial
  probe
  misc_feature (1)..(25): SEQ ID NO: 2855; WAN024E2S; Start 963; Stop 987
tgctagtgagattgacgctattgta

SEQ ID NO: 338984 - DNA, 25 bp, Artificial
  probe
  misc_feature (1)..(25): SEQ ID NO: 2855; WAN024E2S; Start 932; Stop 956
tgtctgattacaaggttgcttatcc

SEQ ID NO: 338985 - DNA, 25 bp, Artificial
  probe
  misc_feature (1)..(25): SEQ ID NO: 2855; WAN024E2S; Start 930; Stop 954
ggtgtctgattacaaggttgcttat

SEQ ID NO: 338986 - DNA, 25 bp, Artificial
  probe
  misc_feature (1)..(25): SEQ ID NO: 2855; WAN024E2S; Start 1154; Stop 1178
tcaaggcagatggcttacaagataa

SEQ ID NO: 338987 - DNA, 25 bp, Artificial
  probe
  misc_feature (1)..(25): SEQ ID NO: 2855; WAN024E2S; Start 1521; Stop 1545
cactccaactgtcattgtcttaacc

SEQ ID NO: 338988 - DNA, 25 bp, Artificial
  probe
  misc_feature (1)..(25): SEQ ID NO: 2855; WAN024E2S; Start 1520; Stop 1544
ccactccaactgtcattgtcttaac

SEQ ID NO: 338989 - DNA, 25 bp, Artificial
  probe
  misc_feature (1)..(25): SEQ ID NO: 2855; WAN024E2S; Start 1933; Stop 1957
gtagagaatatcgttgctcaagtta

SEQ ID NO: 338990 - DNA, 25 bp, Artificial
  probe
  misc_feature (1)..(25): SEQ ID NO: 2855; WAN024E2S; Start 191; Stop 215
atggatcaatgctactgtatgctct

SEQ ID NO: 338991 - DNA, 25 bp, Artificial
  probe
  misc_feature (1)..(25): SEQ ID NO: 2855; WAN024E2S; Start 1044; Stop 1068
cttctctcaagcaactcgtaattcg

SEQ ID NO: 338992 - DNA, 25 bp, Artificial
  probe
  misc_feature (1)..(25): SEQ ID NO: 2855; WAN024E2S; Start 961; Stop 985
gttgctagtgagattgacgctattg

SEQ ID NO: 338993 - DNA, 25 bp, Artificial
  probe
  misc_feature (1)..(25): SEQ ID NO: 2855; WAN024E2S; Start 1519; Stop 1543
accactccaactgtcattgtcttaa

SEQ ID NO: 338994 - DNA, 25 bp, Artificial
  probe
  misc_feature (1)..(25): SEQ ID NO: 2855; WAN024E2S; Start 187; Stop 211
ggtcatggatcaatgctactgtatg

SEQ ID NO: 338995 - DNA, 25 bp, Artificial
  probe
  misc_feature (1)..(25): SEQ ID NO: 2855; WAN024E2S; Start 1636; Stop 1660
attatcattgctacaggatctgagg

SEQ ID NO: 338996 - DNA, 25 bp, Artificial
  probe
  misc_feature (1)..(25): SEQ ID NO: 2855; WAN024E2S; Start 960; Stop 984
agttgctagtgagattgacgctatt

SEQ ID NO: 338997 - DNA, 25 bp, Artificial
  probe
  misc_feature (1)..(25): SEQ ID NO: 2855; WAN024E2S; Start 959; Stop 983
aagttgctagtgagattgacgctat

SEQ ID NO: 338998 - DNA, 25 bp, Artificial
  probe
  misc_feature (1)..(25): SEQ ID NO: 2855; WAN024E2S; Start 432; Stop 456
tgaccattatacttatgttatcgct

SEQ ID NO: 338999 - DNA, 25 bp, Artificial
  probe
  misc_feature (1)..(25): SEQ ID NO: 2855; WAN024E2S; Start 1755; Stop 1779
agatgctacctacaaggaagacatt

SEQ ID NO: 339000 - DNA, 25 bp, Artificial
  probe
  misc_feature (1)..(25): SEQ ID NO: 2855; WAN024E2S; Start 1754; Stop 1778
aagatgctacctacaaggaagacat

SEQ ID NO: 339001 - DNA, 25 bp, Artificial
  probe
  misc_feature (1)..(25): SEQ ID NO: 2855; WAN024E2S; Start 193; Stop 217
ggatcaatgctactgtatgctctct

SEQ ID NO: 339002 - DNA, 25 bp, Artificial
  probe
  misc_feature (1)..(25): SEQ ID NO: 2856; WAN024EYO; Start 56; Stop 80
gtaaagttactggagacagcaagac

SEQ ID NO: 339003 - DNA, 25 bp, Artificial
  probe
  misc_feature (1)..(25): SEQ ID NO: 2856; WAN024EYO; Start 57; Stop 81
taaagttactggagacagcaagaca

SEQ ID NO: 339004 - DNA, 25 bp, Artificial
  probe
  misc_feature (1)..(25): SEQ ID NO: 2856; WAN024EYO; Start 63; Stop 87
tactggagacagcaagacagaactt

SEQ ID NO: 339005 - DNA, 25 bp, Artificial
  probe
  misc_feature (1)..(25): SEQ ID NO: 2856; WAN024EYO; Start 62; Stop 86
ttactggagacagcaagacagaact

SEQ ID NO: 339006 - DNA, 25 bp, Artificial
  probe
  misc_feature (1)..(25): SEQ ID NO: 2856; WAN024EYO; Start 61; Stop 85
gttactggagacagcaagacagaac

SEQ ID NO: 339007 - DNA, 25 bp, Artificial
  probe
  misc_feature (1)..(25): SEQ ID NO: 2856; WAN024EYO; Start 60; Stop 84
agttactggagacagcaagacagaa

SEQ ID NO: 339008 - DNA, 25 bp, Artificial
  probe
  misc_feature (1)..(25): SEQ ID NO: 2856; WAN024EYO; Start 59; Stop 83
aagttactggagacagcaagacaga

SEQ ID NO: 339009 - DNA, 25 bp, Artificial
  probe
  misc_feature (1)..(25): SEQ ID NO: 2856; WAN024EYO; Start 53; Stop 77
ttggtaaagttactggagacagcaa

SEQ ID NO: 339010 - DNA, 25 bp, Artificial
  probe
  misc_feature (1)..(25): SEQ ID NO: 2856; WAN024EYO; Start 52; Stop 76
tttggtaaagttactggagacagca

SEQ ID NO: 339011 - DNA, 25 bp, Artificial
  probe
  misc_feature (1)..(25): SEQ ID NO: 2856; WAN024EYO; Start 55; Stop 79
ggtaaagttactggagacagcaaga

SEQ ID NO: 339012 - DNA, 25 bp, Artificial
  probe
  misc_feature (1)..(25): SEQ ID NO: 2856; WAN024EYO; Start 54; Stop 78
tggtaaagttactggagacagcaag

SEQ ID NO: 339013 - DNA, 25 bp, Artificial
  probe
  misc_feature (1)..(25): SEQ ID NO: 2856; WAN024EYO; Start 58; Stop 82
aaagttactggagacagcaagacag

SEQ ID NO: 339014 - DNA, 25 bp, Artificial
  probe
  misc_feature (1)..(25): SEQ ID NO: 2856; WAN024EYO; Start 47; Stop 71
aaggttttggtaaagttactggaga

SEQ ID NO: 339015 - DNA, 25 bp, Artificial
  probe
  misc_feature (1)..(25): SEQ ID NO: 2856; WAN024EYO; Start 45; Stop 69
agaaggttttggtaaagttactgga

SEQ ID NO: 339016 - DNA, 25 bp, Artificial
  probe
  misc_feature (1)..(25): SEQ ID NO: 2856; WAN024EYO; Start 46; Stop 70
gaaggttttggtaaagttactggag

SEQ ID NO: 339017 - DNA, 25 bp, Artificial
  probe
  misc_feature (1)..(25): SEQ ID NO: 2856; WAN024EYO; Start 48; Stop 72
aggttttggtaaagttactggagac

SEQ ID NO: 339018 - DNA, 25 bp, Artificial
  probe
  misc_feature (1)..(25): SEQ ID NO: 2856; WAN024EYO; Start 44; Stop 68
aagaaggttttggtaaagttactgg

SEQ ID NO: 339019 - DNA, 25 bp, Artificial
  probe
  misc_feature (1)..(25): SEQ ID NO: 2856; WAN024EYO; Start 49; Stop 73
ggttttggtaaagttactggagaca

SEQ ID NO: 339020 - DNA, 25 bp, Artificial
  probe
  misc_feature (1)..(25): SEQ ID NO: 2856; WAN024EYO; Start 8; Stop 32
ttgaaaacaaattggaacaagcaac

SEQ ID NO: 339021 - DNA, 25 bp, Artificial
  probe
  misc_feature (1)..(25): SEQ ID NO: 2856; WAN024EYO; Start 10; Stop 34
gaaaacaaattggaacaagcaacag

SEQ ID NO: 339022 - DNA, 25 bp, Artificial
  probe
  misc_feature (1)..(25): SEQ ID NO: 2856; WAN024EYO; Start 3; Stop 27
gtcacttgaaaacaaattggaacaa

SEQ ID NO: 339023 - DNA, 25 bp, Artificial
  probe
  misc_feature (1)..(25): SEQ ID NO: 2856; WAN024EYO; Start 9; Stop 33
tgaaaacaaattggaacaagcaaca

SEQ ID NO: 339024 - DNA, 25 bp, Artificial
  probe
  misc_feature (1)..(25): SEQ ID NO: 2856; WAN024EYO; Start 2; Stop 26
tgtcacttgaaaacaaattggaaca

SEQ ID NO: 339025 - DNA, 25 bp, Artificial
  probe
  misc_feature (1)..(25): SEQ ID NO: 2856; WAN024EYO; Start 12; Stop 36
aaacaaattggaacaagcaacaggc

SEQ ID NO: 339026 - DNA, 25 bp, Artificial
  probe
  misc_feature (1)..(25): SEQ ID NO: 2856; WAN024EYO; Start 1; Stop 25
atgtcacttgaaaacaaattggaac

SEQ ID NO: 339027 - DNA, 25 bp, Artificial
  probe
  misc_feature (1)..(25): SEQ ID NO: 2856; WAN024EYO; Start 50; Stop 74
gttttggtaaagttactggagacag

SEQ ID NO: 339028 - DNA, 25 bp, Artificial
  probe
  misc_feature (1)..(25): SEQ ID NO: 2856; WAN024EYO; Start 11; Stop 35
aaaacaaattggaacaagcaacagg

SEQ ID NO: 339029 - DNA, 25 bp, Artificial
  probe
  misc_feature (1)..(25): SEQ ID NO: 2856; WAN024EYO; Start 43; Stop 67
aaagaaggttttggtaaagttactg

SEQ ID NO: 339030 - DNA, 25 bp, Artificial
  probe
  misc_feature (1)..(25): SEQ ID NO: 2856; WAN024EYO; Start 51; Stop 75
ttttggtaaagttactggagacagc

SEQ ID NO: 339031 - DNA, 25 bp, Artificial
  probe
  misc_feature (1)..(25): SEQ ID NO: 2856; WAN024EYO; Start 152; Stop 176
tagaaggtgccgttgaaggtttgaa

SEQ ID NO: 339032 - DNA, 25 bp, Artificial
  probe
  misc_feature (1)..(25): SEQ ID NO: 2856; WAN024EYO; Start 113; Stop 137
ctaaggcaaaagacgttgtagaaga

SEQ ID NO: 339033 - DNA, 25 bp, Artificial
  probe
  misc_feature (1)..(25): SEQ ID NO: 2856; WAN024EYO; Start 70; Stop 94
gacagcaagacagaacttgaaggag

SEQ ID NO: 339034 - DNA, 25 bp, Artificial
  probe
  misc_feature (1)..(25): SEQ ID NO: 2856; WAN024EYO; Start 68; Stop 92
gagacagcaagacagaacttgaagg

SEQ ID NO: 339035 - DNA, 25 bp, Artificial
  probe
  misc_feature (1)..(25): SEQ ID NO: 2857; WAN024CFG; Start 871; Stop 895
aatgataagcgtgttgagattgatg

SEQ ID NO: 339036 - DNA, 25 bp, Artificial
  probe
  misc_feature (1)..(25): SEQ ID NO: 2857; WAN024CFG; Start 868; Stop 892
aagaatgataagcgtgttgagattg

SEQ ID NO: 339037 - DNA, 25 bp, Artificial
  probe
  misc_feature (1)..(25): SEQ ID NO: 2857; WAN024CFG; Start 875; Stop 899
ataagcgtgttgagattgatggata

SEQ ID NO: 339038 - DNA, 25 bp, Artificial
  probe
  misc_feature (1)..(25): SEQ ID NO: 2857; WAN024CFG; Start 870; Stop 894
gaatgataagcgtgttgagattgat

SEQ ID NO: 339039 - DNA, 25 bp, Artificial
  probe
  misc_feature (1)..(25): SEQ ID NO: 2857; WAN024CFG; Start 877; Stop 901
aagcgtgttgagattgatggatata

SEQ ID NO: 339040 - DNA, 25 bp, Artificial
  probe
  misc_feature (1)..(25): SEQ ID NO: 2857; WAN024CFG; Start 876; Stop 900
taagcgtgttgagattgatggatat

SEQ ID NO: 339041 - DNA, 25 bp, Artificial
  probe
  misc_feature (1)..(25): SEQ ID NO: 2857; WAN024CFG; Start 878; Stop 902
agcgtgttgagattgatggatatag

SEQ ID NO: 339042 - DNA, 25 bp, Artificial
  probe
  misc_feature (1)..(25): SEQ ID NO: 2857; WAN024CFG; Start 869; Stop 893
agaatgataagcgtgttgagattga

SEQ ID NO: 339043 - DNA, 25 bp, Artificial
  probe
  misc_feature (1)..(25): SEQ ID NO: 2857; WAN024CFG; Start 880; Stop 904
cgtgttgagattgatggatatagtg

SEQ ID NO: 339044 - DNA, 25 bp, Artificial
  probe
  misc_feature (1)..(25): SEQ ID NO: 2857; WAN024CFG; Start 879; Stop 903
gcgtgttgagattgatggatatagt

SEQ ID NO: 339045 - DNA, 25 bp, Artificial
  probe
  misc_feature (1)..(25): SEQ ID NO: 2857; WAN024CFG; Start 874; Stop 898
gataagcgtgttgagattgatggat

SEQ ID NO: 339046 - DNA, 25 bp, Artificial
  probe
  misc_feature (1)..(25): SEQ ID NO: 2857; WAN024CFG; Start 814; Stop 838
gttcctatggttgaagaagcctatc

SEQ ID NO: 339047 - DNA, 25 bp, Artificial
  probe
  misc_feature (1)..(25): SEQ ID NO: 2857; WAN024CFG; Start 872; Stop 896
atgataagcgtgttgagattgatgg

SEQ ID NO: 339048 - DNA, 25 bp, Artificial
  probe
  misc_feature (1)..(25): SEQ ID NO: 2857; WAN024CFG; Start 813; Stop 837
agttcctatggttgaagaagcctat

SEQ ID NO: 339049 - DNA, 25 bp, Artificial
  probe
  misc_feature (1)..(25): SEQ ID NO: 2857; WAN024CFG; Start 567; Stop 591
cgtactaacagaagaacaggaagaa

SEQ ID NO: 339050 - DNA, 25 bp, Artificial
  probe
  misc_feature (1)..(25): SEQ ID NO: 2857; WAN024CFG; Start 812; Stop 836
aagttcctatggttgaagaagccta

SEQ ID NO: 339051 - DNA, 25 bp, Artificial
  probe
  misc_feature (1)..(25): SEQ ID NO: 2857; WAN024CFG; Start 367; Stop 391
attgacagtattaagccatcagacg

SEQ ID NO: 339052 - DNA, 25 bp, Artificial
  probe
  misc_feature (1)..(25): SEQ ID NO: 2857; WAN024CFG; Start 881; Stop 905
gtgttgagattgatggatatagtga

SEQ ID NO: 339053 - DNA, 25 bp, Artificial
  probe
  misc_feature (1)..(25): SEQ ID NO: 2857; WAN024CFG; Start 815; Stop 839
ttcctatggttgaagaagcctatca

SEQ ID NO: 339054 - DNA, 25 bp, Artificial
  probe
  misc_feature (1)..(25): SEQ ID NO: 2857; WAN024CFG; Start 360; Stop 384
aagaagtattgacagtattaagcca

SEQ ID NO: 339055 - DNA, 25 bp, Artificial
  probe
  misc_feature (1)..(25): SEQ ID NO: 2857; WAN024CFG; Start 366; Stop 390
tattgacagtattaagccatcagac

SEQ ID NO: 339056 - DNA, 25 bp, Artificial
  probe
  misc_feature (1)..(25): SEQ ID NO: 2857; WAN024CFG; Start 365; Stop 389
gtattgacagtattaagccatcaga

SEQ ID NO: 339057 - DNA, 25 bp, Artificial
  probe
  misc_feature (1)..(25): SEQ ID NO: 2857; WAN024CFG; Start 364; Stop 388
agtattgacagtattaagccatcag

SEQ ID NO: 339058 - DNA, 25 bp, Artificial
  probe
  misc_feature (1)..(25): SEQ ID NO: 2857; WAN024CFG; Start 361; Stop 385
agaagtattgacagtattaagccat

SEQ ID NO: 339059 - DNA, 25 bp, Artificial
  probe
  misc_feature (1)..(25): SEQ ID NO: 2857; WAN024CFG; Start 873; Stop 897
tgataagcgtgttgagattgatgga

SEQ ID NO: 339060 - DNA, 25 bp, Artificial
  probe
  misc_feature (1)..(25): SEQ ID NO: 2857; WAN024CFG; Start 214; Stop 238
catgatggtattgatgttgtaggaa

SEQ ID NO: 339061 - DNA, 25 bp, Artificial
  probe
  misc_feature (1)..(25): SEQ ID NO: 2857; WAN024CFG; Start 566; Stop 590
ccgtactaacagaagaacaggaaga

SEQ ID NO: 339062 - DNA, 25 bp, Artificial
  probe
  misc_feature (1)..(25): SEQ ID NO: 2857; WAN024CFG; Start 362; Stop 386
gaagtattgacagtattaagccatc

SEQ ID NO: 339063 - DNA, 25 bp, Artificial
  probe
  misc_feature (1)..(25): SEQ ID NO: 2857; WAN024CFG; Start 363; Stop 387
aagtattgacagtattaagccatca

SEQ ID NO: 339064 - DNA, 25 bp, Artificial
  probe
  misc_feature (1)..(25): SEQ ID NO: 2857; WAN024CFG; Start 351; Stop 375
gttaggtgtaagaagtattgacagt

SEQ ID NO: 339065 - DNA, 25 bp, Artificial
  probe
  misc_feature (1)..(25): SEQ ID NO: 2857; WAN024CFG; Start 565; Stop 589
accgtactaacagaagaacaggaag

SEQ ID NO: 339066 - DNA, 25 bp, Artificial
  probe
  misc_feature (1)..(25): SEQ ID NO: 2857; WAN024CFG; Start 467; Stop 491
aggcttcattctatattgctataca

SEQ ID NO: 339067 - DNA, 25 bp, Artificial
  probe
  misc_feature (1)..(25): SEQ ID NO: 2857; WAN024CFG; Start 490; Stop 514
caagatgattgtgttcggaagaatc

SEQ ID NO: 339068 - DNA, 25 bp, Artificial
  probe
  misc_feature (1)..(25): SEQ ID NO: 2858; WAN024D9R; Start 360; Stop 384
aacgattacgacttccatcatcaat

SEQ ID NO: 339069 - DNA, 25 bp, Artificial
  probe
  misc_feature (1)..(25): SEQ ID NO: 2858; WAN024D9R; Start 152; Stop 176
ttgaggattctacacggacacataa

SEQ ID NO: 339070 - DNA, 25 bp, Artificial
  probe
  misc_feature (1)..(25): SEQ ID NO: 2858; WAN024D9R; Start 880; Stop 904
atggcaatcttagaatccgtactag

SEQ ID NO: 339071 - DNA, 25 bp, Artificial
  probe
  misc_feature (1)..(25): SEQ ID NO: 2858; WAN024D9R; Start 361; Stop 385
acgattacgacttccatcatcaatg

SEQ ID NO: 339072 - DNA, 25 bp, Artificial
  probe
  misc_feature (1)..(25): SEQ ID NO: 2858; WAN024D9R; Start 359; Stop 383
caacgattacgacttccatcatcaa

SEQ ID NO: 339073 - DNA, 25 bp, Artificial
  probe
  misc_feature (1)..(25): SEQ ID NO: 2858; WAN024D9R; Start 879; Stop 903
aatggcaatcttagaatccgtacta

SEQ ID NO: 339074 - DNA, 25 bp, Artificial
  probe
  misc_feature (1)..(25): SEQ ID NO: 2858; WAN024D9R; Start 884; Stop 908
caatcttagaatccgtactagcgag

SEQ ID NO: 339075 - DNA, 25 bp, Artificial
  probe
  misc_feature (1)..(25): SEQ ID NO: 2858; WAN024D9R; Start 878; Stop 902
gaatggcaatcttagaatccgtact

SEQ ID NO: 339076 - DNA, 25 bp, Artificial
  probe
  misc_feature (1)..(25): SEQ ID NO: 2858; WAN024D9R; Start 344; Stop 368
aattgattgctagtccaacgattac

SEQ ID NO: 339077 - DNA, 25 bp, Artificial
  probe
  misc_feature (1)..(25): SEQ ID NO: 2858; WAN024D9R; Start 343; Stop 367
gaattgattgctagtccaacgatta

SEQ ID NO: 339078 - DNA, 25 bp, Artificial
  probe
  misc_feature (1)..(25): SEQ ID NO: 2858; WAN024D9R; Start 339; Stop 363
tagagaattgattgctagtccaacg

SEQ ID NO: 339079 - DNA, 25 bp, Artificial
  probe
  misc_feature (1)..(25): SEQ ID NO: 2858; WAN024D9R; Start 342; Stop 366
agaattgattgctagtccaacgatt

SEQ ID NO: 339080 - DNA, 25 bp, Artificial
  probe
  misc_feature (1)..(25): SEQ ID NO: 2858; WAN024D9R; Start 154; Stop 178
gaggattctacacggacacataagt

SEQ ID NO: 339081 - DNA, 25 bp, Artificial
  probe
  misc_feature (1)..(25): SEQ ID NO: 2858; WAN024D9R; Start 153; Stop 177
tgaggattctacacggacacataag

SEQ ID NO: 339082 - DNA, 25 bp, Artificial
  probe
  misc_feature (1)..(25): SEQ ID NO: 2858; WAN024D9R; Start 292; Stop 316
ttaggagtggatgtctgtgtgattc

SEQ ID NO: 339083 - DNA, 25 bp, Artificial
  probe
  misc_feature (1)..(25): SEQ ID NO: 2858; WAN024D9R; Start 341; Stop 365
gagaattgattgctagtccaacgat

SEQ ID NO: 339084 - DNA, 25 bp, Artificial
  probe
  misc_feature (1)..(25): SEQ ID NO: 2858; WAN024D9R; Start 338; Stop 362
atagagaattgattgctagtccaac

SEQ ID NO: 339085 - DNA, 25 bp, Artificial
  probe
  misc_feature (1)..(25): SEQ ID NO: 2858; WAN024D9R; Start 885; Stop 909
aatcttagaatccgtactagcgagt

SEQ ID NO: 339086 - DNA, 25 bp, Artificial
  probe
  misc_feature (1)..(25): SEQ ID NO: 2858; WAN024D9R; Start 345; Stop 369
attgattgctagtccaacgattacg

SEQ ID NO: 339087 - DNA, 25 bp, Artificial
  probe
  misc_feature (1)..(25): SEQ ID NO: 2858; WAN024D9R; Start 569; Stop 593
ctgaggaatggagaagtcaagagtt

SEQ ID NO: 339088 - DNA, 25 bp, Artificial
  probe
  misc_feature (1)..(25): SEQ ID NO: 2858; WAN024D9R; Start 877; Stop 901
cgaatggcaatcttagaatccgtac

SEQ ID NO: 339089 - DNA, 25 bp, Artificial
  probe
  misc_feature (1)..(25): SEQ ID NO: 2858; WAN024D9R; Start 340; Stop 364
agagaattgattgctagtccaacga

SEQ ID NO: 339090 - DNA, 25 bp, Artificial
  probe
  misc_feature (1)..(25): SEQ ID NO: 2858; WAN024D9R; Start 881; Stop 905
tggcaatcttagaatccgtactagc

SEQ ID NO: 339091 - DNA, 25 bp, Artificial
  probe
  misc_feature (1)..(25): SEQ ID NO: 2858; WAN024D9R; Start 357; Stop 381
tccaacgattacgacttccatcatc

SEQ ID NO: 339092 - DNA, 25 bp, Artificial
  probe
  misc_feature (1)..(25): SEQ ID NO: 2858; WAN024D9R; Start 883; Stop 907
gcaatcttagaatccgtactagcga

SEQ ID NO: 339093 - DNA, 25 bp, Artificial
  probe
  misc_feature (1)..(25): SEQ ID NO: 2858; WAN024D9R; Start 200; Stop 224
aacttggattggaacgacttgactt

SEQ ID NO: 339094 - DNA, 25 bp, Artificial
  probe
  misc_feature (1)..(25): SEQ ID NO: 2858; WAN024D9R; Start 155; Stop 179
aggattctacacggacacataagtc

SEQ ID NO: 339095 - DNA, 25 bp, Artificial
  probe
  misc_feature (1)..(25): SEQ ID NO: 2858; WAN024D9R; Start 792; Stop 816
caatcgtgatgtagaaatagcagac

SEQ ID NO: 339096 - DNA, 25 bp, Artificial
  probe
  misc_feature (1)..(25): SEQ ID NO: 2858; WAN024D9R; Start 886; Stop 910
atcttagaatccgtactagcgagta

SEQ ID NO: 339097 - DNA, 25 bp, Artificial
  probe
  misc_feature (1)..(25): SEQ ID NO: 2858; WAN024D9R; Start 889; Stop 913
ttagaatccgtactagcgagtagaa

SEQ ID NO: 339098 - DNA, 25 bp, Artificial
  probe
  misc_feature (1)..(25): SEQ ID NO: 2858; WAN024D9R; Start 798; Stop 822
tgatgtagaaatagcagaccacttg

SEQ ID NO: 339099 - DNA, 25 bp, Artificial
  probe
  misc_feature (1)..(25): SEQ ID NO: 2858; WAN024D9R; Start 196; Stop 220
attaaacttggattggaacgacttg

SEQ ID NO: 339100 - DNA, 25 bp, Artificial
  probe
  misc_feature (1)..(25): SEQ ID NO: 2858; WAN024D9R; Start 346; Stop 370
ttgattgctagtccaacgattacga

SEQ ID NO: 339101 - DNA, 25 bp, Artificial
  probe
  misc_feature (1)..(25): SEQ ID NO: 2859; WAN024D74; Start 456; Stop 480
tatcagacaggaattatcacaagca

SEQ ID NO: 339102 - DNA, 25 bp, Artificial
  probe
  misc_feature (1)..(25): SEQ ID NO: 2859; WAN024D74; Start 458; Stop 482
tcagacaggaattatcacaagcaat

SEQ ID NO: 339103 - DNA, 25 bp, Artificial
  probe
  misc_feature (1)..(25): SEQ ID NO: 2859; WAN024D74; Start 457; Stop 481
atcagacaggaattatcacaagcaa

SEQ ID NO: 339104 - DNA, 25 bp, Artificial
  probe
  misc_feature (1)..(25): SEQ ID NO: 2859; WAN024D74; Start 455; Stop 479
ctatcagacaggaattatcacaagc

SEQ ID NO: 339105 - DNA, 25 bp, Artificial
  probe
  misc_feature (1)..(25): SEQ ID NO: 2859; WAN024D74; Start 117; Stop 141
aatactagaggttgcgtgtaatagg

SEQ ID NO: 339106 - DNA, 25 bp, Artificial
  probe
  misc_feature (1)..(25): SEQ ID NO: 2859; WAN024D74; Start 114; Stop 138
gagaatactagaggttgcgtgtaat

SEQ ID NO: 339107 - DNA, 25 bp, Artificial
  probe
  misc_feature (1)..(25): SEQ ID NO: 2859; WAN024D74; Start 184; Stop 208
ataactgctgttgatatggatgctc

SEQ ID NO: 339108 - DNA, 25 bp, Artificial
  probe
  misc_feature (1)..(25): SEQ ID NO: 2859; WAN024D74; Start 183; Stop 207
gataactgctgttgatatggatgct

SEQ ID NO: 339109 - DNA, 25 bp, Artificial
  probe
  misc_feature (1)..(25): SEQ ID NO: 2859; WAN024D74; Start 182; Stop 206
agataactgctgttgatatggatgc

SEQ ID NO: 339110 - DNA, 25 bp, Artificial
  probe
  misc_feature (1)..(25): SEQ ID NO: 2859; WAN024D74; Start 181; Stop 205
aagataactgctgttgatatggatg

SEQ ID NO: 339111 - DNA, 25 bp, Artificial
  probe
  misc_feature (1)..(25): SEQ ID NO: 2859; WAN024D74; Start 115; Stop 139
agaatactagaggttgcgtgtaata

SEQ ID NO: 339112 - DNA, 25 bp, Artificial
  probe
  misc_feature (1)..(25): SEQ ID NO: 2859; WAN024D74; Start 113; Stop 137
agagaatactagaggttgcgtgtaa

SEQ ID NO: 339113 - DNA, 25 bp, Artificial
  probe
  misc_feature (1)..(25): SEQ ID NO: 2859; WAN024D74; Start 112; Stop 136
aagagaatactagaggttgcgtgta

SEQ ID NO: 339114 - DNA, 25 bp, Artificial
  probe
  misc_feature (1)..(25): SEQ ID NO: 2859; WAN024D74; Start 180; Stop 204
caagataactgctgttgatatggat

SEQ ID NO: 339115 - DNA, 25 bp, Artificial
  probe
  misc_feature (1)..(25): SEQ ID NO: 2859; WAN024D74; Start 116; Stop 140
gaatactagaggttgcgtgtaatag

SEQ ID NO: 339116 - DNA, 25 bp, Artificial
  probe
  misc_feature (1)..(25): SEQ ID NO: 2859; WAN024D74; Start 459; Stop 483
cagacaggaattatcacaagcaatt

SEQ ID NO: 339117 - DNA, 25 bp, Artificial
  probe
  misc_feature (1)..(25): SEQ ID NO: 2859; WAN024D74; Start 454; Stop 478
tctatcagacaggaattatcacaag

SEQ ID NO: 339118 - DNA, 25 bp, Artificial
  probe
  misc_feature (1)..(25): SEQ ID NO: 2859; WAN024D74; Start 185; Stop 209
taactgctgttgatatggatgctca

SEQ ID NO: 339119 - DNA, 25 bp, Artificial
  probe
  misc_feature (1)..(25): SEQ ID NO: 2859; WAN024D74; Start 594; Stop 618
gggtatgatttatgacgaaggtttg

SEQ ID NO: 339120 - DNA, 25 bp, Artificial
  probe
  misc_feature (1)..(25): SEQ ID NO: 2859; WAN024D74; Start 596; Stop 620
gtatgatttatgacgaaggtttgct

SEQ ID NO: 339121 - DNA, 25 bp, Artificial
  probe
  misc_feature (1)..(25): SEQ ID NO: 2859; WAN024D74; Start 77; Stop 101
attggttaattgcagaaggaggatt

SEQ ID NO: 339122 - DNA, 25 bp, Artificial
  probe
  misc_feature (1)..(25): SEQ ID NO: 2859; WAN024D74; Start 595; Stop 619
ggtatgatttatgacgaaggtttgc

SEQ ID NO: 339123 - DNA, 25 bp, Artificial
  probe
  misc_feature (1)..(25): SEQ ID NO: 2859; WAN024D74; Start 245; Stop 269
caggtgttgctcatttaatcagttt

SEQ ID NO: 339124 - DNA, 25 bp, Artificial
  probe
  misc_feature (1)..(25): SEQ ID NO: 2859; WAN024D74; Start 76; Stop 100
gattggttaattgcagaaggaggat

SEQ ID NO: 339125 - DNA, 25 bp, Artificial
  probe
  misc_feature (1)..(25): SEQ ID NO: 2859; WAN024D74; Start 593; Stop 617
cgggtatgatttatgacgaaggttt

SEQ ID NO: 339126 - DNA, 25 bp, Artificial
  probe
  misc_feature (1)..(25): SEQ ID NO: 2859; WAN024D74; Start 73; Stop 97
acagattggttaattgcagaaggag

SEQ ID NO: 339127 - DNA, 25 bp, Artificial
  probe
  misc_feature (1)..(25): SEQ ID NO: 2859; WAN024D74; Start 491; Stop 515
atgtaggtcctttaactcaagatgg

SEQ ID NO: 339128 - DNA, 25 bp, Artificial
  probe
  misc_feature (1)..(25): SEQ ID NO: 2859; WAN024D74; Start 601; Stop 625
atttatgacgaaggtttgctaggaa

SEQ ID NO: 339129 - DNA, 25 bp, Artificial
  probe
  misc_feature (1)..(25): SEQ ID NO: 2859; WAN024D74; Start 598; Stop 622
atgatttatgacgaaggtttgctag

SEQ ID NO: 339130 - DNA, 25 bp, Artificial
  probe
  misc_feature (1)..(25): SEQ ID NO: 2859; WAN024D74; Start 72; Stop 96
cacagattggttaattgcagaagga

SEQ ID NO: 339131 - DNA, 25 bp, Artificial
  probe
  misc_feature (1)..(25): SEQ ID NO: 2859; WAN024D74; Start 493; Stop 517
gtaggtcctttaactcaagatggtt

SEQ ID NO: 339132 - DNA, 25 bp, Artificial
  probe
  misc_feature (1)..(25): SEQ ID NO: 2859; WAN024D74; Start 600; Stop 624
gatttatgacgaaggtttgctagga

SEQ ID NO: 339133 - DNA, 25 bp, Artificial
  probe
  misc_feature (1)..(25): SEQ ID NO: 2859; WAN024D74; Start 494; Stop 518
taggtcctttaactcaagatggttg

SEQ ID NO: 339134 - DNA, 25 bp, Artificial
  probe
  misc_feature (1)..(25): SEQ ID NO: 2860; WAN024CLM; Start 138; Stop 162
tctgattggtttgctctttactttg

SEQ ID NO: 339135 - DNA, 25 bp, Artificial
  probe
  misc_feature (1)..(25): SEQ ID NO: 2860; WAN024CLM; Start 134; Stop 158
tgattctgattggtttgctctttac

SEQ ID NO: 339136 - DNA, 25 bp, Artificial
  probe
  misc_feature (1)..(25): SEQ ID NO: 2860; WAN024CLM; Start 132; Stop 156
gatgattctgattggtttgctcttt

SEQ ID NO: 339137 - DNA, 25 bp, Artificial
  probe
  misc_feature (1)..(25): SEQ ID NO: 2860; WAN024CLM; Start 129; Stop 153
tttgatgattctgattggtttgctc

SEQ ID NO: 339138 - DNA, 25 bp, Artificial
  probe
  misc_feature (1)..(25): SEQ ID NO: 2860; WAN024CLM; Start 135; Stop 159
gattctgattggtttgctctttact

SEQ ID NO: 339139 - DNA, 25 bp, Artificial
  probe
  misc_feature (1)..(25): SEQ ID NO: 2860; WAN024CLM; Start 128; Stop 152
gtttgatgattctgattggtttgct

SEQ ID NO: 339140 - DNA, 25 bp, Artificial
  probe
  misc_feature (1)..(25): SEQ ID NO: 2860; WAN024CLM; Start 137; Stop 161
ttctgattggtttgctctttacttt

SEQ ID NO: 339141 - DNA, 25 bp, Artificial
  probe
  misc_feature (1)..(25): SEQ ID NO: 2860; WAN024CLM; Start 121; Stop 145
ttactgggtttgatgattctgattg

SEQ ID NO: 339142 - DNA, 25 bp, Artificial
  probe
  misc_feature (1)..(25): SEQ ID NO: 2860; WAN024CLM; Start 126; Stop 150
gggtttgatgattctgattggtttg

SEQ ID NO: 339143 - DNA, 25 bp, Artificial
  probe
  misc_feature (1)..(25): SEQ ID NO: 2860; WAN024CLM; Start 122; Stop 146
tactgggtttgatgattctgattgg

SEQ ID NO: 339144 - DNA, 25 bp, Artificial
  probe
  misc_feature (1)..(25): SEQ ID NO: 2860; WAN024CLM; Start 136; Stop 160
attctgattggtttgctctttactt

SEQ ID NO: 339145 - DNA, 25 bp, Artificial
  probe
  misc_feature (1)..(25): SEQ ID NO: 2860; WAN024CLM; Start 131; Stop 155
tgatgattctgattggtttgctctt

SEQ ID NO: 339146 - DNA, 25 bp, Artificial
  probe
  misc_feature (1)..(25): SEQ ID NO: 2860; WAN024CLM; Start 130; Stop 154
ttgatgattctgattggtttgctct

SEQ ID NO: 339147 - DNA, 25 bp, Artificial
  probe
  misc_feature (1)..(25): SEQ ID NO: 2860; WAN024CLM; Start 133; Stop 157
atgattctgattggtttgctcttta

SEQ ID NO: 339148 - DNA, 25 bp, Artificial
  probe
  misc_feature (1)..(25): SEQ ID NO: 2860; WAN024CLM; Start 125; Stop 149
tgggtttgatgattctgattggttt

SEQ ID NO: 339149 - DNA, 25 bp, Artificial
  probe
  misc_feature (1)..(25): SEQ ID NO: 2860; WAN024CLM; Start 141; Stop 165
gattggtttgctctttactttgctg

SEQ ID NO: 339150 - DNA, 25 bp, Artificial
  probe
  misc_feature (1)..(25): SEQ ID NO: 2860; WAN024CLM; Start 139; Stop 163
ctgattggtttgctctttactttgc

SEQ ID NO: 339151 - DNA, 25 bp, Artificial
  probe
  misc_feature (1)..(25): SEQ ID NO: 2860; WAN024CLM; Start 127; Stop 151
ggtttgatgattctgattggtttgc

SEQ ID NO: 339152 - DNA, 25 bp, Artificial
  probe
  misc_feature (1)..(25): SEQ ID NO: 2860; WAN024CLM; Start 120; Stop 144
tttactgggtttgatgattctgatt

SEQ ID NO: 339153 - DNA, 25 bp, Artificial
  probe
  misc_feature (1)..(25): SEQ ID NO: 2860; WAN024CLM; Start 124; Stop 148
ctgggtttgatgattctgattggtt

SEQ ID NO: 339154 - DNA, 25 bp, Artificial
  probe
  misc_feature (1)..(25): SEQ ID NO: 2860; WAN024CLM; Start 140; Stop 164
tgattggtttgctctttactttgct

SEQ ID NO: 339155 - DNA, 25 bp, Artificial
  probe
  misc_feature (1)..(25): SEQ ID NO: 2860; WAN024CLM; Start 148; Stop 172
ttgctctttactttgctgggaattt

SEQ ID NO: 339156 - DNA, 25 bp, Artificial
  probe
  misc_feature (1)..(25): SEQ ID NO: 2860; WAN024CLM; Start 147; Stop 171
tttgctctttactttgctgggaatt

SEQ ID NO: 339157 - DNA, 25 bp, Artificial
  probe
  misc_feature (1)..(25): SEQ ID NO: 2860; WAN024CLM; Start 146; Stop 170
gtttgctctttactttgctgggaat

SEQ ID NO: 339158 - DNA, 25 bp, Artificial
  probe
  misc_feature (1)..(25): SEQ ID NO: 2860; WAN024CLM; Start 142; Stop 166
attggtttgctctttactttgctgg

SEQ ID NO: 339159 - DNA, 25 bp, Artificial
  probe
  misc_feature (1)..(25): SEQ ID NO: 2860; WAN024CLM; Start 123; Stop 147
actgggtttgatgattctgattggt

SEQ ID NO: 339160 - DNA, 25 bp, Artificial
  probe
  misc_feature (1)..(25): SEQ ID NO: 2860; WAN024CLM; Start 117; Stop 141
acttttactgggtttgatgattctg

SEQ ID NO: 339161 - DNA, 25 bp, Artificial
  probe
  misc_feature (1)..(25): SEQ ID NO: 2860; WAN024CLM; Start 116; Stop 140
cacttttactgggtttgatgattct

SEQ ID NO: 339162 - DNA, 25 bp, Artificial
  probe
  misc_feature (1)..(25): SEQ ID NO: 2860; WAN024CLM; Start 152; Stop 176
tctttactttgctgggaattttgag

SEQ ID NO: 339163 - DNA, 25 bp, Artificial
  probe
  misc_feature (1)..(25): SEQ ID NO: 2860; WAN024CLM; Start 151; Stop 175
ctctttactttgctgggaattttga

SEQ ID NO: 339164 - DNA, 25 bp, Artificial
  probe
  misc_feature (1)..(25): SEQ ID NO: 2860; WAN024CLM; Start 118; Stop 142
cttttactgggtttgatgattctga

SEQ ID NO: 339165 - DNA, 25 bp, Artificial
  probe
  misc_feature (1)..(25): SEQ ID NO: 2860; WAN024CLM; Start 153; Stop 177
ctttactttgctgggaattttgagg

SEQ ID NO: 339166 - DNA, 25 bp, Artificial
  probe
  misc_feature (1)..(25): SEQ ID NO: 2860; WAN024CLM; Start 119; Stop 143
ttttactgggtttgatgattctgat

SEQ ID NO: 339167 - DNA, 25 bp, Artificial
  probe
  misc_feature (1)..(25): SEQ ID NO: 2861; WAN024GCY; Start 181; Stop 205
aatgcctatgtggatattaaccgtg

SEQ ID NO: 339168 - DNA, 25 bp, Artificial
  probe
  misc_feature (1)..(25): SEQ ID NO: 2861; WAN024GCY; Start 761; Stop 785
tgactggtcgtaagattattgtaga

SEQ ID NO: 339169 - DNA, 25 bp, Artificial
  probe
  misc_feature (1)..(25): SEQ ID NO: 2861; WAN024GCY; Start 760; Stop 784
ttgactggtcgtaagattattgtag

SEQ ID NO: 339170 - DNA, 25 bp, Artificial
  probe
  misc_feature (1)..(25): SEQ ID NO: 2861; WAN024GCY; Start 534; Stop 558
acaagttacagttgagtacgatgaa

SEQ ID NO: 339171 - DNA, 25 bp, Artificial
  probe
  misc_feature (1)..(25): SEQ ID NO: 2861; WAN024GCY; Start 182; Stop 206
atgcctatgtggatattaaccgtgt

SEQ ID NO: 339172 - DNA, 25 bp, Artificial
  probe
  misc_feature (1)..(25): SEQ ID NO: 2861; WAN024GCY; Start 531; Stop 555
atcacaagttacagttgagtacgat

SEQ ID NO: 339173 - DNA, 25 bp, Artificial
  probe
  misc_feature (1)..(25): SEQ ID NO: 2861; WAN024GCY; Start 530; Stop 554
aatcacaagttacagttgagtacga

SEQ ID NO: 339174 - DNA, 25 bp, Artificial
  probe
  misc_feature (1)..(25): SEQ ID NO: 2861; WAN024GCY; Start 533; Stop 557
cacaagttacagttgagtacgatga

SEQ ID NO: 339175 - DNA, 25 bp, Artificial
  probe
  misc_feature (1)..(25): SEQ ID NO: 2861; WAN024GCY; Start 762; Stop 786
gactggtcgtaagattattgtagat

SEQ ID NO: 339176 - DNA, 25 bp, Artificial
  probe
  misc_feature (1)..(25): SEQ ID NO: 2861; WAN024GCY; Start 532; Stop 556
tcacaagttacagttgagtacgatg

SEQ ID NO: 339177 - DNA, 25 bp, Artificial
  probe
  misc_feature (1)..(25): SEQ ID NO: 2861; WAN024GCY; Start 183; Stop 207
tgcctatgtggatattaaccgtgtg

SEQ ID NO: 339178 - DNA, 25 bp, Artificial
  probe
  misc_feature (1)..(25): SEQ ID NO: 2861; WAN024GCY; Start 874; Stop 898
cgctatattgccaagaatatcgttg

SEQ ID NO: 339179 - DNA, 25 bp, Artificial
  probe
  misc_feature (1)..(25): SEQ ID NO: 2861; WAN024GCY; Start 873; Stop 897
tcgctatattgccaagaatatcgtt

SEQ ID NO: 339180 - DNA, 25 bp, Artificial
  probe
  misc_feature (1)..(25): SEQ ID NO: 2861; WAN024GCY; Start 179; Stop 203
caaatgcctatgtggatattaaccg

SEQ ID NO: 339181 - DNA, 25 bp, Artificial
  probe
  misc_feature (1)..(25): SEQ ID NO: 2861; WAN024GCY; Start 180; Stop 204
aaatgcctatgtggatattaaccgt

SEQ ID NO: 339182 - DNA, 25 bp, Artificial
  probe
  misc_feature (1)..(25): SEQ ID NO: 2861; WAN024GCY; Start 875; Stop 899
gctatattgccaagaatatcgttgc

SEQ ID NO: 339183 - DNA, 25 bp, Artificial
  probe
  misc_feature (1)..(25): SEQ ID NO: 2861; WAN024GCY; Start 872; Stop 896
ctcgctatattgccaagaatatcgt

SEQ ID NO: 339184 - DNA, 25 bp, Artificial
  probe
  misc_feature (1)..(25): SEQ ID NO: 2861; WAN024GCY; Start 757; Stop 781
ggtttgactggtcgtaagattattg

SEQ ID NO: 339185 - DNA, 25 bp, Artificial
  probe
  misc_feature (1)..(25): SEQ ID NO: 2861; WAN024GCY; Start 756; Stop 780
aggtttgactggtcgtaagattatt

SEQ ID NO: 339186 - DNA, 25 bp, Artificial
  probe
  misc_feature (1)..(25): SEQ ID NO: 2861; WAN024GCY; Start 758; Stop 782
gtttgactggtcgtaagattattgt

SEQ ID NO: 339187 - DNA, 25 bp, Artificial
  probe
  misc_feature (1)..(25): SEQ ID NO: 2861; WAN024GCY; Start 700; Stop 724
aaattctttatcaatccgacaggtc

SEQ ID NO: 339188 - DNA, 25 bp, Artificial
  probe
  misc_feature (1)..(25): SEQ ID NO: 2861; WAN024GCY; Start 1151; Stop 1175
gtttggataaggtagatgctttgaa

SEQ ID NO: 339189 - DNA, 25 bp, Artificial
  probe
  misc_feature (1)..(25): SEQ ID NO: 2861; WAN024GCY; Start 651; Stop 675
caaggtcatcaaagaagttattcca

SEQ ID NO: 339190 - DNA, 25 bp, Artificial
  probe
  misc_feature (1)..(25): SEQ ID NO: 2861; WAN024GCY; Start 650; Stop 674
acaaggtcatcaaagaagttattcc

SEQ ID NO: 339191 - DNA, 25 bp, Artificial
  probe
  misc_feature (1)..(25): SEQ ID NO: 2861; WAN024GCY; Start 763; Stop 787
actggtcgtaagattattgtagata

SEQ ID NO: 339192 - DNA, 25 bp, Artificial
  probe
  misc_feature (1)..(25): SEQ ID NO: 2861; WAN024GCY; Start 765; Stop 789
tggtcgtaagattattgtagatact

SEQ ID NO: 339193 - DNA, 25 bp, Artificial
  probe
  misc_feature (1)..(25): SEQ ID NO: 2861; WAN024GCY; Start 1150; Stop 1174
cgtttggataaggtagatgctttga

SEQ ID NO: 339194 - DNA, 25 bp, Artificial
  probe
  misc_feature (1)..(25): SEQ ID NO: 2861; WAN024GCY; Start 822; Stop 846
cttctctggtaaagatgcgactaag

SEQ ID NO: 339195 - DNA, 25 bp, Artificial
  probe
  misc_feature (1)..(25): SEQ ID NO: 2861; WAN024GCY; Start 653; Stop 677
aggtcatcaaagaagttattccatc

SEQ ID NO: 339196 - DNA, 25 bp, Artificial
  probe
  misc_feature (1)..(25): SEQ ID NO: 2861; WAN024GCY; Start 582; Stop 606
tacagtcgttatttctactcagcat

SEQ ID NO: 339197 - DNA, 25 bp, Artificial
  probe
  misc_feature (1)..(25): SEQ ID NO: 2861; WAN024GCY; Start 581; Stop 605
atacagtcgttatttctactcagca

SEQ ID NO: 339198 - DNA, 25 bp, Artificial
  probe
  misc_feature (1)..(25): SEQ ID NO: 2861; WAN024GCY; Start 1154; Stop 1178
tggataaggtagatgctttgaaaga

SEQ ID NO: 339199 - DNA, 25 bp, Artificial
  probe
  misc_feature (1)..(25): SEQ ID NO: 2861; WAN024GCY; Start 654; Stop 678
ggtcatcaaagaagttattccatct

SEQ ID NO: 339200 - DNA, 25 bp, Artificial
  probe
  misc_feature (1)..(25): SEQ ID NO: 2862; WAN024EWD; Start 11; Stop 35
agattggcttattcacaggctcatt

SEQ ID NO: 339201 - DNA, 25 bp, Artificial
  probe
  misc_feature (1)..(25): SEQ ID NO: 2862; WAN024EWD; Start 374; Stop 398
aacatctctatatcagttcatcagg

SEQ ID NO: 339202 - DNA, 25 bp, Artificial
  probe
  misc_feature (1)..(25): SEQ ID NO: 2862; WAN024EWD; Start 10; Stop 34
aagattggcttattcacaggctcat

SEQ ID NO: 339203 - DNA, 25 bp, Artificial
  probe
  misc_feature (1)..(25): SEQ ID NO: 2862; WAN024EWD; Start 9; Stop 33
taagattggcttattcacaggctca

SEQ ID NO: 339204 - DNA, 25 bp, Artificial
  probe
  misc_feature (1)..(25): SEQ ID NO: 2862; WAN024EWD; Start 12; Stop 36
gattggcttattcacaggctcattt

SEQ ID NO: 339205 - DNA, 25 bp, Artificial
  probe
  misc_feature (1)..(25): SEQ ID NO: 2862; WAN024EWD; Start 13; Stop 37
attggcttattcacaggctcatttg

SEQ ID NO: 339206 - DNA, 25 bp, Artificial
  probe
  misc_feature (1)..(25): SEQ ID NO: 2862; WAN024EWD; Start 411; Stop 435
tttgaagtttggtcaggatattgcc

SEQ ID NO: 339207 - DNA, 25 bp, Artificial
  probe
  misc_feature (1)..(25): SEQ ID NO: 2862; WAN024EWD; Start 5; Stop 29
cagataagattggcttattcacagg

SEQ ID NO: 339208 - DNA, 25 bp, Artificial
  probe
  misc_feature (1)..(25): SEQ ID NO: 2862; WAN024EWD; Start 18; Stop 42
cttattcacaggctcatttgatccg

SEQ ID NO: 339209 - DNA, 25 bp, Artificial
  probe
  misc_feature (1)..(25): SEQ ID NO: 2862; WAN024EWD; Start 8; Stop 32
ataagattggcttattcacaggctc

SEQ ID NO: 339210 - DNA, 25 bp, Artificial
  probe
  misc_feature (1)..(25): SEQ ID NO: 2862; WAN024EWD; Start 7; Stop 31
gataagattggcttattcacaggct

SEQ ID NO: 339211 - DNA, 25 bp, Artificial
  probe
  misc_feature (1)..(25): SEQ ID NO: 2862; WAN024EWD; Start 6; Stop 30
agataagattggcttattcacaggc

SEQ ID NO: 339212 - DNA, 25 bp, Artificial
  probe
  misc_feature (1)..(25): SEQ ID NO: 2862; WAN024EWD; Start 20; Stop 44
tattcacaggctcatttgatccgat

SEQ ID NO: 339213 - DNA, 25 bp, Artificial
  probe
  misc_feature (1)..(25): SEQ ID NO: 2862; WAN024EWD; Start 3; Stop 27
gtcagataagattggcttattcaca

SEQ ID NO: 339214 - DNA, 25 bp, Artificial
  probe
  misc_feature (1)..(25): SEQ ID NO: 2862; WAN024EWD; Start 2; Stop 26
tgtcagataagattggcttattcac

SEQ ID NO: 339215 - DNA, 25 bp, Artificial
  probe
  misc_feature (1)..(25): SEQ ID NO: 2862; WAN024EWD; Start 17; Stop 41
gcttattcacaggctcatttgatcc

SEQ ID NO: 339216 - DNA, 25 bp, Artificial
  probe
  misc_feature (1)..(25): SEQ ID NO: 2862; WAN024EWD; Start 16; Stop 40
ggcttattcacaggctcatttgatc

SEQ ID NO: 339217 - DNA, 25 bp, Artificial
  probe
  misc_feature (1)..(25): SEQ ID NO: 2862; WAN024EWD; Start 4; Stop 28
tcagataagattggcttattcacag

SEQ ID NO: 339218 - DNA, 25 bp, Artificial
  probe
  misc_feature (1)..(25): SEQ ID NO: 2862; WAN024EWD; Start 15; Stop 39
tggcttattcacaggctcatttgat

SEQ ID NO: 339219 - DNA, 25 bp, Artificial
  probe
  misc_feature (1)..(25): SEQ ID NO: 2862; WAN024EWD; Start 19; Stop 43
ttattcacaggctcatttgatccga

SEQ ID NO: 339220 - DNA, 25 bp, Artificial
  probe
  misc_feature (1)..(25): SEQ ID NO: 2862; WAN024EWD; Start 14; Stop 38
ttggcttattcacaggctcatttga

SEQ ID NO: 339221 - DNA, 25 bp, Artificial
  probe
  misc_feature (1)..(25): SEQ ID NO: 2862; WAN024EWD; Start 412; Stop 436
ttgaagtttggtcaggatattgcct

SEQ ID NO: 339222 - DNA, 25 bp, Artificial
  probe
  misc_feature (1)..(25): SEQ ID NO: 2862; WAN024EWD; Start 1; Stop 25
atgtcagataagattggcttattca

SEQ ID NO: 339223 - DNA, 25 bp, Artificial
  probe
  misc_feature (1)..(25): SEQ ID NO: 2862; WAN024EWD; Start 408; Stop 432
gcttttgaagtttggtcaggatatt

SEQ ID NO: 339224 - DNA, 25 bp, Artificial
  probe
  misc_feature (1)..(25): SEQ ID NO: 2862; WAN024EWD; Start 410; Stop 434
ttttgaagtttggtcaggatattgc

SEQ ID NO: 339225 - DNA, 25 bp, Artificial
  probe
  misc_feature (1)..(25): SEQ ID NO: 2862; WAN024EWD; Start 409; Stop 433
cttttgaagtttggtcaggatattg

SEQ ID NO: 339226 - DNA, 25 bp, Artificial
  probe
  misc_feature (1)..(25): SEQ ID NO: 2862; WAN024EWD; Start 21; Stop 45
attcacaggctcatttgatccgatg

SEQ ID NO: 339227 - DNA, 25 bp, Artificial
  probe
  misc_feature (1)..(25): SEQ ID NO: 2862; WAN024EWD; Start 329; Stop 353
agctgtcttctgatatagagactat

SEQ ID NO: 339228 - DNA, 25 bp, Artificial
  probe
  misc_feature (1)..(25): SEQ ID NO: 2862; WAN024EWD; Start 330; Stop 354
gctgtcttctgatatagagactatt

SEQ ID NO: 339229 - DNA, 25 bp, Artificial
  probe
  misc_feature (1)..(25): SEQ ID NO: 2862; WAN024EWD; Start 407; Stop 431
agcttttgaagtttggtcaggatat

SEQ ID NO: 339230 - DNA, 25 bp, Artificial
  probe
  misc_feature (1)..(25): SEQ ID NO: 2862; WAN024EWD; Start 373; Stop 397
gaacatctctatatcagttcatcag

SEQ ID NO: 339231 - DNA, 25 bp, Artificial
  probe
  misc_feature (1)..(25): SEQ ID NO: 2862; WAN024EWD; Start 406; Stop 430
gagcttttgaagtttggtcaggata

SEQ ID NO: 339232 - DNA, 25 bp, Artificial
  probe
  misc_feature (1)..(25): SEQ ID NO: 2862; WAN024EWD; Start 41; Stop 65
cgatgacaaatgggcatctggatat

SEQ ID NO: 339233 - DNA, 25 bp, Artificial
  probe
  misc_feature (1)..(25): SEQ ID NO: 2863; WAN024CCV; Start 520; Stop 544
gcagaggtttcagaagcagataaaa

SEQ ID NO: 339234 - DNA, 25 bp, Artificial
  probe
  misc_feature (1)..(25): SEQ ID NO: 2863; WAN024CCV; Start 549; Stop 573
tccactacttaaggatgtaaaacct

SEQ ID NO: 339235 - DNA, 25 bp, Artificial
  probe
  misc_feature (1)..(25): SEQ ID NO: 2863; WAN024CCV; Start 548; Stop 572
atccactacttaaggatgtaaaacc

SEQ ID NO: 339236 - DNA, 25 bp, Artificial
  probe
  misc_feature (1)..(25): SEQ ID NO: 2863; WAN024CCV; Start 550; Stop 574
ccactacttaaggatgtaaaacctt

SEQ ID NO: 339237 - DNA, 25 bp, Artificial
  probe
  misc_feature (1)..(25): SEQ ID NO: 2863; WAN024CCV; Start 552; Stop 576
actacttaaggatgtaaaacctttg

SEQ ID NO: 339238 - DNA, 25 bp, Artificial
  probe
  misc_feature (1)..(25): SEQ ID NO: 2863; WAN024CCV; Start 551; Stop 575
cactacttaaggatgtaaaaccttt

SEQ ID NO: 339239 - DNA, 25 bp, Artificial
  probe
  misc_feature (1)..(25): SEQ ID NO: 2864; WAN024G63; Start 626; Stop 650
ttattggtgatgttgaaggtaagaa

SEQ ID NO: 339240 - DNA, 25 bp, Artificial
  probe
  misc_feature (1)..(25): SEQ ID NO: 2864; WAN024G63; Start 370; Stop 394
gttgatcgtatcctgactcttgatt

SEQ ID NO: 339241 - DNA, 25 bp, Artificial
  probe
  misc_feature (1)..(25): SEQ ID NO: 2864; WAN024G63; Start 625; Stop 649
attattggtgatgttgaaggtaaga

SEQ ID NO: 339242 - DNA, 25 bp, Artificial
  probe
  misc_feature (1)..(25): SEQ ID NO: 2864; WAN024G63; Start 614; Stop 638
acgaaggttatattattggtgatgt

SEQ ID NO: 339243 - DNA, 25 bp, Artificial
  probe
  misc_feature (1)..(25): SEQ ID NO: 2864; WAN024G63; Start 369; Stop 393
agttgatcgtatcctgactcttgat

SEQ ID NO: 339244 - DNA, 25 bp, Artificial
  probe
  misc_feature (1)..(25): SEQ ID NO: 2864; WAN024G63; Start 777; Stop 801
tgctgagcttcttgacaatactaat

SEQ ID NO: 339245 - DNA, 25 bp, Artificial
  probe
  misc_feature (1)..(25): SEQ ID NO: 2864; WAN024G63; Start 776; Stop 800
ctgctgagcttcttgacaatactaa

SEQ ID NO: 339246 - DNA, 25 bp, Artificial
  probe
  misc_feature (1)..(25): SEQ ID NO: 2864; WAN024G63; Start 208; Stop 232
ctaatggaattgttaatcatggtcg

SEQ ID NO: 339247 - DNA, 25 bp, Artificial
  probe
  misc_feature (1)..(25): SEQ ID NO: 2864; WAN024G63; Start 214; Stop 238
gaattgttaatcatggtcgatgctt

SEQ ID NO: 339248 - DNA, 25 bp, Artificial
  probe
  misc_feature (1)..(25): SEQ ID NO: 2864; WAN024G63; Start 211; Stop 235
atggaattgttaatcatggtcgatg

SEQ ID NO: 339249 - DNA, 25 bp, Artificial
  probe
  misc_feature (1)..(25): SEQ ID NO: 2864; WAN024G63; Start 215; Stop 239
aattgttaatcatggtcgatgcttg

SEQ ID NO: 339250 - DNA, 25 bp, Artificial
  probe
  misc_feature (1)..(25): SEQ ID NO: 2864; WAN024G63; Start 205; Stop 229
cacctaatggaattgttaatcatgg

SEQ ID NO: 339251 - DNA, 25 bp, Artificial
  probe
  misc_feature (1)..(25): SEQ ID NO: 2864; WAN024G63; Start 778; Stop 802
gctgagcttcttgacaatactaata

SEQ ID NO: 339252 - DNA, 25 bp, Artificial
  probe
  misc_feature (1)..(25): SEQ ID NO: 2864; WAN024G63; Start 210; Stop 234
aatggaattgttaatcatggtcgat

SEQ ID NO: 339253 - DNA, 25 bp, Artificial
  probe
  misc_feature (1)..(25): SEQ ID NO: 2864; WAN024G63; Start 615; Stop 639
cgaaggttatattattggtgatgtt

SEQ ID NO: 339254 - DNA, 25 bp, Artificial
  probe
  misc_feature (1)..(25): SEQ ID NO: 2864; WAN024G63; Start 628; Stop 652
attggtgatgttgaaggtaagaaag

SEQ ID NO: 339255 - DNA, 25 bp, Artificial
  probe
  misc_feature (1)..(25): SEQ ID NO: 2864; WAN024G63; Start 466; Stop 490
aaacattactgcgataaaggattgc

SEQ ID NO: 339256 - DNA, 25 bp, Artificial
  probe
  misc_feature (1)..(25): SEQ ID NO: 2864; WAN024G63; Start 207; Stop 231
cctaatggaattgttaatcatggtc

SEQ ID NO: 339257 - DNA, 25 bp, Artificial
  probe
  misc_feature (1)..(25): SEQ ID NO: 2864; WAN024G63; Start 169; Stop 193
tacatcatccaatcaacaagtttcc

SEQ ID NO: 339258 - DNA, 25 bp, Artificial
  probe
  misc_feature (1)..(25): SEQ ID NO: 2864; WAN024G63; Start 146; Stop 170
aaagtgtccgtggttatgatgttta

SEQ ID NO: 339259 - DNA, 25 bp, Artificial
  probe
  misc_feature (1)..(25): SEQ ID NO: 2864; WAN024G63; Start 216; Stop 240
attgttaatcatggtcgatgcttgt

SEQ ID NO: 339260 - DNA, 25 bp, Artificial
  probe
  misc_feature (1)..(25): SEQ ID NO: 2864; WAN024G63; Start 202; Stop 226
aaccacctaatggaattgttaatca

SEQ ID NO: 339261 - DNA, 25 bp, Artificial
  probe
  misc_feature (1)..(25): SEQ ID NO: 2864; WAN024G63; Start 194; Stop 218
ctgtcaacaaccacctaatggaatt

SEQ ID NO: 339262 - DNA, 25 bp, Artificial
  probe
  misc_feature (1)..(25): SEQ ID NO: 2864; WAN024G63; Start 209; Stop 233
taatggaattgttaatcatggtcga

SEQ ID NO: 339263 - DNA, 25 bp, Artificial
  probe
  misc_feature (1)..(25): SEQ ID NO: 2864; WAN024G63; Start 467; Stop 491
aacattactgcgataaaggattgct

SEQ ID NO: 339264 - DNA, 25 bp, Artificial
  probe
  misc_feature (1)..(25): SEQ ID NO: 2864; WAN024G63; Start 613; Stop 637
aacgaaggttatattattggtgatg

SEQ ID NO: 339265 - DNA, 25 bp, Artificial
  probe
  misc_feature (1)..(25): SEQ ID NO: 2864; WAN024G63; Start 349; Stop 373
aatatgctggttaaggctggagttg

SEQ ID NO: 339266 - DNA, 25 bp, Artificial
  probe
  misc_feature (1)..(25): SEQ ID NO: 2864; WAN024G63; Start 348; Stop 372
caatatgctggttaaggctggagtt

SEQ ID NO: 339267 - DNA, 25 bp, Artificial
  probe
  misc_feature (1)..(25): SEQ ID NO: 2864; WAN024G63; Start 203; Stop 227
accacctaatggaattgttaatcat

SEQ ID NO: 339268 - DNA, 25 bp, Artificial
  probe
  misc_feature (1)..(25): SEQ ID NO: 2864; WAN024G63; Start 201; Stop 225
caaccacctaatggaattgttaatc

SEQ ID NO: 339269 - DNA, 25 bp, Artificial
  probe
  misc_feature (1)..(25): SEQ ID NO: 2864; WAN024G63; Start 469; Stop 493
cattactgcgataaaggattgcttg

SEQ ID NO: 339270 - DNA, 25 bp, Artificial
  probe
  misc_feature (1)..(25): SEQ ID NO: 2864; WAN024G63; Start 147; Stop 171
aagtgtccgtggttatgatgtttac

SEQ ID NO: 339271 - DNA, 25 bp, Artificial
  probe
  misc_feature (1)..(25): SEQ ID NO: 2864; WAN024G63; Start 195; Stop 219
tgtcaacaaccacctaatggaattg

SEQ ID NO: 339272 - DNA, 25 bp, Artificial
  probe
  misc_feature (1)..(25): SEQ ID NO: 2865; WAN024B8O; Start 83; Stop 107
atattatcgctattgatgaccacgc

SEQ ID NO: 339273 - DNA, 25 bp, Artificial
  probe
  misc_feature (1)..(25): SEQ ID NO: 2865; WAN024B8O; Start 167; Stop 191
atgaagaattattgagatcagcagg

SEQ ID NO: 339274 - DNA, 25 bp, Artificial
  probe
  misc_feature (1)..(25): SEQ ID NO: 2865; WAN024B8O; Start 84; Stop 108
tattatcgctattgatgaccacgca

SEQ ID NO: 339275 - DNA, 25 bp, Artificial
  probe
  misc_feature (1)..(25): SEQ ID NO: 2865; WAN024B8O; Start 193; Stop 217
attgatacctgcgataccgttgtag

SEQ ID NO: 339276 - DNA, 25 bp, Artificial
  probe
  misc_feature (1)..(25): SEQ ID NO: 2865; WAN024B8O; Start 192; Stop 216
gattgatacctgcgataccgttgta

SEQ ID NO: 339277 - DNA, 25 bp, Artificial
  probe
  misc_feature (1)..(25): SEQ ID NO: 2865; WAN024B8O; Start 165; Stop 189
agatgaagaattattgagatcagca

SEQ ID NO: 339278 - DNA, 25 bp, Artificial
  probe
  misc_feature (1)..(25): SEQ ID NO: 2865; WAN024B8O; Start 506; Stop 530
tccgtggcaaatacaatctgaatat

SEQ ID NO: 339279 - DNA, 25 bp, Artificial
  probe
  misc_feature (1)..(25): SEQ ID NO: 2865; WAN024B8O; Start 166; Stop 190
gatgaagaattattgagatcagcag

SEQ ID NO: 339280 - DNA, 25 bp, Artificial
  probe
  misc_feature (1)..(25): SEQ ID NO: 2865; WAN024B8O; Start 164; Stop 188
cagatgaagaattattgagatcagc

SEQ ID NO: 339281 - DNA, 25 bp, Artificial
  probe
  misc_feature (1)..(25): SEQ ID NO: 2865; WAN024B8O; Start 438; Stop 462
aaatgtgtctatcgtggagatgaaa

SEQ ID NO: 339282 - DNA, 25 bp, Artificial
  probe
  misc_feature (1)..(25): SEQ ID NO: 2865; WAN024B8O; Start 505; Stop 529
ctccgtggcaaatacaatctgaata

SEQ ID NO: 339283 - DNA, 25 bp, Artificial
  probe
  misc_feature (1)..(25): SEQ ID NO: 2865; WAN024B8O; Start 495; Stop 519
taaattagacctccgtggcaaatac

SEQ ID NO: 339284 - DNA, 25 bp, Artificial
  probe
  misc_feature (1)..(25): SEQ ID NO: 2865; WAN024B8O; Start 494; Stop 518
gtaaattagacctccgtggcaaata

SEQ ID NO: 339285 - DNA, 25 bp, Artificial
  probe
  misc_feature (1)..(25): SEQ ID NO: 2865; WAN024B8O; Start 586; Stop 610
gacctcttgaaagcagatacctata

SEQ ID NO: 339286 - DNA, 25 bp, Artificial
  probe
  misc_feature (1)..(25): SEQ ID NO: 2865; WAN024B8O; Start 637; Stop 661
ttggataccctagtagcattgaatt

SEQ ID NO: 339287 - DNA, 25 bp, Artificial
  probe
  misc_feature (1)..(25): SEQ ID NO: 2865; WAN024B8O; Start 636; Stop 660
tttggataccctagtagcattgaat

SEQ ID NO: 339288 - DNA, 25 bp, Artificial
  probe
  misc_feature (1)..(25): SEQ ID NO: 2865; WAN024B8O; Start 635; Stop 659
atttggataccctagtagcattgaa

SEQ ID NO: 339289 - DNA, 25 bp, Artificial
  probe
  misc_feature (1)..(25): SEQ ID NO: 2865; WAN024B8O; Start 281; Stop 305
taccgactgttattgctaaggtcaa

SEQ ID NO: 339290 - DNA, 25 bp, Artificial
  probe
  misc_feature (1)..(25): SEQ ID NO: 2865; WAN024B8O; Start 585; Stop 609
tgacctcttgaaagcagatacctat

SEQ ID NO: 339291 - DNA, 25 bp, Artificial
  probe
  misc_feature (1)..(25): SEQ ID NO: 2865; WAN024B8O; Start 584; Stop 608
atgacctcttgaaagcagataccta

SEQ ID NO: 339292 - DNA, 25 bp, Artificial
  probe
  misc_feature (1)..(25): SEQ ID NO: 2865; WAN024B8O; Start 412; Stop 436
agtgttgatgtctttcagttggata

SEQ ID NO: 339293 - DNA, 25 bp, Artificial
  probe
  misc_feature (1)..(25): SEQ ID NO: 2865; WAN024B8O; Start 411; Stop 435
tagtgttgatgtctttcagttggat

SEQ ID NO: 339294 - DNA, 25 bp, Artificial
  probe
  misc_feature (1)..(25): SEQ ID NO: 2865; WAN024B8O; Start 410; Stop 434
atagtgttgatgtctttcagttgga

SEQ ID NO: 339295 - DNA, 25 bp, Artificial
  probe
  misc_feature (1)..(25): SEQ ID NO: 2865; WAN024B8O; Start 413; Stop 437
gtgttgatgtctttcagttggataa

SEQ ID NO: 339296 - DNA, 25 bp, Artificial
  probe
  misc_feature (1)..(25): SEQ ID NO: 2865; WAN024B8O; Start 409; Stop 433
aatagtgttgatgtctttcagttgg

SEQ ID NO: 339297 - DNA, 25 bp, Artificial
  probe
  misc_feature (1)..(25): SEQ ID NO: 2865; WAN024B8O; Start 587; Stop 611
acctcttgaaagcagatacctatat

SEQ ID NO: 339298 - DNA, 25 bp, Artificial
  probe
  misc_feature (1)..(25): SEQ ID NO: 2865; WAN024B8O; Start 581; Stop 605
cagatgacctcttgaaagcagatac

SEQ ID NO: 339299 - DNA, 25 bp, Artificial
  probe
  misc_feature (1)..(25): SEQ ID NO: 2865; WAN024B8O; Start 169; Stop 193
gaagaattattgagatcagcaggga

SEQ ID NO: 339300 - DNA, 25 bp, Artificial
  probe
  misc_feature (1)..(25): SEQ ID NO: 2865; WAN024B8O; Start 172; Stop 196
gaattattgagatcagcagggattg

SEQ ID NO: 339301 - DNA, 25 bp, Artificial
  probe
  misc_feature (1)..(25): SEQ ID NO: 2865; WAN024B8O; Start 171; Stop 195
agaattattgagatcagcagggatt

SEQ ID NO: 339302 - DNA, 25 bp, Artificial
  probe
  misc_feature (1)..(25): SEQ ID NO: 2865; WAN024B8O; Start 170; Stop 194
aagaattattgagatcagcagggat

SEQ ID NO: 339303 - DNA, 25 bp, Artificial
  probe
  misc_feature (1)..(25): SEQ ID NO: 2865; WAN024B8O; Start 634; Stop 658
tatttggataccctagtagcattga

SEQ ID NO: 339304 - DNA, 25 bp, Artificial
  probe
  misc_feature (1)..(25): SEQ ID NO: 2865; WAN024B8O; Start 85; Stop 109
attatcgctattgatgaccacgcag

SEQ ID NO: 339305 - DNA, 25 bp, Artificial
  probe
  misc_feature (1)..(25): SEQ ID NO: 2866; WAN024CXW; Start 38; Stop 62
aaatcaaagaagaaatcaaggcaca

SEQ ID NO: 339306 - DNA, 25 bp, Artificial
  probe
  misc_feature (1)..(25): SEQ ID NO: 2866; WAN024CXW; Start 39; Stop 63
aatcaaagaagaaatcaaggcacat

SEQ ID NO: 339307 - DNA, 25 bp, Artificial
  probe
  misc_feature (1)..(25): SEQ ID NO: 2866; WAN024CXW; Start 74; Stop 98
tcgtagaaatgactttggagaatgg

SEQ ID NO: 339308 - DNA, 25 bp, Artificial
  probe
  misc_feature (1)..(25): SEQ ID NO: 2866; WAN024CXW; Start 75; Stop 99
cgtagaaatgactttggagaatggt

SEQ ID NO: 339309 - DNA, 25 bp, Artificial
  probe
  misc_feature (1)..(25): SEQ ID NO: 2866; WAN024CXW; Start 11; Stop 35
catttacagatgtagccaagatgaa

SEQ ID NO: 339310 - DNA, 25 bp, Artificial
  probe
  misc_feature (1)..(25): SEQ ID NO: 2866; WAN024CXW; Start 40; Stop 64
atcaaagaagaaatcaaggcacatg

SEQ ID NO: 339311 - DNA, 25 bp, Artificial
  probe
  misc_feature (1)..(25): SEQ ID NO: 2866; WAN024CXW; Start 204; Stop 228
cgttgaatcctttacttactcagat

SEQ ID NO: 339312 - DNA, 25 bp, Artificial
  probe
  misc_feature (1)..(25): SEQ ID NO: 2866; WAN024CXW; Start 171; Stop 195
ggatgtggaaggagataaacaagtt

SEQ ID NO: 339313 - DNA, 25 bp, Artificial
  probe
  misc_feature (1)..(25): SEQ ID NO: 2866; WAN024CXW; Start 10; Stop 34
gcatttacagatgtagccaagatga

SEQ ID NO: 339314 - DNA, 25 bp, Artificial
  probe
  misc_feature (1)..(25): SEQ ID NO: 2866; WAN024CXW; Start 12; Stop 36
atttacagatgtagccaagatgaaa

SEQ ID NO: 339315 - DNA, 25 bp, Artificial
  probe
  misc_feature (1)..(25): SEQ ID NO: 2866; WAN024CXW; Start 73; Stop 97
gtcgtagaaatgactttggagaatg

SEQ ID NO: 339316 - DNA, 25 bp, Artificial
  probe
  misc_feature (1)..(25): SEQ ID NO: 2866; WAN024CXW; Start 76; Stop 100
gtagaaatgactttggagaatggtc

SEQ ID NO: 339317 - DNA, 25 bp, Artificial
  probe
  misc_feature (1)..(25): SEQ ID NO: 2866; WAN024CXW; Start 175; Stop 199
gtggaaggagataaacaagttaatg

SEQ ID NO: 339318 - DNA, 25 bp, Artificial
  probe
  misc_feature (1)..(25): SEQ ID NO: 2866; WAN024CXW; Start 80; Stop 104
aaatgactttggagaatggtcgtaa

SEQ ID NO: 339319 - DNA, 25 bp, Artificial
  probe
  misc_feature (1)..(25): SEQ ID NO: 2866; WAN024CXW; Start 77; Stop 101
tagaaatgactttggagaatggtcg

SEQ ID NO: 339320 - DNA, 25 bp, Artificial
  probe
  misc_feature (1)..(25): SEQ ID NO: 2866; WAN024CXW; Start 81; Stop 105
aatgactttggagaatggtcgtaag

SEQ ID NO: 339321 - DNA, 25 bp, Artificial
  probe
  misc_feature (1)..(25): SEQ ID NO: 2866; WAN024CXW; Start 79; Stop 103
gaaatgactttggagaatggtcgta

SEQ ID NO: 339322 - DNA, 25 bp, Artificial
  probe
  misc_feature (1)..(25): SEQ ID NO: 2866; WAN024CXW; Start 172; Stop 196
gatgtggaaggagataaacaagtta

SEQ ID NO: 339323 - DNA, 25 bp, Artificial
  probe
  misc_feature (1)..(25): SEQ ID NO: 2866; WAN024CXW; Start 42; Stop 66
caaagaagaaatcaaggcacatgag

SEQ ID NO: 339324 - DNA, 25 bp, Artificial
  probe
  misc_feature (1)..(25): SEQ ID NO: 2866; WAN024CXW; Start 41; Stop 65
tcaaagaagaaatcaaggcacatga

SEQ ID NO: 339325 - DNA, 25 bp, Artificial
  probe
  misc_feature (1)..(25): SEQ ID NO: 2866; WAN024CXW; Start 176; Stop 200
tggaaggagataaacaagttaatgt

SEQ ID NO: 339326 - DNA, 25 bp, Artificial
  probe
  misc_feature (1)..(25): SEQ ID NO: 2866; WAN024CXW; Start 174; Stop 198
tgtggaaggagataaacaagttaat

SEQ ID NO: 339327 - DNA, 25 bp, Artificial
  probe
  misc_feature (1)..(25): SEQ ID NO: 2866; WAN024CXW; Start 173; Stop 197
atgtggaaggagataaacaagttaa

SEQ ID NO: 339328 - DNA, 25 bp, Artificial
  probe
  misc_feature (1)..(25): SEQ ID NO: 2866; WAN024CXW; Start 123; Stop 147
gggtaagctaattgaagtttatcca

SEQ ID NO: 339329 - DNA, 25 bp, Artificial
  probe
  misc_feature (1)..(25): SEQ ID NO: 2866; WAN024CXW; Start 122; Stop 146
tgggtaagctaattgaagtttatcc

SEQ ID NO: 339330 - DNA, 25 bp, Artificial
  probe
  misc_feature (1)..(25): SEQ ID NO: 2866; WAN024CXW; Start 118; Stop 142
agattgggtaagctaattgaagttt

SEQ ID NO: 339331 - DNA, 25 bp, Artificial
  probe
  misc_feature (1)..(25): SEQ ID NO: 2866; WAN024CXW; Start 43; Stop 67
aaagaagaaatcaaggcacatgagg

SEQ ID NO: 339332 - DNA, 25 bp, Artificial
  probe
  misc_feature (1)..(25): SEQ ID NO: 2866; WAN024CXW; Start 170; Stop 194
gggatgtggaaggagataaacaagt

SEQ ID NO: 339333 - DNA, 25 bp, Artificial
  probe
  misc_feature (1)..(25): SEQ ID NO: 2866; WAN024CXW; Start 61; Stop 85
catgagggacaagtcgtagaaatga

SEQ ID NO: 339334 - DNA, 25 bp, Artificial
  probe
  misc_feature (1)..(25): SEQ ID NO: 2866; WAN024CXW; Start 203; Stop 227
acgttgaatcctttacttactcaga

SEQ ID NO: 339335 - DNA, 25 bp, Artificial
  probe
  misc_feature (1)..(25): SEQ ID NO: 2866; WAN024CXW; Start 62; Stop 86
atgagggacaagtcgtagaaatgac

SEQ ID NO: 339336 - DNA, 25 bp, Artificial
  probe
  misc_feature (1)..(25): SEQ ID NO: 2866; WAN024CXW; Start 59; Stop 83
cacatgagggacaagtcgtagaaat

SEQ ID NO: 339337 - DNA, 25 bp, Artificial
  probe
  misc_feature (1)..(25): SEQ ID NO: 2866; WAN024CXW; Start 78; Stop 102
agaaatgactttggagaatggtcgt

SEQ ID NO: 339338 - DNA, 25 bp, Artificial
  probe
  misc_feature (1)..(25): SEQ ID NO: 2867; WAN024DZQ; Start 320; Stop 344
atagccgtaatatcacagaagaagg

SEQ ID NO: 339339 - DNA, 25 bp, Artificial
  probe
  misc_feature (1)..(25): SEQ ID NO: 2867; WAN024DZQ; Start 324; Stop 348
ccgtaatatcacagaagaaggagta

SEQ ID NO: 339340 - DNA, 25 bp, Artificial
  probe
  misc_feature (1)..(25): SEQ ID NO: 2867; WAN024DZQ; Start 321; Stop 345
tagccgtaatatcacagaagaagga

SEQ ID NO: 339341 - DNA, 25 bp, Artificial
  probe
  misc_feature (1)..(25): SEQ ID NO: 2867; WAN024DZQ; Start 317; Stop 341
cagatagccgtaatatcacagaaga

SEQ ID NO: 339342 - DNA, 25 bp, Artificial
  probe
  misc_feature (1)..(25): SEQ ID NO: 2867; WAN024DZQ; Start 313; Stop 337
ttagcagatagccgtaatatcacag

SEQ ID NO: 339343 - DNA, 25 bp, Artificial
  probe
  misc_feature (1)..(25): SEQ ID NO: 2867; WAN024DZQ; Start 322; Stop 346
agccgtaatatcacagaagaaggag

SEQ ID NO: 339344 - DNA, 25 bp, Artificial
  probe
  misc_feature (1)..(25): SEQ ID NO: 2867; WAN024DZQ; Start 314; Stop 338
tagcagatagccgtaatatcacaga

SEQ ID NO: 339345 - DNA, 25 bp, Artificial
  probe
  misc_feature (1)..(25): SEQ ID NO: 2867; WAN024DZQ; Start 325; Stop 349
cgtaatatcacagaagaaggagtaa

SEQ ID NO: 339346 - DNA, 25 bp, Artificial
  probe
  misc_feature (1)..(25): SEQ ID NO: 2867; WAN024DZQ; Start 318; Stop 342
agatagccgtaatatcacagaagaa

SEQ ID NO: 339347 - DNA, 25 bp, Artificial
  probe
  misc_feature (1)..(25): SEQ ID NO: 2867; WAN024DZQ; Start 1109; Stop 1133
aatatggctataataagtcaggacg

SEQ ID NO: 339348 - DNA, 25 bp, Artificial
  probe
  misc_feature (1)..(25): SEQ ID NO: 2867; WAN024DZQ; Start 323; Stop 347
gccgtaatatcacagaagaaggagt

SEQ ID NO: 339349 - DNA, 25 bp, Artificial
  probe
  misc_feature (1)..(25): SEQ ID NO: 2867; WAN024DZQ; Start 319; Stop 343
gatagccgtaatatcacagaagaag

SEQ ID NO: 339350 - DNA, 25 bp, Artificial
  probe
  misc_feature (1)..(25): SEQ ID NO: 2867; WAN024DZQ; Start 316; Stop 340
gcagatagccgtaatatcacagaag

SEQ ID NO: 339351 - DNA, 25 bp, Artificial
  probe
  misc_feature (1)..(25): SEQ ID NO: 2867; WAN024DZQ; Start 1063; Stop 1087
atcatggatgacaatctcttggaat

SEQ ID NO: 339352 - DNA, 25 bp, Artificial
  probe
  misc_feature (1)..(25): SEQ ID NO: 2867; WAN024DZQ; Start 1064; Stop 1088
tcatggatgacaatctcttggaatt

SEQ ID NO: 339353 - DNA, 25 bp, Artificial
  probe
  misc_feature (1)..(25): SEQ ID NO: 2867; WAN024DZQ; Start 315; Stop 339
agcagatagccgtaatatcacagaa

SEQ ID NO: 339354 - DNA, 25 bp, Artificial
  probe
  misc_feature (1)..(25): SEQ ID NO: 2867; WAN024DZQ; Start 327; Stop 351
taatatcacagaagaaggagtaacc

SEQ ID NO: 339355 - DNA, 25 bp, Artificial
  probe
  misc_feature (1)..(25): SEQ ID NO: 2867; WAN024DZQ; Start 328; Stop 352
aatatcacagaagaaggagtaacct

SEQ ID NO: 339356 - DNA, 25 bp, Artificial
  probe
  misc_feature (1)..(25): SEQ ID NO: 2867; WAN024DZQ; Start 144; Stop 168
gtcacctgaagaattgaaggagatg

SEQ ID NO: 339357 - DNA, 25 bp, Artificial
  probe
  misc_feature (1)..(25): SEQ ID NO: 2867; WAN024DZQ; Start 143; Stop 167
agtcacctgaagaattgaaggagat

SEQ ID NO: 339358 - DNA, 25 bp, Artificial
  probe
  misc_feature (1)..(25): SEQ ID NO: 2867; WAN024DZQ; Start 183; Stop 207
cctatcaaacacctatcatctctgg

SEQ ID NO: 339359 - DNA, 25 bp, Artificial
  probe
  misc_feature (1)..(25): SEQ ID NO: 2867; WAN024DZQ; Start 182; Stop 206
tcctatcaaacacctatcatctctg

SEQ ID NO: 339360 - DNA, 25 bp, Artificial
  probe
  misc_feature (1)..(25): SEQ ID NO: 2867; WAN024DZQ; Start 367; Stop 391
aatggttctaagatgttcctatccc

SEQ ID NO: 339361 - DNA, 25 bp, Artificial
  probe
  misc_feature (1)..(25): SEQ ID NO: 2867; WAN024DZQ; Start 436; Stop 460
atgatgtcctttgatgaatgtcctc

SEQ ID NO: 339362 - DNA, 25 bp, Artificial
  probe
  misc_feature (1)..(25): SEQ ID NO: 2867; WAN024DZQ; Start 184; Stop 208
ctatcaaacacctatcatctctggc

SEQ ID NO: 339363 - DNA, 25 bp, Artificial
  probe
  misc_feature (1)..(25): SEQ ID NO: 2867; WAN024DZQ; Start 185; Stop 209
tatcaaacacctatcatctctggct

SEQ ID NO: 339364 - DNA, 25 bp, Artificial
  probe
  misc_feature (1)..(25): SEQ ID NO: 2867; WAN024DZQ; Start 1021; Stop 1045
ctttacttcttgcttaacctgatga

SEQ ID NO: 339365 - DNA, 25 bp, Artificial
  probe
  misc_feature (1)..(25): SEQ ID NO: 2867; WAN024DZQ; Start 1020; Stop 1044
tctttacttcttgcttaacctgatg

SEQ ID NO: 339366 - DNA, 25 bp, Artificial
  probe
  misc_feature (1)..(25): SEQ ID NO: 2867; WAN024DZQ; Start 301; Stop 325
caggtttattctttagcagatagcc

SEQ ID NO: 339367 - DNA, 25 bp, Artificial
  probe
  misc_feature (1)..(25): SEQ ID NO: 2867; WAN024DZQ; Start 302; Stop 326
aggtttattctttagcagatagccg

SEQ ID NO: 339368 - DNA, 25 bp, Artificial
  probe
  misc_feature (1)..(25): SEQ ID NO: 2867; WAN024DZQ; Start 303; Stop 327
ggtttattctttagcagatagccgt

SEQ ID NO: 339369 - DNA, 25 bp, Artificial
  probe
  misc_feature (1)..(25): SEQ ID NO: 2867; WAN024DZQ; Start 145; Stop 169
tcacctgaagaattgaaggagatgg

SEQ ID NO: 339370 - DNA, 25 bp, Artificial
  probe
  misc_feature (1)..(25): SEQ ID NO: 2867; WAN024DZQ; Start 142; Stop 166
cagtcacctgaagaattgaaggaga

SEQ ID NO: 339371 - DNA, 25 bp, Artificial
  probe
  misc_feature (1)..(25): SEQ ID NO: 2868; WAN024GJU; Start 91; Stop 115
atctctcaagtaacactaggacaca

SEQ ID NO: 339372 - DNA, 25 bp, Artificial
  probe
  misc_feature (1)..(25): SEQ ID NO: 2868; WAN024GJU; Start 90; Stop 114
tatctctcaagtaacactaggacac

SEQ ID NO: 339373 - DNA, 25 bp, Artificial
  probe
  misc_feature (1)..(25): SEQ ID NO: 2868; WAN024GJU; Start 92; Stop 116
tctctcaagtaacactaggacacac

SEQ ID NO: 339374 - DNA, 25 bp, Artificial
  probe
  misc_feature (1)..(25): SEQ ID NO: 2868; WAN024GJU; Start 89; Stop 113
atatctctcaagtaacactaggaca

SEQ ID NO: 339375 - DNA, 25 bp, Artificial
  probe
  misc_feature (1)..(25): SEQ ID NO: 2868; WAN024GJU; Start 93; Stop 117
ctctcaagtaacactaggacacacc

SEQ ID NO: 339376 - DNA, 25 bp, Artificial
  probe
  misc_feature (1)..(25): SEQ ID NO: 2868; WAN024GJU; Start 95; Stop 119
ctcaagtaacactaggacacacctt

SEQ ID NO: 339377 - DNA, 25 bp, Artificial
  probe
  misc_feature (1)..(25): SEQ ID NO: 2868; WAN024GJU; Start 246; Stop 270
tatcatttccaactgtgaagaagtc

SEQ ID NO: 339378 - DNA, 25 bp, Artificial
  probe
  misc_feature (1)..(25): SEQ ID NO: 2868; WAN024GJU; Start 94; Stop 118
tctcaagtaacactaggacacacct

SEQ ID NO: 339379 - DNA, 25 bp, Artificial
  probe
  misc_feature (1)..(25): SEQ ID NO: 2868; WAN024GJU; Start 247; Stop 271
atcatttccaactgtgaagaagtcg

SEQ ID NO: 339380 - DNA, 25 bp, Artificial
  probe
  misc_feature (1)..(25): SEQ ID NO: 2868; WAN024GJU; Start 245; Stop 269
atatcatttccaactgtgaagaagt

SEQ ID NO: 339381 - DNA, 25 bp, Artificial
  probe
  misc_feature (1)..(25): SEQ ID NO: 2868; WAN024GJU; Start 242; Stop 266
tgaatatcatttccaactgtgaaga

SEQ ID NO: 339382 - DNA, 25 bp, Artificial
  probe
  misc_feature (1)..(25): SEQ ID NO: 2868; WAN024GJU; Start 323; Stop 347
ctgacgatgacctcaagattgattt

SEQ ID NO: 339383 - DNA, 25 bp, Artificial
  probe
  misc_feature (1)..(25): SEQ ID NO: 2868; WAN024GJU; Start 322; Stop 346
gctgacgatgacctcaagattgatt

SEQ ID NO: 339384 - DNA, 25 bp, Artificial
  probe
  misc_feature (1)..(25): SEQ ID NO: 2868; WAN024GJU; Start 87; Stop 111
tgatatctctcaagtaacactagga

SEQ ID NO: 339385 - DNA, 25 bp, Artificial
  probe
  misc_feature (1)..(25): SEQ ID NO: 2868; WAN024GJU; Start 88; Stop 112
gatatctctcaagtaacactaggac

SEQ ID NO: 339386 - DNA, 25 bp, Artificial
  probe
  misc_feature (1)..(25): SEQ ID NO: 2868; WAN024GJU; Start 244; Stop 268
aatatcatttccaactgtgaagaag

SEQ ID NO: 339387 - DNA, 25 bp, Artificial
  probe
  misc_feature (1)..(25): SEQ ID NO: 2868; WAN024GJU; Start 243; Stop 267
gaatatcatttccaactgtgaagaa

SEQ ID NO: 339388 - DNA, 25 bp, Artificial
  probe
  misc_feature (1)..(25): SEQ ID NO: 2868; WAN024GJU; Start 98; Stop 122
aagtaacactaggacacaccttggt

SEQ ID NO: 339389 - DNA, 25 bp, Artificial
  probe
  misc_feature (1)..(25): SEQ ID NO: 2868; WAN024GJU; Start 73; Stop 97
gtccttgcctttcttgatatctctc

SEQ ID NO: 339390 - DNA, 25 bp, Artificial
  probe
  misc_feature (1)..(25): SEQ ID NO: 2868; WAN024GJU; Start 358; Stop 382
gaaccagactttgacaaacttgctc

SEQ ID NO: 339391 - DNA, 25 bp, Artificial
  probe
  misc_feature (1)..(25): SEQ ID NO: 2868; WAN024GJU; Start 355; Stop 379
cacgaaccagactttgacaaacttg

SEQ ID NO: 339392 - DNA, 25 bp, Artificial
  probe
  misc_feature (1)..(25): SEQ ID NO: 2868; WAN024GJU; Start 99; Stop 123
agtaacactaggacacaccttggtc

SEQ ID NO: 339393 - DNA, 25 bp, Artificial
  probe
  misc_feature (1)..(25): SEQ ID NO: 2868; WAN024GJU; Start 234; Stop 258
tgctggtatgaatatcatttccaac

SEQ ID NO: 339394 - DNA, 25 bp, Artificial
  probe
  misc_feature (1)..(25): SEQ ID NO: 2868; WAN024GJU; Start 229; Stop 253
aaggctgctggtatgaatatcattt

SEQ ID NO: 339395 - DNA, 25 bp, Artificial
  probe
  misc_feature (1)..(25): SEQ ID NO: 2868; WAN024GJU; Start 74; Stop 98
tccttgcctttcttgatatctctca

SEQ ID NO: 339396 - DNA, 25 bp, Artificial
  probe
  misc_feature (1)..(25): SEQ ID NO: 2868; WAN024GJU; Start 235; Stop 259
gctggtatgaatatcatttccaact

SEQ ID NO: 339397 - DNA, 25 bp, Artificial
  probe
  misc_feature (1)..(25): SEQ ID NO: 2868; WAN024GJU; Start 233; Stop 257
ctgctggtatgaatatcatttccaa

SEQ ID NO: 339398 - DNA, 25 bp, Artificial
  probe
  misc_feature (1)..(25): SEQ ID NO: 2868; WAN024GJU; Start 230; Stop 254
aggctgctggtatgaatatcatttc

SEQ ID NO: 339399 - DNA, 25 bp, Artificial
  probe
  misc_feature (1)..(25): SEQ ID NO: 2868; WAN024GJU; Start 321; Stop 345
tgctgacgatgacctcaagattgat

SEQ ID NO: 339400 - DNA, 25 bp, Artificial
  probe
  misc_feature (1)..(25): SEQ ID NO: 2868; WAN024GJU; Start 72; Stop 96
ggtccttgcctttcttgatatctct

SEQ ID NO: 339401 - DNA, 25 bp, Artificial
  probe
  misc_feature (1)..(25): SEQ ID NO: 2868; WAN024GJU; Start 232; Stop 256
gctgctggtatgaatatcatttcca

SEQ ID NO: 339402 - DNA, 25 bp, Artificial
  probe
  misc_feature (1)..(25): SEQ ID NO: 2868; WAN024GJU; Start 17; Stop 41
tttgtaaaatcatcgcaggggaaat

SEQ ID NO: 339403 - DNA, 25 bp, Artificial
  probe
  misc_feature (1)..(25): SEQ ID NO: 2868; WAN024GJU; Start 96; Stop 120
tcaagtaacactaggacacaccttg

SEQ ID NO: 339404 - DNA, 25 bp, Artificial
  probe
  misc_feature (1)..(25): SEQ ID NO: 2869; WAN024FX9; Start 141; Stop 165
tggttcttctggtgaatgtatctac

SEQ ID NO: 339405 - DNA, 25 bp, Artificial
  probe
  misc_feature (1)..(25): SEQ ID NO: 2869; WAN024FX9; Start 139; Stop 163
aatggttcttctggtgaatgtatct

SEQ ID NO: 339406 - DNA, 25 bp, Artificial
  probe
  misc_feature (1)..(25): SEQ ID NO: 2869; WAN024FX9; Start 138; Stop 162
caatggttcttctggtgaatgtatc

SEQ ID NO: 339407 - DNA, 25 bp, Artificial
  probe
  misc_feature (1)..(25): SEQ ID NO: 2869; WAN024FX9; Start 140; Stop 164
atggttcttctggtgaatgtatcta

SEQ ID NO: 339408 - DNA, 25 bp, Artificial
  probe
  misc_feature (1)..(25): SEQ ID NO: 2869; WAN024FX9; Start 137; Stop 161
tcaatggttcttctggtgaatgtat

SEQ ID NO: 339409 - DNA, 25 bp, Artificial
  probe
  misc_feature (1)..(25): SEQ ID NO: 2869; WAN024FX9; Start 133; Stop 157
tatgtcaatggttcttctggtgaat

SEQ ID NO: 339410 - DNA, 25 bp, Artificial
  probe
  misc_feature (1)..(25): SEQ ID NO: 2869; WAN024FX9; Start 132; Stop 156
ttatgtcaatggttcttctggtgaa

SEQ ID NO: 339411 - DNA, 25 bp, Artificial
  probe
  misc_feature (1)..(25): SEQ ID NO: 2869; WAN024FX9; Start 136; Stop 160
gtcaatggttcttctggtgaatgta

SEQ ID NO: 339412 - DNA, 25 bp, Artificial
  probe
  misc_feature (1)..(25): SEQ ID NO: 2869; WAN024FX9; Start 134; Stop 158
atgtcaatggttcttctggtgaatg

SEQ ID NO: 339413 - DNA, 25 bp, Artificial
  probe
  misc_feature (1)..(25): SEQ ID NO: 2869; WAN024FX9; Start 624; Stop 648
tatcggtggtacttatggtgctatg

SEQ ID NO: 339414 - DNA, 25 bp, Artificial
  probe
  misc_feature (1)..(25): SEQ ID NO: 2869; WAN024FX9; Start 623; Stop 647
gtatcggtggtacttatggtgctat

SEQ ID NO: 339415 - DNA, 25 bp, Artificial
  probe
  misc_feature (1)..(25): SEQ ID NO: 2869; WAN024FX9; Start 142; Stop 166
ggttcttctggtgaatgtatctacc

SEQ ID NO: 339416 - DNA, 25 bp, Artificial
  probe
  misc_feature (1)..(25): SEQ ID NO: 2869; WAN024FX9; Start 130; Stop 154
ctttatgtcaatggttcttctggtg

SEQ ID NO: 339417 - DNA, 25 bp, Artificial
  probe
  misc_feature (1)..(25): SEQ ID NO: 2869; WAN024FX9; Start 129; Stop 153
tctttatgtcaatggttcttctggt

SEQ ID NO: 339418 - DNA, 25 bp, Artificial
  probe
  misc_feature (1)..(25): SEQ ID NO: 2869; WAN024FX9; Start 128; Stop 152
gtctttatgtcaatggttcttctgg

SEQ ID NO: 339419 - DNA, 25 bp, Artificial
  probe
  misc_feature (1)..(25): SEQ ID NO: 2869; WAN024FX9; Start 127; Stop 151
ggtctttatgtcaatggttcttctg

SEQ ID NO: 339420 - DNA, 25 bp, Artificial
  probe
  misc_feature (1)..(25): SEQ ID NO: 2869; WAN024FX9; Start 126; Stop 150
aggtctttatgtcaatggttcttct

SEQ ID NO: 339421 - DNA, 25 bp, Artificial
  probe
  misc_feature (1)..(25): SEQ ID NO: 2869; WAN024FX9; Start 123; Stop 147
tcaaggtctttatgtcaatggttct

SEQ ID NO: 339422 - DNA, 25 bp, Artificial
  probe
  misc_feature (1)..(25): SEQ ID NO: 2869; WAN024FX9; Start 121; Stop 145
gttcaaggtctttatgtcaatggtt

SEQ ID NO: 339423 - DNA, 25 bp, Artificial
  probe
  misc_feature (1)..(25): SEQ ID NO: 2869; WAN024FX9; Start 119; Stop 143
gtgttcaaggtctttatgtcaatgg

SEQ ID NO: 339424 - DNA, 25 bp, Artificial
  probe
  misc_feature (1)..(25): SEQ ID NO: 2869; WAN024FX9; Start 118; Stop 142
ggtgttcaaggtctttatgtcaatg

SEQ ID NO: 339425 - DNA, 25 bp, Artificial
  probe
  misc_feature (1)..(25): SEQ ID NO: 2869; WAN024FX9; Start 117; Stop 141
aggtgttcaaggtctttatgtcaat

SEQ ID NO: 339426 - DNA, 25 bp, Artificial
  probe
  misc_feature (1)..(25): SEQ ID NO: 2869; WAN024FX9; Start 122; Stop 146
ttcaaggtctttatgtcaatggttc

SEQ ID NO: 339427 - DNA, 25 bp, Artificial
  probe
  misc_feature (1)..(25): SEQ ID NO: 2869; WAN024FX9; Start 120; Stop 144
tgttcaaggtctttatgtcaatggt

SEQ ID NO: 339428 - DNA, 25 bp, Artificial
  probe
  misc_feature (1)..(25): SEQ ID NO: 2869; WAN024FX9; Start 124; Stop 148
caaggtctttatgtcaatggttctt

SEQ ID NO: 339429 - DNA, 25 bp, Artificial
  probe
  misc_feature (1)..(25): SEQ ID NO: 2869; WAN024FX9; Start 116; Stop 140
aaggtgttcaaggtctttatgtcaa

SEQ ID NO: 339430 - DNA, 25 bp, Artificial
  probe
  misc_feature (1)..(25): SEQ ID NO: 2869; WAN024FX9; Start 135; Stop 159
tgtcaatggttcttctggtgaatgt

SEQ ID NO: 339431 - DNA, 25 bp, Artificial
  probe
  misc_feature (1)..(25): SEQ ID NO: 2869; WAN024FX9; Start 125; Stop 149
aaggtctttatgtcaatggttcttc

SEQ ID NO: 339432 - DNA, 25 bp, Artificial
  probe
  misc_feature (1)..(25): SEQ ID NO: 2869; WAN024FX9; Start 131; Stop 155
tttatgtcaatggttcttctggtga

SEQ ID NO: 339433 - DNA, 25 bp, Artificial
  probe
  misc_feature (1)..(25): SEQ ID NO: 2869; WAN024FX9; Start 723; Stop 747
tatcaacgcaatcattggtaaactc

SEQ ID NO: 339434 - DNA, 25 bp, Artificial
  probe
  misc_feature (1)..(25): SEQ ID NO: 2869; WAN024FX9; Start 722; Stop 746
ctatcaacgcaatcattggtaaact

SEQ ID NO: 339435 - DNA, 25 bp, Artificial
  probe
  misc_feature (1)..(25): SEQ ID NO: 2869; WAN024FX9; Start 633; Stop 657
tacttatggtgctatgccagaactc

SEQ ID NO: 339436 - DNA, 25 bp, Artificial
  probe
  misc_feature (1)..(25): SEQ ID NO: 2869; WAN024FX9; Start 453; Stop 477
aagcctttacacagaaatgttgaaa

SEQ ID NO: 339437 - DNA, 25 bp, Artificial
  probe
  misc_feature (1)..(25): SEQ ID NO: 2870; WAN024D7F; Start 620; Stop 644
atattgctatctggtcttggtatgg

SEQ ID NO: 339438 - DNA, 25 bp, Artificial
  probe
  misc_feature (1)..(25): SEQ ID NO: 2870; WAN024D7F; Start 621; Stop 645
tattgctatctggtcttggtatgga

SEQ ID NO: 339439 - DNA, 25 bp, Artificial
  probe
  misc_feature (1)..(25): SEQ ID NO: 2870; WAN024D7F; Start 560; Stop 584
tattggataaggaattggctcagaa

SEQ ID NO: 339440 - DNA, 25 bp, Artificial
  probe
  misc_feature (1)..(25): SEQ ID NO: 2870; WAN024D7F; Start 157; Stop 181
ggtgtgaaggttactatcttattgg

SEQ ID NO: 339441 - DNA, 25 bp, Artificial
  probe
  misc_feature (1)..(25): SEQ ID NO: 2870; WAN024D7F; Start 637; Stop 661
tggtatggacagttagttcaaggaa

SEQ ID NO: 339442 - DNA, 25 bp, Artificial
  probe
  misc_feature (1)..(25): SEQ ID NO: 2870; WAN024D7F; Start 636; Stop 660
ttggtatggacagttagttcaagga

SEQ ID NO: 339443 - DNA, 25 bp, Artificial
  probe
  misc_feature (1)..(25): SEQ ID NO: 2870; WAN024D7F; Start 4; Stop 28
tcagcatatcaattaccgaccgtat

SEQ ID NO: 339444 - DNA, 25 bp, Artificial
  probe
  misc_feature (1)..(25): SEQ ID NO: 2870; WAN024D7F; Start 156; Stop 180
tggtgtgaaggttactatcttattg

SEQ ID NO: 339445 - DNA, 25 bp, Artificial
  probe
  misc_feature (1)..(25): SEQ ID NO: 2870; WAN024D7F; Start 627; Stop 651
tatctggtcttggtatggacagtta

SEQ ID NO: 339446 - DNA, 25 bp, Artificial
  probe
  misc_feature (1)..(25): SEQ ID NO: 2870; WAN024D7F; Start 633; Stop 657
gtcttggtatggacagttagttcaa

SEQ ID NO: 339447 - DNA, 25 bp, Artificial
  probe
  misc_feature (1)..(25): SEQ ID NO: 2870; WAN024D7F; Start 158; Stop 182
gtgtgaaggttactatcttattgga

SEQ ID NO: 339448 - DNA, 25 bp, Artificial
  probe
  misc_feature (1)..(25): SEQ ID NO: 2870; WAN024D7F; Start 619; Stop 643
gatattgctatctggtcttggtatg

SEQ ID NO: 339449 - DNA, 25 bp, Artificial
  probe
  misc_feature (1)..(25): SEQ ID NO: 2870; WAN024D7F; Start 218; Stop 242
acgacttgtataagattgctatcat

SEQ ID NO: 339450 - DNA, 25 bp, Artificial
  probe
  misc_feature (1)..(25): SEQ ID NO: 2870; WAN024D7F; Start 213; Stop 237
ggcttacgacttgtataagattgct

SEQ ID NO: 339451 - DNA, 25 bp, Artificial
  probe
  misc_feature (1)..(25): SEQ ID NO: 2870; WAN024D7F; Start 214; Stop 238
gcttacgacttgtataagattgcta

SEQ ID NO: 339452 - DNA, 25 bp, Artificial
  probe
  misc_feature (1)..(25): SEQ ID NO: 2870; WAN024D7F; Start 178; Stop 202
ttggaagaattactagaagctggtt

SEQ ID NO: 339453 - DNA, 25 bp, Artificial
  probe
  misc_feature (1)..(25): SEQ ID NO: 2870; WAN024D7F; Start 177; Stop 201
attggaagaattactagaagctggt

SEQ ID NO: 339454 - DNA, 25 bp, Artificial
  probe
  misc_feature (1)..(25): SEQ ID NO: 2870; WAN024D7F; Start 628; Stop 652
atctggtcttggtatggacagttag

SEQ ID NO: 339455 - DNA, 25 bp, Artificial
  probe
  misc_feature (1)..(25): SEQ ID NO: 2870; WAN024D7F; Start 626; Stop 650
ctatctggtcttggtatggacagtt

SEQ ID NO: 339456 - DNA, 25 bp, Artificial
  probe
  misc_feature (1)..(25): SEQ ID NO: 2870; WAN024D7F; Start 224; Stop 248
tgtataagattgctatcatggatgg

SEQ ID NO: 339457 - DNA, 25 bp, Artificial
  probe
  misc_feature (1)..(25): SEQ ID NO: 2870; WAN024D7F; Start 25; Stop 49
gtatggcaggatgaagctagtaatc

SEQ ID NO: 339458 - DNA, 25 bp, Artificial
  probe
  misc_feature (1)..(25): SEQ ID NO: 2870; WAN024D7F; Start 9; Stop 33
atatcaattaccgaccgtatggcag

SEQ ID NO: 339459 - DNA, 25 bp, Artificial
  probe
  misc_feature (1)..(25): SEQ ID NO: 2870; WAN024D7F; Start 217; Stop 241
tacgacttgtataagattgctatca

SEQ ID NO: 339460 - DNA, 25 bp, Artificial
  probe
  misc_feature (1)..(25): SEQ ID NO: 2870; WAN024D7F; Start 159; Stop 183
tgtgaaggttactatcttattggaa

SEQ ID NO: 339461 - DNA, 25 bp, Artificial
  probe
  misc_feature (1)..(25): SEQ ID NO: 2870; WAN024D7F; Start 155; Stop 179
atggtgtgaaggttactatcttatt

SEQ ID NO: 339462 - DNA, 25 bp, Artificial
  probe
  misc_feature (1)..(25): SEQ ID NO: 2870; WAN024D7F; Start 154; Stop 178
aatggtgtgaaggttactatcttat

SEQ ID NO: 339463 - DNA, 25 bp, Artificial
  probe
  misc_feature (1)..(25): SEQ ID NO: 2870; WAN024D7F; Start 632; Stop 656
ggtcttggtatggacagttagttca

SEQ ID NO: 339464 - DNA, 25 bp, Artificial
  probe
  misc_feature (1)..(25): SEQ ID NO: 2870; WAN024D7F; Start 631; Stop 655
tggtcttggtatggacagttagttc

SEQ ID NO: 339465 - DNA, 25 bp, Artificial
  probe
  misc_feature (1)..(25): SEQ ID NO: 2870; WAN024D7F; Start 630; Stop 654
ctggtcttggtatggacagttagtt

SEQ ID NO: 339466 - DNA, 25 bp, Artificial
  probe
  misc_feature (1)..(25): SEQ ID NO: 2870; WAN024D7F; Start 31; Stop 55
caggatgaagctagtaatcaaggag

SEQ ID NO: 339467 - DNA, 25 bp, Artificial
  probe
  misc_feature (1)..(25): SEQ ID NO: 2870; WAN024D7F; Start 349; Stop 373
gctcatattcttctttaccttgctg

SEQ ID NO: 339468 - DNA, 25 bp, Artificial
  probe
  misc_feature (1)..(25): SEQ ID NO: 2870; WAN024D7F; Start 347; Stop 371
ctgctcatattcttctttaccttgc

SEQ ID NO: 339469 - DNA, 25 bp, Artificial
  probe
  misc_feature (1)..(25): SEQ ID NO: 2870; WAN024D7F; Start 5; Stop 29
cagcatatcaattaccgaccgtatg

SEQ ID NO: 339470 - DNA, 25 bp, Artificial
  probe
  misc_feature (1)..(25): SEQ ID NO: 2871; WAN024C57; Start 52; Stop 76
aagagttctgagttcttaccagtga

SEQ ID NO: 339471 - DNA, 25 bp, Artificial
  probe
  misc_feature (1)..(25): SEQ ID NO: 2871; WAN024C57; Start 51; Stop 75
aaagagttctgagttcttaccagtg

SEQ ID NO: 339472 - DNA, 25 bp, Artificial
  probe
  misc_feature (1)..(25): SEQ ID NO: 2871; WAN024C57; Start 50; Stop 74
caaagagttctgagttcttaccagt

SEQ ID NO: 339473 - DNA, 25 bp, Artificial
  probe
  misc_feature (1)..(25): SEQ ID NO: 2871; WAN024C57; Start 233; Stop 257
cagctttgaagtcaagaactgtttg

SEQ ID NO: 339474 - DNA, 25 bp, Artificial
  probe
  misc_feature (1)..(25): SEQ ID NO: 2871; WAN024C57; Start 232; Stop 256
tcagctttgaagtcaagaactgttt

SEQ ID NO: 339475 - DNA, 25 bp, Artificial
  probe
  misc_feature (1)..(25): SEQ ID NO: 2871; WAN024C57; Start 49; Stop 73
ccaaagagttctgagttcttaccag

SEQ ID NO: 339476 - DNA, 25 bp, Artificial
  probe
  misc_feature (1)..(25): SEQ ID NO: 2871; WAN024C57; Start 234; Stop 258
agctttgaagtcaagaactgtttga

SEQ ID NO: 339477 - DNA, 25 bp, Artificial
  probe
  misc_feature (1)..(25): SEQ ID NO: 2871; WAN024C57; Start 231; Stop 255
ttcagctttgaagtcaagaactgtt

SEQ ID NO: 339478 - DNA, 25 bp, Artificial
  probe
  misc_feature (1)..(25): SEQ ID NO: 2871; WAN024C57; Start 230; Stop 254
tttcagctttgaagtcaagaactgt

SEQ ID NO: 339479 - DNA, 25 bp, Artificial
  probe
  misc_feature (1)..(25): SEQ ID NO: 2871; WAN024C57; Start 78; Stop 102
gatttccccatttggcaattcaaag

SEQ ID NO: 339480 - DNA, 25 bp, Artificial
  probe
  misc_feature (1)..(25): SEQ ID NO: 2871; WAN024C57; Start 229; Stop 253
ttttcagctttgaagtcaagaactg

SEQ ID NO: 339481 - DNA, 25 bp, Artificial
  probe
  misc_feature (1)..(25): SEQ ID NO: 2871; WAN024C57; Start 79; Stop 103
atttccccatttggcaattcaaagg

SEQ ID NO: 339482 - DNA, 25 bp, Artificial
  probe
  misc_feature (1)..(25): SEQ ID NO: 2871; WAN024C57; Start 189; Stop 213
catgagcaactcaattttcttgacg

SEQ ID NO: 339483 - DNA, 25 bp, Artificial
  probe
  misc_feature (1)..(25): SEQ ID NO: 2871; WAN024C57; Start 85; Stop 109
ccatttggcaattcaaaggctaggg

SEQ ID NO: 339484 - DNA, 25 bp, Artificial
  probe
  misc_feature (1)..(25): SEQ ID NO: 2871; WAN024C57; Start 84; Stop 108
cccatttggcaattcaaaggctagg

SEQ ID NO: 339485 - DNA, 25 bp, Artificial
  probe
  misc_feature (1)..(25): SEQ ID NO: 2871; WAN024C57; Start 170; Stop 194
gtgtgataccgaggtcgttcatgag

SEQ ID NO: 339486 - DNA, 25 bp, Artificial
  probe
  misc_feature (1)..(25): SEQ ID NO: 2871; WAN024C57; Start 180; Stop 204
gaggtcgttcatgagcaactcaatt

SEQ ID NO: 339487 - DNA, 25 bp, Artificial
  probe
  misc_feature (1)..(25): SEQ ID NO: 2871; WAN024C57; Start 190; Stop 214
atgagcaactcaattttcttgacgg

SEQ ID NO: 339488 - DNA, 25 bp, Artificial
  probe
  misc_feature (1)..(25): SEQ ID NO: 2871; WAN024C57; Start 181; Stop 205
aggtcgttcatgagcaactcaattt

SEQ ID NO: 339489 - DNA, 25 bp, Artificial
  probe
  misc_feature (1)..(25): SEQ ID NO: 2871; WAN024C57; Start 188; Stop 212
tcatgagcaactcaattttcttgac

SEQ ID NO: 339490 - DNA, 25 bp, Artificial
  probe
  misc_feature (1)..(25): SEQ ID NO: 2871; WAN024C57; Start 187; Stop 211
ttcatgagcaactcaattttcttga

SEQ ID NO: 339491 - DNA, 25 bp, Artificial
  probe
  misc_feature (1)..(25): SEQ ID NO: 2871; WAN024C57; Start 186; Stop 210
gttcatgagcaactcaattttcttg

SEQ ID NO: 339492 - DNA, 25 bp, Artificial
  probe
  misc_feature (1)..(25): SEQ ID NO: 2871; WAN024C57; Start 185; Stop 209
cgttcatgagcaactcaattttctt

SEQ ID NO: 339493 - DNA, 25 bp, Artificial
  probe
  misc_feature (1)..(25): SEQ ID NO: 2871; WAN024C57; Start 196; Stop 220
aactcaattttcttgacggcagctt

SEQ ID NO: 339494 - DNA, 25 bp, Artificial
  probe
  misc_feature (1)..(25): SEQ ID NO: 2871; WAN024C57; Start 83; Stop 107
ccccatttggcaattcaaaggctag

SEQ ID NO: 339495 - DNA, 25 bp, Artificial
  probe
  misc_feature (1)..(25): SEQ ID NO: 2871; WAN024C57; Start 193; Stop 217
agcaactcaattttcttgacggcag

SEQ ID NO: 339496 - DNA, 25 bp, Artificial
  probe
  misc_feature (1)..(25): SEQ ID NO: 2871; WAN024C57; Start 192; Stop 216
gagcaactcaattttcttgacggca

SEQ ID NO: 339497 - DNA, 25 bp, Artificial
  probe
  misc_feature (1)..(25): SEQ ID NO: 2871; WAN024C57; Start 183; Stop 207
gtcgttcatgagcaactcaattttc

SEQ ID NO: 339498 - DNA, 25 bp, Artificial
  probe
  misc_feature (1)..(25): SEQ ID NO: 2871; WAN024C57; Start 184; Stop 208
tcgttcatgagcaactcaattttct

SEQ ID NO: 339499 - DNA, 25 bp, Artificial
  probe
  misc_feature (1)..(25): SEQ ID NO: 2871; WAN024C57; Start 111; Stop 135
tggtccaccagtttcttctgctttt

SEQ ID NO: 339500 - DNA, 25 bp, Artificial
  probe
  misc_feature (1)..(25): SEQ ID NO: 2871; WAN024C57; Start 197; Stop 221
actcaattttcttgacggcagcttc

SEQ ID NO: 339501 - DNA, 25 bp, Artificial
  probe
  misc_feature (1)..(25): SEQ ID NO: 2871; WAN024C57; Start 195; Stop 219
caactcaattttcttgacggcagct

SEQ ID NO: 339502 - DNA, 25 bp, Artificial
  probe
  misc_feature (1)..(25): SEQ ID NO: 2871; WAN024C57; Start 82; Stop 106
tccccatttggcaattcaaaggcta

SEQ ID NO: 339503 - DNA, 25 bp, Artificial
  probe
  misc_feature (1)..(25): SEQ ID NO: 2872; WAN024D4P; Start 152; Stop 176
tagaaggtgctgtagaaggtgttaa

SEQ ID NO: 339504 - DNA, 25 bp, Artificial
  probe
  misc_feature (1)..(25): SEQ ID NO: 2872; WAN024D4P; Start 151; Stop 175
gtagaaggtgctgtagaaggtgtta

SEQ ID NO: 339505 - DNA, 25 bp, Artificial
  probe
  misc_feature (1)..(25): SEQ ID NO: 2872; WAN024D4P; Start 38; Stop 62
ctattaaagaaggtgttgggaaagc

SEQ ID NO: 339506 - DNA, 25 bp, Artificial
  probe
  misc_feature (1)..(25): SEQ ID NO: 2872; WAN024D4P; Start 39; Stop 63
tattaaagaaggtgttgggaaagcc

SEQ ID NO: 339507 - DNA, 25 bp, Artificial
  probe
  misc_feature (1)..(25): SEQ ID NO: 2872; WAN024D4P; Start 185; Stop 209
tgagtggcgacgataaataactaat

SEQ ID NO: 339508 - DNA, 25 bp, Artificial
  probe
  misc_feature (1)..(25): SEQ ID NO: 2872; WAN024D4P; Start 184; Stop 208
ttgagtggcgacgataaataactaa

SEQ ID NO: 339509 - DNA, 25 bp, Artificial
  probe
  misc_feature (1)..(25): SEQ ID NO: 2872; WAN024D4P; Start 37; Stop 61
tctattaaagaaggtgttgggaaag

SEQ ID NO: 339510 - DNA, 25 bp, Artificial
  probe
  misc_feature (1)..(25): SEQ ID NO: 2872; WAN024D4P; Start 150; Stop 174
tgtagaaggtgctgtagaaggtgtt

SEQ ID NO: 339511 - DNA, 25 bp, Artificial
  probe
  misc_feature (1)..(25): SEQ ID NO: 2872; WAN024D4P; Start 183; Stop 207
gttgagtggcgacgataaataacta

SEQ ID NO: 339512 - DNA, 25 bp, Artificial
  probe
  misc_feature (1)..(25): SEQ ID NO: 2872; WAN024D4P; Start 153; Stop 177
agaaggtgctgtagaaggtgttaaa

SEQ ID NO: 339513 - DNA, 25 bp, Artificial
  probe
  misc_feature (1)..(25): SEQ ID NO: 2872; WAN024D4P; Start 181; Stop 205
atgttgagtggcgacgataaataac

SEQ ID NO: 339514 - DNA, 25 bp, Artificial
  probe
  misc_feature (1)..(25): SEQ ID NO: 2872; WAN024D4P; Start 149; Stop 173
ctgtagaaggtgctgtagaaggtgt

SEQ ID NO: 339515 - DNA, 25 bp, Artificial
  probe
  misc_feature (1)..(25): SEQ ID NO: 2872; WAN024D4P; Start 180; Stop 204
catgttgagtggcgacgataaataa

SEQ ID NO: 339516 - DNA, 25 bp, Artificial
  probe
  misc_feature (1)..(25): SEQ ID NO: 2872; WAN024D4P; Start 182; Stop 206
tgttgagtggcgacgataaataact

SEQ ID NO: 339517 - DNA, 25 bp, Artificial
  probe
  misc_feature (1)..(25): SEQ ID NO: 2872; WAN024D4P; Start 34; Stop 58
ggttctattaaagaaggtgttggga

SEQ ID NO: 339518 - DNA, 25 bp, Artificial
  probe
  misc_feature (1)..(25): SEQ ID NO: 2872; WAN024D4P; Start 33; Stop 57
aggttctattaaagaaggtgttggg

SEQ ID NO: 339519 - DNA, 25 bp, Artificial
  probe
  misc_feature (1)..(25): SEQ ID NO: 2872; WAN024D4P; Start 35; Stop 59
gttctattaaagaaggtgttgggaa

SEQ ID NO: 339520 - DNA, 25 bp, Artificial
  probe
  misc_feature (1)..(25): SEQ ID NO: 2872; WAN024D4P; Start 32; Stop 56
aaggttctattaaagaaggtgttgg

SEQ ID NO: 339521 - DNA, 25 bp, Artificial
  probe
  misc_feature (1)..(25): SEQ ID NO: 2872; WAN024D4P; Start 154; Stop 178
gaaggtgctgtagaaggtgttaaaa

SEQ ID NO: 339522 - DNA, 25 bp, Artificial
  probe
  misc_feature (1)..(25): SEQ ID NO: 2872; WAN024D4P; Start 36; Stop 60
ttctattaaagaaggtgttgggaaa

SEQ ID NO: 339523 - DNA, 25 bp, Artificial
  probe
  misc_feature (1)..(25): SEQ ID NO: 2872; WAN024D4P; Start 41; Stop 65
ttaaagaaggtgttgggaaagccat

SEQ ID NO: 339524 - DNA, 25 bp, Artificial
  probe
  misc_feature (1)..(25): SEQ ID NO: 2872; WAN024D4P; Start 40; Stop 64
attaaagaaggtgttgggaaagcca

SEQ ID NO: 339525 - DNA, 25 bp, Artificial
  probe
  misc_feature (1)..(25): SEQ ID NO: 2872; WAN024D4P; Start 148; Stop 172
gctgtagaaggtgctgtagaaggtg

SEQ ID NO: 339526 - DNA, 25 bp, Artificial
  probe
  misc_feature (1)..(25): SEQ ID NO: 2872; WAN024D4P; Start 145; Stop 169
gacgctgtagaaggtgctgtagaag

SEQ ID NO: 339527 - DNA, 25 bp, Artificial
  probe
  misc_feature (1)..(25): SEQ ID NO: 2872; WAN024D4P; Start 28; Stop 52
gctaaaggttctattaaagaaggtg

SEQ ID NO: 339528 - DNA, 25 bp, Artificial
  probe
  misc_feature (1)..(25): SEQ ID NO: 2872; WAN024D4P; Start 42; Stop 66
taaagaaggtgttgggaaagccatc

SEQ ID NO: 339529 - DNA, 25 bp, Artificial
  probe
  misc_feature (1)..(25): SEQ ID NO: 2872; WAN024D4P; Start 31; Stop 55
aaaggttctattaaagaaggtgttg

SEQ ID NO: 339530 - DNA, 25 bp, Artificial
  probe
  misc_feature (1)..(25): SEQ ID NO: 2872; WAN024D4P; Start 27; Stop 51
agctaaaggttctattaaagaaggt

SEQ ID NO: 339531 - DNA, 25 bp, Artificial
  probe
  misc_feature (1)..(25): SEQ ID NO: 2872; WAN024D4P; Start 142; Stop 166
aaagacgctgtagaaggtgctgtag

SEQ ID NO: 339532 - DNA, 25 bp, Artificial
  probe
  misc_feature (1)..(25): SEQ ID NO: 2872; WAN024D4P; Start 29; Stop 53
ctaaaggttctattaaagaaggtgt

SEQ ID NO: 339533 - DNA, 25 bp, Artificial
  probe
  misc_feature (1)..(25): SEQ ID NO: 2872; WAN024D4P; Start 23; Stop 47
atcaagctaaaggttctattaaaga

SEQ ID NO: 339534 - DNA, 25 bp, Artificial
  probe
  misc_feature (1)..(25): SEQ ID NO: 2872; WAN024D4P; Start 179; Stop 203
acatgttgagtggcgacgataaata

SEQ ID NO: 339535 - DNA, 25 bp, Artificial
  probe
  misc_feature (1)..(25): SEQ ID NO: 2872; WAN024D4P; Start 26; Stop 50
aagctaaaggttctattaaagaagg

SEQ ID NO: 339536 - DNA, 25 bp, Artificial
  probe
  misc_feature (1)..(25): SEQ ID NO: 2873; WAN024FM4; Start 924; Stop 948
agcaattcaatcacatatctcaacg

SEQ ID NO: 339537 - DNA, 25 bp, Artificial
  probe
  misc_feature (1)..(25): SEQ ID NO: 2873; WAN024FM4; Start 454; Stop 478
aatcaatggtctggtggtcaattaa

SEQ ID NO: 339538 - DNA, 25 bp, Artificial
  probe
  misc_feature (1)..(25): SEQ ID NO: 2873; WAN024FM4; Start 452; Stop 476
ttaatcaatggtctggtggtcaatt

SEQ ID NO: 339539 - DNA, 25 bp, Artificial
  probe
  misc_feature (1)..(25): SEQ ID NO: 2873; WAN024FM4; Start 453; Stop 477
taatcaatggtctggtggtcaatta

SEQ ID NO: 339540 - DNA, 25 bp, Artificial
  probe
  misc_feature (1)..(25): SEQ ID NO: 2873; WAN024FM4; Start 133; Stop 157
acagcaatgttgttgttactcaatt

SEQ ID NO: 339541 - DNA, 25 bp, Artificial
  probe
  misc_feature (1)..(25): SEQ ID NO: 2873; WAN024FM4; Start 456; Stop 480
tcaatggtctggtggtcaattaata

SEQ ID NO: 339542 - DNA, 25 bp, Artificial
  probe
  misc_feature (1)..(25): SEQ ID NO: 2873; WAN024FM4; Start 449; Stop 473
taattaatcaatggtctggtggtca

SEQ ID NO: 339543 - DNA, 25 bp, Artificial
  probe
  misc_feature (1)..(25): SEQ ID NO: 2873; WAN024FM4; Start 447; Stop 471
agtaattaatcaatggtctggtggt

SEQ ID NO: 339544 - DNA, 25 bp, Artificial
  probe
  misc_feature (1)..(25): SEQ ID NO: 2873; WAN024FM4; Start 448; Stop 472
gtaattaatcaatggtctggtggtc

SEQ ID NO: 339545 - DNA, 25 bp, Artificial
  probe
  misc_feature (1)..(25): SEQ ID NO: 2873; WAN024FM4; Start 455; Stop 479
atcaatggtctggtggtcaattaat

SEQ ID NO: 339546 - DNA, 25 bp, Artificial
  probe
  misc_feature (1)..(25): SEQ ID NO: 2873; WAN024FM4; Start 451; Stop 475
attaatcaatggtctggtggtcaat

SEQ ID NO: 339547 - DNA, 25 bp, Artificial
  probe
  misc_feature (1)..(25): SEQ ID NO: 2873; WAN024FM4; Start 450; Stop 474
aattaatcaatggtctggtggtcaa

SEQ ID NO: 339548 - DNA, 25 bp, Artificial
  probe
  misc_feature (1)..(25): SEQ ID NO: 2873; WAN024FM4; Start 457; Stop 481
caatggtctggtggtcaattaataa

SEQ ID NO: 339549 - DNA, 25 bp, Artificial
  probe
  misc_feature (1)..(25): SEQ ID NO: 2873; WAN024FM4; Start 923; Stop 947
tagcaattcaatcacatatctcaac

SEQ ID NO: 339550 - DNA, 25 bp, Artificial
  probe
  misc_feature (1)..(25): SEQ ID NO: 2873; WAN024FM4; Start 925; Stop 949
gcaattcaatcacatatctcaacgt

SEQ ID NO: 339551 - DNA, 25 bp, Artificial
  probe
  misc_feature (1)..(25): SEQ ID NO: 2873; WAN024FM4; Start 689; Stop 713
caggtattattattgtcgggttagc

SEQ ID NO: 339552 - DNA, 25 bp, Artificial
  probe
  misc_feature (1)..(25): SEQ ID NO: 2873; WAN024FM4; Start 446; Stop 470
cagtaattaatcaatggtctggtgg

SEQ ID NO: 339553 - DNA, 25 bp, Artificial
  probe
  misc_feature (1)..(25): SEQ ID NO: 2873; WAN024FM4; Start 440; Stop 464
cctcaacagtaattaatcaatggtc

SEQ ID NO: 339554 - DNA, 25 bp, Artificial
  probe
  misc_feature (1)..(25): SEQ ID NO: 2873; WAN024FM4; Start 445; Stop 469
acagtaattaatcaatggtctggtg

SEQ ID NO: 339555 - DNA, 25 bp, Artificial
  probe
  misc_feature (1)..(25): SEQ ID NO: 2873; WAN024FM4; Start 403; Stop 427
tggatatttggaacacttctgaatg

SEQ ID NO: 339556 - DNA, 25 bp, Artificial
  probe
  misc_feature (1)..(25): SEQ ID NO: 2873; WAN024FM4; Start 790; Stop 814
ctctctttattgctcctattggctg

SEQ ID NO: 339557 - DNA, 25 bp, Artificial
  probe
  misc_feature (1)..(25): SEQ ID NO: 2873; WAN024FM4; Start 788; Stop 812
gactctctttattgctcctattggc

SEQ ID NO: 339558 - DNA, 25 bp, Artificial
  probe
  misc_feature (1)..(25): SEQ ID NO: 2873; WAN024FM4; Start 96; Stop 120
tgaacctcttaatttaattgtgcca

SEQ ID NO: 339559 - DNA, 25 bp, Artificial
  probe
  misc_feature (1)..(25): SEQ ID NO: 2873; WAN024FM4; Start 791; Stop 815
tctctttattgctcctattggctga

SEQ ID NO: 339560 - DNA, 25 bp, Artificial
  probe
  misc_feature (1)..(25): SEQ ID NO: 2873; WAN024FM4; Start 789; Stop 813
actctctttattgctcctattggct

SEQ ID NO: 339561 - DNA, 25 bp, Artificial
  probe
  misc_feature (1)..(25): SEQ ID NO: 2873; WAN024FM4; Start 401; Stop 425
tttggatatttggaacacttctgaa

SEQ ID NO: 339562 - DNA, 25 bp, Artificial
  probe
  misc_feature (1)..(25): SEQ ID NO: 2873; WAN024FM4; Start 755; Stop 779
aactcttacttctccctgtcacatt

SEQ ID NO: 339563 - DNA, 25 bp, Artificial
  probe
  misc_feature (1)..(25): SEQ ID NO: 2873; WAN024FM4; Start 754; Stop 778
aaactcttacttctccctgtcacat

SEQ ID NO: 339564 - DNA, 25 bp, Artificial
  probe
  misc_feature (1)..(25): SEQ ID NO: 2873; WAN024FM4; Start 95; Stop 119
ctgaacctcttaatttaattgtgcc

SEQ ID NO: 339565 - DNA, 25 bp, Artificial
  probe
  misc_feature (1)..(25): SEQ ID NO: 2873; WAN024FM4; Start 134; Stop 158
cagcaatgttgttgttactcaattt

SEQ ID NO: 339566 - DNA, 25 bp, Artificial
  probe
  misc_feature (1)..(25): SEQ ID NO: 2873; WAN024FM4; Start 444; Stop 468
aacagtaattaatcaatggtctggt

SEQ ID NO: 339567 - DNA, 25 bp, Artificial
  probe
  misc_feature (1)..(25): SEQ ID NO: 2873; WAN024FM4; Start 796; Stop 820
ttattgctcctattggctgagaaat

SEQ ID NO: 339568 - DNA, 25 bp, Artificial
  probe
  misc_feature (1)..(25): SEQ ID NO: 2873; WAN024FM4; Start 402; Stop 426
ttggatatttggaacacttctgaat

SEQ ID NO: 339569 - DNA, 25 bp, Artificial
  probe
  misc_feature (1)..(25): SEQ ID NO: 2874; WAN024FCU; Start 183; Stop 207
tttatcaagcacagatacccaaatg

SEQ ID NO: 339570 - DNA, 25 bp, Artificial
  probe
  misc_feature (1)..(25): SEQ ID NO: 2874; WAN024FCU; Start 182; Stop 206
atttatcaagcacagatacccaaat

SEQ ID NO: 339571 - DNA, 25 bp, Artificial
  probe
  misc_feature (1)..(25): SEQ ID NO: 2874; WAN024FCU; Start 179; Stop 203
catatttatcaagcacagataccca

SEQ ID NO: 339572 - DNA, 25 bp, Artificial
  probe
  misc_feature (1)..(25): SEQ ID NO: 2874; WAN024FCU; Start 173; Stop 197
acttctcatatttatcaagcacaga

SEQ ID NO: 339573 - DNA, 25 bp, Artificial
  probe
  misc_feature (1)..(25): SEQ ID NO: 2874; WAN024FCU; Start 184; Stop 208
ttatcaagcacagatacccaaatgg

SEQ ID NO: 339574 - DNA, 25 bp, Artificial
  probe
  misc_feature (1)..(25): SEQ ID NO: 2874; WAN024FCU; Start 178; Stop 202
tcatatttatcaagcacagataccc

SEQ ID NO: 339575 - DNA, 25 bp, Artificial
  probe
  misc_feature (1)..(25): SEQ ID NO: 2874; WAN024FCU; Start 181; Stop 205
tatttatcaagcacagatacccaaa

SEQ ID NO: 339576 - DNA, 25 bp, Artificial
  probe
  misc_feature (1)..(25): SEQ ID NO: 2874; WAN024FCU; Start 192; Stop 216
cacagatacccaaatggtctctaaa

SEQ ID NO: 339577 - DNA, 25 bp, Artificial
  probe
  misc_feature (1)..(25): SEQ ID NO: 2874; WAN024FCU; Start 193; Stop 217
acagatacccaaatggtctctaaat

SEQ ID NO: 339578 - DNA, 25 bp, Artificial
  probe
  misc_feature (1)..(25): SEQ ID NO: 2874; WAN024FCU; Start 180; Stop 204
atatttatcaagcacagatacccaa

SEQ ID NO: 339579 - DNA, 25 bp, Artificial
  probe
  misc_feature (1)..(25): SEQ ID NO: 2874; WAN024FCU; Start 172; Stop 196
aacttctcatatttatcaagcacag

SEQ ID NO: 339580 - DNA, 25 bp, Artificial
  probe
  misc_feature (1)..(25): SEQ ID NO: 2874; WAN024FCU; Start 194; Stop 218
cagatacccaaatggtctctaaatt

SEQ ID NO: 339581 - DNA, 25 bp, Artificial
  probe
  misc_feature (1)..(25): SEQ ID NO: 2874; WAN024FCU; Start 177; Stop 201
ctcatatttatcaagcacagatacc

SEQ ID NO: 339582 - DNA, 25 bp, Artificial
  probe
  misc_feature (1)..(25): SEQ ID NO: 2874; WAN024FCU; Start 174; Stop 198
cttctcatatttatcaagcacagat

SEQ ID NO: 339583 - DNA, 25 bp, Artificial
  probe
  misc_feature (1)..(25): SEQ ID NO: 2874; WAN024FCU; Start 185; Stop 209
tatcaagcacagatacccaaatggt

SEQ ID NO: 339584 - DNA, 25 bp, Artificial
  probe
  misc_feature (1)..(25): SEQ ID NO: 2874; WAN024FCU; Start 191; Stop 215
gcacagatacccaaatggtctctaa

SEQ ID NO: 339585 - DNA, 25 bp, Artificial
  probe
  misc_feature (1)..(25): SEQ ID NO: 2874; WAN024FCU; Start 171; Stop 195
taacttctcatatttatcaagcaca

SEQ ID NO: 339586 - DNA, 25 bp, Artificial
  probe
  misc_feature (1)..(25): SEQ ID NO: 2874; WAN024FCU; Start 176; Stop 200
tctcatatttatcaagcacagatac

SEQ ID NO: 339587 - DNA, 25 bp, Artificial
  probe
  misc_feature (1)..(25): SEQ ID NO: 2874; WAN024FCU; Start 195; Stop 219
agatacccaaatggtctctaaatta

SEQ ID NO: 339588 - DNA, 25 bp, Artificial
  probe
  misc_feature (1)..(25): SEQ ID NO: 2874; WAN024FCU; Start 190; Stop 214
agcacagatacccaaatggtctcta

SEQ ID NO: 339589 - DNA, 25 bp, Artificial
  probe
  misc_feature (1)..(25): SEQ ID NO: 2874; WAN024FCU; Start 186; Stop 210
atcaagcacagatacccaaatggtc

SEQ ID NO: 339590 - DNA, 25 bp, Artificial
  probe
  misc_feature (1)..(25): SEQ ID NO: 2874; WAN024FCU; Start 196; Stop 220
gatacccaaatggtctctaaattat

SEQ ID NO: 339591 - DNA, 25 bp, Artificial
  probe
  misc_feature (1)..(25): SEQ ID NO: 2874; WAN024FCU; Start 189; Stop 213
aagcacagatacccaaatggtctct

SEQ ID NO: 339592 - DNA, 25 bp, Artificial
  probe
  misc_feature (1)..(25): SEQ ID NO: 2874; WAN024FCU; Start 188; Stop 212
caagcacagatacccaaatggtctc

SEQ ID NO: 339593 - DNA, 25 bp, Artificial
  probe
  misc_feature (1)..(25): SEQ ID NO: 2874; WAN024FCU; Start 175; Stop 199
ttctcatatttatcaagcacagata

SEQ ID NO: 339594 - DNA, 25 bp, Artificial
  probe
  misc_feature (1)..(25): SEQ ID NO: 2874; WAN024FCU; Start 198; Stop 222
tacccaaatggtctctaaattattt

SEQ ID NO: 339595 - DNA, 25 bp, Artificial
  probe
  misc_feature (1)..(25): SEQ ID NO: 2874; WAN024FCU; Start 187; Stop 211
tcaagcacagatacccaaatggtct

SEQ ID NO: 339596 - DNA, 25 bp, Artificial
  probe
  misc_feature (1)..(25): SEQ ID NO: 2874; WAN024FCU; Start 170; Stop 194
ataacttctcatatttatcaagcac

SEQ ID NO: 339597 - DNA, 25 bp, Artificial
  probe
  misc_feature (1)..(25): SEQ ID NO: 2874; WAN024FCU; Start 197; Stop 221
atacccaaatggtctctaaattatt

SEQ ID NO: 339598 - DNA, 25 bp, Artificial
  probe
  misc_feature (1)..(25): SEQ ID NO: 2874; WAN024FCU; Start 55; Stop 79
ggatgttgtaaacaaattaactcat

SEQ ID NO: 339599 - DNA, 25 bp, Artificial
  probe
  misc_feature (1)..(25): SEQ ID NO: 2874; WAN024FCU; Start 144; Stop 168
tcgttcttcatttgataaatattca

SEQ ID NO: 339600 - DNA, 25 bp, Artificial
  probe
  misc_feature (1)..(25): SEQ ID NO: 2874; WAN024FCU; Start 199; Stop 223
acccaaatggtctctaaattatttg

SEQ ID NO: 339601 - DNA, 25 bp, Artificial
  probe
  misc_feature (1)..(25): SEQ ID NO: 2874; WAN024FCU; Start 200; Stop 224
cccaaatggtctctaaattatttga

SEQ ID NO: 339602 - DNA, 25 bp, Artificial
  probe
  misc_feature (1)..(25): SEQ ID NO: 2874; WAN024FCU; Start 201; Stop 225
ccaaatggtctctaaattatttgat

SEQ ID NO: 339603 - DNA, 25 bp, Artificial
  probe
  misc_feature (1)..(25): SEQ ID NO: 2875; WAN024GE3; Start 1005; Stop 1029
gaatgcggaattgaagacagttatg

SEQ ID NO: 339604 - DNA, 25 bp, Artificial
  probe
  misc_feature (1)..(25): SEQ ID NO: 2875; WAN024GE3; Start 1004; Stop 1028
tgaatgcggaattgaagacagttat

SEQ ID NO: 339605 - DNA, 25 bp, Artificial
  probe
  misc_feature (1)..(25): SEQ ID NO: 2875; WAN024GE3; Start 522; Stop 546
gaatcgtgaagtggataagcgtaat

SEQ ID NO: 339606 - DNA, 25 bp, Artificial
  probe
  misc_feature (1)..(25): SEQ ID NO: 2875; WAN024GE3; Start 1003; Stop 1027
ttgaatgcggaattgaagacagtta

SEQ ID NO: 339607 - DNA, 25 bp, Artificial
  probe
  misc_feature (1)..(25): SEQ ID NO: 2875; WAN024GE3; Start 574; Stop 598
attgttgaagaatacctgccagaag

SEQ ID NO: 339608 - DNA, 25 bp, Artificial
  probe
  misc_feature (1)..(25): SEQ ID NO: 2875; WAN024GE3; Start 573; Stop 597
gattgttgaagaatacctgccagaa

SEQ ID NO: 339609 - DNA, 25 bp, Artificial
  probe
  misc_feature (1)..(25): SEQ ID NO: 2875; WAN024GE3; Start 523; Stop 547
aatcgtgaagtggataagcgtaatg

SEQ ID NO: 339610 - DNA, 25 bp, Artificial
  probe
  misc_feature (1)..(25): SEQ ID NO: 2875; WAN024GE3; Start 995; Stop 1019
ttgaacacttgaatgcggaattgaa

SEQ ID NO: 339611 - DNA, 25 bp, Artificial
  probe
  misc_feature (1)..(25): SEQ ID NO: 2875; WAN024GE3; Start 353; Stop 377
cttactctactgttgaccttccaga

SEQ ID NO: 339612 - DNA, 25 bp, Artificial
  probe
  misc_feature (1)..(25): SEQ ID NO: 2875; WAN024GE3; Start 352; Stop 376
tcttactctactgttgaccttccag

SEQ ID NO: 339613 - DNA, 25 bp, Artificial
  probe
  misc_feature (1)..(25): SEQ ID NO: 2875; WAN024GE3; Start 1006; Stop 1030
aatgcggaattgaagacagttatgc

SEQ ID NO: 339614 - DNA, 25 bp, Artificial
  probe
  misc_feature (1)..(25): SEQ ID NO: 2875; WAN024GE3; Start 1002; Stop 1026
cttgaatgcggaattgaagacagtt

SEQ ID NO: 339615 - DNA, 25 bp, Artificial
  probe
  misc_feature (1)..(25): SEQ ID NO: 2875; WAN024GE3; Start 997; Stop 1021
gaacacttgaatgcggaattgaaga

SEQ ID NO: 339616 - DNA, 25 bp, Artificial
  probe
  misc_feature (1)..(25): SEQ ID NO: 2875; WAN024GE3; Start 998; Stop 1022
aacacttgaatgcggaattgaagac

SEQ ID NO: 339617 - DNA, 25 bp, Artificial
  probe
  misc_feature (1)..(25): SEQ ID NO: 2875; WAN024GE3; Start 996; Stop 1020
tgaacacttgaatgcggaattgaag

SEQ ID NO: 339618 - DNA, 25 bp, Artificial
  probe
  misc_feature (1)..(25): SEQ ID NO: 2875; WAN024GE3; Start 77; Stop 101
aagttattcctaaagcagcatttgg

SEQ ID NO: 339619 - DNA, 25 bp, Artificial
  probe
  misc_feature (1)..(25): SEQ ID NO: 2875; WAN024GE3; Start 73; Stop 97
caacaagttattcctaaagcagcat

SEQ ID NO: 339620 - DNA, 25 bp, Artificial
  probe
  misc_feature (1)..(25): SEQ ID NO: 2875; WAN024GE3; Start 75; Stop 99
acaagttattcctaaagcagcattt

SEQ ID NO: 339621 - DNA, 25 bp, Artificial
  probe
  misc_feature (1)..(25): SEQ ID NO: 2875; WAN024GE3; Start 74; Stop 98
aacaagttattcctaaagcagcatt

SEQ ID NO: 339622 - DNA, 25 bp, Artificial
  probe
  misc_feature (1)..(25): SEQ ID NO: 2875; WAN024GE3; Start 521; Stop 545
ggaatcgtgaagtggataagcgtaa

SEQ ID NO: 339623 - DNA, 25 bp, Artificial
  probe
  misc_feature (1)..(25): SEQ ID NO: 2875; WAN024GE3; Start 524; Stop 548
atcgtgaagtggataagcgtaatgg

SEQ ID NO: 339624 - DNA, 25 bp, Artificial
  probe
  misc_feature (1)..(25): SEQ ID NO: 2875; WAN024GE3; Start 567; Stop 591
catgccgattgttgaagaatacctg

SEQ ID NO: 339625 - DNA, 25 bp, Artificial
  probe
  misc_feature (1)..(25): SEQ ID NO: 2875; WAN024GE3; Start 1000; Stop 1024
cacttgaatgcggaattgaagacag

SEQ ID NO: 339626 - DNA, 25 bp, Artificial
  probe
  misc_feature (1)..(25): SEQ ID NO: 2875; WAN024GE3; Start 601; Stop 625
gctggtaaatcaatggactttgttt

SEQ ID NO: 339627 - DNA, 25 bp, Artificial
  probe
  misc_feature (1)..(25): SEQ ID NO: 2875; WAN024GE3; Start 76; Stop 100
caagttattcctaaagcagcatttg

SEQ ID NO: 339628 - DNA, 25 bp, Artificial
  probe
  misc_feature (1)..(25): SEQ ID NO: 2875; WAN024GE3; Start 527; Stop 551
gtgaagtggataagcgtaatggttt

SEQ ID NO: 339629 - DNA, 25 bp, Artificial
  probe
  misc_feature (1)..(25): SEQ ID NO: 2875; WAN024GE3; Start 572; Stop 596
cgattgttgaagaatacctgccaga

SEQ ID NO: 339630 - DNA, 25 bp, Artificial
  probe
  misc_feature (1)..(25): SEQ ID NO: 2875; WAN024GE3; Start 422; Stop 446
actttagtaaggatgacggtatcaa

SEQ ID NO: 339631 - DNA, 25 bp, Artificial
  probe
  misc_feature (1)..(25): SEQ ID NO: 2875; WAN024GE3; Start 423; Stop 447
ctttagtaaggatgacggtatcaac

SEQ ID NO: 339632 - DNA, 25 bp, Artificial
  probe
  misc_feature (1)..(25): SEQ ID NO: 2875; WAN024GE3; Start 600; Stop 624
tgctggtaaatcaatggactttgtt

SEQ ID NO: 339633 - DNA, 25 bp, Artificial
  probe
  misc_feature (1)..(25): SEQ ID NO: 2875; WAN024GE3; Start 526; Stop 550
cgtgaagtggataagcgtaatggtt

SEQ ID NO: 339634 - DNA, 25 bp, Artificial
  probe
  misc_feature (1)..(25): SEQ ID NO: 2875; WAN024GE3; Start 203; Stop 227
atccaagtacagagattgaatttgc

SEQ ID NO: 339635 - DNA, 25 bp, Artificial
  probe
  misc_feature (1)..(25): SEQ ID NO: 2875; WAN024GE3; Start 823; Stop 847
caagaagtggcagaagcagttgata

SEQ ID NO: 339636 - DNA, 25 bp, Artificial
  probe
  misc_feature (1)..(25): SEQ ID NO: 2876; WAN024D8N; Start 357; Stop 381
cgagaattgttgttatcttgctgtt

SEQ ID NO: 339637 - DNA, 25 bp, Artificial
  probe
  misc_feature (1)..(25): SEQ ID NO: 2876; WAN024D8N; Start 355; Stop 379
cacgagaattgttgttatcttgctg

SEQ ID NO: 339638 - DNA, 25 bp, Artificial
  probe
  misc_feature (1)..(25): SEQ ID NO: 2876; WAN024D8N; Start 356; Stop 380
acgagaattgttgttatcttgctgt

SEQ ID NO: 339639 - DNA, 25 bp, Artificial
  probe
  misc_feature (1)..(25): SEQ ID NO: 2876; WAN024D8N; Start 353; Stop 377
tacacgagaattgttgttatcttgc

SEQ ID NO: 339640 - DNA, 25 bp, Artificial
  probe
  misc_feature (1)..(25): SEQ ID NO: 2876; WAN024D8N; Start 354; Stop 378
acacgagaattgttgttatcttgct

SEQ ID NO: 339641 - DNA, 25 bp, Artificial
  probe
  misc_feature (1)..(25): SEQ ID NO: 2876; WAN024D8N; Start 864; Stop 888
agaatctgttggatattcatctgcc

SEQ ID NO: 339642 - DNA, 25 bp, Artificial
  probe
  misc_feature (1)..(25): SEQ ID NO: 2876; WAN024D8N; Start 866; Stop 890
aatctgttggatattcatctgccag

SEQ ID NO: 339643 - DNA, 25 bp, Artificial
  probe
  misc_feature (1)..(25): SEQ ID NO: 2876; WAN024D8N; Start 865; Stop 889
gaatctgttggatattcatctgcca

SEQ ID NO: 339644 - DNA, 25 bp, Artificial
  probe
  misc_feature (1)..(25): SEQ ID NO: 2876; WAN024D8N; Start 565; Stop 589
gcaaaggcaaatgaatggataagta

SEQ ID NO: 339645 - DNA, 25 bp, Artificial
  probe
  misc_feature (1)..(25): SEQ ID NO: 2876; WAN024D8N; Start 562; Stop 586
aaagcaaaggcaaatgaatggataa

SEQ ID NO: 339646 - DNA, 25 bp, Artificial
  probe
  misc_feature (1)..(25): SEQ ID NO: 2876; WAN024D8N; Start 362; Stop 386
attgttgttatcttgctgtttccat

SEQ ID NO: 339647 - DNA, 25 bp, Artificial
  probe
  misc_feature (1)..(25): SEQ ID NO: 2876; WAN024D8N; Start 352; Stop 376
ttacacgagaattgttgttatcttg

SEQ ID NO: 339648 - DNA, 25 bp, Artificial
  probe
  misc_feature (1)..(25): SEQ ID NO: 2876; WAN024D8N; Start 561; Stop 585
taaagcaaaggcaaatgaatggata

SEQ ID NO: 339649 - DNA, 25 bp, Artificial
  probe
  misc_feature (1)..(25): SEQ ID NO: 2876; WAN024D8N; Start 563; Stop 587
aagcaaaggcaaatgaatggataag

SEQ ID NO: 339650 - DNA, 25 bp, Artificial
  probe
  misc_feature (1)..(25): SEQ ID NO: 2876; WAN024D8N; Start 278; Stop 302
cgtatcaaactattaccgcaaactc

SEQ ID NO: 339651 - DNA, 25 bp, Artificial
  probe
  misc_feature (1)..(25): SEQ ID NO: 2876; WAN024D8N; Start 642; Stop 666
tgataaagcacttgaagatgtagca

SEQ ID NO: 339652 - DNA, 25 bp, Artificial
  probe
  misc_feature (1)..(25): SEQ ID NO: 2876; WAN024D8N; Start 641; Stop 665
atgataaagcacttgaagatgtagc

SEQ ID NO: 339653 - DNA, 25 bp, Artificial
  probe
  misc_feature (1)..(25): SEQ ID NO: 2876; WAN024D8N; Start 560; Stop 584
ttaaagcaaaggcaaatgaatggat

SEQ ID NO: 339654 - DNA, 25 bp, Artificial
  probe
  misc_feature (1)..(25): SEQ ID NO: 2876; WAN024D8N; Start 275; Stop 299
atccgtatcaaactattaccgcaaa

SEQ ID NO: 339655 - DNA, 25 bp, Artificial
  probe
  misc_feature (1)..(25): SEQ ID NO: 2876; WAN024D8N; Start 274; Stop 298
aatccgtatcaaactattaccgcaa

SEQ ID NO: 339656 - DNA, 25 bp, Artificial
  probe
  misc_feature (1)..(25): SEQ ID NO: 2876; WAN024D8N; Start 58; Stop 82
gagaagtattcaagtgcaggtcata

SEQ ID NO: 339657 - DNA, 25 bp, Artificial
  probe
  misc_feature (1)..(25): SEQ ID NO: 2876; WAN024D8N; Start 361; Stop 385
aattgttgttatcttgctgtttcca

SEQ ID NO: 339658 - DNA, 25 bp, Artificial
  probe
  misc_feature (1)..(25): SEQ ID NO: 2876; WAN024D8N; Start 279; Stop 303
gtatcaaactattaccgcaaactct

SEQ ID NO: 339659 - DNA, 25 bp, Artificial
  probe
  misc_feature (1)..(25): SEQ ID NO: 2876; WAN024D8N; Start 450; Stop 474
ttattcaaccttgcttcaaccgaat

SEQ ID NO: 339660 - DNA, 25 bp, Artificial
  probe
  misc_feature (1)..(25): SEQ ID NO: 2876; WAN024D8N; Start 273; Stop 297
taatccgtatcaaactattaccgca

SEQ ID NO: 339661 - DNA, 25 bp, Artificial
  probe
  misc_feature (1)..(25): SEQ ID NO: 2876; WAN024D8N; Start 861; Stop 885
agcagaatctgttggatattcatct

SEQ ID NO: 339662 - DNA, 25 bp, Artificial
  probe
  misc_feature (1)..(25): SEQ ID NO: 2876; WAN024D8N; Start 52; Stop 76
aacaatgagaagtattcaagtgcag

SEQ ID NO: 339663 - DNA, 25 bp, Artificial
  probe
  misc_feature (1)..(25): SEQ ID NO: 2876; WAN024D8N; Start 638; Stop 662
atgatgataaagcacttgaagatgt

SEQ ID NO: 339664 - DNA, 25 bp, Artificial
  probe
  misc_feature (1)..(25): SEQ ID NO: 2876; WAN024D8N; Start 635; Stop 659
ttgatgatgataaagcacttgaaga

SEQ ID NO: 339665 - DNA, 25 bp, Artificial
  probe
  misc_feature (1)..(25): SEQ ID NO: 2876; WAN024D8N; Start 495; Stop 519
cttagaaagagtggcaatggaaata

SEQ ID NO: 339666 - DNA, 25 bp, Artificial
  probe
  misc_feature (1)..(25): SEQ ID NO: 2876; WAN024D8N; Start 461; Stop 485
tgcttcaaccgaatcaaataatact

SEQ ID NO: 339667 - DNA, 25 bp, Artificial
  probe
  misc_feature (1)..(25): SEQ ID NO: 2876; WAN024D8N; Start 360; Stop 384
gaattgttgttatcttgctgtttcc

SEQ ID NO: 339668 - DNA, 25 bp, Artificial
  probe
  misc_feature (1)..(25): SEQ ID NO: 2876; WAN024D8N; Start 235; Stop 259
tattcaagttacattgtcagtgcaa

SEQ ID NO: 339669 - DNA, 25 bp, Artificial
  probe
  misc_feature (1)..(25): SEQ ID NO: 2877; WAN024DXK; Start 125; Stop 149
aagaactcactgtatatgtagacga

SEQ ID NO: 339670 - DNA, 25 bp, Artificial
  probe
  misc_feature (1)..(25): SEQ ID NO: 2877; WAN024DXK; Start 127; Stop 151
gaactcactgtatatgtagacgagg

SEQ ID NO: 339671 - DNA, 25 bp, Artificial
  probe
  misc_feature (1)..(25): SEQ ID NO: 2877; WAN024DXK; Start 126; Stop 150
agaactcactgtatatgtagacgag

SEQ ID NO: 339672 - DNA, 25 bp, Artificial
  probe
  misc_feature (1)..(25): SEQ ID NO: 2877; WAN024DXK; Start 1214; Stop 1238
ctgctaacgatgctgtaacattgat

SEQ ID NO: 339673 - DNA, 25 bp, Artificial
  probe
  misc_feature (1)..(25): SEQ ID NO: 2877; WAN024DXK; Start 101; Stop 125
ctgattctggttcatctgaagtcaa

SEQ ID NO: 339674 - DNA, 25 bp, Artificial
  probe
  misc_feature (1)..(25): SEQ ID NO: 2877; WAN024DXK; Start 227; Stop 251
gtgatgctctaggaggtcttgataa

SEQ ID NO: 339675 - DNA, 25 bp, Artificial
  probe
  misc_feature (1)..(25): SEQ ID NO: 2877; WAN024DXK; Start 1215; Stop 1239
tgctaacgatgctgtaacattgatc

SEQ ID NO: 339676 - DNA, 25 bp, Artificial
  probe
  misc_feature (1)..(25): SEQ ID NO: 2877; WAN024DXK; Start 435; Stop 459
cgttatcgagtcacttgttatgtac

SEQ ID NO: 339677 - DNA, 25 bp, Artificial
  probe
  misc_feature (1)..(25): SEQ ID NO: 2877; WAN024DXK; Start 434; Stop 458
ccgttatcgagtcacttgttatgta

SEQ ID NO: 339678 - DNA, 25 bp, Artificial
  probe
  misc_feature (1)..(25): SEQ ID NO: 2877; WAN024DXK; Start 574; Stop 598
gctgactggacaaacttctactata

SEQ ID NO: 339679 - DNA, 25 bp, Artificial
  probe
  misc_feature (1)..(25): SEQ ID NO: 2877; WAN024DXK; Start 272; Stop 296
ctggtaatgtccctgatgttatgat

SEQ ID NO: 339680 - DNA, 25 bp, Artificial
  probe
  misc_feature (1)..(25): SEQ ID NO: 2877; WAN024DXK; Start 273; Stop 297
tggtaatgtccctgatgttatgatg

SEQ ID NO: 339681 - DNA, 25 bp, Artificial
  probe
  misc_feature (1)..(25): SEQ ID NO: 2877; WAN024DXK; Start 155; Stop 179
ataagagctatattgaagaggttgc

SEQ ID NO: 339682 - DNA, 25 bp, Artificial
  probe
  misc_feature (1)..(25): SEQ ID NO: 2877; WAN024DXK; Start 131; Stop 155
tcactgtatatgtagacgagggata

SEQ ID NO: 339683 - DNA, 25 bp, Artificial
  probe
  misc_feature (1)..(25): SEQ ID NO: 2877; WAN024DXK; Start 270; Stop 294
atctggtaatgtccctgatgttatg

SEQ ID NO: 339684 - DNA, 25 bp, Artificial
  probe
  misc_feature (1)..(25): SEQ ID NO: 2877; WAN024DXK; Start 268; Stop 292
caatctggtaatgtccctgatgtta

SEQ ID NO: 339685 - DNA, 25 bp, Artificial
  probe
  misc_feature (1)..(25): SEQ ID NO: 2877; WAN024DXK; Start 269; Stop 293
aatctggtaatgtccctgatgttat

SEQ ID NO: 339686 - DNA, 25 bp, Artificial
  probe
  misc_feature (1)..(25): SEQ ID NO: 2877; WAN024DXK; Start 1013; Stop 1037
atgataagactaacgaaatcccagc

SEQ ID NO: 339687 - DNA, 25 bp, Artificial
  probe
  misc_feature (1)..(25): SEQ ID NO: 2877; WAN024DXK; Start 271; Stop 295
tctggtaatgtccctgatgttatga

SEQ ID NO: 339688 - DNA, 25 bp, Artificial
  probe
  misc_feature (1)..(25): SEQ ID NO: 2877; WAN024DXK; Start 1168; Stop 1192
aatatgctctttgatgctgtaagtg

SEQ ID NO: 339689 - DNA, 25 bp, Artificial
  probe
  misc_feature (1)..(25): SEQ ID NO: 2877; WAN024DXK; Start 518; Stop 542
ctaaagatagcaaatacgcattcgc

SEQ ID NO: 339690 - DNA, 25 bp, Artificial
  probe
  misc_feature (1)..(25): SEQ ID NO: 2877; WAN024DXK; Start 274; Stop 298
ggtaatgtccctgatgttatgatgg

SEQ ID NO: 339691 - DNA, 25 bp, Artificial
  probe
  misc_feature (1)..(25): SEQ ID NO: 2877; WAN024DXK; Start 576; Stop 600
tgactggacaaacttctactataca

SEQ ID NO: 339692 - DNA, 25 bp, Artificial
  probe
  misc_feature (1)..(25): SEQ ID NO: 2877; WAN024DXK; Start 769; Stop 793
atccaaactcaattccaagaaggta

SEQ ID NO: 339693 - DNA, 25 bp, Artificial
  probe
  misc_feature (1)..(25): SEQ ID NO: 2877; WAN024DXK; Start 372; Stop 396
aacagacgacacaactaaatctctt

SEQ ID NO: 339694 - DNA, 25 bp, Artificial
  probe
  misc_feature (1)..(25): SEQ ID NO: 2877; WAN024DXK; Start 371; Stop 395
aaacagacgacacaactaaatctct

SEQ ID NO: 339695 - DNA, 25 bp, Artificial
  probe
  misc_feature (1)..(25): SEQ ID NO: 2877; WAN024DXK; Start 770; Stop 794
tccaaactcaattccaagaaggtaa

SEQ ID NO: 339696 - DNA, 25 bp, Artificial
  probe
  misc_feature (1)..(25): SEQ ID NO: 2877; WAN024DXK; Start 771; Stop 795
ccaaactcaattccaagaaggtaaa

SEQ ID NO: 339697 - DNA, 25 bp, Artificial
  probe
  misc_feature (1)..(25): SEQ ID NO: 2877; WAN024DXK; Start 838; Stop 862
aaagatgctaaagtaaactacggag

SEQ ID NO: 339698 - DNA, 25 bp, Artificial
  probe
  misc_feature (1)..(25): SEQ ID NO: 2877; WAN024DXK; Start 439; Stop 463
atcgagtcacttgttatgtactaca

SEQ ID NO: 339699 - DNA, 25 bp, Artificial
  probe
  misc_feature (1)..(25): SEQ ID NO: 2877; WAN024DXK; Start 250; Stop 274
aaactttctcttgacaaccaatctg

SEQ ID NO: 339700 - DNA, 25 bp, Artificial
  probe
  misc_feature (1)..(25): SEQ ID NO: 2877; WAN024DXK; Start 138; Stop 162
atatgtagacgagggatataagagc

SEQ ID NO: 339701 - DNA, 25 bp, Artificial
  probe
  misc_feature (1)..(25): SEQ ID NO: 2877; WAN024DXK; Start 460; Stop 484
tacaacaaagacttggtgaaagatg

SEQ ID NO: 339702 - DNA, 25 bp, Artificial
  probe
  misc_feature (1)..(25): SEQ ID NO: 2878; WAN024FZP; Start 1314; Stop 1338
atggaagttgattgaccgtattgaa

SEQ ID NO: 339703 - DNA, 25 bp, Artificial
  probe
  misc_feature (1)..(25): SEQ ID NO: 2878; WAN024FZP; Start 1313; Stop 1337
catggaagttgattgaccgtattga

SEQ ID NO: 339704 - DNA, 25 bp, Artificial
  probe
  misc_feature (1)..(25): SEQ ID NO: 2878; WAN024FZP; Start 329; Stop 353
ataagctcttcttcttgtctatggc

SEQ ID NO: 339705 - DNA, 25 bp, Artificial
  probe
  misc_feature (1)..(25): SEQ ID NO: 2878; WAN024FZP; Start 334; Stop 358
ctcttcttcttgtctatggcacctc

SEQ ID NO: 339706 - DNA, 25 bp, Artificial
  probe
  misc_feature (1)..(25): SEQ ID NO: 2878; WAN024FZP; Start 320; Stop 344
ctgaacacaataagctcttcttctt

SEQ ID NO: 339707 - DNA, 25 bp, Artificial
  probe
  misc_feature (1)..(25): SEQ ID NO: 2878; WAN024FZP; Start 1312; Stop 1336
tcatggaagttgattgaccgtattg

SEQ ID NO: 339708 - DNA, 25 bp, Artificial
  probe
  misc_feature (1)..(25): SEQ ID NO: 2878; WAN024FZP; Start 321; Stop 345
tgaacacaataagctcttcttcttg

SEQ ID NO: 339709 - DNA, 25 bp, Artificial
  probe
  misc_feature (1)..(25): SEQ ID NO: 2878; WAN024FZP; Start 336; Stop 360
cttcttcttgtctatggcacctcag

SEQ ID NO: 339710 - DNA, 25 bp, Artificial
  probe
  misc_feature (1)..(25): SEQ ID NO: 2878; WAN024FZP; Start 259; Stop 283
gattcggaacattatattgctttgc

SEQ ID NO: 339711 - DNA, 25 bp, Artificial
  probe
  misc_feature (1)..(25): SEQ ID NO: 2878; WAN024FZP; Start 260; Stop 284
attcggaacattatattgctttgcg

SEQ ID NO: 339712 - DNA, 25 bp, Artificial
  probe
  misc_feature (1)..(25): SEQ ID NO: 2878; WAN024FZP; Start 330; Stop 354
taagctcttcttcttgtctatggca

SEQ ID NO: 339713 - DNA, 25 bp, Artificial
  probe
  misc_feature (1)..(25): SEQ ID NO: 2878; WAN024FZP; Start 328; Stop 352
aataagctcttcttcttgtctatgg

SEQ ID NO: 339714 - DNA, 25 bp, Artificial
  probe
  misc_feature (1)..(25): SEQ ID NO: 2878; WAN024FZP; Start 475; Stop 499
ttgaatgacgaactcctagcaacat

SEQ ID NO: 339715 - DNA, 25 bp, Artificial
  probe
  misc_feature (1)..(25): SEQ ID NO: 2878; WAN024FZP; Start 158; Stop 182
ttgaatctgtagttgtcgagtccat

SEQ ID NO: 339716 - DNA, 25 bp, Artificial
  probe
  misc_feature (1)..(25): SEQ ID NO: 2878; WAN024FZP; Start 339; Stop 363
cttcttgtctatggcacctcagttc

SEQ ID NO: 339717 - DNA, 25 bp, Artificial
  probe
  misc_feature (1)..(25): SEQ ID NO: 2878; WAN024FZP; Start 335; Stop 359
tcttcttcttgtctatggcacctca

SEQ ID NO: 339718 - DNA, 25 bp, Artificial
  probe
  misc_feature (1)..(25): SEQ ID NO: 2878; WAN024FZP; Start 711; Stop 735
aaaccacactctacaacttctttcg

SEQ ID NO: 339719 - DNA, 25 bp, Artificial
  probe
  misc_feature (1)..(25): SEQ ID NO: 2878; WAN024FZP; Start 818; Stop 842
atccaactgatgaagaactcaaaga

SEQ ID NO: 339720 - DNA, 25 bp, Artificial
  probe
  misc_feature (1)..(25): SEQ ID NO: 2878; WAN024FZP; Start 264; Stop 288
ggaacattatattgctttgcgtcaa

SEQ ID NO: 339721 - DNA, 25 bp, Artificial
  probe
  misc_feature (1)..(25): SEQ ID NO: 2878; WAN024FZP; Start 823; Stop 847
actgatgaagaactcaaagaacact

SEQ ID NO: 339722 - DNA, 25 bp, Artificial
  probe
  misc_feature (1)..(25): SEQ ID NO: 2878; WAN024FZP; Start 822; Stop 846
aactgatgaagaactcaaagaacac

SEQ ID NO: 339723 - DNA, 25 bp, Artificial
  probe
  misc_feature (1)..(25): SEQ ID NO: 2878; WAN024FZP; Start 821; Stop 845
caactgatgaagaactcaaagaaca

SEQ ID NO: 339724 - DNA, 25 bp, Artificial
  probe
  misc_feature (1)..(25): SEQ ID NO: 2878; WAN024FZP; Start 820; Stop 844
ccaactgatgaagaactcaaagaac

SEQ ID NO: 339725 - DNA, 25 bp, Artificial
  probe
  misc_feature (1)..(25): SEQ ID NO: 2878; WAN024FZP; Start 819; Stop 843
tccaactgatgaagaactcaaagaa

SEQ ID NO: 339726 - DNA, 25 bp, Artificial
  probe
  misc_feature (1)..(25): SEQ ID NO: 2878; WAN024FZP; Start 824; Stop 848
ctgatgaagaactcaaagaacactt

SEQ ID NO: 339727 - DNA, 25 bp, Artificial
  probe
  misc_feature (1)..(25): SEQ ID NO: 2878; WAN024FZP; Start 225; Stop 249
tagccacttctactatcaaagccat

SEQ ID NO: 339728 - DNA, 25 bp, Artificial
  probe
  misc_feature (1)..(25): SEQ ID NO: 2878; WAN024FZP; Start 159; Stop 183
tgaatctgtagttgtcgagtccatc

SEQ ID NO: 339729 - DNA, 25 bp, Artificial
  probe
  misc_feature (1)..(25): SEQ ID NO: 2878; WAN024FZP; Start 258; Stop 282
tgattcggaacattatattgctttg

SEQ ID NO: 339730 - DNA, 25 bp, Artificial
  probe
  misc_feature (1)..(25): SEQ ID NO: 2878; WAN024FZP; Start 341; Stop 365
tcttgtctatggcacctcagttctt

SEQ ID NO: 339731 - DNA, 25 bp, Artificial
  probe
  misc_feature (1)..(25): SEQ ID NO: 2878; WAN024FZP; Start 340; Stop 364
ttcttgtctatggcacctcagttct

SEQ ID NO: 339732 - DNA, 25 bp, Artificial
  probe
  misc_feature (1)..(25): SEQ ID NO: 2878; WAN024FZP; Start 338; Stop 362
tcttcttgtctatggcacctcagtt

SEQ ID NO: 339733 - DNA, 25 bp, Artificial
  probe
  misc_feature (1)..(25): SEQ ID NO: 2878; WAN024FZP; Start 337; Stop 361
ttcttcttgtctatggcacctcagt

SEQ ID NO: 339734 - DNA, 25 bp, Artificial
  probe
  misc_feature (1)..(25): SEQ ID NO: 2878; WAN024FZP; Start 261; Stop 285
ttcggaacattatattgctttgcgt

SEQ ID NO: 339735 - DNA, 25 bp, Artificial
  probe
  misc_feature (1)..(25): SEQ ID NO: 2879; WAN024ESL; Start 129; Stop 153
gcgtgaattaatcaaggttactctc

SEQ ID NO: 339736 - DNA, 25 bp, Artificial
  probe
  misc_feature (1)..(25): SEQ ID NO: 2879; WAN024ESL; Start 130; Stop 154
cgtgaattaatcaaggttactctct

SEQ ID NO: 339737 - DNA, 25 bp, Artificial
  probe
  misc_feature (1)..(25): SEQ ID NO: 2879; WAN024ESL; Start 48; Stop 72
caccctcaaacctatcatccaaatc

SEQ ID NO: 339738 - DNA, 25 bp, Artificial
  probe
  misc_feature (1)..(25): SEQ ID NO: 2879; WAN024ESL; Start 47; Stop 71
acaccctcaaacctatcatccaaat

SEQ ID NO: 339739 - DNA, 25 bp, Artificial
  probe
  misc_feature (1)..(25): SEQ ID NO: 2879; WAN024ESL; Start 196; Stop 220
ttggaagaagaaatcggtgtggata

SEQ ID NO: 339740 - DNA, 25 bp, Artificial
  probe
  misc_feature (1)..(25): SEQ ID NO: 2879; WAN024ESL; Start 199; Stop 223
gaagaagaaatcggtgtggatacag

SEQ ID NO: 339741 - DNA, 25 bp, Artificial
  probe
  misc_feature (1)..(25): SEQ ID NO: 2879; WAN024ESL; Start 197; Stop 221
tggaagaagaaatcggtgtggatac

SEQ ID NO: 339742 - DNA, 25 bp, Artificial
  probe
  misc_feature (1)..(25): SEQ ID NO: 2879; WAN024ESL; Start 49; Stop 73
accctcaaacctatcatccaaatcg

SEQ ID NO: 339743 - DNA, 25 bp, Artificial
  probe
  misc_feature (1)..(25): SEQ ID NO: 2879; WAN024ESL; Start 200; Stop 224
aagaagaaatcggtgtggatacagt

SEQ ID NO: 339744 - DNA, 25 bp, Artificial
  probe
  misc_feature (1)..(25): SEQ ID NO: 2879; WAN024ESL; Start 195; Stop 219
tttggaagaagaaatcggtgtggat

SEQ ID NO: 339745 - DNA, 25 bp, Artificial
  probe
  misc_feature (1)..(25): SEQ ID NO: 2879; WAN024ESL; Start 171; Stop 195
aaacatccacgaagtagctgaaatt

SEQ ID NO: 339746 - DNA, 25 bp, Artificial
  probe
  misc_feature (1)..(25): SEQ ID NO: 2879; WAN024ESL; Start 46; Stop 70
cacaccctcaaacctatcatccaaa

SEQ ID NO: 339747 - DNA, 25 bp, Artificial
  probe
  misc_feature (1)..(25): SEQ ID NO: 2879; WAN024ESL; Start 54; Stop 78
caaacctatcatccaaatcgggaaa

SEQ ID NO: 339748 - DNA, 25 bp, Artificial
  probe
  misc_feature (1)..(25): SEQ ID NO: 2879; WAN024ESL; Start 172; Stop 196
aacatccacgaagtagctgaaattt

SEQ ID NO: 339749 - DNA, 25 bp, Artificial
  probe
  misc_feature (1)..(25): SEQ ID NO: 2879; WAN024ESL; Start 201; Stop 225
agaagaaatcggtgtggatacagtc

SEQ ID NO: 339750 - DNA, 25 bp, Artificial
  probe
  misc_feature (1)..(25): SEQ ID NO: 2879; WAN024ESL; Start 131; Stop 155
gtgaattaatcaaggttactctctt

SEQ ID NO: 339751 - DNA, 25 bp, Artificial
  probe
  misc_feature (1)..(25): SEQ ID NO: 2879; WAN024ESL; Start 78; Stop 102
aaatggactcaacgaccaaatcaaa

SEQ ID NO: 339752 - DNA, 25 bp, Artificial
  probe
  misc_feature (1)..(25): SEQ ID NO: 2879; WAN024ESL; Start 198; Stop 222
ggaagaagaaatcggtgtggataca

SEQ ID NO: 339753 - DNA, 25 bp, Artificial
  probe
  misc_feature (1)..(25): SEQ ID NO: 2879; WAN024ESL; Start 53; Stop 77
tcaaacctatcatccaaatcgggaa

SEQ ID NO: 339754 - DNA, 25 bp, Artificial
  probe
  misc_feature (1)..(25): SEQ ID NO: 2879; WAN024ESL; Start 51; Stop 75
cctcaaacctatcatccaaatcggg

SEQ ID NO: 339755 - DNA, 25 bp, Artificial
  probe
  misc_feature (1)..(25): SEQ ID NO: 2879; WAN024ESL; Start 50; Stop 74
ccctcaaacctatcatccaaatcgg

SEQ ID NO: 339756 - DNA, 25 bp, Artificial
  probe
  misc_feature (1)..(25): SEQ ID NO: 2879; WAN024ESL; Start 52; Stop 76
ctcaaacctatcatccaaatcggga

SEQ ID NO: 339757 - DNA, 25 bp, Artificial
  probe
  misc_feature (1)..(25): SEQ ID NO: 2879; WAN024ESL; Start 143; Stop 167
aggttactctcttacaaaacacaga

SEQ ID NO: 339758 - DNA, 25 bp, Artificial
  probe
  misc_feature (1)..(25): SEQ ID NO: 2879; WAN024ESL; Start 263; Stop 287
ctagcaagaaagaaaatcgcaagat

SEQ ID NO: 339759 - DNA, 25 bp, Artificial
  probe
  misc_feature (1)..(25): SEQ ID NO: 2879; WAN024ESL; Start 141; Stop 165
caaggttactctcttacaaaacaca

SEQ ID NO: 339760 - DNA, 25 bp, Artificial
  probe
  misc_feature (1)..(25): SEQ ID NO: 2879; WAN024ESL; Start 45; Stop 69
acacaccctcaaacctatcatccaa

SEQ ID NO: 339761 - DNA, 25 bp, Artificial
  probe
  misc_feature (1)..(25): SEQ ID NO: 2879; WAN024ESL; Start 279; Stop 303
tcgcaagatttctaagaaagtcaaa

SEQ ID NO: 339762 - DNA, 25 bp, Artificial
  probe
  misc_feature (1)..(25): SEQ ID NO: 2879; WAN024ESL; Start 142; Stop 166
aaggttactctcttacaaaacacag

SEQ ID NO: 339763 - DNA, 25 bp, Artificial
  probe
  misc_feature (1)..(25): SEQ ID NO: 2879; WAN024ESL; Start 140; Stop 164
tcaaggttactctcttacaaaacac

SEQ ID NO: 339764 - DNA, 25 bp, Artificial
  probe
  misc_feature (1)..(25): SEQ ID NO: 2879; WAN024ESL; Start 280; Stop 304
cgcaagatttctaagaaagtcaaag

SEQ ID NO: 339765 - DNA, 25 bp, Artificial
  probe
  misc_feature (1)..(25): SEQ ID NO: 2879; WAN024ESL; Start 278; Stop 302
atcgcaagatttctaagaaagtcaa

SEQ ID NO: 339766 - DNA, 25 bp, Artificial
  probe
  misc_feature (1)..(25): SEQ ID NO: 2879; WAN024ESL; Start 277; Stop 301
aatcgcaagatttctaagaaagtca

SEQ ID NO: 339767 - DNA, 25 bp, Artificial
  probe
  misc_feature (1)..(25): SEQ ID NO: 2879; WAN024ESL; Start 261; Stop 285
atctagcaagaaagaaaatcgcaag

SEQ ID NO: 339768 - DNA, 25 bp, Artificial
  probe
  misc_feature (1)..(25): SEQ ID NO: 2880; WAN024GD3; Start 449; Stop 473
ttgttgttgatgaagcagatatgac

SEQ ID NO: 339769 - DNA, 25 bp, Artificial
  probe
  misc_feature (1)..(25): SEQ ID NO: 2880; WAN024GD3; Start 459; Stop 483
tgaagcagatatgaccttggatatg

SEQ ID NO: 339770 - DNA, 25 bp, Artificial
  probe
  misc_feature (1)..(25): SEQ ID NO: 2880; WAN024GD3; Start 457; Stop 481
gatgaagcagatatgaccttggata

SEQ ID NO: 339771 - DNA, 25 bp, Artificial
  probe
  misc_feature (1)..(25): SEQ ID NO: 2880; WAN024GD3; Start 452; Stop 476
ttgttgatgaagcagatatgacctt

SEQ ID NO: 339772 - DNA, 25 bp, Artificial
  probe
  misc_feature (1)..(25): SEQ ID NO: 2880; WAN024GD3; Start 458; Stop 482
atgaagcagatatgaccttggatat

SEQ ID NO: 339773 - DNA, 25 bp, Artificial
  probe
  misc_feature (1)..(25): SEQ ID NO: 2880; WAN024GD3; Start 451; Stop 475
gttgttgatgaagcagatatgacct

SEQ ID NO: 339774 - DNA, 25 bp, Artificial
  probe
  misc_feature (1)..(25): SEQ ID NO: 2880; WAN024GD3; Start 460; Stop 484
gaagcagatatgaccttggatatgg

SEQ ID NO: 339775 - DNA, 25 bp, Artificial
  probe
  misc_feature (1)..(25): SEQ ID NO: 2880; WAN024GD3; Start 450; Stop 474
tgttgttgatgaagcagatatgacc

SEQ ID NO: 339776 - DNA, 25 bp, Artificial
  probe
  misc_feature (1)..(25): SEQ ID NO: 2880; WAN024GD3; Start 362; Stop 386
atcagcctcatattgttattggaac

SEQ ID NO: 339777 - DNA, 25 bp, Artificial
  probe
  misc_feature (1)..(25): SEQ ID NO: 2880; WAN024GD3; Start 453; Stop 477
tgttgatgaagcagatatgaccttg

SEQ ID NO: 339778 - DNA, 25 bp, Artificial
  probe
  misc_feature (1)..(25): SEQ ID NO: 2880; WAN024GD3; Start 361; Stop 385
aatcagcctcatattgttattggaa

SEQ ID NO: 339779 - DNA, 25 bp, Artificial
  probe
  misc_feature (1)..(25): SEQ ID NO: 2880; WAN024GD3; Start 456; Stop 480
tgatgaagcagatatgaccttggat

SEQ ID NO: 339780 - DNA, 25 bp, Artificial
  probe
  misc_feature (1)..(25): SEQ ID NO: 2880; WAN024GD3; Start 455; Stop 479
ttgatgaagcagatatgaccttgga

SEQ ID NO: 339781 - DNA, 25 bp, Artificial
  probe
  misc_feature (1)..(25): SEQ ID NO: 2880; WAN024GD3; Start 454; Stop 478
gttgatgaagcagatatgaccttgg

SEQ ID NO: 339782 - DNA, 25 bp, Artificial
  probe
  misc_feature (1)..(25): SEQ ID NO: 2880; WAN024GD3; Start 295; Stop 319
gaagttcgtgtggttaattatgtgg

SEQ ID NO: 339783 - DNA, 25 bp, Artificial
  probe
  misc_feature (1)..(25): SEQ ID NO: 2880; WAN024GD3; Start 776; Stop 800
attcatatctgactgctcaaggctt

SEQ ID NO: 339784 - DNA, 25 bp, Artificial
  probe
  misc_feature (1)..(25): SEQ ID NO: 2880; WAN024GD3; Start 468; Stop 492
tatgaccttggatatgggattcttg

SEQ ID NO: 339785 - DNA, 25 bp, Artificial
  probe
  misc_feature (1)..(25): SEQ ID NO: 2880; WAN024GD3; Start 1121; Stop 1145
ttcaagatacctatgaccgtgatcg

SEQ ID NO: 339786 - DNA, 25 bp, Artificial
  probe
  misc_feature (1)..(25): SEQ ID NO: 2880; WAN024GD3; Start 34; Stop 58
attagagaagccttgaaggagttaa

SEQ ID NO: 339787 - DNA, 25 bp, Artificial
  probe
  misc_feature (1)..(25): SEQ ID NO: 2880; WAN024GD3; Start 464; Stop 488
cagatatgaccttggatatgggatt

SEQ ID NO: 339788 - DNA, 25 bp, Artificial
  probe
  misc_feature (1)..(25): SEQ ID NO: 2880; WAN024GD3; Start 448; Stop 472
tttgttgttgatgaagcagatatga

SEQ ID NO: 339789 - DNA, 25 bp, Artificial
  probe
  misc_feature (1)..(25): SEQ ID NO: 2880; WAN024GD3; Start 397; Stop 421
atctacgacttggttaaatctggtg

SEQ ID NO: 339790 - DNA, 25 bp, Artificial
  probe
  misc_feature (1)..(25): SEQ ID NO: 2880; WAN024GD3; Start 32; Stop 56
atattagagaagccttgaaggagtt

SEQ ID NO: 339791 - DNA, 25 bp, Artificial
  probe
  misc_feature (1)..(25): SEQ ID NO: 2880; WAN024GD3; Start 396; Stop 420
tatctacgacttggttaaatctggt

SEQ ID NO: 339792 - DNA, 25 bp, Artificial
  probe
  misc_feature (1)..(25): SEQ ID NO: 2880; WAN024GD3; Start 466; Stop 490
gatatgaccttggatatgggattct

SEQ ID NO: 339793 - DNA, 25 bp, Artificial
  probe
  misc_feature (1)..(25): SEQ ID NO: 2880; WAN024GD3; Start 465; Stop 489
agatatgaccttggatatgggattc

SEQ ID NO: 339794 - DNA, 25 bp, Artificial
  probe
  misc_feature (1)..(25): SEQ ID NO: 2880; WAN024GD3; Start 399; Stop 423
ctacgacttggttaaatctggtgat

SEQ ID NO: 339795 - DNA, 25 bp, Artificial
  probe
  misc_feature (1)..(25): SEQ ID NO: 2880; WAN024GD3; Start 775; Stop 799
cattcatatctgactgctcaaggct

SEQ ID NO: 339796 - DNA, 25 bp, Artificial
  probe
  misc_feature (1)..(25): SEQ ID NO: 2880; WAN024GD3; Start 358; Stop 382
agcaatcagcctcatattgttattg

SEQ ID NO: 339797 - DNA, 25 bp, Artificial
  probe
  misc_feature (1)..(25): SEQ ID NO: 2880; WAN024GD3; Start 1085; Stop 1109
tcaagtttagtcctaagatggtcaa

SEQ ID NO: 339798 - DNA, 25 bp, Artificial
  probe
  misc_feature (1)..(25): SEQ ID NO: 2880; WAN024GD3; Start 395; Stop 419
gtatctacgacttggttaaatctgg

SEQ ID NO: 339799 - DNA, 25 bp, Artificial
  probe
  misc_feature (1)..(25): SEQ ID NO: 2880; WAN024GD3; Start 359; Stop 383
gcaatcagcctcatattgttattgg

SEQ ID NO: 339800 - DNA, 25 bp, Artificial
  probe
  misc_feature (1)..(25): SEQ ID NO: 2880; WAN024GD3; Start 467; Stop 491
atatgaccttggatatgggattctt

SEQ ID NO: 339801 - DNA, 25 bp, Artificial
  probe
  misc_feature (1)..(25): SEQ ID NO: 2881; WAN024F5K; Start 176; Stop 200
agattaagggtgtctttgagtttca

SEQ ID NO: 339802 - DNA, 25 bp, Artificial
  probe
  misc_feature (1)..(25): SEQ ID NO: 2881; WAN024F5K; Start 177; Stop 201
gattaagggtgtctttgagtttcat

SEQ ID NO: 339803 - DNA, 25 bp, Artificial
  probe
  misc_feature (1)..(25): SEQ ID NO: 2881; WAN024F5K; Start 178; Stop 202
attaagggtgtctttgagtttcatg

SEQ ID NO: 339804 - DNA, 25 bp, Artificial
  probe
  misc_feature (1)..(25): SEQ ID NO: 2881; WAN024F5K; Start 184; Stop 208
ggtgtctttgagtttcatggtatct

SEQ ID NO: 339805 - DNA, 25 bp, Artificial
  probe
  misc_feature (1)..(25): SEQ ID NO: 2881; WAN024F5K; Start 187; Stop 211
gtctttgagtttcatggtatctcct

SEQ ID NO: 339806 - DNA, 25 bp, Artificial
  probe
  misc_feature (1)..(25): SEQ ID NO: 2881; WAN024F5K; Start 185; Stop 209
gtgtctttgagtttcatggtatctc

SEQ ID NO: 339807 - DNA, 25 bp, Artificial
  probe
  misc_feature (1)..(25): SEQ ID NO: 2881; WAN024F5K; Start 188; Stop 212
tctttgagtttcatggtatctcctt

SEQ ID NO: 339808 - DNA, 25 bp, Artificial
  probe
  misc_feature (1)..(25): SEQ ID NO: 2881; WAN024F5K; Start 186; Stop 210
tgtctttgagtttcatggtatctcc

SEQ ID NO: 339809 - DNA, 25 bp, Artificial
  probe
  misc_feature (1)..(25): SEQ ID NO: 2881; WAN024F5K; Start 179; Stop 203
ttaagggtgtctttgagtttcatgg

SEQ ID NO: 339810 - DNA, 25 bp, Artificial
  probe
  misc_feature (1)..(25): SEQ ID NO: 2881; WAN024F5K; Start 189; Stop 213
ctttgagtttcatggtatctccttt

SEQ ID NO: 339811 - DNA, 25 bp, Artificial
  probe
  misc_feature (1)..(25): SEQ ID NO: 2881; WAN024F5K; Start 183; Stop 207
gggtgtctttgagtttcatggtatc

SEQ ID NO: 339812 - DNA, 25 bp, Artificial
  probe
  misc_feature (1)..(25): SEQ ID NO: 2881; WAN024F5K; Start 182; Stop 206
agggtgtctttgagtttcatggtat

SEQ ID NO: 339813 - DNA, 25 bp, Artificial
  probe
  misc_feature (1)..(25): SEQ ID NO: 2881; WAN024F5K; Start 75; Stop 99
attcttgacgacgttgataaagttt

SEQ ID NO: 339814 - DNA, 25 bp, Artificial
  probe
  misc_feature (1)..(25): SEQ ID NO: 2881; WAN024F5K; Start 74; Stop 98
aattcttgacgacgttgataaagtt

SEQ ID NO: 339815 - DNA, 25 bp, Artificial
  probe
  misc_feature (1)..(25): SEQ ID NO: 2881; WAN024F5K; Start 73; Stop 97
caattcttgacgacgttgataaagt

SEQ ID NO: 339816 - DNA, 25 bp, Artificial
  probe
  misc_feature (1)..(25): SEQ ID NO: 2881; WAN024F5K; Start 181; Stop 205
aagggtgtctttgagtttcatggta

SEQ ID NO: 339817 - DNA, 25 bp, Artificial
  probe
  misc_feature (1)..(25): SEQ ID NO: 2881; WAN024F5K; Start 180; Stop 204
taagggtgtctttgagtttcatggt

SEQ ID NO: 339818 - DNA, 25 bp, Artificial
  probe
  misc_feature (1)..(25): SEQ ID NO: 2881; WAN024F5K; Start 70; Stop 94
gttcaattcttgacgacgttgataa

SEQ ID NO: 339819 - DNA, 25 bp, Artificial
  probe
  misc_feature (1)..(25): SEQ ID NO: 2881; WAN024F5K; Start 190; Stop 214
tttgagtttcatggtatctccttta

SEQ ID NO: 339820 - DNA, 25 bp, Artificial
  probe
  misc_feature (1)..(25): SEQ ID NO: 2881; WAN024F5K; Start 174; Stop 198
caagattaagggtgtctttgagttt

SEQ ID NO: 339821 - DNA, 25 bp, Artificial
  probe
  misc_feature (1)..(25): SEQ ID NO: 2881; WAN024F5K; Start 175; Stop 199
aagattaagggtgtctttgagtttc

SEQ ID NO: 339822 - DNA, 25 bp, Artificial
  probe
  misc_feature (1)..(25): SEQ ID NO: 2881; WAN024F5K; Start 191; Stop 215
ttgagtttcatggtatctcctttat

SEQ ID NO: 339823 - DNA, 25 bp, Artificial
  probe
  misc_feature (1)..(25): SEQ ID NO: 2881; WAN024F5K; Start 173; Stop 197
ccaagattaagggtgtctttgagtt

SEQ ID NO: 339824 - DNA, 25 bp, Artificial
  probe
  misc_feature (1)..(25): SEQ ID NO: 2881; WAN024F5K; Start 11; Stop 35
tggatatttccgttagcgtatggag

SEQ ID NO: 339825 - DNA, 25 bp, Artificial
  probe
  misc_feature (1)..(25): SEQ ID NO: 2881; WAN024F5K; Start 10; Stop 34
gtggatatttccgttagcgtatgga

SEQ ID NO: 339826 - DNA, 25 bp, Artificial
  probe
  misc_feature (1)..(25): SEQ ID NO: 2881; WAN024F5K; Start 69; Stop 93
ggttcaattcttgacgacgttgata

SEQ ID NO: 339827 - DNA, 25 bp, Artificial
  probe
  misc_feature (1)..(25): SEQ ID NO: 2881; WAN024F5K; Start 13; Stop 37
gatatttccgttagcgtatggaggg

SEQ ID NO: 339828 - DNA, 25 bp, Artificial
  probe
  misc_feature (1)..(25): SEQ ID NO: 2881; WAN024F5K; Start 12; Stop 36
ggatatttccgttagcgtatggagg

SEQ ID NO: 339829 - DNA, 25 bp, Artificial
  probe
  misc_feature (1)..(25): SEQ ID NO: 2881; WAN024F5K; Start 169; Stop 193
tttcccaagattaagggtgtctttg

SEQ ID NO: 339830 - DNA, 25 bp, Artificial
  probe
  misc_feature (1)..(25): SEQ ID NO: 2881; WAN024F5K; Start 192; Stop 216
tgagtttcatggtatctcctttata

SEQ ID NO: 339831 - DNA, 25 bp, Artificial
  probe
  misc_feature (1)..(25): SEQ ID NO: 2881; WAN024F5K; Start 170; Stop 194
ttcccaagattaagggtgtctttga

SEQ ID NO: 339832 - DNA, 25 bp, Artificial
  probe
  misc_feature (1)..(25): SEQ ID NO: 2881; WAN024F5K; Start 54; Stop 78
aatgaggttttccttggttcaattc

SEQ ID NO: 339833 - DNA, 25 bp, Artificial
  probe
  misc_feature (1)..(25): SEQ ID NO: 2881; WAN024F5K; Start 53; Stop 77
aaatgaggttttccttggttcaatt

SEQ ID NO: 339834 - DNA, 25 bp, Artificial
  probe
  misc_feature (1)..(25): SEQ ID NO: 2882; WAN024DZU; Start 139; Stop 163
cgggtctctcatataagttggattt

SEQ ID NO: 339835 - DNA, 25 bp, Artificial
  probe
  misc_feature (1)..(25): SEQ ID NO: 2882; WAN024DZU; Start 203; Stop 227
taataaatcccacgaatcttagcac

SEQ ID NO: 339836 - DNA, 25 bp, Artificial
  probe
  misc_feature (1)..(25): SEQ ID NO: 2882; WAN024DZU; Start 204; Stop 228
aataaatcccacgaatcttagcacc

SEQ ID NO: 339837 - DNA, 25 bp, Artificial
  probe
  misc_feature (1)..(25): SEQ ID NO: 2882; WAN024DZU; Start 196; Stop 220
accttcataataaatcccacgaatc

SEQ ID NO: 339838 - DNA, 25 bp, Artificial
  probe
  misc_feature (1)..(25): SEQ ID NO: 2882; WAN024DZU; Start 195; Stop 219
gaccttcataataaatcccacgaat

SEQ ID NO: 339839 - DNA, 25 bp, Artificial
  probe
  misc_feature (1)..(25): SEQ ID NO: 2882; WAN024DZU; Start 197; Stop 221
ccttcataataaatcccacgaatct

SEQ ID NO: 339840 - DNA, 25 bp, Artificial
  probe
  misc_feature (1)..(25): SEQ ID NO: 2882; WAN024DZU; Start 205; Stop 229
ataaatcccacgaatcttagcacct

SEQ ID NO: 339841 - DNA, 25 bp, Artificial
  probe
  misc_feature (1)..(25): SEQ ID NO: 2882; WAN024DZU; Start 202; Stop 226
ataataaatcccacgaatcttagca

SEQ ID NO: 339842 - DNA, 25 bp, Artificial
  probe
  misc_feature (1)..(25): SEQ ID NO: 2882; WAN024DZU; Start 201; Stop 225
cataataaatcccacgaatcttagc

SEQ ID NO: 339843 - DNA, 25 bp, Artificial
  probe
  misc_feature (1)..(25): SEQ ID NO: 2882; WAN024DZU; Start 228; Stop 252
ctgttgcttctttataatggtttcc

SEQ ID NO: 339844 - DNA, 25 bp, Artificial
  probe
  misc_feature (1)..(25): SEQ ID NO: 2882; WAN024DZU; Start 227; Stop 251
cctgttgcttctttataatggtttc

SEQ ID NO: 339845 - DNA, 25 bp, Artificial
  probe
  misc_feature (1)..(25): SEQ ID NO: 2882; WAN024DZU; Start 194; Stop 218
ggaccttcataataaatcccacgaa

SEQ ID NO: 339846 - DNA, 25 bp, Artificial
  probe
  misc_feature (1)..(25): SEQ ID NO: 2882; WAN024DZU; Start 33; Stop 57
taactgtacgaacaaagtcttccac

SEQ ID NO: 339847 - DNA, 25 bp, Artificial
  probe
  misc_feature (1)..(25): SEQ ID NO: 2882; WAN024DZU; Start 32; Stop 56
gtaactgtacgaacaaagtcttcca

SEQ ID NO: 339848 - DNA, 25 bp, Artificial
  probe
  misc_feature (1)..(25): SEQ ID NO: 2882; WAN024DZU; Start 111; Stop 135
tttgccaagaatgaaactcctcaac

SEQ ID NO: 339849 - DNA, 25 bp, Artificial
  probe
  misc_feature (1)..(25): SEQ ID NO: 2882; WAN024DZU; Start 206; Stop 230
taaatcccacgaatcttagcacctg

SEQ ID NO: 339850 - DNA, 25 bp, Artificial
  probe
  misc_feature (1)..(25): SEQ ID NO: 2882; WAN024DZU; Start 192; Stop 216
atggaccttcataataaatcccacg

SEQ ID NO: 339851 - DNA, 25 bp, Artificial
  probe
  misc_feature (1)..(25): SEQ ID NO: 2882; WAN024DZU; Start 198; Stop 222
cttcataataaatcccacgaatctt

SEQ ID NO: 339852 - DNA, 25 bp, Artificial
  probe
  misc_feature (1)..(25): SEQ ID NO: 2882; WAN024DZU; Start 193; Stop 217
tggaccttcataataaatcccacga

SEQ ID NO: 339853 - DNA, 25 bp, Artificial
  probe
  misc_feature (1)..(25): SEQ ID NO: 2882; WAN024DZU; Start 225; Stop 249
cacctgttgcttctttataatggtt

SEQ ID NO: 339854 - DNA, 25 bp, Artificial
  probe
  misc_feature (1)..(25): SEQ ID NO: 2882; WAN024DZU; Start 177; Stop 201
aagtttctgtgaaatatggaccttc

SEQ ID NO: 339855 - DNA, 25 bp, Artificial
  probe
  misc_feature (1)..(25): SEQ ID NO: 2882; WAN024DZU; Start 229; Stop 253
tgttgcttctttataatggtttcca

SEQ ID NO: 339856 - DNA, 25 bp, Artificial
  probe
  misc_feature (1)..(25): SEQ ID NO: 2882; WAN024DZU; Start 226; Stop 250
acctgttgcttctttataatggttt

SEQ ID NO: 339857 - DNA, 25 bp, Artificial
  probe
  misc_feature (1)..(25): SEQ ID NO: 2882; WAN024DZU; Start 176; Stop 200
aaagtttctgtgaaatatggacctt

SEQ ID NO: 339858 - DNA, 25 bp, Artificial
  probe
  misc_feature (1)..(25): SEQ ID NO: 2882; WAN024DZU; Start 191; Stop 215
tatggaccttcataataaatcccac

SEQ ID NO: 339859 - DNA, 25 bp, Artificial
  probe
  misc_feature (1)..(25): SEQ ID NO: 2882; WAN024DZU; Start 146; Stop 170
ctcatataagttggattttgtgccc

SEQ ID NO: 339860 - DNA, 25 bp, Artificial
  probe
  misc_feature (1)..(25): SEQ ID NO: 2882; WAN024DZU; Start 112; Stop 136
ttgccaagaatgaaactcctcaaca

SEQ ID NO: 339861 - DNA, 25 bp, Artificial
  probe
  misc_feature (1)..(25): SEQ ID NO: 2882; WAN024DZU; Start 145; Stop 169
tctcatataagttggattttgtgcc

SEQ ID NO: 339862 - DNA, 25 bp, Artificial
  probe
  misc_feature (1)..(25): SEQ ID NO: 2882; WAN024DZU; Start 200; Stop 224
tcataataaatcccacgaatcttag

SEQ ID NO: 339863 - DNA, 25 bp, Artificial
  probe
  misc_feature (1)..(25): SEQ ID NO: 2882; WAN024DZU; Start 230; Stop 254
gttgcttctttataatggtttccaa

SEQ ID NO: 339864 - DNA, 25 bp, Artificial
  probe
  misc_feature (1)..(25): SEQ ID NO: 2882; WAN024DZU; Start 178; Stop 202
agtttctgtgaaatatggaccttca

SEQ ID NO: 339865 - DNA, 25 bp, Artificial
  probe
  misc_feature (1)..(25): SEQ ID NO: 2882; WAN024DZU; Start 147; Stop 171
tcatataagttggattttgtgcccc

SEQ ID NO: 339866 - DNA, 25 bp, Artificial
  probe
  misc_feature (1)..(25): SEQ ID NO: 2882; WAN024DZU; Start 179; Stop 203
gtttctgtgaaatatggaccttcat

SEQ ID NO: 339867 - DNA, 25 bp, Artificial
  probe
  misc_feature (1)..(25): SEQ ID NO: 2883; WAN024EYM; Start 217; Stop 241
gttatcttgactgaccacaatgaat

SEQ ID NO: 339868 - DNA, 25 bp, Artificial
  probe
  misc_feature (1)..(25): SEQ ID NO: 2883; WAN024EYM; Start 216; Stop 240
agttatcttgactgaccacaatgaa

SEQ ID NO: 339869 - DNA, 25 bp, Artificial
  probe
  misc_feature (1)..(25): SEQ ID NO: 2883; WAN024EYM; Start 215; Stop 239
aagttatcttgactgaccacaatga

SEQ ID NO: 339870 - DNA, 25 bp, Artificial
  probe
  misc_feature (1)..(25): SEQ ID NO: 2883; WAN024EYM; Start 218; Stop 242
ttatcttgactgaccacaatgaatt

SEQ ID NO: 339871 - DNA, 25 bp, Artificial
  probe
  misc_feature (1)..(25): SEQ ID NO: 2883; WAN024EYM; Start 368; Stop 392
caatcgtttaccgtatgttcaaaga

SEQ ID NO: 339872 - DNA, 25 bp, Artificial
  probe
  misc_feature (1)..(25): SEQ ID NO: 2883; WAN024EYM; Start 367; Stop 391
tcaatcgtttaccgtatgttcaaag

SEQ ID NO: 339873 - DNA, 25 bp, Artificial
  probe
  misc_feature (1)..(25): SEQ ID NO: 2883; WAN024EYM; Start 365; Stop 389
cttcaatcgtttaccgtatgttcaa

SEQ ID NO: 339874 - DNA, 25 bp, Artificial
  probe
  misc_feature (1)..(25): SEQ ID NO: 2883; WAN024EYM; Start 363; Stop 387
gtcttcaatcgtttaccgtatgttc

SEQ ID NO: 339875 - DNA, 25 bp, Artificial
  probe
  misc_feature (1)..(25): SEQ ID NO: 2883; WAN024EYM; Start 539; Stop 563
aagaatatggtttggcaatgttgaa

SEQ ID NO: 339876 - DNA, 25 bp, Artificial
  probe
  misc_feature (1)..(25): SEQ ID NO: 2883; WAN024EYM; Start 366; Stop 390
ttcaatcgtttaccgtatgttcaaa

SEQ ID NO: 339877 - DNA, 25 bp, Artificial
  probe
  misc_feature (1)..(25): SEQ ID NO: 2883; WAN024EYM; Start 540; Stop 564
agaatatggtttggcaatgttgaaa

SEQ ID NO: 339878 - DNA, 25 bp, Artificial
  probe
  misc_feature (1)..(25): SEQ ID NO: 2883; WAN024EYM; Start 538; Stop 562
gaagaatatggtttggcaatgttga

SEQ ID NO: 339879 - DNA, 25 bp, Artificial
  probe
  misc_feature (1)..(25): SEQ ID NO: 2883; WAN024EYM; Start 364; Stop 388
tcttcaatcgtttaccgtatgttca

SEQ ID NO: 339880 - DNA, 25 bp, Artificial
  probe
  misc_feature (1)..(25): SEQ ID NO: 2883; WAN024EYM; Start 541; Stop 565
gaatatggtttggcaatgttgaaag

SEQ ID NO: 339881 - DNA, 25 bp, Artificial
  probe
  misc_feature (1)..(25): SEQ ID NO: 2883; WAN024EYM; Start 369; Stop 393
aatcgtttaccgtatgttcaaagaa

SEQ ID NO: 339882 - DNA, 25 bp, Artificial
  probe
  misc_feature (1)..(25): SEQ ID NO: 2883; WAN024EYM; Start 537; Stop 561
ggaagaatatggtttggcaatgttg

SEQ ID NO: 339883 - DNA, 25 bp, Artificial
  probe
  misc_feature (1)..(25): SEQ ID NO: 2883; WAN024EYM; Start 773; Stop 797
atatcgtcaactcaaactcagaaat

SEQ ID NO: 339884 - DNA, 25 bp, Artificial
  probe
  misc_feature (1)..(25): SEQ ID NO: 2883; WAN024EYM; Start 542; Stop 566
aatatggtttggcaatgttgaaagc

SEQ ID NO: 339885 - DNA, 25 bp, Artificial
  probe
  misc_feature (1)..(25): SEQ ID NO: 2883; WAN024EYM; Start 429; Stop 453
gatgctttcaggtttgatttcagat

SEQ ID NO: 339886 - DNA, 25 bp, Artificial
  probe
  misc_feature (1)..(25): SEQ ID NO: 2883; WAN024EYM; Start 426; Stop 450
tttgatgctttcaggtttgatttca

SEQ ID NO: 339887 - DNA, 25 bp, Artificial
  probe
  misc_feature (1)..(25): SEQ ID NO: 2883; WAN024EYM; Start 425; Stop 449
gtttgatgctttcaggtttgatttc

SEQ ID NO: 339888 - DNA, 25 bp, Artificial
  probe
  misc_feature (1)..(25): SEQ ID NO: 2883; WAN024EYM; Start 536; Stop 560
tggaagaatatggtttggcaatgtt

SEQ ID NO: 339889 - DNA, 25 bp, Artificial
  probe
  misc_feature (1)..(25): SEQ ID NO: 2883; WAN024EYM; Start 431; Stop 455
tgctttcaggtttgatttcagatac

SEQ ID NO: 339890 - DNA, 25 bp, Artificial
  probe
  misc_feature (1)..(25): SEQ ID NO: 2883; WAN024EYM; Start 427; Stop 451
ttgatgctttcaggtttgatttcag

SEQ ID NO: 339891 - DNA, 25 bp, Artificial
  probe
  misc_feature (1)..(25): SEQ ID NO: 2883; WAN024EYM; Start 534; Stop 558
cttggaagaatatggtttggcaatg

SEQ ID NO: 339892 - DNA, 25 bp, Artificial
  probe
  misc_feature (1)..(25): SEQ ID NO: 2883; WAN024EYM; Start 533; Stop 557
acttggaagaatatggtttggcaat

SEQ ID NO: 339893 - DNA, 25 bp, Artificial
  probe
  misc_feature (1)..(25): SEQ ID NO: 2883; WAN024EYM; Start 362; Stop 386
cgtcttcaatcgtttaccgtatgtt

SEQ ID NO: 339894 - DNA, 25 bp, Artificial
  probe
  misc_feature (1)..(25): SEQ ID NO: 2883; WAN024EYM; Start 424; Stop 448
ggtttgatgctttcaggtttgattt

SEQ ID NO: 339895 - DNA, 25 bp, Artificial
  probe
  misc_feature (1)..(25): SEQ ID NO: 2883; WAN024EYM; Start 123; Stop 147
aactccaaatgaagaaacagccttt

SEQ ID NO: 339896 - DNA, 25 bp, Artificial
  probe
  misc_feature (1)..(25): SEQ ID NO: 2883; WAN024EYM; Start 430; Stop 454
atgctttcaggtttgatttcagata

SEQ ID NO: 339897 - DNA, 25 bp, Artificial
  probe
  misc_feature (1)..(25): SEQ ID NO: 2883; WAN024EYM; Start 532; Stop 556
aacttggaagaatatggtttggcaa

SEQ ID NO: 339898 - DNA, 25 bp, Artificial
  probe
  misc_feature (1)..(25): SEQ ID NO: 2883; WAN024EYM; Start 428; Stop 452
tgatgctttcaggtttgatttcaga

SEQ ID NO: 339899 - DNA, 25 bp, Artificial
  probe
  misc_feature (1)..(25): SEQ ID NO: 2883; WAN024EYM; Start 136; Stop 160
gaaacagcctttgtcttgaactatt

SEQ ID NO: 339900 - DNA, 25 bp, Artificial
  probe
  misc_feature (1)..(25): SEQ ID NO: 2884; WAN024EZ3; Start 220; Stop 244
attcttcatctgtatcgtcactgtt

SEQ ID NO: 339901 - DNA, 25 bp, Artificial
  probe
  misc_feature (1)..(25): SEQ ID NO: 2884; WAN024EZ3; Start 215; Stop 239
cctgtattcttcatctgtatcgtca

SEQ ID NO: 339902 - DNA, 25 bp, Artificial
  probe
  misc_feature (1)..(25): SEQ ID NO: 2884; WAN024EZ3; Start 214; Stop 238
acctgtattcttcatctgtatcgtc

SEQ ID NO: 339903 - DNA, 25 bp, Artificial
  probe
  misc_feature (1)..(25): SEQ ID NO: 2884; WAN024EZ3; Start 219; Stop 243
tattcttcatctgtatcgtcactgt

SEQ ID NO: 339904 - DNA, 25 bp, Artificial
  probe
  misc_feature (1)..(25): SEQ ID NO: 2884; WAN024EZ3; Start 217; Stop 241
tgtattcttcatctgtatcgtcact

SEQ ID NO: 339905 - DNA, 25 bp, Artificial
  probe
  misc_feature (1)..(25): SEQ ID NO: 2884; WAN024EZ3; Start 218; Stop 242
gtattcttcatctgtatcgtcactg

SEQ ID NO: 339906 - DNA, 25 bp, Artificial
  probe
  misc_feature (1)..(25): SEQ ID NO: 2884; WAN024EZ3; Start 216; Stop 240
ctgtattcttcatctgtatcgtcac

SEQ ID NO: 339907 - DNA, 25 bp, Artificial
  probe
  misc_feature (1)..(25): SEQ ID NO: 2884; WAN024EZ3; Start 213; Stop 237
tacctgtattcttcatctgtatcgt

SEQ ID NO: 339908 - DNA, 25 bp, Artificial
  probe
  misc_feature (1)..(25): SEQ ID NO: 2884; WAN024EZ3; Start 212; Stop 236
ttacctgtattcttcatctgtatcg

SEQ ID NO: 339909 - DNA, 25 bp, Artificial
  probe
  misc_feature (1)..(25): SEQ ID NO: 2884; WAN024EZ3; Start 221; Stop 245
ttcttcatctgtatcgtcactgttt

SEQ ID NO: 339910 - DNA, 25 bp, Artificial
  probe
  misc_feature (1)..(25): SEQ ID NO: 2884; WAN024EZ3; Start 208; Stop 232
tcgtttacctgtattcttcatctgt

SEQ ID NO: 339911 - DNA, 25 bp, Artificial
  probe
  misc_feature (1)..(25): SEQ ID NO: 2884; WAN024EZ3; Start 222; Stop 246
tcttcatctgtatcgtcactgtttc

SEQ ID NO: 339912 - DNA, 25 bp, Artificial
  probe
  misc_feature (1)..(25): SEQ ID NO: 2884; WAN024EZ3; Start 225; Stop 249
tcatctgtatcgtcactgtttccta

SEQ ID NO: 339913 - DNA, 25 bp, Artificial
  probe
  misc_feature (1)..(25): SEQ ID NO: 2884; WAN024EZ3; Start 226; Stop 250
catctgtatcgtcactgtttcctac

SEQ ID NO: 339914 - DNA, 25 bp, Artificial
  probe
  misc_feature (1)..(25): SEQ ID NO: 2884; WAN024EZ3; Start 207; Stop 231
ttcgtttacctgtattcttcatctg

SEQ ID NO: 339915 - DNA, 25 bp, Artificial
  probe
  misc_feature (1)..(25): SEQ ID NO: 2884; WAN024EZ3; Start 187; Stop 211
tctattggctatcagatcaattcgt

SEQ ID NO: 339916 - DNA, 25 bp, Artificial
  probe
  misc_feature (1)..(25): SEQ ID NO: 2884; WAN024EZ3; Start 223; Stop 247
cttcatctgtatcgtcactgtttcc

SEQ ID NO: 339917 - DNA, 25 bp, Artificial
  probe
  misc_feature (1)..(25): SEQ ID NO: 2884; WAN024EZ3; Start 188; Stop 212
ctattggctatcagatcaattcgtt

SEQ ID NO: 339918 - DNA, 25 bp, Artificial
  probe
  misc_feature (1)..(25): SEQ ID NO: 2884; WAN024EZ3; Start 209; Stop 233
cgtttacctgtattcttcatctgta

SEQ ID NO: 339919 - DNA, 25 bp, Artificial
  probe
  misc_feature (1)..(25): SEQ ID NO: 2884; WAN024EZ3; Start 293; Stop 317
ggcttcttggatatcatcacgaatt

SEQ ID NO: 339920 - DNA, 25 bp, Artificial
  probe
  misc_feature (1)..(25): SEQ ID NO: 2884; WAN024EZ3; Start 224; Stop 248
ttcatctgtatcgtcactgtttcct

SEQ ID NO: 339921 - DNA, 25 bp, Artificial
  probe
  misc_feature (1)..(25): SEQ ID NO: 2884; WAN024EZ3; Start 203; Stop 227
tcaattcgtttacctgtattcttca

SEQ ID NO: 339922 - DNA, 25 bp, Artificial
  probe
  misc_feature (1)..(25): SEQ ID NO: 2884; WAN024EZ3; Start 193; Stop 217
ggctatcagatcaattcgtttacct

SEQ ID NO: 339923 - DNA, 25 bp, Artificial
  probe
  misc_feature (1)..(25): SEQ ID NO: 2884; WAN024EZ3; Start 142; Stop 166
caaacgatctcgcaattcatacaaa

SEQ ID NO: 339924 - DNA, 25 bp, Artificial
  probe
  misc_feature (1)..(25): SEQ ID NO: 2884; WAN024EZ3; Start 192; Stop 216
tggctatcagatcaattcgtttacc

SEQ ID NO: 339925 - DNA, 25 bp, Artificial
  probe
  misc_feature (1)..(25): SEQ ID NO: 2884; WAN024EZ3; Start 186; Stop 210
ttctattggctatcagatcaattcg

SEQ ID NO: 339926 - DNA, 25 bp, Artificial
  probe
  misc_feature (1)..(25): SEQ ID NO: 2884; WAN024EZ3; Start 139; Stop 163
cttcaaacgatctcgcaattcatac

SEQ ID NO: 339927 - DNA, 25 bp, Artificial
  probe
  misc_feature (1)..(25): SEQ ID NO: 2884; WAN024EZ3; Start 138; Stop 162
tcttcaaacgatctcgcaattcata

SEQ ID NO: 339928 - DNA, 25 bp, Artificial
  probe
  misc_feature (1)..(25): SEQ ID NO: 2884; WAN024EZ3; Start 240; Stop 264
ctgtttcctacaccgtcatttaatt

SEQ ID NO: 339929 - DNA, 25 bp, Artificial
  probe
  misc_feature (1)..(25): SEQ ID NO: 2884; WAN024EZ3; Start 239; Stop 263
actgtttcctacaccgtcatttaat

SEQ ID NO: 339930 - DNA, 25 bp, Artificial
  probe
  misc_feature (1)..(25): SEQ ID NO: 2884; WAN024EZ3; Start 206; Stop 230
attcgtttacctgtattcttcatct

SEQ ID NO: 339931 - DNA, 25 bp, Artificial
  probe
  misc_feature (1)..(25): SEQ ID NO: 2884; WAN024EZ3; Start 241; Stop 265
tgtttcctacaccgtcatttaattt

SEQ ID NO: 339932 - DNA, 25 bp, Artificial
  probe
  misc_feature (1)..(25): SEQ ID NO: 2884; WAN024EZ3; Start 191; Stop 215
ttggctatcagatcaattcgtttac

SEQ ID NO: 339933 - DNA, 25 bp, Artificial
  probe
  misc_feature (1)..(25): SEQ ID NO: 2885; WAN024CPU; Start 52; Stop 76
ttattgagaactggtagaactcctg

SEQ ID NO: 339934 - DNA, 25 bp, Artificial
  probe
  misc_feature (1)..(25): SEQ ID NO: 2885; WAN024CPU; Start 53; Stop 77
tattgagaactggtagaactcctgg

SEQ ID NO: 339935 - DNA, 25 bp, Artificial
  probe
  misc_feature (1)..(25): SEQ ID NO: 2885; WAN024CPU; Start 48; Stop 72
ccctttattgagaactggtagaact

SEQ ID NO: 339936 - DNA, 25 bp, Artificial
  probe
  misc_feature (1)..(25): SEQ ID NO: 2885; WAN024CPU; Start 202; Stop 226
aagttcattagttgtcacctccaaa

SEQ ID NO: 339937 - DNA, 25 bp, Artificial
  probe
  misc_feature (1)..(25): SEQ ID NO: 2885; WAN024CPU; Start 201; Stop 225
aaagttcattagttgtcacctccaa

SEQ ID NO: 339938 - DNA, 25 bp, Artificial
  probe
  misc_feature (1)..(25): SEQ ID NO: 2885; WAN024CPU; Start 198; Stop 222
ttcaaagttcattagttgtcacctc

SEQ ID NO: 339939 - DNA, 25 bp, Artificial
  probe
  misc_feature (1)..(25): SEQ ID NO: 2885; WAN024CPU; Start 199; Stop 223
tcaaagttcattagttgtcacctcc

SEQ ID NO: 339940 - DNA, 25 bp, Artificial
  probe
  misc_feature (1)..(25): SEQ ID NO: 2885; WAN024CPU; Start 196; Stop 220
gtttcaaagttcattagttgtcacc

SEQ ID NO: 339941 - DNA, 25 bp, Artificial
  probe
  misc_feature (1)..(25): SEQ ID NO: 2885; WAN024CPU; Start 197; Stop 221
tttcaaagttcattagttgtcacct

SEQ ID NO: 339942 - DNA, 25 bp, Artificial
  probe
  misc_feature (1)..(25): SEQ ID NO: 2885; WAN024CPU; Start 200; Stop 224
caaagttcattagttgtcacctcca

SEQ ID NO: 339943 - DNA, 25 bp, Artificial
  probe
  misc_feature (1)..(25): SEQ ID NO: 2885; WAN024CPU; Start 51; Stop 75
tttattgagaactggtagaactcct

SEQ ID NO: 339944 - DNA, 25 bp, Artificial
  probe
  misc_feature (1)..(25): SEQ ID NO: 2885; WAN024CPU; Start 195; Stop 219
tgtttcaaagttcattagttgtcac

SEQ ID NO: 339945 - DNA, 25 bp, Artificial
  probe
  misc_feature (1)..(25): SEQ ID NO: 2885; WAN024CPU; Start 50; Stop 74
ctttattgagaactggtagaactcc

SEQ ID NO: 339946 - DNA, 25 bp, Artificial
  probe
  misc_feature (1)..(25): SEQ ID NO: 2885; WAN024CPU; Start 49; Stop 73
cctttattgagaactggtagaactc

SEQ ID NO: 339947 - DNA, 25 bp, Artificial
  probe
  misc_feature (1)..(25): SEQ ID NO: 2885; WAN024CPU; Start 194; Stop 218
ctgtttcaaagttcattagttgtca

SEQ ID NO: 339948 - DNA, 25 bp, Artificial
  probe
  misc_feature (1)..(25): SEQ ID NO: 2885; WAN024CPU; Start 193; Stop 217
actgtttcaaagttcattagttgtc

SEQ ID NO: 339949 - DNA, 25 bp, Artificial
  probe
  misc_feature (1)..(25): SEQ ID NO: 2885; WAN024CPU; Start 192; Stop 216
gactgtttcaaagttcattagttgt

SEQ ID NO: 339950 - DNA, 25 bp, Artificial
  probe
  misc_feature (1)..(25): SEQ ID NO: 2885; WAN024CPU; Start 191; Stop 215
tgactgtttcaaagttcattagttg

SEQ ID NO: 339951 - DNA, 25 bp, Artificial
  probe
  misc_feature (1)..(25): SEQ ID NO: 2885; WAN024CPU; Start 80; Stop 104
aagaccagtcaatcacgttagtgtt

SEQ ID NO: 339952 - DNA, 25 bp, Artificial
  probe
  misc_feature (1)..(25): SEQ ID NO: 2885; WAN024CPU; Start 330; Stop 354
acaggtagaccttgagagaatccag

SEQ ID NO: 339953 - DNA, 25 bp, Artificial
  probe
  misc_feature (1)..(25): SEQ ID NO: 2885; WAN024CPU; Start 329; Stop 353
gacaggtagaccttgagagaatcca

SEQ ID NO: 339954 - DNA, 25 bp, Artificial
  probe
  misc_feature (1)..(25): SEQ ID NO: 2885; WAN024CPU; Start 333; Stop 357
ggtagaccttgagagaatccagcag

SEQ ID NO: 339955 - DNA, 25 bp, Artificial
  probe
  misc_feature (1)..(25): SEQ ID NO: 2885; WAN024CPU; Start 97; Stop 121
ttagtgttggcattttggtcatttc

SEQ ID NO: 339956 - DNA, 25 bp, Artificial
  probe
  misc_feature (1)..(25): SEQ ID NO: 2885; WAN024CPU; Start 127; Stop 151
tgggcagaagtaggtgagaagattt

SEQ ID NO: 339957 - DNA, 25 bp, Artificial
  probe
  misc_feature (1)..(25): SEQ ID NO: 2885; WAN024CPU; Start 47; Stop 71
cccctttattgagaactggtagaac

SEQ ID NO: 339958 - DNA, 25 bp, Artificial
  probe
  misc_feature (1)..(25): SEQ ID NO: 2885; WAN024CPU; Start 96; Stop 120
gttagtgttggcattttggtcattt

SEQ ID NO: 339959 - DNA, 25 bp, Artificial
  probe
  misc_feature (1)..(25): SEQ ID NO: 2885; WAN024CPU; Start 81; Stop 105
agaccagtcaatcacgttagtgttg

SEQ ID NO: 339960 - DNA, 25 bp, Artificial
  probe
  misc_feature (1)..(25): SEQ ID NO: 2885; WAN024CPU; Start 59; Stop 83
gaactggtagaactcctgggaaaga

SEQ ID NO: 339961 - DNA, 25 bp, Artificial
  probe
  misc_feature (1)..(25): SEQ ID NO: 2885; WAN024CPU; Start 58; Stop 82
agaactggtagaactcctgggaaag

SEQ ID NO: 339962 - DNA, 25 bp, Artificial
  probe
  misc_feature (1)..(25): SEQ ID NO: 2885; WAN024CPU; Start 203; Stop 227
agttcattagttgtcacctccaaaa

SEQ ID NO: 339963 - DNA, 25 bp, Artificial
  probe
  misc_feature (1)..(25): SEQ ID NO: 2885; WAN024CPU; Start 334; Stop 358
gtagaccttgagagaatccagcagg

SEQ ID NO: 339964 - DNA, 25 bp, Artificial
  probe
  misc_feature (1)..(25): SEQ ID NO: 2885; WAN024CPU; Start 86; Stop 110
agtcaatcacgttagtgttggcatt

SEQ ID NO: 339965 - DNA, 25 bp, Artificial
  probe
  misc_feature (1)..(25): SEQ ID NO: 2885; WAN024CPU; Start 338; Stop 362
accttgagagaatccagcaggaatc

SEQ ID NO: 339966 - DNA, 25 bp, Artificial
  probe
  misc_feature (1)..(25): SEQ ID NO: 2886; WAN024GLD; Start 1288; Stop 1312
gctctactcaatctgactgactatc

SEQ ID NO: 339967 - DNA, 25 bp, Artificial
  probe
  misc_feature (1)..(25): SEQ ID NO: 2886; WAN024GLD; Start 1551; Stop 1575
tatcgacatcatctcacactacact

SEQ ID NO: 339968 - DNA, 25 bp, Artificial
  probe
  misc_feature (1)..(25): SEQ ID NO: 2886; WAN024GLD; Start 1295; Stop 1319
tcaatctgactgactatcttcaacg

SEQ ID NO: 339969 - DNA, 25 bp, Artificial
  probe
  misc_feature (1)..(25): SEQ ID NO: 2886; WAN024GLD; Start 1293; Stop 1317
actcaatctgactgactatcttcaa

SEQ ID NO: 339970 - DNA, 25 bp, Artificial
  probe
  misc_feature (1)..(25): SEQ ID NO: 2886; WAN024GLD; Start 1294; Stop 1318
ctcaatctgactgactatcttcaac

SEQ ID NO: 339971 - DNA, 25 bp, Artificial
  probe
  misc_feature (1)..(25): SEQ ID NO: 2886; WAN024GLD; Start 1287; Stop 1311
ggctctactcaatctgactgactat

SEQ ID NO: 339972 - DNA, 25 bp, Artificial
  probe
  misc_feature (1)..(25): SEQ ID NO: 2886; WAN024GLD; Start 1298; Stop 1322
atctgactgactatcttcaacggaa

SEQ ID NO: 339973 - DNA, 25 bp, Artificial
  probe
  misc_feature (1)..(25): SEQ ID NO: 2886; WAN024GLD; Start 1297; Stop 1321
aatctgactgactatcttcaacgga

SEQ ID NO: 339974 - DNA, 25 bp, Artificial
  probe
  misc_feature (1)..(25): SEQ ID NO: 2886; WAN024GLD; Start 1296; Stop 1320
caatctgactgactatcttcaacgg

SEQ ID NO: 339975 - DNA, 25 bp, Artificial
  probe
  misc_feature (1)..(25): SEQ ID NO: 2886; WAN024GLD; Start 1289; Stop 1313
ctctactcaatctgactgactatct

SEQ ID NO: 339976 - DNA, 25 bp, Artificial
  probe
  misc_feature (1)..(25): SEQ ID NO: 2886; WAN024GLD; Start 1292; Stop 1316
tactcaatctgactgactatcttca

SEQ ID NO: 339977 - DNA, 25 bp, Artificial
  probe
  misc_feature (1)..(25): SEQ ID NO: 2886; WAN024GLD; Start 385; Stop 409
aatcggacagtcaataatatcggac

SEQ ID NO: 339978 - DNA, 25 bp, Artificial
  probe
  misc_feature (1)..(25): SEQ ID NO: 2886; WAN024GLD; Start 187; Stop 211
attcagtctagttctggtgtaacag

SEQ ID NO: 339979 - DNA, 25 bp, Artificial
  probe
  misc_feature (1)..(25): SEQ ID NO: 2886; WAN024GLD; Start 190; Stop 214
cagtctagttctggtgtaacagtta

SEQ ID NO: 339980 - DNA, 25 bp, Artificial
  probe
  misc_feature (1)..(25): SEQ ID NO: 2886; WAN024GLD; Start 186; Stop 210
aattcagtctagttctggtgtaaca

SEQ ID NO: 339981 - DNA, 25 bp, Artificial
  probe
  misc_feature (1)..(25): SEQ ID NO: 2886; WAN024GLD; Start 179; Stop 203
ctgctctaattcagtctagttctgg

SEQ ID NO: 339982 - DNA, 25 bp, Artificial
  probe
  misc_feature (1)..(25): SEQ ID NO: 2886; WAN024GLD; Start 1552; Stop 1576
atcgacatcatctcacactacactc

SEQ ID NO: 339983 - DNA, 25 bp, Artificial
  probe
  misc_feature (1)..(25): SEQ ID NO: 2886; WAN024GLD; Start 182; Stop 206
ctctaattcagtctagttctggtgt

SEQ ID NO: 339984 - DNA, 25 bp, Artificial
  probe
  misc_feature (1)..(25): SEQ ID NO: 2886; WAN024GLD; Start 181; Stop 205
gctctaattcagtctagttctggtg

SEQ ID NO: 339985 - DNA, 25 bp, Artificial
  probe
  misc_feature (1)..(25): SEQ ID NO: 2886; WAN024GLD; Start 1290; Stop 1314
tctactcaatctgactgactatctt

SEQ ID NO: 339986 - DNA, 25 bp, Artificial
  probe
  misc_feature (1)..(25): SEQ ID NO: 2886; WAN024GLD; Start 180; Stop 204
tgctctaattcagtctagttctggt

SEQ ID NO: 339987 - DNA, 25 bp, Artificial
  probe
  misc_feature (1)..(25): SEQ ID NO: 2886; WAN024GLD; Start 1291; Stop 1315
ctactcaatctgactgactatcttc

SEQ ID NO: 339988 - DNA, 25 bp, Artificial
  probe
  misc_feature (1)..(25): SEQ ID NO: 2886; WAN024GLD; Start 191; Stop 215
agtctagttctggtgtaacagttat

SEQ ID NO: 339989 - DNA, 25 bp, Artificial
  probe
  misc_feature (1)..(25): SEQ ID NO: 2886; WAN024GLD; Start 189; Stop 213
tcagtctagttctggtgtaacagtt

SEQ ID NO: 339990 - DNA, 25 bp, Artificial
  probe
  misc_feature (1)..(25): SEQ ID NO: 2886; WAN024GLD; Start 188; Stop 212
ttcagtctagttctggtgtaacagt

SEQ ID NO: 339991 - DNA, 25 bp, Artificial
  probe
  misc_feature (1)..(25): SEQ ID NO: 2886; WAN024GLD; Start 1286; Stop 1310
aggctctactcaatctgactgacta

SEQ ID NO: 339992 - DNA, 25 bp, Artificial
  probe
  misc_feature (1)..(25): SEQ ID NO: 2886; WAN024GLD; Start 1550; Stop 1574
ttatcgacatcatctcacactacac

SEQ ID NO: 339993 - DNA, 25 bp, Artificial
  probe
  misc_feature (1)..(25): SEQ ID NO: 2886; WAN024GLD; Start 927; Stop 951
tgtaaccaagattattcctggagag

SEQ ID NO: 339994 - DNA, 25 bp, Artificial
  probe
  misc_feature (1)..(25): SEQ ID NO: 2886; WAN024GLD; Start 928; Stop 952
gtaaccaagattattcctggagagg

SEQ ID NO: 339995 - DNA, 25 bp, Artificial
  probe
  misc_feature (1)..(25): SEQ ID NO: 2886; WAN024GLD; Start 390; Stop 414
gacagtcaataatatcggacgcatc

SEQ ID NO: 339996 - DNA, 25 bp, Artificial
  probe
  misc_feature (1)..(25): SEQ ID NO: 2886; WAN024GLD; Start 926; Stop 950
ttgtaaccaagattattcctggaga

SEQ ID NO: 339997 - DNA, 25 bp, Artificial
  probe
  misc_feature (1)..(25): SEQ ID NO: 2886; WAN024GLD; Start 183; Stop 207
tctaattcagtctagttctggtgta

SEQ ID NO: 339998 - DNA, 25 bp, Artificial
  probe
  misc_feature (1)..(25): SEQ ID NO: 2886; WAN024GLD; Start 333; Stop 357
ctatgccctacctatgctctttatc

SEQ ID NO: 339999 - DNA, 25 bp, Artificial
  probe
  misc_feature (1)..(25): SEQ ID NO: 2887; WAN024EWL; Start 222; Stop 246
ctatgtgtggcgtatgtatatcctt

SEQ ID NO: 340000 - DNA, 25 bp, Artificial
  probe
  misc_feature (1)..(25): SEQ ID NO: 2887; WAN024EWL; Start 223; Stop 247
tatgtgtggcgtatgtatatccttg

SEQ ID NO: 340001 - DNA, 25 bp, Artificial
  probe
  misc_feature (1)..(25): SEQ ID NO: 2887; WAN024EWL; Start 1555; Stop 1579
aaggacaagacaaccattatcactg

SEQ ID NO: 340002 - DNA, 25 bp, Artificial
  probe
  misc_feature (1)..(25): SEQ ID NO: 2887; WAN024EWL; Start 94; Stop 118
aatctcattcctcctatggttatgg

SEQ ID NO: 340003 - DNA, 25 bp, Artificial
  probe
  misc_feature (1)..(25): SEQ ID NO: 2887; WAN024EWL; Start 91; Stop 115
ctcaatctcattcctcctatggtta

SEQ ID NO: 340004 - DNA, 25 bp, Artificial
  probe
  misc_feature (1)..(25): SEQ ID NO: 2887; WAN024EWL; Start 1268; Stop 1292
cttcaatcctagacaatatccgctt

SEQ ID NO: 340005 - DNA, 25 bp, Artificial
  probe
  misc_feature (1)..(25): SEQ ID NO: 2887; WAN024EWL; Start 1263; Stop 1287
tgcgacttcaatcctagacaatatc

SEQ ID NO: 340006 - DNA, 25 bp, Artificial
  probe
  misc_feature (1)..(25): SEQ ID NO: 2887; WAN024EWL; Start 93; Stop 117
caatctcattcctcctatggttatg

SEQ ID NO: 340007 - DNA, 25 bp, Artificial
  probe
  misc_feature (1)..(25): SEQ ID NO: 2887; WAN024EWL; Start 1265; Stop 1289
cgacttcaatcctagacaatatccg

SEQ ID NO: 340008 - DNA, 25 bp, Artificial
  probe
  misc_feature (1)..(25): SEQ ID NO: 2887; WAN024EWL; Start 92; Stop 116
tcaatctcattcctcctatggttat

SEQ ID NO: 340009 - DNA, 25 bp, Artificial
  probe
  misc_feature (1)..(25): SEQ ID NO: 2887; WAN024EWL; Start 1266; Stop 1290
gacttcaatcctagacaatatccgc

SEQ ID NO: 340010 - DNA, 25 bp, Artificial
  probe
  misc_feature (1)..(25): SEQ ID NO: 2887; WAN024EWL; Start 1264; Stop 1288
gcgacttcaatcctagacaatatcc

SEQ ID NO: 340011 - DNA, 25 bp, Artificial
  probe
  misc_feature (1)..(25): SEQ ID NO: 2887; WAN024EWL; Start 1262; Stop 1286
ttgcgacttcaatcctagacaatat

SEQ ID NO: 340012 - DNA, 25 bp, Artificial
  probe
  misc_feature (1)..(25): SEQ ID NO: 2887; WAN024EWL; Start 90; Stop 114
cctcaatctcattcctcctatggtt

SEQ ID NO: 340013 - DNA, 25 bp, Artificial
  probe
  misc_feature (1)..(25): SEQ ID NO: 2887; WAN024EWL; Start 1267; Stop 1291
acttcaatcctagacaatatccgct

SEQ ID NO: 340014 - DNA, 25 bp, Artificial
  probe
  misc_feature (1)..(25): SEQ ID NO: 2887; WAN024EWL; Start 589; Stop 613
aataacaaggtacaggagtccgtat

SEQ ID NO: 340015 - DNA, 25 bp, Artificial
  probe
  misc_feature (1)..(25): SEQ ID NO: 2887; WAN024EWL; Start 672; Stop 696
ggcagtcaatgaattaaccttccaa

SEQ ID NO: 340016 - DNA, 25 bp, Artificial
  probe
  misc_feature (1)..(25): SEQ ID NO: 2887; WAN024EWL; Start 88; Stop 112
gtcctcaatctcattcctcctatgg

SEQ ID NO: 340017 - DNA, 25 bp, Artificial
  probe
  misc_feature (1)..(25): SEQ ID NO: 2887; WAN024EWL; Start 221; Stop 245
gctatgtgtggcgtatgtatatcct

SEQ ID NO: 340018 - DNA, 25 bp, Artificial
  probe
  misc_feature (1)..(25): SEQ ID NO: 2887; WAN024EWL; Start 590; Stop 614
ataacaaggtacaggagtccgtatc

SEQ ID NO: 340019 - DNA, 25 bp, Artificial
  probe
  misc_feature (1)..(25): SEQ ID NO: 2887; WAN024EWL; Start 1351; Stop 1375
taccaagatattgtagacatgcctc

SEQ ID NO: 340020 - DNA, 25 bp, Artificial
  probe
  misc_feature (1)..(25): SEQ ID NO: 2887; WAN024EWL; Start 1358; Stop 1382
atattgtagacatgcctcaaggatt

SEQ ID NO: 340021 - DNA, 25 bp, Artificial
  probe
  misc_feature (1)..(25): SEQ ID NO: 2887; WAN024EWL; Start 1357; Stop 1381
gatattgtagacatgcctcaaggat

SEQ ID NO: 340022 - DNA, 25 bp, Artificial
  probe
  misc_feature (1)..(25): SEQ ID NO: 2887; WAN024EWL; Start 582; Stop 606
tgaactcaataacaaggtacaggag

SEQ ID NO: 340023 - DNA, 25 bp, Artificial
  probe
  misc_feature (1)..(25): SEQ ID NO: 2887; WAN024EWL; Start 1508; Stop 1532
atgccaagacagagtatgcgattat

SEQ ID NO: 340024 - DNA, 25 bp, Artificial
  probe
  misc_feature (1)..(25): SEQ ID NO: 2887; WAN024EWL; Start 1355; Stop 1379
aagatattgtagacatgcctcaagg

SEQ ID NO: 340025 - DNA, 25 bp, Artificial
  probe
  misc_feature (1)..(25): SEQ ID NO: 2887; WAN024EWL; Start 1354; Stop 1378
caagatattgtagacatgcctcaag

SEQ ID NO: 340026 - DNA, 25 bp, Artificial
  probe
  misc_feature (1)..(25): SEQ ID NO: 2887; WAN024EWL; Start 1350; Stop 1374
ttaccaagatattgtagacatgcct

SEQ ID NO: 340027 - DNA, 25 bp, Artificial
  probe
  misc_feature (1)..(25): SEQ ID NO: 2887; WAN024EWL; Start 1353; Stop 1377
ccaagatattgtagacatgcctcaa

SEQ ID NO: 340028 - DNA, 25 bp, Artificial
  probe
  misc_feature (1)..(25): SEQ ID NO: 2887; WAN024EWL; Start 599; Stop 623
tacaggagtccgtatcaggtatcaa

SEQ ID NO: 340029 - DNA, 25 bp, Artificial
  probe
  misc_feature (1)..(25): SEQ ID NO: 2887; WAN024EWL; Start 89; Stop 113
tcctcaatctcattcctcctatggt

SEQ ID NO: 340030 - DNA, 25 bp, Artificial
  probe
  misc_feature (1)..(25): SEQ ID NO: 2887; WAN024EWL; Start 1356; Stop 1380
agatattgtagacatgcctcaagga

SEQ ID NO: 340031 - DNA, 25 bp, Artificial
  probe
  misc_feature (1)..(25): SEQ ID NO: 2887; WAN024EWL; Start 588; Stop 612
caataacaaggtacaggagtccgta

SEQ ID NO: 340032 - DNA, 25 bp, Artificial
  probe
  misc_feature (1)..(25): SEQ ID NO: 2888; WAN024FSU; Start 209; Stop 233
atttgagagaggataaacaaggctt

SEQ ID NO: 340033 - DNA, 25 bp, Artificial
  probe
  misc_feature (1)..(25): SEQ ID NO: 2888; WAN024FSU; Start 208; Stop 232
tatttgagagaggataaacaaggct

SEQ ID NO: 340034 - DNA, 25 bp, Artificial
  probe
  misc_feature (1)..(25): SEQ ID NO: 2888; WAN024FSU; Start 188; Stop 212
ttggcttgtctaggaaaggatattt

SEQ ID NO: 340035 - DNA, 25 bp, Artificial
  probe
  misc_feature (1)..(25): SEQ ID NO: 2888; WAN024FSU; Start 190; Stop 214
ggcttgtctaggaaaggatatttga

SEQ ID NO: 340036 - DNA, 25 bp, Artificial
  probe
  misc_feature (1)..(25): SEQ ID NO: 2888; WAN024FSU; Start 187; Stop 211
cttggcttgtctaggaaaggatatt

SEQ ID NO: 340037 - DNA, 25 bp, Artificial
  probe
  misc_feature (1)..(25): SEQ ID NO: 2888; WAN024FSU; Start 189; Stop 213
tggcttgtctaggaaaggatatttg

SEQ ID NO: 340038 - DNA, 25 bp, Artificial
  probe
  misc_feature (1)..(25): SEQ ID NO: 2888; WAN024FSU; Start 191; Stop 215
gcttgtctaggaaaggatatttgag

SEQ ID NO: 340039 - DNA, 25 bp, Artificial
  probe
  misc_feature (1)..(25): SEQ ID NO: 2888; WAN024FSU; Start 197; Stop 221
ctaggaaaggatatttgagagagga

SEQ ID NO: 340040 - DNA, 25 bp, Artificial
  probe
  misc_feature (1)..(25): SEQ ID NO: 2888; WAN024FSU; Start 199; Stop 223
aggaaaggatatttgagagaggata

SEQ ID NO: 340041 - DNA, 25 bp, Artificial
  probe
  misc_feature (1)..(25): SEQ ID NO: 2888; WAN024FSU; Start 198; Stop 222
taggaaaggatatttgagagaggat

SEQ ID NO: 340042 - DNA, 25 bp, Artificial
  probe
  misc_feature (1)..(25): SEQ ID NO: 2888; WAN024FSU; Start 207; Stop 231
atatttgagagaggataaacaaggc

SEQ ID NO: 340043 - DNA, 25 bp, Artificial
  probe
  misc_feature (1)..(25): SEQ ID NO: 2888; WAN024FSU; Start 196; Stop 220
tctaggaaaggatatttgagagagg

SEQ ID NO: 340044 - DNA, 25 bp, Artificial
  probe
  misc_feature (1)..(25): SEQ ID NO: 2888; WAN024FSU; Start 194; Stop 218
tgtctaggaaaggatatttgagaga

SEQ ID NO: 340045 - DNA, 25 bp, Artificial
  probe
  misc_feature (1)..(25): SEQ ID NO: 2888; WAN024FSU; Start 210; Stop 234
tttgagagaggataaacaaggcttg

SEQ ID NO: 340046 - DNA, 25 bp, Artificial
  probe
  misc_feature (1)..(25): SEQ ID NO: 2888; WAN024FSU; Start 200; Stop 224
ggaaaggatatttgagagaggataa

SEQ ID NO: 340047 - DNA, 25 bp, Artificial
  probe
  misc_feature (1)..(25): SEQ ID NO: 2888; WAN024FSU; Start 195; Stop 219
gtctaggaaaggatatttgagagag

SEQ ID NO: 340048 - DNA, 25 bp, Artificial
  probe
  misc_feature (1)..(25): SEQ ID NO: 2888; WAN024FSU; Start 193; Stop 217
ttgtctaggaaaggatatttgagag

SEQ ID NO: 340049 - DNA, 25 bp, Artificial
  probe
  misc_feature (1)..(25): SEQ ID NO: 2888; WAN024FSU; Start 192; Stop 216
cttgtctaggaaaggatatttgaga

SEQ ID NO: 340050 - DNA, 25 bp, Artificial
  probe
  misc_feature (1)..(25): SEQ ID NO: 2888; WAN024FSU; Start 203; Stop 227
aaggatatttgagagaggataaaca

SEQ ID NO: 340051 - DNA, 25 bp, Artificial
  probe
  misc_feature (1)..(25): SEQ ID NO: 2888; WAN024FSU; Start 204; Stop 228
aggatatttgagagaggataaacaa

SEQ ID NO: 340052 - DNA, 25 bp, Artificial
  probe
  misc_feature (1)..(25): SEQ ID NO: 2888; WAN024FSU; Start 76; Stop 100
ctcctccaagtcaatcccatcaatg

SEQ ID NO: 340053 - DNA, 25 bp, Artificial
  probe
  misc_feature (1)..(25): SEQ ID NO: 2888; WAN024FSU; Start 206; Stop 230
gatatttgagagaggataaacaagg

SEQ ID NO: 340054 - DNA, 25 bp, Artificial
  probe
  misc_feature (1)..(25): SEQ ID NO: 2888; WAN024FSU; Start 205; Stop 229
ggatatttgagagaggataaacaag

SEQ ID NO: 340055 - DNA, 25 bp, Artificial
  probe
  misc_feature (1)..(25): SEQ ID NO: 2888; WAN024FSU; Start 88; Stop 112
aatcccatcaatgcctcgttcaatc

SEQ ID NO: 340056 - DNA, 25 bp, Artificial
  probe
  misc_feature (1)..(25): SEQ ID NO: 2888; WAN024FSU; Start 202; Stop 226
aaaggatatttgagagaggataaac

SEQ ID NO: 340057 - DNA, 25 bp, Artificial
  probe
  misc_feature (1)..(25): SEQ ID NO: 2888; WAN024FSU; Start 93; Stop 117
catcaatgcctcgttcaatcgtttg

SEQ ID NO: 340058 - DNA, 25 bp, Artificial
  probe
  misc_feature (1)..(25): SEQ ID NO: 2888; WAN024FSU; Start 201; Stop 225
gaaaggatatttgagagaggataaa

SEQ ID NO: 340059 - DNA, 25 bp, Artificial
  probe
  misc_feature (1)..(25): SEQ ID NO: 2888; WAN024FSU; Start 87; Stop 111
caatcccatcaatgcctcgttcaat

SEQ ID NO: 340060 - DNA, 25 bp, Artificial
  probe
  misc_feature (1)..(25): SEQ ID NO: 2888; WAN024FSU; Start 102; Stop 126
ctcgttcaatcgtttgatagtccag

SEQ ID NO: 340061 - DNA, 25 bp, Artificial
  probe
  misc_feature (1)..(25): SEQ ID NO: 2888; WAN024FSU; Start 135; Stop 159
caatcaagaggcgattcatccgatg

SEQ ID NO: 340062 - DNA, 25 bp, Artificial
  probe
  misc_feature (1)..(25): SEQ ID NO: 2888; WAN024FSU; Start 97; Stop 121
aatgcctcgttcaatcgtttgatag

SEQ ID NO: 340063 - DNA, 25 bp, Artificial
  probe
  misc_feature (1)..(25): SEQ ID NO: 2888; WAN024FSU; Start 96; Stop 120
caatgcctcgttcaatcgtttgata

SEQ ID NO: 340064 - DNA, 25 bp, Artificial
  probe
  misc_feature (1)..(25): SEQ ID NO: 2888; WAN024FSU; Start 231; Stop 255
cttgttgggttccagaagtcagtac

SEQ ID NO: 340065 - DNA, 25 bp, Artificial
  probe
  misc_feature (1)..(25): SEQ ID NO: 2889; WAN024C6Z; Start 370; Stop 394
cgagaagttcaagtcaatatcagga

SEQ ID NO: 340066 - DNA, 25 bp, Artificial
  probe
  misc_feature (1)..(25): SEQ ID NO: 2889; WAN024C6Z; Start 369; Stop 393
ccgagaagttcaagtcaatatcagg

SEQ ID NO: 340067 - DNA, 25 bp, Artificial
  probe
  misc_feature (1)..(25): SEQ ID NO: 2889; WAN024C6Z; Start 371; Stop 395
gagaagttcaagtcaatatcaggaa

SEQ ID NO: 340068 - DNA, 25 bp, Artificial
  probe
  misc_feature (1)..(25): SEQ ID NO: 2889; WAN024C6Z; Start 378; Stop 402
tcaagtcaatatcaggaaccttatc

SEQ ID NO: 340069 - DNA, 25 bp, Artificial
  probe
  misc_feature (1)..(25): SEQ ID NO: 2889; WAN024C6Z; Start 379; Stop 403
caagtcaatatcaggaaccttatcc

SEQ ID NO: 340070 - DNA, 25 bp, Artificial
  probe
  misc_feature (1)..(25): SEQ ID NO: 2889; WAN024C6Z; Start 377; Stop 401
ttcaagtcaatatcaggaaccttat

SEQ ID NO: 340071 - DNA, 25 bp, Artificial
  probe
  misc_feature (1)..(25): SEQ ID NO: 2889; WAN024C6Z; Start 120; Stop 144
catccatgtagttcggaataacaac

SEQ ID NO: 340072 - DNA, 25 bp, Artificial
  probe
  misc_feature (1)..(25): SEQ ID NO: 2889; WAN024C6Z; Start 119; Stop 143
acatccatgtagttcggaataacaa

SEQ ID NO: 340073 - DNA, 25 bp, Artificial
  probe
  misc_feature (1)..(25): SEQ ID NO: 2889; WAN024C6Z; Start 115; Stop 139
gtagacatccatgtagttcggaata

SEQ ID NO: 340074 - DNA, 25 bp, Artificial
  probe
  misc_feature (1)..(25): SEQ ID NO: 2889; WAN024C6Z; Start 117; Stop 141
agacatccatgtagttcggaataac

SEQ ID NO: 340075 - DNA, 25 bp, Artificial
  probe
  misc_feature (1)..(25): SEQ ID NO: 2889; WAN024C6Z; Start 118; Stop 142
gacatccatgtagttcggaataaca

SEQ ID NO: 340076 - DNA, 25 bp, Artificial
  probe
  misc_feature (1)..(25): SEQ ID NO: 2889; WAN024C6Z; Start 38; Stop 62
atatcgtggaagttaaagtgagtgg

SEQ ID NO: 340077 - DNA, 25 bp, Artificial
  probe
  misc_feature (1)..(25): SEQ ID NO: 2889; WAN024C6Z; Start 116; Stop 140
tagacatccatgtagttcggaataa

SEQ ID NO: 340078 - DNA, 25 bp, Artificial
  probe
  misc_feature (1)..(25): SEQ ID NO: 2889; WAN024C6Z; Start 366; Stop 390
ctcccgagaagttcaagtcaatatc

SEQ ID NO: 340079 - DNA, 25 bp, Artificial
  probe
  misc_feature (1)..(25): SEQ ID NO: 2889; WAN024C6Z; Start 368; Stop 392
cccgagaagttcaagtcaatatcag

SEQ ID NO: 340080 - DNA, 25 bp, Artificial
  probe
  misc_feature (1)..(25): SEQ ID NO: 2889; WAN024C6Z; Start 121; Stop 145
atccatgtagttcggaataacaacg

SEQ ID NO: 340081 - DNA, 25 bp, Artificial
  probe
  misc_feature (1)..(25): SEQ ID NO: 2889; WAN024C6Z; Start 414; Stop 438
caaggaaggtctcaaacggaatatc

SEQ ID NO: 340082 - DNA, 25 bp, Artificial
  probe
  misc_feature (1)..(25): SEQ ID NO: 2889; WAN024C6Z; Start 367; Stop 391
tcccgagaagttcaagtcaatatca

SEQ ID NO: 340083 - DNA, 25 bp, Artificial
  probe
  misc_feature (1)..(25): SEQ ID NO: 2889; WAN024C6Z; Start 125; Stop 149
atgtagttcggaataacaacgattc

SEQ ID NO: 340084 - DNA, 25 bp, Artificial
  probe
  misc_feature (1)..(25): SEQ ID NO: 2889; WAN024C6Z; Start 39; Stop 63
tatcgtggaagttaaagtgagtggt

SEQ ID NO: 340085 - DNA, 25 bp, Artificial
  probe
  misc_feature (1)..(25): SEQ ID NO: 2889; WAN024C6Z; Start 111; Stop 135
aatcgtagacatccatgtagttcgg

SEQ ID NO: 340086 - DNA, 25 bp, Artificial
  probe
  misc_feature (1)..(25): SEQ ID NO: 2889; WAN024C6Z; Start 124; Stop 148
catgtagttcggaataacaacgatt

SEQ ID NO: 340087 - DNA, 25 bp, Artificial
  probe
  misc_feature (1)..(25): SEQ ID NO: 2889; WAN024C6Z; Start 227; Stop 251
aacttgccataatctcgctcgtaac

SEQ ID NO: 340088 - DNA, 25 bp, Artificial
  probe
  misc_feature (1)..(25): SEQ ID NO: 2889; WAN024C6Z; Start 123; Stop 147
ccatgtagttcggaataacaacgat

SEQ ID NO: 340089 - DNA, 25 bp, Artificial
  probe
  misc_feature (1)..(25): SEQ ID NO: 2889; WAN024C6Z; Start 114; Stop 138
cgtagacatccatgtagttcggaat

SEQ ID NO: 340090 - DNA, 25 bp, Artificial
  probe
  misc_feature (1)..(25): SEQ ID NO: 2889; WAN024C6Z; Start 365; Stop 389
tctcccgagaagttcaagtcaatat

SEQ ID NO: 340091 - DNA, 25 bp, Artificial
  probe
  misc_feature (1)..(25): SEQ ID NO: 2889; WAN024C6Z; Start 380; Stop 404
aagtcaatatcaggaaccttatccc

SEQ ID NO: 340092 - DNA, 25 bp, Artificial
  probe
  misc_feature (1)..(25): SEQ ID NO: 2889; WAN024C6Z; Start 413; Stop 437
ccaaggaaggtctcaaacggaatat

SEQ ID NO: 340093 - DNA, 25 bp, Artificial
  probe
  misc_feature (1)..(25): SEQ ID NO: 2889; WAN024C6Z; Start 110; Stop 134
aaatcgtagacatccatgtagttcg

SEQ ID NO: 340094 - DNA, 25 bp, Artificial
  probe
  misc_feature (1)..(25): SEQ ID NO: 2889; WAN024C6Z; Start 79; Stop 103
gacatcatctgctggatactggaca

SEQ ID NO: 340095 - DNA, 25 bp, Artificial
  probe
  misc_feature (1)..(25): SEQ ID NO: 2889; WAN024C6Z; Start 78; Stop 102
tgacatcatctgctggatactggac

SEQ ID NO: 340096 - DNA, 25 bp, Artificial
  probe
  misc_feature (1)..(25): SEQ ID NO: 2889; WAN024C6Z; Start 77; Stop 101
gtgacatcatctgctggatactgga

SEQ ID NO: 340097 - DNA, 25 bp, Artificial
  probe
  misc_feature (1)..(25): SEQ ID NO: 2889; WAN024C6Z; Start 122; Stop 146
tccatgtagttcggaataacaacga

SEQ ID NO: 340098 - DNA, 25 bp, Artificial
  probe
  misc_feature (1)..(25): SEQ ID NO: 2890; WAN024CF4; Start 503; Stop 527
ttcgttcaattaagtctgtgatgtc

SEQ ID NO: 340099 - DNA, 25 bp, Artificial
  probe
  misc_feature (1)..(25): SEQ ID NO: 2890; WAN024CF4; Start 506; Stop 530
gttcaattaagtctgtgatgtcctt

SEQ ID NO: 340100 - DNA, 25 bp, Artificial
  probe
  misc_feature (1)..(25): SEQ ID NO: 2890; WAN024CF4; Start 505; Stop 529
cgttcaattaagtctgtgatgtcct

SEQ ID NO: 340101 - DNA, 25 bp, Artificial
  probe
  misc_feature (1)..(25): SEQ ID NO: 2890; WAN024CF4; Start 504; Stop 528
tcgttcaattaagtctgtgatgtcc

SEQ ID NO: 340102 - DNA, 25 bp, Artificial
  probe
  misc_feature (1)..(25): SEQ ID NO: 2890; WAN024CF4; Start 577; Stop 601
gatcgtctatcacctaccattgttg

SEQ ID NO: 340103 - DNA, 25 bp, Artificial
  probe
  misc_feature (1)..(25): SEQ ID NO: 2890; WAN024CF4; Start 578; Stop 602
atcgtctatcacctaccattgttga

SEQ ID NO: 340104 - DNA, 25 bp, Artificial
  probe
  misc_feature (1)..(25): SEQ ID NO: 2890; WAN024CF4; Start 718; Stop 742
attattgatcgcttccaccttgtac

SEQ ID NO: 340105 - DNA, 25 bp, Artificial
  probe
  misc_feature (1)..(25): SEQ ID NO: 2890; WAN024CF4; Start 717; Stop 741
cattattgatcgcttccaccttgta

SEQ ID NO: 340106 - DNA, 25 bp, Artificial
  probe
  misc_feature (1)..(25): SEQ ID NO: 2890; WAN024CF4; Start 1015; Stop 1039
agtgaattactagagtcaaccatct

SEQ ID NO: 340107 - DNA, 25 bp, Artificial
  probe
  misc_feature (1)..(25): SEQ ID NO: 2890; WAN024CF4; Start 1016; Stop 1040
gtgaattactagagtcaaccatctt

SEQ ID NO: 340108 - DNA, 25 bp, Artificial
  probe
  misc_feature (1)..(25): SEQ ID NO: 2890; WAN024CF4; Start 576; Stop 600
ggatcgtctatcacctaccattgtt

SEQ ID NO: 340109 - DNA, 25 bp, Artificial
  probe
  misc_feature (1)..(25): SEQ ID NO: 2890; WAN024CF4; Start 568; Stop 592
aagttacaggatcgtctatcaccta

SEQ ID NO: 340110 - DNA, 25 bp, Artificial
  probe
  misc_feature (1)..(25): SEQ ID NO: 2890; WAN024CF4; Start 569; Stop 593
agttacaggatcgtctatcacctac

SEQ ID NO: 340111 - DNA, 25 bp, Artificial
  probe
  misc_feature (1)..(25): SEQ ID NO: 2890; WAN024CF4; Start 822; Stop 846
tatgaagtcacattggaagctattc

SEQ ID NO: 340112 - DNA, 25 bp, Artificial
  probe
  misc_feature (1)..(25): SEQ ID NO: 2890; WAN024CF4; Start 1065; Stop 1089
aatggatactgctattcaaaccctt

SEQ ID NO: 340113 - DNA, 25 bp, Artificial
  probe
  misc_feature (1)..(25): SEQ ID NO: 2890; WAN024CF4; Start 1064; Stop 1088
aaatggatactgctattcaaaccct

SEQ ID NO: 340114 - DNA, 25 bp, Artificial
  probe
  misc_feature (1)..(25): SEQ ID NO: 2890; WAN024CF4; Start 769; Stop 793
tgtcgtatctctatcctaaagcaac

SEQ ID NO: 340115 - DNA, 25 bp, Artificial
  probe
  misc_feature (1)..(25): SEQ ID NO: 2890; WAN024CF4; Start 770; Stop 794
gtcgtatctctatcctaaagcaact

SEQ ID NO: 340116 - DNA, 25 bp, Artificial
  probe
  misc_feature (1)..(25): SEQ ID NO: 2890; WAN024CF4; Start 1066; Stop 1090
atggatactgctattcaaacccttc

SEQ ID NO: 340117 - DNA, 25 bp, Artificial
  probe
  misc_feature (1)..(25): SEQ ID NO: 2890; WAN024CF4; Start 515; Stop 539
agtctgtgatgtcctttatctgttg

SEQ ID NO: 340118 - DNA, 25 bp, Artificial
  probe
  misc_feature (1)..(25): SEQ ID NO: 2890; WAN024CF4; Start 1009; Stop 1033
cgcaatagtgaattactagagtcaa

SEQ ID NO: 340119 - DNA, 25 bp, Artificial
  probe
  misc_feature (1)..(25): SEQ ID NO: 2890; WAN024CF4; Start 767; Stop 791
attgtcgtatctctatcctaaagca

SEQ ID NO: 340120 - DNA, 25 bp, Artificial
  probe
  misc_feature (1)..(25): SEQ ID NO: 2890; WAN024CF4; Start 1063; Stop 1087
gaaatggatactgctattcaaaccc

SEQ ID NO: 340121 - DNA, 25 bp, Artificial
  probe
  misc_feature (1)..(25): SEQ ID NO: 2890; WAN024CF4; Start 514; Stop 538
aagtctgtgatgtcctttatctgtt

SEQ ID NO: 340122 - DNA, 25 bp, Artificial
  probe
  misc_feature (1)..(25): SEQ ID NO: 2890; WAN024CF4; Start 821; Stop 845
ttatgaagtcacattggaagctatt

SEQ ID NO: 340123 - DNA, 25 bp, Artificial
  probe
  misc_feature (1)..(25): SEQ ID NO: 2890; WAN024CF4; Start 819; Stop 843
aattatgaagtcacattggaagcta

SEQ ID NO: 340124 - DNA, 25 bp, Artificial
  probe
  misc_feature (1)..(25): SEQ ID NO: 2890; WAN024CF4; Start 518; Stop 542
ctgtgatgtcctttatctgttgtga

SEQ ID NO: 340125 - DNA, 25 bp, Artificial
  probe
  misc_feature (1)..(25): SEQ ID NO: 2890; WAN024CF4; Start 517; Stop 541
tctgtgatgtcctttatctgttgtg

SEQ ID NO: 340126 - DNA, 25 bp, Artificial
  probe
  misc_feature (1)..(25): SEQ ID NO: 2890; WAN024CF4; Start 516; Stop 540
gtctgtgatgtcctttatctgttgt

SEQ ID NO: 340127 - DNA, 25 bp, Artificial
  probe
  misc_feature (1)..(25): SEQ ID NO: 2890; WAN024CF4; Start 637; Stop 661
gaatgcgttcaatcagttgtaattg

SEQ ID NO: 340128 - DNA, 25 bp, Artificial
  probe
  misc_feature (1)..(25): SEQ ID NO: 2890; WAN024CF4; Start 784; Stop 808
ctaaagcaacttgataaacagagcc

SEQ ID NO: 340129 - DNA, 25 bp, Artificial
  probe
  misc_feature (1)..(25): SEQ ID NO: 2890; WAN024CF4; Start 783; Stop 807
cctaaagcaacttgataaacagagc

SEQ ID NO: 340130 - DNA, 25 bp, Artificial
  probe
  misc_feature (1)..(25): SEQ ID NO: 2890; WAN024CF4; Start 513; Stop 537
taagtctgtgatgtcctttatctgt

SEQ ID NO: 340131 - DNA, 25 bp, Artificial
  probe
  misc_feature (1)..(25): SEQ ID NO: 2891; WAN024D9Z; Start 271; Stop 295
tataaggcgactgagttctctggta

SEQ ID NO: 340132 - DNA, 25 bp, Artificial
  probe
  misc_feature (1)..(25): SEQ ID NO: 2891; WAN024D9Z; Start 268; Stop 292
tgttataaggcgactgagttctctg

SEQ ID NO: 340133 - DNA, 25 bp, Artificial
  probe
  misc_feature (1)..(25): SEQ ID NO: 2891; WAN024D9Z; Start 365; Stop 389
cctatgatatgctaccattgatgga

SEQ ID NO: 340134 - DNA, 25 bp, Artificial
  probe
  misc_feature (1)..(25): SEQ ID NO: 2891; WAN024D9Z; Start 177; Stop 201
ctacgaagaaacagggttgactatc

SEQ ID NO: 340135 - DNA, 25 bp, Artificial
  probe
  misc_feature (1)..(25): SEQ ID NO: 2891; WAN024D9Z; Start 172; Stop 196
gaaatctacgaagaaacagggttga

SEQ ID NO: 340136 - DNA, 25 bp, Artificial
  probe
  misc_feature (1)..(25): SEQ ID NO: 2891; WAN024D9Z; Start 204; Stop 228
aaatcctcaacttgtcggcattaaa

SEQ ID NO: 340137 - DNA, 25 bp, Artificial
  probe
  misc_feature (1)..(25): SEQ ID NO: 2891; WAN024D9Z; Start 181; Stop 205
gaagaaacagggttgactatccaaa

SEQ ID NO: 340138 - DNA, 25 bp, Artificial
  probe
  misc_feature (1)..(25): SEQ ID NO: 2891; WAN024D9Z; Start 176; Stop 200
tctacgaagaaacagggttgactat

SEQ ID NO: 340139 - DNA, 25 bp, Artificial
  probe
  misc_feature (1)..(25): SEQ ID NO: 2891; WAN024D9Z; Start 175; Stop 199
atctacgaagaaacagggttgacta

SEQ ID NO: 340140 - DNA, 25 bp, Artificial
  probe
  misc_feature (1)..(25): SEQ ID NO: 2891; WAN024D9Z; Start 173; Stop 197
aaatctacgaagaaacagggttgac

SEQ ID NO: 340141 - DNA, 25 bp, Artificial
  probe
  misc_feature (1)..(25): SEQ ID NO: 2891; WAN024D9Z; Start 171; Stop 195
tgaaatctacgaagaaacagggttg

SEQ ID NO: 340142 - DNA, 25 bp, Artificial
  probe
  misc_feature (1)..(25): SEQ ID NO: 2891; WAN024D9Z; Start 170; Stop 194
gtgaaatctacgaagaaacagggtt

SEQ ID NO: 340143 - DNA, 25 bp, Artificial
  probe
  misc_feature (1)..(25): SEQ ID NO: 2891; WAN024D9Z; Start 364; Stop 388
gcctatgatatgctaccattgatgg

SEQ ID NO: 340144 - DNA, 25 bp, Artificial
  probe
  misc_feature (1)..(25): SEQ ID NO: 2891; WAN024D9Z; Start 269; Stop 293
gttataaggcgactgagttctctgg

SEQ ID NO: 340145 - DNA, 25 bp, Artificial
  probe
  misc_feature (1)..(25): SEQ ID NO: 2891; WAN024D9Z; Start 156; Stop 180
ggagtctgtcattcgtgaaatctac

SEQ ID NO: 340146 - DNA, 25 bp, Artificial
  probe
  misc_feature (1)..(25): SEQ ID NO: 2891; WAN024D9Z; Start 366; Stop 390
ctatgatatgctaccattgatggaa

SEQ ID NO: 340147 - DNA, 25 bp, Artificial
  probe
  misc_feature (1)..(25): SEQ ID NO: 2891; WAN024D9Z; Start 174; Stop 198
aatctacgaagaaacagggttgact

SEQ ID NO: 340148 - DNA, 25 bp, Artificial
  probe
  misc_feature (1)..(25): SEQ ID NO: 2891; WAN024D9Z; Start 270; Stop 294
ttataaggcgactgagttctctggt

SEQ ID NO: 340149 - DNA, 25 bp, Artificial
  probe
  misc_feature (1)..(25): SEQ ID NO: 2891; WAN024D9Z; Start 178; Stop 202
tacgaagaaacagggttgactatcc

SEQ ID NO: 340150 - DNA, 25 bp, Artificial
  probe
  misc_feature (1)..(25): SEQ ID NO: 2891; WAN024D9Z; Start 363; Stop 387
ggcctatgatatgctaccattgatg

SEQ ID NO: 340151 - DNA, 25 bp, Artificial
  probe
  misc_feature (1)..(25): SEQ ID NO: 2891; WAN024D9Z; Start 272; Stop 296
ataaggcgactgagttctctggtac

SEQ ID NO: 340152 - DNA, 25 bp, Artificial
  probe
  misc_feature (1)..(25): SEQ ID NO: 2891; WAN024D9Z; Start 155; Stop 179
cggagtctgtcattcgtgaaatcta

SEQ ID NO: 340153 - DNA, 25 bp, Artificial
  probe
  misc_feature (1)..(25): SEQ ID NO: 2891; WAN024D9Z; Start 180; Stop 204
cgaagaaacagggttgactatccaa

SEQ ID NO: 340154 - DNA, 25 bp, Artificial
  probe
  misc_feature (1)..(25): SEQ ID NO: 2891; WAN024D9Z; Start 437; Stop 461
cagaagacgattgggaaaagaaaat

SEQ ID NO: 340155 - DNA, 25 bp, Artificial
  probe
  misc_feature (1)..(25): SEQ ID NO: 2891; WAN024D9Z; Start 435; Stop 459
tacagaagacgattgggaaaagaaa

SEQ ID NO: 340156 - DNA, 25 bp, Artificial
  probe
  misc_feature (1)..(25): SEQ ID NO: 2891; WAN024D9Z; Start 372; Stop 396
tatgctaccattgatggaaatgatg

SEQ ID NO: 340157 - DNA, 25 bp, Artificial
  probe
  misc_feature (1)..(25): SEQ ID NO: 2891; WAN024D9Z; Start 369; Stop 393
tgatatgctaccattgatggaaatg

SEQ ID NO: 340158 - DNA, 25 bp, Artificial
  probe
  misc_feature (1)..(25): SEQ ID NO: 2891; WAN024D9Z; Start 359; Stop 383
atctggcctatgatatgctaccatt

SEQ ID NO: 340159 - DNA, 25 bp, Artificial
  probe
  misc_feature (1)..(25): SEQ ID NO: 2891; WAN024D9Z; Start 358; Stop 382
aatctggcctatgatatgctaccat

SEQ ID NO: 340160 - DNA, 25 bp, Artificial
  probe
  misc_feature (1)..(25): SEQ ID NO: 2891; WAN024D9Z; Start 368; Stop 392
atgatatgctaccattgatggaaat

SEQ ID NO: 340161 - DNA, 25 bp, Artificial
  probe
  misc_feature (1)..(25): SEQ ID NO: 2891; WAN024D9Z; Start 436; Stop 460
acagaagacgattgggaaaagaaaa

SEQ ID NO: 340162 - DNA, 25 bp, Artificial
  probe
  misc_feature (1)..(25): SEQ ID NO: 2891; WAN024D9Z; Start 370; Stop 394
gatatgctaccattgatggaaatga

SEQ ID NO: 340163 - DNA, 25 bp, Artificial
  probe
  misc_feature (1)..(25): SEQ ID NO: 2891; WAN024D9Z; Start 337; Stop 361
aaagaccagattccaaacttaaatc

SEQ ID NO: 340164 - DNA, 25 bp, Artificial
  probe
  misc_feature (1)..(25): SEQ ID NO: 2892; WAN024CA2; Start 40; Stop 64
gaggagacgcagatagtcattgatt

SEQ ID NO: 340165 - DNA, 25 bp, Artificial
  probe
  misc_feature (1)..(25): SEQ ID NO: 2892; WAN024CA2; Start 38; Stop 62
tagaggagacgcagatagtcattga

SEQ ID NO: 340166 - DNA, 25 bp, Artificial
  probe
  misc_feature (1)..(25): SEQ ID NO: 2892; WAN024CA2; Start 37; Stop 61
gtagaggagacgcagatagtcattg

SEQ ID NO: 340167 - DNA, 25 bp, Artificial
  probe
  misc_feature (1)..(25): SEQ ID NO: 2892; WAN024CA2; Start 48; Stop 72
gcagatagtcattgatttcagtcgt

SEQ ID NO: 340168 - DNA, 25 bp, Artificial
  probe
  misc_feature (1)..(25): SEQ ID NO: 2892; WAN024CA2; Start 46; Stop 70
acgcagatagtcattgatttcagtc

SEQ ID NO: 340169 - DNA, 25 bp, Artificial
  probe
  misc_feature (1)..(25): SEQ ID NO: 2892; WAN024CA2; Start 165; Stop 189
tttccatatttcccaagaactgacg

SEQ ID NO: 340170 - DNA, 25 bp, Artificial
  probe
  misc_feature (1)..(25): SEQ ID NO: 2892; WAN024CA2; Start 141; Stop 165
catcaatggcatctacatctggttt

SEQ ID NO: 340171 - DNA, 25 bp, Artificial
  probe
  misc_feature (1)..(25): SEQ ID NO: 2892; WAN024CA2; Start 166; Stop 190
ttccatatttcccaagaactgacga

SEQ ID NO: 340172 - DNA, 25 bp, Artificial
  probe
  misc_feature (1)..(25): SEQ ID NO: 2892; WAN024CA2; Start 39; Stop 63
agaggagacgcagatagtcattgat

SEQ ID NO: 340173 - DNA, 25 bp, Artificial
  probe
  misc_feature (1)..(25): SEQ ID NO: 2892; WAN024CA2; Start 47; Stop 71
cgcagatagtcattgatttcagtcg

SEQ ID NO: 340174 - DNA, 25 bp, Artificial
  probe
  misc_feature (1)..(25): SEQ ID NO: 2892; WAN024CA2; Start 44; Stop 68
agacgcagatagtcattgatttcag

SEQ ID NO: 340175 - DNA, 25 bp, Artificial
  probe
  misc_feature (1)..(25): SEQ ID NO: 2892; WAN024CA2; Start 43; Stop 67
gagacgcagatagtcattgatttca

SEQ ID NO: 340176 - DNA, 25 bp, Artificial
  probe
  misc_feature (1)..(25): SEQ ID NO: 2892; WAN024CA2; Start 45; Stop 69
gacgcagatagtcattgatttcagt

SEQ ID NO: 340177 - DNA, 25 bp, Artificial
  probe
  misc_feature (1)..(25): SEQ ID NO: 2892; WAN024CA2; Start 167; Stop 191
tccatatttcccaagaactgacgag

SEQ ID NO: 340178 - DNA, 25 bp, Artificial
  probe
  misc_feature (1)..(25): SEQ ID NO: 2892; WAN024CA2; Start 136; Stop 160
gagaccatcaatggcatctacatct

SEQ ID NO: 340179 - DNA, 25 bp, Artificial
  probe
  misc_feature (1)..(25): SEQ ID NO: 2892; WAN024CA2; Start 42; Stop 66
ggagacgcagatagtcattgatttc

SEQ ID NO: 340180 - DNA, 25 bp, Artificial
  probe
  misc_feature (1)..(25): SEQ ID NO: 2892; WAN024CA2; Start 137; Stop 161
agaccatcaatggcatctacatctg

SEQ ID NO: 340181 - DNA, 25 bp, Artificial
  probe
  misc_feature (1)..(25): SEQ ID NO: 2892; WAN024CA2; Start 135; Stop 159
tgagaccatcaatggcatctacatc

SEQ ID NO: 340182 - DNA, 25 bp, Artificial
  probe
  misc_feature (1)..(25): SEQ ID NO: 2892; WAN024CA2; Start 134; Stop 158
ctgagaccatcaatggcatctacat

SEQ ID NO: 340183 - DNA, 25 bp, Artificial
  probe
  misc_feature (1)..(25): SEQ ID NO: 2892; WAN024CA2; Start 41; Stop 65
aggagacgcagatagtcattgattt

SEQ ID NO: 340184 - DNA, 25 bp, Artificial
  probe
  misc_feature (1)..(25): SEQ ID NO: 2892; WAN024CA2; Start 140; Stop 164
ccatcaatggcatctacatctggtt

SEQ ID NO: 340185 - DNA, 25 bp, Artificial
  probe
  misc_feature (1)..(25): SEQ ID NO: 2892; WAN024CA2; Start 138; Stop 162
gaccatcaatggcatctacatctgg

SEQ ID NO: 340186 - DNA, 25 bp, Artificial
  probe
  misc_feature (1)..(25): SEQ ID NO: 2892; WAN024CA2; Start 164; Stop 188
ttttccatatttcccaagaactgac

SEQ ID NO: 340187 - DNA, 25 bp, Artificial
  probe
  misc_feature (1)..(25): SEQ ID NO: 2892; WAN024CA2; Start 142; Stop 166
atcaatggcatctacatctggtttt

SEQ ID NO: 340188 - DNA, 25 bp, Artificial
  probe
  misc_feature (1)..(25): SEQ ID NO: 2892; WAN024CA2; Start 233; Stop 257
gcatagagagtatcaaaagccagac

SEQ ID NO: 340189 - DNA, 25 bp, Artificial
  probe
  misc_feature (1)..(25): SEQ ID NO: 2892; WAN024CA2; Start 194; Stop 218
taggcggacaaactctctacatagc

SEQ ID NO: 340190 - DNA, 25 bp, Artificial
  probe
  misc_feature (1)..(25): SEQ ID NO: 2892; WAN024CA2; Start 234; Stop 258
catagagagtatcaaaagccagact

SEQ ID NO: 340191 - DNA, 25 bp, Artificial
  probe
  misc_feature (1)..(25): SEQ ID NO: 2892; WAN024CA2; Start 235; Stop 259
atagagagtatcaaaagccagactg

SEQ ID NO: 340192 - DNA, 25 bp, Artificial
  probe
  misc_feature (1)..(25): SEQ ID NO: 2892; WAN024CA2; Start 168; Stop 192
ccatatttcccaagaactgacgagc

SEQ ID NO: 340193 - DNA, 25 bp, Artificial
  probe
  misc_feature (1)..(25): SEQ ID NO: 2892; WAN024CA2; Start 225; Stop 249
gtccctccgcatagagagtatcaaa

SEQ ID NO: 340194 - DNA, 25 bp, Artificial
  probe
  misc_feature (1)..(25): SEQ ID NO: 2892; WAN024CA2; Start 193; Stop 217
gtaggcggacaaactctctacatag

SEQ ID NO: 340195 - DNA, 25 bp, Artificial
  probe
  misc_feature (1)..(25): SEQ ID NO: 2892; WAN024CA2; Start 200; Stop 224
gacaaactctctacatagcgacgtt

SEQ ID NO: 340196 - DNA, 25 bp, Artificial
  probe
  misc_feature (1)..(25): SEQ ID NO: 2892; WAN024CA2; Start 169; Stop 193
catatttcccaagaactgacgagcg

SEQ ID NO: 340197 - DNA, 25 bp, Artificial
  probe
  misc_feature (1)..(25): SEQ ID NO: 2893; WAN024D5M; Start 331; Stop 355
ccaggcgtagtcagtgattatatta

SEQ ID NO: 340198 - DNA, 25 bp, Artificial
  probe
  misc_feature (1)..(25): SEQ ID NO: 2893; WAN024D5M; Start 329; Stop 353
taccaggcgtagtcagtgattatat

SEQ ID NO: 340199 - DNA, 25 bp, Artificial
  probe
  misc_feature (1)..(25): SEQ ID NO: 2893; WAN024D5M; Start 330; Stop 354
accaggcgtagtcagtgattatatt

SEQ ID NO: 340200 - DNA, 25 bp, Artificial
  probe
  misc_feature (1)..(25): SEQ ID NO: 2893; WAN024D5M; Start 332; Stop 356
caggcgtagtcagtgattatattaa

SEQ ID NO: 340201 - DNA, 25 bp, Artificial
  probe
  misc_feature (1)..(25): SEQ ID NO: 2893; WAN024D5M; Start 262; Stop 286
ttatcagaagaagaattggaacact

SEQ ID NO: 340202 - DNA, 25 bp, Artificial
  probe
  misc_feature (1)..(25): SEQ ID NO: 2893; WAN024D5M; Start 263; Stop 287
tatcagaagaagaattggaacactt

SEQ ID NO: 340203 - DNA, 25 bp, Artificial
  probe
  misc_feature (1)..(25): SEQ ID NO: 2893; WAN024D5M; Start 220; Stop 244
gtgactaaggataaggagctaatcg

SEQ ID NO: 340204 - DNA, 25 bp, Artificial
  probe
  misc_feature (1)..(25): SEQ ID NO: 2893; WAN024D5M; Start 219; Stop 243
tgtgactaaggataaggagctaatc

SEQ ID NO: 340205 - DNA, 25 bp, Artificial
  probe
  misc_feature (1)..(25): SEQ ID NO: 2893; WAN024D5M; Start 218; Stop 242
ttgtgactaaggataaggagctaat

SEQ ID NO: 340206 - DNA, 25 bp, Artificial
  probe
  misc_feature (1)..(25): SEQ ID NO: 2893; WAN024D5M; Start 213; Stop 237
acgatttgtgactaaggataaggag

SEQ ID NO: 340207 - DNA, 25 bp, Artificial
  probe
  misc_feature (1)..(25): SEQ ID NO: 2893; WAN024D5M; Start 212; Stop 236
gacgatttgtgactaaggataagga

SEQ ID NO: 340208 - DNA, 25 bp, Artificial
  probe
  misc_feature (1)..(25): SEQ ID NO: 2893; WAN024D5M; Start 261; Stop 285
attatcagaagaagaattggaacac

SEQ ID NO: 340209 - DNA, 25 bp, Artificial
  probe
  misc_feature (1)..(25): SEQ ID NO: 2893; WAN024D5M; Start 210; Stop 234
tggacgatttgtgactaaggataag

SEQ ID NO: 340210 - DNA, 25 bp, Artificial
  probe
  misc_feature (1)..(25): SEQ ID NO: 2893; WAN024D5M; Start 209; Stop 233
ctggacgatttgtgactaaggataa

SEQ ID NO: 340211 - DNA, 25 bp, Artificial
  probe
  misc_feature (1)..(25): SEQ ID NO: 2893; WAN024D5M; Start 251; Stop 275
cacgcaaacaattatcagaagaaga

SEQ ID NO: 340212 - DNA, 25 bp, Artificial
  probe
  misc_feature (1)..(25): SEQ ID NO: 2893; WAN024D5M; Start 250; Stop 274
tcacgcaaacaattatcagaagaag

SEQ ID NO: 340213 - DNA, 25 bp, Artificial
  probe
  misc_feature (1)..(25): SEQ ID NO: 2893; WAN024D5M; Start 249; Stop 273
gtcacgcaaacaattatcagaagaa

SEQ ID NO: 340214 - DNA, 25 bp, Artificial
  probe
  misc_feature (1)..(25): SEQ ID NO: 2893; WAN024D5M; Start 252; Stop 276
acgcaaacaattatcagaagaagaa

SEQ ID NO: 340215 - DNA, 25 bp, Artificial
  probe
  misc_feature (1)..(25): SEQ ID NO: 2893; WAN024D5M; Start 145; Stop 169
aataccatccaaagagccttatcag

SEQ ID NO: 340216 - DNA, 25 bp, Artificial
  probe
  misc_feature (1)..(25): SEQ ID NO: 2893; WAN024D5M; Start 211; Stop 235
ggacgatttgtgactaaggataagg

SEQ ID NO: 340217 - DNA, 25 bp, Artificial
  probe
  misc_feature (1)..(25): SEQ ID NO: 2893; WAN024D5M; Start 221; Stop 245
tgactaaggataaggagctaatcgc

SEQ ID NO: 340218 - DNA, 25 bp, Artificial
  probe
  misc_feature (1)..(25): SEQ ID NO: 2893; WAN024D5M; Start 144; Stop 168
caataccatccaaagagccttatca

SEQ ID NO: 340219 - DNA, 25 bp, Artificial
  probe
  misc_feature (1)..(25): SEQ ID NO: 2893; WAN024D5M; Start 208; Stop 232
actggacgatttgtgactaaggata

SEQ ID NO: 340220 - DNA, 25 bp, Artificial
  probe
  misc_feature (1)..(25): SEQ ID NO: 2893; WAN024D5M; Start 214; Stop 238
cgatttgtgactaaggataaggagc

SEQ ID NO: 340221 - DNA, 25 bp, Artificial
  probe
  misc_feature (1)..(25): SEQ ID NO: 2893; WAN024D5M; Start 248; Stop 272
agtcacgcaaacaattatcagaaga

SEQ ID NO: 340222 - DNA, 25 bp, Artificial
  probe
  misc_feature (1)..(25): SEQ ID NO: 2893; WAN024D5M; Start 247; Stop 271
cagtcacgcaaacaattatcagaag

SEQ ID NO: 340223 - DNA, 25 bp, Artificial
  probe
  misc_feature (1)..(25): SEQ ID NO: 2893; WAN024D5M; Start 146; Stop 170
ataccatccaaagagccttatcaga

SEQ ID NO: 340224 - DNA, 25 bp, Artificial
  probe
  misc_feature (1)..(25): SEQ ID NO: 2893; WAN024D5M; Start 136; Stop 160
gtcaatcccaataccatccaaagag

SEQ ID NO: 340225 - DNA, 25 bp, Artificial
  probe
  misc_feature (1)..(25): SEQ ID NO: 2893; WAN024D5M; Start 143; Stop 167
ccaataccatccaaagagccttatc

SEQ ID NO: 340226 - DNA, 25 bp, Artificial
  probe
  misc_feature (1)..(25): SEQ ID NO: 2893; WAN024D5M; Start 173; Stop 197
ttgaacgagaaggatttgtctacag

SEQ ID NO: 340227 - DNA, 25 bp, Artificial
  probe
  misc_feature (1)..(25): SEQ ID NO: 2893; WAN024D5M; Start 172; Stop 196
cttgaacgagaaggatttgtctaca

SEQ ID NO: 340228 - DNA, 25 bp, Artificial
  probe
  misc_feature (1)..(25): SEQ ID NO: 2893; WAN024D5M; Start 253; Stop 277
cgcaaacaattatcagaagaagaat

SEQ ID NO: 340229 - DNA, 25 bp, Artificial
  probe
  misc_feature (1)..(25): SEQ ID NO: 2893; WAN024D5M; Start 134; Stop 158
gtgtcaatcccaataccatccaaag

SEQ ID NO: 340230 - DNA, 25 bp, Artificial
  probe
  misc_feature (1)..(25): SEQ ID NO: 2894; WAN024C6D; Start 97; Stop 121
aatatgattgaaggatggcgaccta

SEQ ID NO: 340231 - DNA, 25 bp, Artificial
  probe
  misc_feature (1)..(25): SEQ ID NO: 2894; WAN024C6D; Start 93; Stop 117
tacaaatatgattgaaggatggcga

SEQ ID NO: 340232 - DNA, 25 bp, Artificial
  probe
  misc_feature (1)..(25): SEQ ID NO: 2894; WAN024C6D; Start 98; Stop 122
atatgattgaaggatggcgacctac

SEQ ID NO: 340233 - DNA, 25 bp, Artificial
  probe
  misc_feature (1)..(25): SEQ ID NO: 2894; WAN024C6D; Start 92; Stop 116
gtacaaatatgattgaaggatggcg

SEQ ID NO: 340234 - DNA, 25 bp, Artificial
  probe
  misc_feature (1)..(25): SEQ ID NO: 2894; WAN024C6D; Start 94; Stop 118
acaaatatgattgaaggatggcgac

SEQ ID NO: 340235 - DNA, 25 bp, Artificial
  probe
  misc_feature (1)..(25): SEQ ID NO: 2894; WAN024C6D; Start 91; Stop 115
agtacaaatatgattgaaggatggc

SEQ ID NO: 340236 - DNA, 25 bp, Artificial
  probe
  misc_feature (1)..(25): SEQ ID NO: 2894; WAN024C6D; Start 95; Stop 119
caaatatgattgaaggatggcgacc

SEQ ID NO: 340237 - DNA, 25 bp, Artificial
  probe
  misc_feature (1)..(25): SEQ ID NO: 2894; WAN024C6D; Start 96; Stop 120
aaatatgattgaaggatggcgacct

SEQ ID NO: 340238 - DNA, 25 bp, Artificial
  probe
  misc_feature (1)..(25): SEQ ID NO: 2894; WAN024C6D; Start 140; Stop 164
aattacgagatgaagctcttgctct

SEQ ID NO: 340239 - DNA, 25 bp, Artificial
  probe
  misc_feature (1)..(25): SEQ ID NO: 2894; WAN024C6D; Start 90; Stop 114
aagtacaaatatgattgaaggatgg

SEQ ID NO: 340240 - DNA, 25 bp, Artificial
  probe
  misc_feature (1)..(25): SEQ ID NO: 2894; WAN024C6D; Start 141; Stop 165
attacgagatgaagctcttgctctg

SEQ ID NO: 340241 - DNA, 25 bp, Artificial
  probe
  misc_feature (1)..(25): SEQ ID NO: 2894; WAN024C6D; Start 115; Stop 139
cgacctacggttagtgatgttgaaa

SEQ ID NO: 340242 - DNA, 25 bp, Artificial
  probe
  misc_feature (1)..(25): SEQ ID NO: 2894; WAN024C6D; Start 99; Stop 123
tatgattgaaggatggcgacctacg

SEQ ID NO: 340243 - DNA, 25 bp, Artificial
  probe
  misc_feature (1)..(25): SEQ ID NO: 2894; WAN024C6D; Start 26; Stop 50
agatgacaatcatgggaatagcttt

SEQ ID NO: 340244 - DNA, 25 bp, Artificial
  probe
  misc_feature (1)..(25): SEQ ID NO: 2894; WAN024C6D; Start 25; Stop 49
aagatgacaatcatgggaatagctt

SEQ ID NO: 340245 - DNA, 25 bp, Artificial
  probe
  misc_feature (1)..(25): SEQ ID NO: 2894; WAN024C6D; Start 24; Stop 48
aaagatgacaatcatgggaatagct

SEQ ID NO: 340246 - DNA, 25 bp, Artificial
  probe
  misc_feature (1)..(25): SEQ ID NO: 2894; WAN024C6D; Start 139; Stop 163
aaattacgagatgaagctcttgctc

SEQ ID NO: 340247 - DNA, 25 bp, Artificial
  probe
  misc_feature (1)..(25): SEQ ID NO: 2894; WAN024C6D; Start 37; Stop 61
atgggaatagcttttgaaaaccgat

SEQ ID NO: 340248 - DNA, 25 bp, Artificial
  probe
  misc_feature (1)..(25): SEQ ID NO: 2894; WAN024C6D; Start 34; Stop 58
atcatgggaatagcttttgaaaacc

SEQ ID NO: 340249 - DNA, 25 bp, Artificial
  probe
  misc_feature (1)..(25): SEQ ID NO: 2894; WAN024C6D; Start 30; Stop 54
gacaatcatgggaatagcttttgaa

SEQ ID NO: 340250 - DNA, 25 bp, Artificial
  probe
  misc_feature (1)..(25): SEQ ID NO: 2894; WAN024C6D; Start 116; Stop 140
gacctacggttagtgatgttgaaaa

SEQ ID NO: 340251 - DNA, 25 bp, Artificial
  probe
  misc_feature (1)..(25): SEQ ID NO: 2894; WAN024C6D; Start 31; Stop 55
acaatcatgggaatagcttttgaaa

SEQ ID NO: 340252 - DNA, 25 bp, Artificial
  probe
  misc_feature (1)..(25): SEQ ID NO: 2894; WAN024C6D; Start 29; Stop 53
tgacaatcatgggaatagcttttga

SEQ ID NO: 340253 - DNA, 25 bp, Artificial
  probe
  misc_feature (1)..(25): SEQ ID NO: 2894; WAN024C6D; Start 38; Stop 62
tgggaatagcttttgaaaaccgatc

SEQ ID NO: 340254 - DNA, 25 bp, Artificial
  probe
  misc_feature (1)..(25): SEQ ID NO: 2894; WAN024C6D; Start 33; Stop 57
aatcatgggaatagcttttgaaaac

SEQ ID NO: 340255 - DNA, 25 bp, Artificial
  probe
  misc_feature (1)..(25): SEQ ID NO: 2894; WAN024C6D; Start 32; Stop 56
caatcatgggaatagcttttgaaaa

SEQ ID NO: 340256 - DNA, 25 bp, Artificial
  probe
  misc_feature (1)..(25): SEQ ID NO: 2894; WAN024C6D; Start 42; Stop 66
aatagcttttgaaaaccgatccgtt

SEQ ID NO: 340257 - DNA, 25 bp, Artificial
  probe
  misc_feature (1)..(25): SEQ ID NO: 2894; WAN024C6D; Start 36; Stop 60
catgggaatagcttttgaaaaccga

SEQ ID NO: 340258 - DNA, 25 bp, Artificial
  probe
  misc_feature (1)..(25): SEQ ID NO: 2894; WAN024C6D; Start 41; Stop 65
gaatagcttttgaaaaccgatccgt

SEQ ID NO: 340259 - DNA, 25 bp, Artificial
  probe
  misc_feature (1)..(25): SEQ ID NO: 2894; WAN024C6D; Start 114; Stop 138
gcgacctacggttagtgatgttgaa

SEQ ID NO: 340260 - DNA, 25 bp, Artificial
  probe
  misc_feature (1)..(25): SEQ ID NO: 2894; WAN024C6D; Start 35; Stop 59
tcatgggaatagcttttgaaaaccg

SEQ ID NO: 340261 - DNA, 25 bp, Artificial
  probe
  misc_feature (1)..(25): SEQ ID NO: 2894; WAN024C6D; Start 23; Stop 47
aaaagatgacaatcatgggaatagc

SEQ ID NO: 340262 - DNA, 25 bp, Artificial
  probe
  misc_feature (1)..(25): SEQ ID NO: 2894; WAN024C6D; Start 19; Stop 43
aaagaaaagatgacaatcatgggaa

SEQ ID NO: 340263 - DNA, 25 bp, Artificial
  probe
  misc_feature (1)..(25): SEQ ID NO: 2895; WAN024FD9; Start 25; Stop 49
tcaacaatttccaagtcagtcattt

SEQ ID NO: 340264 - DNA, 25 bp, Artificial
  probe
  misc_feature (1)..(25): SEQ ID NO: 2895; WAN024FD9; Start 24; Stop 48
ttcaacaatttccaagtcagtcatt

SEQ ID NO: 340265 - DNA, 25 bp, Artificial
  probe
  misc_feature (1)..(25): SEQ ID NO: 2895; WAN024FD9; Start 23; Stop 47
tttcaacaatttccaagtcagtcat

SEQ ID NO: 340266 - DNA, 25 bp, Artificial
  probe
  misc_feature (1)..(25): SEQ ID NO: 2895; WAN024FD9; Start 22; Stop 46
atttcaacaatttccaagtcagtca

SEQ ID NO: 340267 - DNA, 25 bp, Artificial
  probe
  misc_feature (1)..(25): SEQ ID NO: 2895; WAN024FD9; Start 209; Stop 233
taagatttgagaagaaaccaccatc

SEQ ID NO: 340268 - DNA, 25 bp, Artificial
  probe
  misc_feature (1)..(25): SEQ ID NO: 2895; WAN024FD9; Start 21; Stop 45
gatttcaacaatttccaagtcagtc

SEQ ID NO: 340269 - DNA, 25 bp, Artificial
  probe
  misc_feature (1)..(25): SEQ ID NO: 2895; WAN024FD9; Start 207; Stop 231
tttaagatttgagaagaaaccacca

SEQ ID NO: 340270 - DNA, 25 bp, Artificial
  probe
  misc_feature (1)..(25): SEQ ID NO: 2895; WAN024FD9; Start 208; Stop 232
ttaagatttgagaagaaaccaccat

SEQ ID NO: 340271 - DNA, 25 bp, Artificial
  probe
  misc_feature (1)..(25): SEQ ID NO: 2895; WAN024FD9; Start 210; Stop 234
aagatttgagaagaaaccaccatcg

SEQ ID NO: 340272 - DNA, 25 bp, Artificial
  probe
  misc_feature (1)..(25): SEQ ID NO: 2895; WAN024FD9; Start 20; Stop 44
tgatttcaacaatttccaagtcagt

SEQ ID NO: 340273 - DNA, 25 bp, Artificial
  probe
  misc_feature (1)..(25): SEQ ID NO: 2895; WAN024FD9; Start 52; Stop 76
gcaacttctgaagatacgatttctc

SEQ ID NO: 340274 - DNA, 25 bp, Artificial
  probe
  misc_feature (1)..(25): SEQ ID NO: 2895; WAN024FD9; Start 51; Stop 75
agcaacttctgaagatacgatttct

SEQ ID NO: 340275 - DNA, 25 bp, Artificial
  probe
  misc_feature (1)..(25): SEQ ID NO: 2895; WAN024FD9; Start 206; Stop 230
ctttaagatttgagaagaaaccacc

SEQ ID NO: 340276 - DNA, 25 bp, Artificial
  probe
  misc_feature (1)..(25): SEQ ID NO: 2895; WAN024FD9; Start 55; Stop 79
acttctgaagatacgatttctctga

SEQ ID NO: 340277 - DNA, 25 bp, Artificial
  probe
  misc_feature (1)..(25): SEQ ID NO: 2895; WAN024FD9; Start 50; Stop 74
tagcaacttctgaagatacgatttc

SEQ ID NO: 340278 - DNA, 25 bp, Artificial
  probe
  misc_feature (1)..(25): SEQ ID NO: 2895; WAN024FD9; Start 54; Stop 78
aacttctgaagatacgatttctctg

SEQ ID NO: 340279 - DNA, 25 bp, Artificial
  probe
  misc_feature (1)..(25): SEQ ID NO: 2895; WAN024FD9; Start 53; Stop 77
caacttctgaagatacgatttctct

SEQ ID NO: 340280 - DNA, 25 bp, Artificial
  probe
  misc_feature (1)..(25): SEQ ID NO: 2895; WAN024FD9; Start 49; Stop 73
ttagcaacttctgaagatacgattt

SEQ ID NO: 340281 - DNA, 25 bp, Artificial
  probe
  misc_feature (1)..(25): SEQ ID NO: 2895; WAN024FD9; Start 48; Stop 72
tttagcaacttctgaagatacgatt

SEQ ID NO: 340282 - DNA, 25 bp, Artificial
  probe
  misc_feature (1)..(25): SEQ ID NO: 2895; WAN024FD9; Start 151; Stop 175
ttaccaacttctacgttaacaccac

SEQ ID NO: 340283 - DNA, 25 bp, Artificial
  probe
  misc_feature (1)..(25): SEQ ID NO: 2895; WAN024FD9; Start 19; Stop 43
ttgatttcaacaatttccaagtcag

SEQ ID NO: 340284 - DNA, 25 bp, Artificial
  probe
  misc_feature (1)..(25): SEQ ID NO: 2895; WAN024FD9; Start 63; Stop 87
agatacgatttctctgatttctgaa

SEQ ID NO: 340285 - DNA, 25 bp, Artificial
  probe
  misc_feature (1)..(25): SEQ ID NO: 2895; WAN024FD9; Start 62; Stop 86
aagatacgatttctctgatttctga

SEQ ID NO: 340286 - DNA, 25 bp, Artificial
  probe
  misc_feature (1)..(25): SEQ ID NO: 2895; WAN024FD9; Start 60; Stop 84
tgaagatacgatttctctgatttct

SEQ ID NO: 340287 - DNA, 25 bp, Artificial
  probe
  misc_feature (1)..(25): SEQ ID NO: 2895; WAN024FD9; Start 58; Stop 82
tctgaagatacgatttctctgattt

SEQ ID NO: 340288 - DNA, 25 bp, Artificial
  probe
  misc_feature (1)..(25): SEQ ID NO: 2895; WAN024FD9; Start 57; Stop 81
ttctgaagatacgatttctctgatt

SEQ ID NO: 340289 - DNA, 25 bp, Artificial
  probe
  misc_feature (1)..(25): SEQ ID NO: 2895; WAN024FD9; Start 61; Stop 85
gaagatacgatttctctgatttctg

SEQ ID NO: 340290 - DNA, 25 bp, Artificial
  probe
  misc_feature (1)..(25): SEQ ID NO: 2895; WAN024FD9; Start 59; Stop 83
ctgaagatacgatttctctgatttc

SEQ ID NO: 340291 - DNA, 25 bp, Artificial
  probe
  misc_feature (1)..(25): SEQ ID NO: 2895; WAN024FD9; Start 56; Stop 80
cttctgaagatacgatttctctgat

SEQ ID NO: 340292 - DNA, 25 bp, Artificial
  probe
  misc_feature (1)..(25): SEQ ID NO: 2895; WAN024FD9; Start 152; Stop 176
taccaacttctacgttaacaccact

SEQ ID NO: 340293 - DNA, 25 bp, Artificial
  probe
  misc_feature (1)..(25): SEQ ID NO: 2895; WAN024FD9; Start 155; Stop 179
caacttctacgttaacaccacttgt

SEQ ID NO: 340294 - DNA, 25 bp, Artificial
  probe
  misc_feature (1)..(25): SEQ ID NO: 2895; WAN024FD9; Start 154; Stop 178
ccaacttctacgttaacaccacttg

SEQ ID NO: 340295 - DNA, 25 bp, Artificial
  probe
  misc_feature (1)..(25): SEQ ID NO: 2895; WAN024FD9; Start 64; Stop 88
gatacgatttctctgatttctgaat

SEQ ID NO: 340296 - DNA, 25 bp, Artificial
  probe
  misc_feature (1)..(25): SEQ ID NO: 2897; WAN024DJQ; Start 157; Stop 181
gctattggtgaattggcttatatgg

SEQ ID NO: 340297 - DNA, 25 bp, Artificial
  probe
  misc_feature (1)..(25): SEQ ID NO: 2897; WAN024DJQ; Start 761; Stop 785
cacacgatgactggatctaactaat

SEQ ID NO: 340298 - DNA, 25 bp, Artificial
  probe
  misc_feature (1)..(25): SEQ ID NO: 2897; WAN024DJQ; Start 111; Stop 135
tgtcggaattattctaggtgatctg

SEQ ID NO: 340299 - DNA, 25 bp, Artificial
  probe
  misc_feature (1)..(25): SEQ ID NO: 2897; WAN024DJQ; Start 110; Stop 134
gtgtcggaattattctaggtgatct

SEQ ID NO: 340300 - DNA, 25 bp, Artificial
  probe
  misc_feature (1)..(25): SEQ ID NO: 2897; WAN024DJQ; Start 109; Stop 133
ggtgtcggaattattctaggtgatc

SEQ ID NO: 340301 - DNA, 25 bp, Artificial
  probe
  misc_feature (1)..(25): SEQ ID NO: 2897; WAN024DJQ; Start 108; Stop 132
tggtgtcggaattattctaggtgat

SEQ ID NO: 340302 - DNA, 25 bp, Artificial
  probe
  misc_feature (1)..(25): SEQ ID NO: 2897; WAN024DJQ; Start 112; Stop 136
gtcggaattattctaggtgatctgc

SEQ ID NO: 340303 - DNA, 25 bp, Artificial
  probe
  misc_feature (1)..(25): SEQ ID NO: 2897; WAN024DJQ; Start 107; Stop 131
ttggtgtcggaattattctaggtga

SEQ ID NO: 340304 - DNA, 25 bp, Artificial
  probe
  misc_feature (1)..(25): SEQ ID NO: 2897; WAN024DJQ; Start 585; Stop 609
gatgatcttgtcagtgatggctaag

SEQ ID NO: 340305 - DNA, 25 bp, Artificial
  probe
  misc_feature (1)..(25): SEQ ID NO: 2897; WAN024DJQ; Start 113; Stop 137
tcggaattattctaggtgatctgcc

SEQ ID NO: 340306 - DNA, 25 bp, Artificial
  probe
  misc_feature (1)..(25): SEQ ID NO: 2897; WAN024DJQ; Start 597; Stop 621
agtgatggctaagaaagagttgatt

SEQ ID NO: 340307 - DNA, 25 bp, Artificial
  probe
  misc_feature (1)..(25): SEQ ID NO: 2897; WAN024DJQ; Start 445; Stop 469
tttgcctttattggatttaccttgg

SEQ ID NO: 340308 - DNA, 25 bp, Artificial
  probe
  misc_feature (1)..(25): SEQ ID NO: 2897; WAN024DJQ; Start 624; Stop 648
ctttgtcttgttgggatatgtttgt

SEQ ID NO: 340309 - DNA, 25 bp, Artificial
  probe
  misc_feature (1)..(25): SEQ ID NO: 2897; WAN024DJQ; Start 625; Stop 649
tttgtcttgttgggatatgtttgtg

SEQ ID NO: 340310 - DNA, 25 bp, Artificial
  probe
  misc_feature (1)..(25): SEQ ID NO: 2897; WAN024DJQ; Start 489; Stop 513
aatggataccttgttgaaactcgta

SEQ ID NO: 340311 - DNA, 25 bp, Artificial
  probe
  misc_feature (1)..(25): SEQ ID NO: 2897; WAN024DJQ; Start 623; Stop 647
cctttgtcttgttgggatatgtttg

SEQ ID NO: 340312 - DNA, 25 bp, Artificial
  probe
  misc_feature (1)..(25): SEQ ID NO: 2897; WAN024DJQ; Start 493; Stop 517
gataccttgttgaaactcgtagact

SEQ ID NO: 340313 - DNA, 25 bp, Artificial
  probe
  misc_feature (1)..(25): SEQ ID NO: 2897; WAN024DJQ; Start 443; Stop 467
tgtttgcctttattggatttacctt

SEQ ID NO: 340314 - DNA, 25 bp, Artificial
  probe
  misc_feature (1)..(25): SEQ ID NO: 2897; WAN024DJQ; Start 442; Stop 466
ttgtttgcctttattggatttacct

SEQ ID NO: 340315 - DNA, 25 bp, Artificial
  probe
  misc_feature (1)..(25): SEQ ID NO: 2897; WAN024DJQ; Start 327; Stop 351
attcttacaaactttcgcctacact

SEQ ID NO: 340316 - DNA, 25 bp, Artificial
  probe
  misc_feature (1)..(25): SEQ ID NO: 2897; WAN024DJQ; Start 596; Stop 620
cagtgatggctaagaaagagttgat

SEQ ID NO: 340317 - DNA, 25 bp, Artificial
  probe
  misc_feature (1)..(25): SEQ ID NO: 2897; WAN024DJQ; Start 760; Stop 784
gcacacgatgactggatctaactaa

SEQ ID NO: 340318 - DNA, 25 bp, Artificial
  probe
  misc_feature (1)..(25): SEQ ID NO: 2897; WAN024DJQ; Start 490; Stop 514
atggataccttgttgaaactcgtag

SEQ ID NO: 340319 - DNA, 25 bp, Artificial
  probe
  misc_feature (1)..(25): SEQ ID NO: 2897; WAN024DJQ; Start 326; Stop 350
aattcttacaaactttcgcctacac

SEQ ID NO: 340320 - DNA, 25 bp, Artificial
  probe
  misc_feature (1)..(25): SEQ ID NO: 2897; WAN024DJQ; Start 325; Stop 349
caattcttacaaactttcgcctaca

SEQ ID NO: 340321 - DNA, 25 bp, Artificial
  probe
  misc_feature (1)..(25): SEQ ID NO: 2897; WAN024DJQ; Start 324; Stop 348
tcaattcttacaaactttcgcctac

SEQ ID NO: 340322 - DNA, 25 bp, Artificial
  probe
  misc_feature (1)..(25): SEQ ID NO: 2897; WAN024DJQ; Start 317; Stop 341
tggcgattcaattcttacaaacttt

SEQ ID NO: 340323 - DNA, 25 bp, Artificial
  probe
  misc_feature (1)..(25): SEQ ID NO: 2897; WAN024DJQ; Start 159; Stop 183
tattggtgaattggcttatatggga

SEQ ID NO: 340324 - DNA, 25 bp, Artificial
  probe
  misc_feature (1)..(25): SEQ ID NO: 2897; WAN024DJQ; Start 444; Stop 468
gtttgcctttattggatttaccttg

SEQ ID NO: 340325 - DNA, 25 bp, Artificial
  probe
  misc_feature (1)..(25): SEQ ID NO: 2897; WAN024DJQ; Start 322; Stop 346
attcaattcttacaaactttcgcct

SEQ ID NO: 340326 - DNA, 25 bp, Artificial
  probe
  misc_feature (1)..(25): SEQ ID NO: 2897; WAN024DJQ; Start 160; Stop 184
attggtgaattggcttatatgggat

SEQ ID NO: 340327 - DNA, 25 bp, Artificial
  probe
  misc_feature (1)..(25): SEQ ID NO: 2897; WAN024DJQ; Start 598; Stop 622
gtgatggctaagaaagagttgattc

SEQ ID NO: 340328 - DNA, 25 bp, Artificial
  probe
  misc_feature (1)..(25): SEQ ID NO: 2897; WAN024DJQ; Start 321; Stop 345
gattcaattcttacaaactttcgcc

SEQ ID NO: 340329 - DNA, 25 bp, Artificial
  probe
  misc_feature (1)..(25): SEQ ID NO: 2898; WAN024G59; Start 49; Stop 73
gaggagacattctacatctgctatc

SEQ ID NO: 340330 - DNA, 25 bp, Artificial
  probe
  misc_feature (1)..(25): SEQ ID NO: 2898; WAN024G59; Start 48; Stop 72
agaggagacattctacatctgctat

SEQ ID NO: 340331 - DNA, 25 bp, Artificial
  probe
  misc_feature (1)..(25): SEQ ID NO: 2898; WAN024G59; Start 50; Stop 74
aggagacattctacatctgctatcg

SEQ ID NO: 340332 - DNA, 25 bp, Artificial
  probe
  misc_feature (1)..(25): SEQ ID NO: 2898; WAN024G59; Start 5; Stop 29
cggatagcatctacagtaccttctc

SEQ ID NO: 340333 - DNA, 25 bp, Artificial
  probe
  misc_feature (1)..(25): SEQ ID NO: 2898; WAN024G59; Start 4; Stop 28
tcggatagcatctacagtaccttct

SEQ ID NO: 340334 - DNA, 25 bp, Artificial
  probe
  misc_feature (1)..(25): SEQ ID NO: 2898; WAN024G59; Start 3; Stop 27
gtcggatagcatctacagtaccttc

SEQ ID NO: 340335 - DNA, 25 bp, Artificial
  probe
  misc_feature (1)..(25): SEQ ID NO: 2898; WAN024G59; Start 167; Stop 191
tccctcattctaaacagtcaatcaa

SEQ ID NO: 340336 - DNA, 25 bp, Artificial
  probe
  misc_feature (1)..(25): SEQ ID NO: 2898; WAN024G59; Start 166; Stop 190
ttccctcattctaaacagtcaatca

SEQ ID NO: 340337 - DNA, 25 bp, Artificial
  probe
  misc_feature (1)..(25): SEQ ID NO: 2898; WAN024G59; Start 168; Stop 192
ccctcattctaaacagtcaatcaaa

SEQ ID NO: 340338 - DNA, 25 bp, Artificial
  probe
  misc_feature (1)..(25): SEQ ID NO: 2898; WAN024G59; Start 165; Stop 189
tttccctcattctaaacagtcaatc

SEQ ID NO: 340339 - DNA, 25 bp, Artificial
  probe
  misc_feature (1)..(25): SEQ ID NO: 2898; WAN024G59; Start 51; Stop 75
ggagacattctacatctgctatcga

SEQ ID NO: 340340 - DNA, 25 bp, Artificial
  probe
  misc_feature (1)..(25): SEQ ID NO: 2898; WAN024G59; Start 6; Stop 30
ggatagcatctacagtaccttctcc

SEQ ID NO: 340341 - DNA, 25 bp, Artificial
  probe
  misc_feature (1)..(25): SEQ ID NO: 2898; WAN024G59; Start 1; Stop 25
atgtcggatagcatctacagtacct

SEQ ID NO: 340342 - DNA, 25 bp, Artificial
  probe
  misc_feature (1)..(25): SEQ ID NO: 2898; WAN024G59; Start 170; Stop 194
ctcattctaaacagtcaatcaaagg

SEQ ID NO: 340343 - DNA, 25 bp, Artificial
  probe
  misc_feature (1)..(25): SEQ ID NO: 2898; WAN024G59; Start 169; Stop 193
cctcattctaaacagtcaatcaaag

SEQ ID NO: 340344 - DNA, 25 bp, Artificial
  probe
  misc_feature (1)..(25): SEQ ID NO: 2898; WAN024G59; Start 2; Stop 26
tgtcggatagcatctacagtacctt

SEQ ID NO: 340345 - DNA, 25 bp, Artificial
  probe
  misc_feature (1)..(25): SEQ ID NO: 2898; WAN024G59; Start 141; Stop 165
ccggtgcaattacaatcttcatatt

SEQ ID NO: 340346 - DNA, 25 bp, Artificial
  probe
  misc_feature (1)..(25): SEQ ID NO: 2898; WAN024G59; Start 140; Stop 164
tccggtgcaattacaatcttcatat

SEQ ID NO: 340347 - DNA, 25 bp, Artificial
  probe
  misc_feature (1)..(25): SEQ ID NO: 2898; WAN024G59; Start 139; Stop 163
atccggtgcaattacaatcttcata

SEQ ID NO: 340348 - DNA, 25 bp, Artificial
  probe
  misc_feature (1)..(25): SEQ ID NO: 2898; WAN024G59; Start 7; Stop 31
gatagcatctacagtaccttctccc

SEQ ID NO: 340349 - DNA, 25 bp, Artificial
  probe
  misc_feature (1)..(25): SEQ ID NO: 2898; WAN024G59; Start 138; Stop 162
aatccggtgcaattacaatcttcat

SEQ ID NO: 340350 - DNA, 25 bp, Artificial
  probe
  misc_feature (1)..(25): SEQ ID NO: 2898; WAN024G59; Start 137; Stop 161
gaatccggtgcaattacaatcttca

SEQ ID NO: 340351 - DNA, 25 bp, Artificial
  probe
  misc_feature (1)..(25): SEQ ID NO: 2898; WAN024G59; Start 54; Stop 78
gacattctacatctgctatcgattg

SEQ ID NO: 340352 - DNA, 25 bp, Artificial
  probe
  misc_feature (1)..(25): SEQ ID NO: 2898; WAN024G59; Start 142; Stop 166
cggtgcaattacaatcttcatattt

SEQ ID NO: 340353 - DNA, 25 bp, Artificial
  probe
  misc_feature (1)..(25): SEQ ID NO: 2898; WAN024G59; Start 52; Stop 76
gagacattctacatctgctatcgat

SEQ ID NO: 340354 - DNA, 25 bp, Artificial
  probe
  misc_feature (1)..(25): SEQ ID NO: 2898; WAN024G59; Start 53; Stop 77
agacattctacatctgctatcgatt

SEQ ID NO: 340355 - DNA, 25 bp, Artificial
  probe
  misc_feature (1)..(25): SEQ ID NO: 2898; WAN024G59; Start 92; Stop 116
tttattgcttcagctacctgttgag

SEQ ID NO: 340356 - DNA, 25 bp, Artificial
  probe
  misc_feature (1)..(25): SEQ ID NO: 2898; WAN024G59; Start 55; Stop 79
acattctacatctgctatcgattgt

SEQ ID NO: 340357 - DNA, 25 bp, Artificial
  probe
  misc_feature (1)..(25): SEQ ID NO: 2898; WAN024G59; Start 47; Stop 71
cagaggagacattctacatctgcta

SEQ ID NO: 340358 - DNA, 25 bp, Artificial
  probe
  misc_feature (1)..(25): SEQ ID NO: 2898; WAN024G59; Start 61; Stop 85
tacatctgctatcgattgttggaag

SEQ ID NO: 340359 - DNA, 25 bp, Artificial
  probe
  misc_feature (1)..(25): SEQ ID NO: 2898; WAN024G59; Start 60; Stop 84
ctacatctgctatcgattgttggaa

SEQ ID NO: 340360 - DNA, 25 bp, Artificial
  probe
  misc_feature (1)..(25): SEQ ID NO: 2898; WAN024G59; Start 58; Stop 82
ttctacatctgctatcgattgttgg

SEQ ID NO: 340361 - DNA, 25 bp, Artificial
  probe
  misc_feature (1)..(25): SEQ ID NO: 2898; WAN024G59; Start 57; Stop 81
attctacatctgctatcgattgttg

SEQ ID NO: 340362 - DNA, 25 bp, Artificial
  probe
  misc_feature (1)..(25): SEQ ID NO: 2899; WAN024FFI; Start 191; Stop 215
ccgtcttgagaaatgtgacagatat

SEQ ID NO: 340363 - DNA, 25 bp, Artificial
  probe
  misc_feature (1)..(25): SEQ ID NO: 2899; WAN024FFI; Start 187; Stop 211
aataccgtcttgagaaatgtgacag

SEQ ID NO: 340364 - DNA, 25 bp, Artificial
  probe
  misc_feature (1)..(25): SEQ ID NO: 2899; WAN024FFI; Start 186; Stop 210
caataccgtcttgagaaatgtgaca

SEQ ID NO: 340365 - DNA, 25 bp, Artificial
  probe
  misc_feature (1)..(25): SEQ ID NO: 2899; WAN024FFI; Start 288; Stop 312
caaagaaatgtttcgcttgagacag

SEQ ID NO: 340366 - DNA, 25 bp, Artificial
  probe
  misc_feature (1)..(25): SEQ ID NO: 2899; WAN024FFI; Start 190; Stop 214
accgtcttgagaaatgtgacagata

SEQ ID NO: 340367 - DNA, 25 bp, Artificial
  probe
  misc_feature (1)..(25): SEQ ID NO: 2899; WAN024FFI; Start 189; Stop 213
taccgtcttgagaaatgtgacagat

SEQ ID NO: 340368 - DNA, 25 bp, Artificial
  probe
  misc_feature (1)..(25): SEQ ID NO: 2899; WAN024FFI; Start 188; Stop 212
ataccgtcttgagaaatgtgacaga

SEQ ID NO: 340369 - DNA, 25 bp, Artificial
  probe
  misc_feature (1)..(25): SEQ ID NO: 2899; WAN024FFI; Start 3; Stop 27
gtcggtgatggaacatttgtttaaa

SEQ ID NO: 340370 - DNA, 25 bp, Artificial
  probe
  misc_feature (1)..(25): SEQ ID NO: 2899; WAN024FFI; Start 252; Stop 276
agctattggtatgaattggttaact

SEQ ID NO: 340371 - DNA, 25 bp, Artificial
  probe
  misc_feature (1)..(25): SEQ ID NO: 2899; WAN024FFI; Start 2; Stop 26
tgtcggtgatggaacatttgtttaa

SEQ ID NO: 340372 - DNA, 25 bp, Artificial
  probe
  misc_feature (1)..(25): SEQ ID NO: 2899; WAN024FFI; Start 4; Stop 28
tcggtgatggaacatttgtttaaat

SEQ ID NO: 340373 - DNA, 25 bp, Artificial
  probe
  misc_feature (1)..(25): SEQ ID NO: 2899; WAN024FFI; Start 282; Stop 306
ctgtttcaaagaaatgtttcgcttg

SEQ ID NO: 340374 - DNA, 25 bp, Artificial
  probe
  misc_feature (1)..(25): SEQ ID NO: 2899; WAN024FFI; Start 154; Stop 178
cttgcttggacagttgtttcagttc

SEQ ID NO: 340375 - DNA, 25 bp, Artificial
  probe
  misc_feature (1)..(25): SEQ ID NO: 2899; WAN024FFI; Start 294; Stop 318
aatgtttcgcttgagacaggaacta

SEQ ID NO: 340376 - DNA, 25 bp, Artificial
  probe
  misc_feature (1)..(25): SEQ ID NO: 2899; WAN024FFI; Start 289; Stop 313
aaagaaatgtttcgcttgagacagg

SEQ ID NO: 340377 - DNA, 25 bp, Artificial
  probe
  misc_feature (1)..(25): SEQ ID NO: 2899; WAN024FFI; Start 5; Stop 29
cggtgatggaacatttgtttaaatt

SEQ ID NO: 340378 - DNA, 25 bp, Artificial
  probe
  misc_feature (1)..(25): SEQ ID NO: 2899; WAN024FFI; Start 253; Stop 277
gctattggtatgaattggttaactt

SEQ ID NO: 340379 - DNA, 25 bp, Artificial
  probe
  misc_feature (1)..(25): SEQ ID NO: 2899; WAN024FFI; Start 278; Stop 302
attcctgtttcaaagaaatgtttcg

SEQ ID NO: 340380 - DNA, 25 bp, Artificial
  probe
  misc_feature (1)..(25): SEQ ID NO: 2899; WAN024FFI; Start 281; Stop 305
cctgtttcaaagaaatgtttcgctt

SEQ ID NO: 340381 - DNA, 25 bp, Artificial
  probe
  misc_feature (1)..(25): SEQ ID NO: 2899; WAN024FFI; Start 279; Stop 303
ttcctgtttcaaagaaatgtttcgc

SEQ ID NO: 340382 - DNA, 25 bp, Artificial
  probe
  misc_feature (1)..(25): SEQ ID NO: 2899; WAN024FFI; Start 155; Stop 179
ttgcttggacagttgtttcagttct

SEQ ID NO: 340383 - DNA, 25 bp, Artificial
  probe
  misc_feature (1)..(25): SEQ ID NO: 2899; WAN024FFI; Start 314; Stop 338
aactagggaagtctaagggtggaag

SEQ ID NO: 340384 - DNA, 25 bp, Artificial
  probe
  misc_feature (1)..(25): SEQ ID NO: 2899; WAN024FFI; Start 313; Stop 337
gaactagggaagtctaagggtggaa

SEQ ID NO: 340385 - DNA, 25 bp, Artificial
  probe
  misc_feature (1)..(25): SEQ ID NO: 2899; WAN024FFI; Start 192; Stop 216
cgtcttgagaaatgtgacagatatc

SEQ ID NO: 340386 - DNA, 25 bp, Artificial
  probe
  misc_feature (1)..(25): SEQ ID NO: 2899; WAN024FFI; Start 295; Stop 319
atgtttcgcttgagacaggaactag

SEQ ID NO: 340387 - DNA, 25 bp, Artificial
  probe
  misc_feature (1)..(25): SEQ ID NO: 2899; WAN024FFI; Start 202; Stop 226
aatgtgacagatatcaagttatggg

SEQ ID NO: 340388 - DNA, 25 bp, Artificial
  probe
  misc_feature (1)..(25): SEQ ID NO: 2899; WAN024FFI; Start 292; Stop 316
gaaatgtttcgcttgagacaggaac

SEQ ID NO: 340389 - DNA, 25 bp, Artificial
  probe
  misc_feature (1)..(25): SEQ ID NO: 2899; WAN024FFI; Start 280; Stop 304
tcctgtttcaaagaaatgtttcgct

SEQ ID NO: 340390 - DNA, 25 bp, Artificial
  probe
  misc_feature (1)..(25): SEQ ID NO: 2899; WAN024FFI; Start 285; Stop 309
tttcaaagaaatgtttcgcttgaga

SEQ ID NO: 340391 - DNA, 25 bp, Artificial
  probe
  misc_feature (1)..(25): SEQ ID NO: 2899; WAN024FFI; Start 284; Stop 308
gtttcaaagaaatgtttcgcttgag

SEQ ID NO: 340392 - DNA, 25 bp, Artificial
  probe
  misc_feature (1)..(25): SEQ ID NO: 2899; WAN024FFI; Start 183; Stop 207
tttcaataccgtcttgagaaatgtg

SEQ ID NO: 340393 - DNA, 25 bp, Artificial
  probe
  misc_feature (1)..(25): SEQ ID NO: 2899; WAN024FFI; Start 184; Stop 208
ttcaataccgtcttgagaaatgtga

SEQ ID NO: 340394 - DNA, 25 bp, Artificial
  probe
  misc_feature (1)..(25): SEQ ID NO: 2899; WAN024FFI; Start 291; Stop 315
agaaatgtttcgcttgagacaggaa

SEQ ID NO: 340395 - DNA, 25 bp, Artificial
  probe
  misc_feature (1)..(25): SEQ ID NO: 2900; WAN024D6G; Start 251; Stop 275
ataccagcaatatgaccaacttcag

SEQ ID NO: 340396 - DNA, 25 bp, Artificial
  probe
  misc_feature (1)..(25): SEQ ID NO: 2900; WAN024D6G; Start 239; Stop 263
gcatcttgaagcataccagcaatat

SEQ ID NO: 340397 - DNA, 25 bp, Artificial
  probe
  misc_feature (1)..(25): SEQ ID NO: 2900; WAN024D6G; Start 241; Stop 265
atcttgaagcataccagcaatatga

SEQ ID NO: 340398 - DNA, 25 bp, Artificial
  probe
  misc_feature (1)..(25): SEQ ID NO: 2900; WAN024D6G; Start 240; Stop 264
catcttgaagcataccagcaatatg

SEQ ID NO: 340399 - DNA, 25 bp, Artificial
  probe
  misc_feature (1)..(25): SEQ ID NO: 2900; WAN024D6G; Start 279; Stop 303
acatacctgtattgacaacaacacc

SEQ ID NO: 340400 - DNA, 25 bp, Artificial
  probe
  misc_feature (1)..(25): SEQ ID NO: 2900; WAN024D6G; Start 252; Stop 276
taccagcaatatgaccaacttcagt

SEQ ID NO: 340401 - DNA, 25 bp, Artificial
  probe
  misc_feature (1)..(25): SEQ ID NO: 2900; WAN024D6G; Start 250; Stop 274
cataccagcaatatgaccaacttca

SEQ ID NO: 340402 - DNA, 25 bp, Artificial
  probe
  misc_feature (1)..(25): SEQ ID NO: 2900; WAN024D6G; Start 242; Stop 266
tcttgaagcataccagcaatatgac

SEQ ID NO: 340403 - DNA, 25 bp, Artificial
  probe
  misc_feature (1)..(25): SEQ ID NO: 2900; WAN024D6G; Start 225; Stop 249
tatcagtctcatccgcatcttgaag

SEQ ID NO: 340404 - DNA, 25 bp, Artificial
  probe
  misc_feature (1)..(25): SEQ ID NO: 2900; WAN024D6G; Start 29; Stop 53
agagaaagaacgatggtaacgatag

SEQ ID NO: 340405 - DNA, 25 bp, Artificial
  probe
  misc_feature (1)..(25): SEQ ID NO: 2900; WAN024D6G; Start 28; Stop 52
aagagaaagaacgatggtaacgata

SEQ ID NO: 340406 - DNA, 25 bp, Artificial
  probe
  misc_feature (1)..(25): SEQ ID NO: 2900; WAN024D6G; Start 224; Stop 248
gtatcagtctcatccgcatcttgaa

SEQ ID NO: 340407 - DNA, 25 bp, Artificial
  probe
  misc_feature (1)..(25): SEQ ID NO: 2900; WAN024D6G; Start 90; Stop 114
caacagaagtcaacaactcaccaag

SEQ ID NO: 340408 - DNA, 25 bp, Artificial
  probe
  misc_feature (1)..(25): SEQ ID NO: 2900; WAN024D6G; Start 243; Stop 267
cttgaagcataccagcaatatgacc

SEQ ID NO: 340409 - DNA, 25 bp, Artificial
  probe
  misc_feature (1)..(25): SEQ ID NO: 2900; WAN024D6G; Start 27; Stop 51
caagagaaagaacgatggtaacgat

SEQ ID NO: 340410 - DNA, 25 bp, Artificial
  probe
  misc_feature (1)..(25): SEQ ID NO: 2900; WAN024D6G; Start 91; Stop 115
aacagaagtcaacaactcaccaagt

SEQ ID NO: 340411 - DNA, 25 bp, Artificial
  probe
  misc_feature (1)..(25): SEQ ID NO: 2900; WAN024D6G; Start 278; Stop 302
tacatacctgtattgacaacaacac

SEQ ID NO: 340412 - DNA, 25 bp, Artificial
  probe
  misc_feature (1)..(25): SEQ ID NO: 2900; WAN024D6G; Start 249; Stop 273
gcataccagcaatatgaccaacttc

SEQ ID NO: 340413 - DNA, 25 bp, Artificial
  probe
  misc_feature (1)..(25): SEQ ID NO: 2900; WAN024D6G; Start 246; Stop 270
gaagcataccagcaatatgaccaac

SEQ ID NO: 340414 - DNA, 25 bp, Artificial
  probe
  misc_feature (1)..(25): SEQ ID NO: 2900; WAN024D6G; Start 152; Stop 176
gtaacaagggcaatgaccaagatag

SEQ ID NO: 340415 - DNA, 25 bp, Artificial
  probe
  misc_feature (1)..(25): SEQ ID NO: 2900; WAN024D6G; Start 30; Stop 54
gagaaagaacgatggtaacgatagc

SEQ ID NO: 340416 - DNA, 25 bp, Artificial
  probe
  misc_feature (1)..(25): SEQ ID NO: 2900; WAN024D6G; Start 222; Stop 246
gtgtatcagtctcatccgcatcttg

SEQ ID NO: 340417 - DNA, 25 bp, Artificial
  probe
  misc_feature (1)..(25): SEQ ID NO: 2900; WAN024D6G; Start 126; Stop 150
cttgaatgaagacacccactacaaa

SEQ ID NO: 340418 - DNA, 25 bp, Artificial
  probe
  misc_feature (1)..(25): SEQ ID NO: 2900; WAN024D6G; Start 36; Stop 60
gaacgatggtaacgatagcaggaag

SEQ ID NO: 340419 - DNA, 25 bp, Artificial
  probe
  misc_feature (1)..(25): SEQ ID NO: 2900; WAN024D6G; Start 32; Stop 56
gaaagaacgatggtaacgatagcag

SEQ ID NO: 340420 - DNA, 25 bp, Artificial
  probe
  misc_feature (1)..(25): SEQ ID NO: 2900; WAN024D6G; Start 248; Stop 272
agcataccagcaatatgaccaactt

SEQ ID NO: 340421 - DNA, 25 bp, Artificial
  probe
  misc_feature (1)..(25): SEQ ID NO: 2900; WAN024D6G; Start 247; Stop 271
aagcataccagcaatatgaccaact

SEQ ID NO: 340422 - DNA, 25 bp, Artificial
  probe
  misc_feature (1)..(25): SEQ ID NO: 2900; WAN024D6G; Start 245; Stop 269
tgaagcataccagcaatatgaccaa

SEQ ID NO: 340423 - DNA, 25 bp, Artificial
  probe
  misc_feature (1)..(25): SEQ ID NO: 2900; WAN024D6G; Start 244; Stop 268
ttgaagcataccagcaatatgacca

SEQ ID NO: 340424 - DNA, 25 bp, Artificial
  probe
  misc_feature (1)..(25): SEQ ID NO: 2900; WAN024D6G; Start 210; Stop 234
tttgtttgagtggtgtatcagtctc

SEQ ID NO: 340425 - DNA, 25 bp, Artificial
  probe
  misc_feature (1)..(25): SEQ ID NO: 2900; WAN024D6G; Start 151; Stop 175
agtaacaagggcaatgaccaagata

SEQ ID NO: 340426 - DNA, 25 bp, Artificial
  probe
  misc_feature (1)..(25): SEQ ID NO: 2900; WAN024D6G; Start 31; Stop 55
agaaagaacgatggtaacgatagca

SEQ ID NO: 340427 - DNA, 25 bp, Artificial
  probe
  misc_feature (1)..(25): SEQ ID NO: 2900; WAN024D6G; Start 19; Stop 43
ttgagtaccaagagaaagaacgatg

SEQ ID NO: 340428 - DNA, 25 bp, Artificial
  probe
  misc_feature (1)..(25): SEQ ID NO: 2901; WAN024FYT; Start 414; Stop 438
atatagacggatgatggttcaactt

SEQ ID NO: 340429 - DNA, 25 bp, Artificial
  probe
  misc_feature (1)..(25): SEQ ID NO: 2901; WAN024FYT; Start 760; Stop 784
cagttacctccagaagataagcgaa

SEQ ID NO: 340430 - DNA, 25 bp, Artificial
  probe
  misc_feature (1)..(25): SEQ ID NO: 2901; WAN024FYT; Start 413; Stop 437
tatatagacggatgatggttcaact

SEQ ID NO: 340431 - DNA, 25 bp, Artificial
  probe
  misc_feature (1)..(25): SEQ ID NO: 2901; WAN024FYT; Start 410; Stop 434
acttatatagacggatgatggttca

SEQ ID NO: 340432 - DNA, 25 bp, Artificial
  probe
  misc_feature (1)..(25): SEQ ID NO: 2901; WAN024FYT; Start 412; Stop 436
ttatatagacggatgatggttcaac

SEQ ID NO: 340433 - DNA, 25 bp, Artificial
  probe
  misc_feature (1)..(25): SEQ ID NO: 2901; WAN024FYT; Start 756; Stop 780
tatgcagttacctccagaagataag

SEQ ID NO: 340434 - DNA, 25 bp, Artificial
  probe
  misc_feature (1)..(25): SEQ ID NO: 2901; WAN024FYT; Start 662; Stop 686
ttggagagccagtatcattagagtt

SEQ ID NO: 340435 - DNA, 25 bp, Artificial
  probe
  misc_feature (1)..(25): SEQ ID NO: 2901; WAN024FYT; Start 464; Stop 488
agaagaaagagaatcgtccactatc

SEQ ID NO: 340436 - DNA, 25 bp, Artificial
  probe
  misc_feature (1)..(25): SEQ ID NO: 2901; WAN024FYT; Start 463; Stop 487
cagaagaaagagaatcgtccactat

SEQ ID NO: 340437 - DNA, 25 bp, Artificial
  probe
  misc_feature (1)..(25): SEQ ID NO: 2901; WAN024FYT; Start 459; Stop 483
aaatcagaagaaagagaatcgtcca

SEQ ID NO: 340438 - DNA, 25 bp, Artificial
  probe
  misc_feature (1)..(25): SEQ ID NO: 2901; WAN024FYT; Start 142; Stop 166
tgggatgatgatattgatattggca

SEQ ID NO: 340439 - DNA, 25 bp, Artificial
  probe
  misc_feature (1)..(25): SEQ ID NO: 2901; WAN024FYT; Start 411; Stop 435
cttatatagacggatgatggttcaa

SEQ ID NO: 340440 - DNA, 25 bp, Artificial
  probe
  misc_feature (1)..(25): SEQ ID NO: 2901; WAN024FYT; Start 778; Stop 802
aagcgaaaccaacatcactataaga

SEQ ID NO: 340441 - DNA, 25 bp, Artificial
  probe
  misc_feature (1)..(25): SEQ ID NO: 2901; WAN024FYT; Start 607; Stop 631
gcaggaaactatacaggagcatata

SEQ ID NO: 340442 - DNA, 25 bp, Artificial
  probe
  misc_feature (1)..(25): SEQ ID NO: 2901; WAN024FYT; Start 144; Stop 168
ggatgatgatattgatattggcatg

SEQ ID NO: 340443 - DNA, 25 bp, Artificial
  probe
  misc_feature (1)..(25): SEQ ID NO: 2901; WAN024FYT; Start 779; Stop 803
agcgaaaccaacatcactataagat

SEQ ID NO: 340444 - DNA, 25 bp, Artificial
  probe
  misc_feature (1)..(25): SEQ ID NO: 2901; WAN024FYT; Start 774; Stop 798
agataagcgaaaccaacatcactat

SEQ ID NO: 340445 - DNA, 25 bp, Artificial
  probe
  misc_feature (1)..(25): SEQ ID NO: 2901; WAN024FYT; Start 664; Stop 688
ggagagccagtatcattagagtttg

SEQ ID NO: 340446 - DNA, 25 bp, Artificial
  probe
  misc_feature (1)..(25): SEQ ID NO: 2901; WAN024FYT; Start 773; Stop 797
aagataagcgaaaccaacatcacta

SEQ ID NO: 340447 - DNA, 25 bp, Artificial
  probe
  misc_feature (1)..(25): SEQ ID NO: 2901; WAN024FYT; Start 777; Stop 801
taagcgaaaccaacatcactataag

SEQ ID NO: 340448 - DNA, 25 bp, Artificial
  probe
  misc_feature (1)..(25): SEQ ID NO: 2901; WAN024FYT; Start 460; Stop 484
aatcagaagaaagagaatcgtccac

SEQ ID NO: 340449 - DNA, 25 bp, Artificial
  probe
  misc_feature (1)..(25): SEQ ID NO: 2901; WAN024FYT; Start 755; Stop 779
atatgcagttacctccagaagataa

SEQ ID NO: 340450 - DNA, 25 bp, Artificial
  probe
  misc_feature (1)..(25): SEQ ID NO: 2901; WAN024FYT; Start 753; Stop 777
ttatatgcagttacctccagaagat

SEQ ID NO: 340451 - DNA, 25 bp, Artificial
  probe
  misc_feature (1)..(25): SEQ ID NO: 2901; WAN024FYT; Start 752; Stop 776
attatatgcagttacctccagaaga

SEQ ID NO: 340452 - DNA, 25 bp, Artificial
  probe
  misc_feature (1)..(25): SEQ ID NO: 2901; WAN024FYT; Start 749; Stop 773
agaattatatgcagttacctccaga

SEQ ID NO: 340453 - DNA, 25 bp, Artificial
  probe
  misc_feature (1)..(25): SEQ ID NO: 2901; WAN024FYT; Start 744; Stop 768
tggagagaattatatgcagttacct

SEQ ID NO: 340454 - DNA, 25 bp, Artificial
  probe
  misc_feature (1)..(25): SEQ ID NO: 2901; WAN024FYT; Start 321; Stop 345
ggaattggtagagagtttgtggata

SEQ ID NO: 340455 - DNA, 25 bp, Artificial
  probe
  misc_feature (1)..(25): SEQ ID NO: 2901; WAN024FYT; Start 268; Stop 292
ttctctgtaattcgggatgattcaa

SEQ ID NO: 340456 - DNA, 25 bp, Artificial
  probe
  misc_feature (1)..(25): SEQ ID NO: 2901; WAN024FYT; Start 267; Stop 291
tttctctgtaattcgggatgattca

SEQ ID NO: 340457 - DNA, 25 bp, Artificial
  probe
  misc_feature (1)..(25): SEQ ID NO: 2901; WAN024FYT; Start 316; Stop 340
aaagaggaattggtagagagtttgt

SEQ ID NO: 340458 - DNA, 25 bp, Artificial
  probe
  misc_feature (1)..(25): SEQ ID NO: 2901; WAN024FYT; Start 317; Stop 341
aagaggaattggtagagagtttgtg

SEQ ID NO: 340459 - DNA, 25 bp, Artificial
  probe
  misc_feature (1)..(25): SEQ ID NO: 2901; WAN024FYT; Start 266; Stop 290
ctttctctgtaattcgggatgattc

SEQ ID NO: 340460 - DNA, 25 bp, Artificial
  probe
  misc_feature (1)..(25): SEQ ID NO: 2901; WAN024FYT; Start 462; Stop 486
tcagaagaaagagaatcgtccacta

SEQ ID NO: 340461 - DNA, 25 bp, Artificial
  probe
  misc_feature (1)..(25): SEQ ID NO: 2902; WAN024DMR; Start 339; Stop 363
ttatacgattcctgacttgcttcaa

SEQ ID NO: 340462 - DNA, 25 bp, Artificial
  probe
  misc_feature (1)..(25): SEQ ID NO: 2902; WAN024DMR; Start 337; Stop 361
gtttatacgattcctgacttgcttc

SEQ ID NO: 340463 - DNA, 25 bp, Artificial
  probe
  misc_feature (1)..(25): SEQ ID NO: 2902; WAN024DMR; Start 267; Stop 291
gttgaaagatgaagattatgctgct

SEQ ID NO: 340464 - DNA, 25 bp, Artificial
  probe
  misc_feature (1)..(25): SEQ ID NO: 2902; WAN024DMR; Start 266; Stop 290
agttgaaagatgaagattatgctgc

SEQ ID NO: 340465 - DNA, 25 bp, Artificial
  probe
  misc_feature (1)..(25): SEQ ID NO: 2902; WAN024DMR; Start 259; Stop 283
gctaccaagttgaaagatgaagatt

SEQ ID NO: 340466 - DNA, 25 bp, Artificial
  probe
  misc_feature (1)..(25): SEQ ID NO: 2902; WAN024DMR; Start 258; Stop 282
tgctaccaagttgaaagatgaagat

SEQ ID NO: 340467 - DNA, 25 bp, Artificial
  probe
  misc_feature (1)..(25): SEQ ID NO: 2902; WAN024DMR; Start 164; Stop 188
gttatcagcaattactccaaagacg

SEQ ID NO: 340468 - DNA, 25 bp, Artificial
  probe
  misc_feature (1)..(25): SEQ ID NO: 2902; WAN024DMR; Start 256; Stop 280
tttgctaccaagttgaaagatgaag

SEQ ID NO: 340469 - DNA, 25 bp, Artificial
  probe
  misc_feature (1)..(25): SEQ ID NO: 2902; WAN024DMR; Start 254; Stop 278
catttgctaccaagttgaaagatga

SEQ ID NO: 340470 - DNA, 25 bp, Artificial
  probe
  misc_feature (1)..(25): SEQ ID NO: 2902; WAN024DMR; Start 263; Stop 287
ccaagttgaaagatgaagattatgc

SEQ ID NO: 340471 - DNA, 25 bp, Artificial
  probe
  misc_feature (1)..(25): SEQ ID NO: 2902; WAN024DMR; Start 269; Stop 293
tgaaagatgaagattatgctgctaa

SEQ ID NO: 340472 - DNA, 25 bp, Artificial
  probe
  misc_feature (1)..(25): SEQ ID NO: 2902; WAN024DMR; Start 268; Stop 292
ttgaaagatgaagattatgctgcta

SEQ ID NO: 340473 - DNA, 25 bp, Artificial
  probe
  misc_feature (1)..(25): SEQ ID NO: 2902; WAN024DMR; Start 257; Stop 281
ttgctaccaagttgaaagatgaaga

SEQ ID NO: 340474 - DNA, 25 bp, Artificial
  probe
  misc_feature (1)..(25): SEQ ID NO: 2902; WAN024DMR; Start 255; Stop 279
atttgctaccaagttgaaagatgaa

SEQ ID NO: 340475 - DNA, 25 bp, Artificial
  probe
  misc_feature (1)..(25): SEQ ID NO: 2902; WAN024DMR; Start 340; Stop 364
tatacgattcctgacttgcttcaaa

SEQ ID NO: 340476 - DNA, 25 bp, Artificial
  probe
  misc_feature (1)..(25): SEQ ID NO: 2902; WAN024DMR; Start 338; Stop 362
tttatacgattcctgacttgcttca

SEQ ID NO: 340477 - DNA, 25 bp, Artificial
  probe
  misc_feature (1)..(25): SEQ ID NO: 2902; WAN024DMR; Start 336; Stop 360
agtttatacgattcctgacttgctt

SEQ ID NO: 340478 - DNA, 25 bp, Artificial
  probe
  misc_feature (1)..(25): SEQ ID NO: 2902; WAN024DMR; Start 163; Stop 187
agttatcagcaattactccaaagac

SEQ ID NO: 340479 - DNA, 25 bp, Artificial
  probe
  misc_feature (1)..(25): SEQ ID NO: 2902; WAN024DMR; Start 279; Stop 303
agattatgctgctaaatatacacga

SEQ ID NO: 340480 - DNA, 25 bp, Artificial
  probe
  misc_feature (1)..(25): SEQ ID NO: 2902; WAN024DMR; Start 341; Stop 365
atacgattcctgacttgcttcaaag

SEQ ID NO: 340481 - DNA, 25 bp, Artificial
  probe
  misc_feature (1)..(25): SEQ ID NO: 2902; WAN024DMR; Start 265; Stop 289
aagttgaaagatgaagattatgctg

SEQ ID NO: 340482 - DNA, 25 bp, Artificial
  probe
  misc_feature (1)..(25): SEQ ID NO: 2902; WAN024DMR; Start 280; Stop 304
gattatgctgctaaatatacacgag

SEQ ID NO: 340483 - DNA, 25 bp, Artificial
  probe
  misc_feature (1)..(25): SEQ ID NO: 2902; WAN024DMR; Start 264; Stop 288
caagttgaaagatgaagattatgct

SEQ ID NO: 340484 - DNA, 25 bp, Artificial
  probe
  misc_feature (1)..(25): SEQ ID NO: 2902; WAN024DMR; Start 270; Stop 294
gaaagatgaagattatgctgctaaa

SEQ ID NO: 340485 - DNA, 25 bp, Artificial
  probe
  misc_feature (1)..(25): SEQ ID NO: 2902; WAN024DMR; Start 253; Stop 277
gcatttgctaccaagttgaaagatg

SEQ ID NO: 340486 - DNA, 25 bp, Artificial
  probe
  misc_feature (1)..(25): SEQ ID NO: 2902; WAN024DMR; Start 262; Stop 286
accaagttgaaagatgaagattatg

SEQ ID NO: 340487 - DNA, 25 bp, Artificial
  probe
  misc_feature (1)..(25): SEQ ID NO: 2902; WAN024DMR; Start 298; Stop 322
acacgagcgaagtactattattcta

SEQ ID NO: 340488 - DNA, 25 bp, Artificial
  probe
  misc_feature (1)..(25): SEQ ID NO: 2902; WAN024DMR; Start 297; Stop 321
tacacgagcgaagtactattattct

SEQ ID NO: 340489 - DNA, 25 bp, Artificial
  probe
  misc_feature (1)..(25): SEQ ID NO: 2902; WAN024DMR; Start 278; Stop 302
aagattatgctgctaaatatacacg

SEQ ID NO: 340490 - DNA, 25 bp, Artificial
  probe
  misc_feature (1)..(25): SEQ ID NO: 2902; WAN024DMR; Start 125; Stop 149
tgctattatttatcttgccaacttt

SEQ ID NO: 340491 - DNA, 25 bp, Artificial
  probe
  misc_feature (1)..(25): SEQ ID NO: 2902; WAN024DMR; Start 165; Stop 189
ttatcagcaattactccaaagacgt

SEQ ID NO: 340492 - DNA, 25 bp, Artificial
  probe
  misc_feature (1)..(25): SEQ ID NO: 2902; WAN024DMR; Start 299; Stop 323
cacgagcgaagtactattattctaa

SEQ ID NO: 340493 - DNA, 25 bp, Artificial
  probe
  misc_feature (1)..(25): SEQ ID NO: 2902; WAN024DMR; Start 296; Stop 320
atacacgagcgaagtactattattc

SEQ ID NO: 340494 - DNA, 25 bp, Artificial
  probe
  misc_feature (1)..(25): SEQ ID NO: 2903; WAN024FNP; Start 302; Stop 326
aatcggttattcaacaggttcagaa

SEQ ID NO: 340495 - DNA, 25 bp, Artificial
  probe
  misc_feature (1)..(25): SEQ ID NO: 2903; WAN024FNP; Start 287; Stop 311
atacatcagcagttgaatcggttat

SEQ ID NO: 340496 - DNA, 25 bp, Artificial
  probe
  misc_feature (1)..(25): SEQ ID NO: 2903; WAN024FNP; Start 288; Stop 312
tacatcagcagttgaatcggttatt

SEQ ID NO: 340497 - DNA, 25 bp, Artificial
  probe
  misc_feature (1)..(25): SEQ ID NO: 2903; WAN024FNP; Start 286; Stop 310
gatacatcagcagttgaatcggtta

SEQ ID NO: 340498 - DNA, 25 bp, Artificial
  probe
  misc_feature (1)..(25): SEQ ID NO: 2903; WAN024FNP; Start 73; Stop 97
caccatcatgtagtagcagtagata

SEQ ID NO: 340499 - DNA, 25 bp, Artificial
  probe
  misc_feature (1)..(25): SEQ ID NO: 2903; WAN024FNP; Start 475; Stop 499
agtcggatcatagttggaacagatt

SEQ ID NO: 340500 - DNA, 25 bp, Artificial
  probe
  misc_feature (1)..(25): SEQ ID NO: 2903; WAN024FNP; Start 474; Stop 498
aagtcggatcatagttggaacagat

SEQ ID NO: 340501 - DNA, 25 bp, Artificial
  probe
  misc_feature (1)..(25): SEQ ID NO: 2903; WAN024FNP; Start 74; Stop 98
accatcatgtagtagcagtagatat

SEQ ID NO: 340502 - DNA, 25 bp, Artificial
  probe
  misc_feature (1)..(25): SEQ ID NO: 2903; WAN024FNP; Start 72; Stop 96
acaccatcatgtagtagcagtagat

SEQ ID NO: 340503 - DNA, 25 bp, Artificial
  probe
  misc_feature (1)..(25): SEQ ID NO: 2903; WAN024FNP; Start 306; Stop 330
ggttattcaacaggttcagaatgtg

SEQ ID NO: 340504 - DNA, 25 bp, Artificial
  probe
  misc_feature (1)..(25): SEQ ID NO: 2903; WAN024FNP; Start 307; Stop 331
gttattcaacaggttcagaatgtga

SEQ ID NO: 340505 - DNA, 25 bp, Artificial
  probe
  misc_feature (1)..(25): SEQ ID NO: 2903; WAN024FNP; Start 303; Stop 327
atcggttattcaacaggttcagaat

SEQ ID NO: 340506 - DNA, 25 bp, Artificial
  probe
  misc_feature (1)..(25): SEQ ID NO: 2903; WAN024FNP; Start 71; Stop 95
aacaccatcatgtagtagcagtaga

SEQ ID NO: 340507 - DNA, 25 bp, Artificial
  probe
  misc_feature (1)..(25): SEQ ID NO: 2903; WAN024FNP; Start 70; Stop 94
caacaccatcatgtagtagcagtag

SEQ ID NO: 340508 - DNA, 25 bp, Artificial
  probe
  misc_feature (1)..(25): SEQ ID NO: 2903; WAN024FNP; Start 1017; Stop 1041
tcagagttcaatacagggagttatg

SEQ ID NO: 340509 - DNA, 25 bp, Artificial
  probe
  misc_feature (1)..(25): SEQ ID NO: 2903; WAN024FNP; Start 1016; Stop 1040
gtcagagttcaatacagggagttat

SEQ ID NO: 340510 - DNA, 25 bp, Artificial
  probe
  misc_feature (1)..(25): SEQ ID NO: 2903; WAN024FNP; Start 301; Stop 325
gaatcggttattcaacaggttcaga

SEQ ID NO: 340511 - DNA, 25 bp, Artificial
  probe
  misc_feature (1)..(25): SEQ ID NO: 2903; WAN024FNP; Start 69; Stop 93
acaacaccatcatgtagtagcagta

SEQ ID NO: 340512 - DNA, 25 bp, Artificial
  probe
  misc_feature (1)..(25): SEQ ID NO: 2903; WAN024FNP; Start 960; Stop 984
agaagttgttattgggatataccga

SEQ ID NO: 340513 - DNA, 25 bp, Artificial
  probe
  misc_feature (1)..(25): SEQ ID NO: 2903; WAN024FNP; Start 304; Stop 328
tcggttattcaacaggttcagaatg

SEQ ID NO: 340514 - DNA, 25 bp, Artificial
  probe
  misc_feature (1)..(25): SEQ ID NO: 2903; WAN024FNP; Start 252; Stop 276
gccaacaaattatgactcagaaaga

SEQ ID NO: 340515 - DNA, 25 bp, Artificial
  probe
  misc_feature (1)..(25): SEQ ID NO: 2903; WAN024FNP; Start 26; Stop 50
ttgggactggttatgttggtttatc

SEQ ID NO: 340516 - DNA, 25 bp, Artificial
  probe
  misc_feature (1)..(25): SEQ ID NO: 2903; WAN024FNP; Start 44; Stop 68
gtttatccatttctgtgttacttgc

SEQ ID NO: 340517 - DNA, 25 bp, Artificial
  probe
  misc_feature (1)..(25): SEQ ID NO: 2903; WAN024FNP; Start 943; Stop 967
gtcagacagatggataaagaagttg

SEQ ID NO: 340518 - DNA, 25 bp, Artificial
  probe
  misc_feature (1)..(25): SEQ ID NO: 2903; WAN024FNP; Start 305; Stop 329
cggttattcaacaggttcagaatgt

SEQ ID NO: 340519 - DNA, 25 bp, Artificial
  probe
  misc_feature (1)..(25): SEQ ID NO: 2903; WAN024FNP; Start 473; Stop 497
caagtcggatcatagttggaacaga

SEQ ID NO: 340520 - DNA, 25 bp, Artificial
  probe
  misc_feature (1)..(25): SEQ ID NO: 2903; WAN024FNP; Start 406; Stop 430
atttcaaatcttctattcagccctg

SEQ ID NO: 340521 - DNA, 25 bp, Artificial
  probe
  misc_feature (1)..(25): SEQ ID NO: 2903; WAN024FNP; Start 25; Stop 49
gttgggactggttatgttggtttat

SEQ ID NO: 340522 - DNA, 25 bp, Artificial
  probe
  misc_feature (1)..(25): SEQ ID NO: 2903; WAN024FNP; Start 1043; Stop 1067
aacgtattaaggatagaggagctaa

SEQ ID NO: 340523 - DNA, 25 bp, Artificial
  probe
  misc_feature (1)..(25): SEQ ID NO: 2903; WAN024FNP; Start 251; Stop 275
cgccaacaaattatgactcagaaag

SEQ ID NO: 340524 - DNA, 25 bp, Artificial
  probe
  misc_feature (1)..(25): SEQ ID NO: 2903; WAN024FNP; Start 959; Stop 983
aagaagttgttattgggatataccg

SEQ ID NO: 340525 - DNA, 25 bp, Artificial
  probe
  misc_feature (1)..(25): SEQ ID NO: 2903; WAN024FNP; Start 778; Stop 802
ggatattgcttaccaaaggacacta

SEQ ID NO: 340526 - DNA, 25 bp, Artificial
  probe
  misc_feature (1)..(25): SEQ ID NO: 2903; WAN024FNP; Start 289; Stop 313
acatcagcagttgaatcggttattc

SEQ ID NO: 340527 - DNA, 25 bp, Artificial
  probe
  misc_feature (1)..(25): SEQ ID NO: 2904; WAN024GK4; Start 104; Stop 128
caactccatctgtagtctcattcaa

SEQ ID NO: 340528 - DNA, 25 bp, Artificial
  probe
  misc_feature (1)..(25): SEQ ID NO: 2904; WAN024GK4; Start 916; Stop 940
gaagttatccttgttggtggttcaa

SEQ ID NO: 340529 - DNA, 25 bp, Artificial
  probe
  misc_feature (1)..(25): SEQ ID NO: 2904; WAN024GK4; Start 13; Stop 37
atcggtattgacttaggtacaacaa

SEQ ID NO: 340530 - DNA, 25 bp, Artificial
  probe
  misc_feature (1)..(25): SEQ ID NO: 2904; WAN024GK4; Start 102; Stop 126
cacaactccatctgtagtctcattc

SEQ ID NO: 340531 - DNA, 25 bp, Artificial
  probe
  misc_feature (1)..(25): SEQ ID NO: 2904; WAN024GK4; Start 12; Stop 36
tatcggtattgacttaggtacaaca

SEQ ID NO: 340532 - DNA, 25 bp, Artificial
  probe
  misc_feature (1)..(25): SEQ ID NO: 2904; WAN024GK4; Start 103; Stop 127
acaactccatctgtagtctcattca

SEQ ID NO: 340533 - DNA, 25 bp, Artificial
  probe
  misc_feature (1)..(25): SEQ ID NO: 2904; WAN024GK4; Start 11; Stop 35
ttatcggtattgacttaggtacaac

SEQ ID NO: 340534 - DNA, 25 bp, Artificial
  probe
  misc_feature (1)..(25): SEQ ID NO: 2904; WAN024GK4; Start 1162; Stop 1186
atcccaacatctaaatcacaagtct

SEQ ID NO: 340535 - DNA, 25 bp, Artificial
  probe
  misc_feature (1)..(25): SEQ ID NO: 2904; WAN024GK4; Start 986; Stop 1010
aagaaccaaacaaatcagtaaaccc

SEQ ID NO: 340536 - DNA, 25 bp, Artificial
  probe
  misc_feature (1)..(25): SEQ ID NO: 2904; WAN024GK4; Start 1172; Stop 1196
ctaaatcacaagtcttctcaacagc

SEQ ID NO: 340537 - DNA, 25 bp, Artificial
  probe
  misc_feature (1)..(25): SEQ ID NO: 2904; WAN024GK4; Start 1164; Stop 1188
cccaacatctaaatcacaagtcttc

SEQ ID NO: 340538 - DNA, 25 bp, Artificial
  probe
  misc_feature (1)..(25): SEQ ID NO: 2904; WAN024GK4; Start 1163; Stop 1187
tcccaacatctaaatcacaagtctt

SEQ ID NO: 340539 - DNA, 25 bp, Artificial
  probe
  misc_feature (1)..(25): SEQ ID NO: 2904; WAN024GK4; Start 1160; Stop 1184
caatcccaacatctaaatcacaagt

SEQ ID NO: 340540 - DNA, 25 bp, Artificial
  probe
  misc_feature (1)..(25): SEQ ID NO: 2904; WAN024GK4; Start 1159; Stop 1183
acaatcccaacatctaaatcacaag

SEQ ID NO: 340541 - DNA, 25 bp, Artificial
  probe
  misc_feature (1)..(25): SEQ ID NO: 2904; WAN024GK4; Start 1114; Stop 1138
gaaacaatgggtggagtatttacaa

SEQ ID NO: 340542 - DNA, 25 bp, Artificial
  probe
  misc_feature (1)..(25): SEQ ID NO: 2904; WAN024GK4; Start 1161; Stop 1185
aatcccaacatctaaatcacaagtc

SEQ ID NO: 340543 - DNA, 25 bp, Artificial
  probe
  misc_feature (1)..(25): SEQ ID NO: 2904; WAN024GK4; Start 987; Stop 1011
agaaccaaacaaatcagtaaaccct

SEQ ID NO: 340544 - DNA, 25 bp, Artificial
  probe
  misc_feature (1)..(25): SEQ ID NO: 2904; WAN024GK4; Start 1173; Stop 1197
taaatcacaagtcttctcaacagca

SEQ ID NO: 340545 - DNA, 25 bp, Artificial
  probe
  misc_feature (1)..(25): SEQ ID NO: 2904; WAN024GK4; Start 1152; Stop 1176
caacactacaatcccaacatctaaa

SEQ ID NO: 340546 - DNA, 25 bp, Artificial
  probe
  misc_feature (1)..(25): SEQ ID NO: 2904; WAN024GK4; Start 1049; Stop 1073
gtgtgattactggtgatgtcaagga

SEQ ID NO: 340547 - DNA, 25 bp, Artificial
  probe
  misc_feature (1)..(25): SEQ ID NO: 2904; WAN024GK4; Start 267; Stop 291
ctcagctatgatccttcaatacttg

SEQ ID NO: 340548 - DNA, 25 bp, Artificial
  probe
  misc_feature (1)..(25): SEQ ID NO: 2904; WAN024GK4; Start 247; Stop 271
gaatacactccacaagaaatctcag

SEQ ID NO: 340549 - DNA, 25 bp, Artificial
  probe
  misc_feature (1)..(25): SEQ ID NO: 2904; WAN024GK4; Start 266; Stop 290
tctcagctatgatccttcaatactt

SEQ ID NO: 340550 - DNA, 25 bp, Artificial
  probe
  misc_feature (1)..(25): SEQ ID NO: 2904; WAN024GK4; Start 1248; Stop 1272
aatggcagcagataacaagactctt

SEQ ID NO: 340551 - DNA, 25 bp, Artificial
  probe
  misc_feature (1)..(25): SEQ ID NO: 2904; WAN024GK4; Start 1115; Stop 1139
aaacaatgggtggagtatttacaaa

SEQ ID NO: 340552 - DNA, 25 bp, Artificial
  probe
  misc_feature (1)..(25): SEQ ID NO: 2904; WAN024GK4; Start 1165; Stop 1189
ccaacatctaaatcacaagtcttct

SEQ ID NO: 340553 - DNA, 25 bp, Artificial
  probe
  misc_feature (1)..(25): SEQ ID NO: 2904; WAN024GK4; Start 265; Stop 289
atctcagctatgatccttcaatact

SEQ ID NO: 340554 - DNA, 25 bp, Artificial
  probe
  misc_feature (1)..(25): SEQ ID NO: 2904; WAN024GK4; Start 248; Stop 272
aatacactccacaagaaatctcagc

SEQ ID NO: 340555 - DNA, 25 bp, Artificial
  probe
  misc_feature (1)..(25): SEQ ID NO: 2904; WAN024GK4; Start 1003; Stop 1027
gtaaaccctgatgaagtagttgcta

SEQ ID NO: 340556 - DNA, 25 bp, Artificial
  probe
  misc_feature (1)..(25): SEQ ID NO: 2904; WAN024GK4; Start 1157; Stop 1181
ctacaatcccaacatctaaatcaca

SEQ ID NO: 340557 - DNA, 25 bp, Artificial
  probe
  misc_feature (1)..(25): SEQ ID NO: 2904; WAN024GK4; Start 1156; Stop 1180
actacaatcccaacatctaaatcac

SEQ ID NO: 340558 - DNA, 25 bp, Artificial
  probe
  misc_feature (1)..(25): SEQ ID NO: 2904; WAN024GK4; Start 1155; Stop 1179
cactacaatcccaacatctaaatca

SEQ ID NO: 340559 - DNA, 25 bp, Artificial
  probe
  misc_feature (1)..(25): SEQ ID NO: 2904; WAN024GK4; Start 1154; Stop 1178
acactacaatcccaacatctaaatc

SEQ ID NO: 340560 - DNA, 25 bp, Artificial
  probe
  misc_feature (1)..(25): SEQ ID NO: 2905; WAN024F5S; Start 2623; Stop 2647
attgatgagatgaagaagttggtga

SEQ ID NO: 340561 - DNA, 25 bp, Artificial
  probe
  misc_feature (1)..(25): SEQ ID NO: 2905; WAN024F5S; Start 2620; Stop 2644
cgtattgatgagatgaagaagttgg

SEQ ID NO: 340562 - DNA, 25 bp, Artificial
  probe
  misc_feature (1)..(25): SEQ ID NO: 2905; WAN024F5S; Start 2624; Stop 2648
ttgatgagatgaagaagttggtgaa

SEQ ID NO: 340563 - DNA, 25 bp, Artificial
  probe
  misc_feature (1)..(25): SEQ ID NO: 2905; WAN024F5S; Start 1434; Stop 1458
aacaggttacgacatcatcttcttc

SEQ ID NO: 340564 - DNA, 25 bp, Artificial
  probe
  misc_feature (1)..(25): SEQ ID NO: 2905; WAN024F5S; Start 1433; Stop 1457
taacaggttacgacatcatcttctt

SEQ ID NO: 340565 - DNA, 25 bp, Artificial
  probe
  misc_feature (1)..(25): SEQ ID NO: 2905; WAN024F5S; Start 2622; Stop 2646
tattgatgagatgaagaagttggtg

SEQ ID NO: 340566 - DNA, 25 bp, Artificial
  probe
  misc_feature (1)..(25): SEQ ID NO: 2905; WAN024F5S; Start 2621; Stop 2645
gtattgatgagatgaagaagttggt

SEQ ID NO: 340567 - DNA, 25 bp, Artificial
  probe
  misc_feature (1)..(25): SEQ ID NO: 2905; WAN024F5S; Start 1435; Stop 1459
acaggttacgacatcatcttcttct

SEQ ID NO: 340568 - DNA, 25 bp, Artificial
  probe
  misc_feature (1)..(25): SEQ ID NO: 2905; WAN024F5S; Start 1071; Stop 1095
gtctactcaatggttcgtcaagatg

SEQ ID NO: 340569 - DNA, 25 bp, Artificial
  probe
  misc_feature (1)..(25): SEQ ID NO: 2905; WAN024F5S; Start 1070; Stop 1094
tgtctactcaatggttcgtcaagat

SEQ ID NO: 340570 - DNA, 25 bp, Artificial
  probe
  misc_feature (1)..(25): SEQ ID NO: 2905; WAN024F5S; Start 1327; Stop 1351
gtcttggatacttggttcagttctg

SEQ ID NO: 340571 - DNA, 25 bp, Artificial
  probe
  misc_feature (1)..(25): SEQ ID NO: 2905; WAN024F5S; Start 1437; Stop 1461
aggttacgacatcatcttcttctgg

SEQ ID NO: 340572 - DNA, 25 bp, Artificial
  probe
  misc_feature (1)..(25): SEQ ID NO: 2905; WAN024F5S; Start 607; Stop 631
atgaattacatgctggaagatggtt

SEQ ID NO: 340573 - DNA, 25 bp, Artificial
  probe
  misc_feature (1)..(25): SEQ ID NO: 2905; WAN024F5S; Start 1073; Stop 1097
ctactcaatggttcgtcaagatgga

SEQ ID NO: 340574 - DNA, 25 bp, Artificial
  probe
  misc_feature (1)..(25): SEQ ID NO: 2905; WAN024F5S; Start 1069; Stop 1093
ttgtctactcaatggttcgtcaaga

SEQ ID NO: 340575 - DNA, 25 bp, Artificial
  probe
  misc_feature (1)..(25): SEQ ID NO: 2905; WAN024F5S; Start 1436; Stop 1460
caggttacgacatcatcttcttctg

SEQ ID NO: 340576 - DNA, 25 bp, Artificial
  probe
  misc_feature (1)..(25): SEQ ID NO: 2905; WAN024F5S; Start 609; Stop 633
gaattacatgctggaagatggttca

SEQ ID NO: 340577 - DNA, 25 bp, Artificial
  probe
  misc_feature (1)..(25): SEQ ID NO: 2905; WAN024F5S; Start 608; Stop 632
tgaattacatgctggaagatggttc

SEQ ID NO: 340578 - DNA, 25 bp, Artificial
  probe
  misc_feature (1)..(25): SEQ ID NO: 2905; WAN024F5S; Start 1072; Stop 1096
tctactcaatggttcgtcaagatgg

SEQ ID NO: 340579 - DNA, 25 bp, Artificial
  probe
  misc_feature (1)..(25): SEQ ID NO: 2905; WAN024F5S; Start 610; Stop 634
aattacatgctggaagatggttcac

SEQ ID NO: 340580 - DNA, 25 bp, Artificial
  probe
  misc_feature (1)..(25): SEQ ID NO: 2905; WAN024F5S; Start 745; Stop 769
cttccaatcgctaataaactcatcc

SEQ ID NO: 340581 - DNA, 25 bp, Artificial
  probe
  misc_feature (1)..(25): SEQ ID NO: 2905; WAN024F5S; Start 744; Stop 768
ccttccaatcgctaataaactcatc

SEQ ID NO: 340582 - DNA, 25 bp, Artificial
  probe
  misc_feature (1)..(25): SEQ ID NO: 2905; WAN024F5S; Start 743; Stop 767
tccttccaatcgctaataaactcat

SEQ ID NO: 340583 - DNA, 25 bp, Artificial
  probe
  misc_feature (1)..(25): SEQ ID NO: 2905; WAN024F5S; Start 742; Stop 766
atccttccaatcgctaataaactca

SEQ ID NO: 340584 - DNA, 25 bp, Artificial
  probe
  misc_feature (1)..(25): SEQ ID NO: 2905; WAN024F5S; Start 741; Stop 765
catccttccaatcgctaataaactc

SEQ ID NO: 340585 - DNA, 25 bp, Artificial
  probe
  misc_feature (1)..(25): SEQ ID NO: 2905; WAN024F5S; Start 740; Stop 764
tcatccttccaatcgctaataaact

SEQ ID NO: 340586 - DNA, 25 bp, Artificial
  probe
  misc_feature (1)..(25): SEQ ID NO: 2905; WAN024F5S; Start 739; Stop 763
gtcatccttccaatcgctaataaac

SEQ ID NO: 340587 - DNA, 25 bp, Artificial
  probe
  misc_feature (1)..(25): SEQ ID NO: 2905; WAN024F5S; Start 2625; Stop 2649
tgatgagatgaagaagttggtgaaa

SEQ ID NO: 340588 - DNA, 25 bp, Artificial
  probe
  misc_feature (1)..(25): SEQ ID NO: 2905; WAN024F5S; Start 749; Stop 773
caatcgctaataaactcatcccaat

SEQ ID NO: 340589 - DNA, 25 bp, Artificial
  probe
  misc_feature (1)..(25): SEQ ID NO: 2905; WAN024F5S; Start 2619; Stop 2643
acgtattgatgagatgaagaagttg

SEQ ID NO: 340590 - DNA, 25 bp, Artificial
  probe
  misc_feature (1)..(25): SEQ ID NO: 2905; WAN024F5S; Start 2618; Stop 2642
cacgtattgatgagatgaagaagtt

SEQ ID NO: 340591 - DNA, 25 bp, Artificial
  probe
  misc_feature (1)..(25): SEQ ID NO: 2905; WAN024F5S; Start 1163; Stop 1187
gtttcaacgataccttccttcaatg

SEQ ID NO: 340592 - DNA, 25 bp, Artificial
  probe
  misc_feature (1)..(25): SEQ ID NO: 2905; WAN024F5S; Start 750; Stop 774
aatcgctaataaactcatcccaatc

SEQ ID NO: 340593 - DNA, 25 bp, Artificial
  probe
  misc_feature (1)..(25): SEQ ID NO: 2906; WAN024FI9; Start 1001; Stop 1025
gtattgaagactgcggtgttgttac

SEQ ID NO: 340594 - DNA, 25 bp, Artificial
  probe
  misc_feature (1)..(25): SEQ ID NO: 2906; WAN024FI9; Start 972; Stop 996
tatctatatccctggtaaagtcggt

SEQ ID NO: 340595 - DNA, 25 bp, Artificial
  probe
  misc_feature (1)..(25): SEQ ID NO: 2906; WAN024FI9; Start 971; Stop 995
gtatctatatccctggtaaagtcgg

SEQ ID NO: 340596 - DNA, 25 bp, Artificial
  probe
  misc_feature (1)..(25): SEQ ID NO: 2906; WAN024FI9; Start 970; Stop 994
ggtatctatatccctggtaaagtcg

SEQ ID NO: 340597 - DNA, 25 bp, Artificial
  probe
  misc_feature (1)..(25): SEQ ID NO: 2906; WAN024FI9; Start 606; Stop 630
cattccagcagctaataaggttgaa

SEQ ID NO: 340598 - DNA, 25 bp, Artificial
  probe
  misc_feature (1)..(25): SEQ ID NO: 2906; WAN024FI9; Start 73; Stop 97
gtcacaatcaattacctcactggtt

SEQ ID NO: 340599 - DNA, 25 bp, Artificial
  probe
  misc_feature (1)..(25): SEQ ID NO: 2906; WAN024FI9; Start 711; Stop 735
caaaccagaccaattcaagaaagat

SEQ ID NO: 340600 - DNA, 25 bp, Artificial
  probe
  misc_feature (1)..(25): SEQ ID NO: 2906; WAN024FI9; Start 568; Stop 592
atggtcttgactggtgataatgctg

SEQ ID NO: 340601 - DNA, 25 bp, Artificial
  probe
  misc_feature (1)..(25): SEQ ID NO: 2906; WAN024FI9; Start 630; Stop 654
aaatgatgctcttctcctctttgac

SEQ ID NO: 340602 - DNA, 25 bp, Artificial
  probe
  misc_feature (1)..(25): SEQ ID NO: 2906; WAN024FI9; Start 973; Stop 997
atctatatccctggtaaagtcggtg

SEQ ID NO: 340603 - DNA, 25 bp, Artificial
  probe
  misc_feature (1)..(25): SEQ ID NO: 2906; WAN024FI9; Start 986; Stop 1010
gtaaagtcggtgttcgtattgaaga

SEQ ID NO: 340604 - DNA, 25 bp, Artificial
  probe
  misc_feature (1)..(25): SEQ ID NO: 2906; WAN024FI9; Start 735; Stop 759
tatttacaacttgactcttgaagcc

SEQ ID NO: 340605 - DNA, 25 bp, Artificial
  probe
  misc_feature (1)..(25): SEQ ID NO: 2906; WAN024FI9; Start 667; Stop 691
gtcaatggctatgcgtcagatatga

SEQ ID NO: 340606 - DNA, 25 bp, Artificial
  probe
  misc_feature (1)..(25): SEQ ID NO: 2906; WAN024FI9; Start 305; Stop 329
acaatctcatcttgaccaaatacca

SEQ ID NO: 340607 - DNA, 25 bp, Artificial
  probe
  misc_feature (1)..(25): SEQ ID NO: 2906; WAN024FI9; Start 304; Stop 328
gacaatctcatcttgaccaaatacc

SEQ ID NO: 340608 - DNA, 25 bp, Artificial
  probe
  misc_feature (1)..(25): SEQ ID NO: 2906; WAN024FI9; Start 712; Stop 736
aaaccagaccaattcaagaaagata

SEQ ID NO: 340609 - DNA, 25 bp, Artificial
  probe
  misc_feature (1)..(25): SEQ ID NO: 2906; WAN024FI9; Start 299; Stop 323
agtttgacaatctcatcttgaccaa

SEQ ID NO: 340610 - DNA, 25 bp, Artificial
  probe
  misc_feature (1)..(25): SEQ ID NO: 2906; WAN024FI9; Start 976; Stop 1000
tatatccctggtaaagtcggtgttc

SEQ ID NO: 340611 - DNA, 25 bp, Artificial
  probe
  misc_feature (1)..(25): SEQ ID NO: 2906; WAN024FI9; Start 975; Stop 999
ctatatccctggtaaagtcggtgtt

SEQ ID NO: 340612 - DNA, 25 bp, Artificial
  probe
  misc_feature (1)..(25): SEQ ID NO: 2906; WAN024FI9; Start 306; Stop 330
caatctcatcttgaccaaataccat

SEQ ID NO: 340613 - DNA, 25 bp, Artificial
  probe
  misc_feature (1)..(25): SEQ ID NO: 2906; WAN024FI9; Start 303; Stop 327
tgacaatctcatcttgaccaaatac

SEQ ID NO: 340614 - DNA, 25 bp, Artificial
  probe
  misc_feature (1)..(25): SEQ ID NO: 2906; WAN024FI9; Start 714; Stop 738
accagaccaattcaagaaagatatt

SEQ ID NO: 340615 - DNA, 25 bp, Artificial
  probe
  misc_feature (1)..(25): SEQ ID NO: 2906; WAN024FI9; Start 713; Stop 737
aaccagaccaattcaagaaagatat

SEQ ID NO: 340616 - DNA, 25 bp, Artificial
  probe
  misc_feature (1)..(25): SEQ ID NO: 2906; WAN024FI9; Start 736; Stop 760
atttacaacttgactcttgaagccc

SEQ ID NO: 340617 - DNA, 25 bp, Artificial
  probe
  misc_feature (1)..(25): SEQ ID NO: 2906; WAN024FI9; Start 298; Stop 322
gagtttgacaatctcatcttgacca

SEQ ID NO: 340618 - DNA, 25 bp, Artificial
  probe
  misc_feature (1)..(25): SEQ ID NO: 2906; WAN024FI9; Start 260; Stop 284
atgctcttccacaacttgacttcaa

SEQ ID NO: 340619 - DNA, 25 bp, Artificial
  probe
  misc_feature (1)..(25): SEQ ID NO: 2906; WAN024FI9; Start 491; Stop 515
ataagactgagacagatatcatcgc

SEQ ID NO: 340620 - DNA, 25 bp, Artificial
  probe
  misc_feature (1)..(25): SEQ ID NO: 2906; WAN024FI9; Start 567; Stop 591
catggtcttgactggtgataatgct

SEQ ID NO: 340621 - DNA, 25 bp, Artificial
  probe
  misc_feature (1)..(25): SEQ ID NO: 2906; WAN024FI9; Start 1000; Stop 1024
cgtattgaagactgcggtgttgtta

SEQ ID NO: 340622 - DNA, 25 bp, Artificial
  probe
  misc_feature (1)..(25): SEQ ID NO: 2906; WAN024FI9; Start 985; Stop 1009
ggtaaagtcggtgttcgtattgaag

SEQ ID NO: 340623 - DNA, 25 bp, Artificial
  probe
  misc_feature (1)..(25): SEQ ID NO: 2906; WAN024FI9; Start 908; Stop 932
catctatcatggaaggaaacgacat

SEQ ID NO: 340624 - DNA, 25 bp, Artificial
  probe
  misc_feature (1)..(25): SEQ ID NO: 2906; WAN024FI9; Start 257; Stop 281
aacatgctcttccacaacttgactt

SEQ ID NO: 340625 - DNA, 25 bp, Artificial
  probe
  misc_feature (1)..(25): SEQ ID NO: 2906; WAN024FI9; Start 302; Stop 326
ttgacaatctcatcttgaccaaata

SEQ ID NO: 340626 - DNA, 25 bp, Artificial
  probe
  misc_feature (1)..(25): SEQ ID NO: 2907; WAN024GO6; Start 816; Stop 840
tgatgatgtccgtgtcaataacaag

SEQ ID NO: 340627 - DNA, 25 bp, Artificial
  probe
  misc_feature (1)..(25): SEQ ID NO: 2907; WAN024GO6; Start 926; Stop 950
agctcgtactcaactatctcttcaa

SEQ ID NO: 340628 - DNA, 25 bp, Artificial
  probe
  misc_feature (1)..(25): SEQ ID NO: 2907; WAN024GO6; Start 817; Stop 841
gatgatgtccgtgtcaataacaagg

SEQ ID NO: 340629 - DNA, 25 bp, Artificial
  probe
  misc_feature (1)..(25): SEQ ID NO: 2907; WAN024GO6; Start 2064; Stop 2088
tgaaagaagatgatgtcctccaatc

SEQ ID NO: 340630 - DNA, 25 bp, Artificial
  probe
  misc_feature (1)..(25): SEQ ID NO: 2907; WAN024GO6; Start 828; Stop 852
tgtcaataacaaggtggcaggtatt

SEQ ID NO: 340631 - DNA, 25 bp, Artificial
  probe
  misc_feature (1)..(25): SEQ ID NO: 2907; WAN024GO6; Start 818; Stop 842
atgatgtccgtgtcaataacaaggt

SEQ ID NO: 340632 - DNA, 25 bp, Artificial
  probe
  misc_feature (1)..(25): SEQ ID NO: 2907; WAN024GO6; Start 2268; Stop 2292
ttgtaggtgatctcttcagtacaga

SEQ ID NO: 340633 - DNA, 25 bp, Artificial
  probe
  misc_feature (1)..(25): SEQ ID NO: 2907; WAN024GO6; Start 927; Stop 951
gctcgtactcaactatctcttcaaa

SEQ ID NO: 340634 - DNA, 25 bp, Artificial
  probe
  misc_feature (1)..(25): SEQ ID NO: 2907; WAN024GO6; Start 1945; Stop 1969
ggctccgattaaactagatgatgtt

SEQ ID NO: 340635 - DNA, 25 bp, Artificial
  probe
  misc_feature (1)..(25): SEQ ID NO: 2907; WAN024GO6; Start 1943; Stop 1967
gtggctccgattaaactagatgatg

SEQ ID NO: 340636 - DNA, 25 bp, Artificial
  probe
  misc_feature (1)..(25): SEQ ID NO: 2907; WAN024GO6; Start 967; Stop 991
atcaactacaactttaacatggtgg

SEQ ID NO: 340637 - DNA, 25 bp, Artificial
  probe
  misc_feature (1)..(25): SEQ ID NO: 2907; WAN024GO6; Start 1743; Stop 1767
tcacaaactttgaaacgaatgaaga

SEQ ID NO: 340638 - DNA, 25 bp, Artificial
  probe
  misc_feature (1)..(25): SEQ ID NO: 2907; WAN024GO6; Start 1944; Stop 1968
tggctccgattaaactagatgatgt

SEQ ID NO: 340639 - DNA, 25 bp, Artificial
  probe
  misc_feature (1)..(25): SEQ ID NO: 2907; WAN024GO6; Start 1744; Stop 1768
cacaaactttgaaacgaatgaagaa

SEQ ID NO: 340640 - DNA, 25 bp, Artificial
  probe
  misc_feature (1)..(25): SEQ ID NO: 2907; WAN024GO6; Start 1738; Stop 1762
aaccatcacaaactttgaaacgaat

SEQ ID NO: 340641 - DNA, 25 bp, Artificial
  probe
  misc_feature (1)..(25): SEQ ID NO: 2907; WAN024GO6; Start 1737; Stop 1761
aaaccatcacaaactttgaaacgaa

SEQ ID NO: 340642 - DNA, 25 bp, Artificial
  probe
  misc_feature (1)..(25): SEQ ID NO: 2907; WAN024GO6; Start 1741; Stop 1765
catcacaaactttgaaacgaatgaa

SEQ ID NO: 340643 - DNA, 25 bp, Artificial
  probe
  misc_feature (1)..(25): SEQ ID NO: 2907; WAN024GO6; Start 1740; Stop 1764
ccatcacaaactttgaaacgaatga

SEQ ID NO: 340644 - DNA, 25 bp, Artificial
  probe
  misc_feature (1)..(25): SEQ ID NO: 2907; WAN024GO6; Start 827; Stop 851
gtgtcaataacaaggtggcaggtat

SEQ ID NO: 340645 - DNA, 25 bp, Artificial
  probe
  misc_feature (1)..(25): SEQ ID NO: 2907; WAN024GO6; Start 1742; Stop 1766
atcacaaactttgaaacgaatgaag

SEQ ID NO: 340646 - DNA, 25 bp, Artificial
  probe
  misc_feature (1)..(25): SEQ ID NO: 2907; WAN024GO6; Start 1739; Stop 1763
accatcacaaactttgaaacgaatg

SEQ ID NO: 340647 - DNA, 25 bp, Artificial
  probe
  misc_feature (1)..(25): SEQ ID NO: 2907; WAN024GO6; Start 1942; Stop 1966
agtggctccgattaaactagatgat

SEQ ID NO: 340648 - DNA, 25 bp, Artificial
  probe
  misc_feature (1)..(25): SEQ ID NO: 2907; WAN024GO6; Start 1646; Stop 1670
ttgatgttcacaagtcttggaaatg

SEQ ID NO: 340649 - DNA, 25 bp, Artificial
  probe
  misc_feature (1)..(25): SEQ ID NO: 2907; WAN024GO6; Start 1745; Stop 1769
acaaactttgaaacgaatgaagaaa

SEQ ID NO: 340650 - DNA, 25 bp, Artificial
  probe
  misc_feature (1)..(25): SEQ ID NO: 2907; WAN024GO6; Start 815; Stop 839
ttgatgatgtccgtgtcaataacaa

SEQ ID NO: 340651 - DNA, 25 bp, Artificial
  probe
  misc_feature (1)..(25): SEQ ID NO: 2907; WAN024GO6; Start 928; Stop 952
ctcgtactcaactatctcttcaaat

SEQ ID NO: 340652 - DNA, 25 bp, Artificial
  probe
  misc_feature (1)..(25): SEQ ID NO: 2907; WAN024GO6; Start 819; Stop 843
tgatgtccgtgtcaataacaaggtg

SEQ ID NO: 340653 - DNA, 25 bp, Artificial
  probe
  misc_feature (1)..(25): SEQ ID NO: 2907; WAN024GO6; Start 1654; Stop 1678
cacaagtcttggaaatgtcatctac

SEQ ID NO: 340654 - DNA, 25 bp, Artificial
  probe
  misc_feature (1)..(25): SEQ ID NO: 2907; WAN024GO6; Start 1653; Stop 1677
tcacaagtcttggaaatgtcatcta

SEQ ID NO: 340655 - DNA, 25 bp, Artificial
  probe
  misc_feature (1)..(25): SEQ ID NO: 2907; WAN024GO6; Start 968; Stop 992
tcaactacaactttaacatggtggc

SEQ ID NO: 340656 - DNA, 25 bp, Artificial
  probe
  misc_feature (1)..(25): SEQ ID NO: 2907; WAN024GO6; Start 1652; Stop 1676
ttcacaagtcttggaaatgtcatct

SEQ ID NO: 340657 - DNA, 25 bp, Artificial
  probe
  misc_feature (1)..(25): SEQ ID NO: 2907; WAN024GO6; Start 1651; Stop 1675
gttcacaagtcttggaaatgtcatc

SEQ ID NO: 340658 - DNA, 25 bp, Artificial
  probe
  misc_feature (1)..(25): SEQ ID NO: 2907; WAN024GO6; Start 1648; Stop 1672
gatgttcacaagtcttggaaatgtc

SEQ ID NO: 340659 - DNA, 25 bp, Artificial
  probe
  misc_feature (1)..(25): SEQ ID NO: 2908; WAN024G9M; Start 181; Stop 205
tatatcatcctagcttctatcatgc

SEQ ID NO: 340660 - DNA, 25 bp, Artificial
  probe
  misc_feature (1)..(25): SEQ ID NO: 2908; WAN024G9M; Start 7; Stop 31
aacctagcagaaagaggaaatatca

SEQ ID NO: 340661 - DNA, 25 bp, Artificial
  probe
  misc_feature (1)..(25): SEQ ID NO: 2908; WAN024G9M; Start 8; Stop 32
acctagcagaaagaggaaatatcat

SEQ ID NO: 340662 - DNA, 25 bp, Artificial
  probe
  misc_feature (1)..(25): SEQ ID NO: 2908; WAN024G9M; Start 1; Stop 25
atgtctaacctagcagaaagaggaa

SEQ ID NO: 340663 - DNA, 25 bp, Artificial
  probe
  misc_feature (1)..(25): SEQ ID NO: 2908; WAN024G9M; Start 213; Stop 237
ggaagaaatcgaagcagaaatgtac

SEQ ID NO: 340664 - DNA, 25 bp, Artificial
  probe
  misc_feature (1)..(25): SEQ ID NO: 2908; WAN024G9M; Start 212; Stop 236
aggaagaaatcgaagcagaaatgta

SEQ ID NO: 340665 - DNA, 25 bp, Artificial
  probe
  misc_feature (1)..(25): SEQ ID NO: 2908; WAN024G9M; Start 2; Stop 26
tgtctaacctagcagaaagaggaaa

SEQ ID NO: 340666 - DNA, 25 bp, Artificial
  probe
  misc_feature (1)..(25): SEQ ID NO: 2908; WAN024G9M; Start 214; Stop 238
gaagaaatcgaagcagaaatgtacg

SEQ ID NO: 340667 - DNA, 25 bp, Artificial
  probe
  misc_feature (1)..(25): SEQ ID NO: 2908; WAN024G9M; Start 211; Stop 235
aaggaagaaatcgaagcagaaatgt

SEQ ID NO: 340668 - DNA, 25 bp, Artificial
  probe
  misc_feature (1)..(25): SEQ ID NO: 2908; WAN024G9M; Start 9; Stop 33
cctagcagaaagaggaaatatcatg

SEQ ID NO: 340669 - DNA, 25 bp, Artificial
  probe
  misc_feature (1)..(25): SEQ ID NO: 2908; WAN024G9M; Start 217; Stop 241
gaaatcgaagcagaaatgtacggaa

SEQ ID NO: 340670 - DNA, 25 bp, Artificial
  probe
  misc_feature (1)..(25): SEQ ID NO: 2908; WAN024G9M; Start 215; Stop 239
aagaaatcgaagcagaaatgtacgg

SEQ ID NO: 340671 - DNA, 25 bp, Artificial
  probe
  misc_feature (1)..(25): SEQ ID NO: 2908; WAN024G9M; Start 218; Stop 242
aaatcgaagcagaaatgtacggaac

SEQ ID NO: 340672 - DNA, 25 bp, Artificial
  probe
  misc_feature (1)..(25): SEQ ID NO: 2908; WAN024G9M; Start 216; Stop 240
agaaatcgaagcagaaatgtacgga

SEQ ID NO: 340673 - DNA, 25 bp, Artificial
  probe
  misc_feature (1)..(25): SEQ ID NO: 2908; WAN024G9M; Start 13; Stop 37
gcagaaagaggaaatatcatgaaca

SEQ ID NO: 340674 - DNA, 25 bp, Artificial
  probe
  misc_feature (1)..(25): SEQ ID NO: 2908; WAN024G9M; Start 12; Stop 36
agcagaaagaggaaatatcatgaac

SEQ ID NO: 340675 - DNA, 25 bp, Artificial
  probe
  misc_feature (1)..(25): SEQ ID NO: 2908; WAN024G9M; Start 180; Stop 204
ctatatcatcctagcttctatcatg

SEQ ID NO: 340676 - DNA, 25 bp, Artificial
  probe
  misc_feature (1)..(25): SEQ ID NO: 2908; WAN024G9M; Start 179; Stop 203
tctatatcatcctagcttctatcat

SEQ ID NO: 340677 - DNA, 25 bp, Artificial
  probe
  misc_feature (1)..(25): SEQ ID NO: 2908; WAN024G9M; Start 178; Stop 202
atctatatcatcctagcttctatca

SEQ ID NO: 340678 - DNA, 25 bp, Artificial
  probe
  misc_feature (1)..(25): SEQ ID NO: 2908; WAN024G9M; Start 219; Stop 243
aatcgaagcagaaatgtacggaaca

SEQ ID NO: 340679 - DNA, 25 bp, Artificial
  probe
  misc_feature (1)..(25): SEQ ID NO: 2908; WAN024G9M; Start 10; Stop 34
ctagcagaaagaggaaatatcatga

SEQ ID NO: 340680 - DNA, 25 bp, Artificial
  probe
  misc_feature (1)..(25): SEQ ID NO: 2908; WAN024G9M; Start 15; Stop 39
agaaagaggaaatatcatgaacagt

SEQ ID NO: 340681 - DNA, 25 bp, Artificial
  probe
  misc_feature (1)..(25): SEQ ID NO: 2908; WAN024G9M; Start 14; Stop 38
cagaaagaggaaatatcatgaacag

SEQ ID NO: 340682 - DNA, 25 bp, Artificial
  probe
  misc_feature (1)..(25): SEQ ID NO: 2908; WAN024G9M; Start 11; Stop 35
tagcagaaagaggaaatatcatgaa

SEQ ID NO: 340683 - DNA, 25 bp, Artificial
  probe
  misc_feature (1)..(25): SEQ ID NO: 2908; WAN024G9M; Start 220; Stop 244
atcgaagcagaaatgtacggaacag

SEQ ID NO: 340684 - DNA, 25 bp, Artificial
  probe
  misc_feature (1)..(25): SEQ ID NO: 2908; WAN024G9M; Start 16; Stop 40
gaaagaggaaatatcatgaacagta

SEQ ID NO: 340685 - DNA, 25 bp, Artificial
  probe
  misc_feature (1)..(25): SEQ ID NO: 2908; WAN024G9M; Start 172; Stop 196
gtgattatctatatcatcctagctt

SEQ ID NO: 340686 - DNA, 25 bp, Artificial
  probe
  misc_feature (1)..(25): SEQ ID NO: 2908; WAN024G9M; Start 17; Stop 41
aaagaggaaatatcatgaacagtaa

SEQ ID NO: 340687 - DNA, 25 bp, Artificial
  probe
  misc_feature (1)..(25): SEQ ID NO: 2908; WAN024G9M; Start 173; Stop 197
tgattatctatatcatcctagcttc

SEQ ID NO: 340688 - DNA, 25 bp, Artificial
  probe
  misc_feature (1)..(25): SEQ ID NO: 2908; WAN024G9M; Start 221; Stop 245
tcgaagcagaaatgtacggaacagg

SEQ ID NO: 340689 - DNA, 25 bp, Artificial
  probe
  misc_feature (1)..(25): SEQ ID NO: 2909; WAN024F5P; Start 789; Stop 813
ctatatcgctcgtatccgtaacttg

SEQ ID NO: 340690 - DNA, 25 bp, Artificial
  probe
  misc_feature (1)..(25): SEQ ID NO: 2909; WAN024F5P; Start 790; Stop 814
tatatcgctcgtatccgtaacttgg

SEQ ID NO: 340691 - DNA, 25 bp, Artificial
  probe
  misc_feature (1)..(25): SEQ ID NO: 2909; WAN024F5P; Start 788; Stop 812
gctatatcgctcgtatccgtaactt

SEQ ID NO: 340692 - DNA, 25 bp, Artificial
  probe
  misc_feature (1)..(25): SEQ ID NO: 2909; WAN024F5P; Start 727; Stop 751
tgttcacatacctttaatctgcttg

SEQ ID NO: 340693 - DNA, 25 bp, Artificial
  probe
  misc_feature (1)..(25): SEQ ID NO: 2909; WAN024F5P; Start 573; Stop 597
aatctttatccagcctgagtatgag

SEQ ID NO: 340694 - DNA, 25 bp, Artificial
  probe
  misc_feature (1)..(25): SEQ ID NO: 2909; WAN024F5P; Start 569; Stop 593
gagaaatctttatccagcctgagta

SEQ ID NO: 340695 - DNA, 25 bp, Artificial
  probe
  misc_feature (1)..(25): SEQ ID NO: 2909; WAN024F5P; Start 72; Stop 96
gcttatgcaggcttatgataatgaa

SEQ ID NO: 340696 - DNA, 25 bp, Artificial
  probe
  misc_feature (1)..(25): SEQ ID NO: 2909; WAN024F5P; Start 572; Stop 596
aaatctttatccagcctgagtatga

SEQ ID NO: 340697 - DNA, 25 bp, Artificial
  probe
  misc_feature (1)..(25): SEQ ID NO: 2909; WAN024F5P; Start 571; Stop 595
gaaatctttatccagcctgagtatg

SEQ ID NO: 340698 - DNA, 25 bp, Artificial
  probe
  misc_feature (1)..(25): SEQ ID NO: 2909; WAN024F5P; Start 570; Stop 594
agaaatctttatccagcctgagtat

SEQ ID NO: 340699 - DNA, 25 bp, Artificial
  probe
  misc_feature (1)..(25): SEQ ID NO: 2909; WAN024F5P; Start 256; Stop 280
aagccttctccatcaaatatccaag

SEQ ID NO: 340700 - DNA, 25 bp, Artificial
  probe
  misc_feature (1)..(25): SEQ ID NO: 2909; WAN024F5P; Start 420; Stop 444
cactcagttcacttatttccaacaa

SEQ ID NO: 340701 - DNA, 25 bp, Artificial
  probe
  misc_feature (1)..(25): SEQ ID NO: 2909; WAN024F5P; Start 419; Stop 443
tcactcagttcacttatttccaaca

SEQ ID NO: 340702 - DNA, 25 bp, Artificial
  probe
  misc_feature (1)..(25): SEQ ID NO: 2909; WAN024F5P; Start 421; Stop 445
actcagttcacttatttccaacaag

SEQ ID NO: 340703 - DNA, 25 bp, Artificial
  probe
  misc_feature (1)..(25): SEQ ID NO: 2909; WAN024F5P; Start 418; Stop 442
atcactcagttcacttatttccaac

SEQ ID NO: 340704 - DNA, 25 bp, Artificial
  probe
  misc_feature (1)..(25): SEQ ID NO: 2909; WAN024F5P; Start 410; Stop 434
gaatggaaatcactcagttcactta

SEQ ID NO: 340705 - DNA, 25 bp, Artificial
  probe
  misc_feature (1)..(25): SEQ ID NO: 2909; WAN024F5P; Start 705; Stop 729
tgcctatgactatgttctcaaatgt

SEQ ID NO: 340706 - DNA, 25 bp, Artificial
  probe
  misc_feature (1)..(25): SEQ ID NO: 2909; WAN024F5P; Start 279; Stop 303
agaactttaccttgagtctttggaa

SEQ ID NO: 340707 - DNA, 25 bp, Artificial
  probe
  misc_feature (1)..(25): SEQ ID NO: 2909; WAN024F5P; Start 703; Stop 727
cctgcctatgactatgttctcaaat

SEQ ID NO: 340708 - DNA, 25 bp, Artificial
  probe
  misc_feature (1)..(25): SEQ ID NO: 2909; WAN024F5P; Start 417; Stop 441
aatcactcagttcacttatttccaa

SEQ ID NO: 340709 - DNA, 25 bp, Artificial
  probe
  misc_feature (1)..(25): SEQ ID NO: 2909; WAN024F5P; Start 704; Stop 728
ctgcctatgactatgttctcaaatg

SEQ ID NO: 340710 - DNA, 25 bp, Artificial
  probe
  misc_feature (1)..(25): SEQ ID NO: 2909; WAN024F5P; Start 409; Stop 433
ggaatggaaatcactcagttcactt

SEQ ID NO: 340711 - DNA, 25 bp, Artificial
  probe
  misc_feature (1)..(25): SEQ ID NO: 2909; WAN024F5P; Start 280; Stop 304
gaactttaccttgagtctttggaaa

SEQ ID NO: 340712 - DNA, 25 bp, Artificial
  probe
  misc_feature (1)..(25): SEQ ID NO: 2909; WAN024F5P; Start 729; Stop 753
ttcacatacctttaatctgcttgac

SEQ ID NO: 340713 - DNA, 25 bp, Artificial
  probe
  misc_feature (1)..(25): SEQ ID NO: 2909; WAN024F5P; Start 728; Stop 752
gttcacatacctttaatctgcttga

SEQ ID NO: 340714 - DNA, 25 bp, Artificial
  probe
  misc_feature (1)..(25): SEQ ID NO: 2909; WAN024F5P; Start 109; Stop 133
acaatgagtccttacactttccttc

SEQ ID NO: 340715 - DNA, 25 bp, Artificial
  probe
  misc_feature (1)..(25): SEQ ID NO: 2909; WAN024F5P; Start 706; Stop 730
gcctatgactatgttctcaaatgtt

SEQ ID NO: 340716 - DNA, 25 bp, Artificial
  probe
  misc_feature (1)..(25): SEQ ID NO: 2909; WAN024F5P; Start 730; Stop 754
tcacatacctttaatctgcttgacg

SEQ ID NO: 340717 - DNA, 25 bp, Artificial
  probe
  misc_feature (1)..(25): SEQ ID NO: 2909; WAN024F5P; Start 257; Stop 281
agccttctccatcaaatatccaaga

SEQ ID NO: 340718 - DNA, 25 bp, Artificial
  probe
  misc_feature (1)..(25): SEQ ID NO: 2909; WAN024F5P; Start 412; Stop 436
atggaaatcactcagttcacttatt

SEQ ID NO: 340719 - DNA, 25 bp, Artificial
  probe
  misc_feature (1)..(25): SEQ ID NO: 2909; WAN024F5P; Start 411; Stop 435
aatggaaatcactcagttcacttat

SEQ ID NO: 340720 - DNA, 25 bp, Artificial
  probe
  misc_feature (1)..(25): SEQ ID NO: 2909; WAN024F5P; Start 255; Stop 279
gaagccttctccatcaaatatccaa

SEQ ID NO: 340721 - DNA, 25 bp, Artificial
  probe
  misc_feature (1)..(25): SEQ ID NO: 2909; WAN024F5P; Start 574; Stop 598
atctttatccagcctgagtatgagc

SEQ ID NO: 340722 - DNA, 25 bp, Artificial
  probe
  misc_feature (1)..(25): SEQ ID NO: 2910; WAN024FQG; Start 19; Stop 43
acgattactgtgccaacctataata

SEQ ID NO: 340723 - DNA, 25 bp, Artificial
  probe
  misc_feature (1)..(25): SEQ ID NO: 2910; WAN024FQG; Start 18; Stop 42
gacgattactgtgccaacctataat

SEQ ID NO: 340724 - DNA, 25 bp, Artificial
  probe
  misc_feature (1)..(25): SEQ ID NO: 2910; WAN024FQG; Start 20; Stop 44
cgattactgtgccaacctataatat

SEQ ID NO: 340725 - DNA, 25 bp, Artificial
  probe
  misc_feature (1)..(25): SEQ ID NO: 2910; WAN024FQG; Start 17; Stop 41
tgacgattactgtgccaacctataa

SEQ ID NO: 340726 - DNA, 25 bp, Artificial
  probe
  misc_feature (1)..(25): SEQ ID NO: 2910; WAN024FQG; Start 16; Stop 40
ctgacgattactgtgccaacctata

SEQ ID NO: 340727 - DNA, 25 bp, Artificial
  probe
  misc_feature (1)..(25): SEQ ID NO: 2910; WAN024FQG; Start 803; Stop 827
tgtatgttatgaatgaggaacttga

SEQ ID NO: 340728 - DNA, 25 bp, Artificial
  probe
  misc_feature (1)..(25): SEQ ID NO: 2910; WAN024FQG; Start 440; Stop 464
aagagacaagaggtattcctagcaa

SEQ ID NO: 340729 - DNA, 25 bp, Artificial
  probe
  misc_feature (1)..(25): SEQ ID NO: 2910; WAN024FQG; Start 437; Stop 461
atcaagagacaagaggtattcctag

SEQ ID NO: 340730 - DNA, 25 bp, Artificial
  probe
  misc_feature (1)..(25): SEQ ID NO: 2910; WAN024FQG; Start 503; Stop 527
tcttgaaggataatgctattacgat

SEQ ID NO: 340731 - DNA, 25 bp, Artificial
  probe
  misc_feature (1)..(25): SEQ ID NO: 2910; WAN024FQG; Start 502; Stop 526
atcttgaaggataatgctattacga

SEQ ID NO: 340732 - DNA, 25 bp, Artificial
  probe
  misc_feature (1)..(25): SEQ ID NO: 2910; WAN024FQG; Start 436; Stop 460
aatcaagagacaagaggtattccta

SEQ ID NO: 340733 - DNA, 25 bp, Artificial
  probe
  misc_feature (1)..(25): SEQ ID NO: 2910; WAN024FQG; Start 441; Stop 465
agagacaagaggtattcctagcaag

SEQ ID NO: 340734 - DNA, 25 bp, Artificial
  probe
  misc_feature (1)..(25): SEQ ID NO: 2910; WAN024FQG; Start 438; Stop 462
tcaagagacaagaggtattcctagc

SEQ ID NO: 340735 - DNA, 25 bp, Artificial
  probe
  misc_feature (1)..(25): SEQ ID NO: 2910; WAN024FQG; Start 442; Stop 466
gagacaagaggtattcctagcaagt

SEQ ID NO: 340736 - DNA, 25 bp, Artificial
  probe
  misc_feature (1)..(25): SEQ ID NO: 2910; WAN024FQG; Start 439; Stop 463
caagagacaagaggtattcctagca

SEQ ID NO: 340737 - DNA, 25 bp, Artificial
  probe
  misc_feature (1)..(25): SEQ ID NO: 2910; WAN024FQG; Start 802; Stop 826
ttgtatgttatgaatgaggaacttg

SEQ ID NO: 340738 - DNA, 25 bp, Artificial
  probe
  misc_feature (1)..(25): SEQ ID NO: 2910; WAN024FQG; Start 432; Stop 456
tccaaatcaagagacaagaggtatt

SEQ ID NO: 340739 - DNA, 25 bp, Artificial
  probe
  misc_feature (1)..(25): SEQ ID NO: 2910; WAN024FQG; Start 431; Stop 455
ttccaaatcaagagacaagaggtat

SEQ ID NO: 340740 - DNA, 25 bp, Artificial
  probe
  misc_feature (1)..(25): SEQ ID NO: 2910; WAN024FQG; Start 430; Stop 454
attccaaatcaagagacaagaggta

SEQ ID NO: 340741 - DNA, 25 bp, Artificial
  probe
  misc_feature (1)..(25): SEQ ID NO: 2910; WAN024FQG; Start 434; Stop 458
caaatcaagagacaagaggtattcc

SEQ ID NO: 340742 - DNA, 25 bp, Artificial
  probe
  misc_feature (1)..(25): SEQ ID NO: 2910; WAN024FQG; Start 433; Stop 457
ccaaatcaagagacaagaggtattc

SEQ ID NO: 340743 - DNA, 25 bp, Artificial
  probe
  misc_feature (1)..(25): SEQ ID NO: 2910; WAN024FQG; Start 162; Stop 186
taaggatttaatggaaggtagcact

SEQ ID NO: 340744 - DNA, 25 bp, Artificial
  probe
  misc_feature (1)..(25): SEQ ID NO: 2910; WAN024FQG; Start 429; Stop 453
aattccaaatcaagagacaagaggt

SEQ ID NO: 340745 - DNA, 25 bp, Artificial
  probe
  misc_feature (1)..(25): SEQ ID NO: 2910; WAN024FQG; Start 453; Stop 477
tattcctagcaagtggacacctatg

SEQ ID NO: 340746 - DNA, 25 bp, Artificial
  probe
  misc_feature (1)..(25): SEQ ID NO: 2910; WAN024FQG; Start 452; Stop 476
gtattcctagcaagtggacacctat

SEQ ID NO: 340747 - DNA, 25 bp, Artificial
  probe
  misc_feature (1)..(25): SEQ ID NO: 2910; WAN024FQG; Start 443; Stop 467
agacaagaggtattcctagcaagtg

SEQ ID NO: 340748 - DNA, 25 bp, Artificial
  probe
  misc_feature (1)..(25): SEQ ID NO: 2910; WAN024FQG; Start 164; Stop 188
aggatttaatggaaggtagcacttt

SEQ ID NO: 340749 - DNA, 25 bp, Artificial
  probe
  misc_feature (1)..(25): SEQ ID NO: 2910; WAN024FQG; Start 163; Stop 187
aaggatttaatggaaggtagcactt

SEQ ID NO: 340750 - DNA, 25 bp, Artificial
  probe
  misc_feature (1)..(25): SEQ ID NO: 2910; WAN024FQG; Start 686; Stop 710
atgagagagtaacgaaacgaatctt

SEQ ID NO: 340751 - DNA, 25 bp, Artificial
  probe
  misc_feature (1)..(25): SEQ ID NO: 2910; WAN024FQG; Start 509; Stop 533
aggataatgctattacgattagtga

SEQ ID NO: 340752 - DNA, 25 bp, Artificial
  probe
  misc_feature (1)..(25): SEQ ID NO: 2910; WAN024FQG; Start 687; Stop 711
tgagagagtaacgaaacgaatctta

SEQ ID NO: 340753 - DNA, 25 bp, Artificial
  probe
  misc_feature (1)..(25): SEQ ID NO: 2910; WAN024FQG; Start 690; Stop 714
gagagtaacgaaacgaatcttagac

SEQ ID NO: 340754 - DNA, 25 bp, Artificial
  probe
  misc_feature (1)..(25): SEQ ID NO: 2910; WAN024FQG; Start 689; Stop 713
agagagtaacgaaacgaatcttaga

SEQ ID NO: 340755 - DNA, 25 bp, Artificial
  probe
  misc_feature (1)..(25): SEQ ID NO: 2911; WAN024EUT; Start 289; Stop 313
cctttggtgacctatctatttgttg

SEQ ID NO: 340756 - DNA, 25 bp, Artificial
  probe
  misc_feature (1)..(25): SEQ ID NO: 2911; WAN024EUT; Start 292; Stop 316
ttggtgacctatctatttgttgttg

SEQ ID NO: 340757 - DNA, 25 bp, Artificial
  probe
  misc_feature (1)..(25): SEQ ID NO: 2911; WAN024EUT; Start 290; Stop 314
ctttggtgacctatctatttgttgt

SEQ ID NO: 340758 - DNA, 25 bp, Artificial
  probe
  misc_feature (1)..(25): SEQ ID NO: 2911; WAN024EUT; Start 288; Stop 312
gcctttggtgacctatctatttgtt

SEQ ID NO: 340759 - DNA, 25 bp, Artificial
  probe
  misc_feature (1)..(25): SEQ ID NO: 2911; WAN024EUT; Start 293; Stop 317
tggtgacctatctatttgttgttgc

SEQ ID NO: 340760 - DNA, 25 bp, Artificial
  probe
  misc_feature (1)..(25): SEQ ID NO: 2911; WAN024EUT; Start 291; Stop 315
tttggtgacctatctatttgttgtt

SEQ ID NO: 340761 - DNA, 25 bp, Artificial
  probe
  misc_feature (1)..(25): SEQ ID NO: 2911; WAN024EUT; Start 591; Stop 615
tttgctcaaaggttggaagttagtt

SEQ ID NO: 340762 - DNA, 25 bp, Artificial
  probe
  misc_feature (1)..(25): SEQ ID NO: 2911; WAN024EUT; Start 592; Stop 616
ttgctcaaaggttggaagttagttg

SEQ ID NO: 340763 - DNA, 25 bp, Artificial
  probe
  misc_feature (1)..(25): SEQ ID NO: 2911; WAN024EUT; Start 294; Stop 318
ggtgacctatctatttgttgttgca

SEQ ID NO: 340764 - DNA, 25 bp, Artificial
  probe
  misc_feature (1)..(25): SEQ ID NO: 2911; WAN024EUT; Start 287; Stop 311
cgcctttggtgacctatctatttgt

SEQ ID NO: 340765 - DNA, 25 bp, Artificial
  probe
  misc_feature (1)..(25): SEQ ID NO: 2911; WAN024EUT; Start 806; Stop 830
tatctgaaaagttccttgctgctaa

SEQ ID NO: 340766 - DNA, 25 bp, Artificial
  probe
  misc_feature (1)..(25): SEQ ID NO: 2911; WAN024EUT; Start 805; Stop 829
ctatctgaaaagttccttgctgcta

SEQ ID NO: 340767 - DNA, 25 bp, Artificial
  probe
  misc_feature (1)..(25): SEQ ID NO: 2911; WAN024EUT; Start 809; Stop 833
ctgaaaagttccttgctgctaaatg

SEQ ID NO: 340768 - DNA, 25 bp, Artificial
  probe
  misc_feature (1)..(25): SEQ ID NO: 2911; WAN024EUT; Start 808; Stop 832
tctgaaaagttccttgctgctaaat

SEQ ID NO: 340769 - DNA, 25 bp, Artificial
  probe
  misc_feature (1)..(25): SEQ ID NO: 2911; WAN024EUT; Start 807; Stop 831
atctgaaaagttccttgctgctaaa

SEQ ID NO: 340770 - DNA, 25 bp, Artificial
  probe
  misc_feature (1)..(25): SEQ ID NO: 2911; WAN024EUT; Start 594; Stop 618
gctcaaaggttggaagttagttgct

SEQ ID NO: 340771 - DNA, 25 bp, Artificial
  probe
  misc_feature (1)..(25): SEQ ID NO: 2911; WAN024EUT; Start 589; Stop 613
attttgctcaaaggttggaagttag

SEQ ID NO: 340772 - DNA, 25 bp, Artificial
  probe
  misc_feature (1)..(25): SEQ ID NO: 2911; WAN024EUT; Start 588; Stop 612
aattttgctcaaaggttggaagtta

SEQ ID NO: 340773 - DNA, 25 bp, Artificial
  probe
  misc_feature (1)..(25): SEQ ID NO: 2911; WAN024EUT; Start 590; Stop 614
ttttgctcaaaggttggaagttagt

SEQ ID NO: 340774 - DNA, 25 bp, Artificial
  probe
  misc_feature (1)..(25): SEQ ID NO: 2911; WAN024EUT; Start 835; Stop 859
gaaccccaattattcaccccaaatc

SEQ ID NO: 340775 - DNA, 25 bp, Artificial
  probe
  misc_feature (1)..(25): SEQ ID NO: 2911; WAN024EUT; Start 810; Stop 834
tgaaaagttccttgctgctaaatgg

SEQ ID NO: 340776 - DNA, 25 bp, Artificial
  probe
  misc_feature (1)..(25): SEQ ID NO: 2911; WAN024EUT; Start 800; Stop 824
ttaggctatctgaaaagttccttgc

SEQ ID NO: 340777 - DNA, 25 bp, Artificial
  probe
  misc_feature (1)..(25): SEQ ID NO: 2911; WAN024EUT; Start 593; Stop 617
tgctcaaaggttggaagttagttgc

SEQ ID NO: 340778 - DNA, 25 bp, Artificial
  probe
  misc_feature (1)..(25): SEQ ID NO: 2911; WAN024EUT; Start 801; Stop 825
taggctatctgaaaagttccttgct

SEQ ID NO: 340779 - DNA, 25 bp, Artificial
  probe
  misc_feature (1)..(25): SEQ ID NO: 2911; WAN024EUT; Start 811; Stop 835
gaaaagttccttgctgctaaatggg

SEQ ID NO: 340780 - DNA, 25 bp, Artificial
  probe
  misc_feature (1)..(25): SEQ ID NO: 2911; WAN024EUT; Start 587; Stop 611
aaattttgctcaaaggttggaagtt

SEQ ID NO: 340781 - DNA, 25 bp, Artificial
  probe
  misc_feature (1)..(25): SEQ ID NO: 2911; WAN024EUT; Start 586; Stop 610
gaaattttgctcaaaggttggaagt

SEQ ID NO: 340782 - DNA, 25 bp, Artificial
  probe
  misc_feature (1)..(25): SEQ ID NO: 2911; WAN024EUT; Start 585; Stop 609
tgaaattttgctcaaaggttggaag

SEQ ID NO: 340783 - DNA, 25 bp, Artificial
  probe
  misc_feature (1)..(25): SEQ ID NO: 2911; WAN024EUT; Start 295; Stop 319
gtgacctatctatttgttgttgcaa

SEQ ID NO: 340784 - DNA, 25 bp, Artificial
  probe
  misc_feature (1)..(25): SEQ ID NO: 2911; WAN024EUT; Start 834; Stop 858
ggaaccccaattattcaccccaaat

SEQ ID NO: 340785 - DNA, 25 bp, Artificial
  probe
  misc_feature (1)..(25): SEQ ID NO: 2911; WAN024EUT; Start 441; Stop 465
ttggggattaggtggactcttgttt

SEQ ID NO: 340786 - DNA, 25 bp, Artificial
  probe
  misc_feature (1)..(25): SEQ ID NO: 2911; WAN024EUT; Start 296; Stop 320
tgacctatctatttgttgttgcaat

SEQ ID NO: 340787 - DNA, 25 bp, Artificial
  probe
  misc_feature (1)..(25): SEQ ID NO: 2911; WAN024EUT; Start 804; Stop 828
gctatctgaaaagttccttgctgct

SEQ ID NO: 340788 - DNA, 25 bp, Artificial
  probe
  misc_feature (1)..(25): SEQ ID NO: 2912; WAN024B4F; Start 1011; Stop 1035
tgtctattccgttcttgaagtgatt

SEQ ID NO: 340789 - DNA, 25 bp, Artificial
  probe
  misc_feature (1)..(25): SEQ ID NO: 2912; WAN024B4F; Start 1010; Stop 1034
atgtctattccgttcttgaagtgat

SEQ ID NO: 340790 - DNA, 25 bp, Artificial
  probe
  misc_feature (1)..(25): SEQ ID NO: 2912; WAN024B4F; Start 1009; Stop 1033
aatgtctattccgttcttgaagtga

SEQ ID NO: 340791 - DNA, 25 bp, Artificial
  probe
  misc_feature (1)..(25): SEQ ID NO: 2912; WAN024B4F; Start 1008; Stop 1032
taatgtctattccgttcttgaagtg

SEQ ID NO: 340792 - DNA, 25 bp, Artificial
  probe
  misc_feature (1)..(25): SEQ ID NO: 2912; WAN024B4F; Start 1007; Stop 1031
ttaatgtctattccgttcttgaagt

SEQ ID NO: 340793 - DNA, 25 bp, Artificial
  probe
  misc_feature (1)..(25): SEQ ID NO: 2912; WAN024B4F; Start 1005; Stop 1029
agttaatgtctattccgttcttgaa

SEQ ID NO: 340794 - DNA, 25 bp, Artificial
  probe
  misc_feature (1)..(25): SEQ ID NO: 2912; WAN024B4F; Start 1006; Stop 1030
gttaatgtctattccgttcttgaag

SEQ ID NO: 340795 - DNA, 25 bp, Artificial
  probe
  misc_feature (1)..(25): SEQ ID NO: 2912; WAN024B4F; Start 1004; Stop 1028
tagttaatgtctattccgttcttga

SEQ ID NO: 340796 - DNA, 25 bp, Artificial
  probe
  misc_feature (1)..(25): SEQ ID NO: 2912; WAN024B4F; Start 1018; Stop 1042
tccgttcttgaagtgatttctacat

SEQ ID NO: 340797 - DNA, 25 bp, Artificial
  probe
  misc_feature (1)..(25): SEQ ID NO: 2912; WAN024B4F; Start 1019; Stop 1043
ccgttcttgaagtgatttctacatt

SEQ ID NO: 340798 - DNA, 25 bp, Artificial
  probe
  misc_feature (1)..(25): SEQ ID NO: 2912; WAN024B4F; Start 1017; Stop 1041
ttccgttcttgaagtgatttctaca

SEQ ID NO: 340799 - DNA, 25 bp, Artificial
  probe
  misc_feature (1)..(25): SEQ ID NO: 2912; WAN024B4F; Start 1016; Stop 1040
attccgttcttgaagtgatttctac

SEQ ID NO: 340800 - DNA, 25 bp, Artificial
  probe
  misc_feature (1)..(25): SEQ ID NO: 2912; WAN024B4F; Start 1012; Stop 1036
gtctattccgttcttgaagtgattt

SEQ ID NO: 340801 - DNA, 25 bp, Artificial
  probe
  misc_feature (1)..(25): SEQ ID NO: 2912; WAN024B4F; Start 1014; Stop 1038
ctattccgttcttgaagtgatttct

SEQ ID NO: 340802 - DNA, 25 bp, Artificial
  probe
  misc_feature (1)..(25): SEQ ID NO: 2912; WAN024B4F; Start 1013; Stop 1037
tctattccgttcttgaagtgatttc

SEQ ID NO: 340803 - DNA, 25 bp, Artificial
  probe
  misc_feature (1)..(25): SEQ ID NO: 2912; WAN024B4F; Start 1003; Stop 1027
ttagttaatgtctattccgttcttg

SEQ ID NO: 340804 - DNA, 25 bp, Artificial
  probe
  misc_feature (1)..(25): SEQ ID NO: 2912; WAN024B4F; Start 1023; Stop 1047
tcttgaagtgatttctacattagca

SEQ ID NO: 340805 - DNA, 25 bp, Artificial
  probe
  misc_feature (1)..(25): SEQ ID NO: 2912; WAN024B4F; Start 1015; Stop 1039
tattccgttcttgaagtgatttcta

SEQ ID NO: 340806 - DNA, 25 bp, Artificial
  probe
  misc_feature (1)..(25): SEQ ID NO: 2912; WAN024B4F; Start 1120; Stop 1144
gccatttgtctgatgatagaagcta

SEQ ID NO: 340807 - DNA, 25 bp, Artificial
  probe
  misc_feature (1)..(25): SEQ ID NO: 2912; WAN024B4F; Start 1024; Stop 1048
cttgaagtgatttctacattagcat

SEQ ID NO: 340808 - DNA, 25 bp, Artificial
  probe
  misc_feature (1)..(25): SEQ ID NO: 2912; WAN024B4F; Start 1022; Stop 1046
ttcttgaagtgatttctacattagc

SEQ ID NO: 340809 - DNA, 25 bp, Artificial
  probe
  misc_feature (1)..(25): SEQ ID NO: 2912; WAN024B4F; Start 1020; Stop 1044
cgttcttgaagtgatttctacatta

SEQ ID NO: 340810 - DNA, 25 bp, Artificial
  probe
  misc_feature (1)..(25): SEQ ID NO: 2912; WAN024B4F; Start 1118; Stop 1142
cagccatttgtctgatgatagaagc

SEQ ID NO: 340811 - DNA, 25 bp, Artificial
  probe
  misc_feature (1)..(25): SEQ ID NO: 2912; WAN024B4F; Start 973; Stop 997
tttcttcaggaaacagtagaggaaa

SEQ ID NO: 340812 - DNA, 25 bp, Artificial
  probe
  misc_feature (1)..(25): SEQ ID NO: 2912; WAN024B4F; Start 972; Stop 996
atttcttcaggaaacagtagaggaa

SEQ ID NO: 340813 - DNA, 25 bp, Artificial
  probe
  misc_feature (1)..(25): SEQ ID NO: 2912; WAN024B4F; Start 1026; Stop 1050
tgaagtgatttctacattagcattt

SEQ ID NO: 340814 - DNA, 25 bp, Artificial
  probe
  misc_feature (1)..(25): SEQ ID NO: 2912; WAN024B4F; Start 1025; Stop 1049
ttgaagtgatttctacattagcatt

SEQ ID NO: 340815 - DNA, 25 bp, Artificial
  probe
  misc_feature (1)..(25): SEQ ID NO: 2912; WAN024B4F; Start 970; Stop 994
gtatttcttcaggaaacagtagagg

SEQ ID NO: 340816 - DNA, 25 bp, Artificial
  probe
  misc_feature (1)..(25): SEQ ID NO: 2912; WAN024B4F; Start 971; Stop 995
tatttcttcaggaaacagtagagga

SEQ ID NO: 340817 - DNA, 25 bp, Artificial
  probe
  misc_feature (1)..(25): SEQ ID NO: 2912; WAN024B4F; Start 965; Stop 989
aaagtgtatttcttcaggaaacagt

SEQ ID NO: 340818 - DNA, 25 bp, Artificial
  probe
  misc_feature (1)..(25): SEQ ID NO: 2912; WAN024B4F; Start 1121; Stop 1145
ccatttgtctgatgatagaagctat

SEQ ID NO: 340819 - DNA, 25 bp, Artificial
  probe
  misc_feature (1)..(25): SEQ ID NO: 2912; WAN024B4F; Start 978; Stop 1002
tcaggaaacagtagaggaaaatcat

SEQ ID NO: 340820 - DNA, 25 bp, Artificial
  probe
  misc_feature (1)..(25): SEQ ID NO: 2912; WAN024B4F; Start 968; Stop 992
gtgtatttcttcaggaaacagtaga

SEQ ID NO: 340821 - DNA, 25 bp, Artificial
  probe
  misc_feature (1)..(25): SEQ ID NO: 2913; WAN024DTX; Start 1370; Stop 1394
aagaactacacgataatgctcaatt

SEQ ID NO: 340822 - DNA, 25 bp, Artificial
  probe
  misc_feature (1)..(25): SEQ ID NO: 2913; WAN024DTX; Start 1082; Stop 1106
atgctgttatgcttggatctatgtt

SEQ ID NO: 340823 - DNA, 25 bp, Artificial
  probe
  misc_feature (1)..(25): SEQ ID NO: 2913; WAN024DTX; Start 1081; Stop 1105
aatgctgttatgcttggatctatgt

SEQ ID NO: 340824 - DNA, 25 bp, Artificial
  probe
  misc_feature (1)..(25): SEQ ID NO: 2913; WAN024DTX; Start 922; Stop 946
tctatctgtactactcgtgtgattg

SEQ ID NO: 340825 - DNA, 25 bp, Artificial
  probe
  misc_feature (1)..(25): SEQ ID NO: 2913; WAN024DTX; Start 920; Stop 944
gttctatctgtactactcgtgtgat

SEQ ID NO: 340826 - DNA, 25 bp, Artificial
  probe
  misc_feature (1)..(25): SEQ ID NO: 2913; WAN024DTX; Start 529; Stop 553
gagagtattcttcaagagcatcgta

SEQ ID NO: 340827 - DNA, 25 bp, Artificial
  probe
  misc_feature (1)..(25): SEQ ID NO: 2913; WAN024DTX; Start 1264; Stop 1288
ggaattgaaggtcgtgttgcttata

SEQ ID NO: 340828 - DNA, 25 bp, Artificial
  probe
  misc_feature (1)..(25): SEQ ID NO: 2913; WAN024DTX; Start 530; Stop 554
agagtattcttcaagagcatcgtat

SEQ ID NO: 340829 - DNA, 25 bp, Artificial
  probe
  misc_feature (1)..(25): SEQ ID NO: 2913; WAN024DTX; Start 923; Stop 947
ctatctgtactactcgtgtgattgc

SEQ ID NO: 340830 - DNA, 25 bp, Artificial
  probe
  misc_feature (1)..(25): SEQ ID NO: 2913; WAN024DTX; Start 919; Stop 943
ggttctatctgtactactcgtgtga

SEQ ID NO: 340831 - DNA, 25 bp, Artificial
  probe
  misc_feature (1)..(25): SEQ ID NO: 2913; WAN024DTX; Start 918; Stop 942
aggttctatctgtactactcgtgtg

SEQ ID NO: 340832 - DNA, 25 bp, Artificial
  probe
  misc_feature (1)..(25): SEQ ID NO: 2913; WAN024DTX; Start 924; Stop 948
tatctgtactactcgtgtgattgct

SEQ ID NO: 340833 - DNA, 25 bp, Artificial
  probe
  misc_feature (1)..(25): SEQ ID NO: 2913; WAN024DTX; Start 921; Stop 945
ttctatctgtactactcgtgtgatt

SEQ ID NO: 340834 - DNA, 25 bp, Artificial
  probe
  misc_feature (1)..(25): SEQ ID NO: 2913; WAN024DTX; Start 532; Stop 556
agtattcttcaagagcatcgtattg

SEQ ID NO: 340835 - DNA, 25 bp, Artificial
  probe
  misc_feature (1)..(25): SEQ ID NO: 2913; WAN024DTX; Start 531; Stop 555
gagtattcttcaagagcatcgtatt

SEQ ID NO: 340836 - DNA, 25 bp, Artificial
  probe
  misc_feature (1)..(25): SEQ ID NO: 2913; WAN024DTX; Start 1265; Stop 1289
gaattgaaggtcgtgttgcttataa

SEQ ID NO: 340837 - DNA, 25 bp, Artificial
  probe
  misc_feature (1)..(25): SEQ ID NO: 2913; WAN024DTX; Start 527; Stop 551
ctgagagtattcttcaagagcatcg

SEQ ID NO: 340838 - DNA, 25 bp, Artificial
  probe
  misc_feature (1)..(25): SEQ ID NO: 2913; WAN024DTX; Start 306; Stop 330
cttcttgacgcctgaacatacaatt

SEQ ID NO: 340839 - DNA, 25 bp, Artificial
  probe
  misc_feature (1)..(25): SEQ ID NO: 2913; WAN024DTX; Start 737; Stop 761
gagcggatgcgattgttattgatac

SEQ ID NO: 340840 - DNA, 25 bp, Artificial
  probe
  misc_feature (1)..(25): SEQ ID NO: 2913; WAN024DTX; Start 910; Stop 934
attggaccaggttctatctgtacta

SEQ ID NO: 340841 - DNA, 25 bp, Artificial
  probe
  misc_feature (1)..(25): SEQ ID NO: 2913; WAN024DTX; Start 909; Stop 933
tattggaccaggttctatctgtact

SEQ ID NO: 340842 - DNA, 25 bp, Artificial
  probe
  misc_feature (1)..(25): SEQ ID NO: 2913; WAN024DTX; Start 908; Stop 932
gtattggaccaggttctatctgtac

SEQ ID NO: 340843 - DNA, 25 bp, Artificial
  probe
  misc_feature (1)..(25): SEQ ID NO: 2913; WAN024DTX; Start 528; Stop 552
tgagagtattcttcaagagcatcgt

SEQ ID NO: 340844 - DNA, 25 bp, Artificial
  probe
  misc_feature (1)..(25): SEQ ID NO: 2913; WAN024DTX; Start 682; Stop 706
gcagtaggtgttacttcagatacat

SEQ ID NO: 340845 - DNA, 25 bp, Artificial
  probe
  misc_feature (1)..(25): SEQ ID NO: 2913; WAN024DTX; Start 911; Stop 935
ttggaccaggttctatctgtactac

SEQ ID NO: 340846 - DNA, 25 bp, Artificial
  probe
  misc_feature (1)..(25): SEQ ID NO: 2913; WAN024DTX; Start 917; Stop 941
caggttctatctgtactactcgtgt

SEQ ID NO: 340847 - DNA, 25 bp, Artificial
  probe
  misc_feature (1)..(25): SEQ ID NO: 2913; WAN024DTX; Start 913; Stop 937
ggaccaggttctatctgtactactc

SEQ ID NO: 340848 - DNA, 25 bp, Artificial
  probe
  misc_feature (1)..(25): SEQ ID NO: 2913; WAN024DTX; Start 740; Stop 764
cggatgcgattgttattgatactgc

SEQ ID NO: 340849 - DNA, 25 bp, Artificial
  probe
  misc_feature (1)..(25): SEQ ID NO: 2913; WAN024DTX; Start 739; Stop 763
gcggatgcgattgttattgatactg

SEQ ID NO: 340850 - DNA, 25 bp, Artificial
  probe
  misc_feature (1)..(25): SEQ ID NO: 2913; WAN024DTX; Start 738; Stop 762
agcggatgcgattgttattgatact

SEQ ID NO: 340851 - DNA, 25 bp, Artificial
  probe
  misc_feature (1)..(25): SEQ ID NO: 2913; WAN024DTX; Start 889; Stop 913
gtagacgttgttaaggttggtattg

SEQ ID NO: 340852 - DNA, 25 bp, Artificial
  probe
  misc_feature (1)..(25): SEQ ID NO: 2913; WAN024DTX; Start 888; Stop 912
tgtagacgttgttaaggttggtatt

SEQ ID NO: 340853 - DNA, 25 bp, Artificial
  probe
  misc_feature (1)..(25): SEQ ID NO: 2913; WAN024DTX; Start 907; Stop 931
ggtattggaccaggttctatctgta

SEQ ID NO: 340854 - DNA, 25 bp, Artificial
  probe
  misc_feature (1)..(25): SEQ ID NO: 2914; WAN024EWE; Start 582; Stop 606
ctatcgtgacttggaatacaacttg

SEQ ID NO: 340855 - DNA, 25 bp, Artificial
  probe
  misc_feature (1)..(25): SEQ ID NO: 2914; WAN024EWE; Start 583; Stop 607
tatcgtgacttggaatacaacttgg

SEQ ID NO: 340856 - DNA, 25 bp, Artificial
  probe
  misc_feature (1)..(25): SEQ ID NO: 2914; WAN024EWE; Start 581; Stop 605
gctatcgtgacttggaatacaactt

SEQ ID NO: 340857 - DNA, 25 bp, Artificial
  probe
  misc_feature (1)..(25): SEQ ID NO: 2914; WAN024EWE; Start 713; Stop 737
ttatctcatacgaagccttcttgtc

SEQ ID NO: 340858 - DNA, 25 bp, Artificial
  probe
  misc_feature (1)..(25): SEQ ID NO: 2914; WAN024EWE; Start 714; Stop 738
tatctcatacgaagccttcttgtct

SEQ ID NO: 340859 - DNA, 25 bp, Artificial
  probe
  misc_feature (1)..(25): SEQ ID NO: 2914; WAN024EWE; Start 533; Stop 557
taacaacatggattggtattgcctt

SEQ ID NO: 340860 - DNA, 25 bp, Artificial
  probe
  misc_feature (1)..(25): SEQ ID NO: 2914; WAN024EWE; Start 354; Stop 378
agtgattaacttggttatcggtgtt

SEQ ID NO: 340861 - DNA, 25 bp, Artificial
  probe
  misc_feature (1)..(25): SEQ ID NO: 2914; WAN024EWE; Start 672; Stop 696
atctgttattgtgacaaccatgact

SEQ ID NO: 340862 - DNA, 25 bp, Artificial
  probe
  misc_feature (1)..(25): SEQ ID NO: 2914; WAN024EWE; Start 351; Stop 375
gacagtgattaacttggttatcggt

SEQ ID NO: 340863 - DNA, 25 bp, Artificial
  probe
  misc_feature (1)..(25): SEQ ID NO: 2914; WAN024EWE; Start 345; Stop 369
gattgcgacagtgattaacttggtt

SEQ ID NO: 340864 - DNA, 25 bp, Artificial
  probe
  misc_feature (1)..(25): SEQ ID NO: 2914; WAN024EWE; Start 715; Stop 739
atctcatacgaagccttcttgtctt

SEQ ID NO: 340865 - DNA, 25 bp, Artificial
  probe
  misc_feature (1)..(25): SEQ ID NO: 2914; WAN024EWE; Start 675; Stop 699
tgttattgtgacaaccatgactcaa

SEQ ID NO: 340866 - DNA, 25 bp, Artificial
  probe
  misc_feature (1)..(25): SEQ ID NO: 2914; WAN024EWE; Start 347; Stop 371
ttgcgacagtgattaacttggttat

SEQ ID NO: 340867 - DNA, 25 bp, Artificial
  probe
  misc_feature (1)..(25): SEQ ID NO: 2914; WAN024EWE; Start 346; Stop 370
attgcgacagtgattaacttggtta

SEQ ID NO: 340868 - DNA, 25 bp, Artificial
  probe
  misc_feature (1)..(25): SEQ ID NO: 2914; WAN024EWE; Start 671; Stop 695
tatctgttattgtgacaaccatgac

SEQ ID NO: 340869 - DNA, 25 bp, Artificial
  probe
  misc_feature (1)..(25): SEQ ID NO: 2914; WAN024EWE; Start 670; Stop 694
gtatctgttattgtgacaaccatga

SEQ ID NO: 340870 - DNA, 25 bp, Artificial
  probe
  misc_feature (1)..(25): SEQ ID NO: 2914; WAN024EWE; Start 532; Stop 556
gtaacaacatggattggtattgcct

SEQ ID NO: 340871 - DNA, 25 bp, Artificial
  probe
  misc_feature (1)..(25): SEQ ID NO: 2914; WAN024EWE; Start 353; Stop 377
cagtgattaacttggttatcggtgt

SEQ ID NO: 340872 - DNA, 25 bp, Artificial
  probe
  misc_feature (1)..(25): SEQ ID NO: 2914; WAN024EWE; Start 352; Stop 376
acagtgattaacttggttatcggtg

SEQ ID NO: 340873 - DNA, 25 bp, Artificial
  probe
  misc_feature (1)..(25): SEQ ID NO: 2914; WAN024EWE; Start 673; Stop 697
tctgttattgtgacaaccatgactc

SEQ ID NO: 340874 - DNA, 25 bp, Artificial
  probe
  misc_feature (1)..(25): SEQ ID NO: 2914; WAN024EWE; Start 528; Stop 552
gagcgtaacaacatggattggtatt

SEQ ID NO: 340875 - DNA, 25 bp, Artificial
  probe
  misc_feature (1)..(25): SEQ ID NO: 2914; WAN024EWE; Start 674; Stop 698
ctgttattgtgacaaccatgactca

SEQ ID NO: 340876 - DNA, 25 bp, Artificial
  probe
  misc_feature (1)..(25): SEQ ID NO: 2914; WAN024EWE; Start 348; Stop 372
tgcgacagtgattaacttggttatc

SEQ ID NO: 340877 - DNA, 25 bp, Artificial
  probe
  misc_feature (1)..(25): SEQ ID NO: 2914; WAN024EWE; Start 342; Stop 366
tgtgattgcgacagtgattaacttg

SEQ ID NO: 340878 - DNA, 25 bp, Artificial
  probe
  misc_feature (1)..(25): SEQ ID NO: 2914; WAN024EWE; Start 232; Stop 256
agtgttcgttatatcaagccaaatg

SEQ ID NO: 340879 - DNA, 25 bp, Artificial
  probe
  misc_feature (1)..(25): SEQ ID NO: 2914; WAN024EWE; Start 813; Stop 837
aaccaatgcttacttgttctggatt

SEQ ID NO: 340880 - DNA, 25 bp, Artificial
  probe
  misc_feature (1)..(25): SEQ ID NO: 2914; WAN024EWE; Start 536; Stop 560
caacatggattggtattgccttcat

SEQ ID NO: 340881 - DNA, 25 bp, Artificial
  probe
  misc_feature (1)..(25): SEQ ID NO: 2914; WAN024EWE; Start 529; Stop 553
agcgtaacaacatggattggtattg

SEQ ID NO: 340882 - DNA, 25 bp, Artificial
  probe
  misc_feature (1)..(25): SEQ ID NO: 2914; WAN024EWE; Start 199; Stop 223
gatttcaatgatgtcagcaaggtaa

SEQ ID NO: 340883 - DNA, 25 bp, Artificial
  probe
  misc_feature (1)..(25): SEQ ID NO: 2914; WAN024EWE; Start 201; Stop 225
tttcaatgatgtcagcaaggtaaac

SEQ ID NO: 340884 - DNA, 25 bp, Artificial
  probe
  misc_feature (1)..(25): SEQ ID NO: 2914; WAN024EWE; Start 732; Stop 756
cttgtctttcttcggtcttggatta

SEQ ID NO: 340885 - DNA, 25 bp, Artificial
  probe
  misc_feature (1)..(25): SEQ ID NO: 2914; WAN024EWE; Start 200; Stop 224
atttcaatgatgtcagcaaggtaaa

SEQ ID NO: 340886 - DNA, 25 bp, Artificial
  probe
  misc_feature (1)..(25): SEQ ID NO: 2914; WAN024EWE; Start 534; Stop 558
aacaacatggattggtattgccttc

SEQ ID NO: 340887 - DNA, 25 bp, Artificial
  probe
  misc_feature (1)..(25): SEQ ID NO: 2915; WAN024GE6; Start 1452; Stop 1476
aactatccgtgatgtattgctcttc

SEQ ID NO: 340888 - DNA, 25 bp, Artificial
  probe
  misc_feature (1)..(25): SEQ ID NO: 2915; WAN024GE6; Start 1451; Stop 1475
caactatccgtgatgtattgctctt

SEQ ID NO: 340889 - DNA, 25 bp, Artificial
  probe
  misc_feature (1)..(25): SEQ ID NO: 2915; WAN024GE6; Start 1433; Stop 1457
tgctcctcactgatacaacaactat

SEQ ID NO: 340890 - DNA, 25 bp, Artificial
  probe
  misc_feature (1)..(25): SEQ ID NO: 2915; WAN024GE6; Start 1432; Stop 1456
atgctcctcactgatacaacaacta

SEQ ID NO: 340891 - DNA, 25 bp, Artificial
  probe
  misc_feature (1)..(25): SEQ ID NO: 2915; WAN024GE6; Start 1435; Stop 1459
ctcctcactgatacaacaactatcc

SEQ ID NO: 340892 - DNA, 25 bp, Artificial
  probe
  misc_feature (1)..(25): SEQ ID NO: 2915; WAN024GE6; Start 1442; Stop 1466
ctgatacaacaactatccgtgatgt

SEQ ID NO: 340893 - DNA, 25 bp, Artificial
  probe
  misc_feature (1)..(25): SEQ ID NO: 2915; WAN024GE6; Start 1441; Stop 1465
actgatacaacaactatccgtgatg

SEQ ID NO: 340894 - DNA, 25 bp, Artificial
  probe
  misc_feature (1)..(25): SEQ ID NO: 2915; WAN024GE6; Start 1434; Stop 1458
gctcctcactgatacaacaactatc

SEQ ID NO: 340895 - DNA, 25 bp, Artificial
  probe
  misc_feature (1)..(25): SEQ ID NO: 2915; WAN024GE6; Start 1449; Stop 1473
aacaactatccgtgatgtattgctc

SEQ ID NO: 340896 - DNA, 25 bp, Artificial
  probe
  misc_feature (1)..(25): SEQ ID NO: 2915; WAN024GE6; Start 1453; Stop 1477
actatccgtgatgtattgctcttcc

SEQ ID NO: 340897 - DNA, 25 bp, Artificial
  probe
  misc_feature (1)..(25): SEQ ID NO: 2915; WAN024GE6; Start 1448; Stop 1472
caacaactatccgtgatgtattgct

SEQ ID NO: 340898 - DNA, 25 bp, Artificial
  probe
  misc_feature (1)..(25): SEQ ID NO: 2915; WAN024GE6; Start 1440; Stop 1464
cactgatacaacaactatccgtgat

SEQ ID NO: 340899 - DNA, 25 bp, Artificial
  probe
  misc_feature (1)..(25): SEQ ID NO: 2915; WAN024GE6; Start 1447; Stop 1471
acaacaactatccgtgatgtattgc

SEQ ID NO: 340900 - DNA, 25 bp, Artificial
  probe
  misc_feature (1)..(25): SEQ ID NO: 2915; WAN024GE6; Start 1438; Stop 1462
ctcactgatacaacaactatccgtg

SEQ ID NO: 340901 - DNA, 25 bp, Artificial
  probe
  misc_feature (1)..(25): SEQ ID NO: 2915; WAN024GE6; Start 1450; Stop 1474
acaactatccgtgatgtattgctct

SEQ ID NO: 340902 - DNA, 25 bp, Artificial
  probe
  misc_feature (1)..(25): SEQ ID NO: 2915; WAN024GE6; Start 1346; Stop 1370
caggaatcgactatgactacattga

SEQ ID NO: 340903 - DNA, 25 bp, Artificial
  probe
  misc_feature (1)..(25): SEQ ID NO: 2915; WAN024GE6; Start 1345; Stop 1369
acaggaatcgactatgactacattg

SEQ ID NO: 340904 - DNA, 25 bp, Artificial
  probe
  misc_feature (1)..(25): SEQ ID NO: 2915; WAN024GE6; Start 1344; Stop 1368
gacaggaatcgactatgactacatt

SEQ ID NO: 340905 - DNA, 25 bp, Artificial
  probe
  misc_feature (1)..(25): SEQ ID NO: 2915; WAN024GE6; Start 1349; Stop 1373
gaatcgactatgactacattgaagc

SEQ ID NO: 340906 - DNA, 25 bp, Artificial
  probe
  misc_feature (1)..(25): SEQ ID NO: 2915; WAN024GE6; Start 1436; Stop 1460
tcctcactgatacaacaactatccg

SEQ ID NO: 340907 - DNA, 25 bp, Artificial
  probe
  misc_feature (1)..(25): SEQ ID NO: 2915; WAN024GE6; Start 1347; Stop 1371
aggaatcgactatgactacattgaa

SEQ ID NO: 340908 - DNA, 25 bp, Artificial
  probe
  misc_feature (1)..(25): SEQ ID NO: 2915; WAN024GE6; Start 1348; Stop 1372
ggaatcgactatgactacattgaag

SEQ ID NO: 340909 - DNA, 25 bp, Artificial
  probe
  misc_feature (1)..(25): SEQ ID NO: 2915; WAN024GE6; Start 1437; Stop 1461
cctcactgatacaacaactatccgt

SEQ ID NO: 340910 - DNA, 25 bp, Artificial
  probe
  misc_feature (1)..(25): SEQ ID NO: 2915; WAN024GE6; Start 965; Stop 989
atatggtggatgctatcagagaaat

SEQ ID NO: 340911 - DNA, 25 bp, Artificial
  probe
  misc_feature (1)..(25): SEQ ID NO: 2915; WAN024GE6; Start 1047; Stop 1071
tgagaagaaagttccagttgagaaa

SEQ ID NO: 340912 - DNA, 25 bp, Artificial
  probe
  misc_feature (1)..(25): SEQ ID NO: 2915; WAN024GE6; Start 969; Stop 993
ggtggatgctatcagagaaattact

SEQ ID NO: 340913 - DNA, 25 bp, Artificial
  probe
  misc_feature (1)..(25): SEQ ID NO: 2915; WAN024GE6; Start 1125; Stop 1149
agaaactttaatccaaccaaccttt

SEQ ID NO: 340914 - DNA, 25 bp, Artificial
  probe
  misc_feature (1)..(25): SEQ ID NO: 2915; WAN024GE6; Start 1122; Stop 1146
tgaagaaactttaatccaaccaacc

SEQ ID NO: 340915 - DNA, 25 bp, Artificial
  probe
  misc_feature (1)..(25): SEQ ID NO: 2915; WAN024GE6; Start 968; Stop 992
tggtggatgctatcagagaaattac

SEQ ID NO: 340916 - DNA, 25 bp, Artificial
  probe
  misc_feature (1)..(25): SEQ ID NO: 2915; WAN024GE6; Start 1123; Stop 1147
gaagaaactttaatccaaccaacct

SEQ ID NO: 340917 - DNA, 25 bp, Artificial
  probe
  misc_feature (1)..(25): SEQ ID NO: 2915; WAN024GE6; Start 967; Stop 991
atggtggatgctatcagagaaatta

SEQ ID NO: 340918 - DNA, 25 bp, Artificial
  probe
  misc_feature (1)..(25): SEQ ID NO: 2915; WAN024GE6; Start 966; Stop 990
tatggtggatgctatcagagaaatt

SEQ ID NO: 340919 - DNA, 25 bp, Artificial
  probe
  misc_feature (1)..(25): SEQ ID NO: 2915; WAN024GE6; Start 1443; Stop 1467
tgatacaacaactatccgtgatgta

SEQ ID NO: 340920 - DNA, 25 bp, Artificial
  probe
  misc_feature (1)..(25): SEQ ID NO: 2916; WAN024GLJ; Start 338; Stop 362
ttcaagtcattcctcatatcacaga

SEQ ID NO: 340921 - DNA, 25 bp, Artificial
  probe
  misc_feature (1)..(25): SEQ ID NO: 2916; WAN024GLJ; Start 337; Stop 361
gttcaagtcattcctcatatcacag

SEQ ID NO: 340922 - DNA, 25 bp, Artificial
  probe
  misc_feature (1)..(25): SEQ ID NO: 2916; WAN024GLJ; Start 335; Stop 359
ctgttcaagtcattcctcatatcac

SEQ ID NO: 340923 - DNA, 25 bp, Artificial
  probe
  misc_feature (1)..(25): SEQ ID NO: 2916; WAN024GLJ; Start 519; Stop 543
tatccatacaaccttgcttccttac

SEQ ID NO: 340924 - DNA, 25 bp, Artificial
  probe
  misc_feature (1)..(25): SEQ ID NO: 2916; WAN024GLJ; Start 518; Stop 542
atatccatacaaccttgcttcctta

SEQ ID NO: 340925 - DNA, 25 bp, Artificial
  probe
  misc_feature (1)..(25): SEQ ID NO: 2916; WAN024GLJ; Start 517; Stop 541
tatatccatacaaccttgcttcctt

SEQ ID NO: 340926 - DNA, 25 bp, Artificial
  probe
  misc_feature (1)..(25): SEQ ID NO: 2916; WAN024GLJ; Start 339; Stop 363
tcaagtcattcctcatatcacagat

SEQ ID NO: 340927 - DNA, 25 bp, Artificial
  probe
  misc_feature (1)..(25): SEQ ID NO: 2916; WAN024GLJ; Start 343; Stop 367
gtcattcctcatatcacagatgctt

SEQ ID NO: 340928 - DNA, 25 bp, Artificial
  probe
  misc_feature (1)..(25): SEQ ID NO: 2916; WAN024GLJ; Start 341; Stop 365
aagtcattcctcatatcacagatgc

SEQ ID NO: 340929 - DNA, 25 bp, Artificial
  probe
  misc_feature (1)..(25): SEQ ID NO: 2916; WAN024GLJ; Start 340; Stop 364
caagtcattcctcatatcacagatg

SEQ ID NO: 340930 - DNA, 25 bp, Artificial
  probe
  misc_feature (1)..(25): SEQ ID NO: 2916; WAN024GLJ; Start 334; Stop 358
actgttcaagtcattcctcatatca

SEQ ID NO: 340931 - DNA, 25 bp, Artificial
  probe
  misc_feature (1)..(25): SEQ ID NO: 2916; WAN024GLJ; Start 342; Stop 366
agtcattcctcatatcacagatgct

SEQ ID NO: 340932 - DNA, 25 bp, Artificial
  probe
  misc_feature (1)..(25): SEQ ID NO: 2916; WAN024GLJ; Start 332; Stop 356
caactgttcaagtcattcctcatat

SEQ ID NO: 340933 - DNA, 25 bp, Artificial
  probe
  misc_feature (1)..(25): SEQ ID NO: 2916; WAN024GLJ; Start 885; Stop 909
ccttgttggtaagtatgtggagttg

SEQ ID NO: 340934 - DNA, 25 bp, Artificial
  probe
  misc_feature (1)..(25): SEQ ID NO: 2916; WAN024GLJ; Start 1343; Stop 1367
ctgctgcttatcacaatcaagaagt

SEQ ID NO: 340935 - DNA, 25 bp, Artificial
  probe
  misc_feature (1)..(25): SEQ ID NO: 2916; WAN024GLJ; Start 336; Stop 360
tgttcaagtcattcctcatatcaca

SEQ ID NO: 340936 - DNA, 25 bp, Artificial
  probe
  misc_feature (1)..(25): SEQ ID NO: 2916; WAN024GLJ; Start 333; Stop 357
aactgttcaagtcattcctcatatc

SEQ ID NO: 340937 - DNA, 25 bp, Artificial
  probe
  misc_feature (1)..(25): SEQ ID NO: 2916; WAN024GLJ; Start 331; Stop 355
gcaactgttcaagtcattcctcata

SEQ ID NO: 340938 - DNA, 25 bp, Artificial
  probe
  misc_feature (1)..(25): SEQ ID NO: 2916; WAN024GLJ; Start 997; Stop 1021
aatgatgtgacagcagagaatgtag

SEQ ID NO: 340939 - DNA, 25 bp, Artificial
  probe
  misc_feature (1)..(25): SEQ ID NO: 2916; WAN024GLJ; Start 996; Stop 1020
caatgatgtgacagcagagaatgta

SEQ ID NO: 340940 - DNA, 25 bp, Artificial
  probe
  misc_feature (1)..(25): SEQ ID NO: 2916; WAN024GLJ; Start 524; Stop 548
atacaaccttgcttccttacctcaa

SEQ ID NO: 340941 - DNA, 25 bp, Artificial
  probe
  misc_feature (1)..(25): SEQ ID NO: 2916; WAN024GLJ; Start 516; Stop 540
gtatatccatacaaccttgcttcct

SEQ ID NO: 340942 - DNA, 25 bp, Artificial
  probe
  misc_feature (1)..(25): SEQ ID NO: 2916; WAN024GLJ; Start 886; Stop 910
cttgttggtaagtatgtggagttgc

SEQ ID NO: 340943 - DNA, 25 bp, Artificial
  probe
  misc_feature (1)..(25): SEQ ID NO: 2916; WAN024GLJ; Start 395; Stop 419
taacgaccgactctgatgtcattat

SEQ ID NO: 340944 - DNA, 25 bp, Artificial
  probe
  misc_feature (1)..(25): SEQ ID NO: 2916; WAN024GLJ; Start 625; Stop 649
atgttggttattcgtacagaagagc

SEQ ID NO: 340945 - DNA, 25 bp, Artificial
  probe
  misc_feature (1)..(25): SEQ ID NO: 2916; WAN024GLJ; Start 523; Stop 547
catacaaccttgcttccttacctca

SEQ ID NO: 340946 - DNA, 25 bp, Artificial
  probe
  misc_feature (1)..(25): SEQ ID NO: 2916; WAN024GLJ; Start 520; Stop 544
atccatacaaccttgcttccttacc

SEQ ID NO: 340947 - DNA, 25 bp, Artificial
  probe
  misc_feature (1)..(25): SEQ ID NO: 2916; WAN024GLJ; Start 1346; Stop 1370
ctgcttatcacaatcaagaagtggt

SEQ ID NO: 340948 - DNA, 25 bp, Artificial
  probe
  misc_feature (1)..(25): SEQ ID NO: 2916; WAN024GLJ; Start 409; Stop 433
gatgtcattatcacagaggttggtg

SEQ ID NO: 340949 - DNA, 25 bp, Artificial
  probe
  misc_feature (1)..(25): SEQ ID NO: 2916; WAN024GLJ; Start 425; Stop 449
aggttggtggaacagtaggagatat

SEQ ID NO: 340950 - DNA, 25 bp, Artificial
  probe
  misc_feature (1)..(25): SEQ ID NO: 2916; WAN024GLJ; Start 1347; Stop 1371
tgcttatcacaatcaagaagtggtg

SEQ ID NO: 340951 - DNA, 25 bp, Artificial
  probe
  misc_feature (1)..(25): SEQ ID NO: 2916; WAN024GLJ; Start 624; Stop 648
tatgttggttattcgtacagaagag

SEQ ID NO: 340952 - DNA, 25 bp, Artificial
  probe
  misc_feature (1)..(25): SEQ ID NO: 2916; WAN024GLJ; Start 394; Stop 418
ctaacgaccgactctgatgtcatta

SEQ ID NO: 340953 - DNA, 25 bp, Artificial
  probe
  misc_feature (1)..(25): SEQ ID NO: 2917; WAN024DVQ; Start 95; Stop 119
ttgttaatgatcgcatctcagaaga

SEQ ID NO: 340954 - DNA, 25 bp, Artificial
  probe
  misc_feature (1)..(25): SEQ ID NO: 2917; WAN024DVQ; Start 94; Stop 118
attgttaatgatcgcatctcagaag

SEQ ID NO: 340955 - DNA, 25 bp, Artificial
  probe
  misc_feature (1)..(25): SEQ ID NO: 2917; WAN024DVQ; Start 295; Stop 319
gagtacctcaatgtaggacagatga

SEQ ID NO: 340956 - DNA, 25 bp, Artificial
  probe
  misc_feature (1)..(25): SEQ ID NO: 2917; WAN024DVQ; Start 258; Stop 282
agatgtgtatgattctattgaagga

SEQ ID NO: 340957 - DNA, 25 bp, Artificial
  probe
  misc_feature (1)..(25): SEQ ID NO: 2917; WAN024DVQ; Start 8; Stop 32
tagagtttgttcgtattgatgaccg

SEQ ID NO: 340958 - DNA, 25 bp, Artificial
  probe
  misc_feature (1)..(25): SEQ ID NO: 2917; WAN024DVQ; Start 7; Stop 31
atagagtttgttcgtattgatgacc

SEQ ID NO: 340959 - DNA, 25 bp, Artificial
  probe
  misc_feature (1)..(25): SEQ ID NO: 2917; WAN024DVQ; Start 398; Stop 422
ttgataagggaacgagagttgaaat

SEQ ID NO: 340960 - DNA, 25 bp, Artificial
  probe
  misc_feature (1)..(25): SEQ ID NO: 2917; WAN024DVQ; Start 394; Stop 418
atagttgataagggaacgagagttg

SEQ ID NO: 340961 - DNA, 25 bp, Artificial
  probe
  misc_feature (1)..(25): SEQ ID NO: 2917; WAN024DVQ; Start 393; Stop 417
aatagttgataagggaacgagagtt

SEQ ID NO: 340962 - DNA, 25 bp, Artificial
  probe
  misc_feature (1)..(25): SEQ ID NO: 2917; WAN024DVQ; Start 392; Stop 416
aaatagttgataagggaacgagagt

SEQ ID NO: 340963 - DNA, 25 bp, Artificial
  probe
  misc_feature (1)..(25): SEQ ID NO: 2917; WAN024DVQ; Start 399; Stop 423
tgataagggaacgagagttgaaatt

SEQ ID NO: 340964 - DNA, 25 bp, Artificial
  probe
  misc_feature (1)..(25): SEQ ID NO: 2917; WAN024DVQ; Start 400; Stop 424
gataagggaacgagagttgaaattc

SEQ ID NO: 340965 - DNA, 25 bp, Artificial
  probe
  misc_feature (1)..(25): SEQ ID NO: 2917; WAN024DVQ; Start 96; Stop 120
tgttaatgatcgcatctcagaagat

SEQ ID NO: 340966 - DNA, 25 bp, Artificial
  probe
  misc_feature (1)..(25): SEQ ID NO: 2917; WAN024DVQ; Start 93; Stop 117
cattgttaatgatcgcatctcagaa

SEQ ID NO: 340967 - DNA, 25 bp, Artificial
  probe
  misc_feature (1)..(25): SEQ ID NO: 2917; WAN024DVQ; Start 395; Stop 419
tagttgataagggaacgagagttga

SEQ ID NO: 340968 - DNA, 25 bp, Artificial
  probe
  misc_feature (1)..(25): SEQ ID NO: 2917; WAN024DVQ; Start 397; Stop 421
gttgataagggaacgagagttgaaa

SEQ ID NO: 340969 - DNA, 25 bp, Artificial
  probe
  misc_feature (1)..(25): SEQ ID NO: 2917; WAN024DVQ; Start 294; Stop 318
ggagtacctcaatgtaggacagatg

SEQ ID NO: 340970 - DNA, 25 bp, Artificial
  probe
  misc_feature (1)..(25): SEQ ID NO: 2917; WAN024DVQ; Start 290; Stop 314
aattggagtacctcaatgtaggaca

SEQ ID NO: 340971 - DNA, 25 bp, Artificial
  probe
  misc_feature (1)..(25): SEQ ID NO: 2917; WAN024DVQ; Start 34; Stop 58
ctggtacatggtcaagttgtcacta

SEQ ID NO: 340972 - DNA, 25 bp, Artificial
  probe
  misc_feature (1)..(25): SEQ ID NO: 2917; WAN024DVQ; Start 293; Stop 317
tggagtacctcaatgtaggacagat

SEQ ID NO: 340973 - DNA, 25 bp, Artificial
  probe
  misc_feature (1)..(25): SEQ ID NO: 2917; WAN024DVQ; Start 353; Stop 377
gtgtagctctaggtgaagaagacaa

SEQ ID NO: 340974 - DNA, 25 bp, Artificial
  probe
  misc_feature (1)..(25): SEQ ID NO: 2917; WAN024DVQ; Start 396; Stop 420
agttgataagggaacgagagttgaa

SEQ ID NO: 340975 - DNA, 25 bp, Artificial
  probe
  misc_feature (1)..(25): SEQ ID NO: 2917; WAN024DVQ; Start 97; Stop 121
gttaatgatcgcatctcagaagata

SEQ ID NO: 340976 - DNA, 25 bp, Artificial
  probe
  misc_feature (1)..(25): SEQ ID NO: 2917; WAN024DVQ; Start 259; Stop 283
gatgtgtatgattctattgaaggaa

SEQ ID NO: 340977 - DNA, 25 bp, Artificial
  probe
  misc_feature (1)..(25): SEQ ID NO: 2917; WAN024DVQ; Start 291; Stop 315
attggagtacctcaatgtaggacag

SEQ ID NO: 340978 - DNA, 25 bp, Artificial
  probe
  misc_feature (1)..(25): SEQ ID NO: 2917; WAN024DVQ; Start 35; Stop 59
tggtacatggtcaagttgtcactac

SEQ ID NO: 340979 - DNA, 25 bp, Artificial
  probe
  misc_feature (1)..(25): SEQ ID NO: 2917; WAN024DVQ; Start 401; Stop 425
ataagggaacgagagttgaaattca

SEQ ID NO: 340980 - DNA, 25 bp, Artificial
  probe
  misc_feature (1)..(25): SEQ ID NO: 2917; WAN024DVQ; Start 257; Stop 281
aagatgtgtatgattctattgaagg

SEQ ID NO: 340981 - DNA, 25 bp, Artificial
  probe
  misc_feature (1)..(25): SEQ ID NO: 2917; WAN024DVQ; Start 292; Stop 316
ttggagtacctcaatgtaggacaga

SEQ ID NO: 340982 - DNA, 25 bp, Artificial
  probe
  misc_feature (1)..(25): SEQ ID NO: 2917; WAN024DVQ; Start 10; Stop 34
gagtttgttcgtattgatgaccgtc

SEQ ID NO: 340983 - DNA, 25 bp, Artificial
  probe
  misc_feature (1)..(25): SEQ ID NO: 2917; WAN024DVQ; Start 98; Stop 122
ttaatgatcgcatctcagaagataa

SEQ ID NO: 340984 - DNA, 25 bp, Artificial
  probe
  misc_feature (1)..(25): SEQ ID NO: 2917; WAN024DVQ; Start 9; Stop 33
agagtttgttcgtattgatgaccgt

SEQ ID NO: 340985 - DNA, 25 bp, Artificial
  probe
  misc_feature (1)..(25): SEQ ID NO: 2917; WAN024DVQ; Start 12; Stop 36
gtttgttcgtattgatgaccgtctg

SEQ ID NO: 340986 - DNA, 25 bp, Artificial
  probe
  misc_feature (1)..(25): SEQ ID NO: 2918; WAN024CRV; Start 688; Stop 712
caacagattaacacttgtcaccttg

SEQ ID NO: 340987 - DNA, 25 bp, Artificial
  probe
  misc_feature (1)..(25): SEQ ID NO: 2918; WAN024CRV; Start 687; Stop 711
ccaacagattaacacttgtcacctt

SEQ ID NO: 340988 - DNA, 25 bp, Artificial
  probe
  misc_feature (1)..(25): SEQ ID NO: 2918; WAN024CRV; Start 689; Stop 713
aacagattaacacttgtcaccttgc

SEQ ID NO: 340989 - DNA, 25 bp, Artificial
  probe
  misc_feature (1)..(25): SEQ ID NO: 2918; WAN024CRV; Start 625; Stop 649
gactaccatatccactactttgaga

SEQ ID NO: 340990 - DNA, 25 bp, Artificial
  probe
  misc_feature (1)..(25): SEQ ID NO: 2918; WAN024CRV; Start 629; Stop 653
accatatccactactttgagatgag

SEQ ID NO: 340991 - DNA, 25 bp, Artificial
  probe
  misc_feature (1)..(25): SEQ ID NO: 2918; WAN024CRV; Start 630; Stop 654
ccatatccactactttgagatgaga

SEQ ID NO: 340992 - DNA, 25 bp, Artificial
  probe
  misc_feature (1)..(25): SEQ ID NO: 2918; WAN024CRV; Start 632; Stop 656
atatccactactttgagatgagaca

SEQ ID NO: 340993 - DNA, 25 bp, Artificial
  probe
  misc_feature (1)..(25): SEQ ID NO: 2918; WAN024CRV; Start 626; Stop 650
actaccatatccactactttgagat

SEQ ID NO: 340994 - DNA, 25 bp, Artificial
  probe
  misc_feature (1)..(25): SEQ ID NO: 2918; WAN024CRV; Start 205; Stop 229
tttcacttgagcggatttcatatct

SEQ ID NO: 340995 - DNA, 25 bp, Artificial
  probe
  misc_feature (1)..(25): SEQ ID NO: 2918; WAN024CRV; Start 631; Stop 655
catatccactactttgagatgagac

SEQ ID NO: 340996 - DNA, 25 bp, Artificial
  probe
  misc_feature (1)..(25): SEQ ID NO: 2918; WAN024CRV; Start 628; Stop 652
taccatatccactactttgagatga

SEQ ID NO: 340997 - DNA, 25 bp, Artificial
  probe
  misc_feature (1)..(25): SEQ ID NO: 2918; WAN024CRV; Start 206; Stop 230
ttcacttgagcggatttcatatctg

SEQ ID NO: 340998 - DNA, 25 bp, Artificial
  probe
  misc_feature (1)..(25): SEQ ID NO: 2918; WAN024CRV; Start 627; Stop 651
ctaccatatccactactttgagatg

SEQ ID NO: 340999 - DNA, 25 bp, Artificial
  probe
  misc_feature (1)..(25): SEQ ID NO: 2918; WAN024CRV; Start 781; Stop 805
cctgcttctgatttgctagatgaaa

SEQ ID NO: 341000 - DNA, 25 bp, Artificial
  probe
  misc_feature (1)..(25): SEQ ID NO: 2918; WAN024CRV; Start 782; Stop 806
ctgcttctgatttgctagatgaaat

SEQ ID NO: 341001 - DNA, 25 bp, Artificial
  probe
  misc_feature (1)..(25): SEQ ID NO: 2918; WAN024CRV; Start 660; Stop 684
acaaagtcgtatcctgagaaacatg

SEQ ID NO: 341002 - DNA, 25 bp, Artificial
  probe
  misc_feature (1)..(25): SEQ ID NO: 2918; WAN024CRV; Start 783; Stop 807
tgcttctgatttgctagatgaaatt

SEQ ID NO: 341003 - DNA, 25 bp, Artificial
  probe
  misc_feature (1)..(25): SEQ ID NO: 2918; WAN024CRV; Start 659; Stop 683
gacaaagtcgtatcctgagaaacat

SEQ ID NO: 341004 - DNA, 25 bp, Artificial
  probe
  misc_feature (1)..(25): SEQ ID NO: 2918; WAN024CRV; Start 788; Stop 812
ctgatttgctagatgaaattgaacg

SEQ ID NO: 341005 - DNA, 25 bp, Artificial
  probe
  misc_feature (1)..(25): SEQ ID NO: 2918; WAN024CRV; Start 784; Stop 808
gcttctgatttgctagatgaaattg

SEQ ID NO: 341006 - DNA, 25 bp, Artificial
  probe
  misc_feature (1)..(25): SEQ ID NO: 2918; WAN024CRV; Start 779; Stop 803
atcctgcttctgatttgctagatga

SEQ ID NO: 341007 - DNA, 25 bp, Artificial
  probe
  misc_feature (1)..(25): SEQ ID NO: 2918; WAN024CRV; Start 501; Stop 525
atactatttatccagaggagacgga

SEQ ID NO: 341008 - DNA, 25 bp, Artificial
  probe
  misc_feature (1)..(25): SEQ ID NO: 2918; WAN024CRV; Start 661; Stop 685
caaagtcgtatcctgagaaacatgg

SEQ ID NO: 341009 - DNA, 25 bp, Artificial
  probe
  misc_feature (1)..(25): SEQ ID NO: 2918; WAN024CRV; Start 502; Stop 526
tactatttatccagaggagacggac

SEQ ID NO: 341010 - DNA, 25 bp, Artificial
  probe
  misc_feature (1)..(25): SEQ ID NO: 2918; WAN024CRV; Start 581; Stop 605
gactggtctatttggatcactctga

SEQ ID NO: 341011 - DNA, 25 bp, Artificial
  probe
  misc_feature (1)..(25): SEQ ID NO: 2918; WAN024CRV; Start 500; Stop 524
aatactatttatccagaggagacgg

SEQ ID NO: 341012 - DNA, 25 bp, Artificial
  probe
  misc_feature (1)..(25): SEQ ID NO: 2918; WAN024CRV; Start 780; Stop 804
tcctgcttctgatttgctagatgaa

SEQ ID NO: 341013 - DNA, 25 bp, Artificial
  probe
  misc_feature (1)..(25): SEQ ID NO: 2918; WAN024CRV; Start 580; Stop 604
agactggtctatttggatcactctg

SEQ ID NO: 341014 - DNA, 25 bp, Artificial
  probe
  misc_feature (1)..(25): SEQ ID NO: 2918; WAN024CRV; Start 579; Stop 603
cagactggtctatttggatcactct

SEQ ID NO: 341015 - DNA, 25 bp, Artificial
  probe
  misc_feature (1)..(25): SEQ ID NO: 2918; WAN024CRV; Start 578; Stop 602
tcagactggtctatttggatcactc

SEQ ID NO: 341016 - DNA, 25 bp, Artificial
  probe
  misc_feature (1)..(25): SEQ ID NO: 2918; WAN024CRV; Start 577; Stop 601
ctcagactggtctatttggatcact

SEQ ID NO: 341017 - DNA, 25 bp, Artificial
  probe
  misc_feature (1)..(25): SEQ ID NO: 2918; WAN024CRV; Start 690; Stop 714
acagattaacacttgtcaccttgcc

SEQ ID NO: 341018 - DNA, 25 bp, Artificial
  probe
  misc_feature (1)..(25): SEQ ID NO: 2918; WAN024CRV; Start 211; Stop 235
ttgagcggatttcatatctggagtc

SEQ ID NO: 341019 - DNA, 25 bp, Artificial
  probe
  misc_feature (1)..(25): SEQ ID NO: 2919; WAN024DEN; Start 462; Stop 486
tagtctacttggttatctggcgatt

SEQ ID NO: 341020 - DNA, 25 bp, Artificial
  probe
  misc_feature (1)..(25): SEQ ID NO: 2919; WAN024DEN; Start 461; Stop 485
ctagtctacttggttatctggcgat

SEQ ID NO: 341021 - DNA, 25 bp, Artificial
  probe
  misc_feature (1)..(25): SEQ ID NO: 2919; WAN024DEN; Start 878; Stop 902
caattcttgtcttagcagccttctt

SEQ ID NO: 341022 - DNA, 25 bp, Artificial
  probe
  misc_feature (1)..(25): SEQ ID NO: 2919; WAN024DEN; Start 24; Stop 48
cctcttggtgtcttctatgctgatt

SEQ ID NO: 341023 - DNA, 25 bp, Artificial
  probe
  misc_feature (1)..(25): SEQ ID NO: 2919; WAN024DEN; Start 463; Stop 487
agtctacttggttatctggcgattg

SEQ ID NO: 341024 - DNA, 25 bp, Artificial
  probe
  misc_feature (1)..(25): SEQ ID NO: 2919; WAN024DEN; Start 494; Stop 518
cattccttgcttggtttattctctt

SEQ ID NO: 341025 - DNA, 25 bp, Artificial
  probe
  misc_feature (1)..(25): SEQ ID NO: 2919; WAN024DEN; Start 492; Stop 516
ctcattccttgcttggtttattctc

SEQ ID NO: 341026 - DNA, 25 bp, Artificial
  probe
  misc_feature (1)..(25): SEQ ID NO: 2919; WAN024DEN; Start 490; Stop 514
ttctcattccttgcttggtttattc

SEQ ID NO: 341027 - DNA, 25 bp, Artificial
  probe
  misc_feature (1)..(25): SEQ ID NO: 2919; WAN024DEN; Start 489; Stop 513
cttctcattccttgcttggtttatt

SEQ ID NO: 341028 - DNA, 25 bp, Artificial
  probe
  misc_feature (1)..(25): SEQ ID NO: 2919; WAN024DEN; Start 28; Stop 52
ttggtgtcttctatgctgatttact

SEQ ID NO: 341029 - DNA, 25 bp, Artificial
  probe
  misc_feature (1)..(25): SEQ ID NO: 2919; WAN024DEN; Start 47; Stop 71
tttactcagcacctctcatctttac

SEQ ID NO: 341030 - DNA, 25 bp, Artificial
  probe
  misc_feature (1)..(25): SEQ ID NO: 2919; WAN024DEN; Start 27; Stop 51
cttggtgtcttctatgctgatttac

SEQ ID NO: 341031 - DNA, 25 bp, Artificial
  probe
  misc_feature (1)..(25): SEQ ID NO: 2919; WAN024DEN; Start 26; Stop 50
tcttggtgtcttctatgctgattta

SEQ ID NO: 341032 - DNA, 25 bp, Artificial
  probe
  misc_feature (1)..(25): SEQ ID NO: 2919; WAN024DEN; Start 493; Stop 517
tcattccttgcttggtttattctct

SEQ ID NO: 341033 - DNA, 25 bp, Artificial
  probe
  misc_feature (1)..(25): SEQ ID NO: 2919; WAN024DEN; Start 491; Stop 515
tctcattccttgcttggtttattct

SEQ ID NO: 341034 - DNA, 25 bp, Artificial
  probe
  misc_feature (1)..(25): SEQ ID NO: 2919; WAN024DEN; Start 29; Stop 53
tggtgtcttctatgctgatttactc

SEQ ID NO: 341035 - DNA, 25 bp, Artificial
  probe
  misc_feature (1)..(25): SEQ ID NO: 2919; WAN024DEN; Start 46; Stop 70
atttactcagcacctctcatcttta

SEQ ID NO: 341036 - DNA, 25 bp, Artificial
  probe
  misc_feature (1)..(25): SEQ ID NO: 2919; WAN024DEN; Start 694; Stop 718
actattgttggacctggatttatcg

SEQ ID NO: 341037 - DNA, 25 bp, Artificial
  probe
  misc_feature (1)..(25): SEQ ID NO: 2919; WAN024DEN; Start 45; Stop 69
gatttactcagcacctctcatcttt

SEQ ID NO: 341038 - DNA, 25 bp, Artificial
  probe
  misc_feature (1)..(25): SEQ ID NO: 2919; WAN024DEN; Start 25; Stop 49
ctcttggtgtcttctatgctgattt

SEQ ID NO: 341039 - DNA, 25 bp, Artificial
  probe
  misc_feature (1)..(25): SEQ ID NO: 2919; WAN024DEN; Start 495; Stop 519
attccttgcttggtttattctcttt

SEQ ID NO: 341040 - DNA, 25 bp, Artificial
  probe
  misc_feature (1)..(25): SEQ ID NO: 2919; WAN024DEN; Start 121; Stop 145
cttgaaggaattatggttatgggtg

SEQ ID NO: 341041 - DNA, 25 bp, Artificial
  probe
  misc_feature (1)..(25): SEQ ID NO: 2919; WAN024DEN; Start 54; Stop 78
agcacctctcatctttacaagtatc

SEQ ID NO: 341042 - DNA, 25 bp, Artificial
  probe
  misc_feature (1)..(25): SEQ ID NO: 2919; WAN024DEN; Start 53; Stop 77
cagcacctctcatctttacaagtat

SEQ ID NO: 341043 - DNA, 25 bp, Artificial
  probe
  misc_feature (1)..(25): SEQ ID NO: 2919; WAN024DEN; Start 151; Stop 175
tctggagttgtctttaaccttgaat

SEQ ID NO: 341044 - DNA, 25 bp, Artificial
  probe
  misc_feature (1)..(25): SEQ ID NO: 2919; WAN024DEN; Start 59; Stop 83
ctctcatctttacaagtatcggtgg

SEQ ID NO: 341045 - DNA, 25 bp, Artificial
  probe
  misc_feature (1)..(25): SEQ ID NO: 2919; WAN024DEN; Start 58; Stop 82
cctctcatctttacaagtatcggtg

SEQ ID NO: 341046 - DNA, 25 bp, Artificial
  probe
  misc_feature (1)..(25): SEQ ID NO: 2919; WAN024DEN; Start 56; Stop 80
cacctctcatctttacaagtatcgg

SEQ ID NO: 341047 - DNA, 25 bp, Artificial
  probe
  misc_feature (1)..(25): SEQ ID NO: 2919; WAN024DEN; Start 488; Stop 512
ccttctcattccttgcttggtttat

SEQ ID NO: 341048 - DNA, 25 bp, Artificial
  probe
  misc_feature (1)..(25): SEQ ID NO: 2919; WAN024DEN; Start 150; Stop 174
ttctggagttgtctttaaccttgaa

SEQ ID NO: 341049 - DNA, 25 bp, Artificial
  probe
  misc_feature (1)..(25): SEQ ID NO: 2919; WAN024DEN; Start 149; Stop 173
tttctggagttgtctttaaccttga

SEQ ID NO: 341050 - DNA, 25 bp, Artificial
  probe
  misc_feature (1)..(25): SEQ ID NO: 2919; WAN024DEN; Start 49; Stop 73
tactcagcacctctcatctttacaa

SEQ ID NO: 341051 - DNA, 25 bp, Artificial
  probe
  misc_feature (1)..(25): SEQ ID NO: 2919; WAN024DEN; Start 48; Stop 72
ttactcagcacctctcatctttaca

SEQ ID NO: 341052 - DNA, 25 bp, Artificial
  probe
  misc_feature (1)..(25): SEQ ID NO: 2920; WAN024C6S; Start 702; Stop 726
tatcgctcttatctaccttcacctt

SEQ ID NO: 341053 - DNA, 25 bp, Artificial
  probe
  misc_feature (1)..(25): SEQ ID NO: 2920; WAN024C6S; Start 697; Stop 721
gttgctatcgctcttatctaccttc

SEQ ID NO: 341054 - DNA, 25 bp, Artificial
  probe
  misc_feature (1)..(25): SEQ ID NO: 2920; WAN024C6S; Start 701; Stop 725
ctatcgctcttatctaccttcacct

SEQ ID NO: 341055 - DNA, 25 bp, Artificial
  probe
  misc_feature (1)..(25): SEQ ID NO: 2920; WAN024C6S; Start 698; Stop 722
ttgctatcgctcttatctaccttca

SEQ ID NO: 341056 - DNA, 25 bp, Artificial
  probe
  misc_feature (1)..(25): SEQ ID NO: 2920; WAN024C6S; Start 665; Stop 689
atattactctaatcggattcggtgc

SEQ ID NO: 341057 - DNA, 25 bp, Artificial
  probe
  misc_feature (1)..(25): SEQ ID NO: 2920; WAN024C6S; Start 668; Stop 692
ttactctaatcggattcggtgctat

SEQ ID NO: 341058 - DNA, 25 bp, Artificial
  probe
  misc_feature (1)..(25): SEQ ID NO: 2920; WAN024C6S; Start 657; Stop 681
tgtgtcagatattactctaatcgga

SEQ ID NO: 341059 - DNA, 25 bp, Artificial
  probe
  misc_feature (1)..(25): SEQ ID NO: 2920; WAN024C6S; Start 699; Stop 723
tgctatcgctcttatctaccttcac

SEQ ID NO: 341060 - DNA, 25 bp, Artificial
  probe
  misc_feature (1)..(25): SEQ ID NO: 2920; WAN024C6S; Start 667; Stop 691
attactctaatcggattcggtgcta

SEQ ID NO: 341061 - DNA, 25 bp, Artificial
  probe
  misc_feature (1)..(25): SEQ ID NO: 2920; WAN024C6S; Start 666; Stop 690
tattactctaatcggattcggtgct

SEQ ID NO: 341062 - DNA, 25 bp, Artificial
  probe
  misc_feature (1)..(25): SEQ ID NO: 2920; WAN024C6S; Start 664; Stop 688
gatattactctaatcggattcggtg

SEQ ID NO: 341063 - DNA, 25 bp, Artificial
  probe
  misc_feature (1)..(25): SEQ ID NO: 2920; WAN024C6S; Start 663; Stop 687
agatattactctaatcggattcggt

SEQ ID NO: 341064 - DNA, 25 bp, Artificial
  probe
  misc_feature (1)..(25): SEQ ID NO: 2920; WAN024C6S; Start 669; Stop 693
tactctaatcggattcggtgctatc

SEQ ID NO: 341065 - DNA, 25 bp, Artificial
  probe
  misc_feature (1)..(25): SEQ ID NO: 2920; WAN024C6S; Start 652; Stop 676
gctgctgtgtcagatattactctaa

SEQ ID NO: 341066 - DNA, 25 bp, Artificial
  probe
  misc_feature (1)..(25): SEQ ID NO: 2920; WAN024C6S; Start 662; Stop 686
cagatattactctaatcggattcgg

SEQ ID NO: 341067 - DNA, 25 bp, Artificial
  probe
  misc_feature (1)..(25): SEQ ID NO: 2920; WAN024C6S; Start 655; Stop 679
gctgtgtcagatattactctaatcg

SEQ ID NO: 341068 - DNA, 25 bp, Artificial
  probe
  misc_feature (1)..(25): SEQ ID NO: 2920; WAN024C6S; Start 700; Stop 724
gctatcgctcttatctaccttcacc

SEQ ID NO: 341069 - DNA, 25 bp, Artificial
  probe
  misc_feature (1)..(25): SEQ ID NO: 2920; WAN024C6S; Start 656; Stop 680
ctgtgtcagatattactctaatcgg

SEQ ID NO: 341070 - DNA, 25 bp, Artificial
  probe
  misc_feature (1)..(25): SEQ ID NO: 2920; WAN024C6S; Start 658; Stop 682
gtgtcagatattactctaatcggat

SEQ ID NO: 341071 - DNA, 25 bp, Artificial
  probe
  misc_feature (1)..(25): SEQ ID NO: 2920; WAN024C6S; Start 661; Stop 685
tcagatattactctaatcggattcg

SEQ ID NO: 341072 - DNA, 25 bp, Artificial
  probe
  misc_feature (1)..(25): SEQ ID NO: 2920; WAN024C6S; Start 21; Stop 45
tttagtagtcgttgtagccttcttt

SEQ ID NO: 341073 - DNA, 25 bp, Artificial
  probe
  misc_feature (1)..(25): SEQ ID NO: 2920; WAN024C6S; Start 22; Stop 46
ttagtagtcgttgtagccttctttg

SEQ ID NO: 341074 - DNA, 25 bp, Artificial
  probe
  misc_feature (1)..(25): SEQ ID NO: 2920; WAN024C6S; Start 654; Stop 678
tgctgtgtcagatattactctaatc

SEQ ID NO: 341075 - DNA, 25 bp, Artificial
  probe
  misc_feature (1)..(25): SEQ ID NO: 2920; WAN024C6S; Start 653; Stop 677
ctgctgtgtcagatattactctaat

SEQ ID NO: 341076 - DNA, 25 bp, Artificial
  probe
  misc_feature (1)..(25): SEQ ID NO: 2920; WAN024C6S; Start 651; Stop 675
cgctgctgtgtcagatattactcta

SEQ ID NO: 341077 - DNA, 25 bp, Artificial
  probe
  misc_feature (1)..(25): SEQ ID NO: 2920; WAN024C6S; Start 706; Stop 730
gctcttatctaccttcacctttcta

SEQ ID NO: 341078 - DNA, 25 bp, Artificial
  probe
  misc_feature (1)..(25): SEQ ID NO: 2920; WAN024C6S; Start 241; Stop 265
attatcatggttcttggtggtgact

SEQ ID NO: 341079 - DNA, 25 bp, Artificial
  probe
  misc_feature (1)..(25): SEQ ID NO: 2920; WAN024C6S; Start 240; Stop 264
cattatcatggttcttggtggtgac

SEQ ID NO: 341080 - DNA, 25 bp, Artificial
  probe
  misc_feature (1)..(25): SEQ ID NO: 2920; WAN024C6S; Start 703; Stop 727
atcgctcttatctaccttcaccttt

SEQ ID NO: 341081 - DNA, 25 bp, Artificial
  probe
  misc_feature (1)..(25): SEQ ID NO: 2920; WAN024C6S; Start 242; Stop 266
ttatcatggttcttggtggtgactt

SEQ ID NO: 341082 - DNA, 25 bp, Artificial
  probe
  misc_feature (1)..(25): SEQ ID NO: 2920; WAN024C6S; Start 776; Stop 800
caatcggcgatatcctagaagacta

SEQ ID NO: 341083 - DNA, 25 bp, Artificial
  probe
  misc_feature (1)..(25): SEQ ID NO: 2920; WAN024C6S; Start 705; Stop 729
cgctcttatctaccttcacctttct

SEQ ID NO: 341084 - DNA, 25 bp, Artificial
  probe
  misc_feature (1)..(25): SEQ ID NO: 2920; WAN024C6S; Start 704; Stop 728
tcgctcttatctaccttcacctttc

SEQ ID NO: 341085 - DNA, 25 bp, Artificial
  probe
  misc_feature (1)..(25): SEQ ID NO: 2921; WAN024DAE; Start 169; Stop 193
cttggtatcgtgattgatgcttatg

SEQ ID NO: 341086 - DNA, 25 bp, Artificial
  probe
  misc_feature (1)..(25): SEQ ID NO: 2921; WAN024DAE; Start 168; Stop 192
ccttggtatcgtgattgatgcttat

SEQ ID NO: 341087 - DNA, 25 bp, Artificial
  probe
  misc_feature (1)..(25): SEQ ID NO: 2921; WAN024DAE; Start 170; Stop 194
ttggtatcgtgattgatgcttatgg

SEQ ID NO: 341088 - DNA, 25 bp, Artificial
  probe
  misc_feature (1)..(25): SEQ ID NO: 2921; WAN024DAE; Start 172; Stop 196
ggtatcgtgattgatgcttatggag

SEQ ID NO: 341089 - DNA, 25 bp, Artificial
  probe
  misc_feature (1)..(25): SEQ ID NO: 2921; WAN024DAE; Start 317; Stop 341
aacttgttggtgatgaattggctaa

SEQ ID NO: 341090 - DNA, 25 bp, Artificial
  probe
  misc_feature (1)..(25): SEQ ID NO: 2921; WAN024DAE; Start 171; Stop 195
tggtatcgtgattgatgcttatgga

SEQ ID NO: 341091 - DNA, 25 bp, Artificial
  probe
  misc_feature (1)..(25): SEQ ID NO: 2921; WAN024DAE; Start 167; Stop 191
accttggtatcgtgattgatgctta

SEQ ID NO: 341092 - DNA, 25 bp, Artificial
  probe
  misc_feature (1)..(25): SEQ ID NO: 2921; WAN024DAE; Start 31; Stop 55
ggtttgagattgaaagaagttgtga

SEQ ID NO: 341093 - DNA, 25 bp, Artificial
  probe
  misc_feature (1)..(25): SEQ ID NO: 2921; WAN024DAE; Start 30; Stop 54
aggtttgagattgaaagaagttgtg

SEQ ID NO: 341094 - DNA, 25 bp, Artificial
  probe
  misc_feature (1)..(25): SEQ ID NO: 2921; WAN024DAE; Start 29; Stop 53
caggtttgagattgaaagaagttgt

SEQ ID NO: 341095 - DNA, 25 bp, Artificial
  probe
  misc_feature (1)..(25): SEQ ID NO: 2921; WAN024DAE; Start 166; Stop 190
aaccttggtatcgtgattgatgctt

SEQ ID NO: 341096 - DNA, 25 bp, Artificial
  probe
  misc_feature (1)..(25): SEQ ID NO: 2921; WAN024DAE; Start 316; Stop 340
caacttgttggtgatgaattggcta

SEQ ID NO: 341097 - DNA, 25 bp, Artificial
  probe
  misc_feature (1)..(25): SEQ ID NO: 2921; WAN024DAE; Start 28; Stop 52
gcaggtttgagattgaaagaagttg

SEQ ID NO: 341098 - DNA, 25 bp, Artificial
  probe
  misc_feature (1)..(25): SEQ ID NO: 2921; WAN024DAE; Start 35; Stop 59
tgagattgaaagaagttgtgaaaga

SEQ ID NO: 341099 - DNA, 25 bp, Artificial
  probe
  misc_feature (1)..(25): SEQ ID NO: 2921; WAN024DAE; Start 142; Stop 166
gcagaagtaaacaaagaagaacaaa

SEQ ID NO: 341100 - DNA, 25 bp, Artificial
  probe
  misc_feature (1)..(25): SEQ ID NO: 2921; WAN024DAE; Start 1; Stop 25
atgtctattgttatcggtgcagatg

SEQ ID NO: 341101 - DNA, 25 bp, Artificial
  probe
  misc_feature (1)..(25): SEQ ID NO: 2921; WAN024DAE; Start 36; Stop 60
gagattgaaagaagttgtgaaagac

SEQ ID NO: 341102 - DNA, 25 bp, Artificial
  probe
  misc_feature (1)..(25): SEQ ID NO: 2921; WAN024DAE; Start 32; Stop 56
gtttgagattgaaagaagttgtgaa

SEQ ID NO: 341103 - DNA, 25 bp, Artificial
  probe
  misc_feature (1)..(25): SEQ ID NO: 2921; WAN024DAE; Start 318; Stop 342
acttgttggtgatgaattggctaaa

SEQ ID NO: 341104 - DNA, 25 bp, Artificial
  probe
  misc_feature (1)..(25): SEQ ID NO: 2921; WAN024DAE; Start 34; Stop 58
ttgagattgaaagaagttgtgaaag

SEQ ID NO: 341105 - DNA, 25 bp, Artificial
  probe
  misc_feature (1)..(25): SEQ ID NO: 2921; WAN024DAE; Start 37; Stop 61
agattgaaagaagttgtgaaagact

SEQ ID NO: 341106 - DNA, 25 bp, Artificial
  probe
  misc_feature (1)..(25): SEQ ID NO: 2921; WAN024DAE; Start 216; Stop 240
aactaagatcaaaggaatggttgct

SEQ ID NO: 341107 - DNA, 25 bp, Artificial
  probe
  misc_feature (1)..(25): SEQ ID NO: 2921; WAN024DAE; Start 33; Stop 57
tttgagattgaaagaagttgtgaaa

SEQ ID NO: 341108 - DNA, 25 bp, Artificial
  probe
  misc_feature (1)..(25): SEQ ID NO: 2921; WAN024DAE; Start 217; Stop 241
actaagatcaaaggaatggttgctg

SEQ ID NO: 341109 - DNA, 25 bp, Artificial
  probe
  misc_feature (1)..(25): SEQ ID NO: 2921; WAN024DAE; Start 173; Stop 197
gtatcgtgattgatgcttatggagc

SEQ ID NO: 341110 - DNA, 25 bp, Artificial
  probe
  misc_feature (1)..(25): SEQ ID NO: 2921; WAN024DAE; Start 109; Stop 133
caagactttgttgatgtgactctcg

SEQ ID NO: 341111 - DNA, 25 bp, Artificial
  probe
  misc_feature (1)..(25): SEQ ID NO: 2921; WAN024DAE; Start 141; Stop 165
tgcagaagtaaacaaagaagaacaa

SEQ ID NO: 341112 - DNA, 25 bp, Artificial
  probe
  misc_feature (1)..(25): SEQ ID NO: 2921; WAN024DAE; Start 165; Stop 189
aaaccttggtatcgtgattgatgct

SEQ ID NO: 341113 - DNA, 25 bp, Artificial
  probe
  misc_feature (1)..(25): SEQ ID NO: 2921; WAN024DAE; Start 285; Stop 309
caacaactcacgtatgatcactatg

SEQ ID NO: 341114 - DNA, 25 bp, Artificial
  probe
  misc_feature (1)..(25): SEQ ID NO: 2921; WAN024DAE; Start 284; Stop 308
acaacaactcacgtatgatcactat

SEQ ID NO: 341115 - DNA, 25 bp, Artificial
  probe
  misc_feature (1)..(25): SEQ ID NO: 2921; WAN024DAE; Start 27; Stop 51
tgcaggtttgagattgaaagaagtt

SEQ ID NO: 341116 - DNA, 25 bp, Artificial
  probe
  misc_feature (1)..(25): SEQ ID NO: 2921; WAN024DAE; Start 213; Stop 237
tgcaactaagatcaaaggaatggtt

SEQ ID NO: 341117 - DNA, 25 bp, Artificial
  probe
  misc_feature (1)..(25): SEQ ID NO: 2921; WAN024DAE; Start 218; Stop 242
ctaagatcaaaggaatggttgctgc

SEQ ID NO: 341118 - DNA, 25 bp, Artificial
  probe
  misc_feature (1)..(25): SEQ ID NO: 2922; WAN024CXK; Start 709; Stop 733
tatgatggtatcgttcgtgtaacat

SEQ ID NO: 341119 - DNA, 25 bp, Artificial
  probe
  misc_feature (1)..(25): SEQ ID NO: 2922; WAN024CXK; Start 708; Stop 732
ctatgatggtatcgttcgtgtaaca

SEQ ID NO: 341120 - DNA, 25 bp, Artificial
  probe
  misc_feature (1)..(25): SEQ ID NO: 2922; WAN024CXK; Start 707; Stop 731
cctatgatggtatcgttcgtgtaac

SEQ ID NO: 341121 - DNA, 25 bp, Artificial
  probe
  misc_feature (1)..(25): SEQ ID NO: 2922; WAN024CXK; Start 714; Stop 738
tggtatcgttcgtgtaacatcagat

SEQ ID NO: 341122 - DNA, 25 bp, Artificial
  probe
  misc_feature (1)..(25): SEQ ID NO: 2922; WAN024CXK; Start 713; Stop 737
atggtatcgttcgtgtaacatcaga

SEQ ID NO: 341123 - DNA, 25 bp, Artificial
  probe
  misc_feature (1)..(25): SEQ ID NO: 2922; WAN024CXK; Start 706; Stop 730
gcctatgatggtatcgttcgtgtaa

SEQ ID NO: 341124 - DNA, 25 bp, Artificial
  probe
  misc_feature (1)..(25): SEQ ID NO: 2922; WAN024CXK; Start 433; Stop 457
gacaatccagctaatccagaagtac

SEQ ID NO: 341125 - DNA, 25 bp, Artificial
  probe
  misc_feature (1)..(25): SEQ ID NO: 2922; WAN024CXK; Start 161; Stop 185
aagctgaacaagatggtattctgaa

SEQ ID NO: 341126 - DNA, 25 bp, Artificial
  probe
  misc_feature (1)..(25): SEQ ID NO: 2922; WAN024CXK; Start 435; Stop 459
caatccagctaatccagaagtacac

SEQ ID NO: 341127 - DNA, 25 bp, Artificial
  probe
  misc_feature (1)..(25): SEQ ID NO: 2922; WAN024CXK; Start 432; Stop 456
tgacaatccagctaatccagaagta

SEQ ID NO: 341128 - DNA, 25 bp, Artificial
  probe
  misc_feature (1)..(25): SEQ ID NO: 2922; WAN024CXK; Start 434; Stop 458
acaatccagctaatccagaagtaca

SEQ ID NO: 341129 - DNA, 25 bp, Artificial
  probe
  misc_feature (1)..(25): SEQ ID NO: 2922; WAN024CXK; Start 256; Stop 280
aaagggtataaagtcgtcatcgtta

SEQ ID NO: 341130 - DNA, 25 bp, Artificial
  probe
  misc_feature (1)..(25): SEQ ID NO: 2922; WAN024CXK; Start 255; Stop 279
taaagggtataaagtcgtcatcgtt

SEQ ID NO: 341131 - DNA, 25 bp, Artificial
  probe
  misc_feature (1)..(25): SEQ ID NO: 2922; WAN024CXK; Start 254; Stop 278
ctaaagggtataaagtcgtcatcgt

SEQ ID NO: 341132 - DNA, 25 bp, Artificial
  probe
  misc_feature (1)..(25): SEQ ID NO: 2922; WAN024CXK; Start 14; Stop 38
acaacattactgaattaatcggtca

SEQ ID NO: 341133 - DNA, 25 bp, Artificial
  probe
  misc_feature (1)..(25): SEQ ID NO: 2922; WAN024CXK; Start 252; Stop 276
tgctaaagggtataaagtcgtcatc

SEQ ID NO: 341134 - DNA, 25 bp, Artificial
  probe
  misc_feature (1)..(25): SEQ ID NO: 2922; WAN024CXK; Start 251; Stop 275
ctgctaaagggtataaagtcgtcat

SEQ ID NO: 341135 - DNA, 25 bp, Artificial
  probe
  misc_feature (1)..(25): SEQ ID NO: 2922; WAN024CXK; Start 700; Stop 724
actaaagcctatgatggtatcgttc

SEQ ID NO: 341136 - DNA, 25 bp, Artificial
  probe
  misc_feature (1)..(25): SEQ ID NO: 2922; WAN024CXK; Start 105; Stop 129
agcatttaatcctggttcatctgta

SEQ ID NO: 341137 - DNA, 25 bp, Artificial
  probe
  misc_feature (1)..(25): SEQ ID NO: 2922; WAN024CXK; Start 106; Stop 130
gcatttaatcctggttcatctgtaa

SEQ ID NO: 341138 - DNA, 25 bp, Artificial
  probe
  misc_feature (1)..(25): SEQ ID NO: 2922; WAN024CXK; Start 409; Stop 433
gatggtttccttcctcttcaatttg

SEQ ID NO: 341139 - DNA, 25 bp, Artificial
  probe
  misc_feature (1)..(25): SEQ ID NO: 2922; WAN024CXK; Start 244; Stop 268
gtaggtgctgctaaagggtataaag

SEQ ID NO: 341140 - DNA, 25 bp, Artificial
  probe
  misc_feature (1)..(25): SEQ ID NO: 2922; WAN024CXK; Start 684; Stop 708
tcctgatacacttgatactaaagcc

SEQ ID NO: 341141 - DNA, 25 bp, Artificial
  probe
  misc_feature (1)..(25): SEQ ID NO: 2922; WAN024CXK; Start 492; Stop 516
tttcggtaaagatggattagatgcc

SEQ ID NO: 341142 - DNA, 25 bp, Artificial
  probe
  misc_feature (1)..(25): SEQ ID NO: 2922; WAN024CXK; Start 104; Stop 128
aagcatttaatcctggttcatctgt

SEQ ID NO: 341143 - DNA, 25 bp, Artificial
  probe
  misc_feature (1)..(25): SEQ ID NO: 2922; WAN024CXK; Start 685; Stop 709
cctgatacacttgatactaaagcct

SEQ ID NO: 341144 - DNA, 25 bp, Artificial
  probe
  misc_feature (1)..(25): SEQ ID NO: 2922; WAN024CXK; Start 699; Stop 723
tactaaagcctatgatggtatcgtt

SEQ ID NO: 341145 - DNA, 25 bp, Artificial
  probe
  misc_feature (1)..(25): SEQ ID NO: 2922; WAN024CXK; Start 103; Stop 127
gaagcatttaatcctggttcatctg

SEQ ID NO: 341146 - DNA, 25 bp, Artificial
  probe
  misc_feature (1)..(25): SEQ ID NO: 2922; WAN024CXK; Start 693; Stop 717
acttgatactaaagcctatgatggt

SEQ ID NO: 341147 - DNA, 25 bp, Artificial
  probe
  misc_feature (1)..(25): SEQ ID NO: 2922; WAN024CXK; Start 258; Stop 282
agggtataaagtcgtcatcgttatg

SEQ ID NO: 341148 - DNA, 25 bp, Artificial
  probe
  misc_feature (1)..(25): SEQ ID NO: 2922; WAN024CXK; Start 257; Stop 281
aagggtataaagtcgtcatcgttat

SEQ ID NO: 341149 - DNA, 25 bp, Artificial
  probe
  misc_feature (1)..(25): SEQ ID NO: 2922; WAN024CXK; Start 245; Stop 269
taggtgctgctaaagggtataaagt

SEQ ID NO: 341150 - DNA, 25 bp, Artificial
  probe
  misc_feature (1)..(25): SEQ ID NO: 2922; WAN024CXK; Start 163; Stop 187
gctgaacaagatggtattctgaaac

SEQ ID NO: 341151 - DNA, 25 bp, Artificial
  probe
  misc_feature (1)..(25): SEQ ID NO: 2923; WAN024B7U; Start 564; Stop 588
tcgtgttgatgaagttgatgataga

SEQ ID NO: 341152 - DNA, 25 bp, Artificial
  probe
  misc_feature (1)..(25): SEQ ID NO: 2923; WAN024B7U; Start 565; Stop 589
cgtgttgatgaagttgatgatagag

SEQ ID NO: 341153 - DNA, 25 bp, Artificial
  probe
  misc_feature (1)..(25): SEQ ID NO: 2923; WAN024B7U; Start 137; Stop 161
ccaataagtatcaagttagccaggt

SEQ ID NO: 341154 - DNA, 25 bp, Artificial
  probe
  misc_feature (1)..(25): SEQ ID NO: 2923; WAN024B7U; Start 136; Stop 160
accaataagtatcaagttagccagg

SEQ ID NO: 341155 - DNA, 25 bp, Artificial
  probe
  misc_feature (1)..(25): SEQ ID NO: 2923; WAN024B7U; Start 142; Stop 166
aagtatcaagttagccaggtatcaa

SEQ ID NO: 341156 - DNA, 25 bp, Artificial
  probe
  misc_feature (1)..(25): SEQ ID NO: 2923; WAN024B7U; Start 563; Stop 587
atcgtgttgatgaagttgatgatag

SEQ ID NO: 341157 - DNA, 25 bp, Artificial
  probe
  misc_feature (1)..(25): SEQ ID NO: 2923; WAN024B7U; Start 141; Stop 165
taagtatcaagttagccaggtatca

SEQ ID NO: 341158 - DNA, 25 bp, Artificial
  probe
  misc_feature (1)..(25): SEQ ID NO: 2923; WAN024B7U; Start 566; Stop 590
gtgttgatgaagttgatgatagaga

SEQ ID NO: 341159 - DNA, 25 bp, Artificial
  probe
  misc_feature (1)..(25): SEQ ID NO: 2923; WAN024B7U; Start 569; Stop 593
ttgatgaagttgatgatagagatgg

SEQ ID NO: 341160 - DNA, 25 bp, Artificial
  probe
  misc_feature (1)..(25): SEQ ID NO: 2923; WAN024B7U; Start 609; Stop 633
attagtaacctgtgaagaccttgct

SEQ ID NO: 341161 - DNA, 25 bp, Artificial
  probe
  misc_feature (1)..(25): SEQ ID NO: 2923; WAN024B7U; Start 608; Stop 632
cattagtaacctgtgaagaccttgc

SEQ ID NO: 341162 - DNA, 25 bp, Artificial
  probe
  misc_feature (1)..(25): SEQ ID NO: 2923; WAN024B7U; Start 562; Stop 586
gatcgtgttgatgaagttgatgata

SEQ ID NO: 341163 - DNA, 25 bp, Artificial
  probe
  misc_feature (1)..(25): SEQ ID NO: 2923; WAN024B7U; Start 607; Stop 631
acattagtaacctgtgaagaccttg

SEQ ID NO: 341164 - DNA, 25 bp, Artificial
  probe
  misc_feature (1)..(25): SEQ ID NO: 2923; WAN024B7U; Start 138; Stop 162
caataagtatcaagttagccaggta

SEQ ID NO: 341165 - DNA, 25 bp, Artificial
  probe
  misc_feature (1)..(25): SEQ ID NO: 2923; WAN024B7U; Start 135; Stop 159
taccaataagtatcaagttagccag

SEQ ID NO: 341166 - DNA, 25 bp, Artificial
  probe
  misc_feature (1)..(25): SEQ ID NO: 2923; WAN024B7U; Start 567; Stop 591
tgttgatgaagttgatgatagagat

SEQ ID NO: 341167 - DNA, 25 bp, Artificial
  probe
  misc_feature (1)..(25): SEQ ID NO: 2923; WAN024B7U; Start 140; Stop 164
ataagtatcaagttagccaggtatc

SEQ ID NO: 341168 - DNA, 25 bp, Artificial
  probe
  misc_feature (1)..(25): SEQ ID NO: 2923; WAN024B7U; Start 341; Stop 365
ataatgttaatctcttctacggagc

SEQ ID NO: 341169 - DNA, 25 bp, Artificial
  probe
  misc_feature (1)..(25): SEQ ID NO: 2923; WAN024B7U; Start 568; Stop 592
gttgatgaagttgatgatagagatg

SEQ ID NO: 341170 - DNA, 25 bp, Artificial
  probe
  misc_feature (1)..(25): SEQ ID NO: 2923; WAN024B7U; Start 610; Stop 634
ttagtaacctgtgaagaccttgctg

SEQ ID NO: 341171 - DNA, 25 bp, Artificial
  probe
  misc_feature (1)..(25): SEQ ID NO: 2923; WAN024B7U; Start 227; Stop 251
ctatctcttcggaagctgttctaac

SEQ ID NO: 341172 - DNA, 25 bp, Artificial
  probe
  misc_feature (1)..(25): SEQ ID NO: 2923; WAN024B7U; Start 228; Stop 252
tatctcttcggaagctgttctaact

SEQ ID NO: 341173 - DNA, 25 bp, Artificial
  probe
  misc_feature (1)..(25): SEQ ID NO: 2923; WAN024B7U; Start 570; Stop 594
tgatgaagttgatgatagagatggg

SEQ ID NO: 341174 - DNA, 25 bp, Artificial
  probe
  misc_feature (1)..(25): SEQ ID NO: 2923; WAN024B7U; Start 139; Stop 163
aataagtatcaagttagccaggtat

SEQ ID NO: 341175 - DNA, 25 bp, Artificial
  probe
  misc_feature (1)..(25): SEQ ID NO: 2923; WAN024B7U; Start 143; Stop 167
agtatcaagttagccaggtatcaaa

SEQ ID NO: 341176 - DNA, 25 bp, Artificial
  probe
  misc_feature (1)..(25): SEQ ID NO: 2923; WAN024B7U; Start 343; Stop 367
aatgttaatctcttctacggagctg

SEQ ID NO: 341177 - DNA, 25 bp, Artificial
  probe
  misc_feature (1)..(25): SEQ ID NO: 2923; WAN024B7U; Start 247; Stop 271
ctaacttctcaatgggatgctcaaa

SEQ ID NO: 341178 - DNA, 25 bp, Artificial
  probe
  misc_feature (1)..(25): SEQ ID NO: 2923; WAN024B7U; Start 342; Stop 366
taatgttaatctcttctacggagct

SEQ ID NO: 341179 - DNA, 25 bp, Artificial
  probe
  misc_feature (1)..(25): SEQ ID NO: 2923; WAN024B7U; Start 339; Stop 363
tgataatgttaatctcttctacgga

SEQ ID NO: 341180 - DNA, 25 bp, Artificial
  probe
  misc_feature (1)..(25): SEQ ID NO: 2923; WAN024B7U; Start 229; Stop 253
atctcttcggaagctgttctaactt

SEQ ID NO: 341181 - DNA, 25 bp, Artificial
  probe
  misc_feature (1)..(25): SEQ ID NO: 2923; WAN024B7U; Start 383; Stop 407
agcaagtaatgggagaaggaaatta

SEQ ID NO: 341182 - DNA, 25 bp, Artificial
  probe
  misc_feature (1)..(25): SEQ ID NO: 2923; WAN024B7U; Start 382; Stop 406
gagcaagtaatgggagaaggaaatt

SEQ ID NO: 341183 - DNA, 25 bp, Artificial
  probe
  misc_feature (1)..(25): SEQ ID NO: 2923; WAN024B7U; Start 347; Stop 371
ttaatctcttctacggagctggtac

SEQ ID NO: 341184 - DNA, 25 bp, Artificial
  probe
  misc_feature (1)..(25): SEQ ID NO: 2924; WAN024C4C; Start 104; Stop 128
gattagatgaggataccattcttgc

SEQ ID NO: 341185 - DNA, 25 bp, Artificial
  probe
  misc_feature (1)..(25): SEQ ID NO: 2924; WAN024C4C; Start 103; Stop 127
cgattagatgaggataccattcttg

SEQ ID NO: 341186 - DNA, 25 bp, Artificial
  probe
  misc_feature (1)..(25): SEQ ID NO: 2924; WAN024C4C; Start 505; Stop 529
gatgtcattacagcatactaccgta

SEQ ID NO: 341187 - DNA, 25 bp, Artificial
  probe
  misc_feature (1)..(25): SEQ ID NO: 2924; WAN024C4C; Start 500; Stop 524
gaagcgatgtcattacagcatacta

SEQ ID NO: 341188 - DNA, 25 bp, Artificial
  probe
  misc_feature (1)..(25): SEQ ID NO: 2924; WAN024C4C; Start 501; Stop 525
aagcgatgtcattacagcatactac

SEQ ID NO: 341189 - DNA, 25 bp, Artificial
  probe
  misc_feature (1)..(25): SEQ ID NO: 2924; WAN024C4C; Start 506; Stop 530
atgtcattacagcatactaccgtat

SEQ ID NO: 341190 - DNA, 25 bp, Artificial
  probe
  misc_feature (1)..(25): SEQ ID NO: 2924; WAN024C4C; Start 98; Stop 122
ctgttcgattagatgaggataccat

SEQ ID NO: 341191 - DNA, 25 bp, Artificial
  probe
  misc_feature (1)..(25): SEQ ID NO: 2924; WAN024C4C; Start 99; Stop 123
tgttcgattagatgaggataccatt

SEQ ID NO: 341192 - DNA, 25 bp, Artificial
  probe
  misc_feature (1)..(25): SEQ ID NO: 2924; WAN024C4C; Start 97; Stop 121
tctgttcgattagatgaggatacca

SEQ ID NO: 341193 - DNA, 25 bp, Artificial
  probe
  misc_feature (1)..(25): SEQ ID NO: 2924; WAN024C4C; Start 100; Stop 124
gttcgattagatgaggataccattc

SEQ ID NO: 341194 - DNA, 25 bp, Artificial
  probe
  misc_feature (1)..(25): SEQ ID NO: 2924; WAN024C4C; Start 102; Stop 126
tcgattagatgaggataccattctt

SEQ ID NO: 341195 - DNA, 25 bp, Artificial
  probe
  misc_feature (1)..(25): SEQ ID NO: 2924; WAN024C4C; Start 101; Stop 125
ttcgattagatgaggataccattct

SEQ ID NO: 341196 - DNA, 25 bp, Artificial
  probe
  misc_feature (1)..(25): SEQ ID NO: 2924; WAN024C4C; Start 343; Stop 367
gatacttattcactaattgagagcg

SEQ ID NO: 341197 - DNA, 25 bp, Artificial
  probe
  misc_feature (1)..(25): SEQ ID NO: 2924; WAN024C4C; Start 105; Stop 129
attagatgaggataccattcttgca

SEQ ID NO: 341198 - DNA, 25 bp, Artificial
  probe
  misc_feature (1)..(25): SEQ ID NO: 2924; WAN024C4C; Start 673; Stop 697
cacccaggctaccgtaaatataatg

SEQ ID NO: 341199 - DNA, 25 bp, Artificial
  probe
  misc_feature (1)..(25): SEQ ID NO: 2924; WAN024C4C; Start 672; Stop 696
tcacccaggctaccgtaaatataat

SEQ ID NO: 341200 - DNA, 25 bp, Artificial
  probe
  misc_feature (1)..(25): SEQ ID NO: 2924; WAN024C4C; Start 652; Stop 676
aattataaggttacaggtcgtcacc

SEQ ID NO: 341201 - DNA, 25 bp, Artificial
  probe
  misc_feature (1)..(25): SEQ ID NO: 2924; WAN024C4C; Start 504; Stop 528
cgatgtcattacagcatactaccgt

SEQ ID NO: 341202 - DNA, 25 bp, Artificial
  probe
  misc_feature (1)..(25): SEQ ID NO: 2924; WAN024C4C; Start 502; Stop 526
agcgatgtcattacagcatactacc

SEQ ID NO: 341203 - DNA, 25 bp, Artificial
  probe
  misc_feature (1)..(25): SEQ ID NO: 2924; WAN024C4C; Start 46; Stop 70
tgtcataagatgtggcaacttggtt

SEQ ID NO: 341204 - DNA, 25 bp, Artificial
  probe
  misc_feature (1)..(25): SEQ ID NO: 2924; WAN024C4C; Start 45; Stop 69
ttgtcataagatgtggcaacttggt

SEQ ID NO: 341205 - DNA, 25 bp, Artificial
  probe
  misc_feature (1)..(25): SEQ ID NO: 2924; WAN024C4C; Start 36; Stop 60
ttgtgatgtttgtcataagatgtgg

SEQ ID NO: 341206 - DNA, 25 bp, Artificial
  probe
  misc_feature (1)..(25): SEQ ID NO: 2924; WAN024C4C; Start 40; Stop 64
gatgtttgtcataagatgtggcaac

SEQ ID NO: 341207 - DNA, 25 bp, Artificial
  probe
  misc_feature (1)..(25): SEQ ID NO: 2924; WAN024C4C; Start 43; Stop 67
gtttgtcataagatgtggcaacttg

SEQ ID NO: 341208 - DNA, 25 bp, Artificial
  probe
  misc_feature (1)..(25): SEQ ID NO: 2924; WAN024C4C; Start 530; Stop 554
tggaaactttagaattagtcgcaaa

SEQ ID NO: 341209 - DNA, 25 bp, Artificial
  probe
  misc_feature (1)..(25): SEQ ID NO: 2924; WAN024C4C; Start 41; Stop 65
atgtttgtcataagatgtggcaact

SEQ ID NO: 341210 - DNA, 25 bp, Artificial
  probe
  misc_feature (1)..(25): SEQ ID NO: 2924; WAN024C4C; Start 529; Stop 553
atggaaactttagaattagtcgcaa

SEQ ID NO: 341211 - DNA, 25 bp, Artificial
  probe
  misc_feature (1)..(25): SEQ ID NO: 2924; WAN024C4C; Start 671; Stop 695
gtcacccaggctaccgtaaatataa

SEQ ID NO: 341212 - DNA, 25 bp, Artificial
  probe
  misc_feature (1)..(25): SEQ ID NO: 2924; WAN024C4C; Start 42; Stop 66
tgtttgtcataagatgtggcaactt

SEQ ID NO: 341213 - DNA, 25 bp, Artificial
  probe
  misc_feature (1)..(25): SEQ ID NO: 2924; WAN024C4C; Start 39; Stop 63
tgatgtttgtcataagatgtggcaa

SEQ ID NO: 341214 - DNA, 25 bp, Artificial
  probe
  misc_feature (1)..(25): SEQ ID NO: 2924; WAN024C4C; Start 79; Stop 103
gctaacgatgggaatgtatctgttc

SEQ ID NO: 341215 - DNA, 25 bp, Artificial
  probe
  misc_feature (1)..(25): SEQ ID NO: 2924; WAN024C4C; Start 20; Stop 44
taattcgtgaacagatttgtgatgt

SEQ ID NO: 341216 - DNA, 25 bp, Artificial
  probe
  misc_feature (1)..(25): SEQ ID NO: 2924; WAN024C4C; Start 499; Stop 523
ggaagcgatgtcattacagcatact

SEQ ID NO: 341217 - DNA, 25 bp, Artificial
  probe
  misc_feature (1)..(25): SEQ ID NO: 2925; WAN024GOI; Start 328; Stop 352
gttaagccttcagtcgttatcaatc

SEQ ID NO: 341218 - DNA, 25 bp, Artificial
  probe
  misc_feature (1)..(25): SEQ ID NO: 2925; WAN024GOI; Start 327; Stop 351
agttaagccttcagtcgttatcaat

SEQ ID NO: 341219 - DNA, 25 bp, Artificial
  probe
  misc_feature (1)..(25): SEQ ID NO: 2925; WAN024GOI; Start 329; Stop 353
ttaagccttcagtcgttatcaatcc

SEQ ID NO: 341220 - DNA, 25 bp, Artificial
  probe
  misc_feature (1)..(25): SEQ ID NO: 2925; WAN024GOI; Start 326; Stop 350
gagttaagccttcagtcgttatcaa

SEQ ID NO: 341221 - DNA, 25 bp, Artificial
  probe
  misc_feature (1)..(25): SEQ ID NO: 2925; WAN024GOI; Start 330; Stop 354
taagccttcagtcgttatcaatcct

SEQ ID NO: 341222 - DNA, 25 bp, Artificial
  probe
  misc_feature (1)..(25): SEQ ID NO: 2925; WAN024GOI; Start 165; Stop 189
ccttcgtcctcatagtaagatggtt

SEQ ID NO: 341223 - DNA, 25 bp, Artificial
  probe
  misc_feature (1)..(25): SEQ ID NO: 2925; WAN024GOI; Start 258; Stop 282
catcatcagtatccatgtagaagca

SEQ ID NO: 341224 - DNA, 25 bp, Artificial
  probe
  misc_feature (1)..(25): SEQ ID NO: 2925; WAN024GOI; Start 260; Stop 284
tcatcagtatccatgtagaagcaac

SEQ ID NO: 341225 - DNA, 25 bp, Artificial
  probe
  misc_feature (1)..(25): SEQ ID NO: 2925; WAN024GOI; Start 259; Stop 283
atcatcagtatccatgtagaagcaa

SEQ ID NO: 341226 - DNA, 25 bp, Artificial
  probe
  misc_feature (1)..(25): SEQ ID NO: 2925; WAN024GOI; Start 325; Stop 349
ggagttaagccttcagtcgttatca

SEQ ID NO: 341227 - DNA, 25 bp, Artificial
  probe
  misc_feature (1)..(25): SEQ ID NO: 2925; WAN024GOI; Start 162; Stop 186
gagccttcgtcctcatagtaagatg

SEQ ID NO: 341228 - DNA, 25 bp, Artificial
  probe
  misc_feature (1)..(25): SEQ ID NO: 2925; WAN024GOI; Start 161; Stop 185
agagccttcgtcctcatagtaagat

SEQ ID NO: 341229 - DNA, 25 bp, Artificial
  probe
  misc_feature (1)..(25): SEQ ID NO: 2925; WAN024GOI; Start 166; Stop 190
cttcgtcctcatagtaagatggttt

SEQ ID NO: 341230 - DNA, 25 bp, Artificial
  probe
  misc_feature (1)..(25): SEQ ID NO: 2925; WAN024GOI; Start 585; Stop 609
tgtagcaggttcctatgtctttaag

SEQ ID NO: 341231 - DNA, 25 bp, Artificial
  probe
  misc_feature (1)..(25): SEQ ID NO: 2925; WAN024GOI; Start 584; Stop 608
ttgtagcaggttcctatgtctttaa

SEQ ID NO: 341232 - DNA, 25 bp, Artificial
  probe
  misc_feature (1)..(25): SEQ ID NO: 2925; WAN024GOI; Start 583; Stop 607
tttgtagcaggttcctatgtcttta

SEQ ID NO: 341233 - DNA, 25 bp, Artificial
  probe
  misc_feature (1)..(25): SEQ ID NO: 2925; WAN024GOI; Start 8; Stop 32
aatacaagattgctccgtcaattct

SEQ ID NO: 341234 - DNA, 25 bp, Artificial
  probe
  misc_feature (1)..(25): SEQ ID NO: 2925; WAN024GOI; Start 7; Stop 31
caatacaagattgctccgtcaattc

SEQ ID NO: 341235 - DNA, 25 bp, Artificial
  probe
  misc_feature (1)..(25): SEQ ID NO: 2925; WAN024GOI; Start 6; Stop 30
tcaatacaagattgctccgtcaatt

SEQ ID NO: 341236 - DNA, 25 bp, Artificial
  probe
  misc_feature (1)..(25): SEQ ID NO: 2925; WAN024GOI; Start 324; Stop 348
cggagttaagccttcagtcgttatc

SEQ ID NO: 341237 - DNA, 25 bp, Artificial
  probe
  misc_feature (1)..(25): SEQ ID NO: 2925; WAN024GOI; Start 9; Stop 33
atacaagattgctccgtcaattctg

SEQ ID NO: 341238 - DNA, 25 bp, Artificial
  probe
  misc_feature (1)..(25): SEQ ID NO: 2925; WAN024GOI; Start 5; Stop 29
ctcaatacaagattgctccgtcaat

SEQ ID NO: 341239 - DNA, 25 bp, Artificial
  probe
  misc_feature (1)..(25): SEQ ID NO: 2925; WAN024GOI; Start 381; Stop 405
cgtccttcatctagttgaccaagtt

SEQ ID NO: 341240 - DNA, 25 bp, Artificial
  probe
  misc_feature (1)..(25): SEQ ID NO: 2925; WAN024GOI; Start 160; Stop 184
gagagccttcgtcctcatagtaaga

SEQ ID NO: 341241 - DNA, 25 bp, Artificial
  probe
  misc_feature (1)..(25): SEQ ID NO: 2925; WAN024GOI; Start 331; Stop 355
aagccttcagtcgttatcaatcctg

SEQ ID NO: 341242 - DNA, 25 bp, Artificial
  probe
  misc_feature (1)..(25): SEQ ID NO: 2925; WAN024GOI; Start 163; Stop 187
agccttcgtcctcatagtaagatgg

SEQ ID NO: 341243 - DNA, 25 bp, Artificial
  probe
  misc_feature (1)..(25): SEQ ID NO: 2925; WAN024GOI; Start 323; Stop 347
tcggagttaagccttcagtcgttat

SEQ ID NO: 341244 - DNA, 25 bp, Artificial
  probe
  misc_feature (1)..(25): SEQ ID NO: 2925; WAN024GOI; Start 586; Stop 610
gtagcaggttcctatgtctttaagg

SEQ ID NO: 341245 - DNA, 25 bp, Artificial
  probe
  misc_feature (1)..(25): SEQ ID NO: 2925; WAN024GOI; Start 382; Stop 406
gtccttcatctagttgaccaagttt

SEQ ID NO: 341246 - DNA, 25 bp, Artificial
  probe
  misc_feature (1)..(25): SEQ ID NO: 2925; WAN024GOI; Start 257; Stop 281
acatcatcagtatccatgtagaagc

SEQ ID NO: 341247 - DNA, 25 bp, Artificial
  probe
  misc_feature (1)..(25): SEQ ID NO: 2925; WAN024GOI; Start 254; Stop 278
cagacatcatcagtatccatgtaga

SEQ ID NO: 341248 - DNA, 25 bp, Artificial
  probe
  misc_feature (1)..(25): SEQ ID NO: 2925; WAN024GOI; Start 4; Stop 28
tctcaatacaagattgctccgtcaa

SEQ ID NO: 341249 - DNA, 25 bp, Artificial
  probe
  misc_feature (1)..(25): SEQ ID NO: 2925; WAN024GOI; Start 164; Stop 188
gccttcgtcctcatagtaagatggt

SEQ ID NO: 341250 - DNA, 25 bp, Artificial
  probe
  misc_feature (1)..(25): SEQ ID NO: 2926; WAN024D3A; Start 551; Stop 575
acttggtcaatcctgtctatgttac

SEQ ID NO: 341251 - DNA, 25 bp, Artificial
  probe
  misc_feature (1)..(25): SEQ ID NO: 2926; WAN024D3A; Start 247; Stop 271
ctcaaggctaaccaagaagtatcag

SEQ ID NO: 341252 - DNA, 25 bp, Artificial
  probe
  misc_feature (1)..(25): SEQ ID NO: 2926; WAN024D3A; Start 431; Stop 455
tggagaaggattatattgtcaaggt

SEQ ID NO: 341253 - DNA, 25 bp, Artificial
  probe
  misc_feature (1)..(25): SEQ ID NO: 2926; WAN024D3A; Start 245; Stop 269
ctctcaaggctaaccaagaagtatc

SEQ ID NO: 341254 - DNA, 25 bp, Artificial
  probe
  misc_feature (1)..(25): SEQ ID NO: 2926; WAN024D3A; Start 246; Stop 270
tctcaaggctaaccaagaagtatca

SEQ ID NO: 341255 - DNA, 25 bp, Artificial
  probe
  misc_feature (1)..(25): SEQ ID NO: 2926; WAN024D3A; Start 241; Stop 265
gtaactctcaaggctaaccaagaag

SEQ ID NO: 341256 - DNA, 25 bp, Artificial
  probe
  misc_feature (1)..(25): SEQ ID NO: 2926; WAN024D3A; Start 240; Stop 264
agtaactctcaaggctaaccaagaa

SEQ ID NO: 341257 - DNA, 25 bp, Artificial
  probe
  misc_feature (1)..(25): SEQ ID NO: 2926; WAN024D3A; Start 239; Stop 263
aagtaactctcaaggctaaccaaga

SEQ ID NO: 341258 - DNA, 25 bp, Artificial
  probe
  misc_feature (1)..(25): SEQ ID NO: 2926; WAN024D3A; Start 432; Stop 456
ggagaaggattatattgtcaaggtt

SEQ ID NO: 341259 - DNA, 25 bp, Artificial
  probe
  misc_feature (1)..(25): SEQ ID NO: 2926; WAN024D3A; Start 244; Stop 268
actctcaaggctaaccaagaagtat

SEQ ID NO: 341260 - DNA, 25 bp, Artificial
  probe
  misc_feature (1)..(25): SEQ ID NO: 2926; WAN024D3A; Start 552; Stop 576
cttggtcaatcctgtctatgttaca

SEQ ID NO: 341261 - DNA, 25 bp, Artificial
  probe
  misc_feature (1)..(25): SEQ ID NO: 2926; WAN024D3A; Start 474; Stop 498
tgtattgaagagacaagatgctact

SEQ ID NO: 341262 - DNA, 25 bp, Artificial
  probe
  misc_feature (1)..(25): SEQ ID NO: 2926; WAN024D3A; Start 243; Stop 267
aactctcaaggctaaccaagaagta

SEQ ID NO: 341263 - DNA, 25 bp, Artificial
  probe
  misc_feature (1)..(25): SEQ ID NO: 2926; WAN024D3A; Start 242; Stop 266
taactctcaaggctaaccaagaagt

SEQ ID NO: 341264 - DNA, 25 bp, Artificial
  probe
  misc_feature (1)..(25): SEQ ID NO: 2926; WAN024D3A; Start 550; Stop 574
gacttggtcaatcctgtctatgtta

SEQ ID NO: 341265 - DNA, 25 bp, Artificial
  probe
  misc_feature (1)..(25): SEQ ID NO: 2926; WAN024D3A; Start 430; Stop 454
ttggagaaggattatattgtcaagg

SEQ ID NO: 341266 - DNA, 25 bp, Artificial
  probe
  misc_feature (1)..(25): SEQ ID NO: 2926; WAN024D3A; Start 554; Stop 578
tggtcaatcctgtctatgttacatt

SEQ ID NO: 341267 - DNA, 25 bp, Artificial
  probe
  misc_feature (1)..(25): SEQ ID NO: 2926; WAN024D3A; Start 553; Stop 577
ttggtcaatcctgtctatgttacat

SEQ ID NO: 341268 - DNA, 25 bp, Artificial
  probe
  misc_feature (1)..(25): SEQ ID NO: 2926; WAN024D3A; Start 475; Stop 499
gtattgaagagacaagatgctacta

SEQ ID NO: 341269 - DNA, 25 bp, Artificial
  probe
  misc_feature (1)..(25): SEQ ID NO: 2926; WAN024D3A; Start 541; Stop 565
caatcagaagacttggtcaatcctg

SEQ ID NO: 341270 - DNA, 25 bp, Artificial
  probe
  misc_feature (1)..(25): SEQ ID NO: 2926; WAN024D3A; Start 540; Stop 564
tcaatcagaagacttggtcaatcct

SEQ ID NO: 341271 - DNA, 25 bp, Artificial
  probe
  misc_feature (1)..(25): SEQ ID NO: 2926; WAN024D3A; Start 539; Stop 563
gtcaatcagaagacttggtcaatcc

SEQ ID NO: 341272 - DNA, 25 bp, Artificial
  probe
  misc_feature (1)..(25): SEQ ID NO: 2926; WAN024D3A; Start 542; Stop 566
aatcagaagacttggtcaatcctgt

SEQ ID NO: 341273 - DNA, 25 bp, Artificial
  probe
  misc_feature (1)..(25): SEQ ID NO: 2926; WAN024D3A; Start 238; Stop 262
aaagtaactctcaaggctaaccaag

SEQ ID NO: 341274 - DNA, 25 bp, Artificial
  probe
  misc_feature (1)..(25): SEQ ID NO: 2926; WAN024D3A; Start 237; Stop 261
gaaagtaactctcaaggctaaccaa

SEQ ID NO: 341275 - DNA, 25 bp, Artificial
  probe
  misc_feature (1)..(25): SEQ ID NO: 2926; WAN024D3A; Start 555; Stop 579
ggtcaatcctgtctatgttacatta

SEQ ID NO: 341276 - DNA, 25 bp, Artificial
  probe
  misc_feature (1)..(25): SEQ ID NO: 2926; WAN024D3A; Start 476; Stop 500
tattgaagagacaagatgctactaa

SEQ ID NO: 341277 - DNA, 25 bp, Artificial
  probe
  misc_feature (1)..(25): SEQ ID NO: 2926; WAN024D3A; Start 543; Stop 567
atcagaagacttggtcaatcctgtc

SEQ ID NO: 341278 - DNA, 25 bp, Artificial
  probe
  misc_feature (1)..(25): SEQ ID NO: 2926; WAN024D3A; Start 590; Stop 614
gggtgctcttgcttgattaactaat

SEQ ID NO: 341279 - DNA, 25 bp, Artificial
  probe
  misc_feature (1)..(25): SEQ ID NO: 2926; WAN024D3A; Start 427; Stop 451
gctttggagaaggattatattgtca

SEQ ID NO: 341280 - DNA, 25 bp, Artificial
  probe
  misc_feature (1)..(25): SEQ ID NO: 2926; WAN024D3A; Start 374; Stop 398
cttctctcttgagttctcaggacag

SEQ ID NO: 341281 - DNA, 25 bp, Artificial
  probe
  misc_feature (1)..(25): SEQ ID NO: 2926; WAN024D3A; Start 370; Stop 394
aatccttctctcttgagttctcagg

SEQ ID NO: 341282 - DNA, 25 bp, Artificial
  probe
  misc_feature (1)..(25): SEQ ID NO: 2926; WAN024D3A; Start 557; Stop 581
tcaatcctgtctatgttacattagg

SEQ ID NO: 341283 - DNA, 25 bp, Artificial
  probe
  misc_feature (1)..(25): SEQ ID NO: 2927; WAN024CAK-5; Start 8; Stop 32
atattattgaattgccagagatgct

SEQ ID NO: 341284 - DNA, 25 bp, Artificial
  probe
  misc_feature (1)..(25): SEQ ID NO: 2927; WAN024CAK-5; Start 7; Stop 31
catattattgaattgccagagatgc

SEQ ID NO: 341285 - DNA, 25 bp, Artificial
  probe
  misc_feature (1)..(25): SEQ ID NO: 2927; WAN024CAK-5; Start 9; Stop 33
tattattgaattgccagagatgctg

SEQ ID NO: 341286 - DNA, 25 bp, Artificial
  probe
  misc_feature (1)..(25): SEQ ID NO: 2927; WAN024CAK-5; Start 472; Stop 496
ctcaagtatatgaagagccagcaag

SEQ ID NO: 341287 - DNA, 25 bp, Artificial
  probe
  misc_feature (1)..(25): SEQ ID NO: 2927; WAN024CAK-5; Start 471; Stop 495
tctcaagtatatgaagagccagcaa

SEQ ID NO: 341288 - DNA, 25 bp, Artificial
  probe
  misc_feature (1)..(25): SEQ ID NO: 2927; WAN024CAK-5; Start 2; Stop 26
tgtctcatattattgaattgccaga

SEQ ID NO: 341289 - DNA, 25 bp, Artificial
  probe
  misc_feature (1)..(25): SEQ ID NO: 2927; WAN024CAK-5; Start 493; Stop 517
caagcggagttgtctcatatcattg

SEQ ID NO: 341290 - DNA, 25 bp, Artificial
  probe
  misc_feature (1)..(25): SEQ ID NO: 2927; WAN024CAK-5; Start 496; Stop 520
gcggagttgtctcatatcattgata

SEQ ID NO: 341291 - DNA, 25 bp, Artificial
  probe
  misc_feature (1)..(25): SEQ ID NO: 2927; WAN024CAK-5; Start 494; Stop 518
aagcggagttgtctcatatcattga

SEQ ID NO: 341292 - DNA, 25 bp, Artificial
  probe
  misc_feature (1)..(25): SEQ ID NO: 2927; WAN024CAK-5; Start 470; Stop 494
gtctcaagtatatgaagagccagca

SEQ ID NO: 341293 - DNA, 25 bp, Artificial
  probe
  misc_feature (1)..(25): SEQ ID NO: 2927; WAN024CAK-5; Start 3; Stop 27
gtctcatattattgaattgccagag

SEQ ID NO: 341294 - DNA, 25 bp, Artificial
  probe
  misc_feature (1)..(25): SEQ ID NO: 2927; WAN024CAK-5; Start 495; Stop 519
agcggagttgtctcatatcattgat

SEQ ID NO: 341295 - DNA, 25 bp, Artificial
  probe
  misc_feature (1)..(25): SEQ ID NO: 2927; WAN024CAK-5; Start 1; Stop 25
atgtctcatattattgaattgccag

SEQ ID NO: 341296 - DNA, 25 bp, Artificial
  probe
  misc_feature (1)..(25): SEQ ID NO: 2927; WAN024CAK-5; Start 6; Stop 30
tcatattattgaattgccagagatg

SEQ ID NO: 341297 - DNA, 25 bp, Artificial
  probe
  misc_feature (1)..(25): SEQ ID NO: 2927; WAN024CAK-5; Start 473; Stop 497
tcaagtatatgaagagccagcaagc

SEQ ID NO: 341298 - DNA, 25 bp, Artificial
  probe
  misc_feature (1)..(25): SEQ ID NO: 2927; WAN024CAK-5; Start 469; Stop 493
cgtctcaagtatatgaagagccagc

SEQ ID NO: 341299 - DNA, 25 bp, Artificial
  probe
  misc_feature (1)..(25): SEQ ID NO: 2927; WAN024CAK-5; Start 5; Stop 29
ctcatattattgaattgccagagat

SEQ ID NO: 341300 - DNA, 25 bp, Artificial
  probe
  misc_feature (1)..(25): SEQ ID NO: 2927; WAN024CAK-5; Start 511; Stop 535
atcattgatattgtcaaccgtctgg

SEQ ID NO: 341301 - DNA, 25 bp, Artificial
  probe
  misc_feature (1)..(25): SEQ ID NO: 2927; WAN024CAK-5; Start 492; Stop 516
gcaagcggagttgtctcatatcatt

SEQ ID NO: 341302 - DNA, 25 bp, Artificial
  probe
  misc_feature (1)..(25): SEQ ID NO: 2927; WAN024CAK-5; Start 510; Stop 534
tatcattgatattgtcaaccgtctg

SEQ ID NO: 341303 - DNA, 25 bp, Artificial
  probe
  misc_feature (1)..(25): SEQ ID NO: 2927; WAN024CAK-5; Start 474; Stop 498
caagtatatgaagagccagcaagcg

SEQ ID NO: 341304 - DNA, 25 bp, Artificial
  probe
  misc_feature (1)..(25): SEQ ID NO: 2927; WAN024CAK-5; Start 491; Stop 515
agcaagcggagttgtctcatatcat

SEQ ID NO: 341305 - DNA, 25 bp, Artificial
  probe
  misc_feature (1)..(25): SEQ ID NO: 2927; WAN024CAK-5; Start 507; Stop 531
tcatatcattgatattgtcaaccgt

SEQ ID NO: 341306 - DNA, 25 bp, Artificial
  probe
  misc_feature (1)..(25): SEQ ID NO: 2927; WAN024CAK-5; Start 4; Stop 28
tctcatattattgaattgccagaga

SEQ ID NO: 341307 - DNA, 25 bp, Artificial
  probe
  misc_feature (1)..(25): SEQ ID NO: 2927; WAN024CAK-5; Start 497; Stop 521
cggagttgtctcatatcattgatat

SEQ ID NO: 341308 - DNA, 25 bp, Artificial
  probe
  misc_feature (1)..(25): SEQ ID NO: 2927; WAN024CAK-5; Start 509; Stop 533
atatcattgatattgtcaaccgtct

SEQ ID NO: 341309 - DNA, 25 bp, Artificial
  probe
  misc_feature (1)..(25): SEQ ID NO: 2927; WAN024CAK-5; Start 508; Stop 532
catatcattgatattgtcaaccgtc

SEQ ID NO: 341310 - DNA, 25 bp, Artificial
  probe
  misc_feature (1)..(25): SEQ ID NO: 2927; WAN024CAK-5; Start 506; Stop 530
ctcatatcattgatattgtcaaccg

SEQ ID NO: 341311 - DNA, 25 bp, Artificial
  probe
  misc_feature (1)..(25): SEQ ID NO: 2927; WAN024CAK-5; Start 475; Stop 499
aagtatatgaagagccagcaagcgg

SEQ ID NO: 341312 - DNA, 25 bp, Artificial
  probe
  misc_feature (1)..(25): SEQ ID NO: 2927; WAN024CAK-5; Start 490; Stop 514
cagcaagcggagttgtctcatatca

SEQ ID NO: 341313 - DNA, 25 bp, Artificial
  probe
  misc_feature (1)..(25): SEQ ID NO: 2927; WAN024CAK-5; Start 85; Stop 109
aaagagttggtagaaaatgccattg

SEQ ID NO: 341314 - DNA, 25 bp, Artificial
  probe
  misc_feature (1)..(25): SEQ ID NO: 2927; WAN024CAK-5; Start 86; Stop 110
aagagttggtagaaaatgccattga

SEQ ID NO: 341315 - DNA, 25 bp, Artificial
  probe
  misc_feature (1)..(25): SEQ ID NO: 2927; WAN024CAK-5; Start 512; Stop 536
tcattgatattgtcaaccgtctggg

SEQ ID NO: 341316 - DNA, 25 bp, Artificial
  probe
  misc_feature (1)..(25): SEQ ID NO: 2928; WAN024CMO; Start 84; Stop 108
ctccgatacagtatcaccgattcta

SEQ ID NO: 341317 - DNA, 25 bp, Artificial
  probe
  misc_feature (1)..(25): SEQ ID NO: 2928; WAN024CMO; Start 81; Stop 105
attctccgatacagtatcaccgatt

SEQ ID NO: 341318 - DNA, 25 bp, Artificial
  probe
  misc_feature (1)..(25): SEQ ID NO: 2928; WAN024CMO; Start 82; Stop 106
ttctccgatacagtatcaccgattc

SEQ ID NO: 341319 - DNA, 25 bp, Artificial
  probe
  misc_feature (1)..(25): SEQ ID NO: 2928; WAN024CMO; Start 80; Stop 104
cattctccgatacagtatcaccgat

SEQ ID NO: 341320 - DNA, 25 bp, Artificial
  probe
  misc_feature (1)..(25): SEQ ID NO: 2928; WAN024CMO; Start 83; Stop 107
tctccgatacagtatcaccgattct

SEQ ID NO: 341321 - DNA, 25 bp, Artificial
  probe
  misc_feature (1)..(25): SEQ ID NO: 2928; WAN024CMO; Start 36; Stop 60
aattctccatagaagctctatcgca

SEQ ID NO: 341322 - DNA, 25 bp, Artificial
  probe
  misc_feature (1)..(25): SEQ ID NO: 2928; WAN024CMO; Start 37; Stop 61
attctccatagaagctctatcgcag

SEQ ID NO: 341323 - DNA, 25 bp, Artificial
  probe
  misc_feature (1)..(25): SEQ ID NO: 2928; WAN024CMO; Start 79; Stop 103
gcattctccgatacagtatcaccga

SEQ ID NO: 341324 - DNA, 25 bp, Artificial
  probe
  misc_feature (1)..(25): SEQ ID NO: 2928; WAN024CMO; Start 35; Stop 59
aaattctccatagaagctctatcgc

SEQ ID NO: 341325 - DNA, 25 bp, Artificial
  probe
  misc_feature (1)..(25): SEQ ID NO: 2928; WAN024CMO; Start 31; Stop 55
aaagaaattctccatagaagctcta

SEQ ID NO: 341326 - DNA, 25 bp, Artificial
  probe
  misc_feature (1)..(25): SEQ ID NO: 2928; WAN024CMO; Start 34; Stop 58
gaaattctccatagaagctctatcg

SEQ ID NO: 341327 - DNA, 25 bp, Artificial
  probe
  misc_feature (1)..(25): SEQ ID NO: 2928; WAN024CMO; Start 33; Stop 57
agaaattctccatagaagctctatc

SEQ ID NO: 341328 - DNA, 25 bp, Artificial
  probe
  misc_feature (1)..(25): SEQ ID NO: 2928; WAN024CMO; Start 32; Stop 56
aagaaattctccatagaagctctat

SEQ ID NO: 341329 - DNA, 25 bp, Artificial
  probe
  misc_feature (1)..(25): SEQ ID NO: 2928; WAN024CMO; Start 38; Stop 62
ttctccatagaagctctatcgcagc

SEQ ID NO: 341330 - DNA, 25 bp, Artificial
  probe
  misc_feature (1)..(25): SEQ ID NO: 2928; WAN024CMO; Start 30; Stop 54
aaaagaaattctccatagaagctct

SEQ ID NO: 341331 - DNA, 25 bp, Artificial
  probe
  misc_feature (1)..(25): SEQ ID NO: 2928; WAN024CMO; Start 43; Stop 67
catagaagctctatcgcagcctttg

SEQ ID NO: 341332 - DNA, 25 bp, Artificial
  probe
  misc_feature (1)..(25): SEQ ID NO: 2928; WAN024CMO; Start 44; Stop 68
atagaagctctatcgcagcctttgt

SEQ ID NO: 341333 - DNA, 25 bp, Artificial
  probe
  misc_feature (1)..(25): SEQ ID NO: 2928; WAN024CMO; Start 45; Stop 69
tagaagctctatcgcagcctttgtg

SEQ ID NO: 341334 - DNA, 25 bp, Artificial
  probe
  misc_feature (1)..(25): SEQ ID NO: 2928; WAN024CMO; Start 42; Stop 66
ccatagaagctctatcgcagccttt

SEQ ID NO: 341335 - DNA, 25 bp, Artificial
  probe
  misc_feature (1)..(25): SEQ ID NO: 2929; WAN024G6S; Start 143; Stop 167
tatcaacgcaggaagattatcaagg

SEQ ID NO: 341336 - DNA, 25 bp, Artificial
  probe
  misc_feature (1)..(25): SEQ ID NO: 2929; WAN024G6S; Start 142; Stop 166
ttatcaacgcaggaagattatcaag

SEQ ID NO: 341337 - DNA, 25 bp, Artificial
  probe
  misc_feature (1)..(25): SEQ ID NO: 2929; WAN024G6S; Start 2458; Stop 2482
aatgaatggcaagttactaagaacg

SEQ ID NO: 341338 - DNA, 25 bp, Artificial
  probe
  misc_feature (1)..(25): SEQ ID NO: 2929; WAN024G6S; Start 1010; Stop 1034
atctgattgaggatgaagaagttgg

SEQ ID NO: 341339 - DNA, 25 bp, Artificial
  probe
  misc_feature (1)..(25): SEQ ID NO: 2929; WAN024G6S; Start 2481; Stop 2505
cgttatcttggctattgaaggacat

SEQ ID NO: 341340 - DNA, 25 bp, Artificial
  probe
  misc_feature (1)..(25): SEQ ID NO: 2929; WAN024G6S; Start 2541; Stop 2565
tagtctggattaccgtatgccttac

SEQ ID NO: 341341 - DNA, 25 bp, Artificial
  probe
  misc_feature (1)..(25): SEQ ID NO: 2929; WAN024G6S; Start 1832; Stop 1856
ttacatctcaaccgctcaagtctat

SEQ ID NO: 341342 - DNA, 25 bp, Artificial
  probe
  misc_feature (1)..(25): SEQ ID NO: 2929; WAN024G6S; Start 1831; Stop 1855
attacatctcaaccgctcaagtcta

SEQ ID NO: 341343 - DNA, 25 bp, Artificial
  probe
  misc_feature (1)..(25): SEQ ID NO: 2929; WAN024G6S; Start 1818; Stop 1842
aacctatgaagccattacatctcaa

SEQ ID NO: 341344 - DNA, 25 bp, Artificial
  probe
  misc_feature (1)..(25): SEQ ID NO: 2929; WAN024G6S; Start 1816; Stop 1840
ccaacctatgaagccattacatctc

SEQ ID NO: 341345 - DNA, 25 bp, Artificial
  probe
  misc_feature (1)..(25): SEQ ID NO: 2929; WAN024G6S; Start 141; Stop 165
attatcaacgcaggaagattatcaa

SEQ ID NO: 341346 - DNA, 25 bp, Artificial
  probe
  misc_feature (1)..(25): SEQ ID NO: 2929; WAN024G6S; Start 1819; Stop 1843
acctatgaagccattacatctcaac

SEQ ID NO: 341347 - DNA, 25 bp, Artificial
  probe
  misc_feature (1)..(25): SEQ ID NO: 2929; WAN024G6S; Start 1817; Stop 1841
caacctatgaagccattacatctca

SEQ ID NO: 341348 - DNA, 25 bp, Artificial
  probe
  misc_feature (1)..(25): SEQ ID NO: 2929; WAN024G6S; Start 1963; Stop 1987
aaccgtatgattactcagaagaaga

SEQ ID NO: 341349 - DNA, 25 bp, Artificial
  probe
  misc_feature (1)..(25): SEQ ID NO: 2929; WAN024G6S; Start 1970; Stop 1994
tgattactcagaagaagagcgatac

SEQ ID NO: 341350 - DNA, 25 bp, Artificial
  probe
  misc_feature (1)..(25): SEQ ID NO: 2929; WAN024G6S; Start 1967; Stop 1991
gtatgattactcagaagaagagcga

SEQ ID NO: 341351 - DNA, 25 bp, Artificial
  probe
  misc_feature (1)..(25): SEQ ID NO: 2929; WAN024G6S; Start 1964; Stop 1988
accgtatgattactcagaagaagag

SEQ ID NO: 341352 - DNA, 25 bp, Artificial
  probe
  misc_feature (1)..(25): SEQ ID NO: 2929; WAN024G6S; Start 140; Stop 164
aattatcaacgcaggaagattatca

SEQ ID NO: 341353 - DNA, 25 bp, Artificial
  probe
  misc_feature (1)..(25): SEQ ID NO: 2929; WAN024G6S; Start 137; Stop 161
aagaattatcaacgcaggaagatta

SEQ ID NO: 341354 - DNA, 25 bp, Artificial
  probe
  misc_feature (1)..(25): SEQ ID NO: 2929; WAN024G6S; Start 2540; Stop 2564
ctagtctggattaccgtatgcctta

SEQ ID NO: 341355 - DNA, 25 bp, Artificial
  probe
  misc_feature (1)..(25): SEQ ID NO: 2929; WAN024G6S; Start 2020; Stop 2044
attatggatcaagtagtggaccgta

SEQ ID NO: 341356 - DNA, 25 bp, Artificial
  probe
  misc_feature (1)..(25): SEQ ID NO: 2929; WAN024G6S; Start 1971; Stop 1995
gattactcagaagaagagcgatacc

SEQ ID NO: 341357 - DNA, 25 bp, Artificial
  probe
  misc_feature (1)..(25): SEQ ID NO: 2929; WAN024G6S; Start 1845; Stop 1869
gctcaagtctatcaaggatcgtatc

SEQ ID NO: 341358 - DNA, 25 bp, Artificial
  probe
  misc_feature (1)..(25): SEQ ID NO: 2929; WAN024G6S; Start 1976; Stop 2000
ctcagaagaagagcgataccaatac

SEQ ID NO: 341359 - DNA, 25 bp, Artificial
  probe
  misc_feature (1)..(25): SEQ ID NO: 2929; WAN024G6S; Start 1969; Stop 1993
atgattactcagaagaagagcgata

SEQ ID NO: 341360 - DNA, 25 bp, Artificial
  probe
  misc_feature (1)..(25): SEQ ID NO: 2929; WAN024G6S; Start 1968; Stop 1992
tatgattactcagaagaagagcgat

SEQ ID NO: 341361 - DNA, 25 bp, Artificial
  probe
  misc_feature (1)..(25): SEQ ID NO: 2929; WAN024G6S; Start 1965; Stop 1989
ccgtatgattactcagaagaagagc

SEQ ID NO: 341362 - DNA, 25 bp, Artificial
  probe
  misc_feature (1)..(25): SEQ ID NO: 2929; WAN024G6S; Start 148; Stop 172
acgcaggaagattatcaaggtctaa

SEQ ID NO: 341363 - DNA, 25 bp, Artificial
  probe
  misc_feature (1)..(25): SEQ ID NO: 2929; WAN024G6S; Start 147; Stop 171
aacgcaggaagattatcaaggtcta

SEQ ID NO: 341364 - DNA, 25 bp, Artificial
  probe
  misc_feature (1)..(25): SEQ ID NO: 2929; WAN024G6S; Start 138; Stop 162
agaattatcaacgcaggaagattat

SEQ ID NO: 341365 - DNA, 25 bp, Artificial
  probe
  misc_feature (1)..(25): SEQ ID NO: 2929; WAN024G6S; Start 1977; Stop 2001
tcagaagaagagcgataccaatacc

SEQ ID NO: 341366 - DNA, 25 bp, Artificial
  probe
  misc_feature (1)..(25): SEQ ID NO: 2929; WAN024G6S; Start 1833; Stop 1857
tacatctcaaccgctcaagtctatc

SEQ ID NO: 341367 - DNA, 25 bp, Artificial
  probe
  misc_feature (1)..(25): SEQ ID NO: 2929; WAN024G6S; Start 1820; Stop 1844
cctatgaagccattacatctcaacc

SEQ ID NO: 341368 - DNA, 25 bp, Artificial
  probe
  misc_feature (1)..(25): SEQ ID NO: 2930; WAN024EWJ; Start 820; Stop 844
caacacgactatgagactgataagc

SEQ ID NO: 341369 - DNA, 25 bp, Artificial
  probe
  misc_feature (1)..(25): SEQ ID NO: 2930; WAN024EWJ; Start 819; Stop 843
tcaacacgactatgagactgataag

SEQ ID NO: 341370 - DNA, 25 bp, Artificial
  probe
  misc_feature (1)..(25): SEQ ID NO: 2930; WAN024EWJ; Start 144; Stop 168
aacaactattggtcgtgctatcatc

SEQ ID NO: 341371 - DNA, 25 bp, Artificial
  probe
  misc_feature (1)..(25): SEQ ID NO: 2930; WAN024EWJ; Start 818; Stop 842
gtcaacacgactatgagactgataa

SEQ ID NO: 341372 - DNA, 25 bp, Artificial
  probe
  misc_feature (1)..(25): SEQ ID NO: 2930; WAN024EWJ; Start 821; Stop 845
aacacgactatgagactgataagcc

SEQ ID NO: 341373 - DNA, 25 bp, Artificial
  probe
  misc_feature (1)..(25): SEQ ID NO: 2930; WAN024EWJ; Start 150; Stop 174
tattggtcgtgctatcatcggtcta

SEQ ID NO: 341374 - DNA, 25 bp, Artificial
  probe
  misc_feature (1)..(25): SEQ ID NO: 2930; WAN024EWJ; Start 306; Stop 330
acgtgcgactgttgattatattatt

SEQ ID NO: 341375 - DNA, 25 bp, Artificial
  probe
  misc_feature (1)..(25): SEQ ID NO: 2930; WAN024EWJ; Start 719; Stop 743
acaatccaattcacccatatactca

SEQ ID NO: 341376 - DNA, 25 bp, Artificial
  probe
  misc_feature (1)..(25): SEQ ID NO: 2930; WAN024EWJ; Start 81; Stop 105
tgctaacttctttatcaacaaggga

SEQ ID NO: 341377 - DNA, 25 bp, Artificial
  probe
  misc_feature (1)..(25): SEQ ID NO: 2930; WAN024EWJ; Start 304; Stop 328
gaacgtgcgactgttgattatatta

SEQ ID NO: 341378 - DNA, 25 bp, Artificial
  probe
  misc_feature (1)..(25): SEQ ID NO: 2930; WAN024EWJ; Start 722; Stop 746
atccaattcacccatatactcaagc

SEQ ID NO: 341379 - DNA, 25 bp, Artificial
  probe
  misc_feature (1)..(25): SEQ ID NO: 2930; WAN024EWJ; Start 82; Stop 106
gctaacttctttatcaacaagggag

SEQ ID NO: 341380 - DNA, 25 bp, Artificial
  probe
  misc_feature (1)..(25): SEQ ID NO: 2930; WAN024EWJ; Start 656; Stop 680
atcgtatcgcagttatttacaaggg

SEQ ID NO: 341381 - DNA, 25 bp, Artificial
  probe
  misc_feature (1)..(25): SEQ ID NO: 2930; WAN024EWJ; Start 725; Stop 749
caattcacccatatactcaagcctt

SEQ ID NO: 341382 - DNA, 25 bp, Artificial
  probe
  misc_feature (1)..(25): SEQ ID NO: 2930; WAN024EWJ; Start 80; Stop 104
atgctaacttctttatcaacaaggg

SEQ ID NO: 341383 - DNA, 25 bp, Artificial
  probe
  misc_feature (1)..(25): SEQ ID NO: 2930; WAN024EWJ; Start 305; Stop 329
aacgtgcgactgttgattatattat

SEQ ID NO: 341384 - DNA, 25 bp, Artificial
  probe
  misc_feature (1)..(25): SEQ ID NO: 2930; WAN024EWJ; Start 302; Stop 326
atgaacgtgcgactgttgattatat

SEQ ID NO: 341385 - DNA, 25 bp, Artificial
  probe
  misc_feature (1)..(25): SEQ ID NO: 2930; WAN024EWJ; Start 303; Stop 327
tgaacgtgcgactgttgattatatt

SEQ ID NO: 341386 - DNA, 25 bp, Artificial
  probe
  misc_feature (1)..(25): SEQ ID NO: 2930; WAN024EWJ; Start 301; Stop 325
aatgaacgtgcgactgttgattata

SEQ ID NO: 341387 - DNA, 25 bp, Artificial
  probe
  misc_feature (1)..(25): SEQ ID NO: 2930; WAN024EWJ; Start 720; Stop 744
caatccaattcacccatatactcaa

SEQ ID NO: 341388 - DNA, 25 bp, Artificial
  probe
  misc_feature (1)..(25): SEQ ID NO: 2930; WAN024EWJ; Start 718; Stop 742
aacaatccaattcacccatatactc

SEQ ID NO: 341389 - DNA, 25 bp, Artificial
  probe
  misc_feature (1)..(25): SEQ ID NO: 2930; WAN024EWJ; Start 168; Stop 192
cggtctaaatgatacaagtaatgga

SEQ ID NO: 341390 - DNA, 25 bp, Artificial
  probe
  misc_feature (1)..(25): SEQ ID NO: 2930; WAN024EWJ; Start 167; Stop 191
tcggtctaaatgatacaagtaatgg

SEQ ID NO: 341391 - DNA, 25 bp, Artificial
  probe
  misc_feature (1)..(25): SEQ ID NO: 2930; WAN024EWJ; Start 43; Stop 67
ttcggtgaaggaagtaagaagtttg

SEQ ID NO: 341392 - DNA, 25 bp, Artificial
  probe
  misc_feature (1)..(25): SEQ ID NO: 2930; WAN024EWJ; Start 143; Stop 167
aaacaactattggtcgtgctatcat

SEQ ID NO: 341393 - DNA, 25 bp, Artificial
  probe
  misc_feature (1)..(25): SEQ ID NO: 2930; WAN024EWJ; Start 637; Stop 661
gttgttcgctttatttcagatcgta

SEQ ID NO: 341394 - DNA, 25 bp, Artificial
  probe
  misc_feature (1)..(25): SEQ ID NO: 2930; WAN024EWJ; Start 721; Stop 745
aatccaattcacccatatactcaag

SEQ ID NO: 341395 - DNA, 25 bp, Artificial
  probe
  misc_feature (1)..(25): SEQ ID NO: 2930; WAN024EWJ; Start 655; Stop 679
gatcgtatcgcagttatttacaagg

SEQ ID NO: 341396 - DNA, 25 bp, Artificial
  probe
  misc_feature (1)..(25): SEQ ID NO: 2930; WAN024EWJ; Start 652; Stop 676
tcagatcgtatcgcagttatttaca

SEQ ID NO: 341397 - DNA, 25 bp, Artificial
  probe
  misc_feature (1)..(25): SEQ ID NO: 2930; WAN024EWJ; Start 145; Stop 169
acaactattggtcgtgctatcatcg

SEQ ID NO: 341398 - DNA, 25 bp, Artificial
  probe
  misc_feature (1)..(25): SEQ ID NO: 2930; WAN024EWJ; Start 645; Stop 669
ctttatttcagatcgtatcgcagtt

SEQ ID NO: 341399 - DNA, 25 bp, Artificial
  probe
  misc_feature (1)..(25): SEQ ID NO: 2930; WAN024EWJ; Start 639; Stop 663
tgttcgctttatttcagatcgtatc

SEQ ID NO: 341400 - DNA, 25 bp, Artificial
  probe
  misc_feature (1)..(25): SEQ ID NO: 2930; WAN024EWJ; Start 640; Stop 664
gttcgctttatttcagatcgtatcg

SEQ ID NO: 341401 - DNA, 25 bp, Artificial
  probe
  misc_feature (1)..(25): SEQ ID NO: 2931; WAN024DFV; Start 532; Stop 556
gaggtgctggaacttatcaatgatt

SEQ ID NO: 341402 - DNA, 25 bp, Artificial
  probe
  misc_feature (1)..(25): SEQ ID NO: 2931; WAN024DFV; Start 337; Stop 361
gacaagaaagaagtaacggaagaag

SEQ ID NO: 341403 - DNA, 25 bp, Artificial
  probe
  misc_feature (1)..(25): SEQ ID NO: 2931; WAN024DFV; Start 531; Stop 555
tgaggtgctggaacttatcaatgat

SEQ ID NO: 341404 - DNA, 25 bp, Artificial
  probe
  misc_feature (1)..(25): SEQ ID NO: 2931; WAN024DFV; Start 151; Stop 175
ctcaacggcttagaaagtattcaag

SEQ ID NO: 341405 - DNA, 25 bp, Artificial
  probe
  misc_feature (1)..(25): SEQ ID NO: 2931; WAN024DFV; Start 158; Stop 182
gcttagaaagtattcaaggtggaga

SEQ ID NO: 341406 - DNA, 25 bp, Artificial
  probe
  misc_feature (1)..(25): SEQ ID NO: 2931; WAN024DFV; Start 336; Stop 360
ggacaagaaagaagtaacggaagaa

SEQ ID NO: 341407 - DNA, 25 bp, Artificial
  probe
  misc_feature (1)..(25): SEQ ID NO: 2931; WAN024DFV; Start 157; Stop 181
ggcttagaaagtattcaaggtggag

SEQ ID NO: 341408 - DNA, 25 bp, Artificial
  probe
  misc_feature (1)..(25): SEQ ID NO: 2931; WAN024DFV; Start 152; Stop 176
tcaacggcttagaaagtattcaagg

SEQ ID NO: 341409 - DNA, 25 bp, Artificial
  probe
  misc_feature (1)..(25): SEQ ID NO: 2931; WAN024DFV; Start 150; Stop 174
cctcaacggcttagaaagtattcaa

SEQ ID NO: 341410 - DNA, 25 bp, Artificial
  probe
  misc_feature (1)..(25): SEQ ID NO: 2931; WAN024DFV; Start 530; Stop 554
gtgaggtgctggaacttatcaatga

SEQ ID NO: 341411 - DNA, 25 bp, Artificial
  probe
  misc_feature (1)..(25): SEQ ID NO: 2931; WAN024DFV; Start 338; Stop 362
acaagaaagaagtaacggaagaagc

SEQ ID NO: 341412 - DNA, 25 bp, Artificial
  probe
  misc_feature (1)..(25): SEQ ID NO: 2931; WAN024DFV; Start 154; Stop 178
aacggcttagaaagtattcaaggtg

SEQ ID NO: 341413 - DNA, 25 bp, Artificial
  probe
  misc_feature (1)..(25): SEQ ID NO: 2931; WAN024DFV; Start 153; Stop 177
caacggcttagaaagtattcaaggt

SEQ ID NO: 341414 - DNA, 25 bp, Artificial
  probe
  misc_feature (1)..(25): SEQ ID NO: 2931; WAN024DFV; Start 533; Stop 557
aggtgctggaacttatcaatgattt

SEQ ID NO: 341415 - DNA, 25 bp, Artificial
  probe
  misc_feature (1)..(25): SEQ ID NO: 2931; WAN024DFV; Start 534; Stop 558
ggtgctggaacttatcaatgatttg

SEQ ID NO: 341416 - DNA, 25 bp, Artificial
  probe
  misc_feature (1)..(25): SEQ ID NO: 2931; WAN024DFV; Start 246; Stop 270
gattggcatggtctttcaaagttat

SEQ ID NO: 341417 - DNA, 25 bp, Artificial
  probe
  misc_feature (1)..(25): SEQ ID NO: 2931; WAN024DFV; Start 247; Stop 271
attggcatggtctttcaaagttatg

SEQ ID NO: 341418 - DNA, 25 bp, Artificial
  probe
  misc_feature (1)..(25): SEQ ID NO: 2931; WAN024DFV; Start 189; Stop 213
tctggatggtcagtctatcgttgaa

SEQ ID NO: 341419 - DNA, 25 bp, Artificial
  probe
  misc_feature (1)..(25): SEQ ID NO: 2931; WAN024DFV; Start 188; Stop 212
ttctggatggtcagtctatcgttga

SEQ ID NO: 341420 - DNA, 25 bp, Artificial
  probe
  misc_feature (1)..(25): SEQ ID NO: 2931; WAN024DFV; Start 245; Stop 269
agattggcatggtctttcaaagtta

SEQ ID NO: 341421 - DNA, 25 bp, Artificial
  probe
  misc_feature (1)..(25): SEQ ID NO: 2931; WAN024DFV; Start 678; Stop 702
cttctttaccaatccgcaaaccaaa

SEQ ID NO: 341422 - DNA, 25 bp, Artificial
  probe
  misc_feature (1)..(25): SEQ ID NO: 2931; WAN024DFV; Start 335; Stop 359
gggacaagaaagaagtaacggaaga

SEQ ID NO: 341423 - DNA, 25 bp, Artificial
  probe
  misc_feature (1)..(25): SEQ ID NO: 2931; WAN024DFV; Start 248; Stop 272
ttggcatggtctttcaaagttatga

SEQ ID NO: 341424 - DNA, 25 bp, Artificial
  probe
  misc_feature (1)..(25): SEQ ID NO: 2931; WAN024DFV; Start 156; Stop 180
cggcttagaaagtattcaaggtgga

SEQ ID NO: 341425 - DNA, 25 bp, Artificial
  probe
  misc_feature (1)..(25): SEQ ID NO: 2931; WAN024DFV; Start 679; Stop 703
ttctttaccaatccgcaaaccaaac

SEQ ID NO: 341426 - DNA, 25 bp, Artificial
  probe
  misc_feature (1)..(25): SEQ ID NO: 2931; WAN024DFV; Start 339; Stop 363
caagaaagaagtaacggaagaagct

SEQ ID NO: 341427 - DNA, 25 bp, Artificial
  probe
  misc_feature (1)..(25): SEQ ID NO: 2931; WAN024DFV; Start 155; Stop 179
acggcttagaaagtattcaaggtgg

SEQ ID NO: 341428 - DNA, 25 bp, Artificial
  probe
  misc_feature (1)..(25): SEQ ID NO: 2931; WAN024DFV; Start 190; Stop 214
ctggatggtcagtctatcgttgaaa

SEQ ID NO: 341429 - DNA, 25 bp, Artificial
  probe
  misc_feature (1)..(25): SEQ ID NO: 2931; WAN024DFV; Start 529; Stop 553
cgtgaggtgctggaacttatcaatg

SEQ ID NO: 341430 - DNA, 25 bp, Artificial
  probe
  misc_feature (1)..(25): SEQ ID NO: 2931; WAN024DFV; Start 582; Stop 606
tttagtaacccacgaaatgcagttt

SEQ ID NO: 341431 - DNA, 25 bp, Artificial
  probe
  misc_feature (1)..(25): SEQ ID NO: 2931; WAN024DFV; Start 401; Stop 425
aacatagctttgcccgtcaattatc

SEQ ID NO: 341432 - DNA, 25 bp, Artificial
  probe
  misc_feature (1)..(25): SEQ ID NO: 2931; WAN024DFV; Start 717; Stop 741
tttaaacgtctttgactttagccaa

SEQ ID NO: 341433 - DNA, 25 bp, Artificial
  probe
  misc_feature (1)..(25): SEQ ID NO: 2931; WAN024DFV; Start 719; Stop 743
taaacgtctttgactttagccaatt

SEQ ID NO: 341434 - DNA, 25 bp, Artificial
  probe
  misc_feature (1)..(25): SEQ ID NO: 2932; WAN024GDM; Start 430; Stop 454
gtcagctcttatcttcattccttct

SEQ ID NO: 341435 - DNA, 25 bp, Artificial
  probe
  misc_feature (1)..(25): SEQ ID NO: 2932; WAN024GDM; Start 429; Stop 453
tgtcagctcttatcttcattccttc

SEQ ID NO: 341436 - DNA, 25 bp, Artificial
  probe
  misc_feature (1)..(25): SEQ ID NO: 2932; WAN024GDM; Start 428; Stop 452
gtgtcagctcttatcttcattcctt

SEQ ID NO: 341437 - DNA, 25 bp, Artificial
  probe
  misc_feature (1)..(25): SEQ ID NO: 2932; WAN024GDM; Start 435; Stop 459
ctcttatcttcattccttctggagc

SEQ ID NO: 341438 - DNA, 25 bp, Artificial
  probe
  misc_feature (1)..(25): SEQ ID NO: 2932; WAN024GDM; Start 434; Stop 458
gctcttatcttcattccttctggag

SEQ ID NO: 341439 - DNA, 25 bp, Artificial
  probe
  misc_feature (1)..(25): SEQ ID NO: 2932; WAN024GDM; Start 425; Stop 449
aaggtgtcagctcttatcttcattc

SEQ ID NO: 341440 - DNA, 25 bp, Artificial
  probe
  misc_feature (1)..(25): SEQ ID NO: 2932; WAN024GDM; Start 61; Stop 85
tccaatttattaaccagagaagcca

SEQ ID NO: 341441 - DNA, 25 bp, Artificial
  probe
  misc_feature (1)..(25): SEQ ID NO: 2932; WAN024GDM; Start 68; Stop 92
tattaaccagagaagccattgaaac

SEQ ID NO: 341442 - DNA, 25 bp, Artificial
  probe
  misc_feature (1)..(25): SEQ ID NO: 2932; WAN024GDM; Start 69; Stop 93
attaaccagagaagccattgaaaca

SEQ ID NO: 341443 - DNA, 25 bp, Artificial
  probe
  misc_feature (1)..(25): SEQ ID NO: 2932; WAN024GDM; Start 62; Stop 86
ccaatttattaaccagagaagccat

SEQ ID NO: 341444 - DNA, 25 bp, Artificial
  probe
  misc_feature (1)..(25): SEQ ID NO: 2932; WAN024GDM; Start 431; Stop 455
tcagctcttatcttcattccttctg

SEQ ID NO: 341445 - DNA, 25 bp, Artificial
  probe
  misc_feature (1)..(25): SEQ ID NO: 2932; WAN024GDM; Start 60; Stop 84
atccaatttattaaccagagaagcc

SEQ ID NO: 341446 - DNA, 25 bp, Artificial
  probe
  misc_feature (1)..(25): SEQ ID NO: 2932; WAN024GDM; Start 182; Stop 206
tttatcgcaattatgactccaaaga

SEQ ID NO: 341447 - DNA, 25 bp, Artificial
  probe
  misc_feature (1)..(25): SEQ ID NO: 2932; WAN024GDM; Start 432; Stop 456
cagctcttatcttcattccttctgg

SEQ ID NO: 341448 - DNA, 25 bp, Artificial
  probe
  misc_feature (1)..(25): SEQ ID NO: 2932; WAN024GDM; Start 70; Stop 94
ttaaccagagaagccattgaaacag

SEQ ID NO: 341449 - DNA, 25 bp, Artificial
  probe
  misc_feature (1)..(25): SEQ ID NO: 2932; WAN024GDM; Start 67; Stop 91
ttattaaccagagaagccattgaaa

SEQ ID NO: 341450 - DNA, 25 bp, Artificial
  probe
  misc_feature (1)..(25): SEQ ID NO: 2932; WAN024GDM; Start 66; Stop 90
tttattaaccagagaagccattgaa

SEQ ID NO: 341451 - DNA, 25 bp, Artificial
  probe
  misc_feature (1)..(25): SEQ ID NO: 2932; WAN024GDM; Start 427; Stop 451
ggtgtcagctcttatcttcattcct

SEQ ID NO: 341452 - DNA, 25 bp, Artificial
  probe
  misc_feature (1)..(25): SEQ ID NO: 2932; WAN024GDM; Start 426; Stop 450
aggtgtcagctcttatcttcattcc

SEQ ID NO: 341453 - DNA, 25 bp, Artificial
  probe
  misc_feature (1)..(25): SEQ ID NO: 2932; WAN024GDM; Start 65; Stop 89
atttattaaccagagaagccattga

SEQ ID NO: 341454 - DNA, 25 bp, Artificial
  probe
  misc_feature (1)..(25): SEQ ID NO: 2932; WAN024GDM; Start 184; Stop 208
tatcgcaattatgactccaaagagg

SEQ ID NO: 341455 - DNA, 25 bp, Artificial
  probe
  misc_feature (1)..(25): SEQ ID NO: 2932; WAN024GDM; Start 183; Stop 207
ttatcgcaattatgactccaaagag

SEQ ID NO: 341456 - DNA, 25 bp, Artificial
  probe
  misc_feature (1)..(25): SEQ ID NO: 2932; WAN024GDM; Start 436; Stop 460
tcttatcttcattccttctggagct

SEQ ID NO: 341457 - DNA, 25 bp, Artificial
  probe
  misc_feature (1)..(25): SEQ ID NO: 2932; WAN024GDM; Start 433; Stop 457
agctcttatcttcattccttctgga

SEQ ID NO: 341458 - DNA, 25 bp, Artificial
  probe
  misc_feature (1)..(25): SEQ ID NO: 2932; WAN024GDM; Start 64; Stop 88
aatttattaaccagagaagccattg

SEQ ID NO: 341459 - DNA, 25 bp, Artificial
  probe
  misc_feature (1)..(25): SEQ ID NO: 2932; WAN024GDM; Start 63; Stop 87
caatttattaaccagagaagccatt

SEQ ID NO: 341460 - DNA, 25 bp, Artificial
  probe
  misc_feature (1)..(25): SEQ ID NO: 2932; WAN024GDM; Start 223; Stop 247
gtctttaaacgaactgtccacaata

SEQ ID NO: 341461 - DNA, 25 bp, Artificial
  probe
  misc_feature (1)..(25): SEQ ID NO: 2932; WAN024GDM; Start 188; Stop 212
gcaattatgactccaaagaggaaat

SEQ ID NO: 341462 - DNA, 25 bp, Artificial
  probe
  misc_feature (1)..(25): SEQ ID NO: 2932; WAN024GDM; Start 59; Stop 83
aatccaatttattaaccagagaagc

SEQ ID NO: 341463 - DNA, 25 bp, Artificial
  probe
  misc_feature (1)..(25): SEQ ID NO: 2932; WAN024GDM; Start 424; Stop 448
aaaggtgtcagctcttatcttcatt

SEQ ID NO: 341464 - DNA, 25 bp, Artificial
  probe
  misc_feature (1)..(25): SEQ ID NO: 2932; WAN024GDM; Start 286; Stop 310
ctttatttggtttgggttcaccttt

SEQ ID NO: 341465 - DNA, 25 bp, Artificial
  probe
  misc_feature (1)..(25): SEQ ID NO: 2932; WAN024GDM; Start 134; Stop 158
ttagtatttctgaattggtcaaacg

SEQ ID NO: 341466 - DNA, 25 bp, Artificial
  probe
  misc_feature (1)..(25): SEQ ID NO: 2932; WAN024GDM; Start 53; Stop 77
accaagaatccaatttattaaccag

SEQ ID NO: 341467 - DNA, 25 bp, Artificial
  probe
  misc_feature (1)..(25): SEQ ID NO: 2933; WAN024ETI; Start 569; Stop 593
gagatgatgacttgattgaacttgg

SEQ ID NO: 341468 - DNA, 25 bp, Artificial
  probe
  misc_feature (1)..(25): SEQ ID NO: 2933; WAN024ETI; Start 566; Stop 590
acagagatgatgacttgattgaact

SEQ ID NO: 341469 - DNA, 25 bp, Artificial
  probe
  misc_feature (1)..(25): SEQ ID NO: 2933; WAN024ETI; Start 565; Stop 589
gacagagatgatgacttgattgaac

SEQ ID NO: 341470 - DNA, 25 bp, Artificial
  probe
  misc_feature (1)..(25): SEQ ID NO: 2933; WAN024ETI; Start 564; Stop 588
agacagagatgatgacttgattgaa

SEQ ID NO: 341471 - DNA, 25 bp, Artificial
  probe
  misc_feature (1)..(25): SEQ ID NO: 2933; WAN024ETI; Start 570; Stop 594
agatgatgacttgattgaacttggt

SEQ ID NO: 341472 - DNA, 25 bp, Artificial
  probe
  misc_feature (1)..(25): SEQ ID NO: 2933; WAN024ETI; Start 563; Stop 587
cagacagagatgatgacttgattga

SEQ ID NO: 341473 - DNA, 25 bp, Artificial
  probe
  misc_feature (1)..(25): SEQ ID NO: 2933; WAN024ETI; Start 561; Stop 585
gacagacagagatgatgacttgatt

SEQ ID NO: 341474 - DNA, 25 bp, Artificial
  probe
  misc_feature (1)..(25): SEQ ID NO: 2933; WAN024ETI; Start 557; Stop 581
gattgacagacagagatgatgactt

SEQ ID NO: 341475 - DNA, 25 bp, Artificial
  probe
  misc_feature (1)..(25): SEQ ID NO: 2933; WAN024ETI; Start 562; Stop 586
acagacagagatgatgacttgattg

SEQ ID NO: 341476 - DNA, 25 bp, Artificial
  probe
  misc_feature (1)..(25): SEQ ID NO: 2933; WAN024ETI; Start 558; Stop 582
attgacagacagagatgatgacttg

SEQ ID NO: 341477 - DNA, 25 bp, Artificial
  probe
  misc_feature (1)..(25): SEQ ID NO: 2933; WAN024ETI; Start 571; Stop 595
gatgatgacttgattgaacttggta

SEQ ID NO: 341478 - DNA, 25 bp, Artificial
  probe
  misc_feature (1)..(25): SEQ ID NO: 2933; WAN024ETI; Start 568; Stop 592
agagatgatgacttgattgaacttg

SEQ ID NO: 341479 - DNA, 25 bp, Artificial
  probe
  misc_feature (1)..(25): SEQ ID NO: 2933; WAN024ETI; Start 567; Stop 591
cagagatgatgacttgattgaactt

SEQ ID NO: 341480 - DNA, 25 bp, Artificial
  probe
  misc_feature (1)..(25): SEQ ID NO: 2933; WAN024ETI; Start 573; Stop 597
tgatgacttgattgaacttggtaag

SEQ ID NO: 341481 - DNA, 25 bp, Artificial
  probe
  misc_feature (1)..(25): SEQ ID NO: 2933; WAN024ETI; Start 560; Stop 584
tgacagacagagatgatgacttgat

SEQ ID NO: 341482 - DNA, 25 bp, Artificial
  probe
  misc_feature (1)..(25): SEQ ID NO: 2933; WAN024ETI; Start 572; Stop 596
atgatgacttgattgaacttggtaa

SEQ ID NO: 341483 - DNA, 25 bp, Artificial
  probe
  misc_feature (1)..(25): SEQ ID NO: 2933; WAN024ETI; Start 559; Stop 583
ttgacagacagagatgatgacttga

SEQ ID NO: 341484 - DNA, 25 bp, Artificial
  probe
  misc_feature (1)..(25): SEQ ID NO: 2933; WAN024ETI; Start 556; Stop 580
ggattgacagacagagatgatgact

SEQ ID NO: 341485 - DNA, 25 bp, Artificial
  probe
  misc_feature (1)..(25): SEQ ID NO: 2933; WAN024ETI; Start 555; Stop 579
aggattgacagacagagatgatgac

SEQ ID NO: 341486 - DNA, 25 bp, Artificial
  probe
  misc_feature (1)..(25): SEQ ID NO: 2933; WAN024ETI; Start 554; Stop 578
caggattgacagacagagatgatga

SEQ ID NO: 341487 - DNA, 25 bp, Artificial
  probe
  misc_feature (1)..(25): SEQ ID NO: 2933; WAN024ETI; Start 547; Stop 571
ctagttccaggattgacagacagag

SEQ ID NO: 341488 - DNA, 25 bp, Artificial
  probe
  misc_feature (1)..(25): SEQ ID NO: 2933; WAN024ETI; Start 548; Stop 572
tagttccaggattgacagacagaga

SEQ ID NO: 341489 - DNA, 25 bp, Artificial
  probe
  misc_feature (1)..(25): SEQ ID NO: 2933; WAN024ETI; Start 439; Stop 463
atcaacgaagaacagcacaagattg

SEQ ID NO: 341490 - DNA, 25 bp, Artificial
  probe
  misc_feature (1)..(25): SEQ ID NO: 2933; WAN024ETI; Start 446; Stop 470
aagaacagcacaagattgtcactag

SEQ ID NO: 341491 - DNA, 25 bp, Artificial
  probe
  misc_feature (1)..(25): SEQ ID NO: 2933; WAN024ETI; Start 553; Stop 577
ccaggattgacagacagagatgatg

SEQ ID NO: 341492 - DNA, 25 bp, Artificial
  probe
  misc_feature (1)..(25): SEQ ID NO: 2933; WAN024ETI; Start 445; Stop 469
gaagaacagcacaagattgtcacta

SEQ ID NO: 341493 - DNA, 25 bp, Artificial
  probe
  misc_feature (1)..(25): SEQ ID NO: 2933; WAN024ETI; Start 311; Stop 335
ctaaggaacaaggaatccactgtac

SEQ ID NO: 341494 - DNA, 25 bp, Artificial
  probe
  misc_feature (1)..(25): SEQ ID NO: 2933; WAN024ETI; Start 429; Stop 453
tatcaaggaaatcaacgaagaacag

SEQ ID NO: 341495 - DNA, 25 bp, Artificial
  probe
  misc_feature (1)..(25): SEQ ID NO: 2933; WAN024ETI; Start 552; Stop 576
tccaggattgacagacagagatgat

SEQ ID NO: 341496 - DNA, 25 bp, Artificial
  probe
  misc_feature (1)..(25): SEQ ID NO: 2933; WAN024ETI; Start 233; Stop 257
gaaataagggtgggattacagtcag

SEQ ID NO: 341497 - DNA, 25 bp, Artificial
  probe
  misc_feature (1)..(25): SEQ ID NO: 2933; WAN024ETI; Start 550; Stop 574
gttccaggattgacagacagagatg

SEQ ID NO: 341498 - DNA, 25 bp, Artificial
  probe
  misc_feature (1)..(25): SEQ ID NO: 2933; WAN024ETI; Start 428; Stop 452
atatcaaggaaatcaacgaagaaca

SEQ ID NO: 341499 - DNA, 25 bp, Artificial
  probe
  misc_feature (1)..(25): SEQ ID NO: 2933; WAN024ETI; Start 234; Stop 258
aaataagggtgggattacagtcagt

SEQ ID NO: 341500 - DNA, 25 bp, Artificial
  probe
  misc_feature (1)..(25): SEQ ID NO: 2934; WAN024DBY; Start 106; Stop 130
gctattggtcctgtaattgaagtag

SEQ ID NO: 341501 - DNA, 25 bp, Artificial
  probe
  misc_feature (1)..(25): SEQ ID NO: 2934; WAN024DBY; Start 334; Stop 358
agccatctcataacttcttgtaatt

SEQ ID NO: 341502 - DNA, 25 bp, Artificial
  probe
  misc_feature (1)..(25): SEQ ID NO: 2934; WAN024DBY; Start 335; Stop 359
gccatctcataacttcttgtaattc

SEQ ID NO: 341503 - DNA, 25 bp, Artificial
  probe
  misc_feature (1)..(25): SEQ ID NO: 2934; WAN024DBY; Start 333; Stop 357
gagccatctcataacttcttgtaat

SEQ ID NO: 341504 - DNA, 25 bp, Artificial
  probe
  misc_feature (1)..(25): SEQ ID NO: 2934; WAN024DBY; Start 286; Stop 310
agaacaagaggtatgtcatctaact

SEQ ID NO: 341505 - DNA, 25 bp, Artificial
  probe
  misc_feature (1)..(25): SEQ ID NO: 2934; WAN024DBY; Start 107; Stop 131
ctattggtcctgtaattgaagtaga

SEQ ID NO: 341506 - DNA, 25 bp, Artificial
  probe
  misc_feature (1)..(25): SEQ ID NO: 2934; WAN024DBY; Start 104; Stop 128
aagctattggtcctgtaattgaagt

SEQ ID NO: 341507 - DNA, 25 bp, Artificial
  probe
  misc_feature (1)..(25): SEQ ID NO: 2934; WAN024DBY; Start 105; Stop 129
agctattggtcctgtaattgaagta

SEQ ID NO: 341508 - DNA, 25 bp, Artificial
  probe
  misc_feature (1)..(25): SEQ ID NO: 2934; WAN024DBY; Start 287; Stop 311
gaacaagaggtatgtcatctaactt

SEQ ID NO: 341509 - DNA, 25 bp, Artificial
  probe
  misc_feature (1)..(25): SEQ ID NO: 2934; WAN024DBY; Start 103; Stop 127
caagctattggtcctgtaattgaag

SEQ ID NO: 341510 - DNA, 25 bp, Artificial
  probe
  misc_feature (1)..(25): SEQ ID NO: 2934; WAN024DBY; Start 108; Stop 132
tattggtcctgtaattgaagtagaa

SEQ ID NO: 341511 - DNA, 25 bp, Artificial
  probe
  misc_feature (1)..(25): SEQ ID NO: 2934; WAN024DBY; Start 24; Stop 48
aattccaaccaatccagctaatatt

SEQ ID NO: 341512 - DNA, 25 bp, Artificial
  probe
  misc_feature (1)..(25): SEQ ID NO: 2934; WAN024DBY; Start 102; Stop 126
acaagctattggtcctgtaattgaa

SEQ ID NO: 341513 - DNA, 25 bp, Artificial
  probe
  misc_feature (1)..(25): SEQ ID NO: 2934; WAN024DBY; Start 95; Stop 119
aagatatacaagctattggtcctgt

SEQ ID NO: 341514 - DNA, 25 bp, Artificial
  probe
  misc_feature (1)..(25): SEQ ID NO: 2934; WAN024DBY; Start 201; Stop 225
gattgctatttcttcaccaagttca

SEQ ID NO: 341515 - DNA, 25 bp, Artificial
  probe
  misc_feature (1)..(25): SEQ ID NO: 2934; WAN024DBY; Start 203; Stop 227
ttgctatttcttcaccaagttcaat

SEQ ID NO: 341516 - DNA, 25 bp, Artificial
  probe
  misc_feature (1)..(25): SEQ ID NO: 2934; WAN024DBY; Start 202; Stop 226
attgctatttcttcaccaagttcaa

SEQ ID NO: 341517 - DNA, 25 bp, Artificial
  probe
  misc_feature (1)..(25): SEQ ID NO: 2934; WAN024DBY; Start 200; Stop 224
cgattgctatttcttcaccaagttc

SEQ ID NO: 341518 - DNA, 25 bp, Artificial
  probe
  misc_feature (1)..(25): SEQ ID NO: 2934; WAN024DBY; Start 336; Stop 360
ccatctcataacttcttgtaattca

SEQ ID NO: 341519 - DNA, 25 bp, Artificial
  probe
  misc_feature (1)..(25): SEQ ID NO: 2934; WAN024DBY; Start 204; Stop 228
tgctatttcttcaccaagttcaata

SEQ ID NO: 341520 - DNA, 25 bp, Artificial
  probe
  misc_feature (1)..(25): SEQ ID NO: 2934; WAN024DBY; Start 345; Stop 369
aacttcttgtaattcatatcttgct

SEQ ID NO: 341521 - DNA, 25 bp, Artificial
  probe
  misc_feature (1)..(25): SEQ ID NO: 2934; WAN024DBY; Start 290; Stop 314
caagaggtatgtcatctaactttgt

SEQ ID NO: 341522 - DNA, 25 bp, Artificial
  probe
  misc_feature (1)..(25): SEQ ID NO: 2934; WAN024DBY; Start 285; Stop 309
tagaacaagaggtatgtcatctaac

SEQ ID NO: 341523 - DNA, 25 bp, Artificial
  probe
  misc_feature (1)..(25): SEQ ID NO: 2934; WAN024DBY; Start 109; Stop 133
attggtcctgtaattgaagtagaaa

SEQ ID NO: 341524 - DNA, 25 bp, Artificial
  probe
  misc_feature (1)..(25): SEQ ID NO: 2934; WAN024DBY; Start 191; Stop 215
ctccaagtccgattgctatttcttc

SEQ ID NO: 341525 - DNA, 25 bp, Artificial
  probe
  misc_feature (1)..(25): SEQ ID NO: 2934; WAN024DBY; Start 280; Stop 304
actattagaacaagaggtatgtcat

SEQ ID NO: 341526 - DNA, 25 bp, Artificial
  probe
  misc_feature (1)..(25): SEQ ID NO: 2934; WAN024DBY; Start 199; Stop 223
ccgattgctatttcttcaccaagtt

SEQ ID NO: 341527 - DNA, 25 bp, Artificial
  probe
  misc_feature (1)..(25): SEQ ID NO: 2934; WAN024DBY; Start 101; Stop 125
tacaagctattggtcctgtaattga

SEQ ID NO: 341528 - DNA, 25 bp, Artificial
  probe
  misc_feature (1)..(25): SEQ ID NO: 2934; WAN024DBY; Start 289; Stop 313
acaagaggtatgtcatctaactttg

SEQ ID NO: 341529 - DNA, 25 bp, Artificial
  probe
  misc_feature (1)..(25): SEQ ID NO: 2934; WAN024DBY; Start 25; Stop 49
attccaaccaatccagctaatattg

SEQ ID NO: 341530 - DNA, 25 bp, Artificial
  probe
  misc_feature (1)..(25): SEQ ID NO: 2934; WAN024DBY; Start 205; Stop 229
gctatttcttcaccaagttcaataa

SEQ ID NO: 341531 - DNA, 25 bp, Artificial
  probe
  misc_feature (1)..(25): SEQ ID NO: 2934; WAN024DBY; Start 100; Stop 124
atacaagctattggtcctgtaattg

SEQ ID NO: 341532 - DNA, 25 bp, Artificial
  probe
  misc_feature (1)..(25): SEQ ID NO: 2934; WAN024DBY; Start 197; Stop 221
gtccgattgctatttcttcaccaag

SEQ ID NO: 341533 - DNA, 25 bp, Artificial
  probe
  misc_feature (1)..(25): SEQ ID NO: 2935; WAN024FOV; Start 28; Stop 52
gctgctcacttaattgatatgaacg

SEQ ID NO: 341534 - DNA, 25 bp, Artificial
  probe
  misc_feature (1)..(25): SEQ ID NO: 2935; WAN024FOV; Start 29; Stop 53
ctgctcacttaattgatatgaacga

SEQ ID NO: 341535 - DNA, 25 bp, Artificial
  probe
  misc_feature (1)..(25): SEQ ID NO: 2935; WAN024FOV; Start 339; Stop 363
aatcgtctctcactctgttcaagat

SEQ ID NO: 341536 - DNA, 25 bp, Artificial
  probe
  misc_feature (1)..(25): SEQ ID NO: 2935; WAN024FOV; Start 30; Stop 54
tgctcacttaattgatatgaacgat

SEQ ID NO: 341537 - DNA, 25 bp, Artificial
  probe
  misc_feature (1)..(25): SEQ ID NO: 2935; WAN024FOV; Start 340; Stop 364
atcgtctctcactctgttcaagatg

SEQ ID NO: 341538 - DNA, 25 bp, Artificial
  probe
  misc_feature (1)..(25): SEQ ID NO: 2935; WAN024FOV; Start 27; Stop 51
agctgctcacttaattgatatgaac

SEQ ID NO: 341539 - DNA, 25 bp, Artificial
  probe
  misc_feature (1)..(25): SEQ ID NO: 2935; WAN024FOV; Start 479; Stop 503
gtatcaaactcaaaggctacaactc

SEQ ID NO: 341540 - DNA, 25 bp, Artificial
  probe
  misc_feature (1)..(25): SEQ ID NO: 2935; WAN024FOV; Start 480; Stop 504
tatcaaactcaaaggctacaactcc

SEQ ID NO: 341541 - DNA, 25 bp, Artificial
  probe
  misc_feature (1)..(25): SEQ ID NO: 2935; WAN024FOV; Start 266; Stop 290
tacctaatattgttgaagaaggcga

SEQ ID NO: 341542 - DNA, 25 bp, Artificial
  probe
  misc_feature (1)..(25): SEQ ID NO: 2935; WAN024FOV; Start 265; Stop 289
gtacctaatattgttgaagaaggcg

SEQ ID NO: 341543 - DNA, 25 bp, Artificial
  probe
  misc_feature (1)..(25): SEQ ID NO: 2935; WAN024FOV; Start 522; Stop 546
aattgaccacattaacggtatcatg

SEQ ID NO: 341544 - DNA, 25 bp, Artificial
  probe
  misc_feature (1)..(25): SEQ ID NO: 2935; WAN024FOV; Start 267; Stop 291
acctaatattgttgaagaaggcgaa

SEQ ID NO: 341545 - DNA, 25 bp, Artificial
  probe
  misc_feature (1)..(25): SEQ ID NO: 2935; WAN024FOV; Start 26; Stop 50
aagctgctcacttaattgatatgaa

SEQ ID NO: 341546 - DNA, 25 bp, Artificial
  probe
  misc_feature (1)..(25): SEQ ID NO: 2935; WAN024FOV; Start 150; Stop 174
gcaattccttaaacattcccaagat

SEQ ID NO: 341547 - DNA, 25 bp, Artificial
  probe
  misc_feature (1)..(25): SEQ ID NO: 2935; WAN024FOV; Start 478; Stop 502
cgtatcaaactcaaaggctacaact

SEQ ID NO: 341548 - DNA, 25 bp, Artificial
  probe
  misc_feature (1)..(25): SEQ ID NO: 2935; WAN024FOV; Start 483; Stop 507
caaactcaaaggctacaactccatt

SEQ ID NO: 341549 - DNA, 25 bp, Artificial
  probe
  misc_feature (1)..(25): SEQ ID NO: 2935; WAN024FOV; Start 343; Stop 367
gtctctcactctgttcaagatgctg

SEQ ID NO: 341550 - DNA, 25 bp, Artificial
  probe
  misc_feature (1)..(25): SEQ ID NO: 2935; WAN024FOV; Start 31; Stop 55
gctcacttaattgatatgaacgata

SEQ ID NO: 341551 - DNA, 25 bp, Artificial
  probe
  misc_feature (1)..(25): SEQ ID NO: 2935; WAN024FOV; Start 153; Stop 177
attccttaaacattcccaagatcct

SEQ ID NO: 341552 - DNA, 25 bp, Artificial
  probe
  misc_feature (1)..(25): SEQ ID NO: 2935; WAN024FOV; Start 154; Stop 178
ttccttaaacattcccaagatcctg

SEQ ID NO: 341553 - DNA, 25 bp, Artificial
  probe
  misc_feature (1)..(25): SEQ ID NO: 2935; WAN024FOV; Start 272; Stop 296
atattgttgaagaaggcgaaactcc

SEQ ID NO: 341554 - DNA, 25 bp, Artificial
  probe
  misc_feature (1)..(25): SEQ ID NO: 2935; WAN024FOV; Start 152; Stop 176
aattccttaaacattcccaagatcc

SEQ ID NO: 341555 - DNA, 25 bp, Artificial
  probe
  misc_feature (1)..(25): SEQ ID NO: 2935; WAN024FOV; Start 338; Stop 362
aaatcgtctctcactctgttcaaga

SEQ ID NO: 341556 - DNA, 25 bp, Artificial
  probe
  misc_feature (1)..(25): SEQ ID NO: 2935; WAN024FOV; Start 1; Stop 25
atgtctgcaatagaacgtattacaa

SEQ ID NO: 341557 - DNA, 25 bp, Artificial
  probe
  misc_feature (1)..(25): SEQ ID NO: 2935; WAN024FOV; Start 484; Stop 508
aaactcaaaggctacaactccattg

SEQ ID NO: 341558 - DNA, 25 bp, Artificial
  probe
  misc_feature (1)..(25): SEQ ID NO: 2935; WAN024FOV; Start 477; Stop 501
ccgtatcaaactcaaaggctacaac

SEQ ID NO: 341559 - DNA, 25 bp, Artificial
  probe
  misc_feature (1)..(25): SEQ ID NO: 2935; WAN024FOV; Start 438; Stop 462
cgttactgttgactactttgacaaa

SEQ ID NO: 341560 - DNA, 25 bp, Artificial
  probe
  misc_feature (1)..(25): SEQ ID NO: 2935; WAN024FOV; Start 513; Stop 537
tcagcatgaaattgaccacattaac

SEQ ID NO: 341561 - DNA, 25 bp, Artificial
  probe
  misc_feature (1)..(25): SEQ ID NO: 2935; WAN024FOV; Start 482; Stop 506
tcaaactcaaaggctacaactccat

SEQ ID NO: 341562 - DNA, 25 bp, Artificial
  probe
  misc_feature (1)..(25): SEQ ID NO: 2935; WAN024FOV; Start 481; Stop 505
atcaaactcaaaggctacaactcca

SEQ ID NO: 341563 - DNA, 25 bp, Artificial
  probe
  misc_feature (1)..(25): SEQ ID NO: 2935; WAN024FOV; Start 158; Stop 182
ttaaacattcccaagatcctgtcat

SEQ ID NO: 341564 - DNA, 25 bp, Artificial
  probe
  misc_feature (1)..(25): SEQ ID NO: 2935; WAN024FOV; Start 271; Stop 295
aatattgttgaagaaggcgaaactc

SEQ ID NO: 341565 - DNA, 25 bp, Artificial
  probe
  misc_feature (1)..(25): SEQ ID NO: 2935; WAN024FOV; Start 473; Stop 497
aacaccgtatcaaactcaaaggcta

SEQ ID NO: 341566 - DNA, 25 bp, Artificial
  probe
  misc_feature (1)..(25): SEQ ID NO: 2936; WAN024FXR; Start 39; Stop 63
acattcatcaacatcaacatccaag

SEQ ID NO: 341567 - DNA, 25 bp, Artificial
  probe
  misc_feature (1)..(25): SEQ ID NO: 2936; WAN024FXR; Start 38; Stop 62
tacattcatcaacatcaacatccaa

SEQ ID NO: 341568 - DNA, 25 bp, Artificial
  probe
  misc_feature (1)..(25): SEQ ID NO: 2936; WAN024FXR; Start 40; Stop 64
cattcatcaacatcaacatccaagc

SEQ ID NO: 341569 - DNA, 25 bp, Artificial
  probe
  misc_feature (1)..(25): SEQ ID NO: 2936; WAN024FXR; Start 37; Stop 61
gtacattcatcaacatcaacatcca

SEQ ID NO: 341570 - DNA, 25 bp, Artificial
  probe
  misc_feature (1)..(25): SEQ ID NO: 2936; WAN024FXR; Start 144; Stop 168
taatgccatatcgtcctcctcaatt

SEQ ID NO: 341571 - DNA, 25 bp, Artificial
  probe
  misc_feature (1)..(25): SEQ ID NO: 2936; WAN024FXR; Start 143; Stop 167
ctaatgccatatcgtcctcctcaat

SEQ ID NO: 341572 - DNA, 25 bp, Artificial
  probe
  misc_feature (1)..(25): SEQ ID NO: 2936; WAN024FXR; Start 41; Stop 65
attcatcaacatcaacatccaagcc

SEQ ID NO: 341573 - DNA, 25 bp, Artificial
  probe
  misc_feature (1)..(25): SEQ ID NO: 2936; WAN024FXR; Start 156; Stop 180
gtcctcctcaatttatctttctcca

SEQ ID NO: 341574 - DNA, 25 bp, Artificial
  probe
  misc_feature (1)..(25): SEQ ID NO: 2936; WAN024FXR; Start 154; Stop 178
tcgtcctcctcaatttatctttctc

SEQ ID NO: 341575 - DNA, 25 bp, Artificial
  probe
  misc_feature (1)..(25): SEQ ID NO: 2936; WAN024FXR; Start 149; Stop 173
ccatatcgtcctcctcaatttatct

SEQ ID NO: 341576 - DNA, 25 bp, Artificial
  probe
  misc_feature (1)..(25): SEQ ID NO: 2936; WAN024FXR; Start 153; Stop 177
atcgtcctcctcaatttatctttct

SEQ ID NO: 341577 - DNA, 25 bp, Artificial
  probe
  misc_feature (1)..(25): SEQ ID NO: 2936; WAN024FXR; Start 157; Stop 181
tcctcctcaatttatctttctccat

SEQ ID NO: 341578 - DNA, 25 bp, Artificial
  probe
  misc_feature (1)..(25): SEQ ID NO: 2936; WAN024FXR; Start 155; Stop 179
cgtcctcctcaatttatctttctcc

SEQ ID NO: 341579 - DNA, 25 bp, Artificial
  probe
  misc_feature (1)..(25): SEQ ID NO: 2936; WAN024FXR; Start 148; Stop 172
gccatatcgtcctcctcaatttatc

SEQ ID NO: 341580 - DNA, 25 bp, Artificial
  probe
  misc_feature (1)..(25): SEQ ID NO: 2936; WAN024FXR; Start 158; Stop 182
cctcctcaatttatctttctccatt

SEQ ID NO: 341581 - DNA, 25 bp, Artificial
  probe
  misc_feature (1)..(25): SEQ ID NO: 2936; WAN024FXR; Start 147; Stop 171
tgccatatcgtcctcctcaatttat

SEQ ID NO: 341582 - DNA, 25 bp, Artificial
  probe
  misc_feature (1)..(25): SEQ ID NO: 2936; WAN024FXR; Start 146; Stop 170
atgccatatcgtcctcctcaattta

SEQ ID NO: 341583 - DNA, 25 bp, Artificial
  probe
  misc_feature (1)..(25): SEQ ID NO: 2936; WAN024FXR; Start 152; Stop 176
tatcgtcctcctcaatttatctttc

SEQ ID NO: 341584 - DNA, 25 bp, Artificial
  probe
  misc_feature (1)..(25): SEQ ID NO: 2936; WAN024FXR; Start 150; Stop 174
catatcgtcctcctcaatttatctt

SEQ ID NO: 341585 - DNA, 25 bp, Artificial
  probe
  misc_feature (1)..(25): SEQ ID NO: 2936; WAN024FXR; Start 145; Stop 169
aatgccatatcgtcctcctcaattt

SEQ ID NO: 341586 - DNA, 25 bp, Artificial
  probe
  misc_feature (1)..(25): SEQ ID NO: 2936; WAN024FXR; Start 151; Stop 175
atatcgtcctcctcaatttatcttt

SEQ ID NO: 341587 - DNA, 25 bp, Artificial
  probe
  misc_feature (1)..(25): SEQ ID NO: 2936; WAN024FXR; Start 86; Stop 110
ctacaatatctgcaatttcttcggt

SEQ ID NO: 341588 - DNA, 25 bp, Artificial
  probe
  misc_feature (1)..(25): SEQ ID NO: 2936; WAN024FXR; Start 85; Stop 109
gctacaatatctgcaatttcttcgg

SEQ ID NO: 341589 - DNA, 25 bp, Artificial
  probe
  misc_feature (1)..(25): SEQ ID NO: 2936; WAN024FXR; Start 88; Stop 112
acaatatctgcaatttcttcggtat

SEQ ID NO: 341590 - DNA, 25 bp, Artificial
  probe
  misc_feature (1)..(25): SEQ ID NO: 2936; WAN024FXR; Start 12; Stop 36
caagaagtctgaagcgtcaacagtt

SEQ ID NO: 341591 - DNA, 25 bp, Artificial
  probe
  misc_feature (1)..(25): SEQ ID NO: 2936; WAN024FXR; Start 15; Stop 39
gaagtctgaagcgtcaacagttgta

SEQ ID NO: 341592 - DNA, 25 bp, Artificial
  probe
  misc_feature (1)..(25): SEQ ID NO: 2936; WAN024FXR; Start 142; Stop 166
gctaatgccatatcgtcctcctcaa

SEQ ID NO: 341593 - DNA, 25 bp, Artificial
  probe
  misc_feature (1)..(25): SEQ ID NO: 2936; WAN024FXR; Start 140; Stop 164
ttgctaatgccatatcgtcctcctc

SEQ ID NO: 341594 - DNA, 25 bp, Artificial
  probe
  misc_feature (1)..(25): SEQ ID NO: 2936; WAN024FXR; Start 87; Stop 111
tacaatatctgcaatttcttcggta

SEQ ID NO: 341595 - DNA, 25 bp, Artificial
  probe
  misc_feature (1)..(25): SEQ ID NO: 2936; WAN024FXR; Start 36; Stop 60
tgtacattcatcaacatcaacatcc

SEQ ID NO: 341596 - DNA, 25 bp, Artificial
  probe
  misc_feature (1)..(25): SEQ ID NO: 2936; WAN024FXR; Start 16; Stop 40
aagtctgaagcgtcaacagttgtac

SEQ ID NO: 341597 - DNA, 25 bp, Artificial
  probe
  misc_feature (1)..(25): SEQ ID NO: 2936; WAN024FXR; Start 13; Stop 37
aagaagtctgaagcgtcaacagttg

SEQ ID NO: 341598 - DNA, 25 bp, Artificial
  probe
  misc_feature (1)..(25): SEQ ID NO: 2936; WAN024FXR; Start 89; Stop 113
caatatctgcaatttcttcggtatt

SEQ ID NO: 341599 - DNA, 25 bp, Artificial
  probe
  misc_feature (1)..(25): SEQ ID NO: 2937; WAN024FT7; Start 842; Stop 866
aagtcaaggaacactcaggtattac

SEQ ID NO: 341600 - DNA, 25 bp, Artificial
  probe
  misc_feature (1)..(25): SEQ ID NO: 2937; WAN024FT7; Start 843; Stop 867
agtcaaggaacactcaggtattacg

SEQ ID NO: 341601 - DNA, 25 bp, Artificial
  probe
  misc_feature (1)..(25): SEQ ID NO: 2937; WAN024FT7; Start 847; Stop 871
aaggaacactcaggtattacgcttg

SEQ ID NO: 341602 - DNA, 25 bp, Artificial
  probe
  misc_feature (1)..(25): SEQ ID NO: 2937; WAN024FT7; Start 846; Stop 870
caaggaacactcaggtattacgctt

SEQ ID NO: 341603 - DNA, 25 bp, Artificial
  probe
  misc_feature (1)..(25): SEQ ID NO: 2937; WAN024FT7; Start 858; Stop 882
aggtattacgcttgaaagagaagtc

SEQ ID NO: 341604 - DNA, 25 bp, Artificial
  probe
  misc_feature (1)..(25): SEQ ID NO: 2937; WAN024FT7; Start 86; Stop 110
aagtaggtggagaggctgattattt

SEQ ID NO: 341605 - DNA, 25 bp, Artificial
  probe
  misc_feature (1)..(25): SEQ ID NO: 2937; WAN024FT7; Start 85; Stop 109
aaagtaggtggagaggctgattatt

SEQ ID NO: 341606 - DNA, 25 bp, Artificial
  probe
  misc_feature (1)..(25): SEQ ID NO: 2937; WAN024FT7; Start 857; Stop 881
caggtattacgcttgaaagagaagt

SEQ ID NO: 341607 - DNA, 25 bp, Artificial
  probe
  misc_feature (1)..(25): SEQ ID NO: 2937; WAN024FT7; Start 306; Stop 330
taacttgattgaaacaactcgcatt

SEQ ID NO: 341608 - DNA, 25 bp, Artificial
  probe
  misc_feature (1)..(25): SEQ ID NO: 2937; WAN024FT7; Start 305; Stop 329
ctaacttgattgaaacaactcgcat

SEQ ID NO: 341609 - DNA, 25 bp, Artificial
  probe
  misc_feature (1)..(25): SEQ ID NO: 2937; WAN024FT7; Start 849; Stop 873
ggaacactcaggtattacgcttgaa

SEQ ID NO: 341610 - DNA, 25 bp, Artificial
  probe
  misc_feature (1)..(25): SEQ ID NO: 2937; WAN024FT7; Start 841; Stop 865
aaagtcaaggaacactcaggtatta

SEQ ID NO: 341611 - DNA, 25 bp, Artificial
  probe
  misc_feature (1)..(25): SEQ ID NO: 2937; WAN024FT7; Start 856; Stop 880
tcaggtattacgcttgaaagagaag

SEQ ID NO: 341612 - DNA, 25 bp, Artificial
  probe
  misc_feature (1)..(25): SEQ ID NO: 2937; WAN024FT7; Start 806; Stop 830
aagactacgaggacttgatccaatc

SEQ ID NO: 341613 - DNA, 25 bp, Artificial
  probe
  misc_feature (1)..(25): SEQ ID NO: 2937; WAN024FT7; Start 859; Stop 883
ggtattacgcttgaaagagaagtcc

SEQ ID NO: 341614 - DNA, 25 bp, Artificial
  probe
  misc_feature (1)..(25): SEQ ID NO: 2937; WAN024FT7; Start 20; Stop 44
tgcttgaaatcttagaaggaattga

SEQ ID NO: 341615 - DNA, 25 bp, Artificial
  probe
  misc_feature (1)..(25): SEQ ID NO: 2937; WAN024FT7; Start 855; Stop 879
ctcaggtattacgcttgaaagagaa

SEQ ID NO: 341616 - DNA, 25 bp, Artificial
  probe
  misc_feature (1)..(25): SEQ ID NO: 2937; WAN024FT7; Start 95; Stop 119
gagaggctgattatttggtctttcc

SEQ ID NO: 341617 - DNA, 25 bp, Artificial
  probe
  misc_feature (1)..(25): SEQ ID NO: 2937; WAN024FT7; Start 94; Stop 118
ggagaggctgattatttggtctttc

SEQ ID NO: 341618 - DNA, 25 bp, Artificial
  probe
  misc_feature (1)..(25): SEQ ID NO: 2937; WAN024FT7; Start 87; Stop 111
agtaggtggagaggctgattatttg

SEQ ID NO: 341619 - DNA, 25 bp, Artificial
  probe
  misc_feature (1)..(25): SEQ ID NO: 2937; WAN024FT7; Start 307; Stop 331
aacttgattgaaacaactcgcattg

SEQ ID NO: 341620 - DNA, 25 bp, Artificial
  probe
  misc_feature (1)..(25): SEQ ID NO: 2937; WAN024FT7; Start 225; Stop 249
gattcgtggatttgtcatcttgtgt

SEQ ID NO: 341621 - DNA, 25 bp, Artificial
  probe
  misc_feature (1)..(25): SEQ ID NO: 2937; WAN024FT7; Start 587; Stop 611
atcaggttatcaagcaggaaatgga

SEQ ID NO: 341622 - DNA, 25 bp, Artificial
  probe
  misc_feature (1)..(25): SEQ ID NO: 2937; WAN024FT7; Start 438; Stop 462
catcttgcagtcttgtaaggtcttg

SEQ ID NO: 341623 - DNA, 25 bp, Artificial
  probe
  misc_feature (1)..(25): SEQ ID NO: 2937; WAN024FT7; Start 845; Stop 869
tcaaggaacactcaggtattacgct

SEQ ID NO: 341624 - DNA, 25 bp, Artificial
  probe
  misc_feature (1)..(25): SEQ ID NO: 2937; WAN024FT7; Start 844; Stop 868
gtcaaggaacactcaggtattacgc

SEQ ID NO: 341625 - DNA, 25 bp, Artificial
  probe
  misc_feature (1)..(25): SEQ ID NO: 2937; WAN024FT7; Start 851; Stop 875
aacactcaggtattacgcttgaaag

SEQ ID NO: 341626 - DNA, 25 bp, Artificial
  probe
  misc_feature (1)..(25): SEQ ID NO: 2937; WAN024FT7; Start 850; Stop 874
gaacactcaggtattacgcttgaaa

SEQ ID NO: 341627 - DNA, 25 bp, Artificial
  probe
  misc_feature (1)..(25): SEQ ID NO: 2937; WAN024FT7; Start 439; Stop 463
atcttgcagtcttgtaaggtcttga

SEQ ID NO: 341628 - DNA, 25 bp, Artificial
  probe
  misc_feature (1)..(25): SEQ ID NO: 2937; WAN024FT7; Start 860; Stop 884
gtattacgcttgaaagagaagtccg

SEQ ID NO: 341629 - DNA, 25 bp, Artificial
  probe
  misc_feature (1)..(25): SEQ ID NO: 2937; WAN024FT7; Start 586; Stop 610
catcaggttatcaagcaggaaatgg

SEQ ID NO: 341630 - DNA, 25 bp, Artificial
  probe
  misc_feature (1)..(25): SEQ ID NO: 2937; WAN024FT7; Start 585; Stop 609
ccatcaggttatcaagcaggaaatg

SEQ ID NO: 341631 - DNA, 25 bp, Artificial
  probe
  misc_feature (1)..(25): SEQ ID NO: 2937; WAN024FT7; Start 630; Stop 654
tgaactcaagcaacctttggaatac

SEQ ID NO: 341632 - DNA, 25 bp, Artificial
  probe
  misc_feature (1)..(25): SEQ ID NO: 2938; WAN024C3O; Start 1011; Stop 1035
aatcactggaactactcaagaagac

SEQ ID NO: 341633 - DNA, 25 bp, Artificial
  probe
  misc_feature (1)..(25): SEQ ID NO: 2938; WAN024C3O; Start 1012; Stop 1036
atcactggaactactcaagaagacc

SEQ ID NO: 341634 - DNA, 25 bp, Artificial
  probe
  misc_feature (1)..(25): SEQ ID NO: 2938; WAN024C3O; Start 1019; Stop 1043
gaactactcaagaagaccttcacaa

SEQ ID NO: 341635 - DNA, 25 bp, Artificial
  probe
  misc_feature (1)..(25): SEQ ID NO: 2938; WAN024C3O; Start 1020; Stop 1044
aactactcaagaagaccttcacaac

SEQ ID NO: 341636 - DNA, 25 bp, Artificial
  probe
  misc_feature (1)..(25): SEQ ID NO: 2938; WAN024C3O; Start 1025; Stop 1049
ctcaagaagaccttcacaaccaata

SEQ ID NO: 341637 - DNA, 25 bp, Artificial
  probe
  misc_feature (1)..(25): SEQ ID NO: 2938; WAN024C3O; Start 1026; Stop 1050
tcaagaagaccttcacaaccaatac

SEQ ID NO: 341638 - DNA, 25 bp, Artificial
  probe
  misc_feature (1)..(25): SEQ ID NO: 2938; WAN024C3O; Start 1014; Stop 1038
cactggaactactcaagaagacctt

SEQ ID NO: 341639 - DNA, 25 bp, Artificial
  probe
  misc_feature (1)..(25): SEQ ID NO: 2938; WAN024C3O; Start 368; Stop 392
accttgaagtatcagttgatgtaga

SEQ ID NO: 341640 - DNA, 25 bp, Artificial
  probe
  misc_feature (1)..(25): SEQ ID NO: 2938; WAN024C3O; Start 367; Stop 391
aaccttgaagtatcagttgatgtag

SEQ ID NO: 341641 - DNA, 25 bp, Artificial
  probe
  misc_feature (1)..(25): SEQ ID NO: 2938; WAN024C3O; Start 448; Stop 472
ctggctgaattggttatcaaggaag

SEQ ID NO: 341642 - DNA, 25 bp, Artificial
  probe
  misc_feature (1)..(25): SEQ ID NO: 2938; WAN024C3O; Start 1013; Stop 1037
tcactggaactactcaagaagacct

SEQ ID NO: 341643 - DNA, 25 bp, Artificial
  probe
  misc_feature (1)..(25): SEQ ID NO: 2938; WAN024C3O; Start 1023; Stop 1047
tactcaagaagaccttcacaaccaa

SEQ ID NO: 341644 - DNA, 25 bp, Artificial
  probe
  misc_feature (1)..(25): SEQ ID NO: 2938; WAN024C3O; Start 1016; Stop 1040
ctggaactactcaagaagaccttca

SEQ ID NO: 341645 - DNA, 25 bp, Artificial
  probe
  misc_feature (1)..(25): SEQ ID NO: 2938; WAN024C3O; Start 1015; Stop 1039
actggaactactcaagaagaccttc

SEQ ID NO: 341646 - DNA, 25 bp, Artificial
  probe
  misc_feature (1)..(25): SEQ ID NO: 2938; WAN024C3O; Start 1030; Stop 1054
gaagaccttcacaaccaataccaag

SEQ ID NO: 341647 - DNA, 25 bp, Artificial
  probe
  misc_feature (1)..(25): SEQ ID NO: 2938; WAN024C3O; Start 1027; Stop 1051
caagaagaccttcacaaccaatacc

SEQ ID NO: 341648 - DNA, 25 bp, Artificial
  probe
  misc_feature (1)..(25): SEQ ID NO: 2938; WAN024C3O; Start 369; Stop 393
ccttgaagtatcagttgatgtagaa

SEQ ID NO: 341649 - DNA, 25 bp, Artificial
  probe
  misc_feature (1)..(25): SEQ ID NO: 2938; WAN024C3O; Start 1018; Stop 1042
ggaactactcaagaagaccttcaca

SEQ ID NO: 341650 - DNA, 25 bp, Artificial
  probe
  misc_feature (1)..(25): SEQ ID NO: 2938; WAN024C3O; Start 1017; Stop 1041
tggaactactcaagaagaccttcac

SEQ ID NO: 341651 - DNA, 25 bp, Artificial
  probe
  misc_feature (1)..(25): SEQ ID NO: 2938; WAN024C3O; Start 1029; Stop 1053
agaagaccttcacaaccaataccaa

SEQ ID NO: 341652 - DNA, 25 bp, Artificial
  probe
  misc_feature (1)..(25): SEQ ID NO: 2938; WAN024C3O; Start 1028; Stop 1052
aagaagaccttcacaaccaatacca

SEQ ID NO: 341653 - DNA, 25 bp, Artificial
  probe
  misc_feature (1)..(25): SEQ ID NO: 2938; WAN024C3O; Start 1022; Stop 1046
ctactcaagaagaccttcacaacca

SEQ ID NO: 341654 - DNA, 25 bp, Artificial
  probe
  misc_feature (1)..(25): SEQ ID NO: 2938; WAN024C3O; Start 1021; Stop 1045
actactcaagaagaccttcacaacc

SEQ ID NO: 341655 - DNA, 25 bp, Artificial
  probe
  misc_feature (1)..(25): SEQ ID NO: 2938; WAN024C3O; Start 1010; Stop 1034
aaatcactggaactactcaagaaga

SEQ ID NO: 341656 - DNA, 25 bp, Artificial
  probe
  misc_feature (1)..(25): SEQ ID NO: 2938; WAN024C3O; Start 1009; Stop 1033
caaatcactggaactactcaagaag

SEQ ID NO: 341657 - DNA, 25 bp, Artificial
  probe
  misc_feature (1)..(25): SEQ ID NO: 2938; WAN024C3O; Start 114; Stop 138
tcttaatgttccaggtttccgtaaa

SEQ ID NO: 341658 - DNA, 25 bp, Artificial
  probe
  misc_feature (1)..(25): SEQ ID NO: 2938; WAN024C3O; Start 1069; Stop 1093
cgtactaagactaaccttgttatcg

SEQ ID NO: 341659 - DNA, 25 bp, Artificial
  probe
  misc_feature (1)..(25): SEQ ID NO: 2938; WAN024C3O; Start 59; Stop 83
ctcaagaccaaatcaaaccagaatt

SEQ ID NO: 341660 - DNA, 25 bp, Artificial
  probe
  misc_feature (1)..(25): SEQ ID NO: 2938; WAN024C3O; Start 769; Stop 793
gacattgatgaagaagttgaaacac

SEQ ID NO: 341661 - DNA, 25 bp, Artificial
  probe
  misc_feature (1)..(25): SEQ ID NO: 2938; WAN024C3O; Start 1024; Stop 1048
actcaagaagaccttcacaaccaat

SEQ ID NO: 341662 - DNA, 25 bp, Artificial
  probe
  misc_feature (1)..(25): SEQ ID NO: 2938; WAN024C3O; Start 645; Stop 669
tatcgtaacattcccagaagactac

SEQ ID NO: 341663 - DNA, 25 bp, Artificial
  probe
  misc_feature (1)..(25): SEQ ID NO: 2938; WAN024C3O; Start 113; Stop 137
ctcttaatgttccaggtttccgtaa

SEQ ID NO: 341664 - DNA, 25 bp, Artificial
  probe
  misc_feature (1)..(25): SEQ ID NO: 2938; WAN024C3O; Start 934; Stop 958
gaagaagttcaccgttcagtaaatg

SEQ ID NO: 341665 - DNA, 25 bp, Artificial
  probe
  misc_feature (1)..(25): SEQ ID NO: 2939; WAN024DFH; Start 692; Stop 716
aagcatatctaggtggctaactaat

SEQ ID NO: 341666 - DNA, 25 bp, Artificial
  probe
  misc_feature (1)..(25): SEQ ID NO: 2939; WAN024DFH; Start 123; Stop 147
taagacaactattcttcgcaccttg

SEQ ID NO: 341667 - DNA, 25 bp, Artificial
  probe
  misc_feature (1)..(25): SEQ ID NO: 2939; WAN024DFH; Start 122; Stop 146
gtaagacaactattcttcgcacctt

SEQ ID NO: 341668 - DNA, 25 bp, Artificial
  probe
  misc_feature (1)..(25): SEQ ID NO: 2939; WAN024DFH; Start 119; Stop 143
caggtaagacaactattcttcgcac

SEQ ID NO: 341669 - DNA, 25 bp, Artificial
  probe
  misc_feature (1)..(25): SEQ ID NO: 2939; WAN024DFH; Start 27; Stop 51
ttctgtgcattacggtatgatccaa

SEQ ID NO: 341670 - DNA, 25 bp, Artificial
  probe
  misc_feature (1)..(25): SEQ ID NO: 2939; WAN024DFH; Start 28; Stop 52
tctgtgcattacggtatgatccaag

SEQ ID NO: 341671 - DNA, 25 bp, Artificial
  probe
  misc_feature (1)..(25): SEQ ID NO: 2939; WAN024DFH; Start 21; Stop 45
aaatctttctgtgcattacggtatg

SEQ ID NO: 341672 - DNA, 25 bp, Artificial
  probe
  misc_feature (1)..(25): SEQ ID NO: 2939; WAN024DFH; Start 121; Stop 145
ggtaagacaactattcttcgcacct

SEQ ID NO: 341673 - DNA, 25 bp, Artificial
  probe
  misc_feature (1)..(25): SEQ ID NO: 2939; WAN024DFH; Start 120; Stop 144
aggtaagacaactattcttcgcacc

SEQ ID NO: 341674 - DNA, 25 bp, Artificial
  probe
  misc_feature (1)..(25): SEQ ID NO: 2939; WAN024DFH; Start 23; Stop 47
atctttctgtgcattacggtatgat

SEQ ID NO: 341675 - DNA, 25 bp, Artificial
  probe
  misc_feature (1)..(25): SEQ ID NO: 2939; WAN024DFH; Start 22; Stop 46
aatctttctgtgcattacggtatga

SEQ ID NO: 341676 - DNA, 25 bp, Artificial
  probe
  misc_feature (1)..(25): SEQ ID NO: 2939; WAN024DFH; Start 24; Stop 48
tctttctgtgcattacggtatgatc

SEQ ID NO: 341677 - DNA, 25 bp, Artificial
  probe
  misc_feature (1)..(25): SEQ ID NO: 2939; WAN024DFH; Start 115; Stop 139
ggtgcaggtaagacaactattcttc

SEQ ID NO: 341678 - DNA, 25 bp, Artificial
  probe
  misc_feature (1)..(25): SEQ ID NO: 2939; WAN024DFH; Start 600; Stop 624
tgcaatctctgaccgaggatatgta

SEQ ID NO: 341679 - DNA, 25 bp, Artificial
  probe
  misc_feature (1)..(25): SEQ ID NO: 2939; WAN024DFH; Start 691; Stop 715
aaagcatatctaggtggctaactaa

SEQ ID NO: 341680 - DNA, 25 bp, Artificial
  probe
  misc_feature (1)..(25): SEQ ID NO: 2939; WAN024DFH; Start 116; Stop 140
gtgcaggtaagacaactattcttcg

SEQ ID NO: 341681 - DNA, 25 bp, Artificial
  probe
  misc_feature (1)..(25): SEQ ID NO: 2939; WAN024DFH; Start 284; Stop 308
ttatggaaaatcttgaaatgggagc

SEQ ID NO: 341682 - DNA, 25 bp, Artificial
  probe
  misc_feature (1)..(25): SEQ ID NO: 2939; WAN024DFH; Start 275; Stop 299
gcttgactgttatggaaaatcttga

SEQ ID NO: 341683 - DNA, 25 bp, Artificial
  probe
  misc_feature (1)..(25): SEQ ID NO: 2939; WAN024DFH; Start 673; Stop 697
tcatcagaagaagtcagaaaagcat

SEQ ID NO: 341684 - DNA, 25 bp, Artificial
  probe
  misc_feature (1)..(25): SEQ ID NO: 2939; WAN024DFH; Start 274; Stop 298
ggcttgactgttatggaaaatcttg

SEQ ID NO: 341685 - DNA, 25 bp, Artificial
  probe
  misc_feature (1)..(25): SEQ ID NO: 2939; WAN024DFH; Start 25; Stop 49
ctttctgtgcattacggtatgatcc

SEQ ID NO: 341686 - DNA, 25 bp, Artificial
  probe
  misc_feature (1)..(25): SEQ ID NO: 2939; WAN024DFH; Start 128; Stop 152
caactattcttcgcaccttgtcagg

SEQ ID NO: 341687 - DNA, 25 bp, Artificial
  probe
  misc_feature (1)..(25): SEQ ID NO: 2939; WAN024DFH; Start 674; Stop 698
catcagaagaagtcagaaaagcata

SEQ ID NO: 341688 - DNA, 25 bp, Artificial
  probe
  misc_feature (1)..(25): SEQ ID NO: 2939; WAN024DFH; Start 454; Stop 478
atgtcaacaccaaaacttcttcttt

SEQ ID NO: 341689 - DNA, 25 bp, Artificial
  probe
  misc_feature (1)..(25): SEQ ID NO: 2939; WAN024DFH; Start 273; Stop 297
tggcttgactgttatggaaaatctt

SEQ ID NO: 341690 - DNA, 25 bp, Artificial
  probe
  misc_feature (1)..(25): SEQ ID NO: 2939; WAN024DFH; Start 118; Stop 142
gcaggtaagacaactattcttcgca

SEQ ID NO: 341691 - DNA, 25 bp, Artificial
  probe
  misc_feature (1)..(25): SEQ ID NO: 2939; WAN024DFH; Start 282; Stop 306
tgttatggaaaatcttgaaatggga

SEQ ID NO: 341692 - DNA, 25 bp, Artificial
  probe
  misc_feature (1)..(25): SEQ ID NO: 2939; WAN024DFH; Start 676; Stop 700
tcagaagaagtcagaaaagcatatc

SEQ ID NO: 341693 - DNA, 25 bp, Artificial
  probe
  misc_feature (1)..(25): SEQ ID NO: 2939; WAN024DFH; Start 272; Stop 296
ctggcttgactgttatggaaaatct

SEQ ID NO: 341694 - DNA, 25 bp, Artificial
  probe
  misc_feature (1)..(25): SEQ ID NO: 2939; WAN024DFH; Start 161; Stop 185
gaccaagttcaggaaagattgaatt

SEQ ID NO: 341695 - DNA, 25 bp, Artificial
  probe
  misc_feature (1)..(25): SEQ ID NO: 2939; WAN024DFH; Start 281; Stop 305
ctgttatggaaaatcttgaaatggg

SEQ ID NO: 341696 - DNA, 25 bp, Artificial
  probe
  misc_feature (1)..(25): SEQ ID NO: 2939; WAN024DFH; Start 157; Stop 181
gttcgaccaagttcaggaaagattg

SEQ ID NO: 341697 - DNA, 25 bp, Artificial
  probe
  misc_feature (1)..(25): SEQ ID NO: 2939; WAN024DFH; Start 162; Stop 186
accaagttcaggaaagattgaattt

SEQ ID NO: 341698 - DNA, 25 bp, Artificial
  probe
  misc_feature (1)..(25): SEQ ID NO: 2940; WAN024FLY; Start 1071; Stop 1095
ttcaactgacttggtaacgaagatt

SEQ ID NO: 341699 - DNA, 25 bp, Artificial
  probe
  misc_feature (1)..(25): SEQ ID NO: 2940; WAN024FLY; Start 1072; Stop 1096
tcaactgacttggtaacgaagattg

SEQ ID NO: 341700 - DNA, 25 bp, Artificial
  probe
  misc_feature (1)..(25): SEQ ID NO: 2940; WAN024FLY; Start 1473; Stop 1497
tatcactgtcgtagaagacttcaag

SEQ ID NO: 341701 - DNA, 25 bp, Artificial
  probe
  misc_feature (1)..(25): SEQ ID NO: 2940; WAN024FLY; Start 1472; Stop 1496
ctatcactgtcgtagaagacttcaa

SEQ ID NO: 341702 - DNA, 25 bp, Artificial
  probe
  misc_feature (1)..(25): SEQ ID NO: 2940; WAN024FLY; Start 691; Stop 715
aagattgtctacacaccacttcatg

SEQ ID NO: 341703 - DNA, 25 bp, Artificial
  probe
  misc_feature (1)..(25): SEQ ID NO: 2940; WAN024FLY; Start 687; Stop 711
catgaagattgtctacacaccactt

SEQ ID NO: 341704 - DNA, 25 bp, Artificial
  probe
  misc_feature (1)..(25): SEQ ID NO: 2940; WAN024FLY; Start 1074; Stop 1098
aactgacttggtaacgaagattgct

SEQ ID NO: 341705 - DNA, 25 bp, Artificial
  probe
  misc_feature (1)..(25): SEQ ID NO: 2940; WAN024FLY; Start 513; Stop 537
gactacttatatccgtgcaatcgaa

SEQ ID NO: 341706 - DNA, 25 bp, Artificial
  probe
  misc_feature (1)..(25): SEQ ID NO: 2940; WAN024FLY; Start 1345; Stop 1369
aaagaatatggctactacgcagaaa

SEQ ID NO: 341707 - DNA, 25 bp, Artificial
  probe
  misc_feature (1)..(25): SEQ ID NO: 2940; WAN024FLY; Start 1655; Stop 1679
ccaacgaagaatcacaagctaagat

SEQ ID NO: 341708 - DNA, 25 bp, Artificial
  probe
  misc_feature (1)..(25): SEQ ID NO: 2940; WAN024FLY; Start 1344; Stop 1368
taaagaatatggctactacgcagaa

SEQ ID NO: 341709 - DNA, 25 bp, Artificial
  probe
  misc_feature (1)..(25): SEQ ID NO: 2940; WAN024FLY; Start 1077; Stop 1101
tgacttggtaacgaagattgctgaa

SEQ ID NO: 341710 - DNA, 25 bp, Artificial
  probe
  misc_feature (1)..(25): SEQ ID NO: 2940; WAN024FLY; Start 1343; Stop 1367
ataaagaatatggctactacgcaga

SEQ ID NO: 341711 - DNA, 25 bp, Artificial
  probe
  misc_feature (1)..(25): SEQ ID NO: 2940; WAN024FLY; Start 1058; Stop 1082
gcaaatctatcgtttcaactgactt

SEQ ID NO: 341712 - DNA, 25 bp, Artificial
  probe
  misc_feature (1)..(25): SEQ ID NO: 2940; WAN024FLY; Start 1073; Stop 1097
caactgacttggtaacgaagattgc

SEQ ID NO: 341713 - DNA, 25 bp, Artificial
  probe
  misc_feature (1)..(25): SEQ ID NO: 2940; WAN024FLY; Start 1422; Stop 1446
gattatggctaaattccgcaacaat

SEQ ID NO: 341714 - DNA, 25 bp, Artificial
  probe
  misc_feature (1)..(25): SEQ ID NO: 2940; WAN024FLY; Start 1423; Stop 1447
attatggctaaattccgcaacaatg

SEQ ID NO: 341715 - DNA, 25 bp, Artificial
  probe
  misc_feature (1)..(25): SEQ ID NO: 2940; WAN024FLY; Start 1653; Stop 1677
aaccaacgaagaatcacaagctaag

SEQ ID NO: 341716 - DNA, 25 bp, Artificial
  probe
  misc_feature (1)..(25): SEQ ID NO: 2940; WAN024FLY; Start 659; Stop 683
cagccttgattgaagaatttggtaa

SEQ ID NO: 341717 - DNA, 25 bp, Artificial
  probe
  misc_feature (1)..(25): SEQ ID NO: 2940; WAN024FLY; Start 660; Stop 684
agccttgattgaagaatttggtaaa

SEQ ID NO: 341718 - DNA, 25 bp, Artificial
  probe
  misc_feature (1)..(25): SEQ ID NO: 2940; WAN024FLY; Start 511; Stop 535
ttgactacttatatccgtgcaatcg

SEQ ID NO: 341719 - DNA, 25 bp, Artificial
  probe
  misc_feature (1)..(25): SEQ ID NO: 2940; WAN024FLY; Start 1064; Stop 1088
ctatcgtttcaactgacttggtaac

SEQ ID NO: 341720 - DNA, 25 bp, Artificial
  probe
  misc_feature (1)..(25): SEQ ID NO: 2940; WAN024FLY; Start 1063; Stop 1087
tctatcgtttcaactgacttggtaa

SEQ ID NO: 341721 - DNA, 25 bp, Artificial
  probe
  misc_feature (1)..(25): SEQ ID NO: 2940; WAN024FLY; Start 1062; Stop 1086
atctatcgtttcaactgacttggta

SEQ ID NO: 341722 - DNA, 25 bp, Artificial
  probe
  misc_feature (1)..(25): SEQ ID NO: 2940; WAN024FLY; Start 1471; Stop 1495
gctatcactgtcgtagaagacttca

SEQ ID NO: 341723 - DNA, 25 bp, Artificial
  probe
  misc_feature (1)..(25): SEQ ID NO: 2940; WAN024FLY; Start 1061; Stop 1085
aatctatcgtttcaactgacttggt

SEQ ID NO: 341724 - DNA, 25 bp, Artificial
  probe
  misc_feature (1)..(25): SEQ ID NO: 2940; WAN024FLY; Start 1060; Stop 1084
aaatctatcgtttcaactgacttgg

SEQ ID NO: 341725 - DNA, 25 bp, Artificial
  probe
  misc_feature (1)..(25): SEQ ID NO: 2940; WAN024FLY; Start 686; Stop 710
acatgaagattgtctacacaccact

SEQ ID NO: 341726 - DNA, 25 bp, Artificial
  probe
  misc_feature (1)..(25): SEQ ID NO: 2940; WAN024FLY; Start 512; Stop 536
tgactacttatatccgtgcaatcga

SEQ ID NO: 341727 - DNA, 25 bp, Artificial
  probe
  misc_feature (1)..(25): SEQ ID NO: 2940; WAN024FLY; Start 1076; Stop 1100
ctgacttggtaacgaagattgctga

SEQ ID NO: 341728 - DNA, 25 bp, Artificial
  probe
  misc_feature (1)..(25): SEQ ID NO: 2940; WAN024FLY; Start 661; Stop 685
gccttgattgaagaatttggtaaag

SEQ ID NO: 341729 - DNA, 25 bp, Artificial
  probe
  misc_feature (1)..(25): SEQ ID NO: 2940; WAN024FLY; Start 1070; Stop 1094
tttcaactgacttggtaacgaagat

SEQ ID NO: 341730 - DNA, 25 bp, Artificial
  probe
  misc_feature (1)..(25): SEQ ID NO: 2940; WAN024FLY; Start 1544; Stop 1568
ctcctccaagtgatgtgttgaaata

SEQ ID NO: 341731 - DNA, 25 bp, Artificial
  probe
  misc_feature (1)..(25): SEQ ID NO: 2941; WAN024FG7; Start 1026; Stop 1050
aatcaagagttatcgtattccagca

SEQ ID NO: 341732 - DNA, 25 bp, Artificial
  probe
  misc_feature (1)..(25): SEQ ID NO: 2941; WAN024FG7; Start 113; Stop 137
ctatgattgtaggagcagtggtatt

SEQ ID NO: 341733 - DNA, 25 bp, Artificial
  probe
  misc_feature (1)..(25): SEQ ID NO: 2941; WAN024FG7; Start 1652; Stop 1676
ctcaagatattactccgatggtcaa

SEQ ID NO: 341734 - DNA, 25 bp, Artificial
  probe
  misc_feature (1)..(25): SEQ ID NO: 2941; WAN024FG7; Start 67; Stop 91
cgtaagtgtcgttatagcattagga

SEQ ID NO: 341735 - DNA, 25 bp, Artificial
  probe
  misc_feature (1)..(25): SEQ ID NO: 2941; WAN024FG7; Start 112; Stop 136
tctatgattgtaggagcagtggtat

SEQ ID NO: 341736 - DNA, 25 bp, Artificial
  probe
  misc_feature (1)..(25): SEQ ID NO: 2941; WAN024FG7; Start 1027; Stop 1051
atcaagagttatcgtattccagcac

SEQ ID NO: 341737 - DNA, 25 bp, Artificial
  probe
  misc_feature (1)..(25): SEQ ID NO: 2941; WAN024FG7; Start 111; Stop 135
ttctatgattgtaggagcagtggta

SEQ ID NO: 341738 - DNA, 25 bp, Artificial
  probe
  misc_feature (1)..(25): SEQ ID NO: 2941; WAN024FG7; Start 1034; Stop 1058
gttatcgtattccagcacttctcaa

SEQ ID NO: 341739 - DNA, 25 bp, Artificial
  probe
  misc_feature (1)..(25): SEQ ID NO: 2941; WAN024FG7; Start 857; Stop 881
ttcggaatctcactgtgtataatcg

SEQ ID NO: 341740 - DNA, 25 bp, Artificial
  probe
  misc_feature (1)..(25): SEQ ID NO: 2941; WAN024FG7; Start 1897; Stop 1921
atccactcttctacgatgaacaata

SEQ ID NO: 341741 - DNA, 25 bp, Artificial
  probe
  misc_feature (1)..(25): SEQ ID NO: 2941; WAN024FG7; Start 1035; Stop 1059
ttatcgtattccagcacttctcaag

SEQ ID NO: 341742 - DNA, 25 bp, Artificial
  probe
  misc_feature (1)..(25): SEQ ID NO: 2941; WAN024FG7; Start 1651; Stop 1675
cctcaagatattactccgatggtca

SEQ ID NO: 341743 - DNA, 25 bp, Artificial
  probe
  misc_feature (1)..(25): SEQ ID NO: 2941; WAN024FG7; Start 68; Stop 92
gtaagtgtcgttatagcattaggaa

SEQ ID NO: 341744 - DNA, 25 bp, Artificial
  probe
  misc_feature (1)..(25): SEQ ID NO: 2941; WAN024FG7; Start 1036; Stop 1060
tatcgtattccagcacttctcaaga

SEQ ID NO: 341745 - DNA, 25 bp, Artificial
  probe
  misc_feature (1)..(25): SEQ ID NO: 2941; WAN024FG7; Start 1030; Stop 1054
aagagttatcgtattccagcacttc

SEQ ID NO: 341746 - DNA, 25 bp, Artificial
  probe
  misc_feature (1)..(25): SEQ ID NO: 2941; WAN024FG7; Start 858; Stop 882
tcggaatctcactgtgtataatcgt

SEQ ID NO: 341747 - DNA, 25 bp, Artificial
  probe
  misc_feature (1)..(25): SEQ ID NO: 2941; WAN024FG7; Start 1029; Stop 1053
caagagttatcgtattccagcactt

SEQ ID NO: 341748 - DNA, 25 bp, Artificial
  probe
  misc_feature (1)..(25): SEQ ID NO: 2941; WAN024FG7; Start 1896; Stop 1920
gatccactcttctacgatgaacaat

SEQ ID NO: 341749 - DNA, 25 bp, Artificial
  probe
  misc_feature (1)..(25): SEQ ID NO: 2941; WAN024FG7; Start 1042; Stop 1066
attccagcacttctcaagacagata

SEQ ID NO: 341750 - DNA, 25 bp, Artificial
  probe
  misc_feature (1)..(25): SEQ ID NO: 2941; WAN024FG7; Start 1041; Stop 1065
tattccagcacttctcaagacagat

SEQ ID NO: 341751 - DNA, 25 bp, Artificial
  probe
  misc_feature (1)..(25): SEQ ID NO: 2941; WAN024FG7; Start 856; Stop 880
attcggaatctcactgtgtataatc

SEQ ID NO: 341752 - DNA, 25 bp, Artificial
  probe
  misc_feature (1)..(25): SEQ ID NO: 2941; WAN024FG7; Start 1043; Stop 1067
ttccagcacttctcaagacagataa

SEQ ID NO: 341753 - DNA, 25 bp, Artificial
  probe
  misc_feature (1)..(25): SEQ ID NO: 2941; WAN024FG7; Start 1031; Stop 1055
agagttatcgtattccagcacttct

SEQ ID NO: 341754 - DNA, 25 bp, Artificial
  probe
  misc_feature (1)..(25): SEQ ID NO: 2941; WAN024FG7; Start 2283; Stop 2307
ggagtatggcatcttgtatgaacat

SEQ ID NO: 341755 - DNA, 25 bp, Artificial
  probe
  misc_feature (1)..(25): SEQ ID NO: 2941; WAN024FG7; Start 1604; Stop 1628
atctatggatgtcctacagtgatga

SEQ ID NO: 341756 - DNA, 25 bp, Artificial
  probe
  misc_feature (1)..(25): SEQ ID NO: 2941; WAN024FG7; Start 1032; Stop 1056
gagttatcgtattccagcacttctc

SEQ ID NO: 341757 - DNA, 25 bp, Artificial
  probe
  misc_feature (1)..(25): SEQ ID NO: 2941; WAN024FG7; Start 1933; Stop 1957
aatacagaatcaacggtggtacaac

SEQ ID NO: 341758 - DNA, 25 bp, Artificial
  probe
  misc_feature (1)..(25): SEQ ID NO: 2941; WAN024FG7; Start 1033; Stop 1057
agttatcgtattccagcacttctca

SEQ ID NO: 341759 - DNA, 25 bp, Artificial
  probe
  misc_feature (1)..(25): SEQ ID NO: 2941; WAN024FG7; Start 1028; Stop 1052
tcaagagttatcgtattccagcact

SEQ ID NO: 341760 - DNA, 25 bp, Artificial
  probe
  misc_feature (1)..(25): SEQ ID NO: 2941; WAN024FG7; Start 1935; Stop 1959
tacagaatcaacggtggtacaacta

SEQ ID NO: 341761 - DNA, 25 bp, Artificial
  probe
  misc_feature (1)..(25): SEQ ID NO: 2941; WAN024FG7; Start 1601; Stop 1625
gctatctatggatgtcctacagtga

SEQ ID NO: 341762 - DNA, 25 bp, Artificial
  probe
  misc_feature (1)..(25): SEQ ID NO: 2941; WAN024FG7; Start 1895; Stop 1919
agatccactcttctacgatgaacaa

SEQ ID NO: 341763 - DNA, 25 bp, Artificial
  probe
  misc_feature (1)..(25): SEQ ID NO: 2941; WAN024FG7; Start 1603; Stop 1627
tatctatggatgtcctacagtgatg

SEQ ID NO: 341764 - DNA, 25 bp, Artificial
  probe
  misc_feature (1)..(25): SEQ ID NO: 2942; WAN024FBM; Start 56; Stop 80
ggtctggtgttagttggataatctt

SEQ ID NO: 341765 - DNA, 25 bp, Artificial
  probe
  misc_feature (1)..(25): SEQ ID NO: 2942; WAN024FBM; Start 54; Stop 78
gaggtctggtgttagttggataatc

SEQ ID NO: 341766 - DNA, 25 bp, Artificial
  probe
  misc_feature (1)..(25): SEQ ID NO: 2942; WAN024FBM; Start 55; Stop 79
aggtctggtgttagttggataatct

SEQ ID NO: 341767 - DNA, 25 bp, Artificial
  probe
  misc_feature (1)..(25): SEQ ID NO: 2942; WAN024FBM; Start 53; Stop 77
agaggtctggtgttagttggataat

SEQ ID NO: 341768 - DNA, 25 bp, Artificial
  probe
  misc_feature (1)..(25): SEQ ID NO: 2942; WAN024FBM; Start 58; Stop 82
tctggtgttagttggataatcttac

SEQ ID NO: 341769 - DNA, 25 bp, Artificial
  probe
  misc_feature (1)..(25): SEQ ID NO: 2942; WAN024FBM; Start 57; Stop 81
gtctggtgttagttggataatctta

SEQ ID NO: 341770 - DNA, 25 bp, Artificial
  probe
  misc_feature (1)..(25): SEQ ID NO: 2942; WAN024FBM; Start 476; Stop 500
tattagccttggtagaagtccagta

SEQ ID NO: 341771 - DNA, 25 bp, Artificial
  probe
  misc_feature (1)..(25): SEQ ID NO: 2942; WAN024FBM; Start 474; Stop 498
gatattagccttggtagaagtccag

SEQ ID NO: 341772 - DNA, 25 bp, Artificial
  probe
  misc_feature (1)..(25): SEQ ID NO: 2942; WAN024FBM; Start 471; Stop 495
ttcgatattagccttggtagaagtc

SEQ ID NO: 341773 - DNA, 25 bp, Artificial
  probe
  misc_feature (1)..(25): SEQ ID NO: 2942; WAN024FBM; Start 468; Stop 492
ggattcgatattagccttggtagaa

SEQ ID NO: 341774 - DNA, 25 bp, Artificial
  probe
  misc_feature (1)..(25): SEQ ID NO: 2942; WAN024FBM; Start 475; Stop 499
atattagccttggtagaagtccagt

SEQ ID NO: 341775 - DNA, 25 bp, Artificial
  probe
  misc_feature (1)..(25): SEQ ID NO: 2942; WAN024FBM; Start 470; Stop 494
attcgatattagccttggtagaagt

SEQ ID NO: 341776 - DNA, 25 bp, Artificial
  probe
  misc_feature (1)..(25): SEQ ID NO: 2942; WAN024FBM; Start 456; Stop 480
ggcacttgctaaggattcgatatta

SEQ ID NO: 341777 - DNA, 25 bp, Artificial
  probe
  misc_feature (1)..(25): SEQ ID NO: 2942; WAN024FBM; Start 59; Stop 83
ctggtgttagttggataatcttacc

SEQ ID NO: 341778 - DNA, 25 bp, Artificial
  probe
  misc_feature (1)..(25): SEQ ID NO: 2942; WAN024FBM; Start 469; Stop 493
gattcgatattagccttggtagaag

SEQ ID NO: 341779 - DNA, 25 bp, Artificial
  probe
  misc_feature (1)..(25): SEQ ID NO: 2942; WAN024FBM; Start 191; Stop 215
cagggttgatttctttgacactttc

SEQ ID NO: 341780 - DNA, 25 bp, Artificial
  probe
  misc_feature (1)..(25): SEQ ID NO: 2942; WAN024FBM; Start 477; Stop 501
attagccttggtagaagtccagtag

SEQ ID NO: 341781 - DNA, 25 bp, Artificial
  probe
  misc_feature (1)..(25): SEQ ID NO: 2942; WAN024FBM; Start 472; Stop 496
tcgatattagccttggtagaagtcc

SEQ ID NO: 341782 - DNA, 25 bp, Artificial
  probe
  misc_feature (1)..(25): SEQ ID NO: 2942; WAN024FBM; Start 473; Stop 497
cgatattagccttggtagaagtcca

SEQ ID NO: 341783 - DNA, 25 bp, Artificial
  probe
  misc_feature (1)..(25): SEQ ID NO: 2942; WAN024FBM; Start 457; Stop 481
gcacttgctaaggattcgatattag

SEQ ID NO: 341784 - DNA, 25 bp, Artificial
  probe
  misc_feature (1)..(25): SEQ ID NO: 2942; WAN024FBM; Start 61; Stop 85
ggtgttagttggataatcttaccat

SEQ ID NO: 341785 - DNA, 25 bp, Artificial
  probe
  misc_feature (1)..(25): SEQ ID NO: 2942; WAN024FBM; Start 52; Stop 76
cagaggtctggtgttagttggataa

SEQ ID NO: 341786 - DNA, 25 bp, Artificial
  probe
  misc_feature (1)..(25): SEQ ID NO: 2942; WAN024FBM; Start 286; Stop 310
tacaagaaagagaaacgagatttgg

SEQ ID NO: 341787 - DNA, 25 bp, Artificial
  probe
  misc_feature (1)..(25): SEQ ID NO: 2942; WAN024FBM; Start 283; Stop 307
tggtacaagaaagagaaacgagatt

SEQ ID NO: 341788 - DNA, 25 bp, Artificial
  probe
  misc_feature (1)..(25): SEQ ID NO: 2942; WAN024FBM; Start 467; Stop 491
aggattcgatattagccttggtaga

SEQ ID NO: 341789 - DNA, 25 bp, Artificial
  probe
  misc_feature (1)..(25): SEQ ID NO: 2942; WAN024FBM; Start 284; Stop 308
ggtacaagaaagagaaacgagattt

SEQ ID NO: 341790 - DNA, 25 bp, Artificial
  probe
  misc_feature (1)..(25): SEQ ID NO: 2942; WAN024FBM; Start 192; Stop 216
agggttgatttctttgacactttca

SEQ ID NO: 341791 - DNA, 25 bp, Artificial
  probe
  misc_feature (1)..(25): SEQ ID NO: 2942; WAN024FBM; Start 190; Stop 214
tcagggttgatttctttgacacttt

SEQ ID NO: 341792 - DNA, 25 bp, Artificial
  probe
  misc_feature (1)..(25): SEQ ID NO: 2942; WAN024FBM; Start 455; Stop 479
aggcacttgctaaggattcgatatt

SEQ ID NO: 341793 - DNA, 25 bp, Artificial
  probe
  misc_feature (1)..(25): SEQ ID NO: 2942; WAN024FBM; Start 454; Stop 478
aaggcacttgctaaggattcgatat

SEQ ID NO: 341794 - DNA, 25 bp, Artificial
  probe
  misc_feature (1)..(25): SEQ ID NO: 2942; WAN024FBM; Start 282; Stop 306
ttggtacaagaaagagaaacgagat

SEQ ID NO: 341795 - DNA, 25 bp, Artificial
  probe
  misc_feature (1)..(25): SEQ ID NO: 2942; WAN024FBM; Start 275; Stop 299
tcaaggtttggtacaagaaagagaa

SEQ ID NO: 341796 - DNA, 25 bp, Artificial
  probe
  misc_feature (1)..(25): SEQ ID NO: 2942; WAN024FBM; Start 274; Stop 298
ttcaaggtttggtacaagaaagaga

SEQ ID NO: 341797 - DNA, 25 bp, Artificial
  probe
  misc_feature (1)..(25): SEQ ID NO: 2943; WAN024DW9; Start 817; Stop 841
cacttggatactgtcttcactatgg

SEQ ID NO: 341798 - DNA, 25 bp, Artificial
  probe
  misc_feature (1)..(25): SEQ ID NO: 2943; WAN024DW9; Start 820; Stop 844
ttggatactgtcttcactatggtag

SEQ ID NO: 341799 - DNA, 25 bp, Artificial
  probe
  misc_feature (1)..(25): SEQ ID NO: 2943; WAN024DW9; Start 819; Stop 843
cttggatactgtcttcactatggta

SEQ ID NO: 341800 - DNA, 25 bp, Artificial
  probe
  misc_feature (1)..(25): SEQ ID NO: 2943; WAN024DW9; Start 818; Stop 842
acttggatactgtcttcactatggt

SEQ ID NO: 341801 - DNA, 25 bp, Artificial
  probe
  misc_feature (1)..(25): SEQ ID NO: 2943; WAN024DW9; Start 821; Stop 845
tggatactgtcttcactatggtaga

SEQ ID NO: 341802 - DNA, 25 bp, Artificial
  probe
  misc_feature (1)..(25): SEQ ID NO: 2943; WAN024DW9; Start 816; Stop 840
gcacttggatactgtcttcactatg

SEQ ID NO: 341803 - DNA, 25 bp, Artificial
  probe
  misc_feature (1)..(25): SEQ ID NO: 2943; WAN024DW9; Start 844; Stop 868
gactatgacaagttcactattcacc

SEQ ID NO: 341804 - DNA, 25 bp, Artificial
  probe
  misc_feature (1)..(25): SEQ ID NO: 2943; WAN024DW9; Start 268; Stop 292
gaatacttagacgaagccaacatcc

SEQ ID NO: 341805 - DNA, 25 bp, Artificial
  probe
  misc_feature (1)..(25): SEQ ID NO: 2943; WAN024DW9; Start 267; Stop 291
ggaatacttagacgaagccaacatc

SEQ ID NO: 341806 - DNA, 25 bp, Artificial
  probe
  misc_feature (1)..(25): SEQ ID NO: 2943; WAN024DW9; Start 839; Stop 863
tggtagactatgacaagttcactat

SEQ ID NO: 341807 - DNA, 25 bp, Artificial
  probe
  misc_feature (1)..(25): SEQ ID NO: 2943; WAN024DW9; Start 838; Stop 862
atggtagactatgacaagttcacta

SEQ ID NO: 341808 - DNA, 25 bp, Artificial
  probe
  misc_feature (1)..(25): SEQ ID NO: 2943; WAN024DW9; Start 837; Stop 861
tatggtagactatgacaagttcact

SEQ ID NO: 341809 - DNA, 25 bp, Artificial
  probe
  misc_feature (1)..(25): SEQ ID NO: 2943; WAN024DW9; Start 835; Stop 859
actatggtagactatgacaagttca

SEQ ID NO: 341810 - DNA, 25 bp, Artificial
  probe
  misc_feature (1)..(25): SEQ ID NO: 2943; WAN024DW9; Start 833; Stop 857
tcactatggtagactatgacaagtt

SEQ ID NO: 341811 - DNA, 25 bp, Artificial
  probe
  misc_feature (1)..(25): SEQ ID NO: 2943; WAN024DW9; Start 832; Stop 856
ttcactatggtagactatgacaagt

SEQ ID NO: 341812 - DNA, 25 bp, Artificial
  probe
  misc_feature (1)..(25): SEQ ID NO: 2943; WAN024DW9; Start 266; Stop 290
aggaatacttagacgaagccaacat

SEQ ID NO: 341813 - DNA, 25 bp, Artificial
  probe
  misc_feature (1)..(25): SEQ ID NO: 2943; WAN024DW9; Start 836; Stop 860
ctatggtagactatgacaagttcac

SEQ ID NO: 341814 - DNA, 25 bp, Artificial
  probe
  misc_feature (1)..(25): SEQ ID NO: 2943; WAN024DW9; Start 834; Stop 858
cactatggtagactatgacaagttc

SEQ ID NO: 341815 - DNA, 25 bp, Artificial
  probe
  misc_feature (1)..(25): SEQ ID NO: 2943; WAN024DW9; Start 830; Stop 854
tcttcactatggtagactatgacaa

SEQ ID NO: 341816 - DNA, 25 bp, Artificial
  probe
  misc_feature (1)..(25): SEQ ID NO: 2943; WAN024DW9; Start 843; Stop 867
agactatgacaagttcactattcac

SEQ ID NO: 341817 - DNA, 25 bp, Artificial
  probe
  misc_feature (1)..(25): SEQ ID NO: 2943; WAN024DW9; Start 831; Stop 855
cttcactatggtagactatgacaag

SEQ ID NO: 341818 - DNA, 25 bp, Artificial
  probe
  misc_feature (1)..(25): SEQ ID NO: 2943; WAN024DW9; Start 562; Stop 586
acactctacggtaagtatatcttca

SEQ ID NO: 341819 - DNA, 25 bp, Artificial
  probe
  misc_feature (1)..(25): SEQ ID NO: 2943; WAN024DW9; Start 265; Stop 289
gaggaatacttagacgaagccaaca

SEQ ID NO: 341820 - DNA, 25 bp, Artificial
  probe
  misc_feature (1)..(25): SEQ ID NO: 2943; WAN024DW9; Start 840; Stop 864
ggtagactatgacaagttcactatt

SEQ ID NO: 341821 - DNA, 25 bp, Artificial
  probe
  misc_feature (1)..(25): SEQ ID NO: 2943; WAN024DW9; Start 809; Stop 833
aattcatgcacttggatactgtctt

SEQ ID NO: 341822 - DNA, 25 bp, Artificial
  probe
  misc_feature (1)..(25): SEQ ID NO: 2943; WAN024DW9; Start 209; Stop 233
tagaacaactcgctgctgaatcatt

SEQ ID NO: 341823 - DNA, 25 bp, Artificial
  probe
  misc_feature (1)..(25): SEQ ID NO: 2943; WAN024DW9; Start 563; Stop 587
cactctacggtaagtatatcttcaa

SEQ ID NO: 341824 - DNA, 25 bp, Artificial
  probe
  misc_feature (1)..(25): SEQ ID NO: 2943; WAN024DW9; Start 561; Stop 585
aacactctacggtaagtatatcttc

SEQ ID NO: 341825 - DNA, 25 bp, Artificial
  probe
  misc_feature (1)..(25): SEQ ID NO: 2943; WAN024DW9; Start 225; Stop 249
tgaatcattgacctctccagaaatc

SEQ ID NO: 341826 - DNA, 25 bp, Artificial
  probe
  misc_feature (1)..(25): SEQ ID NO: 2943; WAN024DW9; Start 182; Stop 206
gcgatgaaggaattgaggttctcta

SEQ ID NO: 341827 - DNA, 25 bp, Artificial
  probe
  misc_feature (1)..(25): SEQ ID NO: 2943; WAN024DW9; Start 810; Stop 834
attcatgcacttggatactgtcttc

SEQ ID NO: 341828 - DNA, 25 bp, Artificial
  probe
  misc_feature (1)..(25): SEQ ID NO: 2943; WAN024DW9; Start 619; Stop 643
ttggtctacaaccgtgaagaagata

SEQ ID NO: 341829 - DNA, 25 bp, Artificial
  probe
  misc_feature (1)..(25): SEQ ID NO: 2943; WAN024DW9; Start 852; Stop 876
caagttcactattcacccagaaatc

SEQ ID NO: 341830 - DNA, 25 bp, Artificial
  probe
  misc_feature (1)..(25): SEQ ID NO: 2944; WAN024G9T; Start 57; Stop 81
atttaatgtgttcatcgtctttccc

SEQ ID NO: 341831 - DNA, 25 bp, Artificial
  probe
  misc_feature (1)..(25): SEQ ID NO: 2944; WAN024G9T; Start 58; Stop 82
tttaatgtgttcatcgtctttccct

SEQ ID NO: 341832 - DNA, 25 bp, Artificial
  probe
  misc_feature (1)..(25): SEQ ID NO: 2944; WAN024G9T; Start 59; Stop 83
ttaatgtgttcatcgtctttccctc

SEQ ID NO: 341833 - DNA, 25 bp, Artificial
  probe
  misc_feature (1)..(25): SEQ ID NO: 2944; WAN024G9T; Start 56; Stop 80
catttaatgtgttcatcgtctttcc

SEQ ID NO: 341834 - DNA, 25 bp, Artificial
  probe
  misc_feature (1)..(25): SEQ ID NO: 2944; WAN024G9T; Start 53; Stop 77
tctcatttaatgtgttcatcgtctt

SEQ ID NO: 341835 - DNA, 25 bp, Artificial
  probe
  misc_feature (1)..(25): SEQ ID NO: 2944; WAN024G9T; Start 52; Stop 76
ttctcatttaatgtgttcatcgtct

SEQ ID NO: 341836 - DNA, 25 bp, Artificial
  probe
  misc_feature (1)..(25): SEQ ID NO: 2944; WAN024G9T; Start 117; Stop 141
tttaattatagtaggcgtttcgtgc

SEQ ID NO: 341837 - DNA, 25 bp, Artificial
  probe
  misc_feature (1)..(25): SEQ ID NO: 2944; WAN024G9T; Start 118; Stop 142
ttaattatagtaggcgtttcgtgct

SEQ ID NO: 341838 - DNA, 25 bp, Artificial
  probe
  misc_feature (1)..(25): SEQ ID NO: 2944; WAN024G9T; Start 119; Stop 143
taattatagtaggcgtttcgtgctc

SEQ ID NO: 341839 - DNA, 25 bp, Artificial
  probe
  misc_feature (1)..(25): SEQ ID NO: 2944; WAN024G9T; Start 120; Stop 144
aattatagtaggcgtttcgtgctct

SEQ ID NO: 341840 - DNA, 25 bp, Artificial
  probe
  misc_feature (1)..(25): SEQ ID NO: 2944; WAN024G9T; Start 55; Stop 79
tcatttaatgtgttcatcgtctttc

SEQ ID NO: 341841 - DNA, 25 bp, Artificial
  probe
  misc_feature (1)..(25): SEQ ID NO: 2944; WAN024G9T; Start 54; Stop 78
ctcatttaatgtgttcatcgtcttt

SEQ ID NO: 341842 - DNA, 25 bp, Artificial
  probe
  misc_feature (1)..(25): SEQ ID NO: 2944; WAN024G9T; Start 51; Stop 75
tttctcatttaatgtgttcatcgtc

SEQ ID NO: 341843 - DNA, 25 bp, Artificial
  probe
  misc_feature (1)..(25): SEQ ID NO: 2944; WAN024G9T; Start 50; Stop 74
ctttctcatttaatgtgttcatcgt

SEQ ID NO: 341844 - DNA, 25 bp, Artificial
  probe
  misc_feature (1)..(25): SEQ ID NO: 2944; WAN024G9T; Start 49; Stop 73
actttctcatttaatgtgttcatcg

SEQ ID NO: 341845 - DNA, 25 bp, Artificial
  probe
  misc_feature (1)..(25): SEQ ID NO: 2944; WAN024G9T; Start 60; Stop 84
taatgtgttcatcgtctttccctcc

SEQ ID NO: 341846 - DNA, 25 bp, Artificial
  probe
  misc_feature (1)..(25): SEQ ID NO: 2944; WAN024G9T; Start 121; Stop 145
attatagtaggcgtttcgtgctctg

SEQ ID NO: 341847 - DNA, 25 bp, Artificial
  probe
  misc_feature (1)..(25): SEQ ID NO: 2944; WAN024G9T; Start 116; Stop 140
atttaattatagtaggcgtttcgtg

SEQ ID NO: 341848 - DNA, 25 bp, Artificial
  probe
  misc_feature (1)..(25): SEQ ID NO: 2944; WAN024G9T; Start 115; Stop 139
gatttaattatagtaggcgtttcgt

SEQ ID NO: 341849 - DNA, 25 bp, Artificial
  probe
  misc_feature (1)..(25): SEQ ID NO: 2944; WAN024G9T; Start 114; Stop 138
tgatttaattatagtaggcgtttcg

SEQ ID NO: 341850 - DNA, 25 bp, Artificial
  probe
  misc_feature (1)..(25): SEQ ID NO: 2944; WAN024G9T; Start 171; Stop 195
acaaaggttttcattttcgtggatt

SEQ ID NO: 341851 - DNA, 25 bp, Artificial
  probe
  misc_feature (1)..(25): SEQ ID NO: 2944; WAN024G9T; Start 172; Stop 196
caaaggttttcattttcgtggattt

SEQ ID NO: 341852 - DNA, 25 bp, Artificial
  probe
  misc_feature (1)..(25): SEQ ID NO: 2944; WAN024G9T; Start 173; Stop 197
aaaggttttcattttcgtggatttc

SEQ ID NO: 341853 - DNA, 25 bp, Artificial
  probe
  misc_feature (1)..(25): SEQ ID NO: 2944; WAN024G9T; Start 174; Stop 198
aaggttttcattttcgtggatttcg

SEQ ID NO: 341854 - DNA, 25 bp, Artificial
  probe
  misc_feature (1)..(25): SEQ ID NO: 2944; WAN024G9T; Start 165; Stop 189
aacacaacaaaggttttcattttcg

SEQ ID NO: 341855 - DNA, 25 bp, Artificial
  probe
  misc_feature (1)..(25): SEQ ID NO: 2944; WAN024G9T; Start 170; Stop 194
aacaaaggttttcattttcgtggat

SEQ ID NO: 341856 - DNA, 25 bp, Artificial
  probe
  misc_feature (1)..(25): SEQ ID NO: 2944; WAN024G9T; Start 177; Stop 201
gttttcattttcgtggatttcgtgt

SEQ ID NO: 341857 - DNA, 25 bp, Artificial
  probe
  misc_feature (1)..(25): SEQ ID NO: 2944; WAN024G9T; Start 166; Stop 190
acacaacaaaggttttcattttcgt

SEQ ID NO: 341858 - DNA, 25 bp, Artificial
  probe
  misc_feature (1)..(25): SEQ ID NO: 2944; WAN024G9T; Start 169; Stop 193
caacaaaggttttcattttcgtgga

SEQ ID NO: 341859 - DNA, 25 bp, Artificial
  probe
  misc_feature (1)..(25): SEQ ID NO: 2944; WAN024G9T; Start 168; Stop 192
acaacaaaggttttcattttcgtgg

SEQ ID NO: 341860 - DNA, 25 bp, Artificial
  probe
  misc_feature (1)..(25): SEQ ID NO: 2944; WAN024G9T; Start 122; Stop 146
ttatagtaggcgtttcgtgctctgt

SEQ ID NO: 341861 - DNA, 25 bp, Artificial
  probe
  misc_feature (1)..(25): SEQ ID NO: 2944; WAN024G9T; Start 176; Stop 200
ggttttcattttcgtggatttcgtg

SEQ ID NO: 341862 - DNA, 25 bp, Artificial
  probe
  misc_feature (1)..(25): SEQ ID NO: 2944; WAN024G9T; Start 175; Stop 199
aggttttcattttcgtggatttcgt

SEQ ID NO: 341863 - DNA, 25 bp, Artificial
  probe
  misc_feature (1)..(25): SEQ ID NO: 2945; WAN024CZC; Start 1256; Stop 1280
tgagagaagaattgagcctataact

SEQ ID NO: 341864 - DNA, 25 bp, Artificial
  probe
  misc_feature (1)..(25): SEQ ID NO: 2945; WAN024CZC; Start 211; Stop 235
cagttagtagatccgataagtcagg

SEQ ID NO: 341865 - DNA, 25 bp, Artificial
  probe
  misc_feature (1)..(25): SEQ ID NO: 2945; WAN024CZC; Start 210; Stop 234
ccagttagtagatccgataagtcag

SEQ ID NO: 341866 - DNA, 25 bp, Artificial
  probe
  misc_feature (1)..(25): SEQ ID NO: 2945; WAN024CZC; Start 209; Stop 233
tccagttagtagatccgataagtca

SEQ ID NO: 341867 - DNA, 25 bp, Artificial
  probe
  misc_feature (1)..(25): SEQ ID NO: 2945; WAN024CZC; Start 409; Stop 433
aatgagaattgtccagtggcttatc

SEQ ID NO: 341868 - DNA, 25 bp, Artificial
  probe
  misc_feature (1)..(25): SEQ ID NO: 2945; WAN024CZC; Start 1255; Stop 1279
ttgagagaagaattgagcctataac

SEQ ID NO: 341869 - DNA, 25 bp, Artificial
  probe
  misc_feature (1)..(25): SEQ ID NO: 2945; WAN024CZC; Start 723; Stop 747
caatgctagactccttaatgatgaa

SEQ ID NO: 341870 - DNA, 25 bp, Artificial
  probe
  misc_feature (1)..(25): SEQ ID NO: 2945; WAN024CZC; Start 208; Stop 232
atccagttagtagatccgataagtc

SEQ ID NO: 341871 - DNA, 25 bp, Artificial
  probe
  misc_feature (1)..(25): SEQ ID NO: 2945; WAN024CZC; Start 722; Stop 746
tcaatgctagactccttaatgatga

SEQ ID NO: 341872 - DNA, 25 bp, Artificial
  probe
  misc_feature (1)..(25): SEQ ID NO: 2945; WAN024CZC; Start 923; Stop 947
ctcatcgtagttaccagtaccaaga

SEQ ID NO: 341873 - DNA, 25 bp, Artificial
  probe
  misc_feature (1)..(25): SEQ ID NO: 2945; WAN024CZC; Start 720; Stop 744
ggtcaatgctagactccttaatgat

SEQ ID NO: 341874 - DNA, 25 bp, Artificial
  probe
  misc_feature (1)..(25): SEQ ID NO: 2945; WAN024CZC; Start 721; Stop 745
gtcaatgctagactccttaatgatg

SEQ ID NO: 341875 - DNA, 25 bp, Artificial
  probe
  misc_feature (1)..(25): SEQ ID NO: 2945; WAN024CZC; Start 922; Stop 946
actcatcgtagttaccagtaccaag

SEQ ID NO: 341876 - DNA, 25 bp, Artificial
  probe
  misc_feature (1)..(25): SEQ ID NO: 2945; WAN024CZC; Start 695; Stop 719
atggtatctatccagagaatgttgg

SEQ ID NO: 341877 - DNA, 25 bp, Artificial
  probe
  misc_feature (1)..(25): SEQ ID NO: 2945; WAN024CZC; Start 212; Stop 236
agttagtagatccgataagtcagga

SEQ ID NO: 341878 - DNA, 25 bp, Artificial
  probe
  misc_feature (1)..(25): SEQ ID NO: 2945; WAN024CZC; Start 1257; Stop 1281
gagagaagaattgagcctataacta

SEQ ID NO: 341879 - DNA, 25 bp, Artificial
  probe
  misc_feature (1)..(25): SEQ ID NO: 2945; WAN024CZC; Start 73; Stop 97
ggaattgagttggagtatcctgttg

SEQ ID NO: 341880 - DNA, 25 bp, Artificial
  probe
  misc_feature (1)..(25): SEQ ID NO: 2945; WAN024CZC; Start 1236; Stop 1260
aatgacctatttacagcctttgaga

SEQ ID NO: 341881 - DNA, 25 bp, Artificial
  probe
  misc_feature (1)..(25): SEQ ID NO: 2945; WAN024CZC; Start 1239; Stop 1263
gacctatttacagcctttgagagaa

SEQ ID NO: 341882 - DNA, 25 bp, Artificial
  probe
  misc_feature (1)..(25): SEQ ID NO: 2945; WAN024CZC; Start 1237; Stop 1261
atgacctatttacagcctttgagag

SEQ ID NO: 341883 - DNA, 25 bp, Artificial
  probe
  misc_feature (1)..(25): SEQ ID NO: 2945; WAN024CZC; Start 410; Stop 434
atgagaattgtccagtggcttatcc

SEQ ID NO: 341884 - DNA, 25 bp, Artificial
  probe
  misc_feature (1)..(25): SEQ ID NO: 2945; WAN024CZC; Start 1241; Stop 1265
cctatttacagcctttgagagaaga

SEQ ID NO: 341885 - DNA, 25 bp, Artificial
  probe
  misc_feature (1)..(25): SEQ ID NO: 2945; WAN024CZC; Start 1240; Stop 1264
acctatttacagcctttgagagaag

SEQ ID NO: 341886 - DNA, 25 bp, Artificial
  probe
  misc_feature (1)..(25): SEQ ID NO: 2945; WAN024CZC; Start 1217; Stop 1241
tggtgagaaataaggaagaaatgac

SEQ ID NO: 341887 - DNA, 25 bp, Artificial
  probe
  misc_feature (1)..(25): SEQ ID NO: 2945; WAN024CZC; Start 1216; Stop 1240
gtggtgagaaataaggaagaaatga

SEQ ID NO: 341888 - DNA, 25 bp, Artificial
  probe
  misc_feature (1)..(25): SEQ ID NO: 2945; WAN024CZC; Start 1215; Stop 1239
agtggtgagaaataaggaagaaatg

SEQ ID NO: 341889 - DNA, 25 bp, Artificial
  probe
  misc_feature (1)..(25): SEQ ID NO: 2945; WAN024CZC; Start 693; Stop 717
gcatggtatctatccagagaatgtt

SEQ ID NO: 341890 - DNA, 25 bp, Artificial
  probe
  misc_feature (1)..(25): SEQ ID NO: 2945; WAN024CZC; Start 110; Stop 134
gggatgctacagatgttgaagttat

SEQ ID NO: 341891 - DNA, 25 bp, Artificial
  probe
  misc_feature (1)..(25): SEQ ID NO: 2945; WAN024CZC; Start 1238; Stop 1262
tgacctatttacagcctttgagaga

SEQ ID NO: 341892 - DNA, 25 bp, Artificial
  probe
  misc_feature (1)..(25): SEQ ID NO: 2945; WAN024CZC; Start 1246; Stop 1270
ttacagcctttgagagaagaattga

SEQ ID NO: 341893 - DNA, 25 bp, Artificial
  probe
  misc_feature (1)..(25): SEQ ID NO: 2945; WAN024CZC; Start 1252; Stop 1276
cctttgagagaagaattgagcctat

SEQ ID NO: 341894 - DNA, 25 bp, Artificial
  probe
  misc_feature (1)..(25): SEQ ID NO: 2945; WAN024CZC; Start 197; Stop 221
ttggcaatctgatccagttagtaga

SEQ ID NO: 341895 - DNA, 25 bp, Artificial
  probe
  misc_feature (1)..(25): SEQ ID NO: 2945; WAN024CZC; Start 1247; Stop 1271
tacagcctttgagagaagaattgag

SEQ ID NO: 341896 - DNA, 25 bp, Artificial
  probe
  misc_feature (1)..(25): SEQ ID NO: 2946; WAN024D66; Start 164; Stop 188
aagagaacaatatcaccagacttca

SEQ ID NO: 341897 - DNA, 25 bp, Artificial
  probe
  misc_feature (1)..(25): SEQ ID NO: 2946; WAN024D66; Start 165; Stop 189
agagaacaatatcaccagacttcat

SEQ ID NO: 341898 - DNA, 25 bp, Artificial
  probe
  misc_feature (1)..(25): SEQ ID NO: 2946; WAN024D66; Start 226; Stop 250
gcaacggataaggtcattatagatg

SEQ ID NO: 341899 - DNA, 25 bp, Artificial
  probe
  misc_feature (1)..(25): SEQ ID NO: 2946; WAN024D66; Start 230; Stop 254
cggataaggtcattatagatgttcg

SEQ ID NO: 341900 - DNA, 25 bp, Artificial
  probe
  misc_feature (1)..(25): SEQ ID NO: 2946; WAN024D66; Start 227; Stop 251
caacggataaggtcattatagatgt

SEQ ID NO: 341901 - DNA, 25 bp, Artificial
  probe
  misc_feature (1)..(25): SEQ ID NO: 2946; WAN024D66; Start 166; Stop 190
gagaacaatatcaccagacttcatg

SEQ ID NO: 341902 - DNA, 25 bp, Artificial
  probe
  misc_feature (1)..(25): SEQ ID NO: 2946; WAN024D66; Start 237; Stop 261
ggtcattatagatgttcgttatcct

SEQ ID NO: 341903 - DNA, 25 bp, Artificial
  probe
  misc_feature (1)..(25): SEQ ID NO: 2946; WAN024D66; Start 236; Stop 260
aggtcattatagatgttcgttatcc

SEQ ID NO: 341904 - DNA, 25 bp, Artificial
  probe
  misc_feature (1)..(25): SEQ ID NO: 2946; WAN024D66; Start 231; Stop 255
ggataaggtcattatagatgttcgt

SEQ ID NO: 341905 - DNA, 25 bp, Artificial
  probe
  misc_feature (1)..(25): SEQ ID NO: 2946; WAN024D66; Start 229; Stop 253
acggataaggtcattatagatgttc

SEQ ID NO: 341906 - DNA, 25 bp, Artificial
  probe
  misc_feature (1)..(25): SEQ ID NO: 2946; WAN024D66; Start 167; Stop 191
agaacaatatcaccagacttcatgc

SEQ ID NO: 341907 - DNA, 25 bp, Artificial
  probe
  misc_feature (1)..(25): SEQ ID NO: 2946; WAN024D66; Start 228; Stop 252
aacggataaggtcattatagatgtt

SEQ ID NO: 341908 - DNA, 25 bp, Artificial
  probe
  misc_feature (1)..(25): SEQ ID NO: 2946; WAN024D66; Start 294; Stop 318
tttattggcaggaaacgaaagtatc

SEQ ID NO: 341909 - DNA, 25 bp, Artificial
  probe
  misc_feature (1)..(25): SEQ ID NO: 2946; WAN024D66; Start 292; Stop 316
gatttattggcaggaaacgaaagta

SEQ ID NO: 341910 - DNA, 25 bp, Artificial
  probe
  misc_feature (1)..(25): SEQ ID NO: 2946; WAN024D66; Start 295; Stop 319
ttattggcaggaaacgaaagtatct

SEQ ID NO: 341911 - DNA, 25 bp, Artificial
  probe
  misc_feature (1)..(25): SEQ ID NO: 2946; WAN024D66; Start 290; Stop 314
ttgatttattggcaggaaacgaaag

SEQ ID NO: 341912 - DNA, 25 bp, Artificial
  probe
  misc_feature (1)..(25): SEQ ID NO: 2946; WAN024D66; Start 293; Stop 317
atttattggcaggaaacgaaagtat

SEQ ID NO: 341913 - DNA, 25 bp, Artificial
  probe
  misc_feature (1)..(25): SEQ ID NO: 2946; WAN024D66; Start 169; Stop 193
aacaatatcaccagacttcatgcaa

SEQ ID NO: 341914 - DNA, 25 bp, Artificial
  probe
  misc_feature (1)..(25): SEQ ID NO: 2946; WAN024D66; Start 225; Stop 249
tgcaacggataaggtcattatagat

SEQ ID NO: 341915 - DNA, 25 bp, Artificial
  probe
  misc_feature (1)..(25): SEQ ID NO: 2946; WAN024D66; Start 224; Stop 248
gtgcaacggataaggtcattataga

SEQ ID NO: 341916 - DNA, 25 bp, Artificial
  probe
  misc_feature (1)..(25): SEQ ID NO: 2946; WAN024D66; Start 296; Stop 320
tattggcaggaaacgaaagtatctt

SEQ ID NO: 341917 - DNA, 25 bp, Artificial
  probe
  misc_feature (1)..(25): SEQ ID NO: 2946; WAN024D66; Start 302; Stop 326
caggaaacgaaagtatcttgattga

SEQ ID NO: 341918 - DNA, 25 bp, Artificial
  probe
  misc_feature (1)..(25): SEQ ID NO: 2946; WAN024D66; Start 301; Stop 325
gcaggaaacgaaagtatcttgattg

SEQ ID NO: 341919 - DNA, 25 bp, Artificial
  probe
  misc_feature (1)..(25): SEQ ID NO: 2946; WAN024D66; Start 172; Stop 196
aatatcaccagacttcatgcaagac

SEQ ID NO: 341920 - DNA, 25 bp, Artificial
  probe
  misc_feature (1)..(25): SEQ ID NO: 2946; WAN024D66; Start 171; Stop 195
caatatcaccagacttcatgcaaga

SEQ ID NO: 341921 - DNA, 25 bp, Artificial
  probe
  misc_feature (1)..(25): SEQ ID NO: 2946; WAN024D66; Start 41; Stop 65
ttacggaggatgaggattcaagtct

SEQ ID NO: 341922 - DNA, 25 bp, Artificial
  probe
  misc_feature (1)..(25): SEQ ID NO: 2946; WAN024D66; Start 289; Stop 313
gttgatttattggcaggaaacgaaa

SEQ ID NO: 341923 - DNA, 25 bp, Artificial
  probe
  misc_feature (1)..(25): SEQ ID NO: 2946; WAN024D66; Start 286; Stop 310
attgttgatttattggcaggaaacg

SEQ ID NO: 341924 - DNA, 25 bp, Artificial
  probe
  misc_feature (1)..(25): SEQ ID NO: 2946; WAN024D66; Start 291; Stop 315
tgatttattggcaggaaacgaaagt

SEQ ID NO: 341925 - DNA, 25 bp, Artificial
  probe
  misc_feature (1)..(25): SEQ ID NO: 2946; WAN024D66; Start 170; Stop 194
acaatatcaccagacttcatgcaag

SEQ ID NO: 341926 - DNA, 25 bp, Artificial
  probe
  misc_feature (1)..(25): SEQ ID NO: 2946; WAN024D66; Start 168; Stop 192
gaacaatatcaccagacttcatgca

SEQ ID NO: 341927 - DNA, 25 bp, Artificial
  probe
  misc_feature (1)..(25): SEQ ID NO: 2946; WAN024D66; Start 163; Stop 187
aaagagaacaatatcaccagacttc

SEQ ID NO: 341928 - DNA, 25 bp, Artificial
  probe
  misc_feature (1)..(25): SEQ ID NO: 2946; WAN024D66; Start 285; Stop 309
aattgttgatttattggcaggaaac

SEQ ID NO: 341929 - DNA, 25 bp, Artificial
  probe
  misc_feature (1)..(25): SEQ ID NO: 2947; WAN024GOH; Start 488; Stop 512
gttcagactacgactatctagcctt

SEQ ID NO: 341930 - DNA, 25 bp, Artificial
  probe
  misc_feature (1)..(25): SEQ ID NO: 2947; WAN024GOH; Start 590; Stop 614
aagtgtacgcttctaacgaatatat

SEQ ID NO: 341931 - DNA, 25 bp, Artificial
  probe
  misc_feature (1)..(25): SEQ ID NO: 2947; WAN024GOH; Start 2; Stop 26
tgtctttaagggagaagtcaatgag

SEQ ID NO: 341932 - DNA, 25 bp, Artificial
  probe
  misc_feature (1)..(25): SEQ ID NO: 2947; WAN024GOH; Start 1; Stop 25
atgtctttaagggagaagtcaatga

SEQ ID NO: 341933 - DNA, 25 bp, Artificial
  probe
  misc_feature (1)..(25): SEQ ID NO: 2947; WAN024GOH; Start 493; Stop 517
gactacgactatctagcctttatgc

SEQ ID NO: 341934 - DNA, 25 bp, Artificial
  probe
  misc_feature (1)..(25): SEQ ID NO: 2947; WAN024GOH; Start 285; Stop 309
ggctctcttaaccatctttgaacaa

SEQ ID NO: 341935 - DNA, 25 bp, Artificial
  probe
  misc_feature (1)..(25): SEQ ID NO: 2947; WAN024GOH; Start 275; Stop 299
atctggaattggctctcttaaccat

SEQ ID NO: 341936 - DNA, 25 bp, Artificial
  probe
  misc_feature (1)..(25): SEQ ID NO: 2947; WAN024GOH; Start 418; Stop 442
caaatagaaattgaggatgggcaaa

SEQ ID NO: 341937 - DNA, 25 bp, Artificial
  probe
  misc_feature (1)..(25): SEQ ID NO: 2947; WAN024GOH; Start 151; Stop 175
gaagaagacttacctcttgctctag

SEQ ID NO: 341938 - DNA, 25 bp, Artificial
  probe
  misc_feature (1)..(25): SEQ ID NO: 2947; WAN024GOH; Start 286; Stop 310
gctctcttaaccatctttgaacaaa

SEQ ID NO: 341939 - DNA, 25 bp, Artificial
  probe
  misc_feature (1)..(25): SEQ ID NO: 2947; WAN024GOH; Start 490; Stop 514
tcagactacgactatctagccttta

SEQ ID NO: 341940 - DNA, 25 bp, Artificial
  probe
  misc_feature (1)..(25): SEQ ID NO: 2947; WAN024GOH; Start 278; Stop 302
tggaattggctctcttaaccatctt

SEQ ID NO: 341941 - DNA, 25 bp, Artificial
  probe
  misc_feature (1)..(25): SEQ ID NO: 2947; WAN024GOH; Start 390; Stop 414
caatcctaagttggcaccctatatg

SEQ ID NO: 341942 - DNA, 25 bp, Artificial
  probe
  misc_feature (1)..(25): SEQ ID NO: 2947; WAN024GOH; Start 489; Stop 513
ttcagactacgactatctagccttt

SEQ ID NO: 341943 - DNA, 25 bp, Artificial
  probe
  misc_feature (1)..(25): SEQ ID NO: 2947; WAN024GOH; Start 591; Stop 615
agtgtacgcttctaacgaatatata

SEQ ID NO: 341944 - DNA, 25 bp, Artificial
  probe
  misc_feature (1)..(25): SEQ ID NO: 2947; WAN024GOH; Start 3; Stop 27
gtctttaagggagaagtcaatgagc

SEQ ID NO: 341945 - DNA, 25 bp, Artificial
  probe
  misc_feature (1)..(25): SEQ ID NO: 2947; WAN024GOH; Start 592; Stop 616
gtgtacgcttctaacgaatatatag

SEQ ID NO: 341946 - DNA, 25 bp, Artificial
  probe
  misc_feature (1)..(25): SEQ ID NO: 2947; WAN024GOH; Start 492; Stop 516
agactacgactatctagcctttatg

SEQ ID NO: 341947 - DNA, 25 bp, Artificial
  probe
  misc_feature (1)..(25): SEQ ID NO: 2947; WAN024GOH; Start 491; Stop 515
cagactacgactatctagcctttat

SEQ ID NO: 341948 - DNA, 25 bp, Artificial
  probe
  misc_feature (1)..(25): SEQ ID NO: 2947; WAN024GOH; Start 150; Stop 174
ggaagaagacttacctcttgctcta

SEQ ID NO: 341949 - DNA, 25 bp, Artificial
  probe
  misc_feature (1)..(25): SEQ ID NO: 2947; WAN024GOH; Start 496; Stop 520
tacgactatctagcctttatgccag

SEQ ID NO: 341950 - DNA, 25 bp, Artificial
  probe
  misc_feature (1)..(25): SEQ ID NO: 2947; WAN024GOH; Start 495; Stop 519
ctacgactatctagcctttatgcca

SEQ ID NO: 341951 - DNA, 25 bp, Artificial
  probe
  misc_feature (1)..(25): SEQ ID NO: 2947; WAN024GOH; Start 494; Stop 518
actacgactatctagcctttatgcc

SEQ ID NO: 341952 - DNA, 25 bp, Artificial
  probe
  misc_feature (1)..(25): SEQ ID NO: 2947; WAN024GOH; Start 499; Stop 523
gactatctagcctttatgccagttc

SEQ ID NO: 341953 - DNA, 25 bp, Artificial
  probe
  misc_feature (1)..(25): SEQ ID NO: 2947; WAN024GOH; Start 277; Stop 301
ctggaattggctctcttaaccatct

SEQ ID NO: 341954 - DNA, 25 bp, Artificial
  probe
  misc_feature (1)..(25): SEQ ID NO: 2947; WAN024GOH; Start 276; Stop 300
tctggaattggctctcttaaccatc

SEQ ID NO: 341955 - DNA, 25 bp, Artificial
  probe
  misc_feature (1)..(25): SEQ ID NO: 2947; WAN024GOH; Start 274; Stop 298
gatctggaattggctctcttaacca

SEQ ID NO: 341956 - DNA, 25 bp, Artificial
  probe
  misc_feature (1)..(25): SEQ ID NO: 2947; WAN024GOH; Start 152; Stop 176
aagaagacttacctcttgctctagc

SEQ ID NO: 341957 - DNA, 25 bp, Artificial
  probe
  misc_feature (1)..(25): SEQ ID NO: 2947; WAN024GOH; Start 13; Stop 37
gagaagtcaatgagcgagtacaaac

SEQ ID NO: 341958 - DNA, 25 bp, Artificial
  probe
  misc_feature (1)..(25): SEQ ID NO: 2947; WAN024GOH; Start 608; Stop 632
aatatatagatagggaagtgtcggt

SEQ ID NO: 341959 - DNA, 25 bp, Artificial
  probe
  misc_feature (1)..(25): SEQ ID NO: 2947; WAN024GOH; Start 589; Stop 613
aaagtgtacgcttctaacgaatata

SEQ ID NO: 341960 - DNA, 25 bp, Artificial
  probe
  misc_feature (1)..(25): SEQ ID NO: 2947; WAN024GOH; Start 6; Stop 30
tttaagggagaagtcaatgagcgag

SEQ ID NO: 341961 - DNA, 25 bp, Artificial
  probe
  misc_feature (1)..(25): SEQ ID NO: 2947; WAN024GOH; Start 280; Stop 304
gaattggctctcttaaccatctttg

SEQ ID NO: 341962 - DNA, 25 bp, Artificial
  probe
  misc_feature (1)..(25): SEQ ID NO: 2948; WAN024B5U; Start 193; Stop 217
tatcctcgcttaataacagaatcag

SEQ ID NO: 341963 - DNA, 25 bp, Artificial
  probe
  misc_feature (1)..(25): SEQ ID NO: 2948; WAN024B5U; Start 192; Stop 216
atatcctcgcttaataacagaatca

SEQ ID NO: 341964 - DNA, 25 bp, Artificial
  probe
  misc_feature (1)..(25): SEQ ID NO: 2948; WAN024B5U; Start 263; Stop 287
cacttcacgatcatctgtctggtag

SEQ ID NO: 341965 - DNA, 25 bp, Artificial
  probe
  misc_feature (1)..(25): SEQ ID NO: 2948; WAN024B5U; Start 97; Stop 121
gcaagcgaatcattctctcatttat

SEQ ID NO: 341966 - DNA, 25 bp, Artificial
  probe
  misc_feature (1)..(25): SEQ ID NO: 2948; WAN024B5U; Start 191; Stop 215
aatatcctcgcttaataacagaatc

SEQ ID NO: 341967 - DNA, 25 bp, Artificial
  probe
  misc_feature (1)..(25): SEQ ID NO: 2948; WAN024B5U; Start 264; Stop 288
acttcacgatcatctgtctggtaga

SEQ ID NO: 341968 - DNA, 25 bp, Artificial
  probe
  misc_feature (1)..(25): SEQ ID NO: 2948; WAN024B5U; Start 194; Stop 218
atcctcgcttaataacagaatcagc

SEQ ID NO: 341969 - DNA, 25 bp, Artificial
  probe
  misc_feature (1)..(25): SEQ ID NO: 2948; WAN024B5U; Start 98; Stop 122
caagcgaatcattctctcatttatt

SEQ ID NO: 341970 - DNA, 25 bp, Artificial
  probe
  misc_feature (1)..(25): SEQ ID NO: 2948; WAN024B5U; Start 197; Stop 221
ctcgcttaataacagaatcagcttg

SEQ ID NO: 341971 - DNA, 25 bp, Artificial
  probe
  misc_feature (1)..(25): SEQ ID NO: 2948; WAN024B5U; Start 200; Stop 224
gcttaataacagaatcagcttgtct

SEQ ID NO: 341972 - DNA, 25 bp, Artificial
  probe
  misc_feature (1)..(25): SEQ ID NO: 2948; WAN024B5U; Start 199; Stop 223
cgcttaataacagaatcagcttgtc

SEQ ID NO: 341973 - DNA, 25 bp, Artificial
  probe
  misc_feature (1)..(25): SEQ ID NO: 2948; WAN024B5U; Start 198; Stop 222
tcgcttaataacagaatcagcttgt

SEQ ID NO: 341974 - DNA, 25 bp, Artificial
  probe
  misc_feature (1)..(25): SEQ ID NO: 2948; WAN024B5U; Start 11; Stop 35
tggtcagtttcttctccaatctaaa

SEQ ID NO: 341975 - DNA, 25 bp, Artificial
  probe
  misc_feature (1)..(25): SEQ ID NO: 2948; WAN024B5U; Start 10; Stop 34
atggtcagtttcttctccaatctaa

SEQ ID NO: 341976 - DNA, 25 bp, Artificial
  probe
  misc_feature (1)..(25): SEQ ID NO: 2948; WAN024B5U; Start 8; Stop 32
ttatggtcagtttcttctccaatct

SEQ ID NO: 341977 - DNA, 25 bp, Artificial
  probe
  misc_feature (1)..(25): SEQ ID NO: 2948; WAN024B5U; Start 196; Stop 220
cctcgcttaataacagaatcagctt

SEQ ID NO: 341978 - DNA, 25 bp, Artificial
  probe
  misc_feature (1)..(25): SEQ ID NO: 2948; WAN024B5U; Start 7; Stop 31
tttatggtcagtttcttctccaatc

SEQ ID NO: 341979 - DNA, 25 bp, Artificial
  probe
  misc_feature (1)..(25): SEQ ID NO: 2948; WAN024B5U; Start 9; Stop 33
tatggtcagtttcttctccaatcta

SEQ ID NO: 341980 - DNA, 25 bp, Artificial
  probe
  misc_feature (1)..(25): SEQ ID NO: 2948; WAN024B5U; Start 99; Stop 123
aagcgaatcattctctcatttattt

SEQ ID NO: 341981 - DNA, 25 bp, Artificial
  probe
  misc_feature (1)..(25): SEQ ID NO: 2948; WAN024B5U; Start 195; Stop 219
tcctcgcttaataacagaatcagct

SEQ ID NO: 341982 - DNA, 25 bp, Artificial
  probe
  misc_feature (1)..(25): SEQ ID NO: 2948; WAN024B5U; Start 96; Stop 120
tgcaagcgaatcattctctcattta

SEQ ID NO: 341983 - DNA, 25 bp, Artificial
  probe
  misc_feature (1)..(25): SEQ ID NO: 2948; WAN024B5U; Start 94; Stop 118
actgcaagcgaatcattctctcatt

SEQ ID NO: 341984 - DNA, 25 bp, Artificial
  probe
  misc_feature (1)..(25): SEQ ID NO: 2948; WAN024B5U; Start 259; Stop 283
tttccacttcacgatcatctgtctg

SEQ ID NO: 341985 - DNA, 25 bp, Artificial
  probe
  misc_feature (1)..(25): SEQ ID NO: 2948; WAN024B5U; Start 22; Stop 46
ttctccaatctaaaacacctcctac

SEQ ID NO: 341986 - DNA, 25 bp, Artificial
  probe
  misc_feature (1)..(25): SEQ ID NO: 2948; WAN024B5U; Start 21; Stop 45
cttctccaatctaaaacacctccta

SEQ ID NO: 341987 - DNA, 25 bp, Artificial
  probe
  misc_feature (1)..(25): SEQ ID NO: 2948; WAN024B5U; Start 19; Stop 43
ttcttctccaatctaaaacacctcc

SEQ ID NO: 341988 - DNA, 25 bp, Artificial
  probe
  misc_feature (1)..(25): SEQ ID NO: 2948; WAN024B5U; Start 3; Stop 27
gtcttttatggtcagtttcttctcc

SEQ ID NO: 341989 - DNA, 25 bp, Artificial
  probe
  misc_feature (1)..(25): SEQ ID NO: 2948; WAN024B5U; Start 23; Stop 47
tctccaatctaaaacacctcctact

SEQ ID NO: 341990 - DNA, 25 bp, Artificial
  probe
  misc_feature (1)..(25): SEQ ID NO: 2948; WAN024B5U; Start 24; Stop 48
ctccaatctaaaacacctcctacta

SEQ ID NO: 341991 - DNA, 25 bp, Artificial
  probe
  misc_feature (1)..(25): SEQ ID NO: 2948; WAN024B5U; Start 2; Stop 26
tgtcttttatggtcagtttcttctc

SEQ ID NO: 341992 - DNA, 25 bp, Artificial
  probe
  misc_feature (1)..(25): SEQ ID NO: 2948; WAN024B5U; Start 20; Stop 44
tcttctccaatctaaaacacctcct

SEQ ID NO: 341993 - DNA, 25 bp, Artificial
  probe
  misc_feature (1)..(25): SEQ ID NO: 2948; WAN024B5U; Start 18; Stop 42
tttcttctccaatctaaaacacctc

SEQ ID NO: 341994 - DNA, 25 bp, Artificial
  probe
  misc_feature (1)..(25): SEQ ID NO: 2948; WAN024B5U; Start 12; Stop 36
ggtcagtttcttctccaatctaaaa

SEQ ID NO: 341995 - DNA, 25 bp, Artificial
  probe
  misc_feature (1)..(25): SEQ ID NO: 2949; WAN024B5H; Start 590; Stop 614
gtcgtagcgttgataagatgaatac

SEQ ID NO: 341996 - DNA, 25 bp, Artificial
  probe
  misc_feature (1)..(25): SEQ ID NO: 2949; WAN024B5H; Start 591; Stop 615
tcgtagcgttgataagatgaatact

SEQ ID NO: 341997 - DNA, 25 bp, Artificial
  probe
  misc_feature (1)..(25): SEQ ID NO: 2949; WAN024B5H; Start 670; Stop 694
gatgatatgattgataccgctggaa

SEQ ID NO: 341998 - DNA, 25 bp, Artificial
  probe
  misc_feature (1)..(25): SEQ ID NO: 2949; WAN024B5H; Start 671; Stop 695
atgatatgattgataccgctggaac

SEQ ID NO: 341999 - DNA, 25 bp, Artificial
  probe
  misc_feature (1)..(25): SEQ ID NO: 2949; WAN024B5H; Start 668; Stop 692
ttgatgatatgattgataccgctgg

SEQ ID NO: 342000 - DNA, 25 bp, Artificial
  probe
  misc_feature (1)..(25): SEQ ID NO: 2949; WAN024B5H; Start 667; Stop 691
attgatgatatgattgataccgctg

SEQ ID NO: 342001 - DNA, 25 bp, Artificial
  probe
  misc_feature (1)..(25): SEQ ID NO: 2949; WAN024B5H; Start 665; Stop 689
tgattgatgatatgattgataccgc

SEQ ID NO: 342002 - DNA, 25 bp, Artificial
  probe
  misc_feature (1)..(25): SEQ ID NO: 2949; WAN024B5H; Start 589; Stop 613
cgtcgtagcgttgataagatgaata

SEQ ID NO: 342003 - DNA, 25 bp, Artificial
  probe
  misc_feature (1)..(25): SEQ ID NO: 2949; WAN024B5H; Start 666; Stop 690
gattgatgatatgattgataccgct

SEQ ID NO: 342004 - DNA, 25 bp, Artificial
  probe
  misc_feature (1)..(25): SEQ ID NO: 2949; WAN024B5H; Start 669; Stop 693
tgatgatatgattgataccgctgga

SEQ ID NO: 342005 - DNA, 25 bp, Artificial
  probe
  misc_feature (1)..(25): SEQ ID NO: 2949; WAN024B5H; Start 483; Stop 507
tatggttggttctgactatgtggtt

SEQ ID NO: 342006 - DNA, 25 bp, Artificial
  probe
  misc_feature (1)..(25): SEQ ID NO: 2949; WAN024B5H; Start 592; Stop 616
cgtagcgttgataagatgaatacta

SEQ ID NO: 342007 - DNA, 25 bp, Artificial
  probe
  misc_feature (1)..(25): SEQ ID NO: 2949; WAN024B5H; Start 114; Stop 138
agatggagagattcaggtcaacatt

SEQ ID NO: 342008 - DNA, 25 bp, Artificial
  probe
  misc_feature (1)..(25): SEQ ID NO: 2949; WAN024B5H; Start 115; Stop 139
gatggagagattcaggtcaacattg

SEQ ID NO: 342009 - DNA, 25 bp, Artificial
  probe
  misc_feature (1)..(25): SEQ ID NO: 2949; WAN024B5H; Start 111; Stop 135
ttcagatggagagattcaggtcaac

SEQ ID NO: 342010 - DNA, 25 bp, Artificial
  probe
  misc_feature (1)..(25): SEQ ID NO: 2949; WAN024B5H; Start 674; Stop 698
atatgattgataccgctggaacgat

SEQ ID NO: 342011 - DNA, 25 bp, Artificial
  probe
  misc_feature (1)..(25): SEQ ID NO: 2949; WAN024B5H; Start 259; Stop 283
gtcaatgttgtcatgccttactatg

SEQ ID NO: 342012 - DNA, 25 bp, Artificial
  probe
  misc_feature (1)..(25): SEQ ID NO: 2949; WAN024B5H; Start 258; Stop 282
tgtcaatgttgtcatgccttactat

SEQ ID NO: 342013 - DNA, 25 bp, Artificial
  probe
  misc_feature (1)..(25): SEQ ID NO: 2949; WAN024B5H; Start 675; Stop 699
tatgattgataccgctggaacgatt

SEQ ID NO: 342014 - DNA, 25 bp, Artificial
  probe
  misc_feature (1)..(25): SEQ ID NO: 2949; WAN024B5H; Start 482; Stop 506
gtatggttggttctgactatgtggt

SEQ ID NO: 342015 - DNA, 25 bp, Artificial
  probe
  misc_feature (1)..(25): SEQ ID NO: 2949; WAN024B5H; Start 480; Stop 504
tggtatggttggttctgactatgtg

SEQ ID NO: 342016 - DNA, 25 bp, Artificial
  probe
  misc_feature (1)..(25): SEQ ID NO: 2949; WAN024B5H; Start 479; Stop 503
gtggtatggttggttctgactatgt

SEQ ID NO: 342017 - DNA, 25 bp, Artificial
  probe
  misc_feature (1)..(25): SEQ ID NO: 2949; WAN024B5H; Start 113; Stop 137
cagatggagagattcaggtcaacat

SEQ ID NO: 342018 - DNA, 25 bp, Artificial
  probe
  misc_feature (1)..(25): SEQ ID NO: 2949; WAN024B5H; Start 639; Stop 663
taaggttgaaggcaagacttgtatc

SEQ ID NO: 342019 - DNA, 25 bp, Artificial
  probe
  misc_feature (1)..(25): SEQ ID NO: 2949; WAN024B5H; Start 260; Stop 284
tcaatgttgtcatgccttactatgg

SEQ ID NO: 342020 - DNA, 25 bp, Artificial
  probe
  misc_feature (1)..(25): SEQ ID NO: 2949; WAN024B5H; Start 257; Stop 281
ctgtcaatgttgtcatgccttacta

SEQ ID NO: 342021 - DNA, 25 bp, Artificial
  probe
  misc_feature (1)..(25): SEQ ID NO: 2949; WAN024B5H; Start 638; Stop 662
gtaaggttgaaggcaagacttgtat

SEQ ID NO: 342022 - DNA, 25 bp, Artificial
  probe
  misc_feature (1)..(25): SEQ ID NO: 2949; WAN024B5H; Start 673; Stop 697
gatatgattgataccgctggaacga

SEQ ID NO: 342023 - DNA, 25 bp, Artificial
  probe
  misc_feature (1)..(25): SEQ ID NO: 2949; WAN024B5H; Start 116; Stop 140
atggagagattcaggtcaacattga

SEQ ID NO: 342024 - DNA, 25 bp, Artificial
  probe
  misc_feature (1)..(25): SEQ ID NO: 2949; WAN024B5H; Start 481; Stop 505
ggtatggttggttctgactatgtgg

SEQ ID NO: 342025 - DNA, 25 bp, Artificial
  probe
  misc_feature (1)..(25): SEQ ID NO: 2949; WAN024B5H; Start 21; Stop 45
gctgtttgccctttcttctaataaa

SEQ ID NO: 342026 - DNA, 25 bp, Artificial
  probe
  misc_feature (1)..(25): SEQ ID NO: 2949; WAN024B5H; Start 853; Stop 877
cgtttgattgataagattgagcaga

SEQ ID NO: 342027 - DNA, 25 bp, Artificial
  probe
  misc_feature (1)..(25): SEQ ID NO: 2949; WAN024B5H; Start 672; Stop 696
tgatatgattgataccgctggaacg

SEQ ID NO: 342028 - DNA, 25 bp, Artificial
  probe
  misc_feature (1)..(25): SEQ ID NO: 2950; WAN024DLN; Start 182; Stop 206
ttaagtcggaaggcatctgtagatt

SEQ ID NO: 342029 - DNA, 25 bp, Artificial
  probe
  misc_feature (1)..(25): SEQ ID NO: 2950; WAN024DLN; Start 326; Stop 350
tcatggatgaagtaaggatagtcaa

SEQ ID NO: 342030 - DNA, 25 bp, Artificial
  probe
  misc_feature (1)..(25): SEQ ID NO: 2950; WAN024DLN; Start 183; Stop 207
taagtcggaaggcatctgtagattg

SEQ ID NO: 342031 - DNA, 25 bp, Artificial
  probe
  misc_feature (1)..(25): SEQ ID NO: 2950; WAN024DLN; Start 213; Stop 237
gggcaatcaaacctttcatatagtc

SEQ ID NO: 342032 - DNA, 25 bp, Artificial
  probe
  misc_feature (1)..(25): SEQ ID NO: 2950; WAN024DLN; Start 214; Stop 238
ggcaatcaaacctttcatatagtca

SEQ ID NO: 342033 - DNA, 25 bp, Artificial
  probe
  misc_feature (1)..(25): SEQ ID NO: 2950; WAN024DLN; Start 217; Stop 241
aatcaaacctttcatatagtcacgg

SEQ ID NO: 342034 - DNA, 25 bp, Artificial
  probe
  misc_feature (1)..(25): SEQ ID NO: 2950; WAN024DLN; Start 6; Stop 30
caaaggcagttcccaaattaaattc

SEQ ID NO: 342035 - DNA, 25 bp, Artificial
  probe
  misc_feature (1)..(25): SEQ ID NO: 2950; WAN024DLN; Start 399; Stop 423
tatcctctgctactggagtcttgta

SEQ ID NO: 342036 - DNA, 25 bp, Artificial
  probe
  misc_feature (1)..(25): SEQ ID NO: 2950; WAN024DLN; Start 7; Stop 31
aaaggcagttcccaaattaaattcg

SEQ ID NO: 342037 - DNA, 25 bp, Artificial
  probe
  misc_feature (1)..(25): SEQ ID NO: 2950; WAN024DLN; Start 218; Stop 242
atcaaacctttcatatagtcacggc

SEQ ID NO: 342038 - DNA, 25 bp, Artificial
  probe
  misc_feature (1)..(25): SEQ ID NO: 2950; WAN024DLN; Start 397; Stop 421
cttatcctctgctactggagtcttg

SEQ ID NO: 342039 - DNA, 25 bp, Artificial
  probe
  misc_feature (1)..(25): SEQ ID NO: 2950; WAN024DLN; Start 376; Stop 400
caagtgagatttgtttggaacctta

SEQ ID NO: 342040 - DNA, 25 bp, Artificial
  probe
  misc_feature (1)..(25): SEQ ID NO: 2950; WAN024DLN; Start 378; Stop 402
agtgagatttgtttggaaccttatc

SEQ ID NO: 342041 - DNA, 25 bp, Artificial
  probe
  misc_feature (1)..(25): SEQ ID NO: 2950; WAN024DLN; Start 334; Stop 358
gaagtaaggatagtcaaatgggttg

SEQ ID NO: 342042 - DNA, 25 bp, Artificial
  probe
  misc_feature (1)..(25): SEQ ID NO: 2950; WAN024DLN; Start 266; Stop 290
ttaccatctgtagccttagtccagt

SEQ ID NO: 342043 - DNA, 25 bp, Artificial
  probe
  misc_feature (1)..(25): SEQ ID NO: 2950; WAN024DLN; Start 5; Stop 29
gcaaaggcagttcccaaattaaatt

SEQ ID NO: 342044 - DNA, 25 bp, Artificial
  probe
  misc_feature (1)..(25): SEQ ID NO: 2950; WAN024DLN; Start 333; Stop 357
tgaagtaaggatagtcaaatgggtt

SEQ ID NO: 342045 - DNA, 25 bp, Artificial
  probe
  misc_feature (1)..(25): SEQ ID NO: 2950; WAN024DLN; Start 264; Stop 288
ctttaccatctgtagccttagtcca

SEQ ID NO: 342046 - DNA, 25 bp, Artificial
  probe
  misc_feature (1)..(25): SEQ ID NO: 2950; WAN024DLN; Start 215; Stop 239
gcaatcaaacctttcatatagtcac

SEQ ID NO: 342047 - DNA, 25 bp, Artificial
  probe
  misc_feature (1)..(25): SEQ ID NO: 2950; WAN024DLN; Start 332; Stop 356
atgaagtaaggatagtcaaatgggt

SEQ ID NO: 342048 - DNA, 25 bp, Artificial
  probe
  misc_feature (1)..(25): SEQ ID NO: 2950; WAN024DLN; Start 377; Stop 401
aagtgagatttgtttggaaccttat

SEQ ID NO: 342049 - DNA, 25 bp, Artificial
  probe
  misc_feature (1)..(25): SEQ ID NO: 2950; WAN024DLN; Start 335; Stop 359
aagtaaggatagtcaaatgggttgc

SEQ ID NO: 342050 - DNA, 25 bp, Artificial
  probe
  misc_feature (1)..(25): SEQ ID NO: 2950; WAN024DLN; Start 216; Stop 240
caatcaaacctttcatatagtcacg

SEQ ID NO: 342051 - DNA, 25 bp, Artificial
  probe
  misc_feature (1)..(25): SEQ ID NO: 2950; WAN024DLN; Start 220; Stop 244
caaacctttcatatagtcacggctc

SEQ ID NO: 342052 - DNA, 25 bp, Artificial
  probe
  misc_feature (1)..(25): SEQ ID NO: 2950; WAN024DLN; Start 331; Stop 355
gatgaagtaaggatagtcaaatggg

SEQ ID NO: 342053 - DNA, 25 bp, Artificial
  probe
  misc_feature (1)..(25): SEQ ID NO: 2950; WAN024DLN; Start 330; Stop 354
ggatgaagtaaggatagtcaaatgg

SEQ ID NO: 342054 - DNA, 25 bp, Artificial
  probe
  misc_feature (1)..(25): SEQ ID NO: 2950; WAN024DLN; Start 222; Stop 246
aacctttcatatagtcacggctctt

SEQ ID NO: 342055 - DNA, 25 bp, Artificial
  probe
  misc_feature (1)..(25): SEQ ID NO: 2950; WAN024DLN; Start 221; Stop 245
aaacctttcatatagtcacggctct

SEQ ID NO: 342056 - DNA, 25 bp, Artificial
  probe
  misc_feature (1)..(25): SEQ ID NO: 2950; WAN024DLN; Start 398; Stop 422
ttatcctctgctactggagtcttgt

SEQ ID NO: 342057 - DNA, 25 bp, Artificial
  probe
  misc_feature (1)..(25): SEQ ID NO: 2950; WAN024DLN; Start 219; Stop 243
tcaaacctttcatatagtcacggct

SEQ ID NO: 342058 - DNA, 25 bp, Artificial
  probe
  misc_feature (1)..(25): SEQ ID NO: 2950; WAN024DLN; Start 267; Stop 291
taccatctgtagccttagtccagtc

SEQ ID NO: 342059 - DNA, 25 bp, Artificial
  probe
  misc_feature (1)..(25): SEQ ID NO: 2950; WAN024DLN; Start 190; Stop 214
gaaggcatctgtagattgacgaagg

SEQ ID NO: 342060 - DNA, 25 bp, Artificial
  probe
  misc_feature (1)..(25): SEQ ID NO: 2950; WAN024DLN; Start 189; Stop 213
ggaaggcatctgtagattgacgaag

SEQ ID NO: 342061 - DNA, 25 bp, Artificial
  probe
  misc_feature (1)..(25): SEQ ID NO: 2951; WAN024CVT; Start 868; Stop 892
ggcaatatgaccagcagtaatctat

SEQ ID NO: 342062 - DNA, 25 bp, Artificial
  probe
  misc_feature (1)..(25): SEQ ID NO: 2951; WAN024CVT; Start 105; Stop 129
ctacctcgccattatcaattatgtg

SEQ ID NO: 342063 - DNA, 25 bp, Artificial
  probe
  misc_feature (1)..(25): SEQ ID NO: 2951; WAN024CVT; Start 104; Stop 128
tctacctcgccattatcaattatgt

SEQ ID NO: 342064 - DNA, 25 bp, Artificial
  probe
  misc_feature (1)..(25): SEQ ID NO: 2951; WAN024CVT; Start 1223; Stop 1247
gtcaatggttagtcaagttcaacac

SEQ ID NO: 342065 - DNA, 25 bp, Artificial
  probe
  misc_feature (1)..(25): SEQ ID NO: 2951; WAN024CVT; Start 1221; Stop 1245
ttgtcaatggttagtcaagttcaac

SEQ ID NO: 342066 - DNA, 25 bp, Artificial
  probe
  misc_feature (1)..(25): SEQ ID NO: 2951; WAN024CVT; Start 342; Stop 366
gattgtcatcatcaacctcatctct

SEQ ID NO: 342067 - DNA, 25 bp, Artificial
  probe
  misc_feature (1)..(25): SEQ ID NO: 2951; WAN024CVT; Start 343; Stop 367
attgtcatcatcaacctcatctctg

SEQ ID NO: 342068 - DNA, 25 bp, Artificial
  probe
  misc_feature (1)..(25): SEQ ID NO: 2951; WAN024CVT; Start 1228; Stop 1252
tggttagtcaagttcaacactcata

SEQ ID NO: 342069 - DNA, 25 bp, Artificial
  probe
  misc_feature (1)..(25): SEQ ID NO: 2951; WAN024CVT; Start 869; Stop 893
gcaatatgaccagcagtaatctatt

SEQ ID NO: 342070 - DNA, 25 bp, Artificial
  probe
  misc_feature (1)..(25): SEQ ID NO: 2951; WAN024CVT; Start 1225; Stop 1249
caatggttagtcaagttcaacactc

SEQ ID NO: 342071 - DNA, 25 bp, Artificial
  probe
  misc_feature (1)..(25): SEQ ID NO: 2951; WAN024CVT; Start 1227; Stop 1251
atggttagtcaagttcaacactcat

SEQ ID NO: 342072 - DNA, 25 bp, Artificial
  probe
  misc_feature (1)..(25): SEQ ID NO: 2951; WAN024CVT; Start 1226; Stop 1250
aatggttagtcaagttcaacactca

SEQ ID NO: 342073 - DNA, 25 bp, Artificial
  probe
  misc_feature (1)..(25): SEQ ID NO: 2951; WAN024CVT; Start 1224; Stop 1248
tcaatggttagtcaagttcaacact

SEQ ID NO: 342074 - DNA, 25 bp, Artificial
  probe
  misc_feature (1)..(25): SEQ ID NO: 2951; WAN024CVT; Start 103; Stop 127
ttctacctcgccattatcaattatg

SEQ ID NO: 342075 - DNA, 25 bp, Artificial
  probe
  misc_feature (1)..(25): SEQ ID NO: 2951; WAN024CVT; Start 1229; Stop 1253
ggttagtcaagttcaacactcataa

SEQ ID NO: 342076 - DNA, 25 bp, Artificial
  probe
  misc_feature (1)..(25): SEQ ID NO: 2951; WAN024CVT; Start 1222; Stop 1246
tgtcaatggttagtcaagttcaaca

SEQ ID NO: 342077 - DNA, 25 bp, Artificial
  probe
  misc_feature (1)..(25): SEQ ID NO: 2951; WAN024CVT; Start 344; Stop 368
ttgtcatcatcaacctcatctctga

SEQ ID NO: 342078 - DNA, 25 bp, Artificial
  probe
  misc_feature (1)..(25): SEQ ID NO: 2951; WAN024CVT; Start 347; Stop 371
tcatcatcaacctcatctctgacac

SEQ ID NO: 342079 - DNA, 25 bp, Artificial
  probe
  misc_feature (1)..(25): SEQ ID NO: 2951; WAN024CVT; Start 118; Stop 142
atcaattatgtggctcagtacaatt

SEQ ID NO: 342080 - DNA, 25 bp, Artificial
  probe
  misc_feature (1)..(25): SEQ ID NO: 2951; WAN024CVT; Start 106; Stop 130
tacctcgccattatcaattatgtgg

SEQ ID NO: 342081 - DNA, 25 bp, Artificial
  probe
  misc_feature (1)..(25): SEQ ID NO: 2951; WAN024CVT; Start 114; Stop 138
cattatcaattatgtggctcagtac

SEQ ID NO: 342082 - DNA, 25 bp, Artificial
  probe
  misc_feature (1)..(25): SEQ ID NO: 2951; WAN024CVT; Start 116; Stop 140
ttatcaattatgtggctcagtacaa

SEQ ID NO: 342083 - DNA, 25 bp, Artificial
  probe
  misc_feature (1)..(25): SEQ ID NO: 2951; WAN024CVT; Start 994; Stop 1018
accagtttcatcagttctacgatta

SEQ ID NO: 342084 - DNA, 25 bp, Artificial
  probe
  misc_feature (1)..(25): SEQ ID NO: 2951; WAN024CVT; Start 113; Stop 137
ccattatcaattatgtggctcagta

SEQ ID NO: 342085 - DNA, 25 bp, Artificial
  probe
  misc_feature (1)..(25): SEQ ID NO: 2951; WAN024CVT; Start 993; Stop 1017
gaccagtttcatcagttctacgatt

SEQ ID NO: 342086 - DNA, 25 bp, Artificial
  probe
  misc_feature (1)..(25): SEQ ID NO: 2951; WAN024CVT; Start 958; Stop 982
agtatcctttgtcaagcctatatcg

SEQ ID NO: 342087 - DNA, 25 bp, Artificial
  probe
  misc_feature (1)..(25): SEQ ID NO: 2951; WAN024CVT; Start 959; Stop 983
gtatcctttgtcaagcctatatcgt

SEQ ID NO: 342088 - DNA, 25 bp, Artificial
  probe
  misc_feature (1)..(25): SEQ ID NO: 2951; WAN024CVT; Start 117; Stop 141
tatcaattatgtggctcagtacaat

SEQ ID NO: 342089 - DNA, 25 bp, Artificial
  probe
  misc_feature (1)..(25): SEQ ID NO: 2951; WAN024CVT; Start 115; Stop 139
attatcaattatgtggctcagtaca

SEQ ID NO: 342090 - DNA, 25 bp, Artificial
  probe
  misc_feature (1)..(25): SEQ ID NO: 2951; WAN024CVT; Start 962; Stop 986
tcctttgtcaagcctatatcgtaat

SEQ ID NO: 342091 - DNA, 25 bp, Artificial
  probe
  misc_feature (1)..(25): SEQ ID NO: 2951; WAN024CVT; Start 961; Stop 985
atcctttgtcaagcctatatcgtaa

SEQ ID NO: 342092 - DNA, 25 bp, Artificial
  probe
  misc_feature (1)..(25): SEQ ID NO: 2951; WAN024CVT; Start 1230; Stop 1254
gttagtcaagttcaacactcataac

SEQ ID NO: 342093 - DNA, 25 bp, Artificial
  probe
  misc_feature (1)..(25): SEQ ID NO: 2951; WAN024CVT; Start 705; Stop 729
agataccgtcatactactgtttctg

SEQ ID NO: 342094 - DNA, 25 bp, Artificial
  probe
  misc_feature (1)..(25): SEQ ID NO: 2952; WAN024DUO; Start 267; Stop 291
ggtcttcctctttcatttcctgtaa

SEQ ID NO: 342095 - DNA, 25 bp, Artificial
  probe
  misc_feature (1)..(25): SEQ ID NO: 2952; WAN024DUO; Start 224; Stop 248
ttgtaagtagtttggcagaattgac

SEQ ID NO: 342096 - DNA, 25 bp, Artificial
  probe
  misc_feature (1)..(25): SEQ ID NO: 2952; WAN024DUO; Start 223; Stop 247
gttgtaagtagtttggcagaattga

SEQ ID NO: 342097 - DNA, 25 bp, Artificial
  probe
  misc_feature (1)..(25): SEQ ID NO: 2952; WAN024DUO; Start 222; Stop 246
agttgtaagtagtttggcagaattg

SEQ ID NO: 342098 - DNA, 25 bp, Artificial
  probe
  misc_feature (1)..(25): SEQ ID NO: 2952; WAN024DUO; Start 220; Stop 244
aaagttgtaagtagtttggcagaat

SEQ ID NO: 342099 - DNA, 25 bp, Artificial
  probe
  misc_feature (1)..(25): SEQ ID NO: 2952; WAN024DUO; Start 221; Stop 245
aagttgtaagtagtttggcagaatt

SEQ ID NO: 342100 - DNA, 25 bp, Artificial
  probe
  misc_feature (1)..(25): SEQ ID NO: 2952; WAN024DUO; Start 266; Stop 290
tggtcttcctctttcatttcctgta

SEQ ID NO: 342101 - DNA, 25 bp, Artificial
  probe
  misc_feature (1)..(25): SEQ ID NO: 2952; WAN024DUO; Start 226; Stop 250
gtaagtagtttggcagaattgacaa

SEQ ID NO: 342102 - DNA, 25 bp, Artificial
  probe
  misc_feature (1)..(25): SEQ ID NO: 2952; WAN024DUO; Start 227; Stop 251
taagtagtttggcagaattgacaag

SEQ ID NO: 342103 - DNA, 25 bp, Artificial
  probe
  misc_feature (1)..(25): SEQ ID NO: 2952; WAN024DUO; Start 179; Stop 203
taagatttgtcacgaatgagttcct

SEQ ID NO: 342104 - DNA, 25 bp, Artificial
  probe
  misc_feature (1)..(25): SEQ ID NO: 2952; WAN024DUO; Start 178; Stop 202
ttaagatttgtcacgaatgagttcc

SEQ ID NO: 342105 - DNA, 25 bp, Artificial
  probe
  misc_feature (1)..(25): SEQ ID NO: 2952; WAN024DUO; Start 14; Stop 38
tttcgttgttgtattggattccctt

SEQ ID NO: 342106 - DNA, 25 bp, Artificial
  probe
  misc_feature (1)..(25): SEQ ID NO: 2952; WAN024DUO; Start 234; Stop 258
tttggcagaattgacaagtgatttc

SEQ ID NO: 342107 - DNA, 25 bp, Artificial
  probe
  misc_feature (1)..(25): SEQ ID NO: 2952; WAN024DUO; Start 19; Stop 43
ttgttgtattggattcccttgtcag

SEQ ID NO: 342108 - DNA, 25 bp, Artificial
  probe
  misc_feature (1)..(25): SEQ ID NO: 2952; WAN024DUO; Start 231; Stop 255
tagtttggcagaattgacaagtgat

SEQ ID NO: 342109 - DNA, 25 bp, Artificial
  probe
  misc_feature (1)..(25): SEQ ID NO: 2952; WAN024DUO; Start 41; Stop 65
cagagaccatttccattacaacgag

SEQ ID NO: 342110 - DNA, 25 bp, Artificial
  probe
  misc_feature (1)..(25): SEQ ID NO: 2952; WAN024DUO; Start 21; Stop 45
gttgtattggattcccttgtcagag

SEQ ID NO: 342111 - DNA, 25 bp, Artificial
  probe
  misc_feature (1)..(25): SEQ ID NO: 2952; WAN024DUO; Start 233; Stop 257
gtttggcagaattgacaagtgattt

SEQ ID NO: 342112 - DNA, 25 bp, Artificial
  probe
  misc_feature (1)..(25): SEQ ID NO: 2952; WAN024DUO; Start 22; Stop 46
ttgtattggattcccttgtcagaga

SEQ ID NO: 342113 - DNA, 25 bp, Artificial
  probe
  misc_feature (1)..(25): SEQ ID NO: 2952; WAN024DUO; Start 18; Stop 42
gttgttgtattggattcccttgtca

SEQ ID NO: 342114 - DNA, 25 bp, Artificial
  probe
  misc_feature (1)..(25): SEQ ID NO: 2952; WAN024DUO; Start 228; Stop 252
aagtagtttggcagaattgacaagt

SEQ ID NO: 342115 - DNA, 25 bp, Artificial
  probe
  misc_feature (1)..(25): SEQ ID NO: 2952; WAN024DUO; Start 42; Stop 66
agagaccatttccattacaacgagt

SEQ ID NO: 342116 - DNA, 25 bp, Artificial
  probe
  misc_feature (1)..(25): SEQ ID NO: 2952; WAN024DUO; Start 40; Stop 64
tcagagaccatttccattacaacga

SEQ ID NO: 342117 - DNA, 25 bp, Artificial
  probe
  misc_feature (1)..(25): SEQ ID NO: 2952; WAN024DUO; Start 225; Stop 249
tgtaagtagtttggcagaattgaca

SEQ ID NO: 342118 - DNA, 25 bp, Artificial
  probe
  misc_feature (1)..(25): SEQ ID NO: 2952; WAN024DUO; Start 15; Stop 39
ttcgttgttgtattggattcccttg

SEQ ID NO: 342119 - DNA, 25 bp, Artificial
  probe
  misc_feature (1)..(25): SEQ ID NO: 2952; WAN024DUO; Start 20; Stop 44
tgttgtattggattcccttgtcaga

SEQ ID NO: 342120 - DNA, 25 bp, Artificial
  probe
  misc_feature (1)..(25): SEQ ID NO: 2952; WAN024DUO; Start 180; Stop 204
aagatttgtcacgaatgagttcctc

SEQ ID NO: 342121 - DNA, 25 bp, Artificial
  probe
  misc_feature (1)..(25): SEQ ID NO: 2952; WAN024DUO; Start 232; Stop 256
agtttggcagaattgacaagtgatt

SEQ ID NO: 342122 - DNA, 25 bp, Artificial
  probe
  misc_feature (1)..(25): SEQ ID NO: 2952; WAN024DUO; Start 36; Stop 60
cttgtcagagaccatttccattaca

SEQ ID NO: 342123 - DNA, 25 bp, Artificial
  probe
  misc_feature (1)..(25): SEQ ID NO: 2952; WAN024DUO; Start 230; Stop 254
gtagtttggcagaattgacaagtga

SEQ ID NO: 342124 - DNA, 25 bp, Artificial
  probe
  misc_feature (1)..(25): SEQ ID NO: 2952; WAN024DUO; Start 229; Stop 253
agtagtttggcagaattgacaagtg

SEQ ID NO: 342125 - DNA, 25 bp, Artificial
  probe
  misc_feature (1)..(25): SEQ ID NO: 2952; WAN024DUO; Start 38; Stop 62
tgtcagagaccatttccattacaac

SEQ ID NO: 342126 - DNA, 25 bp, Artificial
  probe
  misc_feature (1)..(25): SEQ ID NO: 2952; WAN024DUO; Start 35; Stop 59
ccttgtcagagaccatttccattac

SEQ ID NO: 342127 - DNA, 25 bp, Artificial
  probe
  misc_feature (1)..(25): SEQ ID NO: 2953; WAN024D7P; Start 44; Stop 68
caacaactgaaataacaccgatacg

SEQ ID NO: 342128 - DNA, 25 bp, Artificial
  probe
  misc_feature (1)..(25): SEQ ID NO: 2953; WAN024D7P; Start 262; Stop 286
gctgtagtatttaccaattcaacga

SEQ ID NO: 342129 - DNA, 25 bp, Artificial
  probe
  misc_feature (1)..(25): SEQ ID NO: 2953; WAN024D7P; Start 43; Stop 67
tcaacaactgaaataacaccgatac

SEQ ID NO: 342130 - DNA, 25 bp, Artificial
  probe
  misc_feature (1)..(25): SEQ ID NO: 2953; WAN024D7P; Start 186; Stop 210
aagagtttcacctgaaggcattatc

SEQ ID NO: 342131 - DNA, 25 bp, Artificial
  probe
  misc_feature (1)..(25): SEQ ID NO: 2953; WAN024D7P; Start 190; Stop 214
gtttcacctgaaggcattatcaaag

SEQ ID NO: 342132 - DNA, 25 bp, Artificial
  probe
  misc_feature (1)..(25): SEQ ID NO: 2953; WAN024D7P; Start 185; Stop 209
caagagtttcacctgaaggcattat

SEQ ID NO: 342133 - DNA, 25 bp, Artificial
  probe
  misc_feature (1)..(25): SEQ ID NO: 2953; WAN024D7P; Start 189; Stop 213
agtttcacctgaaggcattatcaaa

SEQ ID NO: 342134 - DNA, 25 bp, Artificial
  probe
  misc_feature (1)..(25): SEQ ID NO: 2953; WAN024D7P; Start 188; Stop 212
gagtttcacctgaaggcattatcaa

SEQ ID NO: 342135 - DNA, 25 bp, Artificial
  probe
  misc_feature (1)..(25): SEQ ID NO: 2953; WAN024D7P; Start 261; Stop 285
agctgtagtatttaccaattcaacg

SEQ ID NO: 342136 - DNA, 25 bp, Artificial
  probe
  misc_feature (1)..(25): SEQ ID NO: 2953; WAN024D7P; Start 196; Stop 220
cctgaaggcattatcaaagcaagag

SEQ ID NO: 342137 - DNA, 25 bp, Artificial
  probe
  misc_feature (1)..(25): SEQ ID NO: 2953; WAN024D7P; Start 187; Stop 211
agagtttcacctgaaggcattatca

SEQ ID NO: 342138 - DNA, 25 bp, Artificial
  probe
  misc_feature (1)..(25): SEQ ID NO: 2953; WAN024D7P; Start 263; Stop 287
ctgtagtatttaccaattcaacgaa

SEQ ID NO: 342139 - DNA, 25 bp, Artificial
  probe
  misc_feature (1)..(25): SEQ ID NO: 2953; WAN024D7P; Start 191; Stop 215
tttcacctgaaggcattatcaaagc

SEQ ID NO: 342140 - DNA, 25 bp, Artificial
  probe
  misc_feature (1)..(25): SEQ ID NO: 2953; WAN024D7P; Start 45; Stop 69
aacaactgaaataacaccgatacgt

SEQ ID NO: 342141 - DNA, 25 bp, Artificial
  probe
  misc_feature (1)..(25): SEQ ID NO: 2953; WAN024D7P; Start 184; Stop 208
tcaagagtttcacctgaaggcatta

SEQ ID NO: 342142 - DNA, 25 bp, Artificial
  probe
  misc_feature (1)..(25): SEQ ID NO: 2953; WAN024D7P; Start 197; Stop 221
ctgaaggcattatcaaagcaagagc

SEQ ID NO: 342143 - DNA, 25 bp, Artificial
  probe
  misc_feature (1)..(25): SEQ ID NO: 2953; WAN024D7P; Start 194; Stop 218
cacctgaaggcattatcaaagcaag

SEQ ID NO: 342144 - DNA, 25 bp, Artificial
  probe
  misc_feature (1)..(25): SEQ ID NO: 2953; WAN024D7P; Start 46; Stop 70
acaactgaaataacaccgatacgtc

SEQ ID NO: 342145 - DNA, 25 bp, Artificial
  probe
  misc_feature (1)..(25): SEQ ID NO: 2953; WAN024D7P; Start 195; Stop 219
acctgaaggcattatcaaagcaaga

SEQ ID NO: 342146 - DNA, 25 bp, Artificial
  probe
  misc_feature (1)..(25): SEQ ID NO: 2953; WAN024D7P; Start 193; Stop 217
tcacctgaaggcattatcaaagcaa

SEQ ID NO: 342147 - DNA, 25 bp, Artificial
  probe
  misc_feature (1)..(25): SEQ ID NO: 2953; WAN024D7P; Start 47; Stop 71
caactgaaataacaccgatacgtcc

SEQ ID NO: 342148 - DNA, 25 bp, Artificial
  probe
  misc_feature (1)..(25): SEQ ID NO: 2953; WAN024D7P; Start 141; Stop 165
gattttctctccgatagttgctgtt

SEQ ID NO: 342149 - DNA, 25 bp, Artificial
  probe
  misc_feature (1)..(25): SEQ ID NO: 2953; WAN024D7P; Start 41; Stop 65
cttcaacaactgaaataacaccgat

SEQ ID NO: 342150 - DNA, 25 bp, Artificial
  probe
  misc_feature (1)..(25): SEQ ID NO: 2953; WAN024D7P; Start 35; Stop 59
ctccaccttcaacaactgaaataac

SEQ ID NO: 342151 - DNA, 25 bp, Artificial
  probe
  misc_feature (1)..(25): SEQ ID NO: 2953; WAN024D7P; Start 34; Stop 58
tctccaccttcaacaactgaaataa

SEQ ID NO: 342152 - DNA, 25 bp, Artificial
  probe
  misc_feature (1)..(25): SEQ ID NO: 2953; WAN024D7P; Start 192; Stop 216
ttcacctgaaggcattatcaaagca

SEQ ID NO: 342153 - DNA, 25 bp, Artificial
  probe
  misc_feature (1)..(25): SEQ ID NO: 2953; WAN024D7P; Start 48; Stop 72
aactgaaataacaccgatacgtcca

SEQ ID NO: 342154 - DNA, 25 bp, Artificial
  probe
  misc_feature (1)..(25): SEQ ID NO: 2953; WAN024D7P; Start 254; Stop 278
tgactttagctgtagtatttaccaa

SEQ ID NO: 342155 - DNA, 25 bp, Artificial
  probe
  misc_feature (1)..(25): SEQ ID NO: 2953; WAN024D7P; Start 142; Stop 166
attttctctccgatagttgctgttg

SEQ ID NO: 342156 - DNA, 25 bp, Artificial
  probe
  misc_feature (1)..(25): SEQ ID NO: 2953; WAN024D7P; Start 38; Stop 62
caccttcaacaactgaaataacacc

SEQ ID NO: 342157 - DNA, 25 bp, Artificial
  probe
  misc_feature (1)..(25): SEQ ID NO: 2953; WAN024D7P; Start 37; Stop 61
ccaccttcaacaactgaaataacac

SEQ ID NO: 342158 - DNA, 25 bp, Artificial
  probe
  misc_feature (1)..(25): SEQ ID NO: 2953; WAN024D7P; Start 36; Stop 60
tccaccttcaacaactgaaataaca

SEQ ID NO: 342159 - DNA, 25 bp, Artificial
  probe
  misc_feature (1)..(25): SEQ ID NO: 2953; WAN024D7P; Start 33; Stop 57
gtctccaccttcaacaactgaaata

SEQ ID NO: 342160 - DNA, 25 bp, Artificial
  probe
  misc_feature (1)..(25): SEQ ID NO: 2954; WAN024C74; Start 227; Stop 251
aagttattcatctccacattccctc

SEQ ID NO: 342161 - DNA, 25 bp, Artificial
  probe
  misc_feature (1)..(25): SEQ ID NO: 2954; WAN024C74; Start 226; Stop 250
gaagttattcatctccacattccct

SEQ ID NO: 342162 - DNA, 25 bp, Artificial
  probe
  misc_feature (1)..(25): SEQ ID NO: 2954; WAN024C74; Start 162; Stop 186
aatccttccgctcatagtgaacaac

SEQ ID NO: 342163 - DNA, 25 bp, Artificial
  probe
  misc_feature (1)..(25): SEQ ID NO: 2954; WAN024C74; Start 228; Stop 252
agttattcatctccacattccctcg

SEQ ID NO: 342164 - DNA, 25 bp, Artificial
  probe
  misc_feature (1)..(25): SEQ ID NO: 2954; WAN024C74; Start 224; Stop 248
gtgaagttattcatctccacattcc

SEQ ID NO: 342165 - DNA, 25 bp, Artificial
  probe
  misc_feature (1)..(25): SEQ ID NO: 2954; WAN024C74; Start 158; Stop 182
atcaaatccttccgctcatagtgaa

SEQ ID NO: 342166 - DNA, 25 bp, Artificial
  probe
  misc_feature (1)..(25): SEQ ID NO: 2954; WAN024C74; Start 166; Stop 190
cttccgctcatagtgaacaacttcc

SEQ ID NO: 342167 - DNA, 25 bp, Artificial
  probe
  misc_feature (1)..(25): SEQ ID NO: 2954; WAN024C74; Start 165; Stop 189
ccttccgctcatagtgaacaacttc

SEQ ID NO: 342168 - DNA, 25 bp, Artificial
  probe
  misc_feature (1)..(25): SEQ ID NO: 2954; WAN024C74; Start 194; Stop 218
agatcctgtacgttcatagtcaaat

SEQ ID NO: 342169 - DNA, 25 bp, Artificial
  probe
  misc_feature (1)..(25): SEQ ID NO: 2954; WAN024C74; Start 163; Stop 187
atccttccgctcatagtgaacaact

SEQ ID NO: 342170 - DNA, 25 bp, Artificial
  probe
  misc_feature (1)..(25): SEQ ID NO: 2954; WAN024C74; Start 196; Stop 220
atcctgtacgttcatagtcaaatcg

SEQ ID NO: 342171 - DNA, 25 bp, Artificial
  probe
  misc_feature (1)..(25): SEQ ID NO: 2954; WAN024C74; Start 195; Stop 219
gatcctgtacgttcatagtcaaatc

SEQ ID NO: 342172 - DNA, 25 bp, Artificial
  probe
  misc_feature (1)..(25): SEQ ID NO: 2954; WAN024C74; Start 161; Stop 185
aaatccttccgctcatagtgaacaa

SEQ ID NO: 342173 - DNA, 25 bp, Artificial
  probe
  misc_feature (1)..(25): SEQ ID NO: 2954; WAN024C74; Start 192; Stop 216
gcagatcctgtacgttcatagtcaa

SEQ ID NO: 342174 - DNA, 25 bp, Artificial
  probe
  misc_feature (1)..(25): SEQ ID NO: 2954; WAN024C74; Start 230; Stop 254
ttattcatctccacattccctcgaa

SEQ ID NO: 342175 - DNA, 25 bp, Artificial
  probe
  misc_feature (1)..(25): SEQ ID NO: 2954; WAN024C74; Start 157; Stop 181
catcaaatccttccgctcatagtga

SEQ ID NO: 342176 - DNA, 25 bp, Artificial
  probe
  misc_feature (1)..(25): SEQ ID NO: 2954; WAN024C74; Start 167; Stop 191
ttccgctcatagtgaacaacttcct

SEQ ID NO: 342177 - DNA, 25 bp, Artificial
  probe
  misc_feature (1)..(25): SEQ ID NO: 2954; WAN024C74; Start 164; Stop 188
tccttccgctcatagtgaacaactt

SEQ ID NO: 342178 - DNA, 25 bp, Artificial
  probe
  misc_feature (1)..(25): SEQ ID NO: 2954; WAN024C74; Start 159; Stop 183
tcaaatccttccgctcatagtgaac

SEQ ID NO: 342179 - DNA, 25 bp, Artificial
  probe
  misc_feature (1)..(25): SEQ ID NO: 2954; WAN024C74; Start 229; Stop 253
gttattcatctccacattccctcga

SEQ ID NO: 342180 - DNA, 25 bp, Artificial
  probe
  misc_feature (1)..(25): SEQ ID NO: 2954; WAN024C74; Start 193; Stop 217
cagatcctgtacgttcatagtcaaa

SEQ ID NO: 342181 - DNA, 25 bp, Artificial
  probe
  misc_feature (1)..(25): SEQ ID NO: 2954; WAN024C74; Start 231; Stop 255
tattcatctccacattccctcgaac

SEQ ID NO: 342182 - DNA, 25 bp, Artificial
  probe
  misc_feature (1)..(25): SEQ ID NO: 2954; WAN024C74; Start 160; Stop 184
caaatccttccgctcatagtgaaca

SEQ ID NO: 342183 - DNA, 25 bp, Artificial
  probe
  misc_feature (1)..(25): SEQ ID NO: 2954; WAN024C74; Start 269; Stop 293
ttcttcttgatgaggtcaaacttct

SEQ ID NO: 342184 - DNA, 25 bp, Artificial
  probe
  misc_feature (1)..(25): SEQ ID NO: 2954; WAN024C74; Start 225; Stop 249
tgaagttattcatctccacattccc

SEQ ID NO: 342185 - DNA, 25 bp, Artificial
  probe
  misc_feature (1)..(25): SEQ ID NO: 2954; WAN024C74; Start 145; Stop 169
ctcaccttctggcatcaaatccttc

SEQ ID NO: 342186 - DNA, 25 bp, Artificial
  probe
  misc_feature (1)..(25): SEQ ID NO: 2954; WAN024C74; Start 270; Stop 294
tcttcttgatgaggtcaaacttctg

SEQ ID NO: 342187 - DNA, 25 bp, Artificial
  probe
  misc_feature (1)..(25): SEQ ID NO: 2954; WAN024C74; Start 268; Stop 292
attcttcttgatgaggtcaaacttc

SEQ ID NO: 342188 - DNA, 25 bp, Artificial
  probe
  misc_feature (1)..(25): SEQ ID NO: 2954; WAN024C74; Start 267; Stop 291
aattcttcttgatgaggtcaaactt

SEQ ID NO: 342189 - DNA, 25 bp, Artificial
  probe
  misc_feature (1)..(25): SEQ ID NO: 2954; WAN024C74; Start 191; Stop 215
tgcagatcctgtacgttcatagtca

SEQ ID NO: 342190 - DNA, 25 bp, Artificial
  probe
  misc_feature (1)..(25): SEQ ID NO: 2954; WAN024C74; Start 168; Stop 192
tccgctcatagtgaacaacttcctg

SEQ ID NO: 342191 - DNA, 25 bp, Artificial
  probe
  misc_feature (1)..(25): SEQ ID NO: 2954; WAN024C74; Start 271; Stop 295
cttcttgatgaggtcaaacttctgg

SEQ ID NO: 342192 - DNA, 25 bp, Artificial
  probe
  misc_feature (1)..(25): SEQ ID NO: 2954; WAN024C74; Start 197; Stop 221
tcctgtacgttcatagtcaaatcgc

SEQ ID NO: 342193 - DNA, 25 bp, Artificial
  probe
  misc_feature (1)..(25): SEQ ID NO: 2955; WAN024DPF; Start 65; Stop 89
ttgtctttgtagataaaggcaattt

SEQ ID NO: 342194 - DNA, 25 bp, Artificial
  probe
  misc_feature (1)..(25): SEQ ID NO: 2955; WAN024DPF; Start 64; Stop 88
tttgtctttgtagataaaggcaatt

SEQ ID NO: 342195 - DNA, 25 bp, Artificial
  probe
  misc_feature (1)..(25): SEQ ID NO: 2955; WAN024DPF; Start 70; Stop 94
tttgtagataaaggcaattttgaca

SEQ ID NO: 342196 - DNA, 25 bp, Artificial
  probe
  misc_feature (1)..(25): SEQ ID NO: 2955; WAN024DPF; Start 60; Stop 84
gcattttgtctttgtagataaaggc

SEQ ID NO: 342197 - DNA, 25 bp, Artificial
  probe
  misc_feature (1)..(25): SEQ ID NO: 2955; WAN024DPF; Start 72; Stop 96
tgtagataaaggcaattttgacaat

SEQ ID NO: 342198 - DNA, 25 bp, Artificial
  probe
  misc_feature (1)..(25): SEQ ID NO: 2955; WAN024DPF; Start 61; Stop 85
cattttgtctttgtagataaaggca

SEQ ID NO: 342199 - DNA, 25 bp, Artificial
  probe
  misc_feature (1)..(25): SEQ ID NO: 2955; WAN024DPF; Start 59; Stop 83
agcattttgtctttgtagataaagg

SEQ ID NO: 342200 - DNA, 25 bp, Artificial
  probe
  misc_feature (1)..(25): SEQ ID NO: 2955; WAN024DPF; Start 66; Stop 90
tgtctttgtagataaaggcaatttt

SEQ ID NO: 342201 - DNA, 25 bp, Artificial
  probe
  misc_feature (1)..(25): SEQ ID NO: 2955; WAN024DPF; Start 63; Stop 87
ttttgtctttgtagataaaggcaat

SEQ ID NO: 342202 - DNA, 25 bp, Artificial
  probe
  misc_feature (1)..(25): SEQ ID NO: 2955; WAN024DPF; Start 62; Stop 86
attttgtctttgtagataaaggcaa

SEQ ID NO: 342203 - DNA, 25 bp, Artificial
  probe
  misc_feature (1)..(25): SEQ ID NO: 2955; WAN024DPF; Start 69; Stop 93
ctttgtagataaaggcaattttgac

SEQ ID NO: 342204 - DNA, 25 bp, Artificial
  probe
  misc_feature (1)..(25): SEQ ID NO: 2955; WAN024DPF; Start 68; Stop 92
tctttgtagataaaggcaattttga

SEQ ID NO: 342205 - DNA, 25 bp, Artificial
  probe
  misc_feature (1)..(25): SEQ ID NO: 2955; WAN024DPF; Start 67; Stop 91
gtctttgtagataaaggcaattttg

SEQ ID NO: 342206 - DNA, 25 bp, Artificial
  probe
  misc_feature (1)..(25): SEQ ID NO: 2955; WAN024DPF; Start 75; Stop 99
agataaaggcaattttgacaataaa

SEQ ID NO: 342207 - DNA, 25 bp, Artificial
  probe
  misc_feature (1)..(25): SEQ ID NO: 2955; WAN024DPF; Start 73; Stop 97
gtagataaaggcaattttgacaata

SEQ ID NO: 342208 - DNA, 25 bp, Artificial
  probe
  misc_feature (1)..(25): SEQ ID NO: 2955; WAN024DPF; Start 71; Stop 95
ttgtagataaaggcaattttgacaa

SEQ ID NO: 342209 - DNA, 25 bp, Artificial
  probe
  misc_feature (1)..(25): SEQ ID NO: 2955; WAN024DPF; Start 58; Stop 82
aagcattttgtctttgtagataaag

SEQ ID NO: 342210 - DNA, 25 bp, Artificial
  probe
  misc_feature (1)..(25): SEQ ID NO: 2955; WAN024DPF; Start 74; Stop 98
tagataaaggcaattttgacaataa

SEQ ID NO: 342211 - DNA, 25 bp, Artificial
  probe
  misc_feature (1)..(25): SEQ ID NO: 2955; WAN024DPF; Start 57; Stop 81
taagcattttgtctttgtagataaa

SEQ ID NO: 342212 - DNA, 25 bp, Artificial
  probe
  misc_feature (1)..(25): SEQ ID NO: 2955; WAN024DPF; Start 76; Stop 100
gataaaggcaattttgacaataaaa

SEQ ID NO: 342213 - DNA, 25 bp, Artificial
  probe
  misc_feature (1)..(25): SEQ ID NO: 2955; WAN024DPF; Start 56; Stop 80
ataagcattttgtctttgtagataa

SEQ ID NO: 342214 - DNA, 25 bp, Artificial
  probe
  misc_feature (1)..(25): SEQ ID NO: 2955; WAN024DPF; Start 53; Stop 77
tttataagcattttgtctttgtaga

SEQ ID NO: 342215 - DNA, 25 bp, Artificial
  probe
  misc_feature (1)..(25): SEQ ID NO: 2955; WAN024DPF; Start 1; Stop 25
atgtggagtgttgctacaacgaaaa

SEQ ID NO: 342216 - DNA, 25 bp, Artificial
  probe
  misc_feature (1)..(25): SEQ ID NO: 2955; WAN024DPF; Start 54; Stop 78
ttataagcattttgtctttgtagat

SEQ ID NO: 342217 - DNA, 25 bp, Artificial
  probe
  misc_feature (1)..(25): SEQ ID NO: 2956; WAN024FJM; Start 306; Stop 330
taccatacttgctaatcttgacagg

SEQ ID NO: 342218 - DNA, 25 bp, Artificial
  probe
  misc_feature (1)..(25): SEQ ID NO: 2956; WAN024FJM; Start 767; Stop 791
aagtatcagagagtgtcatagaagc

SEQ ID NO: 342219 - DNA, 25 bp, Artificial
  probe
  misc_feature (1)..(25): SEQ ID NO: 2956; WAN024FJM; Start 869; Stop 893
aatggaatcaacctacaacaatagc

SEQ ID NO: 342220 - DNA, 25 bp, Artificial
  probe
  misc_feature (1)..(25): SEQ ID NO: 2956; WAN024FJM; Start 289; Stop 313
gaagtcataccatccgataccatac

SEQ ID NO: 342221 - DNA, 25 bp, Artificial
  probe
  misc_feature (1)..(25): SEQ ID NO: 2956; WAN024FJM; Start 299; Stop 323
catccgataccatacttgctaatct

SEQ ID NO: 342222 - DNA, 25 bp, Artificial
  probe
  misc_feature (1)..(25): SEQ ID NO: 2956; WAN024FJM; Start 302; Stop 326
ccgataccatacttgctaatcttga

SEQ ID NO: 342223 - DNA, 25 bp, Artificial
  probe
  misc_feature (1)..(25): SEQ ID NO: 2956; WAN024FJM; Start 301; Stop 325
tccgataccatacttgctaatcttg

SEQ ID NO: 342224 - DNA, 25 bp, Artificial
  probe
  misc_feature (1)..(25): SEQ ID NO: 2956; WAN024FJM; Start 292; Stop 316
gtcataccatccgataccatacttg

SEQ ID NO: 342225 - DNA, 25 bp, Artificial
  probe
  misc_feature (1)..(25): SEQ ID NO: 2956; WAN024FJM; Start 295; Stop 319
ataccatccgataccatacttgcta

SEQ ID NO: 342226 - DNA, 25 bp, Artificial
  probe
  misc_feature (1)..(25): SEQ ID NO: 2956; WAN024FJM; Start 303; Stop 327
cgataccatacttgctaatcttgac

SEQ ID NO: 342227 - DNA, 25 bp, Artificial
  probe
  misc_feature (1)..(25): SEQ ID NO: 2956; WAN024FJM; Start 300; Stop 324
atccgataccatacttgctaatctt

SEQ ID NO: 342228 - DNA, 25 bp, Artificial
  probe
  misc_feature (1)..(25): SEQ ID NO: 2956; WAN024FJM; Start 296; Stop 320
taccatccgataccatacttgctaa

SEQ ID NO: 342229 - DNA, 25 bp, Artificial
  probe
  misc_feature (1)..(25): SEQ ID NO: 2956; WAN024FJM; Start 298; Stop 322
ccatccgataccatacttgctaatc

SEQ ID NO: 342230 - DNA, 25 bp, Artificial
  probe
  misc_feature (1)..(25): SEQ ID NO: 2956; WAN024FJM; Start 610; Stop 634
gtgctgacattaactggtatgagat

SEQ ID NO: 342231 - DNA, 25 bp, Artificial
  probe
  misc_feature (1)..(25): SEQ ID NO: 2956; WAN024FJM; Start 611; Stop 635
tgctgacattaactggtatgagata

SEQ ID NO: 342232 - DNA, 25 bp, Artificial
  probe
  misc_feature (1)..(25): SEQ ID NO: 2956; WAN024FJM; Start 297; Stop 321
accatccgataccatacttgctaat

SEQ ID NO: 342233 - DNA, 25 bp, Artificial
  probe
  misc_feature (1)..(25): SEQ ID NO: 2956; WAN024FJM; Start 831; Stop 855
gccattgtcaagcgatgattatatt

SEQ ID NO: 342234 - DNA, 25 bp, Artificial
  probe
  misc_feature (1)..(25): SEQ ID NO: 2956; WAN024FJM; Start 269; Stop 293
cagttgataagaagatgaaggaagt

SEQ ID NO: 342235 - DNA, 25 bp, Artificial
  probe
  misc_feature (1)..(25): SEQ ID NO: 2956; WAN024FJM; Start 305; Stop 329
ataccatacttgctaatcttgacag

SEQ ID NO: 342236 - DNA, 25 bp, Artificial
  probe
  misc_feature (1)..(25): SEQ ID NO: 2956; WAN024FJM; Start 291; Stop 315
agtcataccatccgataccatactt

SEQ ID NO: 342237 - DNA, 25 bp, Artificial
  probe
  misc_feature (1)..(25): SEQ ID NO: 2956; WAN024FJM; Start 290; Stop 314
aagtcataccatccgataccatact

SEQ ID NO: 342238 - DNA, 25 bp, Artificial
  probe
  misc_feature (1)..(25): SEQ ID NO: 2956; WAN024FJM; Start 830; Stop 854
agccattgtcaagcgatgattatat

SEQ ID NO: 342239 - DNA, 25 bp, Artificial
  probe
  misc_feature (1)..(25): SEQ ID NO: 2956; WAN024FJM; Start 304; Stop 328
gataccatacttgctaatcttgaca

SEQ ID NO: 342240 - DNA, 25 bp, Artificial
  probe
  misc_feature (1)..(25): SEQ ID NO: 2956; WAN024FJM; Start 270; Stop 294
agttgataagaagatgaaggaagtc

SEQ ID NO: 342241 - DNA, 25 bp, Artificial
  probe
  misc_feature (1)..(25): SEQ ID NO: 2956; WAN024FJM; Start 648; Stop 672
tgccttacaactgaagaatatagac

SEQ ID NO: 342242 - DNA, 25 bp, Artificial
  probe
  misc_feature (1)..(25): SEQ ID NO: 2956; WAN024FJM; Start 646; Stop 670
actgccttacaactgaagaatatag

SEQ ID NO: 342243 - DNA, 25 bp, Artificial
  probe
  misc_feature (1)..(25): SEQ ID NO: 2956; WAN024FJM; Start 597; Stop 621
tgatatggttcttgtgctgacatta

SEQ ID NO: 342244 - DNA, 25 bp, Artificial
  probe
  misc_feature (1)..(25): SEQ ID NO: 2956; WAN024FJM; Start 605; Stop 629
ttcttgtgctgacattaactggtat

SEQ ID NO: 342245 - DNA, 25 bp, Artificial
  probe
  misc_feature (1)..(25): SEQ ID NO: 2956; WAN024FJM; Start 600; Stop 624
tatggttcttgtgctgacattaact

SEQ ID NO: 342246 - DNA, 25 bp, Artificial
  probe
  misc_feature (1)..(25): SEQ ID NO: 2956; WAN024FJM; Start 599; Stop 623
atatggttcttgtgctgacattaac

SEQ ID NO: 342247 - DNA, 25 bp, Artificial
  probe
  misc_feature (1)..(25): SEQ ID NO: 2956; WAN024FJM; Start 598; Stop 622
gatatggttcttgtgctgacattaa

SEQ ID NO: 342248 - DNA, 25 bp, Artificial
  probe
  misc_feature (1)..(25): SEQ ID NO: 2956; WAN024FJM; Start 622; Stop 646
actggtatgagatatggtgagttaa

SEQ ID NO: 342249 - DNA, 25 bp, Artificial
  probe
  misc_feature (1)..(25): SEQ ID NO: 2956; WAN024FJM; Start 619; Stop 643
ttaactggtatgagatatggtgagt

SEQ ID NO: 342250 - DNA, 25 bp, Artificial
  probe
  misc_feature (1)..(25): SEQ ID NO: 2957; WAN024FAR; Start 624; Stop 648
gaacattgaattgccttacttgcta

SEQ ID NO: 342251 - DNA, 25 bp, Artificial
  probe
  misc_feature (1)..(25): SEQ ID NO: 2957; WAN024FAR; Start 625; Stop 649
aacattgaattgccttacttgctac

SEQ ID NO: 342252 - DNA, 25 bp, Artificial
  probe
  misc_feature (1)..(25): SEQ ID NO: 2957; WAN024FAR; Start 621; Stop 645
ctggaacattgaattgccttacttg

SEQ ID NO: 342253 - DNA, 25 bp, Artificial
  probe
  misc_feature (1)..(25): SEQ ID NO: 2957; WAN024FAR; Start 620; Stop 644
tctggaacattgaattgccttactt

SEQ ID NO: 342254 - DNA, 25 bp, Artificial
  probe
  misc_feature (1)..(25): SEQ ID NO: 2957; WAN024FAR; Start 619; Stop 643
ttctggaacattgaattgccttact

SEQ ID NO: 342255 - DNA, 25 bp, Artificial
  probe
  misc_feature (1)..(25): SEQ ID NO: 2957; WAN024FAR; Start 2; Stop 26
tgtggattaggagtagagagactat

SEQ ID NO: 342256 - DNA, 25 bp, Artificial
  probe
  misc_feature (1)..(25): SEQ ID NO: 2957; WAN024FAR; Start 1; Stop 25
atgtggattaggagtagagagacta

SEQ ID NO: 342257 - DNA, 25 bp, Artificial
  probe
  misc_feature (1)..(25): SEQ ID NO: 2957; WAN024FAR; Start 4; Stop 28
tggattaggagtagagagactatga

SEQ ID NO: 342258 - DNA, 25 bp, Artificial
  probe
  misc_feature (1)..(25): SEQ ID NO: 2957; WAN024FAR; Start 3; Stop 27
gtggattaggagtagagagactatg

SEQ ID NO: 342259 - DNA, 25 bp, Artificial
  probe
  misc_feature (1)..(25): SEQ ID NO: 2957; WAN024FAR; Start 628; Stop 652
attgaattgccttacttgctaccaa

SEQ ID NO: 342260 - DNA, 25 bp, Artificial
  probe
  misc_feature (1)..(25): SEQ ID NO: 2957; WAN024FAR; Start 385; Stop 409
atcttcaagcaagtcttcaactacg

SEQ ID NO: 342261 - DNA, 25 bp, Artificial
  probe
  misc_feature (1)..(25): SEQ ID NO: 2957; WAN024FAR; Start 627; Stop 651
cattgaattgccttacttgctacca

SEQ ID NO: 342262 - DNA, 25 bp, Artificial
  probe
  misc_feature (1)..(25): SEQ ID NO: 2957; WAN024FAR; Start 626; Stop 650
acattgaattgccttacttgctacc

SEQ ID NO: 342263 - DNA, 25 bp, Artificial
  probe
  misc_feature (1)..(25): SEQ ID NO: 2957; WAN024FAR; Start 384; Stop 408
gatcttcaagcaagtcttcaactac

SEQ ID NO: 342264 - DNA, 25 bp, Artificial
  probe
  misc_feature (1)..(25): SEQ ID NO: 2957; WAN024FAR; Start 383; Stop 407
tgatcttcaagcaagtcttcaacta

SEQ ID NO: 342265 - DNA, 25 bp, Artificial
  probe
  misc_feature (1)..(25): SEQ ID NO: 2957; WAN024FAR; Start 134; Stop 158
ttaccaactggacaggattgactta

SEQ ID NO: 342266 - DNA, 25 bp, Artificial
  probe
  misc_feature (1)..(25): SEQ ID NO: 2957; WAN024FAR; Start 560; Stop 584
ctattccaactgagattacagaggc

SEQ ID NO: 342267 - DNA, 25 bp, Artificial
  probe
  misc_feature (1)..(25): SEQ ID NO: 2957; WAN024FAR; Start 559; Stop 583
tctattccaactgagattacagagg

SEQ ID NO: 342268 - DNA, 25 bp, Artificial
  probe
  misc_feature (1)..(25): SEQ ID NO: 2957; WAN024FAR; Start 561; Stop 585
tattccaactgagattacagaggca

SEQ ID NO: 342269 - DNA, 25 bp, Artificial
  probe
  misc_feature (1)..(25): SEQ ID NO: 2957; WAN024FAR; Start 5; Stop 29
ggattaggagtagagagactatgaa

SEQ ID NO: 342270 - DNA, 25 bp, Artificial
  probe
  misc_feature (1)..(25): SEQ ID NO: 2957; WAN024FAR; Start 623; Stop 647
ggaacattgaattgccttacttgct

SEQ ID NO: 342271 - DNA, 25 bp, Artificial
  probe
  misc_feature (1)..(25): SEQ ID NO: 2957; WAN024FAR; Start 622; Stop 646
tggaacattgaattgccttacttgc

SEQ ID NO: 342272 - DNA, 25 bp, Artificial
  probe
  misc_feature (1)..(25): SEQ ID NO: 2957; WAN024FAR; Start 618; Stop 642
tttctggaacattgaattgccttac

SEQ ID NO: 342273 - DNA, 25 bp, Artificial
  probe
  misc_feature (1)..(25): SEQ ID NO: 2957; WAN024FAR; Start 93; Stop 117
tttcttctatgtgccgatgtttcaa

SEQ ID NO: 342274 - DNA, 25 bp, Artificial
  probe
  misc_feature (1)..(25): SEQ ID NO: 2957; WAN024FAR; Start 562; Stop 586
attccaactgagattacagaggcag

SEQ ID NO: 342275 - DNA, 25 bp, Artificial
  probe
  misc_feature (1)..(25): SEQ ID NO: 2957; WAN024FAR; Start 573; Stop 597
gattacagaggcagcaaggattgat

SEQ ID NO: 342276 - DNA, 25 bp, Artificial
  probe
  misc_feature (1)..(25): SEQ ID NO: 2957; WAN024FAR; Start 394; Stop 418
caagtcttcaactacggtcttccag

SEQ ID NO: 342277 - DNA, 25 bp, Artificial
  probe
  misc_feature (1)..(25): SEQ ID NO: 2957; WAN024FAR; Start 391; Stop 415
aagcaagtcttcaactacggtcttc

SEQ ID NO: 342278 - DNA, 25 bp, Artificial
  probe
  misc_feature (1)..(25): SEQ ID NO: 2957; WAN024FAR; Start 386; Stop 410
tcttcaagcaagtcttcaactacgg

SEQ ID NO: 342279 - DNA, 25 bp, Artificial
  probe
  misc_feature (1)..(25): SEQ ID NO: 2957; WAN024FAR; Start 94; Stop 118
ttcttctatgtgccgatgtttcaag

SEQ ID NO: 342280 - DNA, 25 bp, Artificial
  probe
  misc_feature (1)..(25): SEQ ID NO: 2957; WAN024FAR; Start 574; Stop 598
attacagaggcagcaaggattgatg

SEQ ID NO: 342281 - DNA, 25 bp, Artificial
  probe
  misc_feature (1)..(25): SEQ ID NO: 2957; WAN024FAR; Start 390; Stop 414
caagcaagtcttcaactacggtctt

SEQ ID NO: 342282 - DNA, 25 bp, Artificial
  probe
  misc_feature (1)..(25): SEQ ID NO: 2957; WAN024FAR; Start 388; Stop 412
ttcaagcaagtcttcaactacggtc

SEQ ID NO: 342283 - DNA, 25 bp, Artificial
  probe
  misc_feature (1)..(25): SEQ ID NO: 2958; WAN024FDX; Start 173; Stop 197
ccaatatggctcatctgaatgtaga

SEQ ID NO: 342284 - DNA, 25 bp, Artificial
  probe
  misc_feature (1)..(25): SEQ ID NO: 2958; WAN024FDX; Start 236; Stop 260
aaagtgtgaagattgcccttgtaat

SEQ ID NO: 342285 - DNA, 25 bp, Artificial
  probe
  misc_feature (1)..(25): SEQ ID NO: 2958; WAN024FDX; Start 174; Stop 198
caatatggctcatctgaatgtagat

SEQ ID NO: 342286 - DNA, 25 bp, Artificial
  probe
  misc_feature (1)..(25): SEQ ID NO: 2958; WAN024FDX; Start 309; Stop 333
agaaatcctcacggtcttggtatag

SEQ ID NO: 342287 - DNA, 25 bp, Artificial
  probe
  misc_feature (1)..(25): SEQ ID NO: 2958; WAN024FDX; Start 175; Stop 199
aatatggctcatctgaatgtagatc

SEQ ID NO: 342288 - DNA, 25 bp, Artificial
  probe
  misc_feature (1)..(25): SEQ ID NO: 2958; WAN024FDX; Start 253; Stop 277
cttgtaatcacggctaaactggttg

SEQ ID NO: 342289 - DNA, 25 bp, Artificial
  probe
  misc_feature (1)..(25): SEQ ID NO: 2958; WAN024FDX; Start 125; Stop 149
aattcgtcattgctatagtccgtcg

SEQ ID NO: 342290 - DNA, 25 bp, Artificial
  probe
  misc_feature (1)..(25): SEQ ID NO: 2958; WAN024FDX; Start 138; Stop 162
tatagtccgtcgtctgaggcataaa

SEQ ID NO: 342291 - DNA, 25 bp, Artificial
  probe
  misc_feature (1)..(25): SEQ ID NO: 2958; WAN024FDX; Start 124; Stop 148
aaattcgtcattgctatagtccgtc

SEQ ID NO: 342292 - DNA, 25 bp, Artificial
  probe
  misc_feature (1)..(25): SEQ ID NO: 2958; WAN024FDX; Start 254; Stop 278
ttgtaatcacggctaaactggttga

SEQ ID NO: 342293 - DNA, 25 bp, Artificial
  probe
  misc_feature (1)..(25): SEQ ID NO: 2958; WAN024FDX; Start 237; Stop 261
aagtgtgaagattgcccttgtaatc

SEQ ID NO: 342294 - DNA, 25 bp, Artificial
  probe
  misc_feature (1)..(25): SEQ ID NO: 2958; WAN024FDX; Start 75; Stop 99
ctacgctggcatctgtttcaaattc

SEQ ID NO: 342295 - DNA, 25 bp, Artificial
  probe
  misc_feature (1)..(25): SEQ ID NO: 2958; WAN024FDX; Start 137; Stop 161
ctatagtccgtcgtctgaggcataa

SEQ ID NO: 342296 - DNA, 25 bp, Artificial
  probe
  misc_feature (1)..(25): SEQ ID NO: 2958; WAN024FDX; Start 252; Stop 276
ccttgtaatcacggctaaactggtt

SEQ ID NO: 342297 - DNA, 25 bp, Artificial
  probe
  misc_feature (1)..(25): SEQ ID NO: 2958; WAN024FDX; Start 187; Stop 211
ctgaatgtagatctgttccaattcc

SEQ ID NO: 342298 - DNA, 25 bp, Artificial
  probe
  misc_feature (1)..(25): SEQ ID NO: 2958; WAN024FDX; Start 123; Stop 147
caaattcgtcattgctatagtccgt

SEQ ID NO: 342299 - DNA, 25 bp, Artificial
  probe
  misc_feature (1)..(25): SEQ ID NO: 2958; WAN024FDX; Start 84; Stop 108
catctgtttcaaattccatcccagc

SEQ ID NO: 342300 - DNA, 25 bp, Artificial
  probe
  misc_feature (1)..(25): SEQ ID NO: 2958; WAN024FDX; Start 83; Stop 107
gcatctgtttcaaattccatcccag

SEQ ID NO: 342301 - DNA, 25 bp, Artificial
  probe
  misc_feature (1)..(25): SEQ ID NO: 2958; WAN024FDX; Start 191; Stop 215
atgtagatctgttccaattccgcaa

SEQ ID NO: 342302 - DNA, 25 bp, Artificial
  probe
  misc_feature (1)..(25): SEQ ID NO: 2958; WAN024FDX; Start 190; Stop 214
aatgtagatctgttccaattccgca

SEQ ID NO: 342303 - DNA, 25 bp, Artificial
  probe
  misc_feature (1)..(25): SEQ ID NO: 2958; WAN024FDX; Start 188; Stop 212
tgaatgtagatctgttccaattccg

SEQ ID NO: 342304 - DNA, 25 bp, Artificial
  probe
  misc_feature (1)..(25): SEQ ID NO: 2958; WAN024FDX; Start 308; Stop 332
aagaaatcctcacggtcttggtata

SEQ ID NO: 342305 - DNA, 25 bp, Artificial
  probe
  misc_feature (1)..(25): SEQ ID NO: 2958; WAN024FDX; Start 182; Stop 206
ctcatctgaatgtagatctgttcca

SEQ ID NO: 342306 - DNA, 25 bp, Artificial
  probe
  misc_feature (1)..(25): SEQ ID NO: 2958; WAN024FDX; Start 177; Stop 201
tatggctcatctgaatgtagatctg

SEQ ID NO: 342307 - DNA, 25 bp, Artificial
  probe
  misc_feature (1)..(25): SEQ ID NO: 2958; WAN024FDX; Start 186; Stop 210
tctgaatgtagatctgttccaattc

SEQ ID NO: 342308 - DNA, 25 bp, Artificial
  probe
  misc_feature (1)..(25): SEQ ID NO: 2958; WAN024FDX; Start 183; Stop 207
tcatctgaatgtagatctgttccaa

SEQ ID NO: 342309 - DNA, 25 bp, Artificial
  probe
  misc_feature (1)..(25): SEQ ID NO: 2958; WAN024FDX; Start 238; Stop 262
agtgtgaagattgcccttgtaatca

SEQ ID NO: 342310 - DNA, 25 bp, Artificial
  probe
  misc_feature (1)..(25): SEQ ID NO: 2958; WAN024FDX; Start 54; Stop 78
catcgtcaaagaaggtcaaggctac

SEQ ID NO: 342311 - DNA, 25 bp, Artificial
  probe
  misc_feature (1)..(25): SEQ ID NO: 2958; WAN024FDX; Start 181; Stop 205
gctcatctgaatgtagatctgttcc

SEQ ID NO: 342312 - DNA, 25 bp, Artificial
  probe
  misc_feature (1)..(25): SEQ ID NO: 2958; WAN024FDX; Start 180; Stop 204
ggctcatctgaatgtagatctgttc

SEQ ID NO: 342313 - DNA, 25 bp, Artificial
  probe
  misc_feature (1)..(25): SEQ ID NO: 2958; WAN024FDX; Start 176; Stop 200
atatggctcatctgaatgtagatct

SEQ ID NO: 342314 - DNA, 25 bp, Artificial
  probe
  misc_feature (1)..(25): SEQ ID NO: 2958; WAN024FDX; Start 235; Stop 259
aaaagtgtgaagattgcccttgtaa

SEQ ID NO: 342315 - DNA, 25 bp, Artificial
  probe
  misc_feature (1)..(25): SEQ ID NO: 2958; WAN024FDX; Start 80; Stop 104
ctggcatctgtttcaaattccatcc

SEQ ID NO: 342316 - DNA, 25 bp, Artificial
  probe
  misc_feature (1)..(25): SEQ ID NO: 2959; WAN024C9Z; Start 83; Stop 107
tcattcatgtagagacgcatctgag

SEQ ID NO: 342317 - DNA, 25 bp, Artificial
  probe
  misc_feature (1)..(25): SEQ ID NO: 2959; WAN024C9Z; Start 82; Stop 106
ctcattcatgtagagacgcatctga

SEQ ID NO: 342318 - DNA, 25 bp, Artificial
  probe
  misc_feature (1)..(25): SEQ ID NO: 2959; WAN024C9Z; Start 85; Stop 109
attcatgtagagacgcatctgagtg

SEQ ID NO: 342319 - DNA, 25 bp, Artificial
  probe
  misc_feature (1)..(25): SEQ ID NO: 2959; WAN024C9Z; Start 84; Stop 108
cattcatgtagagacgcatctgagt

SEQ ID NO: 342320 - DNA, 25 bp, Artificial
  probe
  misc_feature (1)..(25): SEQ ID NO: 2959; WAN024C9Z; Start 114; Stop 138
tgtaatcgctattggtttcatggta

SEQ ID NO: 342321 - DNA, 25 bp, Artificial
  probe
  misc_feature (1)..(25): SEQ ID NO: 2959; WAN024C9Z; Start 111; Stop 135
gagtgtaatcgctattggtttcatg

SEQ ID NO: 342322 - DNA, 25 bp, Artificial
  probe
  misc_feature (1)..(25): SEQ ID NO: 2959; WAN024C9Z; Start 115; Stop 139
gtaatcgctattggtttcatggtaa

SEQ ID NO: 342323 - DNA, 25 bp, Artificial
  probe
  misc_feature (1)..(25): SEQ ID NO: 2959; WAN024C9Z; Start 116; Stop 140
taatcgctattggtttcatggtaac

SEQ ID NO: 342324 - DNA, 25 bp, Artificial
  probe
  misc_feature (1)..(25): SEQ ID NO: 2959; WAN024C9Z; Start 112; Stop 136
agtgtaatcgctattggtttcatgg

SEQ ID NO: 342325 - DNA, 25 bp, Artificial
  probe
  misc_feature (1)..(25): SEQ ID NO: 2959; WAN024C9Z; Start 113; Stop 137
gtgtaatcgctattggtttcatggt

SEQ ID NO: 342326 - DNA, 25 bp, Artificial
  probe
  misc_feature (1)..(25): SEQ ID NO: 2959; WAN024C9Z; Start 190; Stop 214
cacgccaccaaattcattctcatag

SEQ ID NO: 342327 - DNA, 25 bp, Artificial
  probe
  misc_feature (1)..(25): SEQ ID NO: 2959; WAN024C9Z; Start 195; Stop 219
caccaaattcattctcatagtggaa

SEQ ID NO: 342328 - DNA, 25 bp, Artificial
  probe
  misc_feature (1)..(25): SEQ ID NO: 2959; WAN024C9Z; Start 191; Stop 215
acgccaccaaattcattctcatagt

SEQ ID NO: 342329 - DNA, 25 bp, Artificial
  probe
  misc_feature (1)..(25): SEQ ID NO: 2959; WAN024C9Z; Start 117; Stop 141
aatcgctattggtttcatggtaacg

SEQ ID NO: 342330 - DNA, 25 bp, Artificial
  probe
  misc_feature (1)..(25): SEQ ID NO: 2959; WAN024C9Z; Start 74; Stop 98
caggtcagctcattcatgtagagac

SEQ ID NO: 342331 - DNA, 25 bp, Artificial
  probe
  misc_feature (1)..(25): SEQ ID NO: 2959; WAN024C9Z; Start 196; Stop 220
accaaattcattctcatagtggaaa

SEQ ID NO: 342332 - DNA, 25 bp, Artificial
  probe
  misc_feature (1)..(25): SEQ ID NO: 2959; WAN024C9Z; Start 128; Stop 152
gtttcatggtaacgacgtttgatat

SEQ ID NO: 342333 - DNA, 25 bp, Artificial
  probe
  misc_feature (1)..(25): SEQ ID NO: 2959; WAN024C9Z; Start 129; Stop 153
tttcatggtaacgacgtttgatatt

SEQ ID NO: 342334 - DNA, 25 bp, Artificial
  probe
  misc_feature (1)..(25): SEQ ID NO: 2959; WAN024C9Z; Start 123; Stop 147
tattggtttcatggtaacgacgttt

SEQ ID NO: 342335 - DNA, 25 bp, Artificial
  probe
  misc_feature (1)..(25): SEQ ID NO: 2959; WAN024C9Z; Start 81; Stop 105
gctcattcatgtagagacgcatctg

SEQ ID NO: 342336 - DNA, 25 bp, Artificial
  probe
  misc_feature (1)..(25): SEQ ID NO: 2959; WAN024C9Z; Start 134; Stop 158
tggtaacgacgtttgatattattga

SEQ ID NO: 342337 - DNA, 25 bp, Artificial
  probe
  misc_feature (1)..(25): SEQ ID NO: 2959; WAN024C9Z; Start 46; Stop 70
attgagacgatagccttgacaggtt

SEQ ID NO: 342338 - DNA, 25 bp, Artificial
  probe
  misc_feature (1)..(25): SEQ ID NO: 2959; WAN024C9Z; Start 130; Stop 154
ttcatggtaacgacgtttgatatta

SEQ ID NO: 342339 - DNA, 25 bp, Artificial
  probe
  misc_feature (1)..(25): SEQ ID NO: 2959; WAN024C9Z; Start 122; Stop 146
ctattggtttcatggtaacgacgtt

SEQ ID NO: 342340 - DNA, 25 bp, Artificial
  probe
  misc_feature (1)..(25): SEQ ID NO: 2959; WAN024C9Z; Start 192; Stop 216
cgccaccaaattcattctcatagtg

SEQ ID NO: 342341 - DNA, 25 bp, Artificial
  probe
  misc_feature (1)..(25): SEQ ID NO: 2959; WAN024C9Z; Start 143; Stop 167
cgtttgatattattgataactccct

SEQ ID NO: 342342 - DNA, 25 bp, Artificial
  probe
  misc_feature (1)..(25): SEQ ID NO: 2959; WAN024C9Z; Start 131; Stop 155
tcatggtaacgacgtttgatattat

SEQ ID NO: 342343 - DNA, 25 bp, Artificial
  probe
  misc_feature (1)..(25): SEQ ID NO: 2959; WAN024C9Z; Start 127; Stop 151
ggtttcatggtaacgacgtttgata

SEQ ID NO: 342344 - DNA, 25 bp, Artificial
  probe
  misc_feature (1)..(25): SEQ ID NO: 2959; WAN024C9Z; Start 203; Stop 227
tcattctcatagtggaaatggaatt

SEQ ID NO: 342345 - DNA, 25 bp, Artificial
  probe
  misc_feature (1)..(25): SEQ ID NO: 2959; WAN024C9Z; Start 202; Stop 226
ttcattctcatagtggaaatggaat

SEQ ID NO: 342346 - DNA, 25 bp, Artificial
  probe
  misc_feature (1)..(25): SEQ ID NO: 2959; WAN024C9Z; Start 201; Stop 225
attcattctcatagtggaaatggaa

SEQ ID NO: 342347 - DNA, 25 bp, Artificial
  probe
  misc_feature (1)..(25): SEQ ID NO: 2959; WAN024C9Z; Start 200; Stop 224
aattcattctcatagtggaaatgga

SEQ ID NO: 342348 - DNA, 25 bp, Artificial
  probe
  misc_feature (1)..(25): SEQ ID NO: 2959; WAN024C9Z; Start 156; Stop 180
tgataactccctcaaacggaatgtc

SEQ ID NO: 342349 - DNA, 25 bp, Artificial
  probe
  misc_feature (1)..(25): SEQ ID NO: 2960; WAN024CXD; Start 913; Stop 937
atattactgcttgacgatgtgatga

SEQ ID NO: 342350 - DNA, 25 bp, Artificial
  probe
  misc_feature (1)..(25): SEQ ID NO: 2960; WAN024CXD; Start 3; Stop 27
gtggctacaacatctatctctcaag

SEQ ID NO: 342351 - DNA, 25 bp, Artificial
  probe
  misc_feature (1)..(25): SEQ ID NO: 2960; WAN024CXD; Start 914; Stop 938
tattactgcttgacgatgtgatgag

SEQ ID NO: 342352 - DNA, 25 bp, Artificial
  probe
  misc_feature (1)..(25): SEQ ID NO: 2960; WAN024CXD; Start 6; Stop 30
gctacaacatctatctctcaagact

SEQ ID NO: 342353 - DNA, 25 bp, Artificial
  probe
  misc_feature (1)..(25): SEQ ID NO: 2960; WAN024CXD; Start 5; Stop 29
ggctacaacatctatctctcaagac

SEQ ID NO: 342354 - DNA, 25 bp, Artificial
  probe
  misc_feature (1)..(25): SEQ ID NO: 2960; WAN024CXD; Start 547; Stop 571
gttgattatggatgtcgtgtaatga

SEQ ID NO: 342355 - DNA, 25 bp, Artificial
  probe
  misc_feature (1)..(25): SEQ ID NO: 2960; WAN024CXD; Start 4; Stop 28
tggctacaacatctatctctcaaga

SEQ ID NO: 342356 - DNA, 25 bp, Artificial
  probe
  misc_feature (1)..(25): SEQ ID NO: 2960; WAN024CXD; Start 543; Stop 567
gctagttgattatggatgtcgtgta

SEQ ID NO: 342357 - DNA, 25 bp, Artificial
  probe
  misc_feature (1)..(25): SEQ ID NO: 2960; WAN024CXD; Start 546; Stop 570
agttgattatggatgtcgtgtaatg

SEQ ID NO: 342358 - DNA, 25 bp, Artificial
  probe
  misc_feature (1)..(25): SEQ ID NO: 2960; WAN024CXD; Start 548; Stop 572
ttgattatggatgtcgtgtaatgaa

SEQ ID NO: 342359 - DNA, 25 bp, Artificial
  probe
  misc_feature (1)..(25): SEQ ID NO: 2960; WAN024CXD; Start 1050; Stop 1074
aagtatcttcactattcaggatggt

SEQ ID NO: 342360 - DNA, 25 bp, Artificial
  probe
  misc_feature (1)..(25): SEQ ID NO: 2960; WAN024CXD; Start 549; Stop 573
tgattatggatgtcgtgtaatgaat

SEQ ID NO: 342361 - DNA, 25 bp, Artificial
  probe
  misc_feature (1)..(25): SEQ ID NO: 2960; WAN024CXD; Start 544; Stop 568
ctagttgattatggatgtcgtgtaa

SEQ ID NO: 342362 - DNA, 25 bp, Artificial
  probe
  misc_feature (1)..(25): SEQ ID NO: 2960; WAN024CXD; Start 645; Stop 669
cgaagagttgtcaatatcctatcaa

SEQ ID NO: 342363 - DNA, 25 bp, Artificial
  probe
  misc_feature (1)..(25): SEQ ID NO: 2960; WAN024CXD; Start 551; Stop 575
attatggatgtcgtgtaatgaatca

SEQ ID NO: 342364 - DNA, 25 bp, Artificial
  probe
  misc_feature (1)..(25): SEQ ID NO: 2960; WAN024CXD; Start 2; Stop 26
tgtggctacaacatctatctctcaa

SEQ ID NO: 342365 - DNA, 25 bp, Artificial
  probe
  misc_feature (1)..(25): SEQ ID NO: 2960; WAN024CXD; Start 922; Stop 946
cttgacgatgtgatgagtgaacttg

SEQ ID NO: 342366 - DNA, 25 bp, Artificial
  probe
  misc_feature (1)..(25): SEQ ID NO: 2960; WAN024CXD; Start 1051; Stop 1075
agtatcttcactattcaggatggta

SEQ ID NO: 342367 - DNA, 25 bp, Artificial
  probe
  misc_feature (1)..(25): SEQ ID NO: 2960; WAN024CXD; Start 553; Stop 577
tatggatgtcgtgtaatgaatcacc

SEQ ID NO: 342368 - DNA, 25 bp, Artificial
  probe
  misc_feature (1)..(25): SEQ ID NO: 2960; WAN024CXD; Start 552; Stop 576
ttatggatgtcgtgtaatgaatcac

SEQ ID NO: 342369 - DNA, 25 bp, Artificial
  probe
  misc_feature (1)..(25): SEQ ID NO: 2960; WAN024CXD; Start 545; Stop 569
tagttgattatggatgtcgtgtaat

SEQ ID NO: 342370 - DNA, 25 bp, Artificial
  probe
  misc_feature (1)..(25): SEQ ID NO: 2960; WAN024CXD; Start 928; Stop 952
gatgtgatgagtgaacttgacaaca

SEQ ID NO: 342371 - DNA, 25 bp, Artificial
  probe
  misc_feature (1)..(25): SEQ ID NO: 2960; WAN024CXD; Start 1052; Stop 1076
gtatcttcactattcaggatggtaa

SEQ ID NO: 342372 - DNA, 25 bp, Artificial
  probe
  misc_feature (1)..(25): SEQ ID NO: 2960; WAN024CXD; Start 923; Stop 947
ttgacgatgtgatgagtgaacttga

SEQ ID NO: 342373 - DNA, 25 bp, Artificial
  probe
  misc_feature (1)..(25): SEQ ID NO: 2960; WAN024CXD; Start 640; Stop 664
cagatcgaagagttgtcaatatcct

SEQ ID NO: 342374 - DNA, 25 bp, Artificial
  probe
  misc_feature (1)..(25): SEQ ID NO: 2960; WAN024CXD; Start 639; Stop 663
tcagatcgaagagttgtcaatatcc

SEQ ID NO: 342375 - DNA, 25 bp, Artificial
  probe
  misc_feature (1)..(25): SEQ ID NO: 2960; WAN024CXD; Start 644; Stop 668
tcgaagagttgtcaatatcctatca

SEQ ID NO: 342376 - DNA, 25 bp, Artificial
  probe
  misc_feature (1)..(25): SEQ ID NO: 2960; WAN024CXD; Start 7; Stop 31
ctacaacatctatctctcaagactt

SEQ ID NO: 342377 - DNA, 25 bp, Artificial
  probe
  misc_feature (1)..(25): SEQ ID NO: 2960; WAN024CXD; Start 653; Stop 677
tgtcaatatcctatcaatcttctgt

SEQ ID NO: 342378 - DNA, 25 bp, Artificial
  probe
  misc_feature (1)..(25): SEQ ID NO: 2960; WAN024CXD; Start 634; Stop 658
tctaatcagatcgaagagttgtcaa

SEQ ID NO: 342379 - DNA, 25 bp, Artificial
  probe
  misc_feature (1)..(25): SEQ ID NO: 2960; WAN024CXD; Start 915; Stop 939
attactgcttgacgatgtgatgagt

SEQ ID NO: 342380 - DNA, 25 bp, Artificial
  probe
  misc_feature (1)..(25): SEQ ID NO: 2960; WAN024CXD; Start 333; Stop 357
gaatgttgtcttatttgctcctgaa

SEQ ID NO: 342381 - DNA, 25 bp, Artificial
  probe
  misc_feature (1)..(25): SEQ ID NO: 2960; WAN024CXD; Start 331; Stop 355
atgaatgttgtcttatttgctcctg

SEQ ID NO: 342382 - DNA, 25 bp, Artificial
  probe
  misc_feature (1)..(25): SEQ ID NO: 2961; WAN024DBM; Start 176; Stop 200
gagcggataacgatattagagatga

SEQ ID NO: 342383 - DNA, 25 bp, Artificial
  probe
  misc_feature (1)..(25): SEQ ID NO: 2961; WAN024DBM; Start 175; Stop 199
agagcggataacgatattagagatg

SEQ ID NO: 342384 - DNA, 25 bp, Artificial
  probe
  misc_feature (1)..(25): SEQ ID NO: 2961; WAN024DBM; Start 174; Stop 198
cagagcggataacgatattagagat

SEQ ID NO: 342385 - DNA, 25 bp, Artificial
  probe
  misc_feature (1)..(25): SEQ ID NO: 2961; WAN024DBM; Start 172; Stop 196
tacagagcggataacgatattagag

SEQ ID NO: 342386 - DNA, 25 bp, Artificial
  probe
  misc_feature (1)..(25): SEQ ID NO: 2961; WAN024DBM; Start 171; Stop 195
ctacagagcggataacgatattaga

SEQ ID NO: 342387 - DNA, 25 bp, Artificial
  probe
  misc_feature (1)..(25): SEQ ID NO: 2961; WAN024DBM; Start 177; Stop 201
agcggataacgatattagagatgaa

SEQ ID NO: 342388 - DNA, 25 bp, Artificial
  probe
  misc_feature (1)..(25): SEQ ID NO: 2961; WAN024DBM; Start 173; Stop 197
acagagcggataacgatattagaga

SEQ ID NO: 342389 - DNA, 25 bp, Artificial
  probe
  misc_feature (1)..(25): SEQ ID NO: 2961; WAN024DBM; Start 151; Stop 175
ctgactgagatgattaatggctaca

SEQ ID NO: 342390 - DNA, 25 bp, Artificial
  probe
  misc_feature (1)..(25): SEQ ID NO: 2961; WAN024DBM; Start 150; Stop 174
tctgactgagatgattaatggctac

SEQ ID NO: 342391 - DNA, 25 bp, Artificial
  probe
  misc_feature (1)..(25): SEQ ID NO: 2961; WAN024DBM; Start 149; Stop 173
ctctgactgagatgattaatggcta

SEQ ID NO: 342392 - DNA, 25 bp, Artificial
  probe
  misc_feature (1)..(25): SEQ ID NO: 2961; WAN024DBM; Start 147; Stop 171
aactctgactgagatgattaatggc

SEQ ID NO: 342393 - DNA, 25 bp, Artificial
  probe
  misc_feature (1)..(25): SEQ ID NO: 2961; WAN024DBM; Start 154; Stop 178
actgagatgattaatggctacagag

SEQ ID NO: 342394 - DNA, 25 bp, Artificial
  probe
  misc_feature (1)..(25): SEQ ID NO: 2961; WAN024DBM; Start 153; Stop 177
gactgagatgattaatggctacaga

SEQ ID NO: 342395 - DNA, 25 bp, Artificial
  probe
  misc_feature (1)..(25): SEQ ID NO: 2961; WAN024DBM; Start 152; Stop 176
tgactgagatgattaatggctacag

SEQ ID NO: 342396 - DNA, 25 bp, Artificial
  probe
  misc_feature (1)..(25): SEQ ID NO: 2961; WAN024DBM; Start 148; Stop 172
actctgactgagatgattaatggct

SEQ ID NO: 342397 - DNA, 25 bp, Artificial
  probe
  misc_feature (1)..(25): SEQ ID NO: 2961; WAN024DBM; Start 178; Stop 202
gcggataacgatattagagatgaaa

SEQ ID NO: 342398 - DNA, 25 bp, Artificial
  probe
  misc_feature (1)..(25): SEQ ID NO: 2961; WAN024DBM; Start 170; Stop 194
gctacagagcggataacgatattag

SEQ ID NO: 342399 - DNA, 25 bp, Artificial
  probe
  misc_feature (1)..(25): SEQ ID NO: 2961; WAN024DBM; Start 250; Stop 274
caacaaggaaatacaatggaatctt

SEQ ID NO: 342400 - DNA, 25 bp, Artificial
  probe
  misc_feature (1)..(25): SEQ ID NO: 2961; WAN024DBM; Start 169; Stop 193
ggctacagagcggataacgatatta

SEQ ID NO: 342401 - DNA, 25 bp, Artificial
  probe
  misc_feature (1)..(25): SEQ ID NO: 2961; WAN024DBM; Start 155; Stop 179
ctgagatgattaatggctacagagc

SEQ ID NO: 342402 - DNA, 25 bp, Artificial
  probe
  misc_feature (1)..(25): SEQ ID NO: 2961; WAN024DBM; Start 248; Stop 272
accaacaaggaaatacaatggaatc

SEQ ID NO: 342403 - DNA, 25 bp, Artificial
  probe
  misc_feature (1)..(25): SEQ ID NO: 2961; WAN024DBM; Start 162; Stop 186
gattaatggctacagagcggataac

SEQ ID NO: 342404 - DNA, 25 bp, Artificial
  probe
  misc_feature (1)..(25): SEQ ID NO: 2961; WAN024DBM; Start 249; Stop 273
ccaacaaggaaatacaatggaatct

SEQ ID NO: 342405 - DNA, 25 bp, Artificial
  probe
  misc_feature (1)..(25): SEQ ID NO: 2961; WAN024DBM; Start 160; Stop 184
atgattaatggctacagagcggata

SEQ ID NO: 342406 - DNA, 25 bp, Artificial
  probe
  misc_feature (1)..(25): SEQ ID NO: 2961; WAN024DBM; Start 161; Stop 185
tgattaatggctacagagcggataa

SEQ ID NO: 342407 - DNA, 25 bp, Artificial
  probe
  misc_feature (1)..(25): SEQ ID NO: 2961; WAN024DBM; Start 252; Stop 276
acaaggaaatacaatggaatcttac

SEQ ID NO: 342408 - DNA, 25 bp, Artificial
  probe
  misc_feature (1)..(25): SEQ ID NO: 2961; WAN024DBM; Start 146; Stop 170
aaactctgactgagatgattaatgg

SEQ ID NO: 342409 - DNA, 25 bp, Artificial
  probe
  misc_feature (1)..(25): SEQ ID NO: 2961; WAN024DBM; Start 253; Stop 277
caaggaaatacaatggaatcttact

SEQ ID NO: 342410 - DNA, 25 bp, Artificial
  probe
  misc_feature (1)..(25): SEQ ID NO: 2961; WAN024DBM; Start 159; Stop 183
gatgattaatggctacagagcggat

SEQ ID NO: 342411 - DNA, 25 bp, Artificial
  probe
  misc_feature (1)..(25): SEQ ID NO: 2961; WAN024DBM; Start 156; Stop 180
tgagatgattaatggctacagagcg

SEQ ID NO: 342412 - DNA, 25 bp, Artificial
  probe
  misc_feature (1)..(25): SEQ ID NO: 2961; WAN024DBM; Start 16; Stop 40
ttatggaatgctaagccggatacac

SEQ ID NO: 342413 - DNA, 25 bp, Artificial
  probe
  misc_feature (1)..(25): SEQ ID NO: 2961; WAN024DBM; Start 251; Stop 275
aacaaggaaatacaatggaatctta

SEQ ID NO: 342414 - DNA, 25 bp, Artificial
  probe
  misc_feature (1)..(25): SEQ ID NO: 2961; WAN024DBM; Start 179; Stop 203
cggataacgatattagagatgaaat

SEQ ID NO: 342415 - DNA, 25 bp, Artificial
  probe
  misc_feature (1)..(25): SEQ ID NO: 2962; WAN024EWS; Start 362; Stop 386
attctcaggcagattatctactctt

SEQ ID NO: 342416 - DNA, 25 bp, Artificial
  probe
  misc_feature (1)..(25): SEQ ID NO: 2962; WAN024EWS; Start 361; Stop 385
aattctcaggcagattatctactct

SEQ ID NO: 342417 - DNA, 25 bp, Artificial
  probe
  misc_feature (1)..(25): SEQ ID NO: 2962; WAN024EWS; Start 293; Stop 317
atttatttgagaatttgccttgtgc

SEQ ID NO: 342418 - DNA, 25 bp, Artificial
  probe
  misc_feature (1)..(25): SEQ ID NO: 2962; WAN024EWS; Start 294; Stop 318
tttatttgagaatttgccttgtgcc

SEQ ID NO: 342419 - DNA, 25 bp, Artificial
  probe
  misc_feature (1)..(25): SEQ ID NO: 2962; WAN024EWS; Start 364; Stop 388
tctcaggcagattatctactctttg

SEQ ID NO: 342420 - DNA, 25 bp, Artificial
  probe
  misc_feature (1)..(25): SEQ ID NO: 2962; WAN024EWS; Start 367; Stop 391
caggcagattatctactctttgatg

SEQ ID NO: 342421 - DNA, 25 bp, Artificial
  probe
  misc_feature (1)..(25): SEQ ID NO: 2962; WAN024EWS; Start 365; Stop 389
ctcaggcagattatctactctttga

SEQ ID NO: 342422 - DNA, 25 bp, Artificial
  probe
  misc_feature (1)..(25): SEQ ID NO: 2962; WAN024EWS; Start 363; Stop 387
ttctcaggcagattatctactcttt

SEQ ID NO: 342423 - DNA, 25 bp, Artificial
  probe
  misc_feature (1)..(25): SEQ ID NO: 2962; WAN024EWS; Start 295; Stop 319
ttatttgagaatttgccttgtgcca

SEQ ID NO: 342424 - DNA, 25 bp, Artificial
  probe
  misc_feature (1)..(25): SEQ ID NO: 2962; WAN024EWS; Start 366; Stop 390
tcaggcagattatctactctttgat

SEQ ID NO: 342425 - DNA, 25 bp, Artificial
  probe
  misc_feature (1)..(25): SEQ ID NO: 2962; WAN024EWS; Start 291; Stop 315
tgatttatttgagaatttgccttgt

SEQ ID NO: 342426 - DNA, 25 bp, Artificial
  probe
  misc_feature (1)..(25): SEQ ID NO: 2962; WAN024EWS; Start 292; Stop 316
gatttatttgagaatttgccttgtg

SEQ ID NO: 342427 - DNA, 25 bp, Artificial
  probe
  misc_feature (1)..(25): SEQ ID NO: 2962; WAN024EWS; Start 296; Stop 320
tatttgagaatttgccttgtgccag

SEQ ID NO: 342428 - DNA, 25 bp, Artificial
  probe
  misc_feature (1)..(25): SEQ ID NO: 2962; WAN024EWS; Start 472; Stop 496
ggtggccttaatgaagataatgtag

SEQ ID NO: 342429 - DNA, 25 bp, Artificial
  probe
  misc_feature (1)..(25): SEQ ID NO: 2962; WAN024EWS; Start 473; Stop 497
gtggccttaatgaagataatgtagt

SEQ ID NO: 342430 - DNA, 25 bp, Artificial
  probe
  misc_feature (1)..(25): SEQ ID NO: 2962; WAN024EWS; Start 192; Stop 216
aaaggttggagtatttgtttcacca

SEQ ID NO: 342431 - DNA, 25 bp, Artificial
  probe
  misc_feature (1)..(25): SEQ ID NO: 2962; WAN024EWS; Start 21; Stop 45
gagttgcagattgacaaaggttaaa

SEQ ID NO: 342432 - DNA, 25 bp, Artificial
  probe
  misc_feature (1)..(25): SEQ ID NO: 2962; WAN024EWS; Start 471; Stop 495
aggtggccttaatgaagataatgta

SEQ ID NO: 342433 - DNA, 25 bp, Artificial
  probe
  misc_feature (1)..(25): SEQ ID NO: 2962; WAN024EWS; Start 470; Stop 494
caggtggccttaatgaagataatgt

SEQ ID NO: 342434 - DNA, 25 bp, Artificial
  probe
  misc_feature (1)..(25): SEQ ID NO: 2962; WAN024EWS; Start 202; Stop 226
gtatttgtttcaccaagtcgggtag

SEQ ID NO: 342435 - DNA, 25 bp, Artificial
  probe
  misc_feature (1)..(25): SEQ ID NO: 2962; WAN024EWS; Start 300; Stop 324
tgagaatttgccttgtgccagtatt

SEQ ID NO: 342436 - DNA, 25 bp, Artificial
  probe
  misc_feature (1)..(25): SEQ ID NO: 2962; WAN024EWS; Start 299; Stop 323
ttgagaatttgccttgtgccagtat

SEQ ID NO: 342437 - DNA, 25 bp, Artificial
  probe
  misc_feature (1)..(25): SEQ ID NO: 2962; WAN024EWS; Start 203; Stop 227
tatttgtttcaccaagtcgggtaga

SEQ ID NO: 342438 - DNA, 25 bp, Artificial
  probe
  misc_feature (1)..(25): SEQ ID NO: 2962; WAN024EWS; Start 201; Stop 225
agtatttgtttcaccaagtcgggta

SEQ ID NO: 342439 - DNA, 25 bp, Artificial
  probe
  misc_feature (1)..(25): SEQ ID NO: 2962; WAN024EWS; Start 298; Stop 322
tttgagaatttgccttgtgccagta

SEQ ID NO: 342440 - DNA, 25 bp, Artificial
  probe
  misc_feature (1)..(25): SEQ ID NO: 2962; WAN024EWS; Start 132; Stop 156
aagacaggtgactttagaagaggca

SEQ ID NO: 342441 - DNA, 25 bp, Artificial
  probe
  misc_feature (1)..(25): SEQ ID NO: 2962; WAN024EWS; Start 373; Stop 397
gattatctactctttgatgcccctg

SEQ ID NO: 342442 - DNA, 25 bp, Artificial
  probe
  misc_feature (1)..(25): SEQ ID NO: 2962; WAN024EWS; Start 427; Stop 451
ggtcaactggatacgactggactag

SEQ ID NO: 342443 - DNA, 25 bp, Artificial
  probe
  misc_feature (1)..(25): SEQ ID NO: 2962; WAN024EWS; Start 374; Stop 398
attatctactctttgatgcccctgt

SEQ ID NO: 342444 - DNA, 25 bp, Artificial
  probe
  misc_feature (1)..(25): SEQ ID NO: 2962; WAN024EWS; Start 368; Stop 392
aggcagattatctactctttgatgc

SEQ ID NO: 342445 - DNA, 25 bp, Artificial
  probe
  misc_feature (1)..(25): SEQ ID NO: 2962; WAN024EWS; Start 474; Stop 498
tggccttaatgaagataatgtagta

SEQ ID NO: 342446 - DNA, 25 bp, Artificial
  probe
  misc_feature (1)..(25): SEQ ID NO: 2962; WAN024EWS; Start 469; Stop 493
gcaggtggccttaatgaagataatg

SEQ ID NO: 342447 - DNA, 25 bp, Artificial
  probe
  misc_feature (1)..(25): SEQ ID NO: 2962; WAN024EWS; Start 301; Stop 325
gagaatttgccttgtgccagtattc

SEQ ID NO: 342448 - DNA, 25 bp, Artificial
  probe
  misc_feature (1)..(25): SEQ ID NO: 2963; WAN024GJ3; Start 1; Stop 25
atgtgtaggattggaagagcttcta

SEQ ID NO: 342449 - DNA, 25 bp, Artificial
  probe
  misc_feature (1)..(25): SEQ ID NO: 2963; WAN024GJ3; Start 56; Stop 80
caaagatgtcttccatacctgaaac

SEQ ID NO: 342450 - DNA, 25 bp, Artificial
  probe
  misc_feature (1)..(25): SEQ ID NO: 2963; WAN024GJ3; Start 57; Stop 81
aaagatgtcttccatacctgaaacg

SEQ ID NO: 342451 - DNA, 25 bp, Artificial
  probe
  misc_feature (1)..(25): SEQ ID NO: 2963; WAN024GJ3; Start 55; Stop 79
acaaagatgtcttccatacctgaaa

SEQ ID NO: 342452 - DNA, 25 bp, Artificial
  probe
  misc_feature (1)..(25): SEQ ID NO: 2963; WAN024GJ3; Start 168; Stop 192
agttgtaccgtcaagtttagaaagg

SEQ ID NO: 342453 - DNA, 25 bp, Artificial
  probe
  misc_feature (1)..(25): SEQ ID NO: 2963; WAN024GJ3; Start 167; Stop 191
tagttgtaccgtcaagtttagaaag

SEQ ID NO: 342454 - DNA, 25 bp, Artificial
  probe
  misc_feature (1)..(25): SEQ ID NO: 2963; WAN024GJ3; Start 206; Stop 230
caaccttaactgtaccacggaagac

SEQ ID NO: 342455 - DNA, 25 bp, Artificial
  probe
  misc_feature (1)..(25): SEQ ID NO: 2963; WAN024GJ3; Start 166; Stop 190
ttagttgtaccgtcaagtttagaaa

SEQ ID NO: 342456 - DNA, 25 bp, Artificial
  probe
  misc_feature (1)..(25): SEQ ID NO: 2963; WAN024GJ3; Start 165; Stop 189
tttagttgtaccgtcaagtttagaa

SEQ ID NO: 342457 - DNA, 25 bp, Artificial
  probe
  misc_feature (1)..(25): SEQ ID NO: 2963; WAN024GJ3; Start 9; Stop 33
gattggaagagcttctactgcatct

SEQ ID NO: 342458 - DNA, 25 bp, Artificial
  probe
  misc_feature (1)..(25): SEQ ID NO: 2963; WAN024GJ3; Start 169; Stop 193
gttgtaccgtcaagtttagaaaggg

SEQ ID NO: 342459 - DNA, 25 bp, Artificial
  probe
  misc_feature (1)..(25): SEQ ID NO: 2963; WAN024GJ3; Start 10; Stop 34
attggaagagcttctactgcatctg

SEQ ID NO: 342460 - DNA, 25 bp, Artificial
  probe
  misc_feature (1)..(25): SEQ ID NO: 2963; WAN024GJ3; Start 4; Stop 28
tgtaggattggaagagcttctactg

SEQ ID NO: 342461 - DNA, 25 bp, Artificial
  probe
  misc_feature (1)..(25): SEQ ID NO: 2963; WAN024GJ3; Start 3; Stop 27
gtgtaggattggaagagcttctact

SEQ ID NO: 342462 - DNA, 25 bp, Artificial
  probe
  misc_feature (1)..(25): SEQ ID NO: 2963; WAN024GJ3; Start 122; Stop 146
gttccaaaccaaagaaaccgaagag

SEQ ID NO: 342463 - DNA, 25 bp, Artificial
  probe
  misc_feature (1)..(25): SEQ ID NO: 2963; WAN024GJ3; Start 58; Stop 82
aagatgtcttccatacctgaaacgg

SEQ ID NO: 342464 - DNA, 25 bp, Artificial
  probe
  misc_feature (1)..(25): SEQ ID NO: 2963; WAN024GJ3; Start 2; Stop 26
tgtgtaggattggaagagcttctac

SEQ ID NO: 342465 - DNA, 25 bp, Artificial
  probe
  misc_feature (1)..(25): SEQ ID NO: 2963; WAN024GJ3; Start 6; Stop 30
taggattggaagagcttctactgca

SEQ ID NO: 342466 - DNA, 25 bp, Artificial
  probe
  misc_feature (1)..(25): SEQ ID NO: 2963; WAN024GJ3; Start 123; Stop 147
ttccaaaccaaagaaaccgaagagt

SEQ ID NO: 342467 - DNA, 25 bp, Artificial
  probe
  misc_feature (1)..(25): SEQ ID NO: 2963; WAN024GJ3; Start 124; Stop 148
tccaaaccaaagaaaccgaagagtt

SEQ ID NO: 342468 - DNA, 25 bp, Artificial
  probe
  misc_feature (1)..(25): SEQ ID NO: 2963; WAN024GJ3; Start 207; Stop 231
aaccttaactgtaccacggaagaca

SEQ ID NO: 342469 - DNA, 25 bp, Artificial
  probe
  misc_feature (1)..(25): SEQ ID NO: 2963; WAN024GJ3; Start 8; Stop 32
ggattggaagagcttctactgcatc

SEQ ID NO: 342470 - DNA, 25 bp, Artificial
  probe
  misc_feature (1)..(25): SEQ ID NO: 2963; WAN024GJ3; Start 243; Stop 267
gatacgtccaacgaagtcattgtag

SEQ ID NO: 342471 - DNA, 25 bp, Artificial
  probe
  misc_feature (1)..(25): SEQ ID NO: 2963; WAN024GJ3; Start 170; Stop 194
ttgtaccgtcaagtttagaaagggt

SEQ ID NO: 342472 - DNA, 25 bp, Artificial
  probe
  misc_feature (1)..(25): SEQ ID NO: 2963; WAN024GJ3; Start 205; Stop 229
ccaaccttaactgtaccacggaaga

SEQ ID NO: 342473 - DNA, 25 bp, Artificial
  probe
  misc_feature (1)..(25): SEQ ID NO: 2963; WAN024GJ3; Start 142; Stop 166
aagagttttgtaacacggaagtttt

SEQ ID NO: 342474 - DNA, 25 bp, Artificial
  probe
  misc_feature (1)..(25): SEQ ID NO: 2963; WAN024GJ3; Start 141; Stop 165
gaagagttttgtaacacggaagttt

SEQ ID NO: 342475 - DNA, 25 bp, Artificial
  probe
  misc_feature (1)..(25): SEQ ID NO: 2963; WAN024GJ3; Start 7; Stop 31
aggattggaagagcttctactgcat

SEQ ID NO: 342476 - DNA, 25 bp, Artificial
  probe
  misc_feature (1)..(25): SEQ ID NO: 2963; WAN024GJ3; Start 5; Stop 29
gtaggattggaagagcttctactgc

SEQ ID NO: 342477 - DNA, 25 bp, Artificial
  probe
  misc_feature (1)..(25): SEQ ID NO: 2963; WAN024GJ3; Start 208; Stop 232
accttaactgtaccacggaagacac

SEQ ID NO: 342478 - DNA, 25 bp, Artificial
  probe
  misc_feature (1)..(25): SEQ ID NO: 2963; WAN024GJ3; Start 11; Stop 35
ttggaagagcttctactgcatctgt

SEQ ID NO: 342479 - DNA, 25 bp, Artificial
  probe
  misc_feature (1)..(25): SEQ ID NO: 2963; WAN024GJ3; Start 70; Stop 94
atacctgaaacggcaatcaagtcac

SEQ ID NO: 342480 - DNA, 25 bp, Artificial
  probe
  misc_feature (1)..(25): SEQ ID NO: 2963; WAN024GJ3; Start 69; Stop 93
catacctgaaacggcaatcaagtca

SEQ ID NO: 342481 - DNA, 25 bp, Artificial
  probe
  misc_feature (1)..(25): SEQ ID NO: 2964; WAN024CPJ; Start 105; Stop 129
tgagcagtcttaccctattatccac

SEQ ID NO: 342482 - DNA, 25 bp, Artificial
  probe
  misc_feature (1)..(25): SEQ ID NO: 2964; WAN024CPJ; Start 104; Stop 128
ctgagcagtcttaccctattatcca

SEQ ID NO: 342483 - DNA, 25 bp, Artificial
  probe
  misc_feature (1)..(25): SEQ ID NO: 2964; WAN024CPJ; Start 414; Stop 438
tttattagaagtgggaattggtggc

SEQ ID NO: 342484 - DNA, 25 bp, Artificial
  probe
  misc_feature (1)..(25): SEQ ID NO: 2964; WAN024CPJ; Start 130; Stop 154
gtaacagggactaatgggaaaggat

SEQ ID NO: 342485 - DNA, 25 bp, Artificial
  probe
  misc_feature (1)..(25): SEQ ID NO: 2964; WAN024CPJ; Start 415; Stop 439
ttattagaagtgggaattggtggct

SEQ ID NO: 342486 - DNA, 25 bp, Artificial
  probe
  misc_feature (1)..(25): SEQ ID NO: 2964; WAN024CPJ; Start 131; Stop 155
taacagggactaatgggaaaggatc

SEQ ID NO: 342487 - DNA, 25 bp, Artificial
  probe
  misc_feature (1)..(25): SEQ ID NO: 2964; WAN024CPJ; Start 1184; Stop 1208
tgttcgttacagggtctctctattt

SEQ ID NO: 342488 - DNA, 25 bp, Artificial
  probe
  misc_feature (1)..(25): SEQ ID NO: 2964; WAN024CPJ; Start 417; Stop 441
attagaagtgggaattggtggctta

SEQ ID NO: 342489 - DNA, 25 bp, Artificial
  probe
  misc_feature (1)..(25): SEQ ID NO: 2964; WAN024CPJ; Start 416; Stop 440
tattagaagtgggaattggtggctt

SEQ ID NO: 342490 - DNA, 25 bp, Artificial
  probe
  misc_feature (1)..(25): SEQ ID NO: 2964; WAN024CPJ; Start 106; Stop 130
gagcagtcttaccctattatccacg

SEQ ID NO: 342491 - DNA, 25 bp, Artificial
  probe
  misc_feature (1)..(25): SEQ ID NO: 2964; WAN024CPJ; Start 134; Stop 158
cagggactaatgggaaaggatctac

SEQ ID NO: 342492 - DNA, 25 bp, Artificial
  probe
  misc_feature (1)..(25): SEQ ID NO: 2964; WAN024CPJ; Start 133; Stop 157
acagggactaatgggaaaggatcta

SEQ ID NO: 342493 - DNA, 25 bp, Artificial
  probe
  misc_feature (1)..(25): SEQ ID NO: 2964; WAN024CPJ; Start 418; Stop 442
ttagaagtgggaattggtggcttac

SEQ ID NO: 342494 - DNA, 25 bp, Artificial
  probe
  misc_feature (1)..(25): SEQ ID NO: 2964; WAN024CPJ; Start 108; Stop 132
gcagtcttaccctattatccacgta

SEQ ID NO: 342495 - DNA, 25 bp, Artificial
  probe
  misc_feature (1)..(25): SEQ ID NO: 2964; WAN024CPJ; Start 135; Stop 159
agggactaatgggaaaggatctacc

SEQ ID NO: 342496 - DNA, 25 bp, Artificial
  probe
  misc_feature (1)..(25): SEQ ID NO: 2964; WAN024CPJ; Start 132; Stop 156
aacagggactaatgggaaaggatct

SEQ ID NO: 342497 - DNA, 25 bp, Artificial
  probe
  misc_feature (1)..(25): SEQ ID NO: 2964; WAN024CPJ; Start 1185; Stop 1209
gttcgttacagggtctctctatttt

SEQ ID NO: 342498 - DNA, 25 bp, Artificial
  probe
  misc_feature (1)..(25): SEQ ID NO: 2964; WAN024CPJ; Start 404; Stop 428
tggatttggttttattagaagtggg

SEQ ID NO: 342499 - DNA, 25 bp, Artificial
  probe
  misc_feature (1)..(25): SEQ ID NO: 2964; WAN024CPJ; Start 167; Stop 191
ttatgagggaattatttatggggca

SEQ ID NO: 342500 - DNA, 25 bp, Artificial
  probe
  misc_feature (1)..(25): SEQ ID NO: 2964; WAN024CPJ; Start 32; Stop 56
atagtcggattggtttgaattttcg

SEQ ID NO: 342501 - DNA, 25 bp, Artificial
  probe
  misc_feature (1)..(25): SEQ ID NO: 2964; WAN024CPJ; Start 1192; Stop 1216
acagggtctctctattttatctcag

SEQ ID NO: 342502 - DNA, 25 bp, Artificial
  probe
  misc_feature (1)..(25): SEQ ID NO: 2964; WAN024CPJ; Start 154; Stop 178
tctaccattgcttttatgagggaat

SEQ ID NO: 342503 - DNA, 25 bp, Artificial
  probe
  misc_feature (1)..(25): SEQ ID NO: 2964; WAN024CPJ; Start 153; Stop 177
atctaccattgcttttatgagggaa

SEQ ID NO: 342504 - DNA, 25 bp, Artificial
  probe
  misc_feature (1)..(25): SEQ ID NO: 2964; WAN024CPJ; Start 1186; Stop 1210
ttcgttacagggtctctctatttta

SEQ ID NO: 342505 - DNA, 25 bp, Artificial
  probe
  misc_feature (1)..(25): SEQ ID NO: 2964; WAN024CPJ; Start 405; Stop 429
ggatttggttttattagaagtggga

SEQ ID NO: 342506 - DNA, 25 bp, Artificial
  probe
  misc_feature (1)..(25): SEQ ID NO: 2964; WAN024CPJ; Start 695; Stop 719
caagctctttactaaatctttcaca

SEQ ID NO: 342507 - DNA, 25 bp, Artificial
  probe
  misc_feature (1)..(25): SEQ ID NO: 2964; WAN024CPJ; Start 413; Stop 437
ttttattagaagtgggaattggtgg

SEQ ID NO: 342508 - DNA, 25 bp, Artificial
  probe
  misc_feature (1)..(25): SEQ ID NO: 2964; WAN024CPJ; Start 411; Stop 435
ggttttattagaagtgggaattggt

SEQ ID NO: 342509 - DNA, 25 bp, Artificial
  probe
  misc_feature (1)..(25): SEQ ID NO: 2964; WAN024CPJ; Start 410; Stop 434
tggttttattagaagtgggaattgg

SEQ ID NO: 342510 - DNA, 25 bp, Artificial
  probe
  misc_feature (1)..(25): SEQ ID NO: 2964; WAN024CPJ; Start 121; Stop 145
attatccacgtaacagggactaatg

SEQ ID NO: 342511 - DNA, 25 bp, Artificial
  probe
  misc_feature (1)..(25): SEQ ID NO: 2964; WAN024CPJ; Start 113; Stop 137
cttaccctattatccacgtaacagg

SEQ ID NO: 342512 - DNA, 25 bp, Artificial
  probe
  misc_feature (1)..(25): SEQ ID NO: 2964; WAN024CPJ; Start 1187; Stop 1211
tcgttacagggtctctctattttat

SEQ ID NO: 342513 - DNA, 25 bp, Artificial
  probe
  misc_feature (1)..(25): SEQ ID NO: 2964; WAN024CPJ; Start 111; Stop 135
gtcttaccctattatccacgtaaca

SEQ ID NO: 342514 - DNA, 25 bp, Artificial
  probe
  misc_feature (1)..(25): SEQ ID NO: 2965; WAN024D44; Start 934; Stop 958
agtatgcgtatgttgaccaagatta

SEQ ID NO: 342515 - DNA, 25 bp, Artificial
  probe
  misc_feature (1)..(25): SEQ ID NO: 2965; WAN024D44; Start 933; Stop 957
tagtatgcgtatgttgaccaagatt

SEQ ID NO: 342516 - DNA, 25 bp, Artificial
  probe
  misc_feature (1)..(25): SEQ ID NO: 2965; WAN024D44; Start 932; Stop 956
ttagtatgcgtatgttgaccaagat

SEQ ID NO: 342517 - DNA, 25 bp, Artificial
  probe
  misc_feature (1)..(25): SEQ ID NO: 2965; WAN024D44; Start 931; Stop 955
attagtatgcgtatgttgaccaaga

SEQ ID NO: 342518 - DNA, 25 bp, Artificial
  probe
  misc_feature (1)..(25): SEQ ID NO: 2965; WAN024D44; Start 936; Stop 960
tatgcgtatgttgaccaagattatg

SEQ ID NO: 342519 - DNA, 25 bp, Artificial
  probe
  misc_feature (1)..(25): SEQ ID NO: 2965; WAN024D44; Start 935; Stop 959
gtatgcgtatgttgaccaagattat

SEQ ID NO: 342520 - DNA, 25 bp, Artificial
  probe
  misc_feature (1)..(25): SEQ ID NO: 2965; WAN024D44; Start 329; Stop 353
ctaatagcgatgaagataacgagaa

SEQ ID NO: 342521 - DNA, 25 bp, Artificial
  probe
  misc_feature (1)..(25): SEQ ID NO: 2965; WAN024D44; Start 598; Stop 622
ctagtggatgacatcaatggtaagg

SEQ ID NO: 342522 - DNA, 25 bp, Artificial
  probe
  misc_feature (1)..(25): SEQ ID NO: 2965; WAN024D44; Start 937; Stop 961
atgcgtatgttgaccaagattatgc

SEQ ID NO: 342523 - DNA, 25 bp, Artificial
  probe
  misc_feature (1)..(25): SEQ ID NO: 2965; WAN024D44; Start 599; Stop 623
tagtggatgacatcaatggtaaggt

SEQ ID NO: 342524 - DNA, 25 bp, Artificial
  probe
  misc_feature (1)..(25): SEQ ID NO: 2965; WAN024D44; Start 597; Stop 621
gctagtggatgacatcaatggtaag

SEQ ID NO: 342525 - DNA, 25 bp, Artificial
  probe
  misc_feature (1)..(25): SEQ ID NO: 2965; WAN024D44; Start 604; Stop 628
gatgacatcaatggtaaggttcgtt

SEQ ID NO: 342526 - DNA, 25 bp, Artificial
  probe
  misc_feature (1)..(25): SEQ ID NO: 2965; WAN024D44; Start 601; Stop 625
gtggatgacatcaatggtaaggttc

SEQ ID NO: 342527 - DNA, 25 bp, Artificial
  probe
  misc_feature (1)..(25): SEQ ID NO: 2965; WAN024D44; Start 706; Stop 730
tatgatgatggttacgccttagcag

SEQ ID NO: 342528 - DNA, 25 bp, Artificial
  probe
  misc_feature (1)..(25): SEQ ID NO: 2965; WAN024D44; Start 705; Stop 729
ctatgatgatggttacgccttagca

SEQ ID NO: 342529 - DNA, 25 bp, Artificial
  probe
  misc_feature (1)..(25): SEQ ID NO: 2965; WAN024D44; Start 600; Stop 624
agtggatgacatcaatggtaaggtt

SEQ ID NO: 342530 - DNA, 25 bp, Artificial
  probe
  misc_feature (1)..(25): SEQ ID NO: 2965; WAN024D44; Start 31; Stop 55
atgaatgcagatgatacagtaacca

SEQ ID NO: 342531 - DNA, 25 bp, Artificial
  probe
  misc_feature (1)..(25): SEQ ID NO: 2965; WAN024D44; Start 26; Stop 50
aaggaatgaatgcagatgatacagt

SEQ ID NO: 342532 - DNA, 25 bp, Artificial
  probe
  misc_feature (1)..(25): SEQ ID NO: 2965; WAN024D44; Start 27; Stop 51
aggaatgaatgcagatgatacagta

SEQ ID NO: 342533 - DNA, 25 bp, Artificial
  probe
  misc_feature (1)..(25): SEQ ID NO: 2965; WAN024D44; Start 333; Stop 357
tagcgatgaagataacgagaaagaa

SEQ ID NO: 342534 - DNA, 25 bp, Artificial
  probe
  misc_feature (1)..(25): SEQ ID NO: 2965; WAN024D44; Start 332; Stop 356
atagcgatgaagataacgagaaaga

SEQ ID NO: 342535 - DNA, 25 bp, Artificial
  probe
  misc_feature (1)..(25): SEQ ID NO: 2965; WAN024D44; Start 673; Stop 697
agtgagggtttggtatttgaatcta

SEQ ID NO: 342536 - DNA, 25 bp, Artificial
  probe
  misc_feature (1)..(25): SEQ ID NO: 2965; WAN024D44; Start 672; Stop 696
tagtgagggtttggtatttgaatct

SEQ ID NO: 342537 - DNA, 25 bp, Artificial
  probe
  misc_feature (1)..(25): SEQ ID NO: 2965; WAN024D44; Start 607; Stop 631
gacatcaatggtaaggttcgtttag

SEQ ID NO: 342538 - DNA, 25 bp, Artificial
  probe
  misc_feature (1)..(25): SEQ ID NO: 2965; WAN024D44; Start 609; Stop 633
catcaatggtaaggttcgtttagtt

SEQ ID NO: 342539 - DNA, 25 bp, Artificial
  probe
  misc_feature (1)..(25): SEQ ID NO: 2965; WAN024D44; Start 608; Stop 632
acatcaatggtaaggttcgtttagt

SEQ ID NO: 342540 - DNA, 25 bp, Artificial
  probe
  misc_feature (1)..(25): SEQ ID NO: 2965; WAN024D44; Start 357; Stop 381
agtttctgttgtcaataccctcttt

SEQ ID NO: 342541 - DNA, 25 bp, Artificial
  probe
  misc_feature (1)..(25): SEQ ID NO: 2965; WAN024D44; Start 30; Stop 54
aatgaatgcagatgatacagtaacc

SEQ ID NO: 342542 - DNA, 25 bp, Artificial
  probe
  misc_feature (1)..(25): SEQ ID NO: 2965; WAN024D44; Start 32; Stop 56
tgaatgcagatgatacagtaaccat

SEQ ID NO: 342543 - DNA, 25 bp, Artificial
  probe
  misc_feature (1)..(25): SEQ ID NO: 2965; WAN024D44; Start 606; Stop 630
tgacatcaatggtaaggttcgttta

SEQ ID NO: 342544 - DNA, 25 bp, Artificial
  probe
  misc_feature (1)..(25): SEQ ID NO: 2965; WAN024D44; Start 380; Stop 404
tttcaaagcaggtagatggcattat

SEQ ID NO: 342545 - DNA, 25 bp, Artificial
  probe
  misc_feature (1)..(25): SEQ ID NO: 2965; WAN024D44; Start 28; Stop 52
ggaatgaatgcagatgatacagtaa

SEQ ID NO: 342546 - DNA, 25 bp, Artificial
  probe
  misc_feature (1)..(25): SEQ ID NO: 2965; WAN024D44; Start 331; Stop 355
aatagcgatgaagataacgagaaag

SEQ ID NO: 342547 - DNA, 25 bp, Artificial
  probe
  misc_feature (1)..(25): SEQ ID NO: 2966; WAN024CVV; Start 262; Stop 286
gaacatcattcaagtcaccagatac

SEQ ID NO: 342548 - DNA, 25 bp, Artificial
  probe
  misc_feature (1)..(25): SEQ ID NO: 2966; WAN024CVV; Start 254; Stop 278
aatcatccgaacatcattcaagtca

SEQ ID NO: 342549 - DNA, 25 bp, Artificial
  probe
  misc_feature (1)..(25): SEQ ID NO: 2966; WAN024CVV; Start 261; Stop 285
cgaacatcattcaagtcaccagata

SEQ ID NO: 342550 - DNA, 25 bp, Artificial
  probe
  misc_feature (1)..(25): SEQ ID NO: 2966; WAN024CVV; Start 263; Stop 287
aacatcattcaagtcaccagatact

SEQ ID NO: 342551 - DNA, 25 bp, Artificial
  probe
  misc_feature (1)..(25): SEQ ID NO: 2966; WAN024CVV; Start 237; Stop 261
ataccactacttgactgaatcatcc

SEQ ID NO: 342552 - DNA, 25 bp, Artificial
  probe
  misc_feature (1)..(25): SEQ ID NO: 2966; WAN024CVV; Start 234; Stop 258
tgaataccactacttgactgaatca

SEQ ID NO: 342553 - DNA, 25 bp, Artificial
  probe
  misc_feature (1)..(25): SEQ ID NO: 2966; WAN024CVV; Start 244; Stop 268
tacttgactgaatcatccgaacatc

SEQ ID NO: 342554 - DNA, 25 bp, Artificial
  probe
  misc_feature (1)..(25): SEQ ID NO: 2966; WAN024CVV; Start 243; Stop 267
ctacttgactgaatcatccgaacat

SEQ ID NO: 342555 - DNA, 25 bp, Artificial
  probe
  misc_feature (1)..(25): SEQ ID NO: 2966; WAN024CVV; Start 255; Stop 279
atcatccgaacatcattcaagtcac

SEQ ID NO: 342556 - DNA, 25 bp, Artificial
  probe
  misc_feature (1)..(25): SEQ ID NO: 2966; WAN024CVV; Start 247; Stop 271
ttgactgaatcatccgaacatcatt

SEQ ID NO: 342557 - DNA, 25 bp, Artificial
  probe
  misc_feature (1)..(25): SEQ ID NO: 2966; WAN024CVV; Start 246; Stop 270
cttgactgaatcatccgaacatcat

SEQ ID NO: 342558 - DNA, 25 bp, Artificial
  probe
  misc_feature (1)..(25): SEQ ID NO: 2966; WAN024CVV; Start 241; Stop 265
cactacttgactgaatcatccgaac

SEQ ID NO: 342559 - DNA, 25 bp, Artificial
  probe
  misc_feature (1)..(25): SEQ ID NO: 2966; WAN024CVV; Start 236; Stop 260
aataccactacttgactgaatcatc

SEQ ID NO: 342560 - DNA, 25 bp, Artificial
  probe
  misc_feature (1)..(25): SEQ ID NO: 2966; WAN024CVV; Start 235; Stop 259
gaataccactacttgactgaatcat

SEQ ID NO: 342561 - DNA, 25 bp, Artificial
  probe
  misc_feature (1)..(25): SEQ ID NO: 2966; WAN024CVV; Start 242; Stop 266
actacttgactgaatcatccgaaca

SEQ ID NO: 342562 - DNA, 25 bp, Artificial
  probe
  misc_feature (1)..(25): SEQ ID NO: 2966; WAN024CVV; Start 233; Stop 257
gtgaataccactacttgactgaatc

SEQ ID NO: 342563 - DNA, 25 bp, Artificial
  probe
  misc_feature (1)..(25): SEQ ID NO: 2966; WAN024CVV; Start 238; Stop 262
taccactacttgactgaatcatccg

SEQ ID NO: 342564 - DNA, 25 bp, Artificial
  probe
  misc_feature (1)..(25): SEQ ID NO: 2966; WAN024CVV; Start 253; Stop 277
gaatcatccgaacatcattcaagtc

SEQ ID NO: 342565 - DNA, 25 bp, Artificial
  probe
  misc_feature (1)..(25): SEQ ID NO: 2966; WAN024CVV; Start 245; Stop 269
acttgactgaatcatccgaacatca

SEQ ID NO: 342566 - DNA, 25 bp, Artificial
  probe
  misc_feature (1)..(25): SEQ ID NO: 2966; WAN024CVV; Start 240; Stop 264
ccactacttgactgaatcatccgaa

SEQ ID NO: 342567 - DNA, 25 bp, Artificial
  probe
  misc_feature (1)..(25): SEQ ID NO: 2966; WAN024CVV; Start 248; Stop 272
tgactgaatcatccgaacatcattc

SEQ ID NO: 342568 - DNA, 25 bp, Artificial
  probe
  misc_feature (1)..(25): SEQ ID NO: 2966; WAN024CVV; Start 97; Stop 121
cctctaagaccttcactttggattt

SEQ ID NO: 342569 - DNA, 25 bp, Artificial
  probe
  misc_feature (1)..(25): SEQ ID NO: 2966; WAN024CVV; Start 166; Stop 190
gagaatggtaaacaaagacatctgc

SEQ ID NO: 342570 - DNA, 25 bp, Artificial
  probe
  misc_feature (1)..(25): SEQ ID NO: 2966; WAN024CVV; Start 165; Stop 189
tgagaatggtaaacaaagacatctg

SEQ ID NO: 342571 - DNA, 25 bp, Artificial
  probe
  misc_feature (1)..(25): SEQ ID NO: 2966; WAN024CVV; Start 260; Stop 284
ccgaacatcattcaagtcaccagat

SEQ ID NO: 342572 - DNA, 25 bp, Artificial
  probe
  misc_feature (1)..(25): SEQ ID NO: 2966; WAN024CVV; Start 258; Stop 282
atccgaacatcattcaagtcaccag

SEQ ID NO: 342573 - DNA, 25 bp, Artificial
  probe
  misc_feature (1)..(25): SEQ ID NO: 2966; WAN024CVV; Start 256; Stop 280
tcatccgaacatcattcaagtcacc

SEQ ID NO: 342574 - DNA, 25 bp, Artificial
  probe
  misc_feature (1)..(25): SEQ ID NO: 2966; WAN024CVV; Start 164; Stop 188
atgagaatggtaaacaaagacatct

SEQ ID NO: 342575 - DNA, 25 bp, Artificial
  probe
  misc_feature (1)..(25): SEQ ID NO: 2966; WAN024CVV; Start 157; Stop 181
cgagtgtatgagaatggtaaacaaa

SEQ ID NO: 342576 - DNA, 25 bp, Artificial
  probe
  misc_feature (1)..(25): SEQ ID NO: 2966; WAN024CVV; Start 257; Stop 281
catccgaacatcattcaagtcacca

SEQ ID NO: 342577 - DNA, 25 bp, Artificial
  probe
  misc_feature (1)..(25): SEQ ID NO: 2966; WAN024CVV; Start 152; Stop 176
agattcgagtgtatgagaatggtaa

SEQ ID NO: 342578 - DNA, 25 bp, Artificial
  probe
  misc_feature (1)..(25): SEQ ID NO: 2966; WAN024CVV; Start 151; Stop 175
aagattcgagtgtatgagaatggta

SEQ ID NO: 342579 - DNA, 25 bp, Artificial
  probe
  misc_feature (1)..(25): SEQ ID NO: 2966; WAN024CVV; Start 150; Stop 174
caagattcgagtgtatgagaatggt

SEQ ID NO: 342580 - DNA, 25 bp, Artificial
  probe
  misc_feature (1)..(25): SEQ ID NO: 2967; WAN024F4T; Start 940; Stop 964
gaattgacagatacaccagttgaac

SEQ ID NO: 342581 - DNA, 25 bp, Artificial
  probe
  misc_feature (1)..(25): SEQ ID NO: 2967; WAN024F4T; Start 939; Stop 963
agaattgacagatacaccagttgaa

SEQ ID NO: 342582 - DNA, 25 bp, Artificial
  probe
  misc_feature (1)..(25): SEQ ID NO: 2967; WAN024F4T; Start 938; Stop 962
aagaattgacagatacaccagttga

SEQ ID NO: 342583 - DNA, 25 bp, Artificial
  probe
  misc_feature (1)..(25): SEQ ID NO: 2967; WAN024F4T; Start 937; Stop 961
gaagaattgacagatacaccagttg

SEQ ID NO: 342584 - DNA, 25 bp, Artificial
  probe
  misc_feature (1)..(25): SEQ ID NO: 2967; WAN024F4T; Start 936; Stop 960
ggaagaattgacagatacaccagtt

SEQ ID NO: 342585 - DNA, 25 bp, Artificial
  probe
  misc_feature (1)..(25): SEQ ID NO: 2967; WAN024F4T; Start 931; Stop 955
atgttggaagaattgacagatacac

SEQ ID NO: 342586 - DNA, 25 bp, Artificial
  probe
  misc_feature (1)..(25): SEQ ID NO: 2967; WAN024F4T; Start 942; Stop 966
attgacagatacaccagttgaactt

SEQ ID NO: 342587 - DNA, 25 bp, Artificial
  probe
  misc_feature (1)..(25): SEQ ID NO: 2967; WAN024F4T; Start 941; Stop 965
aattgacagatacaccagttgaact

SEQ ID NO: 342588 - DNA, 25 bp, Artificial
  probe
  misc_feature (1)..(25): SEQ ID NO: 2967; WAN024F4T; Start 932; Stop 956
tgttggaagaattgacagatacacc

SEQ ID NO: 342589 - DNA, 25 bp, Artificial
  probe
  misc_feature (1)..(25): SEQ ID NO: 2967; WAN024F4T; Start 930; Stop 954
aatgttggaagaattgacagataca

SEQ ID NO: 342590 - DNA, 25 bp, Artificial
  probe
  misc_feature (1)..(25): SEQ ID NO: 2967; WAN024F4T; Start 943; Stop 967
ttgacagatacaccagttgaacttg

SEQ ID NO: 342591 - DNA, 25 bp, Artificial
  probe
  misc_feature (1)..(25): SEQ ID NO: 2967; WAN024F4T; Start 1298; Stop 1322
aattgtcaatcgtagctcagtctat

SEQ ID NO: 342592 - DNA, 25 bp, Artificial
  probe
  misc_feature (1)..(25): SEQ ID NO: 2967; WAN024F4T; Start 1297; Stop 1321
gaattgtcaatcgtagctcagtcta

SEQ ID NO: 342593 - DNA, 25 bp, Artificial
  probe
  misc_feature (1)..(25): SEQ ID NO: 2967; WAN024F4T; Start 846; Stop 870
tatcattaaggctgttcaagacgca

SEQ ID NO: 342594 - DNA, 25 bp, Artificial
  probe
  misc_feature (1)..(25): SEQ ID NO: 2967; WAN024F4T; Start 934; Stop 958
ttggaagaattgacagatacaccag

SEQ ID NO: 342595 - DNA, 25 bp, Artificial
  probe
  misc_feature (1)..(25): SEQ ID NO: 2967; WAN024F4T; Start 1507; Stop 1531
ggaaccattgccttgattgaagaag

SEQ ID NO: 342596 - DNA, 25 bp, Artificial
  probe
  misc_feature (1)..(25): SEQ ID NO: 2967; WAN024F4T; Start 1016; Stop 1040
cactcttcatctttatcagccaatc

SEQ ID NO: 342597 - DNA, 25 bp, Artificial
  probe
  misc_feature (1)..(25): SEQ ID NO: 2967; WAN024F4T; Start 933; Stop 957
gttggaagaattgacagatacacca

SEQ ID NO: 342598 - DNA, 25 bp, Artificial
  probe
  misc_feature (1)..(25): SEQ ID NO: 2967; WAN024F4T; Start 1017; Stop 1041
actcttcatctttatcagccaatct

SEQ ID NO: 342599 - DNA, 25 bp, Artificial
  probe
  misc_feature (1)..(25): SEQ ID NO: 2967; WAN024F4T; Start 629; Stop 653
agttggtaatcgtcaaggctgatag

SEQ ID NO: 342600 - DNA, 25 bp, Artificial
  probe
  misc_feature (1)..(25): SEQ ID NO: 2967; WAN024F4T; Start 628; Stop 652
gagttggtaatcgtcaaggctgata

SEQ ID NO: 342601 - DNA, 25 bp, Artificial
  probe
  misc_feature (1)..(25): SEQ ID NO: 2967; WAN024F4T; Start 1015; Stop 1039
ccactcttcatctttatcagccaat

SEQ ID NO: 342602 - DNA, 25 bp, Artificial
  probe
  misc_feature (1)..(25): SEQ ID NO: 2967; WAN024F4T; Start 1; Stop 25
atgtgtggaattgttggtgttgttg

SEQ ID NO: 342603 - DNA, 25 bp, Artificial
  probe
  misc_feature (1)..(25): SEQ ID NO: 2967; WAN024F4T; Start 1011; Stop 1035
gaaaccactcttcatctttatcagc

SEQ ID NO: 342604 - DNA, 25 bp, Artificial
  probe
  misc_feature (1)..(25): SEQ ID NO: 2967; WAN024F4T; Start 1012; Stop 1036
aaaccactcttcatctttatcagcc

SEQ ID NO: 342605 - DNA, 25 bp, Artificial
  probe
  misc_feature (1)..(25): SEQ ID NO: 2967; WAN024F4T; Start 1295; Stop 1319
atgaattgtcaatcgtagctcagtc

SEQ ID NO: 342606 - DNA, 25 bp, Artificial
  probe
  misc_feature (1)..(25): SEQ ID NO: 2967; WAN024F4T; Start 935; Stop 959
tggaagaattgacagatacaccagt

SEQ ID NO: 342607 - DNA, 25 bp, Artificial
  probe
  misc_feature (1)..(25): SEQ ID NO: 2967; WAN024F4T; Start 70; Stop 94
cttgaataccgtggctatgattctg

SEQ ID NO: 342608 - DNA, 25 bp, Artificial
  probe
  misc_feature (1)..(25): SEQ ID NO: 2967; WAN024F4T; Start 1368; Stop 1392
tgaacttcttgaaacaactcgtaac

SEQ ID NO: 342609 - DNA, 25 bp, Artificial
  probe
  misc_feature (1)..(25): SEQ ID NO: 2967; WAN024F4T; Start 1367; Stop 1391
gtgaacttcttgaaacaactcgtaa

SEQ ID NO: 342610 - DNA, 25 bp, Artificial
  probe
  misc_feature (1)..(25): SEQ ID NO: 2967; WAN024F4T; Start 1294; Stop 1318
catgaattgtcaatcgtagctcagt

SEQ ID NO: 342611 - DNA, 25 bp, Artificial
  probe
  misc_feature (1)..(25): SEQ ID NO: 2967; WAN024F4T; Start 711; Stop 735
acttgacttgtcagatatcggtaag

SEQ ID NO: 342612 - DNA, 25 bp, Artificial
  probe
  misc_feature (1)..(25): SEQ ID NO: 2967; WAN024F4T; Start 710; Stop 734
aacttgacttgtcagatatcggtaa

SEQ ID NO: 342613 - DNA, 25 bp, Artificial
  probe
  misc_feature (1)..(25): SEQ ID NO: 2968; WAN024GEF; Start 97; Stop 121
tggtcactaaagaactataagagaa

SEQ ID NO: 342614 - DNA, 25 bp, Artificial
  probe
  misc_feature (1)..(25): SEQ ID NO: 2968; WAN024GEF; Start 96; Stop 120
atggtcactaaagaactataagaga

SEQ ID NO: 342615 - DNA, 25 bp, Artificial
  probe
  misc_feature (1)..(25): SEQ ID NO: 2968; WAN024GEF; Start 94; Stop 118
acatggtcactaaagaactataaga

SEQ ID NO: 342616 - DNA, 25 bp, Artificial
  probe
  misc_feature (1)..(25): SEQ ID NO: 2968; WAN024GEF; Start 163; Stop 187
ttcgattgctctcttcctcttgttt

SEQ ID NO: 342617 - DNA, 25 bp, Artificial
  probe
  misc_feature (1)..(25): SEQ ID NO: 2968; WAN024GEF; Start 162; Stop 186
tttcgattgctctcttcctcttgtt

SEQ ID NO: 342618 - DNA, 25 bp, Artificial
  probe
  misc_feature (1)..(25): SEQ ID NO: 2968; WAN024GEF; Start 95; Stop 119
catggtcactaaagaactataagag

SEQ ID NO: 342619 - DNA, 25 bp, Artificial
  probe
  misc_feature (1)..(25): SEQ ID NO: 2968; WAN024GEF; Start 93; Stop 117
aacatggtcactaaagaactataag

SEQ ID NO: 342620 - DNA, 25 bp, Artificial
  probe
  misc_feature (1)..(25): SEQ ID NO: 2968; WAN024GEF; Start 98; Stop 122
ggtcactaaagaactataagagaaa

SEQ ID NO: 342621 - DNA, 25 bp, Artificial
  probe
  misc_feature (1)..(25): SEQ ID NO: 2968; WAN024GEF; Start 92; Stop 116
aaacatggtcactaaagaactataa

SEQ ID NO: 342622 - DNA, 25 bp, Artificial
  probe
  misc_feature (1)..(25): SEQ ID NO: 2968; WAN024GEF; Start 114; Stop 138
taagagaaaaggtaaacctagcgac

SEQ ID NO: 342623 - DNA, 25 bp, Artificial
  probe
  misc_feature (1)..(25): SEQ ID NO: 2968; WAN024GEF; Start 113; Stop 137
ataagagaaaaggtaaacctagcga

SEQ ID NO: 342624 - DNA, 25 bp, Artificial
  probe
  misc_feature (1)..(25): SEQ ID NO: 2968; WAN024GEF; Start 164; Stop 188
tcgattgctctcttcctcttgtttt

SEQ ID NO: 342625 - DNA, 25 bp, Artificial
  probe
  misc_feature (1)..(25): SEQ ID NO: 2968; WAN024GEF; Start 112; Stop 136
tataagagaaaaggtaaacctagcg

SEQ ID NO: 342626 - DNA, 25 bp, Artificial
  probe
  misc_feature (1)..(25): SEQ ID NO: 2968; WAN024GEF; Start 42; Stop 66
acattgcagatgtaacataaagaaa

SEQ ID NO: 342627 - DNA, 25 bp, Artificial
  probe
  misc_feature (1)..(25): SEQ ID NO: 2968; WAN024GEF; Start 107; Stop 131
agaactataagagaaaaggtaaacc

SEQ ID NO: 342628 - DNA, 25 bp, Artificial
  probe
  misc_feature (1)..(25): SEQ ID NO: 2968; WAN024GEF; Start 115; Stop 139
aagagaaaaggtaaacctagcgacg

SEQ ID NO: 342629 - DNA, 25 bp, Artificial
  probe
  misc_feature (1)..(25): SEQ ID NO: 2968; WAN024GEF; Start 91; Stop 115
aaaacatggtcactaaagaactata

SEQ ID NO: 342630 - DNA, 25 bp, Artificial
  probe
  misc_feature (1)..(25): SEQ ID NO: 2968; WAN024GEF; Start 43; Stop 67
cattgcagatgtaacataaagaaaa

SEQ ID NO: 342631 - DNA, 25 bp, Artificial
  probe
  misc_feature (1)..(25): SEQ ID NO: 2968; WAN024GEF; Start 111; Stop 135
ctataagagaaaaggtaaacctagc

SEQ ID NO: 342632 - DNA, 25 bp, Artificial
  probe
  misc_feature (1)..(25): SEQ ID NO: 2968; WAN024GEF; Start 102; Stop 126
actaaagaactataagagaaaaggt

SEQ ID NO: 342633 - DNA, 25 bp, Artificial
  probe
  misc_feature (1)..(25): SEQ ID NO: 2968; WAN024GEF; Start 101; Stop 125
cactaaagaactataagagaaaagg

SEQ ID NO: 342634 - DNA, 25 bp, Artificial
  probe
  misc_feature (1)..(25): SEQ ID NO: 2968; WAN024GEF; Start 108; Stop 132
gaactataagagaaaaggtaaacct

SEQ ID NO: 342635 - DNA, 25 bp, Artificial
  probe
  misc_feature (1)..(25): SEQ ID NO: 2968; WAN024GEF; Start 41; Stop 65
tacattgcagatgtaacataaagaa

SEQ ID NO: 342636 - DNA, 25 bp, Artificial
  probe
  misc_feature (1)..(25): SEQ ID NO: 2968; WAN024GEF; Start 110; Stop 134
actataagagaaaaggtaaacctag

SEQ ID NO: 342637 - DNA, 25 bp, Artificial
  probe
  misc_feature (1)..(25): SEQ ID NO: 2968; WAN024GEF; Start 116; Stop 140
agagaaaaggtaaacctagcgacgc

SEQ ID NO: 342638 - DNA, 25 bp, Artificial
  probe
  misc_feature (1)..(25): SEQ ID NO: 2968; WAN024GEF; Start 109; Stop 133
aactataagagaaaaggtaaaccta

SEQ ID NO: 342639 - DNA, 25 bp, Artificial
  probe
  misc_feature (1)..(25): SEQ ID NO: 2969; WAN024CFP; Start 534; Stop 558
atggttagatttatggcgtgatgta

SEQ ID NO: 342640 - DNA, 25 bp, Artificial
  probe
  misc_feature (1)..(25): SEQ ID NO: 2969; WAN024CFP; Start 535; Stop 559
tggttagatttatggcgtgatgtaa

SEQ ID NO: 342641 - DNA, 25 bp, Artificial
  probe
  misc_feature (1)..(25): SEQ ID NO: 2969; WAN024CFP; Start 532; Stop 556
gaatggttagatttatggcgtgatg

SEQ ID NO: 342642 - DNA, 25 bp, Artificial
  probe
  misc_feature (1)..(25): SEQ ID NO: 2969; WAN024CFP; Start 531; Stop 555
agaatggttagatttatggcgtgat

SEQ ID NO: 342643 - DNA, 25 bp, Artificial
  probe
  misc_feature (1)..(25): SEQ ID NO: 2969; WAN024CFP; Start 530; Stop 554
aagaatggttagatttatggcgtga

SEQ ID NO: 342644 - DNA, 25 bp, Artificial
  probe
  misc_feature (1)..(25): SEQ ID NO: 2969; WAN024CFP; Start 529; Stop 553
caagaatggttagatttatggcgtg

SEQ ID NO: 342645 - DNA, 25 bp, Artificial
  probe
  misc_feature (1)..(25): SEQ ID NO: 2969; WAN024CFP; Start 533; Stop 557
aatggttagatttatggcgtgatgt

SEQ ID NO: 342646 - DNA, 25 bp, Artificial
  probe
  misc_feature (1)..(25): SEQ ID NO: 2969; WAN024CFP; Start 528; Stop 552
acaagaatggttagatttatggcgt

SEQ ID NO: 342647 - DNA, 25 bp, Artificial
  probe
  misc_feature (1)..(25): SEQ ID NO: 2969; WAN024CFP; Start 520; Stop 544
attagccaacaagaatggttagatt

SEQ ID NO: 342648 - DNA, 25 bp, Artificial
  probe
  misc_feature (1)..(25): SEQ ID NO: 2969; WAN024CFP; Start 304; Stop 328
acacctaatgtaatgagtgatgaat

SEQ ID NO: 342649 - DNA, 25 bp, Artificial
  probe
  misc_feature (1)..(25): SEQ ID NO: 2969; WAN024CFP; Start 527; Stop 551
aacaagaatggttagatttatggcg

SEQ ID NO: 342650 - DNA, 25 bp, Artificial
  probe
  misc_feature (1)..(25): SEQ ID NO: 2969; WAN024CFP; Start 403; Stop 427
aagggatatgttcgtaagttagaga

SEQ ID NO: 342651 - DNA, 25 bp, Artificial
  probe
  misc_feature (1)..(25): SEQ ID NO: 2969; WAN024CFP; Start 70; Stop 94
cgtcatattggagagaatcaaatgg

SEQ ID NO: 342652 - DNA, 25 bp, Artificial
  probe
  misc_feature (1)..(25): SEQ ID NO: 2969; WAN024CFP; Start 404; Stop 428
agggatatgttcgtaagttagagat

SEQ ID NO: 342653 - DNA, 25 bp, Artificial
  probe
  misc_feature (1)..(25): SEQ ID NO: 2969; WAN024CFP; Start 299; Stop 323
tgactacacctaatgtaatgagtga

SEQ ID NO: 342654 - DNA, 25 bp, Artificial
  probe
  misc_feature (1)..(25): SEQ ID NO: 2969; WAN024CFP; Start 526; Stop 550
caacaagaatggttagatttatggc

SEQ ID NO: 342655 - DNA, 25 bp, Artificial
  probe
  misc_feature (1)..(25): SEQ ID NO: 2969; WAN024CFP; Start 519; Stop 543
tattagccaacaagaatggttagat

SEQ ID NO: 342656 - DNA, 25 bp, Artificial
  probe
  misc_feature (1)..(25): SEQ ID NO: 2969; WAN024CFP; Start 518; Stop 542
atattagccaacaagaatggttaga

SEQ ID NO: 342657 - DNA, 25 bp, Artificial
  probe
  misc_feature (1)..(25): SEQ ID NO: 2969; WAN024CFP; Start 402; Stop 426
aaagggatatgttcgtaagttagag

SEQ ID NO: 342658 - DNA, 25 bp, Artificial
  probe
  misc_feature (1)..(25): SEQ ID NO: 2969; WAN024CFP; Start 71; Stop 95
gtcatattggagagaatcaaatgga

SEQ ID NO: 342659 - DNA, 25 bp, Artificial
  probe
  misc_feature (1)..(25): SEQ ID NO: 2969; WAN024CFP; Start 298; Stop 322
ttgactacacctaatgtaatgagtg

SEQ ID NO: 342660 - DNA, 25 bp, Artificial
  probe
  misc_feature (1)..(25): SEQ ID NO: 2969; WAN024CFP; Start 627; Stop 651
tgaaatggctaagtattctggtaaa

SEQ ID NO: 342661 - DNA, 25 bp, Artificial
  probe
  misc_feature (1)..(25): SEQ ID NO: 2969; WAN024CFP; Start 405; Stop 429
gggatatgttcgtaagttagagatt

SEQ ID NO: 342662 - DNA, 25 bp, Artificial
  probe
  misc_feature (1)..(25): SEQ ID NO: 2969; WAN024CFP; Start 569; Stop 593
cagaaataacacaagttcaagttca

SEQ ID NO: 342663 - DNA, 25 bp, Artificial
  probe
  misc_feature (1)..(25): SEQ ID NO: 2969; WAN024CFP; Start 301; Stop 325
actacacctaatgtaatgagtgatg

SEQ ID NO: 342664 - DNA, 25 bp, Artificial
  probe
  misc_feature (1)..(25): SEQ ID NO: 2969; WAN024CFP; Start 626; Stop 650
atgaaatggctaagtattctggtaa

SEQ ID NO: 342665 - DNA, 25 bp, Artificial
  probe
  misc_feature (1)..(25): SEQ ID NO: 2969; WAN024CFP; Start 305; Stop 329
cacctaatgtaatgagtgatgaatt

SEQ ID NO: 342666 - DNA, 25 bp, Artificial
  probe
  misc_feature (1)..(25): SEQ ID NO: 2969; WAN024CFP; Start 568; Stop 592
tcagaaataacacaagttcaagttc

SEQ ID NO: 342667 - DNA, 25 bp, Artificial
  probe
  misc_feature (1)..(25): SEQ ID NO: 2969; WAN024CFP; Start 302; Stop 326
ctacacctaatgtaatgagtgatga

SEQ ID NO: 342668 - DNA, 25 bp, Artificial
  probe
  misc_feature (1)..(25): SEQ ID NO: 2969; WAN024CFP; Start 300; Stop 324
gactacacctaatgtaatgagtgat

SEQ ID NO: 342669 - DNA, 25 bp, Artificial
  probe
  misc_feature (1)..(25): SEQ ID NO: 2969; WAN024CFP; Start 629; Stop 653
aaatggctaagtattctggtaaaga

SEQ ID NO: 342670 - DNA, 25 bp, Artificial
  probe
  misc_feature (1)..(25): SEQ ID NO: 2969; WAN024CFP; Start 624; Stop 648
atatgaaatggctaagtattctggt

SEQ ID NO: 342671 - DNA, 25 bp, Artificial
  probe
  misc_feature (1)..(25): SEQ ID NO: 2969; WAN024CFP; Start 536; Stop 560
ggttagatttatggcgtgatgtaac

SEQ ID NO: 342672 - DNA, 25 bp, Artificial
  probe
  misc_feature (1)..(25): SEQ ID NO: 2970; WAN024CV3; Start 202; Stop 226
ttcagtagcactaatagcatcaact

SEQ ID NO: 342673 - DNA, 25 bp, Artificial
  probe
  misc_feature (1)..(25): SEQ ID NO: 2970; WAN024CV3; Start 201; Stop 225
cttcagtagcactaatagcatcaac

SEQ ID NO: 342674 - DNA, 25 bp, Artificial
  probe
  misc_feature (1)..(25): SEQ ID NO: 2970; WAN024CV3; Start 200; Stop 224
ccttcagtagcactaatagcatcaa

SEQ ID NO: 342675 - DNA, 25 bp, Artificial
  probe
  misc_feature (1)..(25): SEQ ID NO: 2970; WAN024CV3; Start 198; Stop 222
ctccttcagtagcactaatagcatc

SEQ ID NO: 342676 - DNA, 25 bp, Artificial
  probe
  misc_feature (1)..(25): SEQ ID NO: 2970; WAN024CV3; Start 203; Stop 227
tcagtagcactaatagcatcaacta

SEQ ID NO: 342677 - DNA, 25 bp, Artificial
  probe
  misc_feature (1)..(25): SEQ ID NO: 2970; WAN024CV3; Start 199; Stop 223
tccttcagtagcactaatagcatca

SEQ ID NO: 342678 - DNA, 25 bp, Artificial
  probe
  misc_feature (1)..(25): SEQ ID NO: 2970; WAN024CV3; Start 208; Stop 232
agcactaatagcatcaactacaata

SEQ ID NO: 342679 - DNA, 25 bp, Artificial
  probe
  misc_feature (1)..(25): SEQ ID NO: 2970; WAN024CV3; Start 207; Stop 231
tagcactaatagcatcaactacaat

SEQ ID NO: 342680 - DNA, 25 bp, Artificial
  probe
  misc_feature (1)..(25): SEQ ID NO: 2970; WAN024CV3; Start 197; Stop 221
cctccttcagtagcactaatagcat

SEQ ID NO: 342681 - DNA, 25 bp, Artificial
  probe
  misc_feature (1)..(25): SEQ ID NO: 2970; WAN024CV3; Start 217; Stop 241
agcatcaactacaatatctttccct

SEQ ID NO: 342682 - DNA, 25 bp, Artificial
  probe
  misc_feature (1)..(25): SEQ ID NO: 2970; WAN024CV3; Start 209; Stop 233
gcactaatagcatcaactacaatat

SEQ ID NO: 342683 - DNA, 25 bp, Artificial
  probe
  misc_feature (1)..(25): SEQ ID NO: 2970; WAN024CV3; Start 218; Stop 242
gcatcaactacaatatctttccctt

SEQ ID NO: 342684 - DNA, 25 bp, Artificial
  probe
  misc_feature (1)..(25): SEQ ID NO: 2970; WAN024CV3; Start 105; Stop 129
ctttagaaccagcctcttcaaattg

SEQ ID NO: 342685 - DNA, 25 bp, Artificial
  probe
  misc_feature (1)..(25): SEQ ID NO: 2970; WAN024CV3; Start 216; Stop 240
tagcatcaactacaatatctttccc

SEQ ID NO: 342686 - DNA, 25 bp, Artificial
  probe
  misc_feature (1)..(25): SEQ ID NO: 2970; WAN024CV3; Start 205; Stop 229
agtagcactaatagcatcaactaca

SEQ ID NO: 342687 - DNA, 25 bp, Artificial
  probe
  misc_feature (1)..(25): SEQ ID NO: 2970; WAN024CV3; Start 193; Stop 217
tttccctccttcagtagcactaata

SEQ ID NO: 342688 - DNA, 25 bp, Artificial
  probe
  misc_feature (1)..(25): SEQ ID NO: 2970; WAN024CV3; Start 204; Stop 228
cagtagcactaatagcatcaactac

SEQ ID NO: 342689 - DNA, 25 bp, Artificial
  probe
  misc_feature (1)..(25): SEQ ID NO: 2970; WAN024CV3; Start 194; Stop 218
ttccctccttcagtagcactaatag

SEQ ID NO: 342690 - DNA, 25 bp, Artificial
  probe
  misc_feature (1)..(25): SEQ ID NO: 2970; WAN024CV3; Start 116; Stop 140
gcctcttcaaattgcttaaagtaca

SEQ ID NO: 342691 - DNA, 25 bp, Artificial
  probe
  misc_feature (1)..(25): SEQ ID NO: 2970; WAN024CV3; Start 206; Stop 230
gtagcactaatagcatcaactacaa

SEQ ID NO: 342692 - DNA, 25 bp, Artificial
  probe
  misc_feature (1)..(25): SEQ ID NO: 2970; WAN024CV3; Start 192; Stop 216
ctttccctccttcagtagcactaat

SEQ ID NO: 342693 - DNA, 25 bp, Artificial
  probe
  misc_feature (1)..(25): SEQ ID NO: 2970; WAN024CV3; Start 106; Stop 130
tttagaaccagcctcttcaaattgc

SEQ ID NO: 342694 - DNA, 25 bp, Artificial
  probe
  misc_feature (1)..(25): SEQ ID NO: 2970; WAN024CV3; Start 117; Stop 141
cctcttcaaattgcttaaagtacat

SEQ ID NO: 342695 - DNA, 25 bp, Artificial
  probe
  misc_feature (1)..(25): SEQ ID NO: 2970; WAN024CV3; Start 219; Stop 243
catcaactacaatatctttcccttt

SEQ ID NO: 342696 - DNA, 25 bp, Artificial
  probe
  misc_feature (1)..(25): SEQ ID NO: 2970; WAN024CV3; Start 114; Stop 138
cagcctcttcaaattgcttaaagta

SEQ ID NO: 342697 - DNA, 25 bp, Artificial
  probe
  misc_feature (1)..(25): SEQ ID NO: 2970; WAN024CV3; Start 115; Stop 139
agcctcttcaaattgcttaaagtac

SEQ ID NO: 342698 - DNA, 25 bp, Artificial
  probe
  misc_feature (1)..(25): SEQ ID NO: 2970; WAN024CV3; Start 215; Stop 239
atagcatcaactacaatatctttcc

SEQ ID NO: 342699 - DNA, 25 bp, Artificial
  probe
  misc_feature (1)..(25): SEQ ID NO: 2970; WAN024CV3; Start 17; Stop 41
ttctcaagaatcaaattagccattt

SEQ ID NO: 342700 - DNA, 25 bp, Artificial
  probe
  misc_feature (1)..(25): SEQ ID NO: 2970; WAN024CV3; Start 195; Stop 219
tccctccttcagtagcactaatagc

SEQ ID NO: 342701 - DNA, 25 bp, Artificial
  probe
  misc_feature (1)..(25): SEQ ID NO: 2970; WAN024CV3; Start 88; Stop 112
tacaactggttttcctgctttagaa

SEQ ID NO: 342702 - DNA, 25 bp, Artificial
  probe
  misc_feature (1)..(25): SEQ ID NO: 2970; WAN024CV3; Start 210; Stop 234
cactaatagcatcaactacaatatc

SEQ ID NO: 342703 - DNA, 25 bp, Artificial
  probe
  misc_feature (1)..(25): SEQ ID NO: 2970; WAN024CV3; Start 111; Stop 135
aaccagcctcttcaaattgcttaaa

SEQ ID NO: 342704 - DNA, 25 bp, Artificial
  probe
  misc_feature (1)..(25): SEQ ID NO: 2970; WAN024CV3; Start 104; Stop 128
gctttagaaccagcctcttcaaatt

SEQ ID NO: 342705 - DNA, 25 bp, Artificial
  probe
  misc_feature (1)..(25): SEQ ID NO: 2971; WAN024GLW; Start 135; Stop 159
aacacatagaatcatacctggaagc

SEQ ID NO: 342706 - DNA, 25 bp, Artificial
  probe
  misc_feature (1)..(25): SEQ ID NO: 2971; WAN024GLW; Start 139; Stop 163
catagaatcatacctggaagcgttc

SEQ ID NO: 342707 - DNA, 25 bp, Artificial
  probe
  misc_feature (1)..(25): SEQ ID NO: 2971; WAN024GLW; Start 138; Stop 162
acatagaatcatacctggaagcgtt

SEQ ID NO: 342708 - DNA, 25 bp, Artificial
  probe
  misc_feature (1)..(25): SEQ ID NO: 2971; WAN024GLW; Start 134; Stop 158
taacacatagaatcatacctggaag

SEQ ID NO: 342709 - DNA, 25 bp, Artificial
  probe
  misc_feature (1)..(25): SEQ ID NO: 2971; WAN024GLW; Start 137; Stop 161
cacatagaatcatacctggaagcgt

SEQ ID NO: 342710 - DNA, 25 bp, Artificial
  probe
  misc_feature (1)..(25): SEQ ID NO: 2971; WAN024GLW; Start 136; Stop 160
acacatagaatcatacctggaagcg

SEQ ID NO: 342711 - DNA, 25 bp, Artificial
  probe
  misc_feature (1)..(25): SEQ ID NO: 2971; WAN024GLW; Start 131; Stop 155
caataacacatagaatcatacctgg

SEQ ID NO: 342712 - DNA, 25 bp, Artificial
  probe
  misc_feature (1)..(25): SEQ ID NO: 2971; WAN024GLW; Start 133; Stop 157
ataacacatagaatcatacctggaa

SEQ ID NO: 342713 - DNA, 25 bp, Artificial
  probe
  misc_feature (1)..(25): SEQ ID NO: 2971; WAN024GLW; Start 132; Stop 156
aataacacatagaatcatacctgga

SEQ ID NO: 342714 - DNA, 25 bp, Artificial
  probe
  misc_feature (1)..(25): SEQ ID NO: 2971; WAN024GLW; Start 130; Stop 154
acaataacacatagaatcatacctg

SEQ ID NO: 342715 - DNA, 25 bp, Artificial
  probe
  misc_feature (1)..(25): SEQ ID NO: 2971; WAN024GLW; Start 155; Stop 179
gaagcgttcctgcaattaacttaag

SEQ ID NO: 342716 - DNA, 25 bp, Artificial
  probe
  misc_feature (1)..(25): SEQ ID NO: 2971; WAN024GLW; Start 167; Stop 191
caattaacttaagcggtgttccaac

SEQ ID NO: 342717 - DNA, 25 bp, Artificial
  probe
  misc_feature (1)..(25): SEQ ID NO: 2971; WAN024GLW; Start 171; Stop 195
taacttaagcggtgttccaacaatt

SEQ ID NO: 342718 - DNA, 25 bp, Artificial
  probe
  misc_feature (1)..(25): SEQ ID NO: 2971; WAN024GLW; Start 170; Stop 194
ttaacttaagcggtgttccaacaat

SEQ ID NO: 342719 - DNA, 25 bp, Artificial
  probe
  misc_feature (1)..(25): SEQ ID NO: 2971; WAN024GLW; Start 169; Stop 193
attaacttaagcggtgttccaacaa

SEQ ID NO: 342720 - DNA, 25 bp, Artificial
  probe
  misc_feature (1)..(25): SEQ ID NO: 2971; WAN024GLW; Start 168; Stop 192
aattaacttaagcggtgttccaaca

SEQ ID NO: 342721 - DNA, 25 bp, Artificial
  probe
  misc_feature (1)..(25): SEQ ID NO: 2971; WAN024GLW; Start 166; Stop 190
gcaattaacttaagcggtgttccaa

SEQ ID NO: 342722 - DNA, 25 bp, Artificial
  probe
  misc_feature (1)..(25): SEQ ID NO: 2971; WAN024GLW; Start 43; Stop 67
tctgtagtaaattgtaaccaaactg

SEQ ID NO: 342723 - DNA, 25 bp, Artificial
  probe
  misc_feature (1)..(25): SEQ ID NO: 2971; WAN024GLW; Start 156; Stop 180
aagcgttcctgcaattaacttaagc

SEQ ID NO: 342724 - DNA, 25 bp, Artificial
  probe
  misc_feature (1)..(25): SEQ ID NO: 2971; WAN024GLW; Start 44; Stop 68
ctgtagtaaattgtaaccaaactgg

SEQ ID NO: 342725 - DNA, 25 bp, Artificial
  probe
  misc_feature (1)..(25): SEQ ID NO: 2971; WAN024GLW; Start 101; Stop 125
taactccacagaaccaaaagaatga

SEQ ID NO: 342726 - DNA, 25 bp, Artificial
  probe
  misc_feature (1)..(25): SEQ ID NO: 2971; WAN024GLW; Start 100; Stop 124
ttaactccacagaaccaaaagaatg

SEQ ID NO: 342727 - DNA, 25 bp, Artificial
  probe
  misc_feature (1)..(25): SEQ ID NO: 2971; WAN024GLW; Start 98; Stop 122
cattaactccacagaaccaaaagaa

SEQ ID NO: 342728 - DNA, 25 bp, Artificial
  probe
  misc_feature (1)..(25): SEQ ID NO: 2971; WAN024GLW; Start 164; Stop 188
ctgcaattaacttaagcggtgttcc

SEQ ID NO: 342729 - DNA, 25 bp, Artificial
  probe
  misc_feature (1)..(25): SEQ ID NO: 2971; WAN024GLW; Start 163; Stop 187
cctgcaattaacttaagcggtgttc

SEQ ID NO: 342730 - DNA, 25 bp, Artificial
  probe
  misc_feature (1)..(25): SEQ ID NO: 2971; WAN024GLW; Start 160; Stop 184
gttcctgcaattaacttaagcggtg

SEQ ID NO: 342731 - DNA, 25 bp, Artificial
  probe
  misc_feature (1)..(25): SEQ ID NO: 2971; WAN024GLW; Start 106; Stop 130
ccacagaaccaaaagaatgagttta

SEQ ID NO: 342732 - DNA, 25 bp, Artificial
  probe
  misc_feature (1)..(25): SEQ ID NO: 2971; WAN024GLW; Start 161; Stop 185
ttcctgcaattaacttaagcggtgt

SEQ ID NO: 342733 - DNA, 25 bp, Artificial
  probe
  misc_feature (1)..(25): SEQ ID NO: 2971; WAN024GLW; Start 97; Stop 121
ccattaactccacagaaccaaaaga

SEQ ID NO: 342734 - DNA, 25 bp, Artificial
  probe
  misc_feature (1)..(25): SEQ ID NO: 2971; WAN024GLW; Start 99; Stop 123
attaactccacagaaccaaaagaat

SEQ ID NO: 342735 - DNA, 25 bp, Artificial
  probe
  misc_feature (1)..(25): SEQ ID NO: 2971; WAN024GLW; Start 108; Stop 132
acagaaccaaaagaatgagtttaca

SEQ ID NO: 342736 - DNA, 25 bp, Artificial
  probe
  misc_feature (1)..(25): SEQ ID NO: 2971; WAN024GLW; Start 105; Stop 129
tccacagaaccaaaagaatgagttt

SEQ ID NO: 342737 - DNA, 25 bp, Artificial
  probe
  misc_feature (1)..(25): SEQ ID NO: 2971; WAN024GLW; Start 162; Stop 186
tcctgcaattaacttaagcggtgtt

SEQ ID NO: 342738 - DNA, 25 bp, Artificial
  probe
  misc_feature (1)..(25): SEQ ID NO: 2972; WAN024FEU; Start 44; Stop 68
ctagccattccaatagagattacca

SEQ ID NO: 342739 - DNA, 25 bp, Artificial
  probe
  misc_feature (1)..(25): SEQ ID NO: 2972; WAN024FEU; Start 95; Stop 119
cttgccagtgctttattatagtccc

SEQ ID NO: 342740 - DNA, 25 bp, Artificial
  probe
  misc_feature (1)..(25): SEQ ID NO: 2972; WAN024FEU; Start 94; Stop 118
acttgccagtgctttattatagtcc

SEQ ID NO: 342741 - DNA, 25 bp, Artificial
  probe
  misc_feature (1)..(25): SEQ ID NO: 2972; WAN024FEU; Start 23; Stop 47
agtctgagaatcactgttccgctag

SEQ ID NO: 342742 - DNA, 25 bp, Artificial
  probe
  misc_feature (1)..(25): SEQ ID NO: 2972; WAN024FEU; Start 104; Stop 128
gctttattatagtcccctgtcacaa

SEQ ID NO: 342743 - DNA, 25 bp, Artificial
  probe
  misc_feature (1)..(25): SEQ ID NO: 2972; WAN024FEU; Start 101; Stop 125
agtgctttattatagtcccctgtca

SEQ ID NO: 342744 - DNA, 25 bp, Artificial
  probe
  misc_feature (1)..(25): SEQ ID NO: 2972; WAN024FEU; Start 195; Stop 219
ccacagcaggtgtcttataaagaat

SEQ ID NO: 342745 - DNA, 25 bp, Artificial
  probe
  misc_feature (1)..(25): SEQ ID NO: 2972; WAN024FEU; Start 103; Stop 127
tgctttattatagtcccctgtcaca

SEQ ID NO: 342746 - DNA, 25 bp, Artificial
  probe
  misc_feature (1)..(25): SEQ ID NO: 2972; WAN024FEU; Start 197; Stop 221
acagcaggtgtcttataaagaatac

SEQ ID NO: 342747 - DNA, 25 bp, Artificial
  probe
  misc_feature (1)..(25): SEQ ID NO: 2972; WAN024FEU; Start 196; Stop 220
cacagcaggtgtcttataaagaata

SEQ ID NO: 342748 - DNA, 25 bp, Artificial
  probe
  misc_feature (1)..(25): SEQ ID NO: 2972; WAN024FEU; Start 144; Stop 168
ggtaggagagataacctggaaccag

SEQ ID NO: 342749 - DNA, 25 bp, Artificial
  probe
  misc_feature (1)..(25): SEQ ID NO: 2972; WAN024FEU; Start 105; Stop 129
ctttattatagtcccctgtcacaaa

SEQ ID NO: 342750 - DNA, 25 bp, Artificial
  probe
  misc_feature (1)..(25): SEQ ID NO: 2972; WAN024FEU; Start 198; Stop 222
cagcaggtgtcttataaagaatact

SEQ ID NO: 342751 - DNA, 25 bp, Artificial
  probe
  misc_feature (1)..(25): SEQ ID NO: 2972; WAN024FEU; Start 194; Stop 218
accacagcaggtgtcttataaagaa

SEQ ID NO: 342752 - DNA, 25 bp, Artificial
  probe
  misc_feature (1)..(25): SEQ ID NO: 2972; WAN024FEU; Start 100; Stop 124
cagtgctttattatagtcccctgtc

SEQ ID NO: 342753 - DNA, 25 bp, Artificial
  probe
  misc_feature (1)..(25): SEQ ID NO: 2972; WAN024FEU; Start 145; Stop 169
gtaggagagataacctggaaccagc

SEQ ID NO: 342754 - DNA, 25 bp, Artificial
  probe
  misc_feature (1)..(25): SEQ ID NO: 2972; WAN024FEU; Start 106; Stop 130
tttattatagtcccctgtcacaaaa

SEQ ID NO: 342755 - DNA, 25 bp, Artificial
  probe
  misc_feature (1)..(25): SEQ ID NO: 2972; WAN024FEU; Start 102; Stop 126
gtgctttattatagtcccctgtcac

SEQ ID NO: 342756 - DNA, 25 bp, Artificial
  probe
  misc_feature (1)..(25): SEQ ID NO: 2972; WAN024FEU; Start 193; Stop 217
gaccacagcaggtgtcttataaaga

SEQ ID NO: 342757 - DNA, 25 bp, Artificial
  probe
  misc_feature (1)..(25): SEQ ID NO: 2972; WAN024FEU; Start 199; Stop 223
agcaggtgtcttataaagaatactt

SEQ ID NO: 342758 - DNA, 25 bp, Artificial
  probe
  misc_feature (1)..(25): SEQ ID NO: 2972; WAN024FEU; Start 96; Stop 120
ttgccagtgctttattatagtcccc

SEQ ID NO: 342759 - DNA, 25 bp, Artificial
  probe
  misc_feature (1)..(25): SEQ ID NO: 2972; WAN024FEU; Start 99; Stop 123
ccagtgctttattatagtcccctgt

SEQ ID NO: 342760 - DNA, 25 bp, Artificial
  probe
  misc_feature (1)..(25): SEQ ID NO: 2972; WAN024FEU; Start 184; Stop 208
caagataaagaccacagcaggtgtc

SEQ ID NO: 342761 - DNA, 25 bp, Artificial
  probe
  misc_feature (1)..(25): SEQ ID NO: 2972; WAN024FEU; Start 142; Stop 166
tcggtaggagagataacctggaacc

SEQ ID NO: 342762 - DNA, 25 bp, Artificial
  probe
  misc_feature (1)..(25): SEQ ID NO: 2972; WAN024FEU; Start 97; Stop 121
tgccagtgctttattatagtcccct

SEQ ID NO: 342763 - DNA, 25 bp, Artificial
  probe
  misc_feature (1)..(25): SEQ ID NO: 2972; WAN024FEU; Start 93; Stop 117
cacttgccagtgctttattatagtc

SEQ ID NO: 342764 - DNA, 25 bp, Artificial
  probe
  misc_feature (1)..(25): SEQ ID NO: 2972; WAN024FEU; Start 143; Stop 167
cggtaggagagataacctggaacca

SEQ ID NO: 342765 - DNA, 25 bp, Artificial
  probe
  misc_feature (1)..(25): SEQ ID NO: 2972; WAN024FEU; Start 192; Stop 216
agaccacagcaggtgtcttataaag

SEQ ID NO: 342766 - DNA, 25 bp, Artificial
  probe
  misc_feature (1)..(25): SEQ ID NO: 2972; WAN024FEU; Start 98; Stop 122
gccagtgctttattatagtcccctg

SEQ ID NO: 342767 - DNA, 25 bp, Artificial
  probe
  misc_feature (1)..(25): SEQ ID NO: 2972; WAN024FEU; Start 200; Stop 224
gcaggtgtcttataaagaatactta

SEQ ID NO: 342768 - DNA, 25 bp, Artificial
  probe
  misc_feature (1)..(25): SEQ ID NO: 2972; WAN024FEU; Start 183; Stop 207
ccaagataaagaccacagcaggtgt

SEQ ID NO: 342769 - DNA, 25 bp, Artificial
  probe
  misc_feature (1)..(25): SEQ ID NO: 2972; WAN024FEU; Start 185; Stop 209
aagataaagaccacagcaggtgtct

SEQ ID NO: 342770 - DNA, 25 bp, Artificial
  probe
  misc_feature (1)..(25): SEQ ID NO: 2973; WAN024GAT; Start 220; Stop 244
ggcatcaataatgaactatctgtcg

SEQ ID NO: 342771 - DNA, 25 bp, Artificial
  probe
  misc_feature (1)..(25): SEQ ID NO: 2973; WAN024GAT; Start 214; Stop 238
gctgttggcatcaataatgaactat

SEQ ID NO: 342772 - DNA, 25 bp, Artificial
  probe
  misc_feature (1)..(25): SEQ ID NO: 2973; WAN024GAT; Start 219; Stop 243
tggcatcaataatgaactatctgtc

SEQ ID NO: 342773 - DNA, 25 bp, Artificial
  probe
  misc_feature (1)..(25): SEQ ID NO: 2973; WAN024GAT; Start 218; Stop 242
ttggcatcaataatgaactatctgt

SEQ ID NO: 342774 - DNA, 25 bp, Artificial
  probe
  misc_feature (1)..(25): SEQ ID NO: 2973; WAN024GAT; Start 216; Stop 240
tgttggcatcaataatgaactatct

SEQ ID NO: 342775 - DNA, 25 bp, Artificial
  probe
  misc_feature (1)..(25): SEQ ID NO: 2973; WAN024GAT; Start 217; Stop 241
gttggcatcaataatgaactatctg

SEQ ID NO: 342776 - DNA, 25 bp, Artificial
  probe
  misc_feature (1)..(25): SEQ ID NO: 2973; WAN024GAT; Start 215; Stop 239
ctgttggcatcaataatgaactatc

SEQ ID NO: 342777 - DNA, 25 bp, Artificial
  probe
  misc_feature (1)..(25): SEQ ID NO: 2973; WAN024GAT; Start 140; Stop 164
ccttaataccaacttgtgagtatgg

SEQ ID NO: 342778 - DNA, 25 bp, Artificial
  probe
  misc_feature (1)..(25): SEQ ID NO: 2973; WAN024GAT; Start 213; Stop 237
agctgttggcatcaataatgaacta

SEQ ID NO: 342779 - DNA, 25 bp, Artificial
  probe
  misc_feature (1)..(25): SEQ ID NO: 2973; WAN024GAT; Start 168; Stop 192
tgagaatggtactacgttacttaca

SEQ ID NO: 342780 - DNA, 25 bp, Artificial
  probe
  misc_feature (1)..(25): SEQ ID NO: 2973; WAN024GAT; Start 221; Stop 245
gcatcaataatgaactatctgtcga

SEQ ID NO: 342781 - DNA, 25 bp, Artificial
  probe
  misc_feature (1)..(25): SEQ ID NO: 2973; WAN024GAT; Start 211; Stop 235
gaagctgttggcatcaataatgaac

SEQ ID NO: 342782 - DNA, 25 bp, Artificial
  probe
  misc_feature (1)..(25): SEQ ID NO: 2973; WAN024GAT; Start 209; Stop 233
atgaagctgttggcatcaataatga

SEQ ID NO: 342783 - DNA, 25 bp, Artificial
  probe
  misc_feature (1)..(25): SEQ ID NO: 2973; WAN024GAT; Start 212; Stop 236
aagctgttggcatcaataatgaact

SEQ ID NO: 342784 - DNA, 25 bp, Artificial
  probe
  misc_feature (1)..(25): SEQ ID NO: 2973; WAN024GAT; Start 210; Stop 234
tgaagctgttggcatcaataatgaa

SEQ ID NO: 342785 - DNA, 25 bp, Artificial
  probe
  misc_feature (1)..(25): SEQ ID NO: 2973; WAN024GAT; Start 169; Stop 193
gagaatggtactacgttacttacaa

SEQ ID NO: 342786 - DNA, 25 bp, Artificial
  probe
  misc_feature (1)..(25): SEQ ID NO: 2973; WAN024GAT; Start 167; Stop 191
ttgagaatggtactacgttacttac

SEQ ID NO: 342787 - DNA, 25 bp, Artificial
  probe
  misc_feature (1)..(25): SEQ ID NO: 2973; WAN024GAT; Start 139; Stop 163
cccttaataccaacttgtgagtatg

SEQ ID NO: 342788 - DNA, 25 bp, Artificial
  probe
  misc_feature (1)..(25): SEQ ID NO: 2973; WAN024GAT; Start 208; Stop 232
gatgaagctgttggcatcaataatg

SEQ ID NO: 342789 - DNA, 25 bp, Artificial
  probe
  misc_feature (1)..(25): SEQ ID NO: 2973; WAN024GAT; Start 207; Stop 231
agatgaagctgttggcatcaataat

SEQ ID NO: 342790 - DNA, 25 bp, Artificial
  probe
  misc_feature (1)..(25): SEQ ID NO: 2973; WAN024GAT; Start 154; Stop 178
tgtgagtatggttttgagaatggta

SEQ ID NO: 342791 - DNA, 25 bp, Artificial
  probe
  misc_feature (1)..(25): SEQ ID NO: 2973; WAN024GAT; Start 152; Stop 176
cttgtgagtatggttttgagaatgg

SEQ ID NO: 342792 - DNA, 25 bp, Artificial
  probe
  misc_feature (1)..(25): SEQ ID NO: 2973; WAN024GAT; Start 153; Stop 177
ttgtgagtatggttttgagaatggt

SEQ ID NO: 342793 - DNA, 25 bp, Artificial
  probe
  misc_feature (1)..(25): SEQ ID NO: 2973; WAN024GAT; Start 206; Stop 230
cagatgaagctgttggcatcaataa

SEQ ID NO: 342794 - DNA, 25 bp, Artificial
  probe
  misc_feature (1)..(25): SEQ ID NO: 2973; WAN024GAT; Start 149; Stop 173
caacttgtgagtatggttttgagaa

SEQ ID NO: 342795 - DNA, 25 bp, Artificial
  probe
  misc_feature (1)..(25): SEQ ID NO: 2973; WAN024GAT; Start 151; Stop 175
acttgtgagtatggttttgagaatg

SEQ ID NO: 342796 - DNA, 25 bp, Artificial
  probe
  misc_feature (1)..(25): SEQ ID NO: 2973; WAN024GAT; Start 155; Stop 179
gtgagtatggttttgagaatggtac

SEQ ID NO: 342797 - DNA, 25 bp, Artificial
  probe
  misc_feature (1)..(25): SEQ ID NO: 2973; WAN024GAT; Start 159; Stop 183
gtatggttttgagaatggtactacg

SEQ ID NO: 342798 - DNA, 25 bp, Artificial
  probe
  misc_feature (1)..(25): SEQ ID NO: 2973; WAN024GAT; Start 166; Stop 190
tttgagaatggtactacgttactta

SEQ ID NO: 342799 - DNA, 25 bp, Artificial
  probe
  misc_feature (1)..(25): SEQ ID NO: 2973; WAN024GAT; Start 150; Stop 174
aacttgtgagtatggttttgagaat

SEQ ID NO: 342800 - DNA, 25 bp, Artificial
  probe
  misc_feature (1)..(25): SEQ ID NO: 2973; WAN024GAT; Start 138; Stop 162
ccccttaataccaacttgtgagtat

SEQ ID NO: 342801 - DNA, 25 bp, Artificial
  probe
  misc_feature (1)..(25): SEQ ID NO: 2973; WAN024GAT; Start 162; Stop 186
tggttttgagaatggtactacgtta

SEQ ID NO: 342802 - DNA, 25 bp, Artificial
  probe
  misc_feature (1)..(25): SEQ ID NO: 2973; WAN024GAT; Start 68; Stop 92
aaacctcgttatattcttttgttgt

SEQ ID NO: 342803 - DNA, 25 bp, Artificial
  probe
  misc_feature (1)..(25): SEQ ID NO: 2974; WAN024FXK; Start 134; Stop 158
tttgttcaaatccgaggaatttcaa

SEQ ID NO: 342804 - DNA, 25 bp, Artificial
  probe
  misc_feature (1)..(25): SEQ ID NO: 2974; WAN024FXK; Start 60; Stop 84
tttacctttaggatcgaagtctgat

SEQ ID NO: 342805 - DNA, 25 bp, Artificial
  probe
  misc_feature (1)..(25): SEQ ID NO: 2974; WAN024FXK; Start 133; Stop 157
atttgttcaaatccgaggaatttca

SEQ ID NO: 342806 - DNA, 25 bp, Artificial
  probe
  misc_feature (1)..(25): SEQ ID NO: 2974; WAN024FXK; Start 169; Stop 193
tttacagttgggtggaaacgaagtc

SEQ ID NO: 342807 - DNA, 25 bp, Artificial
  probe
  misc_feature (1)..(25): SEQ ID NO: 2974; WAN024FXK; Start 51; Stop 75
agcatctgttttacctttaggatcg

SEQ ID NO: 342808 - DNA, 25 bp, Artificial
  probe
  misc_feature (1)..(25): SEQ ID NO: 2974; WAN024FXK; Start 75; Stop 99
gaagtctgatccacctttacctcca

SEQ ID NO: 342809 - DNA, 25 bp, Artificial
  probe
  misc_feature (1)..(25): SEQ ID NO: 2974; WAN024FXK; Start 98; Stop 122
caccgataggaagtccagtcaagac

SEQ ID NO: 342810 - DNA, 25 bp, Artificial
  probe
  misc_feature (1)..(25): SEQ ID NO: 2974; WAN024FXK; Start 49; Stop 73
tcagcatctgttttacctttaggat

SEQ ID NO: 342811 - DNA, 25 bp, Artificial
  probe
  misc_feature (1)..(25): SEQ ID NO: 2974; WAN024FXK; Start 48; Stop 72
ttcagcatctgttttacctttagga

SEQ ID NO: 342812 - DNA, 25 bp, Artificial
  probe
  misc_feature (1)..(25): SEQ ID NO: 2974; WAN024FXK; Start 47; Stop 71
cttcagcatctgttttacctttagg

SEQ ID NO: 342813 - DNA, 25 bp, Artificial
  probe
  misc_feature (1)..(25): SEQ ID NO: 2974; WAN024FXK; Start 45; Stop 69
cacttcagcatctgttttaccttta

SEQ ID NO: 342814 - DNA, 25 bp, Artificial
  probe
  misc_feature (1)..(25): SEQ ID NO: 2974; WAN024FXK; Start 43; Stop 67
atcacttcagcatctgttttacctt

SEQ ID NO: 342815 - DNA, 25 bp, Artificial
  probe
  misc_feature (1)..(25): SEQ ID NO: 2974; WAN024FXK; Start 46; Stop 70
acttcagcatctgttttacctttag

SEQ ID NO: 342816 - DNA, 25 bp, Artificial
  probe
  misc_feature (1)..(25): SEQ ID NO: 2974; WAN024FXK; Start 44; Stop 68
tcacttcagcatctgttttaccttt

SEQ ID NO: 342817 - DNA, 25 bp, Artificial
  probe
  misc_feature (1)..(25): SEQ ID NO: 2974; WAN024FXK; Start 72; Stop 96
atcgaagtctgatccacctttacct

SEQ ID NO: 342818 - DNA, 25 bp, Artificial
  probe
  misc_feature (1)..(25): SEQ ID NO: 2974; WAN024FXK; Start 61; Stop 85
ttacctttaggatcgaagtctgatc

SEQ ID NO: 342819 - DNA, 25 bp, Artificial
  probe
  misc_feature (1)..(25): SEQ ID NO: 2974; WAN024FXK; Start 42; Stop 66
catcacttcagcatctgttttacct

SEQ ID NO: 342820 - DNA, 25 bp, Artificial
  probe
  misc_feature (1)..(25): SEQ ID NO: 2974; WAN024FXK; Start 76; Stop 100
aagtctgatccacctttacctccac

SEQ ID NO: 342821 - DNA, 25 bp, Artificial
  probe
  misc_feature (1)..(25): SEQ ID NO: 2974; WAN024FXK; Start 50; Stop 74
cagcatctgttttacctttaggatc

SEQ ID NO: 342822 - DNA, 25 bp, Artificial
  probe
  misc_feature (1)..(25): SEQ ID NO: 2974; WAN024FXK; Start 82; Stop 106
gatccacctttacctccaccgatag

SEQ ID NO: 342823 - DNA, 25 bp, Artificial
  probe
  misc_feature (1)..(25): SEQ ID NO: 2974; WAN024FXK; Start 57; Stop 81
tgttttacctttaggatcgaagtct

SEQ ID NO: 342824 - DNA, 25 bp, Artificial
  probe
  misc_feature (1)..(25): SEQ ID NO: 2974; WAN024FXK; Start 55; Stop 79
tctgttttacctttaggatcgaagt

SEQ ID NO: 342825 - DNA, 25 bp, Artificial
  probe
  misc_feature (1)..(25): SEQ ID NO: 2974; WAN024FXK; Start 58; Stop 82
gttttacctttaggatcgaagtctg

SEQ ID NO: 342826 - DNA, 25 bp, Artificial
  probe
  misc_feature (1)..(25): SEQ ID NO: 2974; WAN024FXK; Start 56; Stop 80
ctgttttacctttaggatcgaagtc

SEQ ID NO: 342827 - DNA, 25 bp, Artificial
  probe
  misc_feature (1)..(25): SEQ ID NO: 2974; WAN024FXK; Start 59; Stop 83
ttttacctttaggatcgaagtctga

SEQ ID NO: 342828 - DNA, 25 bp, Artificial
  probe
  misc_feature (1)..(25): SEQ ID NO: 2974; WAN024FXK; Start 52; Stop 76
gcatctgttttacctttaggatcga

SEQ ID NO: 342829 - DNA, 25 bp, Artificial
  probe
  misc_feature (1)..(25): SEQ ID NO: 2974; WAN024FXK; Start 53; Stop 77
catctgttttacctttaggatcgaa

SEQ ID NO: 342830 - DNA, 25 bp, Artificial
  probe
  misc_feature (1)..(25): SEQ ID NO: 2974; WAN024FXK; Start 73; Stop 97
tcgaagtctgatccacctttacctc

SEQ ID NO: 342831 - DNA, 25 bp, Artificial
  probe
  misc_feature (1)..(25): SEQ ID NO: 2974; WAN024FXK; Start 54; Stop 78
atctgttttacctttaggatcgaag

SEQ ID NO: 342832 - DNA, 25 bp, Artificial
  probe
  misc_feature (1)..(25): SEQ ID NO: 2974; WAN024FXK; Start 89; Stop 113
ctttacctccaccgataggaagtcc

SEQ ID NO: 342833 - DNA, 25 bp, Artificial
  probe
  misc_feature (1)..(25): SEQ ID NO: 2974; WAN024FXK; Start 88; Stop 112
cctttacctccaccgataggaagtc

SEQ ID NO: 342834 - DNA, 25 bp, Artificial
  probe
  misc_feature (1)..(25): SEQ ID NO: 2974; WAN024FXK; Start 91; Stop 115
ttacctccaccgataggaagtccag

SEQ ID NO: 342835 - DNA, 25 bp, Artificial
  probe
  misc_feature (1)..(25): SEQ ID NO: 2974; WAN024FXK; Start 74; Stop 98
cgaagtctgatccacctttacctcc

SEQ ID NO: 342836 - DNA, 25 bp, Artificial
  probe
  misc_feature (1)..(25): SEQ ID NO: 2975; WAN024CZ2; Start 64; Stop 88
ttgacctgcctctatattggtaacc

SEQ ID NO: 342837 - DNA, 25 bp, Artificial
  probe
  misc_feature (1)..(25): SEQ ID NO: 2975; WAN024CZ2; Start 69; Stop 93
ctgcctctatattggtaaccatgat

SEQ ID NO: 342838 - DNA, 25 bp, Artificial
  probe
  misc_feature (1)..(25): SEQ ID NO: 2975; WAN024CZ2; Start 70; Stop 94
tgcctctatattggtaaccatgatt

SEQ ID NO: 342839 - DNA, 25 bp, Artificial
  probe
  misc_feature (1)..(25): SEQ ID NO: 2975; WAN024CZ2; Start 144; Stop 168
tctggtactggccttatatcactta

SEQ ID NO: 342840 - DNA, 25 bp, Artificial
  probe
  misc_feature (1)..(25): SEQ ID NO: 2975; WAN024CZ2; Start 68; Stop 92
cctgcctctatattggtaaccatga

SEQ ID NO: 342841 - DNA, 25 bp, Artificial
  probe
  misc_feature (1)..(25): SEQ ID NO: 2975; WAN024CZ2; Start 66; Stop 90
gacctgcctctatattggtaaccat

SEQ ID NO: 342842 - DNA, 25 bp, Artificial
  probe
  misc_feature (1)..(25): SEQ ID NO: 2975; WAN024CZ2; Start 67; Stop 91
acctgcctctatattggtaaccatg

SEQ ID NO: 342843 - DNA, 25 bp, Artificial
  probe
  misc_feature (1)..(25): SEQ ID NO: 2975; WAN024CZ2; Start 63; Stop 87
tttgacctgcctctatattggtaac

SEQ ID NO: 342844 - DNA, 25 bp, Artificial
  probe
  misc_feature (1)..(25): SEQ ID NO: 2975; WAN024CZ2; Start 143; Stop 167
gtctggtactggccttatatcactt

SEQ ID NO: 342845 - DNA, 25 bp, Artificial
  probe
  misc_feature (1)..(25): SEQ ID NO: 2975; WAN024CZ2; Start 82; Stop 106
ggtaaccatgatttgtttactctca

SEQ ID NO: 342846 - DNA, 25 bp, Artificial
  probe
  misc_feature (1)..(25): SEQ ID NO: 2975; WAN024CZ2; Start 65; Stop 89
tgacctgcctctatattggtaacca

SEQ ID NO: 342847 - DNA, 25 bp, Artificial
  probe
  misc_feature (1)..(25): SEQ ID NO: 2975; WAN024CZ2; Start 93; Stop 117
tttgtttactctcaatcatcaagaa

SEQ ID NO: 342848 - DNA, 25 bp, Artificial
  probe
  misc_feature (1)..(25): SEQ ID NO: 2975; WAN024CZ2; Start 81; Stop 105
tggtaaccatgatttgtttactctc

SEQ ID NO: 342849 - DNA, 25 bp, Artificial
  probe
  misc_feature (1)..(25): SEQ ID NO: 2975; WAN024CZ2; Start 52; Stop 76
ttatttgttattttgacctgcctct

SEQ ID NO: 342850 - DNA, 25 bp, Artificial
  probe
  misc_feature (1)..(25): SEQ ID NO: 2975; WAN024CZ2; Start 95; Stop 119
tgtttactctcaatcatcaagaatt

SEQ ID NO: 342851 - DNA, 25 bp, Artificial
  probe
  misc_feature (1)..(25): SEQ ID NO: 2975; WAN024CZ2; Start 94; Stop 118
ttgtttactctcaatcatcaagaat

SEQ ID NO: 342852 - DNA, 25 bp, Artificial
  probe
  misc_feature (1)..(25): SEQ ID NO: 2975; WAN024CZ2; Start 92; Stop 116
atttgtttactctcaatcatcaaga

SEQ ID NO: 342853 - DNA, 25 bp, Artificial
  probe
  misc_feature (1)..(25): SEQ ID NO: 2975; WAN024CZ2; Start 71; Stop 95
gcctctatattggtaaccatgattt

SEQ ID NO: 342854 - DNA, 25 bp, Artificial
  probe
  misc_feature (1)..(25): SEQ ID NO: 2975; WAN024CZ2; Start 54; Stop 78
atttgttattttgacctgcctctat

SEQ ID NO: 342855 - DNA, 25 bp, Artificial
  probe
  misc_feature (1)..(25): SEQ ID NO: 2975; WAN024CZ2; Start 80; Stop 104
ttggtaaccatgatttgtttactct

SEQ ID NO: 342856 - DNA, 25 bp, Artificial
  probe
  misc_feature (1)..(25): SEQ ID NO: 2975; WAN024CZ2; Start 59; Stop 83
ttattttgacctgcctctatattgg

SEQ ID NO: 342857 - DNA, 25 bp, Artificial
  probe
  misc_feature (1)..(25): SEQ ID NO: 2975; WAN024CZ2; Start 85; Stop 109
aaccatgatttgtttactctcaatc

SEQ ID NO: 342858 - DNA, 25 bp, Artificial
  probe
  misc_feature (1)..(25): SEQ ID NO: 2975; WAN024CZ2; Start 51; Stop 75
tttatttgttattttgacctgcctc

SEQ ID NO: 342859 - DNA, 25 bp, Artificial
  probe
  misc_feature (1)..(25): SEQ ID NO: 2975; WAN024CZ2; Start 55; Stop 79
tttgttattttgacctgcctctata

SEQ ID NO: 342860 - DNA, 25 bp, Artificial
  probe
  misc_feature (1)..(25): SEQ ID NO: 2975; WAN024CZ2; Start 53; Stop 77
tatttgttattttgacctgcctcta

SEQ ID NO: 342861 - DNA, 25 bp, Artificial
  probe
  misc_feature (1)..(25): SEQ ID NO: 2975; WAN024CZ2; Start 83; Stop 107
gtaaccatgatttgtttactctcaa

SEQ ID NO: 342862 - DNA, 25 bp, Artificial
  probe
  misc_feature (1)..(25): SEQ ID NO: 2975; WAN024CZ2; Start 142; Stop 166
ggtctggtactggccttatatcact

SEQ ID NO: 342863 - DNA, 25 bp, Artificial
  probe
  misc_feature (1)..(25): SEQ ID NO: 2975; WAN024CZ2; Start 29; Stop 53
aatggacggatttattttggatttt

SEQ ID NO: 342864 - DNA, 25 bp, Artificial
  probe
  misc_feature (1)..(25): SEQ ID NO: 2975; WAN024CZ2; Start 57; Stop 81
tgttattttgacctgcctctatatt

SEQ ID NO: 342865 - DNA, 25 bp, Artificial
  probe
  misc_feature (1)..(25): SEQ ID NO: 2975; WAN024CZ2; Start 56; Stop 80
ttgttattttgacctgcctctatat

SEQ ID NO: 342866 - DNA, 25 bp, Artificial
  probe
  misc_feature (1)..(25): SEQ ID NO: 2975; WAN024CZ2; Start 50; Stop 74
ttttatttgttattttgacctgcct

SEQ ID NO: 342867 - DNA, 25 bp, Artificial
  probe
  misc_feature (1)..(25): SEQ ID NO: 2975; WAN024CZ2; Start 79; Stop 103
attggtaaccatgatttgtttactc

SEQ ID NO: 342868 - DNA, 25 bp, Artificial
  probe
  misc_feature (1)..(25): SEQ ID NO: 2975; WAN024CZ2; Start 58; Stop 82
gttattttgacctgcctctatattg

SEQ ID NO: 342869 - DNA, 25 bp, Artificial
  probe
  misc_feature (1)..(25): SEQ ID NO: 2976; WAN024DCB; Start 82; Stop 106
ggtgctatcgttacttcacttgtaa

SEQ ID NO: 342870 - DNA, 25 bp, Artificial
  probe
  misc_feature (1)..(25): SEQ ID NO: 2976; WAN024DCB; Start 81; Stop 105
tggtgctatcgttacttcacttgta

SEQ ID NO: 342871 - DNA, 25 bp, Artificial
  probe
  misc_feature (1)..(25): SEQ ID NO: 2976; WAN024DCB; Start 240; Stop 264
taccgccctcttctttattatcaag

SEQ ID NO: 342872 - DNA, 25 bp, Artificial
  probe
  misc_feature (1)..(25): SEQ ID NO: 2976; WAN024DCB; Start 239; Stop 263
gtaccgccctcttctttattatcaa

SEQ ID NO: 342873 - DNA, 25 bp, Artificial
  probe
  misc_feature (1)..(25): SEQ ID NO: 2976; WAN024DCB; Start 80; Stop 104
ttggtgctatcgttacttcacttgt

SEQ ID NO: 342874 - DNA, 25 bp, Artificial
  probe
  misc_feature (1)..(25): SEQ ID NO: 2976; WAN024DCB; Start 327; Stop 351
aaccgaattggaagtccttcaagaa

SEQ ID NO: 342875 - DNA, 25 bp, Artificial
  probe
  misc_feature (1)..(25): SEQ ID NO: 2976; WAN024DCB; Start 103; Stop 127
gtaaacgacattatcactcctctta

SEQ ID NO: 342876 - DNA, 25 bp, Artificial
  probe
  misc_feature (1)..(25): SEQ ID NO: 2976; WAN024DCB; Start 99; Stop 123
acttgtaaacgacattatcactcct

SEQ ID NO: 342877 - DNA, 25 bp, Artificial
  probe
  misc_feature (1)..(25): SEQ ID NO: 2976; WAN024DCB; Start 98; Stop 122
cacttgtaaacgacattatcactcc

SEQ ID NO: 342878 - DNA, 25 bp, Artificial
  probe
  misc_feature (1)..(25): SEQ ID NO: 2976; WAN024DCB; Start 102; Stop 126
tgtaaacgacattatcactcctctt

SEQ ID NO: 342879 - DNA, 25 bp, Artificial
  probe
  misc_feature (1)..(25): SEQ ID NO: 2976; WAN024DCB; Start 101; Stop 125
ttgtaaacgacattatcactcctct

SEQ ID NO: 342880 - DNA, 25 bp, Artificial
  probe
  misc_feature (1)..(25): SEQ ID NO: 2976; WAN024DCB; Start 100; Stop 124
cttgtaaacgacattatcactcctc

SEQ ID NO: 342881 - DNA, 25 bp, Artificial
  probe
  misc_feature (1)..(25): SEQ ID NO: 2976; WAN024DCB; Start 106; Stop 130
aacgacattatcactcctcttattt

SEQ ID NO: 342882 - DNA, 25 bp, Artificial
  probe
  misc_feature (1)..(25): SEQ ID NO: 2976; WAN024DCB; Start 105; Stop 129
aaacgacattatcactcctcttatt

SEQ ID NO: 342883 - DNA, 25 bp, Artificial
  probe
  misc_feature (1)..(25): SEQ ID NO: 2976; WAN024DCB; Start 97; Stop 121
tcacttgtaaacgacattatcactc

SEQ ID NO: 342884 - DNA, 25 bp, Artificial
  probe
  misc_feature (1)..(25): SEQ ID NO: 2976; WAN024DCB; Start 330; Stop 354
cgaattggaagtccttcaagaaata

SEQ ID NO: 342885 - DNA, 25 bp, Artificial
  probe
  misc_feature (1)..(25): SEQ ID NO: 2976; WAN024DCB; Start 96; Stop 120
ttcacttgtaaacgacattatcact

SEQ ID NO: 342886 - DNA, 25 bp, Artificial
  probe
  misc_feature (1)..(25): SEQ ID NO: 2976; WAN024DCB; Start 94; Stop 118
acttcacttgtaaacgacattatca

SEQ ID NO: 342887 - DNA, 25 bp, Artificial
  probe
  misc_feature (1)..(25): SEQ ID NO: 2976; WAN024DCB; Start 95; Stop 119
cttcacttgtaaacgacattatcac

SEQ ID NO: 342888 - DNA, 25 bp, Artificial
  probe
  misc_feature (1)..(25): SEQ ID NO: 2976; WAN024DCB; Start 247; Stop 271
ctcttctttattatcaagggcattg

SEQ ID NO: 342889 - DNA, 25 bp, Artificial
  probe
  misc_feature (1)..(25): SEQ ID NO: 2976; WAN024DCB; Start 84; Stop 108
tgctatcgttacttcacttgtaaac

SEQ ID NO: 342890 - DNA, 25 bp, Artificial
  probe
  misc_feature (1)..(25): SEQ ID NO: 2976; WAN024DCB; Start 83; Stop 107
gtgctatcgttacttcacttgtaaa

SEQ ID NO: 342891 - DNA, 25 bp, Artificial
  probe
  misc_feature (1)..(25): SEQ ID NO: 2976; WAN024DCB; Start 329; Stop 353
ccgaattggaagtccttcaagaaat

SEQ ID NO: 342892 - DNA, 25 bp, Artificial
  probe
  misc_feature (1)..(25): SEQ ID NO: 2976; WAN024DCB; Start 246; Stop 270
cctcttctttattatcaagggcatt

SEQ ID NO: 342893 - DNA, 25 bp, Artificial
  probe
  misc_feature (1)..(25): SEQ ID NO: 2976; WAN024DCB; Start 326; Stop 350
caaccgaattggaagtccttcaaga

SEQ ID NO: 342894 - DNA, 25 bp, Artificial
  probe
  misc_feature (1)..(25): SEQ ID NO: 2976; WAN024DCB; Start 22; Stop 46
ttcttgcttcgaggaaatgttattg

SEQ ID NO: 342895 - DNA, 25 bp, Artificial
  probe
  misc_feature (1)..(25): SEQ ID NO: 2976; WAN024DCB; Start 21; Stop 45
gttcttgcttcgaggaaatgttatt

SEQ ID NO: 342896 - DNA, 25 bp, Artificial
  probe
  misc_feature (1)..(25): SEQ ID NO: 2976; WAN024DCB; Start 79; Stop 103
tttggtgctatcgttacttcacttg

SEQ ID NO: 342897 - DNA, 25 bp, Artificial
  probe
  misc_feature (1)..(25): SEQ ID NO: 2976; WAN024DCB; Start 33; Stop 57
aggaaatgttattgaccttgctgtc

SEQ ID NO: 342898 - DNA, 25 bp, Artificial
  probe
  misc_feature (1)..(25): SEQ ID NO: 2976; WAN024DCB; Start 32; Stop 56
gaggaaatgttattgaccttgctgt

SEQ ID NO: 342899 - DNA, 25 bp, Artificial
  probe
  misc_feature (1)..(25): SEQ ID NO: 2976; WAN024DCB; Start 104; Stop 128
taaacgacattatcactcctcttat

SEQ ID NO: 342900 - DNA, 25 bp, Artificial
  probe
  misc_feature (1)..(25): SEQ ID NO: 2976; WAN024DCB; Start 24; Stop 48
cttgcttcgaggaaatgttattgac

SEQ ID NO: 342901 - DNA, 25 bp, Artificial
  probe
  misc_feature (1)..(25): SEQ ID NO: 2976; WAN024DCB; Start 23; Stop 47
tcttgcttcgaggaaatgttattga

SEQ ID NO: 342902 - DNA, 25 bp, Artificial
  probe
  misc_feature (1)..(25): SEQ ID NO: 2977; WAN024DAW; Start 120; Stop 144
aactgtaacaggtggatcaatcctt

SEQ ID NO: 342903 - DNA, 25 bp, Artificial
  probe
  misc_feature (1)..(25): SEQ ID NO: 2977; WAN024DAW; Start 123; Stop 147
tgtaacaggtggatcaatcctttac

SEQ ID NO: 342904 - DNA, 25 bp, Artificial
  probe
  misc_feature (1)..(25): SEQ ID NO: 2977; WAN024DAW; Start 122; Stop 146
ctgtaacaggtggatcaatccttta

SEQ ID NO: 342905 - DNA, 25 bp, Artificial
  probe
  misc_feature (1)..(25): SEQ ID NO: 2977; WAN024DAW; Start 117; Stop 141
acaaactgtaacaggtggatcaatc

SEQ ID NO: 342906 - DNA, 25 bp, Artificial
  probe
  misc_feature (1)..(25): SEQ ID NO: 2977; WAN024DAW; Start 116; Stop 140
gacaaactgtaacaggtggatcaat

SEQ ID NO: 342907 - DNA, 25 bp, Artificial
  probe
  misc_feature (1)..(25): SEQ ID NO: 2977; WAN024DAW; Start 46; Stop 70
aaaggtggaggttctacatcaaacg

SEQ ID NO: 342908 - DNA, 25 bp, Artificial
  probe
  misc_feature (1)..(25): SEQ ID NO: 2977; WAN024DAW; Start 124; Stop 148
gtaacaggtggatcaatcctttacc

SEQ ID NO: 342909 - DNA, 25 bp, Artificial
  probe
  misc_feature (1)..(25): SEQ ID NO: 2977; WAN024DAW; Start 121; Stop 145
actgtaacaggtggatcaatccttt

SEQ ID NO: 342910 - DNA, 25 bp, Artificial
  probe
  misc_feature (1)..(25): SEQ ID NO: 2977; WAN024DAW; Start 119; Stop 143
aaactgtaacaggtggatcaatcct

SEQ ID NO: 342911 - DNA, 25 bp, Artificial
  probe
  misc_feature (1)..(25): SEQ ID NO: 2977; WAN024DAW; Start 118; Stop 142
caaactgtaacaggtggatcaatcc

SEQ ID NO: 342912 - DNA, 25 bp, Artificial
  probe
  misc_feature (1)..(25): SEQ ID NO: 2977; WAN024DAW; Start 149; Stop 173
gtcaacgtggtacacacatctatcc

SEQ ID NO: 342913 - DNA, 25 bp, Artificial
  probe
  misc_feature (1)..(25): SEQ ID NO: 2977; WAN024DAW; Start 45; Stop 69
aaaaggtggaggttctacatcaaac

SEQ ID NO: 342914 - DNA, 25 bp, Artificial
  probe
  misc_feature (1)..(25): SEQ ID NO: 2977; WAN024DAW; Start 9; Stop 33
aatgactcttaacaacttgcaactt

SEQ ID NO: 342915 - DNA, 25 bp, Artificial
  probe
  misc_feature (1)..(25): SEQ ID NO: 2977; WAN024DAW; Start 125; Stop 149
taacaggtggatcaatcctttaccg

SEQ ID NO: 342916 - DNA, 25 bp, Artificial
  probe
  misc_feature (1)..(25): SEQ ID NO: 2977; WAN024DAW; Start 151; Stop 175
caacgtggtacacacatctatccag

SEQ ID NO: 342917 - DNA, 25 bp, Artificial
  probe
  misc_feature (1)..(25): SEQ ID NO: 2977; WAN024DAW; Start 148; Stop 172
cgtcaacgtggtacacacatctatc

SEQ ID NO: 342918 - DNA, 25 bp, Artificial
  probe
  misc_feature (1)..(25): SEQ ID NO: 2977; WAN024DAW; Start 115; Stop 139
ggacaaactgtaacaggtggatcaa

SEQ ID NO: 342919 - DNA, 25 bp, Artificial
  probe
  misc_feature (1)..(25): SEQ ID NO: 2977; WAN024DAW; Start 150; Stop 174
tcaacgtggtacacacatctatcca

SEQ ID NO: 342920 - DNA, 25 bp, Artificial
  probe
  misc_feature (1)..(25): SEQ ID NO: 2977; WAN024DAW; Start 47; Stop 71
aaggtggaggttctacatcaaacgg

SEQ ID NO: 342921 - DNA, 25 bp, Artificial
  probe
  misc_feature (1)..(25): SEQ ID NO: 2977; WAN024DAW; Start 152; Stop 176
aacgtggtacacacatctatccagg

SEQ ID NO: 342922 - DNA, 25 bp, Artificial
  probe
  misc_feature (1)..(25): SEQ ID NO: 2977; WAN024DAW; Start 10; Stop 34
atgactcttaacaacttgcaacttt

SEQ ID NO: 342923 - DNA, 25 bp, Artificial
  probe
  misc_feature (1)..(25): SEQ ID NO: 2977; WAN024DAW; Start 8; Stop 32
aaatgactcttaacaacttgcaact

SEQ ID NO: 342924 - DNA, 25 bp, Artificial
  probe
  misc_feature (1)..(25): SEQ ID NO: 2977; WAN024DAW; Start 154; Stop 178
cgtggtacacacatctatccaggtg

SEQ ID NO: 342925 - DNA, 25 bp, Artificial
  probe
  misc_feature (1)..(25): SEQ ID NO: 2977; WAN024DAW; Start 56; Stop 80
gttctacatcaaacggacgtgattc

SEQ ID NO: 342926 - DNA, 25 bp, Artificial
  probe
  misc_feature (1)..(25): SEQ ID NO: 2977; WAN024DAW; Start 130; Stop 154
ggtggatcaatcctttaccgtcaac

SEQ ID NO: 342927 - DNA, 25 bp, Artificial
  probe
  misc_feature (1)..(25): SEQ ID NO: 2977; WAN024DAW; Start 129; Stop 153
aggtggatcaatcctttaccgtcaa

SEQ ID NO: 342928 - DNA, 25 bp, Artificial
  probe
  misc_feature (1)..(25): SEQ ID NO: 2977; WAN024DAW; Start 134; Stop 158
gatcaatcctttaccgtcaacgtgg

SEQ ID NO: 342929 - DNA, 25 bp, Artificial
  probe
  misc_feature (1)..(25): SEQ ID NO: 2977; WAN024DAW; Start 57; Stop 81
ttctacatcaaacggacgtgattca

SEQ ID NO: 342930 - DNA, 25 bp, Artificial
  probe
  misc_feature (1)..(25): SEQ ID NO: 2977; WAN024DAW; Start 131; Stop 155
gtggatcaatcctttaccgtcaacg

SEQ ID NO: 342931 - DNA, 25 bp, Artificial
  probe
  misc_feature (1)..(25): SEQ ID NO: 2977; WAN024DAW; Start 147; Stop 171
ccgtcaacgtggtacacacatctat

SEQ ID NO: 342932 - DNA, 25 bp, Artificial
  probe
  misc_feature (1)..(25): SEQ ID NO: 2977; WAN024DAW; Start 126; Stop 150
aacaggtggatcaatcctttaccgt

SEQ ID NO: 342933 - DNA, 25 bp, Artificial
  probe
  misc_feature (1)..(25): SEQ ID NO: 2977; WAN024DAW; Start 60; Stop 84
tacatcaaacggacgtgattcacaa

SEQ ID NO: 342934 - DNA, 25 bp, Artificial
  probe
  misc_feature (1)..(25): SEQ ID NO: 2977; WAN024DAW; Start 58; Stop 82
tctacatcaaacggacgtgattcac

SEQ ID NO: 342935 - DNA, 25 bp, Artificial
  probe
  misc_feature (1)..(25): SEQ ID NO: 2978; WAN024CYM; Start 22; Stop 46
tgtggttcaggattaggttcaagtt

SEQ ID NO: 342936 - DNA, 25 bp, Artificial
  probe
  misc_feature (1)..(25): SEQ ID NO: 2978; WAN024CYM; Start 224; Stop 248
ttgatatggatgaactacgagaatt

SEQ ID NO: 342937 - DNA, 25 bp, Artificial
  probe
  misc_feature (1)..(25): SEQ ID NO: 2978; WAN024CYM; Start 223; Stop 247
attgatatggatgaactacgagaat

SEQ ID NO: 342938 - DNA, 25 bp, Artificial
  probe
  misc_feature (1)..(25): SEQ ID NO: 2978; WAN024CYM; Start 21; Stop 45
ttgtggttcaggattaggttcaagt

SEQ ID NO: 342939 - DNA, 25 bp, Artificial
  probe
  misc_feature (1)..(25): SEQ ID NO: 2978; WAN024CYM; Start 222; Stop 246
tattgatatggatgaactacgagaa

SEQ ID NO: 342940 - DNA, 25 bp, Artificial
  probe
  misc_feature (1)..(25): SEQ ID NO: 2978; WAN024CYM; Start 221; Stop 245
ttattgatatggatgaactacgaga

SEQ ID NO: 342941 - DNA, 25 bp, Artificial
  probe
  misc_feature (1)..(25): SEQ ID NO: 2978; WAN024CYM; Start 111; Stop 135
acattatgatttaggtggagcagat

SEQ ID NO: 342942 - DNA, 25 bp, Artificial
  probe
  misc_feature (1)..(25): SEQ ID NO: 2978; WAN024CYM; Start 110; Stop 134
aacattatgatttaggtggagcaga

SEQ ID NO: 342943 - DNA, 25 bp, Artificial
  probe
  misc_feature (1)..(25): SEQ ID NO: 2978; WAN024CYM; Start 109; Stop 133
gaacattatgatttaggtggagcag

SEQ ID NO: 342944 - DNA, 25 bp, Artificial
  probe
  misc_feature (1)..(25): SEQ ID NO: 2978; WAN024CYM; Start 108; Stop 132
tgaacattatgatttaggtggagca

SEQ ID NO: 342945 - DNA, 25 bp, Artificial
  probe
  misc_feature (1)..(25): SEQ ID NO: 2978; WAN024CYM; Start 107; Stop 131
ttgaacattatgatttaggtggagc

SEQ ID NO: 342946 - DNA, 25 bp, Artificial
  probe
  misc_feature (1)..(25): SEQ ID NO: 2978; WAN024CYM; Start 225; Stop 249
tgatatggatgaactacgagaatta

SEQ ID NO: 342947 - DNA, 25 bp, Artificial
  probe
  misc_feature (1)..(25): SEQ ID NO: 2978; WAN024CYM; Start 147; Stop 171
tgatatttggattgttggtcgtgat

SEQ ID NO: 342948 - DNA, 25 bp, Artificial
  probe
  misc_feature (1)..(25): SEQ ID NO: 2978; WAN024CYM; Start 85; Stop 109
ttgaatgtttcggatgtagaagttg

SEQ ID NO: 342949 - DNA, 25 bp, Artificial
  probe
  misc_feature (1)..(25): SEQ ID NO: 2978; WAN024CYM; Start 80; Stop 104
gtgatttgaatgtttcggatgtaga

SEQ ID NO: 342950 - DNA, 25 bp, Artificial
  probe
  misc_feature (1)..(25): SEQ ID NO: 2978; WAN024CYM; Start 78; Stop 102
gagtgatttgaatgtttcggatgta

SEQ ID NO: 342951 - DNA, 25 bp, Artificial
  probe
  misc_feature (1)..(25): SEQ ID NO: 2978; WAN024CYM; Start 87; Stop 111
gaatgtttcggatgtagaagttgaa

SEQ ID NO: 342952 - DNA, 25 bp, Artificial
  probe
  misc_feature (1)..(25): SEQ ID NO: 2978; WAN024CYM; Start 79; Stop 103
agtgatttgaatgtttcggatgtag

SEQ ID NO: 342953 - DNA, 25 bp, Artificial
  probe
  misc_feature (1)..(25): SEQ ID NO: 2978; WAN024CYM; Start 76; Stop 100
ttgagtgatttgaatgtttcggatg

SEQ ID NO: 342954 - DNA, 25 bp, Artificial
  probe
  misc_feature (1)..(25): SEQ ID NO: 2978; WAN024CYM; Start 86; Stop 110
tgaatgtttcggatgtagaagttga

SEQ ID NO: 342955 - DNA, 25 bp, Artificial
  probe
  misc_feature (1)..(25): SEQ ID NO: 2978; WAN024CYM; Start 75; Stop 99
attgagtgatttgaatgtttcggat

SEQ ID NO: 342956 - DNA, 25 bp, Artificial
  probe
  misc_feature (1)..(25): SEQ ID NO: 2978; WAN024CYM; Start 23; Stop 47
gtggttcaggattaggttcaagttt

SEQ ID NO: 342957 - DNA, 25 bp, Artificial
  probe
  misc_feature (1)..(25): SEQ ID NO: 2978; WAN024CYM; Start 88; Stop 112
aatgtttcggatgtagaagttgaac

SEQ ID NO: 342958 - DNA, 25 bp, Artificial
  probe
  misc_feature (1)..(25): SEQ ID NO: 2978; WAN024CYM; Start 84; Stop 108
tttgaatgtttcggatgtagaagtt

SEQ ID NO: 342959 - DNA, 25 bp, Artificial
  probe
  misc_feature (1)..(25): SEQ ID NO: 2978; WAN024CYM; Start 73; Stop 97
gtattgagtgatttgaatgtttcgg

SEQ ID NO: 342960 - DNA, 25 bp, Artificial
  probe
  misc_feature (1)..(25): SEQ ID NO: 2978; WAN024CYM; Start 83; Stop 107
atttgaatgtttcggatgtagaagt

SEQ ID NO: 342961 - DNA, 25 bp, Artificial
  probe
  misc_feature (1)..(25): SEQ ID NO: 2978; WAN024CYM; Start 81; Stop 105
tgatttgaatgtttcggatgtagaa

SEQ ID NO: 342962 - DNA, 25 bp, Artificial
  probe
  misc_feature (1)..(25): SEQ ID NO: 2978; WAN024CYM; Start 74; Stop 98
tattgagtgatttgaatgtttcgga

SEQ ID NO: 342963 - DNA, 25 bp, Artificial
  probe
  misc_feature (1)..(25): SEQ ID NO: 2978; WAN024CYM; Start 146; Stop 170
ctgatatttggattgttggtcgtga

SEQ ID NO: 342964 - DNA, 25 bp, Artificial
  probe
  misc_feature (1)..(25): SEQ ID NO: 2978; WAN024CYM; Start 77; Stop 101
tgagtgatttgaatgtttcggatgt

SEQ ID NO: 342965 - DNA, 25 bp, Artificial
  probe
  misc_feature (1)..(25): SEQ ID NO: 2978; WAN024CYM; Start 150; Stop 174
tatttggattgttggtcgtgatcta

SEQ ID NO: 342966 - DNA, 25 bp, Artificial
  probe
  misc_feature (1)..(25): SEQ ID NO: 2978; WAN024CYM; Start 148; Stop 172
gatatttggattgttggtcgtgatc

SEQ ID NO: 342967 - DNA, 25 bp, Artificial
  probe
  misc_feature (1)..(25): SEQ ID NO: 2978; WAN024CYM; Start 82; Stop 106
gatttgaatgtttcggatgtagaag

SEQ ID NO: 342968 - DNA, 25 bp, Artificial
  probe
  misc_feature (1)..(25): SEQ ID NO: 2979; WAN024DVI; Start 354; Stop 378
ttatgctattgttgctacaggagaa

SEQ ID NO: 342969 - DNA, 25 bp, Artificial
  probe
  misc_feature (1)..(25): SEQ ID NO: 2979; WAN024DVI; Start 353; Stop 377
cttatgctattgttgctacaggaga

SEQ ID NO: 342970 - DNA, 25 bp, Artificial
  probe
  misc_feature (1)..(25): SEQ ID NO: 2979; WAN024DVI; Start 352; Stop 376
gcttatgctattgttgctacaggag

SEQ ID NO: 342971 - DNA, 25 bp, Artificial
  probe
  misc_feature (1)..(25): SEQ ID NO: 2979; WAN024DVI; Start 193; Stop 217
agttacgtcgatagttcaattcagt

SEQ ID NO: 342972 - DNA, 25 bp, Artificial
  probe
  misc_feature (1)..(25): SEQ ID NO: 2979; WAN024DVI; Start 183; Stop 207
gccattagatagttacgtcgatagt

SEQ ID NO: 342973 - DNA, 25 bp, Artificial
  probe
  misc_feature (1)..(25): SEQ ID NO: 2979; WAN024DVI; Start 182; Stop 206
tgccattagatagttacgtcgatag

SEQ ID NO: 342974 - DNA, 25 bp, Artificial
  probe
  misc_feature (1)..(25): SEQ ID NO: 2979; WAN024DVI; Start 180; Stop 204
aatgccattagatagttacgtcgat

SEQ ID NO: 342975 - DNA, 25 bp, Artificial
  probe
  misc_feature (1)..(25): SEQ ID NO: 2979; WAN024DVI; Start 194; Stop 218
gttacgtcgatagttcaattcagtt

SEQ ID NO: 342976 - DNA, 25 bp, Artificial
  probe
  misc_feature (1)..(25): SEQ ID NO: 2979; WAN024DVI; Start 227; Stop 251
ttgtttcgggtgatgatattcctaa

SEQ ID NO: 342977 - DNA, 25 bp, Artificial
  probe
  misc_feature (1)..(25): SEQ ID NO: 2979; WAN024DVI; Start 370; Stop 394
acaggagaaacttcactttatgcta

SEQ ID NO: 342978 - DNA, 25 bp, Artificial
  probe
  misc_feature (1)..(25): SEQ ID NO: 2979; WAN024DVI; Start 369; Stop 393
tacaggagaaacttcactttatgct

SEQ ID NO: 342979 - DNA, 25 bp, Artificial
  probe
  misc_feature (1)..(25): SEQ ID NO: 2979; WAN024DVI; Start 366; Stop 390
tgctacaggagaaacttcactttat

SEQ ID NO: 342980 - DNA, 25 bp, Artificial
  probe
  misc_feature (1)..(25): SEQ ID NO: 2979; WAN024DVI; Start 365; Stop 389
ttgctacaggagaaacttcacttta

SEQ ID NO: 342981 - DNA, 25 bp, Artificial
  probe
  misc_feature (1)..(25): SEQ ID NO: 2979; WAN024DVI; Start 229; Stop 253
gtttcgggtgatgatattcctaaga

SEQ ID NO: 342982 - DNA, 25 bp, Artificial
  probe
  misc_feature (1)..(25): SEQ ID NO: 2979; WAN024DVI; Start 407; Stop 431
agaaaggagtagttgttgaaagaga

SEQ ID NO: 342983 - DNA, 25 bp, Artificial
  probe
  misc_feature (1)..(25): SEQ ID NO: 2979; WAN024DVI; Start 368; Stop 392
ctacaggagaaacttcactttatgc

SEQ ID NO: 342984 - DNA, 25 bp, Artificial
  probe
  misc_feature (1)..(25): SEQ ID NO: 2979; WAN024DVI; Start 367; Stop 391
gctacaggagaaacttcactttatg

SEQ ID NO: 342985 - DNA, 25 bp, Artificial
  probe
  misc_feature (1)..(25): SEQ ID NO: 2979; WAN024DVI; Start 228; Stop 252
tgtttcgggtgatgatattcctaag

SEQ ID NO: 342986 - DNA, 25 bp, Artificial
  probe
  misc_feature (1)..(25): SEQ ID NO: 2979; WAN024DVI; Start 181; Stop 205
atgccattagatagttacgtcgata

SEQ ID NO: 342987 - DNA, 25 bp, Artificial
  probe
  misc_feature (1)..(25): SEQ ID NO: 2979; WAN024DVI; Start 226; Stop 250
gttgtttcgggtgatgatattccta

SEQ ID NO: 342988 - DNA, 25 bp, Artificial
  probe
  misc_feature (1)..(25): SEQ ID NO: 2979; WAN024DVI; Start 41; Stop 65
tgaagactttaatggaaatgggaca

SEQ ID NO: 342989 - DNA, 25 bp, Artificial
  probe
  misc_feature (1)..(25): SEQ ID NO: 2979; WAN024DVI; Start 230; Stop 254
tttcgggtgatgatattcctaagat

SEQ ID NO: 342990 - DNA, 25 bp, Artificial
  probe
  misc_feature (1)..(25): SEQ ID NO: 2979; WAN024DVI; Start 40; Stop 64
ttgaagactttaatggaaatgggac

SEQ ID NO: 342991 - DNA, 25 bp, Artificial
  probe
  misc_feature (1)..(25): SEQ ID NO: 2979; WAN024DVI; Start 179; Stop 203
taatgccattagatagttacgtcga

SEQ ID NO: 342992 - DNA, 25 bp, Artificial
  probe
  misc_feature (1)..(25): SEQ ID NO: 2979; WAN024DVI; Start 408; Stop 432
gaaaggagtagttgttgaaagagaa

SEQ ID NO: 342993 - DNA, 25 bp, Artificial
  probe
  misc_feature (1)..(25): SEQ ID NO: 2979; WAN024DVI; Start 406; Stop 430
aagaaaggagtagttgttgaaagag

SEQ ID NO: 342994 - DNA, 25 bp, Artificial
  probe
  misc_feature (1)..(25): SEQ ID NO: 2979; WAN024DVI; Start 371; Stop 395
caggagaaacttcactttatgctaa

SEQ ID NO: 342995 - DNA, 25 bp, Artificial
  probe
  misc_feature (1)..(25): SEQ ID NO: 2979; WAN024DVI; Start 42; Stop 66
gaagactttaatggaaatgggacat

SEQ ID NO: 342996 - DNA, 25 bp, Artificial
  probe
  misc_feature (1)..(25): SEQ ID NO: 2979; WAN024DVI; Start 192; Stop 216
tagttacgtcgatagttcaattcag

SEQ ID NO: 342997 - DNA, 25 bp, Artificial
  probe
  misc_feature (1)..(25): SEQ ID NO: 2979; WAN024DVI; Start 178; Stop 202
ttaatgccattagatagttacgtcg

SEQ ID NO: 342998 - DNA, 25 bp, Artificial
  probe
  misc_feature (1)..(25): SEQ ID NO: 2979; WAN024DVI; Start 231; Stop 255
ttcgggtgatgatattcctaagata

SEQ ID NO: 342999 - DNA, 25 bp, Artificial
  probe
  misc_feature (1)..(25): SEQ ID NO: 2979; WAN024DVI; Start 409; Stop 433
aaaggagtagttgttgaaagagaaa

SEQ ID NO: 343000 - DNA, 25 bp, Artificial
  probe
  misc_feature (1)..(25): SEQ ID NO: 2979; WAN024DVI; Start 39; Stop 63
attgaagactttaatggaaatggga

SEQ ID NO: 343001 - DNA, 25 bp, Artificial
  probe
  misc_feature (1)..(25): SEQ ID NO: 2980; WAN024FNT; Start 264; Stop 288
tcttgcttggttgtcttatggtatt

SEQ ID NO: 343002 - DNA, 25 bp, Artificial
  probe
  misc_feature (1)..(25): SEQ ID NO: 2980; WAN024FNT; Start 263; Stop 287
ctcttgcttggttgtcttatggtat

SEQ ID NO: 343003 - DNA, 25 bp, Artificial
  probe
  misc_feature (1)..(25): SEQ ID NO: 2980; WAN024FNT; Start 313; Stop 337
atgattacaggtgcttcttacggta

SEQ ID NO: 343004 - DNA, 25 bp, Artificial
  probe
  misc_feature (1)..(25): SEQ ID NO: 2980; WAN024FNT; Start 419; Stop 443
aattcttgctctcacactctcttca

SEQ ID NO: 343005 - DNA, 25 bp, Artificial
  probe
  misc_feature (1)..(25): SEQ ID NO: 2980; WAN024FNT; Start 462; Stop 486
cgacttggttgaccttgatgttatc

SEQ ID NO: 343006 - DNA, 25 bp, Artificial
  probe
  misc_feature (1)..(25): SEQ ID NO: 2980; WAN024FNT; Start 420; Stop 444
attcttgctctcacactctcttcaa

SEQ ID NO: 343007 - DNA, 25 bp, Artificial
  probe
  misc_feature (1)..(25): SEQ ID NO: 2980; WAN024FNT; Start 265; Stop 289
cttgcttggttgtcttatggtattt

SEQ ID NO: 343008 - DNA, 25 bp, Artificial
  probe
  misc_feature (1)..(25): SEQ ID NO: 2980; WAN024FNT; Start 314; Stop 338
tgattacaggtgcttcttacggtac

SEQ ID NO: 343009 - DNA, 25 bp, Artificial
  probe
  misc_feature (1)..(25): SEQ ID NO: 2980; WAN024FNT; Start 429; Stop 453
ctcacactctcttcaagcatttaac

SEQ ID NO: 343010 - DNA, 25 bp, Artificial
  probe
  misc_feature (1)..(25): SEQ ID NO: 2980; WAN024FNT; Start 428; Stop 452
tctcacactctcttcaagcatttaa

SEQ ID NO: 343011 - DNA, 25 bp, Artificial
  probe
  misc_feature (1)..(25): SEQ ID NO: 2980; WAN024FNT; Start 427; Stop 451
ctctcacactctcttcaagcattta

SEQ ID NO: 343012 - DNA, 25 bp, Artificial
  probe
  misc_feature (1)..(25): SEQ ID NO: 2980; WAN024FNT; Start 267; Stop 291
tgcttggttgtcttatggtatttac

SEQ ID NO: 343013 - DNA, 25 bp, Artificial
  probe
  misc_feature (1)..(25): SEQ ID NO: 2980; WAN024FNT; Start 262; Stop 286
gctcttgcttggttgtcttatggta

SEQ ID NO: 343014 - DNA, 25 bp, Artificial
  probe
  misc_feature (1)..(25): SEQ ID NO: 2980; WAN024FNT; Start 266; Stop 290
ttgcttggttgtcttatggtattta

SEQ ID NO: 343015 - DNA, 25 bp, Artificial
  probe
  misc_feature (1)..(25): SEQ ID NO: 2980; WAN024FNT; Start 430; Stop 454
tcacactctcttcaagcatttaacc

SEQ ID NO: 343016 - DNA, 25 bp, Artificial
  probe
  misc_feature (1)..(25): SEQ ID NO: 2980; WAN024FNT; Start 391; Stop 415
gaaatcaaggcaaatgttcttccag

SEQ ID NO: 343017 - DNA, 25 bp, Artificial
  probe
  misc_feature (1)..(25): SEQ ID NO: 2980; WAN024FNT; Start 373; Stop 397
caaatcttgaatgctcctgaaatca

SEQ ID NO: 343018 - DNA, 25 bp, Artificial
  probe
  misc_feature (1)..(25): SEQ ID NO: 2980; WAN024FNT; Start 433; Stop 457
cactctcttcaagcatttaacccaa

SEQ ID NO: 343019 - DNA, 25 bp, Artificial
  probe
  misc_feature (1)..(25): SEQ ID NO: 2980; WAN024FNT; Start 389; Stop 413
ctgaaatcaaggcaaatgttcttcc

SEQ ID NO: 343020 - DNA, 25 bp, Artificial
  probe
  misc_feature (1)..(25): SEQ ID NO: 2980; WAN024FNT; Start 435; Stop 459
ctctcttcaagcatttaacccaagt

SEQ ID NO: 343021 - DNA, 25 bp, Artificial
  probe
  misc_feature (1)..(25): SEQ ID NO: 2980; WAN024FNT; Start 434; Stop 458
actctcttcaagcatttaacccaag

SEQ ID NO: 343022 - DNA, 25 bp, Artificial
  probe
  misc_feature (1)..(25): SEQ ID NO: 2980; WAN024FNT; Start 397; Stop 421
aaggcaaatgttcttccagatgaat

SEQ ID NO: 343023 - DNA, 25 bp, Artificial
  probe
  misc_feature (1)..(25): SEQ ID NO: 2980; WAN024FNT; Start 393; Stop 417
aatcaaggcaaatgttcttccagat

SEQ ID NO: 343024 - DNA, 25 bp, Artificial
  probe
  misc_feature (1)..(25): SEQ ID NO: 2980; WAN024FNT; Start 392; Stop 416
aaatcaaggcaaatgttcttccaga

SEQ ID NO: 343025 - DNA, 25 bp, Artificial
  probe
  misc_feature (1)..(25): SEQ ID NO: 2980; WAN024FNT; Start 436; Stop 460
tctcttcaagcatttaacccaagtg

SEQ ID NO: 343026 - DNA, 25 bp, Artificial
  probe
  misc_feature (1)..(25): SEQ ID NO: 2980; WAN024FNT; Start 398; Stop 422
aggcaaatgttcttccagatgaatt

SEQ ID NO: 343027 - DNA, 25 bp, Artificial
  probe
  misc_feature (1)..(25): SEQ ID NO: 2980; WAN024FNT; Start 312; Stop 336
catgattacaggtgcttcttacggt

SEQ ID NO: 343028 - DNA, 25 bp, Artificial
  probe
  misc_feature (1)..(25): SEQ ID NO: 2980; WAN024FNT; Start 202; Stop 226
gatggcgttattatcggtactcctg

SEQ ID NO: 343029 - DNA, 25 bp, Artificial
  probe
  misc_feature (1)..(25): SEQ ID NO: 2980; WAN024FNT; Start 201; Stop 225
agatggcgttattatcggtactcct

SEQ ID NO: 343030 - DNA, 25 bp, Artificial
  probe
  misc_feature (1)..(25): SEQ ID NO: 2980; WAN024FNT; Start 200; Stop 224
cagatggcgttattatcggtactcc

SEQ ID NO: 343031 - DNA, 25 bp, Artificial
  probe
  misc_feature (1)..(25): SEQ ID NO: 2980; WAN024FNT; Start 390; Stop 414
tgaaatcaaggcaaatgttcttcca

SEQ ID NO: 343032 - DNA, 25 bp, Artificial
  probe
  misc_feature (1)..(25): SEQ ID NO: 2980; WAN024FNT; Start 203; Stop 227
atggcgttattatcggtactcctga

SEQ ID NO: 343033 - DNA, 25 bp, Artificial
  probe
  misc_feature (1)..(25): SEQ ID NO: 2980; WAN024FNT; Start 207; Stop 231
cgttattatcggtactcctgagtat

SEQ ID NO: 343034 - DNA, 25 bp, Artificial
  probe
  misc_feature (1)..(25): SEQ ID NO: 2981; WAN024ETJ; Start 390; Stop 414
agagattgaggattacgatgctatg

SEQ ID NO: 343035 - DNA, 25 bp, Artificial
  probe
  misc_feature (1)..(25): SEQ ID NO: 2981; WAN024ETJ; Start 389; Stop 413
cagagattgaggattacgatgctat

SEQ ID NO: 343036 - DNA, 25 bp, Artificial
  probe
  misc_feature (1)..(25): SEQ ID NO: 2981; WAN024ETJ; Start 393; Stop 417
gattgaggattacgatgctatggat

SEQ ID NO: 343037 - DNA, 25 bp, Artificial
  probe
  misc_feature (1)..(25): SEQ ID NO: 2981; WAN024ETJ; Start 391; Stop 415
gagattgaggattacgatgctatgg

SEQ ID NO: 343038 - DNA, 25 bp, Artificial
  probe
  misc_feature (1)..(25): SEQ ID NO: 2981; WAN024ETJ; Start 392; Stop 416
agattgaggattacgatgctatgga

SEQ ID NO: 343039 - DNA, 25 bp, Artificial
  probe
  misc_feature (1)..(25): SEQ ID NO: 2981; WAN024ETJ; Start 267; Stop 291
tattgttggagatgtgacgacctat

SEQ ID NO: 343040 - DNA, 25 bp, Artificial
  probe
  misc_feature (1)..(25): SEQ ID NO: 2981; WAN024ETJ; Start 385; Stop 409
tcttcagagattgaggattacgatg

SEQ ID NO: 343041 - DNA, 25 bp, Artificial
  probe
  misc_feature (1)..(25): SEQ ID NO: 2981; WAN024ETJ; Start 266; Stop 290
ttattgttggagatgtgacgaccta

SEQ ID NO: 343042 - DNA, 25 bp, Artificial
  probe
  misc_feature (1)..(25): SEQ ID NO: 2981; WAN024ETJ; Start 346; Stop 370
atgaagaatggtcagttacttggag

SEQ ID NO: 343043 - DNA, 25 bp, Artificial
  probe
  misc_feature (1)..(25): SEQ ID NO: 2981; WAN024ETJ; Start 345; Stop 369
gatgaagaatggtcagttacttgga

SEQ ID NO: 343044 - DNA, 25 bp, Artificial
  probe
  misc_feature (1)..(25): SEQ ID NO: 2981; WAN024ETJ; Start 384; Stop 408
ttcttcagagattgaggattacgat

SEQ ID NO: 343045 - DNA, 25 bp, Artificial
  probe
  misc_feature (1)..(25): SEQ ID NO: 2981; WAN024ETJ; Start 383; Stop 407
attcttcagagattgaggattacga

SEQ ID NO: 343046 - DNA, 25 bp, Artificial
  probe
  misc_feature (1)..(25): SEQ ID NO: 2981; WAN024ETJ; Start 349; Stop 373
aagaatggtcagttacttggagttc

SEQ ID NO: 343047 - DNA, 25 bp, Artificial
  probe
  misc_feature (1)..(25): SEQ ID NO: 2981; WAN024ETJ; Start 348; Stop 372
gaagaatggtcagttacttggagtt

SEQ ID NO: 343048 - DNA, 25 bp, Artificial
  probe
  misc_feature (1)..(25): SEQ ID NO: 2981; WAN024ETJ; Start 344; Stop 368
tgatgaagaatggtcagttacttgg

SEQ ID NO: 343049 - DNA, 25 bp, Artificial
  probe
  misc_feature (1)..(25): SEQ ID NO: 2981; WAN024ETJ; Start 341; Stop 365
cgatgatgaagaatggtcagttact

SEQ ID NO: 343050 - DNA, 25 bp, Artificial
  probe
  misc_feature (1)..(25): SEQ ID NO: 2981; WAN024ETJ; Start 277; Stop 301
gatgtgacgacctatctcaactata

SEQ ID NO: 343051 - DNA, 25 bp, Artificial
  probe
  misc_feature (1)..(25): SEQ ID NO: 2981; WAN024ETJ; Start 394; Stop 418
attgaggattacgatgctatggatc

SEQ ID NO: 343052 - DNA, 25 bp, Artificial
  probe
  misc_feature (1)..(25): SEQ ID NO: 2981; WAN024ETJ; Start 388; Stop 412
tcagagattgaggattacgatgcta

SEQ ID NO: 343053 - DNA, 25 bp, Artificial
  probe
  misc_feature (1)..(25): SEQ ID NO: 2981; WAN024ETJ; Start 382; Stop 406
gattcttcagagattgaggattacg

SEQ ID NO: 343054 - DNA, 25 bp, Artificial
  probe
  misc_feature (1)..(25): SEQ ID NO: 2981; WAN024ETJ; Start 343; Stop 367
atgatgaagaatggtcagttacttg

SEQ ID NO: 343055 - DNA, 25 bp, Artificial
  probe
  misc_feature (1)..(25): SEQ ID NO: 2981; WAN024ETJ; Start 380; Stop 404
tggattcttcagagattgaggatta

SEQ ID NO: 343056 - DNA, 25 bp, Artificial
  probe
  misc_feature (1)..(25): SEQ ID NO: 2981; WAN024ETJ; Start 279; Stop 303
tgtgacgacctatctcaactatatt

SEQ ID NO: 343057 - DNA, 25 bp, Artificial
  probe
  misc_feature (1)..(25): SEQ ID NO: 2981; WAN024ETJ; Start 261; Stop 285
aactgttattgttggagatgtgacg

SEQ ID NO: 343058 - DNA, 25 bp, Artificial
  probe
  misc_feature (1)..(25): SEQ ID NO: 2981; WAN024ETJ; Start 263; Stop 287
ctgttattgttggagatgtgacgac

SEQ ID NO: 343059 - DNA, 25 bp, Artificial
  probe
  misc_feature (1)..(25): SEQ ID NO: 2981; WAN024ETJ; Start 342; Stop 366
gatgatgaagaatggtcagttactt

SEQ ID NO: 343060 - DNA, 25 bp, Artificial
  probe
  misc_feature (1)..(25): SEQ ID NO: 2981; WAN024ETJ; Start 386; Stop 410
cttcagagattgaggattacgatgc

SEQ ID NO: 343061 - DNA, 25 bp, Artificial
  probe
  misc_feature (1)..(25): SEQ ID NO: 2981; WAN024ETJ; Start 381; Stop 405
ggattcttcagagattgaggattac

SEQ ID NO: 343062 - DNA, 25 bp, Artificial
  probe
  misc_feature (1)..(25): SEQ ID NO: 2981; WAN024ETJ; Start 278; Stop 302
atgtgacgacctatctcaactatat

SEQ ID NO: 343063 - DNA, 25 bp, Artificial
  probe
  misc_feature (1)..(25): SEQ ID NO: 2981; WAN024ETJ; Start 379; Stop 403
ctggattcttcagagattgaggatt

SEQ ID NO: 343064 - DNA, 25 bp, Artificial
  probe
  misc_feature (1)..(25): SEQ ID NO: 2981; WAN024ETJ; Start 340; Stop 364
ccgatgatgaagaatggtcagttac

SEQ ID NO: 343065 - DNA, 25 bp, Artificial
  probe
  misc_feature (1)..(25): SEQ ID NO: 2981; WAN024ETJ; Start 387; Stop 411
ttcagagattgaggattacgatgct

SEQ ID NO: 343066 - DNA, 25 bp, Artificial
  probe
  misc_feature (1)..(25): SEQ ID NO: 2981; WAN024ETJ; Start 347; Stop 371
tgaagaatggtcagttacttggagt

SEQ ID NO: 343067 - DNA, 25 bp, Artificial
  probe
  misc_feature (1)..(25): SEQ ID NO: 2982; WAN024G7O; Start 786; Stop 810
agactatattacggaccagatgttg

SEQ ID NO: 343068 - DNA, 25 bp, Artificial
  probe
  misc_feature (1)..(25): SEQ ID NO: 2982; WAN024G7O; Start 784; Stop 808
caagactatattacggaccagatgt

SEQ ID NO: 343069 - DNA, 25 bp, Artificial
  probe
  misc_feature (1)..(25): SEQ ID NO: 2982; WAN024G7O; Start 783; Stop 807
tcaagactatattacggaccagatg

SEQ ID NO: 343070 - DNA, 25 bp, Artificial
  probe
  misc_feature (1)..(25): SEQ ID NO: 2982; WAN024G7O; Start 362; Stop 386
aacatccagtcaagtatcgcaataa

SEQ ID NO: 343071 - DNA, 25 bp, Artificial
  probe
  misc_feature (1)..(25): SEQ ID NO: 2982; WAN024G7O; Start 724; Stop 748
aatatcaacgaccagaataccaatg

SEQ ID NO: 343072 - DNA, 25 bp, Artificial
  probe
  misc_feature (1)..(25): SEQ ID NO: 2982; WAN024G7O; Start 785; Stop 809
aagactatattacggaccagatgtt

SEQ ID NO: 343073 - DNA, 25 bp, Artificial
  probe
  misc_feature (1)..(25): SEQ ID NO: 2982; WAN024G7O; Start 363; Stop 387
acatccagtcaagtatcgcaataag

SEQ ID NO: 343074 - DNA, 25 bp, Artificial
  probe
  misc_feature (1)..(25): SEQ ID NO: 2982; WAN024G7O; Start 361; Stop 385
gaacatccagtcaagtatcgcaata

SEQ ID NO: 343075 - DNA, 25 bp, Artificial
  probe
  misc_feature (1)..(25): SEQ ID NO: 2982; WAN024G7O; Start 725; Stop 749
atatcaacgaccagaataccaatgc

SEQ ID NO: 343076 - DNA, 25 bp, Artificial
  probe
  misc_feature (1)..(25): SEQ ID NO: 2982; WAN024G7O; Start 364; Stop 388
catccagtcaagtatcgcaataagg

SEQ ID NO: 343077 - DNA, 25 bp, Artificial
  probe
  misc_feature (1)..(25): SEQ ID NO: 2982; WAN024G7O; Start 304; Stop 328
agtctctacaagattgctggaattg

SEQ ID NO: 343078 - DNA, 25 bp, Artificial
  probe
  misc_feature (1)..(25): SEQ ID NO: 2982; WAN024G7O; Start 1521; Stop 1545
attacgagaacattacaacaagtct

SEQ ID NO: 343079 - DNA, 25 bp, Artificial
  probe
  misc_feature (1)..(25): SEQ ID NO: 2982; WAN024G7O; Start 782; Stop 806
gtcaagactatattacggaccagat

SEQ ID NO: 343080 - DNA, 25 bp, Artificial
  probe
  misc_feature (1)..(25): SEQ ID NO: 2982; WAN024G7O; Start 982; Stop 1006
gaagtctacggtgttgaactgattc

SEQ ID NO: 343081 - DNA, 25 bp, Artificial
  probe
  misc_feature (1)..(25): SEQ ID NO: 2982; WAN024G7O; Start 303; Stop 327
cagtctctacaagattgctggaatt

SEQ ID NO: 343082 - DNA, 25 bp, Artificial
  probe
  misc_feature (1)..(25): SEQ ID NO: 2982; WAN024G7O; Start 295; Stop 319
gtcaaggacagtctctacaagattg

SEQ ID NO: 343083 - DNA, 25 bp, Artificial
  probe
  misc_feature (1)..(25): SEQ ID NO: 2982; WAN024G7O; Start 294; Stop 318
agtcaaggacagtctctacaagatt

SEQ ID NO: 343084 - DNA, 25 bp, Artificial
  probe
  misc_feature (1)..(25): SEQ ID NO: 2982; WAN024G7O; Start 293; Stop 317
aagtcaaggacagtctctacaagat

SEQ ID NO: 343085 - DNA, 25 bp, Artificial
  probe
  misc_feature (1)..(25): SEQ ID NO: 2982; WAN024G7O; Start 1520; Stop 1544
aattacgagaacattacaacaagtc

SEQ ID NO: 343086 - DNA, 25 bp, Artificial
  probe
  misc_feature (1)..(25): SEQ ID NO: 2982; WAN024G7O; Start 1519; Stop 1543
gaattacgagaacattacaacaagt

SEQ ID NO: 343087 - DNA, 25 bp, Artificial
  probe
  misc_feature (1)..(25): SEQ ID NO: 2982; WAN024G7O; Start 1523; Stop 1547
tacgagaacattacaacaagtctaa

SEQ ID NO: 343088 - DNA, 25 bp, Artificial
  probe
  misc_feature (1)..(25): SEQ ID NO: 2982; WAN024G7O; Start 1522; Stop 1546
ttacgagaacattacaacaagtcta

SEQ ID NO: 343089 - DNA, 25 bp, Artificial
  probe
  misc_feature (1)..(25): SEQ ID NO: 2982; WAN024G7O; Start 981; Stop 1005
agaagtctacggtgttgaactgatt

SEQ ID NO: 343090 - DNA, 25 bp, Artificial
  probe
  misc_feature (1)..(25): SEQ ID NO: 2982; WAN024G7O; Start 980; Stop 1004
aagaagtctacggtgttgaactgat

SEQ ID NO: 343091 - DNA, 25 bp, Artificial
  probe
  misc_feature (1)..(25): SEQ ID NO: 2982; WAN024G7O; Start 1518; Stop 1542
agaattacgagaacattacaacaag

SEQ ID NO: 343092 - DNA, 25 bp, Artificial
  probe
  misc_feature (1)..(25): SEQ ID NO: 2982; WAN024G7O; Start 1510; Stop 1534
tgtggaatagaattacgagaacatt

SEQ ID NO: 343093 - DNA, 25 bp, Artificial
  probe
  misc_feature (1)..(25): SEQ ID NO: 2982; WAN024G7O; Start 1508; Stop 1532
aatgtggaatagaattacgagaaca

SEQ ID NO: 343094 - DNA, 25 bp, Artificial
  probe
  misc_feature (1)..(25): SEQ ID NO: 2982; WAN024G7O; Start 305; Stop 329
gtctctacaagattgctggaattgc

SEQ ID NO: 343095 - DNA, 25 bp, Artificial
  probe
  misc_feature (1)..(25): SEQ ID NO: 2982; WAN024G7O; Start 297; Stop 321
caaggacagtctctacaagattgct

SEQ ID NO: 343096 - DNA, 25 bp, Artificial
  probe
  misc_feature (1)..(25): SEQ ID NO: 2982; WAN024G7O; Start 302; Stop 326
acagtctctacaagattgctggaat

SEQ ID NO: 343097 - DNA, 25 bp, Artificial
  probe
  misc_feature (1)..(25): SEQ ID NO: 2982; WAN024G7O; Start 292; Stop 316
caagtcaaggacagtctctacaaga

SEQ ID NO: 343098 - DNA, 25 bp, Artificial
  probe
  misc_feature (1)..(25): SEQ ID NO: 2982; WAN024G7O; Start 787; Stop 811
gactatattacggaccagatgttgg

SEQ ID NO: 343099 - DNA, 25 bp, Artificial
  probe
  misc_feature (1)..(25): SEQ ID NO: 2982; WAN024G7O; Start 296; Stop 320
tcaaggacagtctctacaagattgc

SEQ ID NO: 343100 - DNA, 25 bp, Artificial
  probe
  misc_feature (1)..(25): SEQ ID NO: 2983; WAN024G6Q; Start 65; Stop 89
cattagcagtcttagtagcaggaag

SEQ ID NO: 343101 - DNA, 25 bp, Artificial
  probe
  misc_feature (1)..(25): SEQ ID NO: 2983; WAN024G6Q; Start 685; Stop 709
actgttatgactagcaaggtagatg

SEQ ID NO: 343102 - DNA, 25 bp, Artificial
  probe
  misc_feature (1)..(25): SEQ ID NO: 2983; WAN024G6Q; Start 684; Stop 708
cactgttatgactagcaaggtagat

SEQ ID NO: 343103 - DNA, 25 bp, Artificial
  probe
  misc_feature (1)..(25): SEQ ID NO: 2983; WAN024G6Q; Start 562; Stop 586
tactcaagtagcgaagacaattcaa

SEQ ID NO: 343104 - DNA, 25 bp, Artificial
  probe
  misc_feature (1)..(25): SEQ ID NO: 2983; WAN024G6Q; Start 561; Stop 585
ttactcaagtagcgaagacaattca

SEQ ID NO: 343105 - DNA, 25 bp, Artificial
  probe
  misc_feature (1)..(25): SEQ ID NO: 2983; WAN024G6Q; Start 683; Stop 707
tcactgttatgactagcaaggtaga

SEQ ID NO: 343106 - DNA, 25 bp, Artificial
  probe
  misc_feature (1)..(25): SEQ ID NO: 2983; WAN024G6Q; Start 669; Stop 693
aattgcctcaactgtcactgttatg

SEQ ID NO: 343107 - DNA, 25 bp, Artificial
  probe
  misc_feature (1)..(25): SEQ ID NO: 2983; WAN024G6Q; Start 66; Stop 90
attagcagtcttagtagcaggaagc

SEQ ID NO: 343108 - DNA, 25 bp, Artificial
  probe
  misc_feature (1)..(25): SEQ ID NO: 2983; WAN024G6Q; Start 982; Stop 1006
ggtattactattcctgagtctgttc

SEQ ID NO: 343109 - DNA, 25 bp, Artificial
  probe
  misc_feature (1)..(25): SEQ ID NO: 2983; WAN024G6Q; Start 64; Stop 88
gcattagcagtcttagtagcaggaa

SEQ ID NO: 343110 - DNA, 25 bp, Artificial
  probe
  misc_feature (1)..(25): SEQ ID NO: 2983; WAN024G6Q; Start 981; Stop 1005
aggtattactattcctgagtctgtt

SEQ ID NO: 343111 - DNA, 25 bp, Artificial
  probe
  misc_feature (1)..(25): SEQ ID NO: 2983; WAN024G6Q; Start 670; Stop 694
attgcctcaactgtcactgttatga

SEQ ID NO: 343112 - DNA, 25 bp, Artificial
  probe
  misc_feature (1)..(25): SEQ ID NO: 2983; WAN024G6Q; Start 217; Stop 241
gatggacttgcagaagaaggatata

SEQ ID NO: 343113 - DNA, 25 bp, Artificial
  probe
  misc_feature (1)..(25): SEQ ID NO: 2983; WAN024G6Q; Start 218; Stop 242
atggacttgcagaagaaggatataa

SEQ ID NO: 343114 - DNA, 25 bp, Artificial
  probe
  misc_feature (1)..(25): SEQ ID NO: 2983; WAN024G6Q; Start 1015; Stop 1039
gcaggacaagtcatcgaataactaa

SEQ ID NO: 343115 - DNA, 25 bp, Artificial
  probe
  misc_feature (1)..(25): SEQ ID NO: 2983; WAN024G6Q; Start 180; Stop 204
ccatccatcccttgatttgatttat

SEQ ID NO: 343116 - DNA, 25 bp, Artificial
  probe
  misc_feature (1)..(25): SEQ ID NO: 2983; WAN024G6Q; Start 983; Stop 1007
gtattactattcctgagtctgttct

SEQ ID NO: 343117 - DNA, 25 bp, Artificial
  probe
  misc_feature (1)..(25): SEQ ID NO: 2983; WAN024G6Q; Start 969; Stop 993
agcacaagaactaggtattactatt

SEQ ID NO: 343118 - DNA, 25 bp, Artificial
  probe
  misc_feature (1)..(25): SEQ ID NO: 2983; WAN024G6Q; Start 597; Stop 621
cgaagaatttaaggcttatgctgaa

SEQ ID NO: 343119 - DNA, 25 bp, Artificial
  probe
  misc_feature (1)..(25): SEQ ID NO: 2983; WAN024G6Q; Start 1016; Stop 1040
caggacaagtcatcgaataactaat

SEQ ID NO: 343120 - DNA, 25 bp, Artificial
  probe
  misc_feature (1)..(25): SEQ ID NO: 2983; WAN024G6Q; Start 216; Stop 240
agatggacttgcagaagaaggatat

SEQ ID NO: 343121 - DNA, 25 bp, Artificial
  probe
  misc_feature (1)..(25): SEQ ID NO: 2983; WAN024G6Q; Start 179; Stop 203
gccatccatcccttgatttgattta

SEQ ID NO: 343122 - DNA, 25 bp, Artificial
  probe
  misc_feature (1)..(25): SEQ ID NO: 2983; WAN024G6Q; Start 563; Stop 587
actcaagtagcgaagacaattcaaa

SEQ ID NO: 343123 - DNA, 25 bp, Artificial
  probe
  misc_feature (1)..(25): SEQ ID NO: 2983; WAN024G6Q; Start 215; Stop 239
aagatggacttgcagaagaaggata

SEQ ID NO: 343124 - DNA, 25 bp, Artificial
  probe
  misc_feature (1)..(25): SEQ ID NO: 2983; WAN024G6Q; Start 1014; Stop 1038
agcaggacaagtcatcgaataacta

SEQ ID NO: 343125 - DNA, 25 bp, Artificial
  probe
  misc_feature (1)..(25): SEQ ID NO: 2983; WAN024G6Q; Start 1012; Stop 1036
gaagcaggacaagtcatcgaataac

SEQ ID NO: 343126 - DNA, 25 bp, Artificial
  probe
  misc_feature (1)..(25): SEQ ID NO: 2983; WAN024G6Q; Start 1011; Stop 1035
agaagcaggacaagtcatcgaataa

SEQ ID NO: 343127 - DNA, 25 bp, Artificial
  probe
  misc_feature (1)..(25): SEQ ID NO: 2983; WAN024G6Q; Start 1010; Stop 1034
aagaagcaggacaagtcatcgaata

SEQ ID NO: 343128 - DNA, 25 bp, Artificial
  probe
  misc_feature (1)..(25): SEQ ID NO: 2983; WAN024G6Q; Start 980; Stop 1004
taggtattactattcctgagtctgt

SEQ ID NO: 343129 - DNA, 25 bp, Artificial
  probe
  misc_feature (1)..(25): SEQ ID NO: 2983; WAN024G6Q; Start 560; Stop 584
tttactcaagtagcgaagacaattc

SEQ ID NO: 343130 - DNA, 25 bp, Artificial
  probe
  misc_feature (1)..(25): SEQ ID NO: 2983; WAN024G6Q; Start 559; Stop 583
ctttactcaagtagcgaagacaatt

SEQ ID NO: 343131 - DNA, 25 bp, Artificial
  probe
  misc_feature (1)..(25): SEQ ID NO: 2983; WAN024G6Q; Start 288; Stop 312
aagtaaggttgcgacaatgagtaaa

SEQ ID NO: 343132 - DNA, 25 bp, Artificial
  probe
  misc_feature (1)..(25): SEQ ID NO: 2983; WAN024G6Q; Start 287; Stop 311
aaagtaaggttgcgacaatgagtaa

SEQ ID NO: 343133 - DNA, 25 bp, Artificial
  probe
  misc_feature (1)..(25): SEQ ID NO: 2984; WAN024D8A; Start 311; Stop 335
atgatgccatgaaccaagtgtataa

SEQ ID NO: 343134 - DNA, 25 bp, Artificial
  probe
  misc_feature (1)..(25): SEQ ID NO: 2984; WAN024D8A; Start 310; Stop 334
aatgatgccatgaaccaagtgtata

SEQ ID NO: 343135 - DNA, 25 bp, Artificial
  probe
  misc_feature (1)..(25): SEQ ID NO: 2984; WAN024D8A; Start 316; Stop 340
gccatgaaccaagtgtataaggatt

SEQ ID NO: 343136 - DNA, 25 bp, Artificial
  probe
  misc_feature (1)..(25): SEQ ID NO: 2984; WAN024D8A; Start 312; Stop 336
tgatgccatgaaccaagtgtataag

SEQ ID NO: 343137 - DNA, 25 bp, Artificial
  probe
  misc_feature (1)..(25): SEQ ID NO: 2984; WAN024D8A; Start 377; Stop 401
ttgtcaatcagactacgaatcaagc

SEQ ID NO: 343138 - DNA, 25 bp, Artificial
  probe
  misc_feature (1)..(25): SEQ ID NO: 2984; WAN024D8A; Start 317; Stop 341
ccatgaaccaagtgtataaggatta

SEQ ID NO: 343139 - DNA, 25 bp, Artificial
  probe
  misc_feature (1)..(25): SEQ ID NO: 2984; WAN024D8A; Start 313; Stop 337
gatgccatgaaccaagtgtataagg

SEQ ID NO: 343140 - DNA, 25 bp, Artificial
  probe
  misc_feature (1)..(25): SEQ ID NO: 2984; WAN024D8A; Start 315; Stop 339
tgccatgaaccaagtgtataaggat

SEQ ID NO: 343141 - DNA, 25 bp, Artificial
  probe
  misc_feature (1)..(25): SEQ ID NO: 2984; WAN024D8A; Start 314; Stop 338
atgccatgaaccaagtgtataagga

SEQ ID NO: 343142 - DNA, 25 bp, Artificial
  probe
  misc_feature (1)..(25): SEQ ID NO: 2984; WAN024D8A; Start 443; Stop 467
taaagaatgccaaccaatcaaagac

SEQ ID NO: 343143 - DNA, 25 bp, Artificial
  probe
  misc_feature (1)..(25): SEQ ID NO: 2984; WAN024D8A; Start 442; Stop 466
ttaaagaatgccaaccaatcaaaga

SEQ ID NO: 343144 - DNA, 25 bp, Artificial
  probe
  misc_feature (1)..(25): SEQ ID NO: 2984; WAN024D8A; Start 253; Stop 277
acacgtattcaaccttatatgactg

SEQ ID NO: 343145 - DNA, 25 bp, Artificial
  probe
  misc_feature (1)..(25): SEQ ID NO: 2984; WAN024D8A; Start 254; Stop 278
cacgtattcaaccttatatgactga

SEQ ID NO: 343146 - DNA, 25 bp, Artificial
  probe
  misc_feature (1)..(25): SEQ ID NO: 2984; WAN024D8A; Start 374; Stop 398
tctttgtcaatcagactacgaatca

SEQ ID NO: 343147 - DNA, 25 bp, Artificial
  probe
  misc_feature (1)..(25): SEQ ID NO: 2984; WAN024D8A; Start 376; Stop 400
tttgtcaatcagactacgaatcaag

SEQ ID NO: 343148 - DNA, 25 bp, Artificial
  probe
  misc_feature (1)..(25): SEQ ID NO: 2984; WAN024D8A; Start 375; Stop 399
ctttgtcaatcagactacgaatcaa

SEQ ID NO: 343149 - DNA, 25 bp, Artificial
  probe
  misc_feature (1)..(25): SEQ ID NO: 2984; WAN024D8A; Start 283; Stop 307
gcttattctcaagaattgtcaagtc

SEQ ID NO: 343150 - DNA, 25 bp, Artificial
  probe
  misc_feature (1)..(25): SEQ ID NO: 2984; WAN024D8A; Start 373; Stop 397
atctttgtcaatcagactacgaatc

SEQ ID NO: 343151 - DNA, 25 bp, Artificial
  probe
  misc_feature (1)..(25): SEQ ID NO: 2984; WAN024D8A; Start 309; Stop 333
aaatgatgccatgaaccaagtgtat

SEQ ID NO: 343152 - DNA, 25 bp, Artificial
  probe
  misc_feature (1)..(25): SEQ ID NO: 2984; WAN024D8A; Start 441; Stop 465
tttaaagaatgccaaccaatcaaag

SEQ ID NO: 343153 - DNA, 25 bp, Artificial
  probe
  misc_feature (1)..(25): SEQ ID NO: 2984; WAN024D8A; Start 318; Stop 342
catgaaccaagtgtataaggattat

SEQ ID NO: 343154 - DNA, 25 bp, Artificial
  probe
  misc_feature (1)..(25): SEQ ID NO: 2984; WAN024D8A; Start 252; Stop 276
tacacgtattcaaccttatatgact

SEQ ID NO: 343155 - DNA, 25 bp, Artificial
  probe
  misc_feature (1)..(25): SEQ ID NO: 2984; WAN024D8A; Start 440; Stop 464
atttaaagaatgccaaccaatcaaa

SEQ ID NO: 343156 - DNA, 25 bp, Artificial
  probe
  misc_feature (1)..(25): SEQ ID NO: 2984; WAN024D8A; Start 372; Stop 396
tatctttgtcaatcagactacgaat

SEQ ID NO: 343157 - DNA, 25 bp, Artificial
  probe
  misc_feature (1)..(25): SEQ ID NO: 2984; WAN024D8A; Start 371; Stop 395
atatctttgtcaatcagactacgaa

SEQ ID NO: 343158 - DNA, 25 bp, Artificial
  probe
  misc_feature (1)..(25): SEQ ID NO: 2984; WAN024D8A; Start 544; Stop 568
gtttggaaatctgggttagatgatt

SEQ ID NO: 343159 - DNA, 25 bp, Artificial
  probe
  misc_feature (1)..(25): SEQ ID NO: 2984; WAN024D8A; Start 543; Stop 567
ggtttggaaatctgggttagatgat

SEQ ID NO: 343160 - DNA, 25 bp, Artificial
  probe
  misc_feature (1)..(25): SEQ ID NO: 2984; WAN024D8A; Start 284; Stop 308
cttattctcaagaattgtcaagtca

SEQ ID NO: 343161 - DNA, 25 bp, Artificial
  probe
  misc_feature (1)..(25): SEQ ID NO: 2984; WAN024D8A; Start 542; Stop 566
aggtttggaaatctgggttagatga

SEQ ID NO: 343162 - DNA, 25 bp, Artificial
  probe
  misc_feature (1)..(25): SEQ ID NO: 2984; WAN024D8A; Start 541; Stop 565
caggtttggaaatctgggttagatg

SEQ ID NO: 343163 - DNA, 25 bp, Artificial
  probe
  misc_feature (1)..(25): SEQ ID NO: 2984; WAN024D8A; Start 285; Stop 309
ttattctcaagaattgtcaagtcaa

SEQ ID NO: 343164 - DNA, 25 bp, Artificial
  probe
  misc_feature (1)..(25): SEQ ID NO: 2984; WAN024D8A; Start 439; Stop 463
gatttaaagaatgccaaccaatcaa

SEQ ID NO: 343165 - DNA, 25 bp, Artificial
  probe
  misc_feature (1)..(25): SEQ ID NO: 2984; WAN024D8A; Start 251; Stop 275
atacacgtattcaaccttatatgac

SEQ ID NO: 343166 - DNA, 25 bp, Artificial
  probe
  misc_feature (1)..(25): SEQ ID NO: 2985; WAN0249GG; Start 41; Stop 65
acagtacgttatttaaagaaagcgg

SEQ ID NO: 343167 - DNA, 25 bp, Artificial
  probe
  misc_feature (1)..(25): SEQ ID NO: 2985; WAN0249GG; Start 42; Stop 66
cagtacgttatttaaagaaagcgga

SEQ ID NO: 343168 - DNA, 25 bp, Artificial
  probe
  misc_feature (1)..(25): SEQ ID NO: 2985; WAN0249GG; Start 43; Stop 67
agtacgttatttaaagaaagcggat

SEQ ID NO: 343169 - DNA, 25 bp, Artificial
  probe
  misc_feature (1)..(25): SEQ ID NO: 2985; WAN0249GG; Start 44; Stop 68
gtacgttatttaaagaaagcggatt

SEQ ID NO: 343170 - DNA, 25 bp, Artificial
  probe
  misc_feature (1)..(25): SEQ ID NO: 2985; WAN0249GG; Start 40; Stop 64
tacagtacgttatttaaagaaagcg

SEQ ID NO: 343171 - DNA, 25 bp, Artificial
  probe
  misc_feature (1)..(25): SEQ ID NO: 2985; WAN0249GG; Start 46; Stop 70
acgttatttaaagaaagcggattaa

SEQ ID NO: 343172 - DNA, 25 bp, Artificial
  probe
  misc_feature (1)..(25): SEQ ID NO: 2985; WAN0249GG; Start 45; Stop 69
tacgttatttaaagaaagcggatta

SEQ ID NO: 343173 - DNA, 25 bp, Artificial
  probe
  misc_feature (1)..(25): SEQ ID NO: 2985; WAN0249GG; Start 39; Stop 63
ttacagtacgttatttaaagaaagc

SEQ ID NO: 343174 - DNA, 25 bp, Artificial
  probe
  misc_feature (1)..(25): SEQ ID NO: 2985; WAN0249GG; Start 47; Stop 71
cgttatttaaagaaagcggattaaa

SEQ ID NO: 343175 - DNA, 25 bp, Artificial
  probe
  misc_feature (1)..(25): SEQ ID NO: 2985; WAN0249GG; Start 10; Stop 34
acacttatttgaaagaatttctgta

SEQ ID NO: 343176 - DNA, 25 bp, Artificial
  probe
  misc_feature (1)..(25): SEQ ID NO: 2985; WAN0249GG; Start 9; Stop 33
tacacttatttgaaagaatttctgt

SEQ ID NO: 343177 - DNA, 25 bp, Artificial
  probe
  misc_feature (1)..(25): SEQ ID NO: 2985; WAN0249GG; Start 48; Stop 72
gttatttaaagaaagcggattaaaa

SEQ ID NO: 343178 - DNA, 25 bp, Artificial
  probe
  misc_feature (1)..(25): SEQ ID NO: 2986; WAN024FPO; Start 149; Stop 173
atggtatgtcaatgtatggtgaagg

SEQ ID NO: 343179 - DNA, 25 bp, Artificial
  probe
  misc_feature (1)..(25): SEQ ID NO: 2986; WAN024FPO; Start 376; Stop 400
gcaggaagtacagttattggaagaa

SEQ ID NO: 343180 - DNA, 25 bp, Artificial
  probe
  misc_feature (1)..(25): SEQ ID NO: 2986; WAN024FPO; Start 374; Stop 398
aagcaggaagtacagttattggaag

SEQ ID NO: 343181 - DNA, 25 bp, Artificial
  probe
  misc_feature (1)..(25): SEQ ID NO: 2986; WAN024FPO; Start 148; Stop 172
aatggtatgtcaatgtatggtgaag

SEQ ID NO: 343182 - DNA, 25 bp, Artificial
  probe
  misc_feature (1)..(25): SEQ ID NO: 2986; WAN024FPO; Start 368; Stop 392
tcattcaagcaggaagtacagttat

SEQ ID NO: 343183 - DNA, 25 bp, Artificial
  probe
  misc_feature (1)..(25): SEQ ID NO: 2986; WAN024FPO; Start 367; Stop 391
atcattcaagcaggaagtacagtta

SEQ ID NO: 343184 - DNA, 25 bp, Artificial
  probe
  misc_feature (1)..(25): SEQ ID NO: 2986; WAN024FPO; Start 366; Stop 390
aatcattcaagcaggaagtacagtt

SEQ ID NO: 343185 - DNA, 25 bp, Artificial
  probe
  misc_feature (1)..(25): SEQ ID NO: 2986; WAN024FPO; Start 369; Stop 393
cattcaagcaggaagtacagttatt

SEQ ID NO: 343186 - DNA, 25 bp, Artificial
  probe
  misc_feature (1)..(25): SEQ ID NO: 2986; WAN024FPO; Start 370; Stop 394
attcaagcaggaagtacagttattg

SEQ ID NO: 343187 - DNA, 25 bp, Artificial
  probe
  misc_feature (1)..(25): SEQ ID NO: 2986; WAN024FPO; Start 375; Stop 399
agcaggaagtacagttattggaaga

SEQ ID NO: 343188 - DNA, 25 bp, Artificial
  probe
  misc_feature (1)..(25): SEQ ID NO: 2986; WAN024FPO; Start 377; Stop 401
caggaagtacagttattggaagaat

SEQ ID NO: 343189 - DNA, 25 bp, Artificial
  probe
  misc_feature (1)..(25): SEQ ID NO: 2986; WAN024FPO; Start 373; Stop 397
caagcaggaagtacagttattggaa

SEQ ID NO: 343190 - DNA, 25 bp, Artificial
  probe
  misc_feature (1)..(25): SEQ ID NO: 2986; WAN024FPO; Start 371; Stop 395
ttcaagcaggaagtacagttattgg

SEQ ID NO: 343191 - DNA, 25 bp, Artificial
  probe
  misc_feature (1)..(25): SEQ ID NO: 2986; WAN024FPO; Start 365; Stop 389
caatcattcaagcaggaagtacagt

SEQ ID NO: 343192 - DNA, 25 bp, Artificial
  probe
  misc_feature (1)..(25): SEQ ID NO: 2986; WAN024FPO; Start 147; Stop 171
taatggtatgtcaatgtatggtgaa

SEQ ID NO: 343193 - DNA, 25 bp, Artificial
  probe
  misc_feature (1)..(25): SEQ ID NO: 2986; WAN024FPO; Start 146; Stop 170
ttaatggtatgtcaatgtatggtga

SEQ ID NO: 343194 - DNA, 25 bp, Artificial
  probe
  misc_feature (1)..(25): SEQ ID NO: 2986; WAN024FPO; Start 372; Stop 396
tcaagcaggaagtacagttattgga

SEQ ID NO: 343195 - DNA, 25 bp, Artificial
  probe
  misc_feature (1)..(25): SEQ ID NO: 2986; WAN024FPO; Start 337; Stop 361
ttaggtggtgcgattattgaggaag

SEQ ID NO: 343196 - DNA, 25 bp, Artificial
  probe
  misc_feature (1)..(25): SEQ ID NO: 2986; WAN024FPO; Start 378; Stop 402
aggaagtacagttattggaagaatt

SEQ ID NO: 343197 - DNA, 25 bp, Artificial
  probe
  misc_feature (1)..(25): SEQ ID NO: 2986; WAN024FPO; Start 309; Stop 333
cgtctgggtaggaaataatgtgata

SEQ ID NO: 343198 - DNA, 25 bp, Artificial
  probe
  misc_feature (1)..(25): SEQ ID NO: 2986; WAN024FPO; Start 213; Stop 237
ttgccaaattatcacttcctttcat

SEQ ID NO: 343199 - DNA, 25 bp, Artificial
  probe
  misc_feature (1)..(25): SEQ ID NO: 2986; WAN024FPO; Start 212; Stop 236
attgccaaattatcacttcctttca

SEQ ID NO: 343200 - DNA, 25 bp, Artificial
  probe
  misc_feature (1)..(25): SEQ ID NO: 2986; WAN024FPO; Start 364; Stop 388
gcaatcattcaagcaggaagtacag

SEQ ID NO: 343201 - DNA, 25 bp, Artificial
  probe
  misc_feature (1)..(25): SEQ ID NO: 2986; WAN024FPO; Start 153; Stop 177
tatgtcaatgtatggtgaagggaaa

SEQ ID NO: 343202 - DNA, 25 bp, Artificial
  probe
  misc_feature (1)..(25): SEQ ID NO: 2986; WAN024FPO; Start 214; Stop 238
tgccaaattatcacttcctttcata

SEQ ID NO: 343203 - DNA, 25 bp, Artificial
  probe
  misc_feature (1)..(25): SEQ ID NO: 2986; WAN024FPO; Start 152; Stop 176
gtatgtcaatgtatggtgaagggaa

SEQ ID NO: 343204 - DNA, 25 bp, Artificial
  probe
  misc_feature (1)..(25): SEQ ID NO: 2986; WAN024FPO; Start 310; Stop 334
gtctgggtaggaaataatgtgataa

SEQ ID NO: 343205 - DNA, 25 bp, Artificial
  probe
  misc_feature (1)..(25): SEQ ID NO: 2986; WAN024FPO; Start 209; Stop 233
tgaattgccaaattatcacttcctt

SEQ ID NO: 343206 - DNA, 25 bp, Artificial
  probe
  misc_feature (1)..(25): SEQ ID NO: 2986; WAN024FPO; Start 208; Stop 232
ttgaattgccaaattatcacttcct

SEQ ID NO: 343207 - DNA, 25 bp, Artificial
  probe
  misc_feature (1)..(25): SEQ ID NO: 2986; WAN024FPO; Start 203; Stop 227
caggattgaattgccaaattatcac

SEQ ID NO: 343208 - DNA, 25 bp, Artificial
  probe
  misc_feature (1)..(25): SEQ ID NO: 2986; WAN024FPO; Start 204; Stop 228
aggattgaattgccaaattatcact

SEQ ID NO: 343209 - DNA, 25 bp, Artificial
  probe
  misc_feature (1)..(25): SEQ ID NO: 2986; WAN024FPO; Start 202; Stop 226
tcaggattgaattgccaaattatca

SEQ ID NO: 343210 - DNA, 25 bp, Artificial
  probe
  misc_feature (1)..(25): SEQ ID NO: 2986; WAN024FPO; Start 336; Stop 360
tttaggtggtgcgattattgaggaa

SEQ ID NO: 343211 - DNA, 25 bp, Artificial
  probe
  misc_feature (1)..(25): SEQ ID NO: 2987; WAN024DFQ; Start 143; Stop 167
gctatactcctgagttgattgtcct

SEQ ID NO: 343212 - DNA, 25 bp, Artificial
  probe
  misc_feature (1)..(25): SEQ ID NO: 2987; WAN024DFQ; Start 19; Stop 43
accattatttgtattgcccttatcg

SEQ ID NO: 343213 - DNA, 25 bp, Artificial
  probe
  misc_feature (1)..(25): SEQ ID NO: 2987; WAN024DFQ; Start 20; Stop 44
ccattatttgtattgcccttatcgc

SEQ ID NO: 343214 - DNA, 25 bp, Artificial
  probe
  misc_feature (1)..(25): SEQ ID NO: 2987; WAN024DFQ; Start 15; Stop 39
tgtaaccattatttgtattgccctt

SEQ ID NO: 343215 - DNA, 25 bp, Artificial
  probe
  misc_feature (1)..(25): SEQ ID NO: 2987; WAN024DFQ; Start 14; Stop 38
ttgtaaccattatttgtattgccct

SEQ ID NO: 343216 - DNA, 25 bp, Artificial
  probe
  misc_feature (1)..(25): SEQ ID NO: 2987; WAN024DFQ; Start 141; Stop 165
aggctatactcctgagttgattgtc

SEQ ID NO: 343217 - DNA, 25 bp, Artificial
  probe
  misc_feature (1)..(25): SEQ ID NO: 2987; WAN024DFQ; Start 140; Stop 164
gaggctatactcctgagttgattgt

SEQ ID NO: 343218 - DNA, 25 bp, Artificial
  probe
  misc_feature (1)..(25): SEQ ID NO: 2987; WAN024DFQ; Start 142; Stop 166
ggctatactcctgagttgattgtcc

SEQ ID NO: 343219 - DNA, 25 bp, Artificial
  probe
  misc_feature (1)..(25): SEQ ID NO: 2987; WAN024DFQ; Start 13; Stop 37
attgtaaccattatttgtattgccc

SEQ ID NO: 343220 - DNA, 25 bp, Artificial
  probe
  misc_feature (1)..(25): SEQ ID NO: 2987; WAN024DFQ; Start 275; Stop 299
gggaagagtatgtagtggaaatcac

SEQ ID NO: 343221 - DNA, 25 bp, Artificial
  probe
  misc_feature (1)..(25): SEQ ID NO: 2987; WAN024DFQ; Start 18; Stop 42
aaccattatttgtattgcccttatc

SEQ ID NO: 343222 - DNA, 25 bp, Artificial
  probe
  misc_feature (1)..(25): SEQ ID NO: 2987; WAN024DFQ; Start 276; Stop 300
ggaagagtatgtagtggaaatcacg

SEQ ID NO: 343223 - DNA, 25 bp, Artificial
  probe
  misc_feature (1)..(25): SEQ ID NO: 2987; WAN024DFQ; Start 16; Stop 40
gtaaccattatttgtattgccctta

SEQ ID NO: 343224 - DNA, 25 bp, Artificial
  probe
  misc_feature (1)..(25): SEQ ID NO: 2987; WAN024DFQ; Start 324; Stop 348
ctttgcttgtggtatgaacatgatg

SEQ ID NO: 343225 - DNA, 25 bp, Artificial
  probe
  misc_feature (1)..(25): SEQ ID NO: 2987; WAN024DFQ; Start 111; Stop 135
ataccaagagattcgagtggaagtc

SEQ ID NO: 343226 - DNA, 25 bp, Artificial
  probe
  misc_feature (1)..(25): SEQ ID NO: 2987; WAN024DFQ; Start 110; Stop 134
gataccaagagattcgagtggaagt

SEQ ID NO: 343227 - DNA, 25 bp, Artificial
  probe
  misc_feature (1)..(25): SEQ ID NO: 2987; WAN024DFQ; Start 277; Stop 301
gaagagtatgtagtggaaatcacgc

SEQ ID NO: 343228 - DNA, 25 bp, Artificial
  probe
  misc_feature (1)..(25): SEQ ID NO: 2987; WAN024DFQ; Start 115; Stop 139
caagagattcgagtggaagtcatgg

SEQ ID NO: 343229 - DNA, 25 bp, Artificial
  probe
  misc_feature (1)..(25): SEQ ID NO: 2987; WAN024DFQ; Start 109; Stop 133
ggataccaagagattcgagtggaag

SEQ ID NO: 343230 - DNA, 25 bp, Artificial
  probe
  misc_feature (1)..(25): SEQ ID NO: 2987; WAN024DFQ; Start 214; Stop 238
tcaccatgtctggatcaaattgttt

SEQ ID NO: 343231 - DNA, 25 bp, Artificial
  probe
  misc_feature (1)..(25): SEQ ID NO: 2987; WAN024DFQ; Start 213; Stop 237
ttcaccatgtctggatcaaattgtt

SEQ ID NO: 343232 - DNA, 25 bp, Artificial
  probe
  misc_feature (1)..(25): SEQ ID NO: 2987; WAN024DFQ; Start 212; Stop 236
cttcaccatgtctggatcaaattgt

SEQ ID NO: 343233 - DNA, 25 bp, Artificial
  probe
  misc_feature (1)..(25): SEQ ID NO: 2987; WAN024DFQ; Start 323; Stop 347
gctttgcttgtggtatgaacatgat

SEQ ID NO: 343234 - DNA, 25 bp, Artificial
  probe
  misc_feature (1)..(25): SEQ ID NO: 2987; WAN024DFQ; Start 278; Stop 302
aagagtatgtagtggaaatcacgcc

SEQ ID NO: 343235 - DNA, 25 bp, Artificial
  probe
  misc_feature (1)..(25): SEQ ID NO: 2987; WAN024DFQ; Start 17; Stop 41
taaccattatttgtattgcccttat

SEQ ID NO: 343236 - DNA, 25 bp, Artificial
  probe
  misc_feature (1)..(25): SEQ ID NO: 2987; WAN024DFQ; Start 112; Stop 136
taccaagagattcgagtggaagtca

SEQ ID NO: 343237 - DNA, 25 bp, Artificial
  probe
  misc_feature (1)..(25): SEQ ID NO: 2987; WAN024DFQ; Start 283; Stop 307
tatgtagtggaaatcacgcctgaac

SEQ ID NO: 343238 - DNA, 25 bp, Artificial
  probe
  misc_feature (1)..(25): SEQ ID NO: 2987; WAN024DFQ; Start 282; Stop 306
gtatgtagtggaaatcacgcctgaa

SEQ ID NO: 343239 - DNA, 25 bp, Artificial
  probe
  misc_feature (1)..(25): SEQ ID NO: 2987; WAN024DFQ; Start 325; Stop 349
tttgcttgtggtatgaacatgatgc

SEQ ID NO: 343240 - DNA, 25 bp, Artificial
  probe
  misc_feature (1)..(25): SEQ ID NO: 2987; WAN024DFQ; Start 105; Stop 129
aaacggataccaagagattcgagtg

SEQ ID NO: 343241 - DNA, 25 bp, Artificial
  probe
  misc_feature (1)..(25): SEQ ID NO: 2987; WAN024DFQ; Start 274; Stop 298
ggggaagagtatgtagtggaaatca

SEQ ID NO: 343242 - DNA, 25 bp, Artificial
  probe
  misc_feature (1)..(25): SEQ ID NO: 2987; WAN024DFQ; Start 211; Stop 235
ccttcaccatgtctggatcaaattg

SEQ ID NO: 343243 - DNA, 25 bp, Artificial
  probe
  misc_feature (1)..(25): SEQ ID NO: 2987; WAN024DFQ; Start 210; Stop 234
tccttcaccatgtctggatcaaatt

SEQ ID NO: 343244 - DNA, 25 bp, Artificial
  probe
  misc_feature (1)..(25): SEQ ID NO: 2988; WAN024CTL; Start 764; Stop 788
attatggttcagcctcacaatatca

SEQ ID NO: 343245 - DNA, 25 bp, Artificial
  probe
  misc_feature (1)..(25): SEQ ID NO: 2988; WAN024CTL; Start 859; Stop 883
ttaactgagatggaacaagaccttc

SEQ ID NO: 343246 - DNA, 25 bp, Artificial
  probe
  misc_feature (1)..(25): SEQ ID NO: 2988; WAN024CTL; Start 763; Stop 787
tattatggttcagcctcacaatatc

SEQ ID NO: 343247 - DNA, 25 bp, Artificial
  probe
  misc_feature (1)..(25): SEQ ID NO: 2988; WAN024CTL; Start 860; Stop 884
taactgagatggaacaagaccttca

SEQ ID NO: 343248 - DNA, 25 bp, Artificial
  probe
  misc_feature (1)..(25): SEQ ID NO: 2988; WAN024CTL; Start 350; Stop 374
ctattgatattgctcatggtcatgc

SEQ ID NO: 343249 - DNA, 25 bp, Artificial
  probe
  misc_feature (1)..(25): SEQ ID NO: 2988; WAN024CTL; Start 347; Stop 371
tcactattgatattgctcatggtca

SEQ ID NO: 343250 - DNA, 25 bp, Artificial
  probe
  misc_feature (1)..(25): SEQ ID NO: 2988; WAN024CTL; Start 349; Stop 373
actattgatattgctcatggtcatg

SEQ ID NO: 343251 - DNA, 25 bp, Artificial
  probe
  misc_feature (1)..(25): SEQ ID NO: 2988; WAN024CTL; Start 348; Stop 372
cactattgatattgctcatggtcat

SEQ ID NO: 343252 - DNA, 25 bp, Artificial
  probe
  misc_feature (1)..(25): SEQ ID NO: 2988; WAN024CTL; Start 861; Stop 885
aactgagatggaacaagaccttcaa

SEQ ID NO: 343253 - DNA, 25 bp, Artificial
  probe
  misc_feature (1)..(25): SEQ ID NO: 2988; WAN024CTL; Start 351; Stop 375
tattgatattgctcatggtcatgcg

SEQ ID NO: 343254 - DNA, 25 bp, Artificial
  probe
  misc_feature (1)..(25): SEQ ID NO: 2988; WAN024CTL; Start 872; Stop 896
aacaagaccttcaaagtgctatttc

SEQ ID NO: 343255 - DNA, 25 bp, Artificial
  probe
  misc_feature (1)..(25): SEQ ID NO: 2988; WAN024CTL; Start 858; Stop 882
tttaactgagatggaacaagacctt

SEQ ID NO: 343256 - DNA, 25 bp, Artificial
  probe
  misc_feature (1)..(25): SEQ ID NO: 2988; WAN024CTL; Start 852; Stop 876
agacactttaactgagatggaacaa

SEQ ID NO: 343257 - DNA, 25 bp, Artificial
  probe
  misc_feature (1)..(25): SEQ ID NO: 2988; WAN024CTL; Start 185; Stop 209
aaggtggttacttctacattatgca

SEQ ID NO: 343258 - DNA, 25 bp, Artificial
  probe
  misc_feature (1)..(25): SEQ ID NO: 2988; WAN024CTL; Start 420; Stop 444
agatacctttgtcattgctggaaat

SEQ ID NO: 343259 - DNA, 25 bp, Artificial
  probe
  misc_feature (1)..(25): SEQ ID NO: 2988; WAN024CTL; Start 878; Stop 902
accttcaaagtgctatttcttatgc

SEQ ID NO: 343260 - DNA, 25 bp, Artificial
  probe
  misc_feature (1)..(25): SEQ ID NO: 2988; WAN024CTL; Start 871; Stop 895
gaacaagaccttcaaagtgctattt

SEQ ID NO: 343261 - DNA, 25 bp, Artificial
  probe
  misc_feature (1)..(25): SEQ ID NO: 2988; WAN024CTL; Start 854; Stop 878
acactttaactgagatggaacaaga

SEQ ID NO: 343262 - DNA, 25 bp, Artificial
  probe
  misc_feature (1)..(25): SEQ ID NO: 2988; WAN024CTL; Start 851; Stop 875
aagacactttaactgagatggaaca

SEQ ID NO: 343263 - DNA, 25 bp, Artificial
  probe
  misc_feature (1)..(25): SEQ ID NO: 2988; WAN024CTL; Start 855; Stop 879
cactttaactgagatggaacaagac

SEQ ID NO: 343264 - DNA, 25 bp, Artificial
  probe
  misc_feature (1)..(25): SEQ ID NO: 2988; WAN024CTL; Start 853; Stop 877
gacactttaactgagatggaacaag

SEQ ID NO: 343265 - DNA, 25 bp, Artificial
  probe
  misc_feature (1)..(25): SEQ ID NO: 2988; WAN024CTL; Start 850; Stop 874
caagacactttaactgagatggaac

SEQ ID NO: 343266 - DNA, 25 bp, Artificial
  probe
  misc_feature (1)..(25): SEQ ID NO: 2988; WAN024CTL; Start 180; Stop 204
ggctaaaggtggttacttctacatt

SEQ ID NO: 343267 - DNA, 25 bp, Artificial
  probe
  misc_feature (1)..(25): SEQ ID NO: 2988; WAN024CTL; Start 857; Stop 881
ctttaactgagatggaacaagacct

SEQ ID NO: 343268 - DNA, 25 bp, Artificial
  probe
  misc_feature (1)..(25): SEQ ID NO: 2988; WAN024CTL; Start 412; Stop 436
gaattgccagatacctttgtcattg

SEQ ID NO: 343269 - DNA, 25 bp, Artificial
  probe
  misc_feature (1)..(25): SEQ ID NO: 2988; WAN024CTL; Start 411; Stop 435
agaattgccagatacctttgtcatt

SEQ ID NO: 343270 - DNA, 25 bp, Artificial
  probe
  misc_feature (1)..(25): SEQ ID NO: 2988; WAN024CTL; Start 856; Stop 880
actttaactgagatggaacaagacc

SEQ ID NO: 343271 - DNA, 25 bp, Artificial
  probe
  misc_feature (1)..(25): SEQ ID NO: 2988; WAN024CTL; Start 873; Stop 897
acaagaccttcaaagtgctatttct

SEQ ID NO: 343272 - DNA, 25 bp, Artificial
  probe
  misc_feature (1)..(25): SEQ ID NO: 2988; WAN024CTL; Start 184; Stop 208
aaaggtggttacttctacattatgc

SEQ ID NO: 343273 - DNA, 25 bp, Artificial
  probe
  misc_feature (1)..(25): SEQ ID NO: 2988; WAN024CTL; Start 410; Stop 434
aagaattgccagatacctttgtcat

SEQ ID NO: 343274 - DNA, 25 bp, Artificial
  probe
  misc_feature (1)..(25): SEQ ID NO: 2988; WAN024CTL; Start 403; Stop 427
atcaagaaagaattgccagatacct

SEQ ID NO: 343275 - DNA, 25 bp, Artificial
  probe
  misc_feature (1)..(25): SEQ ID NO: 2988; WAN024CTL; Start 402; Stop 426
catcaagaaagaattgccagatacc

SEQ ID NO: 343276 - DNA, 25 bp, Artificial
  probe
  misc_feature (1)..(25): SEQ ID NO: 2988; WAN024CTL; Start 404; Stop 428
tcaagaaagaattgccagatacctt

SEQ ID NO: 343277 - DNA, 25 bp, Artificial
  probe
  misc_feature (1)..(25): SEQ ID NO: 2989; WAN024DLI; Start 95; Stop 119
gtggaagaagtggtatatctggttg

SEQ ID NO: 343278 - DNA, 25 bp, Artificial
  probe
  misc_feature (1)..(25): SEQ ID NO: 2989; WAN024DLI; Start 96; Stop 120
tggaagaagtggtatatctggttgg

SEQ ID NO: 343279 - DNA, 25 bp, Artificial
  probe
  misc_feature (1)..(25): SEQ ID NO: 2989; WAN024DLI; Start 94; Stop 118
ggtggaagaagtggtatatctggtt

SEQ ID NO: 343280 - DNA, 25 bp, Artificial
  probe
  misc_feature (1)..(25): SEQ ID NO: 2989; WAN024DLI; Start 89; Stop 113
gaggtggtggaagaagtggtatatc

SEQ ID NO: 343281 - DNA, 25 bp, Artificial
  probe
  misc_feature (1)..(25): SEQ ID NO: 2989; WAN024DLI; Start 92; Stop 116
gtggtggaagaagtggtatatctgg

SEQ ID NO: 343282 - DNA, 25 bp, Artificial
  probe
  misc_feature (1)..(25): SEQ ID NO: 2989; WAN024DLI; Start 91; Stop 115
ggtggtggaagaagtggtatatctg

SEQ ID NO: 343283 - DNA, 25 bp, Artificial
  probe
  misc_feature (1)..(25): SEQ ID NO: 2989; WAN024DLI; Start 90; Stop 114
aggtggtggaagaagtggtatatct

SEQ ID NO: 343284 - DNA, 25 bp, Artificial
  probe
  misc_feature (1)..(25): SEQ ID NO: 2989; WAN024DLI; Start 93; Stop 117
tggtggaagaagtggtatatctggt

SEQ ID NO: 343285 - DNA, 25 bp, Artificial
  probe
  misc_feature (1)..(25): SEQ ID NO: 2989; WAN024DLI; Start 194; Stop 218
tagatttagcagatggattgtttgg

SEQ ID NO: 343286 - DNA, 25 bp, Artificial
  probe
  misc_feature (1)..(25): SEQ ID NO: 2989; WAN024DLI; Start 88; Stop 112
ggaggtggtggaagaagtggtatat

SEQ ID NO: 343287 - DNA, 25 bp, Artificial
  probe
  misc_feature (1)..(25): SEQ ID NO: 2989; WAN024DLI; Start 195; Stop 219
agatttagcagatggattgtttggc

SEQ ID NO: 343288 - DNA, 25 bp, Artificial
  probe
  misc_feature (1)..(25): SEQ ID NO: 2989; WAN024DLI; Start 77; Stop 101
taaattctatgggaggtggtggaag

SEQ ID NO: 343289 - DNA, 25 bp, Artificial
  probe
  misc_feature (1)..(25): SEQ ID NO: 2989; WAN024DLI; Start 76; Stop 100
gtaaattctatgggaggtggtggaa

SEQ ID NO: 343290 - DNA, 25 bp, Artificial
  probe
  misc_feature (1)..(25): SEQ ID NO: 2989; WAN024DLI; Start 97; Stop 121
ggaagaagtggtatatctggttggg

SEQ ID NO: 343291 - DNA, 25 bp, Artificial
  probe
  misc_feature (1)..(25): SEQ ID NO: 2989; WAN024DLI; Start 193; Stop 217
atagatttagcagatggattgtttg

SEQ ID NO: 343292 - DNA, 25 bp, Artificial
  probe
  misc_feature (1)..(25): SEQ ID NO: 2989; WAN024DLI; Start 186; Stop 210
ttggactatagatttagcagatgga

SEQ ID NO: 343293 - DNA, 25 bp, Artificial
  probe
  misc_feature (1)..(25): SEQ ID NO: 2989; WAN024DLI; Start 187; Stop 211
tggactatagatttagcagatggat

SEQ ID NO: 343294 - DNA, 25 bp, Artificial
  probe
  misc_feature (1)..(25): SEQ ID NO: 2989; WAN024DLI; Start 73; Stop 97
ctcgtaaattctatgggaggtggtg

SEQ ID NO: 343295 - DNA, 25 bp, Artificial
  probe
  misc_feature (1)..(25): SEQ ID NO: 2989; WAN024DLI; Start 151; Stop 175
aatcaagggatgagtcctaatcgtg

SEQ ID NO: 343296 - DNA, 25 bp, Artificial
  probe
  misc_feature (1)..(25): SEQ ID NO: 2989; WAN024DLI; Start 150; Stop 174
caatcaagggatgagtcctaatcgt

SEQ ID NO: 343297 - DNA, 25 bp, Artificial
  probe
  misc_feature (1)..(25): SEQ ID NO: 2989; WAN024DLI; Start 185; Stop 209
attggactatagatttagcagatgg

SEQ ID NO: 343298 - DNA, 25 bp, Artificial
  probe
  misc_feature (1)..(25): SEQ ID NO: 2989; WAN024DLI; Start 78; Stop 102
aaattctatgggaggtggtggaaga

SEQ ID NO: 343299 - DNA, 25 bp, Artificial
  probe
  misc_feature (1)..(25): SEQ ID NO: 2989; WAN024DLI; Start 188; Stop 212
ggactatagatttagcagatggatt

SEQ ID NO: 343300 - DNA, 25 bp, Artificial
  probe
  misc_feature (1)..(25): SEQ ID NO: 2989; WAN024DLI; Start 67; Stop 91
ggcaacctcgtaaattctatgggag

SEQ ID NO: 343301 - DNA, 25 bp, Artificial
  probe
  misc_feature (1)..(25): SEQ ID NO: 2989; WAN024DLI; Start 148; Stop 172
ggcaatcaagggatgagtcctaatc

SEQ ID NO: 343302 - DNA, 25 bp, Artificial
  probe
  misc_feature (1)..(25): SEQ ID NO: 2989; WAN024DLI; Start 190; Stop 214
actatagatttagcagatggattgt

SEQ ID NO: 343303 - DNA, 25 bp, Artificial
  probe
  misc_feature (1)..(25): SEQ ID NO: 2989; WAN024DLI; Start 182; Stop 206
ttgattggactatagatttagcaga

SEQ ID NO: 343304 - DNA, 25 bp, Artificial
  probe
  misc_feature (1)..(25): SEQ ID NO: 2989; WAN024DLI; Start 28; Stop 52
atggaattgacagaagctgagttgc

SEQ ID NO: 343305 - DNA, 25 bp, Artificial
  probe
  misc_feature (1)..(25): SEQ ID NO: 2989; WAN024DLI; Start 75; Stop 99
cgtaaattctatgggaggtggtgga

SEQ ID NO: 343306 - DNA, 25 bp, Artificial
  probe
  misc_feature (1)..(25): SEQ ID NO: 2989; WAN024DLI; Start 74; Stop 98
tcgtaaattctatgggaggtggtgg

SEQ ID NO: 343307 - DNA, 25 bp, Artificial
  probe
  misc_feature (1)..(25): SEQ ID NO: 2989; WAN024DLI; Start 192; Stop 216
tatagatttagcagatggattgttt

SEQ ID NO: 343308 - DNA, 25 bp, Artificial
  probe
  misc_feature (1)..(25): SEQ ID NO: 2989; WAN024DLI; Start 183; Stop 207
tgattggactatagatttagcagat

SEQ ID NO: 343309 - DNA, 25 bp, Artificial
  probe
  misc_feature (1)..(25): SEQ ID NO: 2989; WAN024DLI; Start 149; Stop 173
gcaatcaagggatgagtcctaatcg

SEQ ID NO: 343310 - DNA, 25 bp, Artificial
  probe
  misc_feature (1)..(25): SEQ ID NO: 2990; WAN024EWV; Start 327; Stop 351
ttctgattcgtattcttcaaggtga

SEQ ID NO: 343311 - DNA, 25 bp, Artificial
  probe
  misc_feature (1)..(25): SEQ ID NO: 2990; WAN024EWV; Start 212; Stop 236
taacctcagcaccaatacggataat

SEQ ID NO: 343312 - DNA, 25 bp, Artificial
  probe
  misc_feature (1)..(25): SEQ ID NO: 2990; WAN024EWV; Start 211; Stop 235
ttaacctcagcaccaatacggataa

SEQ ID NO: 343313 - DNA, 25 bp, Artificial
  probe
  misc_feature (1)..(25): SEQ ID NO: 2990; WAN024EWV; Start 46; Stop 70
atcttaacatcacgaacgacaccat

SEQ ID NO: 343314 - DNA, 25 bp, Artificial
  probe
  misc_feature (1)..(25): SEQ ID NO: 2990; WAN024EWV; Start 213; Stop 237
aacctcagcaccaatacggataatc

SEQ ID NO: 343315 - DNA, 25 bp, Artificial
  probe
  misc_feature (1)..(25): SEQ ID NO: 2990; WAN024EWV; Start 198; Stop 222
aatatcaccttctttaacctcagca

SEQ ID NO: 343316 - DNA, 25 bp, Artificial
  probe
  misc_feature (1)..(25): SEQ ID NO: 2990; WAN024EWV; Start 199; Stop 223
atatcaccttctttaacctcagcac

SEQ ID NO: 343317 - DNA, 25 bp, Artificial
  probe
  misc_feature (1)..(25): SEQ ID NO: 2990; WAN024EWV; Start 197; Stop 221
gaatatcaccttctttaacctcagc

SEQ ID NO: 343318 - DNA, 25 bp, Artificial
  probe
  misc_feature (1)..(25): SEQ ID NO: 2990; WAN024EWV; Start 47; Stop 71
tcttaacatcacgaacgacaccatc

SEQ ID NO: 343319 - DNA, 25 bp, Artificial
  probe
  misc_feature (1)..(25): SEQ ID NO: 2990; WAN024EWV; Start 324; Stop 348
cgtttctgattcgtattcttcaagg

SEQ ID NO: 343320 - DNA, 25 bp, Artificial
  probe
  misc_feature (1)..(25): SEQ ID NO: 2990; WAN024EWV; Start 326; Stop 350
tttctgattcgtattcttcaaggtg

SEQ ID NO: 343321 - DNA, 25 bp, Artificial
  probe
  misc_feature (1)..(25): SEQ ID NO: 2990; WAN024EWV; Start 325; Stop 349
gtttctgattcgtattcttcaaggt

SEQ ID NO: 343322 - DNA, 25 bp, Artificial
  probe
  misc_feature (1)..(25): SEQ ID NO: 2990; WAN024EWV; Start 79; Stop 103
tgtggtacacgaagagaagtatcac

SEQ ID NO: 343323 - DNA, 25 bp, Artificial
  probe
  misc_feature (1)..(25): SEQ ID NO: 2990; WAN024EWV; Start 323; Stop 347
gcgtttctgattcgtattcttcaag

SEQ ID NO: 343324 - DNA, 25 bp, Artificial
  probe
  misc_feature (1)..(25): SEQ ID NO: 2990; WAN024EWV; Start 205; Stop 229
ccttctttaacctcagcaccaatac

SEQ ID NO: 343325 - DNA, 25 bp, Artificial
  probe
  misc_feature (1)..(25): SEQ ID NO: 2990; WAN024EWV; Start 210; Stop 234
tttaacctcagcaccaatacggata

SEQ ID NO: 343326 - DNA, 25 bp, Artificial
  probe
  misc_feature (1)..(25): SEQ ID NO: 2990; WAN024EWV; Start 204; Stop 228
accttctttaacctcagcaccaata

SEQ ID NO: 343327 - DNA, 25 bp, Artificial
  probe
  misc_feature (1)..(25): SEQ ID NO: 2990; WAN024EWV; Start 206; Stop 230
cttctttaacctcagcaccaatacg

SEQ ID NO: 343328 - DNA, 25 bp, Artificial
  probe
  misc_feature (1)..(25): SEQ ID NO: 2990; WAN024EWV; Start 45; Stop 69
gatcttaacatcacgaacgacacca

SEQ ID NO: 343329 - DNA, 25 bp, Artificial
  probe
  misc_feature (1)..(25): SEQ ID NO: 2990; WAN024EWV; Start 200; Stop 224
tatcaccttctttaacctcagcacc

SEQ ID NO: 343330 - DNA, 25 bp, Artificial
  probe
  misc_feature (1)..(25): SEQ ID NO: 2990; WAN024EWV; Start 84; Stop 108
tacacgaagagaagtatcacgcact

SEQ ID NO: 343331 - DNA, 25 bp, Artificial
  probe
  misc_feature (1)..(25): SEQ ID NO: 2990; WAN024EWV; Start 83; Stop 107
gtacacgaagagaagtatcacgcac

SEQ ID NO: 343332 - DNA, 25 bp, Artificial
  probe
  misc_feature (1)..(25): SEQ ID NO: 2990; WAN024EWV; Start 80; Stop 104
gtggtacacgaagagaagtatcacg

SEQ ID NO: 343333 - DNA, 25 bp, Artificial
  probe
  misc_feature (1)..(25): SEQ ID NO: 2990; WAN024EWV; Start 184; Stop 208
actttacctacaagaatatcacctt

SEQ ID NO: 343334 - DNA, 25 bp, Artificial
  probe
  misc_feature (1)..(25): SEQ ID NO: 2990; WAN024EWV; Start 209; Stop 233
ctttaacctcagcaccaatacggat

SEQ ID NO: 343335 - DNA, 25 bp, Artificial
  probe
  misc_feature (1)..(25): SEQ ID NO: 2990; WAN024EWV; Start 207; Stop 231
ttctttaacctcagcaccaatacgg

SEQ ID NO: 343336 - DNA, 25 bp, Artificial
  probe
  misc_feature (1)..(25): SEQ ID NO: 2990; WAN024EWV; Start 185; Stop 209
ctttacctacaagaatatcaccttc

SEQ ID NO: 343337 - DNA, 25 bp, Artificial
  probe
  misc_feature (1)..(25): SEQ ID NO: 2990; WAN024EWV; Start 203; Stop 227
caccttctttaacctcagcaccaat

SEQ ID NO: 343338 - DNA, 25 bp, Artificial
  probe
  misc_feature (1)..(25): SEQ ID NO: 2990; WAN024EWV; Start 183; Stop 207
tactttacctacaagaatatcacct

SEQ ID NO: 343339 - DNA, 25 bp, Artificial
  probe
  misc_feature (1)..(25): SEQ ID NO: 2990; WAN024EWV; Start 82; Stop 106
ggtacacgaagagaagtatcacgca

SEQ ID NO: 343340 - DNA, 25 bp, Artificial
  probe
  misc_feature (1)..(25): SEQ ID NO: 2990; WAN024EWV; Start 81; Stop 105
tggtacacgaagagaagtatcacgc

SEQ ID NO: 343341 - DNA, 25 bp, Artificial
  probe
  misc_feature (1)..(25): SEQ ID NO: 2990; WAN024EWV; Start 44; Stop 68
agatcttaacatcacgaacgacacc

SEQ ID NO: 343342 - DNA, 25 bp, Artificial
  probe
  misc_feature (1)..(25): SEQ ID NO: 2990; WAN024EWV; Start 208; Stop 232
tctttaacctcagcaccaatacgga

SEQ ID NO: 343343 - DNA, 25 bp, Artificial
  probe
  misc_feature (1)..(25): SEQ ID NO: 2991; WAN024FIH; Start 1233; Stop 1257
caagattccttacacttacttcaca

SEQ ID NO: 343344 - DNA, 25 bp, Artificial
  probe
  misc_feature (1)..(25): SEQ ID NO: 2991; WAN024FIH; Start 1232; Stop 1256
acaagattccttacacttacttcac

SEQ ID NO: 343345 - DNA, 25 bp, Artificial
  probe
  misc_feature (1)..(25): SEQ ID NO: 2991; WAN024FIH; Start 1228; Stop 1252
gacaacaagattccttacacttact

SEQ ID NO: 343346 - DNA, 25 bp, Artificial
  probe
  misc_feature (1)..(25): SEQ ID NO: 2991; WAN024FIH; Start 1229; Stop 1253
acaacaagattccttacacttactt

SEQ ID NO: 343347 - DNA, 25 bp, Artificial
  probe
  misc_feature (1)..(25): SEQ ID NO: 2991; WAN024FIH; Start 110; Stop 134
ctatgtacggtggaacttgtatcaa

SEQ ID NO: 343348 - DNA, 25 bp, Artificial
  probe
  misc_feature (1)..(25): SEQ ID NO: 2991; WAN024FIH; Start 111; Stop 135
tatgtacggtggaacttgtatcaac

SEQ ID NO: 343349 - DNA, 25 bp, Artificial
  probe
  misc_feature (1)..(25): SEQ ID NO: 2991; WAN024FIH; Start 1234; Stop 1258
aagattccttacacttacttcacaa

SEQ ID NO: 343350 - DNA, 25 bp, Artificial
  probe
  misc_feature (1)..(25): SEQ ID NO: 2991; WAN024FIH; Start 1231; Stop 1255
aacaagattccttacacttacttca

SEQ ID NO: 343351 - DNA, 25 bp, Artificial
  probe
  misc_feature (1)..(25): SEQ ID NO: 2991; WAN024FIH; Start 1281; Stop 1305
cttggctgagaacttgaatgacttg

SEQ ID NO: 343352 - DNA, 25 bp, Artificial
  probe
  misc_feature (1)..(25): SEQ ID NO: 2991; WAN024FIH; Start 1230; Stop 1254
caacaagattccttacacttacttc

SEQ ID NO: 343353 - DNA, 25 bp, Artificial
  probe
  misc_feature (1)..(25): SEQ ID NO: 2991; WAN024FIH; Start 1226; Stop 1250
tggacaacaagattccttacactta

SEQ ID NO: 343354 - DNA, 25 bp, Artificial
  probe
  misc_feature (1)..(25): SEQ ID NO: 2991; WAN024FIH; Start 1220; Stop 1244
ttgctatggacaacaagattcctta

SEQ ID NO: 343355 - DNA, 25 bp, Artificial
  probe
  misc_feature (1)..(25): SEQ ID NO: 2991; WAN024FIH; Start 1225; Stop 1249
atggacaacaagattccttacactt

SEQ ID NO: 343356 - DNA, 25 bp, Artificial
  probe
  misc_feature (1)..(25): SEQ ID NO: 2991; WAN024FIH; Start 1227; Stop 1251
ggacaacaagattccttacacttac

SEQ ID NO: 343357 - DNA, 25 bp, Artificial
  probe
  misc_feature (1)..(25): SEQ ID NO: 2991; WAN024FIH; Start 1224; Stop 1248
tatggacaacaagattccttacact

SEQ ID NO: 343358 - DNA, 25 bp, Artificial
  probe
  misc_feature (1)..(25): SEQ ID NO: 2991; WAN024FIH; Start 1223; Stop 1247
ctatggacaacaagattccttacac

SEQ ID NO: 343359 - DNA, 25 bp, Artificial
  probe
  misc_feature (1)..(25): SEQ ID NO: 2991; WAN024FIH; Start 1222; Stop 1246
gctatggacaacaagattccttaca

SEQ ID NO: 343360 - DNA, 25 bp, Artificial
  probe
  misc_feature (1)..(25): SEQ ID NO: 2991; WAN024FIH; Start 1221; Stop 1245
tgctatggacaacaagattccttac

SEQ ID NO: 343361 - DNA, 25 bp, Artificial
  probe
  misc_feature (1)..(25): SEQ ID NO: 2991; WAN024FIH; Start 1292; Stop 1316
acttgaatgacttgtttgcgattta

SEQ ID NO: 343362 - DNA, 25 bp, Artificial
  probe
  misc_feature (1)..(25): SEQ ID NO: 2991; WAN024FIH; Start 1282; Stop 1306
ttggctgagaacttgaatgacttgt

SEQ ID NO: 343363 - DNA, 25 bp, Artificial
  probe
  misc_feature (1)..(25): SEQ ID NO: 2991; WAN024FIH; Start 973; Stop 997
ctcaatgtgccaaatactatgttca

SEQ ID NO: 343364 - DNA, 25 bp, Artificial
  probe
  misc_feature (1)..(25): SEQ ID NO: 2991; WAN024FIH; Start 971; Stop 995
gtctcaatgtgccaaatactatgtt

SEQ ID NO: 343365 - DNA, 25 bp, Artificial
  probe
  misc_feature (1)..(25): SEQ ID NO: 2991; WAN024FIH; Start 972; Stop 996
tctcaatgtgccaaatactatgttc

SEQ ID NO: 343366 - DNA, 25 bp, Artificial
  probe
  misc_feature (1)..(25): SEQ ID NO: 2991; WAN024FIH; Start 109; Stop 133
gctatgtacggtggaacttgtatca

SEQ ID NO: 343367 - DNA, 25 bp, Artificial
  probe
  misc_feature (1)..(25): SEQ ID NO: 2991; WAN024FIH; Start 754; Stop 778
aaaccaaatgtagaaccacttcaac

SEQ ID NO: 343368 - DNA, 25 bp, Artificial
  probe
  misc_feature (1)..(25): SEQ ID NO: 2991; WAN024FIH; Start 753; Stop 777
caaaccaaatgtagaaccacttcaa

SEQ ID NO: 343369 - DNA, 25 bp, Artificial
  probe
  misc_feature (1)..(25): SEQ ID NO: 2991; WAN024FIH; Start 1293; Stop 1317
cttgaatgacttgtttgcgatttaa

SEQ ID NO: 343370 - DNA, 25 bp, Artificial
  probe
  misc_feature (1)..(25): SEQ ID NO: 2991; WAN024FIH; Start 1283; Stop 1307
tggctgagaacttgaatgacttgtt

SEQ ID NO: 343371 - DNA, 25 bp, Artificial
  probe
  misc_feature (1)..(25): SEQ ID NO: 2991; WAN024FIH; Start 1295; Stop 1319
tgaatgacttgtttgcgatttaact

SEQ ID NO: 343372 - DNA, 25 bp, Artificial
  probe
  misc_feature (1)..(25): SEQ ID NO: 2991; WAN024FIH; Start 756; Stop 780
accaaatgtagaaccacttcaactt

SEQ ID NO: 343373 - DNA, 25 bp, Artificial
  probe
  misc_feature (1)..(25): SEQ ID NO: 2991; WAN024FIH; Start 755; Stop 779
aaccaaatgtagaaccacttcaact

SEQ ID NO: 343374 - DNA, 25 bp, Artificial
  probe
  misc_feature (1)..(25): SEQ ID NO: 2991; WAN024FIH; Start 1294; Stop 1318
ttgaatgacttgtttgcgatttaac

SEQ ID NO: 343375 - DNA, 25 bp, Artificial
  probe
  misc_feature (1)..(25): SEQ ID NO: 2991; WAN024FIH; Start 1291; Stop 1315
aacttgaatgacttgtttgcgattt

SEQ ID NO: 343376 - DNA, 25 bp, Artificial
  probe
  misc_feature (1)..(25): SEQ ID NO: 2992; WAN024FIF; Start 26; Stop 50
tcgaatttcattctagcacaagaaa

SEQ ID NO: 343377 - DNA, 25 bp, Artificial
  probe
  misc_feature (1)..(25): SEQ ID NO: 2992; WAN024FIF; Start 61; Stop 85
cacaattctgctacggaaaagacag

SEQ ID NO: 343378 - DNA, 25 bp, Artificial
  probe
  misc_feature (1)..(25): SEQ ID NO: 2992; WAN024FIF; Start 27; Stop 51
cgaatttcattctagcacaagaaaa

SEQ ID NO: 343379 - DNA, 25 bp, Artificial
  probe
  misc_feature (1)..(25): SEQ ID NO: 2992; WAN024FIF; Start 25; Stop 49
ttcgaatttcattctagcacaagaa

SEQ ID NO: 343380 - DNA, 25 bp, Artificial
  probe
  misc_feature (1)..(25): SEQ ID NO: 2992; WAN024FIF; Start 56; Stop 80
ttttgcacaattctgctacggaaaa

SEQ ID NO: 343381 - DNA, 25 bp, Artificial
  probe
  misc_feature (1)..(25): SEQ ID NO: 2992; WAN024FIF; Start 62; Stop 86
acaattctgctacggaaaagacaga

SEQ ID NO: 343382 - DNA, 25 bp, Artificial
  probe
  misc_feature (1)..(25): SEQ ID NO: 2992; WAN024FIF; Start 57; Stop 81
tttgcacaattctgctacggaaaag

SEQ ID NO: 343383 - DNA, 25 bp, Artificial
  probe
  misc_feature (1)..(25): SEQ ID NO: 2992; WAN024FIF; Start 55; Stop 79
cttttgcacaattctgctacggaaa

SEQ ID NO: 343384 - DNA, 25 bp, Artificial
  probe
  misc_feature (1)..(25): SEQ ID NO: 2992; WAN024FIF; Start 52; Stop 76
aaacttttgcacaattctgctacgg

SEQ ID NO: 343385 - DNA, 25 bp, Artificial
  probe
  misc_feature (1)..(25): SEQ ID NO: 2992; WAN024FIF; Start 60; Stop 84
gcacaattctgctacggaaaagaca

SEQ ID NO: 343386 - DNA, 25 bp, Artificial
  probe
  misc_feature (1)..(25): SEQ ID NO: 2992; WAN024FIF; Start 58; Stop 82
ttgcacaattctgctacggaaaaga

SEQ ID NO: 343387 - DNA, 25 bp, Artificial
  probe
  misc_feature (1)..(25): SEQ ID NO: 2992; WAN024FIF; Start 54; Stop 78
acttttgcacaattctgctacggaa

SEQ ID NO: 343388 - DNA, 25 bp, Artificial
  probe
  misc_feature (1)..(25): SEQ ID NO: 2992; WAN024FIF; Start 53; Stop 77
aacttttgcacaattctgctacgga

SEQ ID NO: 343389 - DNA, 25 bp, Artificial
  probe
  misc_feature (1)..(25): SEQ ID NO: 2992; WAN024FIF; Start 59; Stop 83
tgcacaattctgctacggaaaagac

SEQ ID NO: 343390 - DNA, 25 bp, Artificial
  probe
  misc_feature (1)..(25): SEQ ID NO: 2993; WAN024FCV; Start 404; Stop 428
gttatagagaggaacaatctggatg

SEQ ID NO: 343391 - DNA, 25 bp, Artificial
  probe
  misc_feature (1)..(25): SEQ ID NO: 2993; WAN024FCV; Start 405; Stop 429
ttatagagaggaacaatctggatgt

SEQ ID NO: 343392 - DNA, 25 bp, Artificial
  probe
  misc_feature (1)..(25): SEQ ID NO: 2993; WAN024FCV; Start 453; Stop 477
acagaatgagatagaagagcttagt

SEQ ID NO: 343393 - DNA, 25 bp, Artificial
  probe
  misc_feature (1)..(25): SEQ ID NO: 2993; WAN024FCV; Start 452; Stop 476
aacagaatgagatagaagagcttag

SEQ ID NO: 343394 - DNA, 25 bp, Artificial
  probe
  misc_feature (1)..(25): SEQ ID NO: 2993; WAN024FCV; Start 57; Stop 81
catttgggtatctgtgcttgataaa

SEQ ID NO: 343395 - DNA, 25 bp, Artificial
  probe
  misc_feature (1)..(25): SEQ ID NO: 2993; WAN024FCV; Start 369; Stop 393
agttatcggactgcatatgaatagg

SEQ ID NO: 343396 - DNA, 25 bp, Artificial
  probe
  misc_feature (1)..(25): SEQ ID NO: 2993; WAN024FCV; Start 366; Stop 390
tgaagttatcggactgcatatgaat

SEQ ID NO: 343397 - DNA, 25 bp, Artificial
  probe
  misc_feature (1)..(25): SEQ ID NO: 2993; WAN024FCV; Start 365; Stop 389
atgaagttatcggactgcatatgaa

SEQ ID NO: 343398 - DNA, 25 bp, Artificial
  probe
  misc_feature (1)..(25): SEQ ID NO: 2993; WAN024FCV; Start 364; Stop 388
catgaagttatcggactgcatatga

SEQ ID NO: 343399 - DNA, 25 bp, Artificial
  probe
  misc_feature (1)..(25): SEQ ID NO: 2993; WAN024FCV; Start 61; Stop 85
tgggtatctgtgcttgataaatatg

SEQ ID NO: 343400 - DNA, 25 bp, Artificial
  probe
  misc_feature (1)..(25): SEQ ID NO: 2993; WAN024FCV; Start 58; Stop 82
atttgggtatctgtgcttgataaat

SEQ ID NO: 343401 - DNA, 25 bp, Artificial
  probe
  misc_feature (1)..(25): SEQ ID NO: 2993; WAN024FCV; Start 67; Stop 91
tctgtgcttgataaatatgagaagt

SEQ ID NO: 343402 - DNA, 25 bp, Artificial
  probe
  misc_feature (1)..(25): SEQ ID NO: 2993; WAN024FCV; Start 56; Stop 80
ccatttgggtatctgtgcttgataa

SEQ ID NO: 343403 - DNA, 25 bp, Artificial
  probe
  misc_feature (1)..(25): SEQ ID NO: 2993; WAN024FCV; Start 62; Stop 86
gggtatctgtgcttgataaatatga

SEQ ID NO: 343404 - DNA, 25 bp, Artificial
  probe
  misc_feature (1)..(25): SEQ ID NO: 2993; WAN024FCV; Start 454; Stop 478
cagaatgagatagaagagcttagta

SEQ ID NO: 343405 - DNA, 25 bp, Artificial
  probe
  misc_feature (1)..(25): SEQ ID NO: 2993; WAN024FCV; Start 368; Stop 392
aagttatcggactgcatatgaatag

SEQ ID NO: 343406 - DNA, 25 bp, Artificial
  probe
  misc_feature (1)..(25): SEQ ID NO: 2993; WAN024FCV; Start 367; Stop 391
gaagttatcggactgcatatgaata

SEQ ID NO: 343407 - DNA, 25 bp, Artificial
  probe
  misc_feature (1)..(25): SEQ ID NO: 2993; WAN024FCV; Start 59; Stop 83
tttgggtatctgtgcttgataaata

SEQ ID NO: 343408 - DNA, 25 bp, Artificial
  probe
  misc_feature (1)..(25): SEQ ID NO: 2993; WAN024FCV; Start 48; Stop 72
tttagagaccatttgggtatctgtg

SEQ ID NO: 343409 - DNA, 25 bp, Artificial
  probe
  misc_feature (1)..(25): SEQ ID NO: 2993; WAN024FCV; Start 47; Stop 71
atttagagaccatttgggtatctgt

SEQ ID NO: 343410 - DNA, 25 bp, Artificial
  probe
  misc_feature (1)..(25): SEQ ID NO: 2993; WAN024FCV; Start 60; Stop 84
ttgggtatctgtgcttgataaatat

SEQ ID NO: 343411 - DNA, 25 bp, Artificial
  probe
  misc_feature (1)..(25): SEQ ID NO: 2993; WAN024FCV; Start 68; Stop 92
ctgtgcttgataaatatgagaagtt

SEQ ID NO: 343412 - DNA, 25 bp, Artificial
  probe
  misc_feature (1)..(25): SEQ ID NO: 2993; WAN024FCV; Start 421; Stop 445
tctggatgtttagatatggttgtta

SEQ ID NO: 343413 - DNA, 25 bp, Artificial
  probe
  misc_feature (1)..(25): SEQ ID NO: 2993; WAN024FCV; Start 46; Stop 70
aatttagagaccatttgggtatctg

SEQ ID NO: 343414 - DNA, 25 bp, Artificial
  probe
  misc_feature (1)..(25): SEQ ID NO: 2993; WAN024FCV; Start 406; Stop 430
tatagagaggaacaatctggatgtt

SEQ ID NO: 343415 - DNA, 25 bp, Artificial
  probe
  misc_feature (1)..(25): SEQ ID NO: 2993; WAN024FCV; Start 403; Stop 427
tgttatagagaggaacaatctggat

SEQ ID NO: 343416 - DNA, 25 bp, Artificial
  probe
  misc_feature (1)..(25): SEQ ID NO: 2993; WAN024FCV; Start 363; Stop 387
tcatgaagttatcggactgcatatg

SEQ ID NO: 343417 - DNA, 25 bp, Artificial
  probe
  misc_feature (1)..(25): SEQ ID NO: 2993; WAN024FCV; Start 393; Stop 417
ggctatatcttgttatagagaggaa

SEQ ID NO: 343418 - DNA, 25 bp, Artificial
  probe
  misc_feature (1)..(25): SEQ ID NO: 2993; WAN024FCV; Start 251; Stop 275
tatcaactgacattgaacgtattgg

SEQ ID NO: 343419 - DNA, 25 bp, Artificial
  probe
  misc_feature (1)..(25): SEQ ID NO: 2993; WAN024FCV; Start 63; Stop 87
ggtatctgtgcttgataaatatgag

SEQ ID NO: 343420 - DNA, 25 bp, Artificial
  probe
  misc_feature (1)..(25): SEQ ID NO: 2993; WAN024FCV; Start 66; Stop 90
atctgtgcttgataaatatgagaag

SEQ ID NO: 343421 - DNA, 25 bp, Artificial
  probe
  misc_feature (1)..(25): SEQ ID NO: 2993; WAN024FCV; Start 376; Stop 400
ggactgcatatgaatagggctatat

SEQ ID NO: 343422 - DNA, 25 bp, Artificial
  probe
  misc_feature (1)..(25): SEQ ID NO: 2993; WAN024FCV; Start 55; Stop 79
accatttgggtatctgtgcttgata

SEQ ID NO: 343423 - DNA, 25 bp, Artificial
  probe
  misc_feature (1)..(25): SEQ ID NO: 2994; WAN024DG7; Start 37; Stop 61
atgagtatgattgaagttagccatt

SEQ ID NO: 343424 - DNA, 25 bp, Artificial
  probe
  misc_feature (1)..(25): SEQ ID NO: 2994; WAN024DG7; Start 36; Stop 60
aatgagtatgattgaagttagccat

SEQ ID NO: 343425 - DNA, 25 bp, Artificial
  probe
  misc_feature (1)..(25): SEQ ID NO: 2994; WAN024DG7; Start 34; Stop 58
gcaatgagtatgattgaagttagcc

SEQ ID NO: 343426 - DNA, 25 bp, Artificial
  probe
  misc_feature (1)..(25): SEQ ID NO: 2994; WAN024DG7; Start 35; Stop 59
caatgagtatgattgaagttagcca

SEQ ID NO: 343427 - DNA, 25 bp, Artificial
  probe
  misc_feature (1)..(25): SEQ ID NO: 2994; WAN024DG7; Start 38; Stop 62
tgagtatgattgaagttagccattt

SEQ ID NO: 343428 - DNA, 25 bp, Artificial
  probe
  misc_feature (1)..(25): SEQ ID NO: 2994; WAN024DG7; Start 33; Stop 57
tgcaatgagtatgattgaagttagc

SEQ ID NO: 343429 - DNA, 25 bp, Artificial
  probe
  misc_feature (1)..(25): SEQ ID NO: 2994; WAN024DG7; Start 31; Stop 55
ggtgcaatgagtatgattgaagtta

SEQ ID NO: 343430 - DNA, 25 bp, Artificial
  probe
  misc_feature (1)..(25): SEQ ID NO: 2994; WAN024DG7; Start 30; Stop 54
aggtgcaatgagtatgattgaagtt

SEQ ID NO: 343431 - DNA, 25 bp, Artificial
  probe
  misc_feature (1)..(25): SEQ ID NO: 2994; WAN024DG7; Start 24; Stop 48
taaaggaggtgcaatgagtatgatt

SEQ ID NO: 343432 - DNA, 25 bp, Artificial
  probe
  misc_feature (1)..(25): SEQ ID NO: 2994; WAN024DG7; Start 23; Stop 47
ataaaggaggtgcaatgagtatgat

SEQ ID NO: 343433 - DNA, 25 bp, Artificial
  probe
  misc_feature (1)..(25): SEQ ID NO: 2994; WAN024DG7; Start 18; Stop 42
agaatataaaggaggtgcaatgagt

SEQ ID NO: 343434 - DNA, 25 bp, Artificial
  probe
  misc_feature (1)..(25): SEQ ID NO: 2994; WAN024DG7; Start 29; Stop 53
gaggtgcaatgagtatgattgaagt

SEQ ID NO: 343435 - DNA, 25 bp, Artificial
  probe
  misc_feature (1)..(25): SEQ ID NO: 2994; WAN024DG7; Start 22; Stop 46
tataaaggaggtgcaatgagtatga

SEQ ID NO: 343436 - DNA, 25 bp, Artificial
  probe
  misc_feature (1)..(25): SEQ ID NO: 2994; WAN024DG7; Start 15; Stop 39
tgtagaatataaaggaggtgcaatg

SEQ ID NO: 343437 - DNA, 25 bp, Artificial
  probe
  misc_feature (1)..(25): SEQ ID NO: 2994; WAN024DG7; Start 32; Stop 56
gtgcaatgagtatgattgaagttag

SEQ ID NO: 343438 - DNA, 25 bp, Artificial
  probe
  misc_feature (1)..(25): SEQ ID NO: 2994; WAN024DG7; Start 28; Stop 52
ggaggtgcaatgagtatgattgaag

SEQ ID NO: 343439 - DNA, 25 bp, Artificial
  probe
  misc_feature (1)..(25): SEQ ID NO: 2994; WAN024DG7; Start 21; Stop 45
atataaaggaggtgcaatgagtatg

SEQ ID NO: 343440 - DNA, 25 bp, Artificial
  probe
  misc_feature (1)..(25): SEQ ID NO: 2994; WAN024DG7; Start 19; Stop 43
gaatataaaggaggtgcaatgagta

SEQ ID NO: 343441 - DNA, 25 bp, Artificial
  probe
  misc_feature (1)..(25): SEQ ID NO: 2994; WAN024DG7; Start 16; Stop 40
gtagaatataaaggaggtgcaatga

SEQ ID NO: 343442 - DNA, 25 bp, Artificial
  probe
  misc_feature (1)..(25): SEQ ID NO: 2994; WAN024DG7; Start 39; Stop 63
gagtatgattgaagttagccattta

SEQ ID NO: 343443 - DNA, 25 bp, Artificial
  probe
  misc_feature (1)..(25): SEQ ID NO: 2994; WAN024DG7; Start 17; Stop 41
tagaatataaaggaggtgcaatgag

SEQ ID NO: 343444 - DNA, 25 bp, Artificial
  probe
  misc_feature (1)..(25): SEQ ID NO: 2994; WAN024DG7; Start 27; Stop 51
aggaggtgcaatgagtatgattgaa

SEQ ID NO: 343445 - DNA, 25 bp, Artificial
  probe
  misc_feature (1)..(25): SEQ ID NO: 2994; WAN024DG7; Start 26; Stop 50
aaggaggtgcaatgagtatgattga

SEQ ID NO: 343446 - DNA, 25 bp, Artificial
  probe
  misc_feature (1)..(25): SEQ ID NO: 2994; WAN024DG7; Start 13; Stop 37
aatgtagaatataaaggaggtgcaa

SEQ ID NO: 343447 - DNA, 25 bp, Artificial
  probe
  misc_feature (1)..(25): SEQ ID NO: 2994; WAN024DG7; Start 12; Stop 36
aaatgtagaatataaaggaggtgca

SEQ ID NO: 343448 - DNA, 25 bp, Artificial
  probe
  misc_feature (1)..(25): SEQ ID NO: 2994; WAN024DG7; Start 20; Stop 44
aatataaaggaggtgcaatgagtat

SEQ ID NO: 343449 - DNA, 25 bp, Artificial
  probe
  misc_feature (1)..(25): SEQ ID NO: 2994; WAN024DG7; Start 14; Stop 38
atgtagaatataaaggaggtgcaat

SEQ ID NO: 343450 - DNA, 25 bp, Artificial
  probe
  misc_feature (1)..(25): SEQ ID NO: 2994; WAN024DG7; Start 40; Stop 64
agtatgattgaagttagccatttat

SEQ ID NO: 343451 - DNA, 25 bp, Artificial
  probe
  misc_feature (1)..(25): SEQ ID NO: 2994; WAN024DG7; Start 41; Stop 65
gtatgattgaagttagccatttatc

SEQ ID NO: 343452 - DNA, 25 bp, Artificial
  probe
  misc_feature (1)..(25): SEQ ID NO: 2994; WAN024DG7; Start 25; Stop 49
aaaggaggtgcaatgagtatgattg

SEQ ID NO: 343453 - DNA, 25 bp, Artificial
  probe
  misc_feature (1)..(25): SEQ ID NO: 2994; WAN024DG7; Start 11; Stop 35
aaaatgtagaatataaaggaggtgc

SEQ ID NO: 343454 - DNA, 25 bp, Artificial
  probe
  misc_feature (1)..(25): SEQ ID NO: 2994; WAN024DG7; Start 44; Stop 68
tgattgaagttagccatttatcaaa

SEQ ID NO: 343455 - DNA, 25 bp, Artificial
  probe
  misc_feature (1)..(25): SEQ ID NO: 2994; WAN024DG7; Start 43; Stop 67
atgattgaagttagccatttatcaa

SEQ ID NO: 343456 - DNA, 25 bp, Artificial
  probe
  misc_feature (1)..(25): SEQ ID NO: 2995; WAN024AWK; Start 652; Stop 676
ttacgagacctggataaactacatc

SEQ ID NO: 343457 - DNA, 25 bp, Artificial
  probe
  misc_feature (1)..(25): SEQ ID NO: 2995; WAN024AWK; Start 389; Stop 413
gagcgaaagtggtcattatgtttaa

SEQ ID NO: 343458 - DNA, 25 bp, Artificial
  probe
  misc_feature (1)..(25): SEQ ID NO: 2995; WAN024AWK; Start 653; Stop 677
tacgagacctggataaactacatca

SEQ ID NO: 343459 - DNA, 25 bp, Artificial
  probe
  misc_feature (1)..(25): SEQ ID NO: 2995; WAN024AWK; Start 404; Stop 428
ttatgtttaatcctgttatggctcg

SEQ ID NO: 343460 - DNA, 25 bp, Artificial
  probe
  misc_feature (1)..(25): SEQ ID NO: 2995; WAN024AWK; Start 390; Stop 414
agcgaaagtggtcattatgtttaat

SEQ ID NO: 343461 - DNA, 25 bp, Artificial
  probe
  misc_feature (1)..(25): SEQ ID NO: 2995; WAN024AWK; Start 391; Stop 415
gcgaaagtggtcattatgtttaatc

SEQ ID NO: 343462 - DNA, 25 bp, Artificial
  probe
  misc_feature (1)..(25): SEQ ID NO: 2995; WAN024AWK; Start 388; Stop 412
ggagcgaaagtggtcattatgttta

SEQ ID NO: 343463 - DNA, 25 bp, Artificial
  probe
  misc_feature (1)..(25): SEQ ID NO: 2995; WAN024AWK; Start 651; Stop 675
tttacgagacctggataaactacat

SEQ ID NO: 343464 - DNA, 25 bp, Artificial
  probe
  misc_feature (1)..(25): SEQ ID NO: 2995; WAN024AWK; Start 525; Stop 549
agagttgatggagactttctttgaa

SEQ ID NO: 343465 - DNA, 25 bp, Artificial
  probe
  misc_feature (1)..(25): SEQ ID NO: 2995; WAN024AWK; Start 482; Stop 506
ttacagaggaagagttagctgactt

SEQ ID NO: 343466 - DNA, 25 bp, Artificial
  probe
  misc_feature (1)..(25): SEQ ID NO: 2995; WAN024AWK; Start 145; Stop 169
atgctagatatcggtggagaatcaa

SEQ ID NO: 343467 - DNA, 25 bp, Artificial
  probe
  misc_feature (1)..(25): SEQ ID NO: 2995; WAN024AWK; Start 148; Stop 172
ctagatatcggtggagaatcaactc

SEQ ID NO: 343468 - DNA, 25 bp, Artificial
  probe
  misc_feature (1)..(25): SEQ ID NO: 2995; WAN024AWK; Start 392; Stop 416
cgaaagtggtcattatgtttaatcc

SEQ ID NO: 343469 - DNA, 25 bp, Artificial
  probe
  misc_feature (1)..(25): SEQ ID NO: 2995; WAN024AWK; Start 396; Stop 420
agtggtcattatgtttaatcctgtt

SEQ ID NO: 343470 - DNA, 25 bp, Artificial
  probe
  misc_feature (1)..(25): SEQ ID NO: 2995; WAN024AWK; Start 395; Stop 419
aagtggtcattatgtttaatcctgt

SEQ ID NO: 343471 - DNA, 25 bp, Artificial
  probe
  misc_feature (1)..(25): SEQ ID NO: 2995; WAN024AWK; Start 147; Stop 171
gctagatatcggtggagaatcaact

SEQ ID NO: 343472 - DNA, 25 bp, Artificial
  probe
  misc_feature (1)..(25): SEQ ID NO: 2995; WAN024AWK; Start 144; Stop 168
catgctagatatcggtggagaatca

SEQ ID NO: 343473 - DNA, 25 bp, Artificial
  probe
  misc_feature (1)..(25): SEQ ID NO: 2995; WAN024AWK; Start 656; Stop 680
gagacctggataaactacatcagaa

SEQ ID NO: 343474 - DNA, 25 bp, Artificial
  probe
  misc_feature (1)..(25): SEQ ID NO: 2995; WAN024AWK; Start 657; Stop 681
agacctggataaactacatcagaag

SEQ ID NO: 343475 - DNA, 25 bp, Artificial
  probe
  misc_feature (1)..(25): SEQ ID NO: 2995; WAN024AWK; Start 31; Stop 55
gctatttgcggaattatcaatgtaa

SEQ ID NO: 343476 - DNA, 25 bp, Artificial
  probe
  misc_feature (1)..(25): SEQ ID NO: 2995; WAN024AWK; Start 146; Stop 170
tgctagatatcggtggagaatcaac

SEQ ID NO: 343477 - DNA, 25 bp, Artificial
  probe
  misc_feature (1)..(25): SEQ ID NO: 2995; WAN024AWK; Start 510; Stop 534
aacattgccaatcgaagagttgatg

SEQ ID NO: 343478 - DNA, 25 bp, Artificial
  probe
  misc_feature (1)..(25): SEQ ID NO: 2995; WAN024AWK; Start 258; Stop 282
tgtcctcatttctattgatacttgg

SEQ ID NO: 343479 - DNA, 25 bp, Artificial
  probe
  misc_feature (1)..(25): SEQ ID NO: 2995; WAN024AWK; Start 149; Stop 173
tagatatcggtggagaatcaactcg

SEQ ID NO: 343480 - DNA, 25 bp, Artificial
  probe
  misc_feature (1)..(25): SEQ ID NO: 2995; WAN024AWK; Start 251; Stop 275
aaagtgatgtcctcatttctattga

SEQ ID NO: 343481 - DNA, 25 bp, Artificial
  probe
  misc_feature (1)..(25): SEQ ID NO: 2995; WAN024AWK; Start 24; Stop 48
aaagacagctatttgcggaattatc

SEQ ID NO: 343482 - DNA, 25 bp, Artificial
  probe
  misc_feature (1)..(25): SEQ ID NO: 2995; WAN024AWK; Start 712; Stop 736
aagaggtttgtcatcaatatccttg

SEQ ID NO: 343483 - DNA, 25 bp, Artificial
  probe
  misc_feature (1)..(25): SEQ ID NO: 2995; WAN024AWK; Start 711; Stop 735
caagaggtttgtcatcaatatcctt

SEQ ID NO: 343484 - DNA, 25 bp, Artificial
  probe
  misc_feature (1)..(25): SEQ ID NO: 2995; WAN024AWK; Start 655; Stop 679
cgagacctggataaactacatcaga

SEQ ID NO: 343485 - DNA, 25 bp, Artificial
  probe
  misc_feature (1)..(25): SEQ ID NO: 2995; WAN024AWK; Start 383; Stop 407
aagatggagcgaaagtggtcattat

SEQ ID NO: 343486 - DNA, 25 bp, Artificial
  probe
  misc_feature (1)..(25): SEQ ID NO: 2995; WAN024AWK; Start 710; Stop 734
gcaagaggtttgtcatcaatatcct

SEQ ID NO: 343487 - DNA, 25 bp, Artificial
  probe
  misc_feature (1)..(25): SEQ ID NO: 2995; WAN024AWK; Start 252; Stop 276
aagtgatgtcctcatttctattgat

SEQ ID NO: 343488 - DNA, 25 bp, Artificial
  probe
  misc_feature (1)..(25): SEQ ID NO: 2995; WAN024AWK; Start 405; Stop 429
tatgtttaatcctgttatggctcga

SEQ ID NO: 343489 - DNA, 25 bp, Artificial
  probe
  misc_feature (1)..(25): SEQ ID NO: 2996; WAN024GMQ; Start 16; Stop 40
gatataatcaaggctcacaaggtct

SEQ ID NO: 343490 - DNA, 25 bp, Artificial
  probe
  misc_feature (1)..(25): SEQ ID NO: 2996; WAN024GMQ; Start 15; Stop 39
agatataatcaaggctcacaaggtc

SEQ ID NO: 343491 - DNA, 25 bp, Artificial
  probe
  misc_feature (1)..(25): SEQ ID NO: 2996; WAN024GMQ; Start 14; Stop 38
aagatataatcaaggctcacaaggt

SEQ ID NO: 343492 - DNA, 25 bp, Artificial
  probe
  misc_feature (1)..(25): SEQ ID NO: 2996; WAN024GMQ; Start 85; Stop 109
ttatcggagaagtatggtgctaaga

SEQ ID NO: 343493 - DNA, 25 bp, Artificial
  probe
  misc_feature (1)..(25): SEQ ID NO: 2996; WAN024GMQ; Start 86; Stop 110
tatcggagaagtatggtgctaagat

SEQ ID NO: 343494 - DNA, 25 bp, Artificial
  probe
  misc_feature (1)..(25): SEQ ID NO: 2996; WAN024GMQ; Start 603; Stop 627
agagattgaggttatcggagtagag

SEQ ID NO: 343495 - DNA, 25 bp, Artificial
  probe
  misc_feature (1)..(25): SEQ ID NO: 2996; WAN024GMQ; Start 17; Stop 41
atataatcaaggctcacaaggtctt

SEQ ID NO: 343496 - DNA, 25 bp, Artificial
  probe
  misc_feature (1)..(25): SEQ ID NO: 2996; WAN024GMQ; Start 602; Stop 626
cagagattgaggttatcggagtaga

SEQ ID NO: 343497 - DNA, 25 bp, Artificial
  probe
  misc_feature (1)..(25): SEQ ID NO: 2996; WAN024GMQ; Start 594; Stop 618
aacaagtccagagattgaggttatc

SEQ ID NO: 343498 - DNA, 25 bp, Artificial
  probe
  misc_feature (1)..(25): SEQ ID NO: 2996; WAN024GMQ; Start 87; Stop 111
atcggagaagtatggtgctaagatt

SEQ ID NO: 343499 - DNA, 25 bp, Artificial
  probe
  misc_feature (1)..(25): SEQ ID NO: 2996; WAN024GMQ; Start 471; Stop 495
tcaaggaacagttgcttatgagatt

SEQ ID NO: 343500 - DNA, 25 bp, Artificial
  probe
  misc_feature (1)..(25): SEQ ID NO: 2996; WAN024GMQ; Start 604; Stop 628
gagattgaggttatcggagtagagg

SEQ ID NO: 343501 - DNA, 25 bp, Artificial
  probe
  misc_feature (1)..(25): SEQ ID NO: 2996; WAN024GMQ; Start 601; Stop 625
ccagagattgaggttatcggagtag

SEQ ID NO: 343502 - DNA, 25 bp, Artificial
  probe
  misc_feature (1)..(25): SEQ ID NO: 2996; WAN024GMQ; Start 470; Stop 494
gtcaaggaacagttgcttatgagat

SEQ ID NO: 343503 - DNA, 25 bp, Artificial
  probe
  misc_feature (1)..(25): SEQ ID NO: 2996; WAN024GMQ; Start 741; Stop 765
ctatgaagcaactcgtcaacatatt

SEQ ID NO: 343504 - DNA, 25 bp, Artificial
  probe
  misc_feature (1)..(25): SEQ ID NO: 2996; WAN024GMQ; Start 740; Stop 764
cctatgaagcaactcgtcaacatat

SEQ ID NO: 343505 - DNA, 25 bp, Artificial
  probe
  misc_feature (1)..(25): SEQ ID NO: 2996; WAN024GMQ; Start 595; Stop 619
acaagtccagagattgaggttatcg

SEQ ID NO: 343506 - DNA, 25 bp, Artificial
  probe
  misc_feature (1)..(25): SEQ ID NO: 2996; WAN024GMQ; Start 801; Stop 825
tgaaaccttgattgacctttactct

SEQ ID NO: 343507 - DNA, 25 bp, Artificial
  probe
  misc_feature (1)..(25): SEQ ID NO: 2996; WAN024GMQ; Start 799; Stop 823
tctgaaaccttgattgacctttact

SEQ ID NO: 343508 - DNA, 25 bp, Artificial
  probe
  misc_feature (1)..(25): SEQ ID NO: 2996; WAN024GMQ; Start 89; Stop 113
cggagaagtatggtgctaagattta

SEQ ID NO: 343509 - DNA, 25 bp, Artificial
  probe
  misc_feature (1)..(25): SEQ ID NO: 2996; WAN024GMQ; Start 84; Stop 108
tttatcggagaagtatggtgctaag

SEQ ID NO: 343510 - DNA, 25 bp, Artificial
  probe
  misc_feature (1)..(25): SEQ ID NO: 2996; WAN024GMQ; Start 800; Stop 824
ctgaaaccttgattgacctttactc

SEQ ID NO: 343511 - DNA, 25 bp, Artificial
  probe
  misc_feature (1)..(25): SEQ ID NO: 2996; WAN024GMQ; Start 83; Stop 107
atttatcggagaagtatggtgctaa

SEQ ID NO: 343512 - DNA, 25 bp, Artificial
  probe
  misc_feature (1)..(25): SEQ ID NO: 2996; WAN024GMQ; Start 81; Stop 105
ttatttatcggagaagtatggtgct

SEQ ID NO: 343513 - DNA, 25 bp, Artificial
  probe
  misc_feature (1)..(25): SEQ ID NO: 2996; WAN024GMQ; Start 909; Stop 933
catttgttgtatcatttctggagga

SEQ ID NO: 343514 - DNA, 25 bp, Artificial
  probe
  misc_feature (1)..(25): SEQ ID NO: 2996; WAN024GMQ; Start 1033; Stop 1057
gctttgcgtgagtttgtaaatgata

SEQ ID NO: 343515 - DNA, 25 bp, Artificial
  probe
  misc_feature (1)..(25): SEQ ID NO: 2996; WAN024GMQ; Start 798; Stop 822
ttctgaaaccttgattgacctttac

SEQ ID NO: 343516 - DNA, 25 bp, Artificial
  probe
  misc_feature (1)..(25): SEQ ID NO: 2996; WAN024GMQ; Start 806; Stop 830
ccttgattgacctttactctaagca

SEQ ID NO: 343517 - DNA, 25 bp, Artificial
  probe
  misc_feature (1)..(25): SEQ ID NO: 2996; WAN024GMQ; Start 805; Stop 829
accttgattgacctttactctaagc

SEQ ID NO: 343518 - DNA, 25 bp, Artificial
  probe
  misc_feature (1)..(25): SEQ ID NO: 2996; WAN024GMQ; Start 739; Stop 763
acctatgaagcaactcgtcaacata

SEQ ID NO: 343519 - DNA, 25 bp, Artificial
  probe
  misc_feature (1)..(25): SEQ ID NO: 2996; WAN024GMQ; Start 596; Stop 620
caagtccagagattgaggttatcgg

SEQ ID NO: 343520 - DNA, 25 bp, Artificial
  probe
  misc_feature (1)..(25): SEQ ID NO: 2996; WAN024GMQ; Start 82; Stop 106
tatttatcggagaagtatggtgcta

SEQ ID NO: 343521 - DNA, 25 bp, Artificial
  probe
  misc_feature (1)..(25): SEQ ID NO: 2996; WAN024GMQ; Start 80; Stop 104
attatttatcggagaagtatggtgc

SEQ ID NO: 343522 - DNA, 25 bp, Artificial
  probe
  misc_feature (1)..(25): SEQ ID NO: 2997; WAN024G8T; Start 258; Stop 282
cgatcttcttctcttcacctacttg

SEQ ID NO: 343523 - DNA, 25 bp, Artificial
  probe
  misc_feature (1)..(25): SEQ ID NO: 2997; WAN024G8T; Start 259; Stop 283
gatcttcttctcttcacctacttgc

SEQ ID NO: 343524 - DNA, 25 bp, Artificial
  probe
  misc_feature (1)..(25): SEQ ID NO: 2997; WAN024G8T; Start 257; Stop 281
acgatcttcttctcttcacctactt

SEQ ID NO: 343525 - DNA, 25 bp, Artificial
  probe
  misc_feature (1)..(25): SEQ ID NO: 2997; WAN024G8T; Start 256; Stop 280
gacgatcttcttctcttcacctact

SEQ ID NO: 343526 - DNA, 25 bp, Artificial
  probe
  misc_feature (1)..(25): SEQ ID NO: 2997; WAN024G8T; Start 70; Stop 94
catagcttagttagtcgtggtcatc

SEQ ID NO: 343527 - DNA, 25 bp, Artificial
  probe
  misc_feature (1)..(25): SEQ ID NO: 2997; WAN024G8T; Start 355; Stop 379
gttcgtgacaatcaaggacaactac

SEQ ID NO: 343528 - DNA, 25 bp, Artificial
  probe
  misc_feature (1)..(25): SEQ ID NO: 2997; WAN024G8T; Start 667; Stop 691
aacattgaagcaagtgtgagagatg

SEQ ID NO: 343529 - DNA, 25 bp, Artificial
  probe
  misc_feature (1)..(25): SEQ ID NO: 2997; WAN024G8T; Start 666; Stop 690
caacattgaagcaagtgtgagagat

SEQ ID NO: 343530 - DNA, 25 bp, Artificial
  probe
  misc_feature (1)..(25): SEQ ID NO: 2997; WAN024G8T; Start 67; Stop 91
gttcatagcttagttagtcgtggtc

SEQ ID NO: 343531 - DNA, 25 bp, Artificial
  probe
  misc_feature (1)..(25): SEQ ID NO: 2997; WAN024G8T; Start 62; Stop 86
caggtgttcatagcttagttagtcg

SEQ ID NO: 343532 - DNA, 25 bp, Artificial
  probe
  misc_feature (1)..(25): SEQ ID NO: 2997; WAN024G8T; Start 69; Stop 93
tcatagcttagttagtcgtggtcat

SEQ ID NO: 343533 - DNA, 25 bp, Artificial
  probe
  misc_feature (1)..(25): SEQ ID NO: 2997; WAN024G8T; Start 65; Stop 89
gtgttcatagcttagttagtcgtgg

SEQ ID NO: 343534 - DNA, 25 bp, Artificial
  probe
  misc_feature (1)..(25): SEQ ID NO: 2997; WAN024G8T; Start 64; Stop 88
ggtgttcatagcttagttagtcgtg

SEQ ID NO: 343535 - DNA, 25 bp, Artificial
  probe
  misc_feature (1)..(25): SEQ ID NO: 2997; WAN024G8T; Start 63; Stop 87
aggtgttcatagcttagttagtcgt

SEQ ID NO: 343536 - DNA, 25 bp, Artificial
  probe
  misc_feature (1)..(25): SEQ ID NO: 2997; WAN024G8T; Start 61; Stop 85
gcaggtgttcatagcttagttagtc

SEQ ID NO: 343537 - DNA, 25 bp, Artificial
  probe
  misc_feature (1)..(25): SEQ ID NO: 2997; WAN024G8T; Start 68; Stop 92
ttcatagcttagttagtcgtggtca

SEQ ID NO: 343538 - DNA, 25 bp, Artificial
  probe
  misc_feature (1)..(25): SEQ ID NO: 2997; WAN024G8T; Start 66; Stop 90
tgttcatagcttagttagtcgtggt

SEQ ID NO: 343539 - DNA, 25 bp, Artificial
  probe
  misc_feature (1)..(25): SEQ ID NO: 2997; WAN024G8T; Start 75; Stop 99
cttagttagtcgtggtcatcgtgtc

SEQ ID NO: 343540 - DNA, 25 bp, Artificial
  probe
  misc_feature (1)..(25): SEQ ID NO: 2997; WAN024G8T; Start 255; Stop 279
cgacgatcttcttctcttcacctac

SEQ ID NO: 343541 - DNA, 25 bp, Artificial
  probe
  misc_feature (1)..(25): SEQ ID NO: 2997; WAN024G8T; Start 354; Stop 378
tgttcgtgacaatcaaggacaacta

SEQ ID NO: 343542 - DNA, 25 bp, Artificial
  probe
  misc_feature (1)..(25): SEQ ID NO: 2997; WAN024G8T; Start 260; Stop 284
atcttcttctcttcacctacttgca

SEQ ID NO: 343543 - DNA, 25 bp, Artificial
  probe
  misc_feature (1)..(25): SEQ ID NO: 2997; WAN024G8T; Start 71; Stop 95
atagcttagttagtcgtggtcatcg

SEQ ID NO: 343544 - DNA, 25 bp, Artificial
  probe
  misc_feature (1)..(25): SEQ ID NO: 2997; WAN024G8T; Start 60; Stop 84
tgcaggtgttcatagcttagttagt

SEQ ID NO: 343545 - DNA, 25 bp, Artificial
  probe
  misc_feature (1)..(25): SEQ ID NO: 2997; WAN024G8T; Start 126; Stop 150
ttctggctttactgatgctgactat

SEQ ID NO: 343546 - DNA, 25 bp, Artificial
  probe
  misc_feature (1)..(25): SEQ ID NO: 2997; WAN024G8T; Start 80; Stop 104
ttagtcgtggtcatcgtgtccttat

SEQ ID NO: 343547 - DNA, 25 bp, Artificial
  probe
  misc_feature (1)..(25): SEQ ID NO: 2997; WAN024G8T; Start 263; Stop 287
ttcttctcttcacctacttgcacat

SEQ ID NO: 343548 - DNA, 25 bp, Artificial
  probe
  misc_feature (1)..(25): SEQ ID NO: 2997; WAN024G8T; Start 356; Stop 380
ttcgtgacaatcaaggacaactacc

SEQ ID NO: 343549 - DNA, 25 bp, Artificial
  probe
  misc_feature (1)..(25): SEQ ID NO: 2997; WAN024G8T; Start 346; Stop 370
tatgaaactgttcgtgacaatcaag

SEQ ID NO: 343550 - DNA, 25 bp, Artificial
  probe
  misc_feature (1)..(25): SEQ ID NO: 2997; WAN024G8T; Start 345; Stop 369
ctatgaaactgttcgtgacaatcaa

SEQ ID NO: 343551 - DNA, 25 bp, Artificial
  probe
  misc_feature (1)..(25): SEQ ID NO: 2997; WAN024G8T; Start 197; Stop 221
cagcagagttggttgtgaaagtaaa

SEQ ID NO: 343552 - DNA, 25 bp, Artificial
  probe
  misc_feature (1)..(25): SEQ ID NO: 2997; WAN024G8T; Start 665; Stop 689
tcaacattgaagcaagtgtgagaga

SEQ ID NO: 343553 - DNA, 25 bp, Artificial
  probe
  misc_feature (1)..(25): SEQ ID NO: 2997; WAN024G8T; Start 506; Stop 530
aagtaactatcatcggtggtggtgt

SEQ ID NO: 343554 - DNA, 25 bp, Artificial
  probe
  misc_feature (1)..(25): SEQ ID NO: 2997; WAN024G8T; Start 747; Stop 771
gacagatgagatggtcaaacaaatg

SEQ ID NO: 343555 - DNA, 25 bp, Artificial
  probe
  misc_feature (1)..(25): SEQ ID NO: 2998; WAN024COD; Start 146; Stop 170
tgatgatgaataagcgattgaagac

SEQ ID NO: 343556 - DNA, 25 bp, Artificial
  probe
  misc_feature (1)..(25): SEQ ID NO: 2998; WAN024COD; Start 147; Stop 171
gatgatgaataagcgattgaagact

SEQ ID NO: 343557 - DNA, 25 bp, Artificial
  probe
  misc_feature (1)..(25): SEQ ID NO: 2998; WAN024COD; Start 454; Stop 478
gatacttggagagatgaagatgctt

SEQ ID NO: 343558 - DNA, 25 bp, Artificial
  probe
  misc_feature (1)..(25): SEQ ID NO: 2998; WAN024COD; Start 455; Stop 479
atacttggagagatgaagatgcttg

SEQ ID NO: 343559 - DNA, 25 bp, Artificial
  probe
  misc_feature (1)..(25): SEQ ID NO: 2998; WAN024COD; Start 452; Stop 476
tagatacttggagagatgaagatgc

SEQ ID NO: 343560 - DNA, 25 bp, Artificial
  probe
  misc_feature (1)..(25): SEQ ID NO: 2998; WAN024COD; Start 145; Stop 169
ttgatgatgaataagcgattgaaga

SEQ ID NO: 343561 - DNA, 25 bp, Artificial
  probe
  misc_feature (1)..(25): SEQ ID NO: 2998; WAN024COD; Start 453; Stop 477
agatacttggagagatgaagatgct

SEQ ID NO: 343562 - DNA, 25 bp, Artificial
  probe
  misc_feature (1)..(25): SEQ ID NO: 2998; WAN024COD; Start 358; Stop 382
atagaactagatggttatgccttgg

SEQ ID NO: 343563 - DNA, 25 bp, Artificial
  probe
  misc_feature (1)..(25): SEQ ID NO: 2998; WAN024COD; Start 116; Stop 140
ttaatgatgatattgcgtcagagtg

SEQ ID NO: 343564 - DNA, 25 bp, Artificial
  probe
  misc_feature (1)..(25): SEQ ID NO: 2998; WAN024COD; Start 117; Stop 141
taatgatgatattgcgtcagagtgg

SEQ ID NO: 343565 - DNA, 25 bp, Artificial
  probe
  misc_feature (1)..(25): SEQ ID NO: 2998; WAN024COD; Start 456; Stop 480
tacttggagagatgaagatgcttgt

SEQ ID NO: 343566 - DNA, 25 bp, Artificial
  probe
  misc_feature (1)..(25): SEQ ID NO: 2998; WAN024COD; Start 149; Stop 173
tgatgaataagcgattgaagactat

SEQ ID NO: 343567 - DNA, 25 bp, Artificial
  probe
  misc_feature (1)..(25): SEQ ID NO: 2998; WAN024COD; Start 148; Stop 172
atgatgaataagcgattgaagacta

SEQ ID NO: 343568 - DNA, 25 bp, Artificial
  probe
  misc_feature (1)..(25): SEQ ID NO: 2998; WAN024COD; Start 458; Stop 482
cttggagagatgaagatgcttgttc

SEQ ID NO: 343569 - DNA, 25 bp, Artificial
  probe
  misc_feature (1)..(25): SEQ ID NO: 2998; WAN024COD; Start 450; Stop 474
tgtagatacttggagagatgaagat

SEQ ID NO: 343570 - DNA, 25 bp, Artificial
  probe
  misc_feature (1)..(25): SEQ ID NO: 2998; WAN024COD; Start 449; Stop 473
atgtagatacttggagagatgaaga

SEQ ID NO: 343571 - DNA, 25 bp, Artificial
  probe
  misc_feature (1)..(25): SEQ ID NO: 2998; WAN024COD; Start 864; Stop 888
ttgtgagatggagcatgtagaatat

SEQ ID NO: 343572 - DNA, 25 bp, Artificial
  probe
  misc_feature (1)..(25): SEQ ID NO: 2998; WAN024COD; Start 863; Stop 887
gttgtgagatggagcatgtagaata

SEQ ID NO: 343573 - DNA, 25 bp, Artificial
  probe
  misc_feature (1)..(25): SEQ ID NO: 2998; WAN024COD; Start 316; Stop 340
tctgacatcattgttacaggaagtt

SEQ ID NO: 343574 - DNA, 25 bp, Artificial
  probe
  misc_feature (1)..(25): SEQ ID NO: 2998; WAN024COD; Start 315; Stop 339
ttctgacatcattgttacaggaagt

SEQ ID NO: 343575 - DNA, 25 bp, Artificial
  probe
  misc_feature (1)..(25): SEQ ID NO: 2998; WAN024COD; Start 312; Stop 336
agattctgacatcattgttacagga

SEQ ID NO: 343576 - DNA, 25 bp, Artificial
  probe
  misc_feature (1)..(25): SEQ ID NO: 2998; WAN024COD; Start 152; Stop 176
tgaataagcgattgaagactataca

SEQ ID NO: 343577 - DNA, 25 bp, Artificial
  probe
  misc_feature (1)..(25): SEQ ID NO: 2998; WAN024COD; Start 451; Stop 475
gtagatacttggagagatgaagatg

SEQ ID NO: 343578 - DNA, 25 bp, Artificial
  probe
  misc_feature (1)..(25): SEQ ID NO: 2998; WAN024COD; Start 314; Stop 338
attctgacatcattgttacaggaag

SEQ ID NO: 343579 - DNA, 25 bp, Artificial
  probe
  misc_feature (1)..(25): SEQ ID NO: 2998; WAN024COD; Start 313; Stop 337
gattctgacatcattgttacaggaa

SEQ ID NO: 343580 - DNA, 25 bp, Artificial
  probe
  misc_feature (1)..(25): SEQ ID NO: 2998; WAN024COD; Start 861; Stop 885
tagttgtgagatggagcatgtagaa

SEQ ID NO: 343581 - DNA, 25 bp, Artificial
  probe
  misc_feature (1)..(25): SEQ ID NO: 2998; WAN024COD; Start 865; Stop 889
tgtgagatggagcatgtagaatatt

SEQ ID NO: 343582 - DNA, 25 bp, Artificial
  probe
  misc_feature (1)..(25): SEQ ID NO: 2998; WAN024COD; Start 457; Stop 481
acttggagagatgaagatgcttgtt

SEQ ID NO: 343583 - DNA, 25 bp, Artificial
  probe
  misc_feature (1)..(25): SEQ ID NO: 2998; WAN024COD; Start 485; Stop 509
aactgttagaactgaccaatcaata

SEQ ID NO: 343584 - DNA, 25 bp, Artificial
  probe
  misc_feature (1)..(25): SEQ ID NO: 2998; WAN024COD; Start 488; Stop 512
tgttagaactgaccaatcaatatca

SEQ ID NO: 343585 - DNA, 25 bp, Artificial
  probe
  misc_feature (1)..(25): SEQ ID NO: 2998; WAN024COD; Start 860; Stop 884
ctagttgtgagatggagcatgtaga

SEQ ID NO: 343586 - DNA, 25 bp, Artificial
  probe
  misc_feature (1)..(25): SEQ ID NO: 2998; WAN024COD; Start 486; Stop 510
actgttagaactgaccaatcaatat

SEQ ID NO: 343587 - DNA, 25 bp, Artificial
  probe
  misc_feature (1)..(25): SEQ ID NO: 2998; WAN024COD; Start 448; Stop 472
aatgtagatacttggagagatgaag

SEQ ID NO: 343588 - DNA, 25 bp, Artificial
  probe
  misc_feature (1)..(25): SEQ ID NO: 2999; WAN024DCZ; Start 2138; Stop 2162
tgacacgactggaaggtatcaatag

SEQ ID NO: 343589 - DNA, 25 bp, Artificial
  probe
  misc_feature (1)..(25): SEQ ID NO: 2999; WAN024DCZ; Start 2141; Stop 2165
cacgactggaaggtatcaatagcaa

SEQ ID NO: 343590 - DNA, 25 bp, Artificial
  probe
  misc_feature (1)..(25): SEQ ID NO: 2999; WAN024DCZ; Start 2133; Stop 2157
aacattgacacgactggaaggtatc

SEQ ID NO: 343591 - DNA, 25 bp, Artificial
  probe
  misc_feature (1)..(25): SEQ ID NO: 2999; WAN024DCZ; Start 2146; Stop 2170
ctggaaggtatcaatagcaaagttt

SEQ ID NO: 343592 - DNA, 25 bp, Artificial
  probe
  misc_feature (1)..(25): SEQ ID NO: 2999; WAN024DCZ; Start 2139; Stop 2163
gacacgactggaaggtatcaatagc

SEQ ID NO: 343593 - DNA, 25 bp, Artificial
  probe
  misc_feature (1)..(25): SEQ ID NO: 2999; WAN024DCZ; Start 2143; Stop 2167
cgactggaaggtatcaatagcaaag

SEQ ID NO: 343594 - DNA, 25 bp, Artificial
  probe
  misc_feature (1)..(25): SEQ ID NO: 2999; WAN024DCZ; Start 2145; Stop 2169
actggaaggtatcaatagcaaagtt

SEQ ID NO: 343595 - DNA, 25 bp, Artificial
  probe
  misc_feature (1)..(25): SEQ ID NO: 2999; WAN024DCZ; Start 2144; Stop 2168
gactggaaggtatcaatagcaaagt

SEQ ID NO: 343596 - DNA, 25 bp, Artificial
  probe
  misc_feature (1)..(25): SEQ ID NO: 2999; WAN024DCZ; Start 2147; Stop 2171
tggaaggtatcaatagcaaagttta

SEQ ID NO: 343597 - DNA, 25 bp, Artificial
  probe
  misc_feature (1)..(25): SEQ ID NO: 2999; WAN024DCZ; Start 2142; Stop 2166
acgactggaaggtatcaatagcaaa

SEQ ID NO: 343598 - DNA, 25 bp, Artificial
  probe
  misc_feature (1)..(25): SEQ ID NO: 2999; WAN024DCZ; Start 2140; Stop 2164
acacgactggaaggtatcaatagca

SEQ ID NO: 343599 - DNA, 25 bp, Artificial
  probe
  misc_feature (1)..(25): SEQ ID NO: 2999; WAN024DCZ; Start 2132; Stop 2156
aaacattgacacgactggaaggtat

SEQ ID NO: 343600 - DNA, 25 bp, Artificial
  probe
  misc_feature (1)..(25): SEQ ID NO: 2999; WAN024DCZ; Start 2137; Stop 2161
ttgacacgactggaaggtatcaata

SEQ ID NO: 343601 - DNA, 25 bp, Artificial
  probe
  misc_feature (1)..(25): SEQ ID NO: 2999; WAN024DCZ; Start 2134; Stop 2158
acattgacacgactggaaggtatca

SEQ ID NO: 343602 - DNA, 25 bp, Artificial
  probe
  misc_feature (1)..(25): SEQ ID NO: 2999; WAN024DCZ; Start 2131; Stop 2155
gaaacattgacacgactggaaggta

SEQ ID NO: 343603 - DNA, 25 bp, Artificial
  probe
  misc_feature (1)..(25): SEQ ID NO: 2999; WAN024DCZ; Start 2096; Stop 2120
ttggaaagagcaatcgaatgaaact

SEQ ID NO: 343604 - DNA, 25 bp, Artificial
  probe
  misc_feature (1)..(25): SEQ ID NO: 2999; WAN024DCZ; Start 2095; Stop 2119
gttggaaagagcaatcgaatgaaac

SEQ ID NO: 343605 - DNA, 25 bp, Artificial
  probe
  misc_feature (1)..(25): SEQ ID NO: 2999; WAN024DCZ; Start 2094; Stop 2118
agttggaaagagcaatcgaatgaaa

SEQ ID NO: 343606 - DNA, 25 bp, Artificial
  probe
  misc_feature (1)..(25): SEQ ID NO: 2999; WAN024DCZ; Start 2097; Stop 2121
tggaaagagcaatcgaatgaaactc

SEQ ID NO: 343607 - DNA, 25 bp, Artificial
  probe
  misc_feature (1)..(25): SEQ ID NO: 2999; WAN024DCZ; Start 2088; Stop 2112
tatctcagttggaaagagcaatcga

SEQ ID NO: 343608 - DNA, 25 bp, Artificial
  probe
  misc_feature (1)..(25): SEQ ID NO: 2999; WAN024DCZ; Start 2093; Stop 2117
cagttggaaagagcaatcgaatgaa

SEQ ID NO: 343609 - DNA, 25 bp, Artificial
  probe
  misc_feature (1)..(25): SEQ ID NO: 2999; WAN024DCZ; Start 2135; Stop 2159
cattgacacgactggaaggtatcaa

SEQ ID NO: 343610 - DNA, 25 bp, Artificial
  probe
  misc_feature (1)..(25): SEQ ID NO: 2999; WAN024DCZ; Start 2099; Stop 2123
gaaagagcaatcgaatgaaactccc

SEQ ID NO: 343611 - DNA, 25 bp, Artificial
  probe
  misc_feature (1)..(25): SEQ ID NO: 2999; WAN024DCZ; Start 2091; Stop 2115
ctcagttggaaagagcaatcgaatg

SEQ ID NO: 343612 - DNA, 25 bp, Artificial
  probe
  misc_feature (1)..(25): SEQ ID NO: 2999; WAN024DCZ; Start 2090; Stop 2114
tctcagttggaaagagcaatcgaat

SEQ ID NO: 343613 - DNA, 25 bp, Artificial
  probe
  misc_feature (1)..(25): SEQ ID NO: 2999; WAN024DCZ; Start 2089; Stop 2113
atctcagttggaaagagcaatcgaa

SEQ ID NO: 343614 - DNA, 25 bp, Artificial
  probe
  misc_feature (1)..(25): SEQ ID NO: 2999; WAN024DCZ; Start 1004; Stop 1028
cttatgcttttatcctgaccatgac

SEQ ID NO: 343615 - DNA, 25 bp, Artificial
  probe
  misc_feature (1)..(25): SEQ ID NO: 2999; WAN024DCZ; Start 2092; Stop 2116
tcagttggaaagagcaatcgaatga

SEQ ID NO: 343616 - DNA, 25 bp, Artificial
  probe
  misc_feature (1)..(25): SEQ ID NO: 2999; WAN024DCZ; Start 1005; Stop 1029
ttatgcttttatcctgaccatgacc

SEQ ID NO: 343617 - DNA, 25 bp, Artificial
  probe
  misc_feature (1)..(25): SEQ ID NO: 2999; WAN024DCZ; Start 907; Stop 931
ggggttaagggcttggataattttg

SEQ ID NO: 343618 - DNA, 25 bp, Artificial
  probe
  misc_feature (1)..(25): SEQ ID NO: 2999; WAN024DCZ; Start 905; Stop 929
atggggttaagggcttggataattt

SEQ ID NO: 343619 - DNA, 25 bp, Artificial
  probe
  misc_feature (1)..(25): SEQ ID NO: 2999; WAN024DCZ; Start 1003; Stop 1027
gcttatgcttttatcctgaccatga

SEQ ID NO: 343620 - DNA, 25 bp, Artificial
  probe
  misc_feature (1)..(25): SEQ ID NO: 2999; WAN024DCZ; Start 2098; Stop 2122
ggaaagagcaatcgaatgaaactcc

SEQ ID NO: 343621 - DNA, 25 bp, Artificial
  probe
  misc_feature (1)..(25): SEQ ID NO: 3000; WAN024CS4; Start 415; Stop 439
tatcttaatggttctgttgacgacg

SEQ ID NO: 343622 - DNA, 25 bp, Artificial
  probe
  misc_feature (1)..(25): SEQ ID NO: 3000; WAN024CS4; Start 414; Stop 438
ttatcttaatggttctgttgacgac

SEQ ID NO: 343623 - DNA, 25 bp, Artificial
  probe
  misc_feature (1)..(25): SEQ ID NO: 3000; WAN024CS4; Start 497; Stop 521
accttgcgactgaagagattaagaa

SEQ ID NO: 343624 - DNA, 25 bp, Artificial
  probe
  misc_feature (1)..(25): SEQ ID NO: 3000; WAN024CS4; Start 35; Stop 59
aattacataaccagttctacgctat

SEQ ID NO: 343625 - DNA, 25 bp, Artificial
  probe
  misc_feature (1)..(25): SEQ ID NO: 3000; WAN024CS4; Start 496; Stop 520
gaccttgcgactgaagagattaaga

SEQ ID NO: 343626 - DNA, 25 bp, Artificial
  probe
  misc_feature (1)..(25): SEQ ID NO: 3000; WAN024CS4; Start 37; Stop 61
ttacataaccagttctacgctatgg

SEQ ID NO: 343627 - DNA, 25 bp, Artificial
  probe
  misc_feature (1)..(25): SEQ ID NO: 3000; WAN024CS4; Start 208; Stop 232
ctccaacaaccagtctctcaagatt

SEQ ID NO: 343628 - DNA, 25 bp, Artificial
  probe
  misc_feature (1)..(25): SEQ ID NO: 3000; WAN024CS4; Start 36; Stop 60
attacataaccagttctacgctatg

SEQ ID NO: 343629 - DNA, 25 bp, Artificial
  probe
  misc_feature (1)..(25): SEQ ID NO: 3000; WAN024CS4; Start 495; Stop 519
tgaccttgcgactgaagagattaag

SEQ ID NO: 343630 - DNA, 25 bp, Artificial
  probe
  misc_feature (1)..(25): SEQ ID NO: 3000; WAN024CS4; Start 603; Stop 627
tatctgtgaatgggttgtctacttt

SEQ ID NO: 343631 - DNA, 25 bp, Artificial
  probe
  misc_feature (1)..(25): SEQ ID NO: 3000; WAN024CS4; Start 151; Stop 175
gcagaagtaaatgaatacgaagtga

SEQ ID NO: 343632 - DNA, 25 bp, Artificial
  probe
  misc_feature (1)..(25): SEQ ID NO: 3000; WAN024CS4; Start 602; Stop 626
atatctgtgaatgggttgtctactt

SEQ ID NO: 343633 - DNA, 25 bp, Artificial
  probe
  misc_feature (1)..(25): SEQ ID NO: 3000; WAN024CS4; Start 601; Stop 625
aatatctgtgaatgggttgtctact

SEQ ID NO: 343634 - DNA, 25 bp, Artificial
  probe
  misc_feature (1)..(25): SEQ ID NO: 3000; WAN024CS4; Start 607; Stop 631
tgtgaatgggttgtctactttgaaa

SEQ ID NO: 343635 - DNA, 25 bp, Artificial
  probe
  misc_feature (1)..(25): SEQ ID NO: 3000; WAN024CS4; Start 604; Stop 628
atctgtgaatgggttgtctactttg

SEQ ID NO: 343636 - DNA, 25 bp, Artificial
  probe
  misc_feature (1)..(25): SEQ ID NO: 3000; WAN024CS4; Start 494; Stop 518
gtgaccttgcgactgaagagattaa

SEQ ID NO: 343637 - DNA, 25 bp, Artificial
  probe
  misc_feature (1)..(25): SEQ ID NO: 3000; WAN024CS4; Start 419; Stop 443
ttaatggttctgttgacgacgcata

SEQ ID NO: 343638 - DNA, 25 bp, Artificial
  probe
  misc_feature (1)..(25): SEQ ID NO: 3000; WAN024CS4; Start 606; Stop 630
ctgtgaatgggttgtctactttgaa

SEQ ID NO: 343639 - DNA, 25 bp, Artificial
  probe
  misc_feature (1)..(25): SEQ ID NO: 3000; WAN024CS4; Start 608; Stop 632
gtgaatgggttgtctactttgaaac

SEQ ID NO: 343640 - DNA, 25 bp, Artificial
  probe
  misc_feature (1)..(25): SEQ ID NO: 3000; WAN024CS4; Start 600; Stop 624
aaatatctgtgaatgggttgtctac

SEQ ID NO: 343641 - DNA, 25 bp, Artificial
  probe
  misc_feature (1)..(25): SEQ ID NO: 3000; WAN024CS4; Start 33; Stop 57
gaaattacataaccagttctacgct

SEQ ID NO: 343642 - DNA, 25 bp, Artificial
  probe
  misc_feature (1)..(25): SEQ ID NO: 3000; WAN024CS4; Start 498; Stop 522
ccttgcgactgaagagattaagaaa

SEQ ID NO: 343643 - DNA, 25 bp, Artificial
  probe
  misc_feature (1)..(25): SEQ ID NO: 3000; WAN024CS4; Start 413; Stop 437
tttatcttaatggttctgttgacga

SEQ ID NO: 343644 - DNA, 25 bp, Artificial
  probe
  misc_feature (1)..(25): SEQ ID NO: 3000; WAN024CS4; Start 160; Stop 184
aatgaatacgaagtgaaactggaaa

SEQ ID NO: 343645 - DNA, 25 bp, Artificial
  probe
  misc_feature (1)..(25): SEQ ID NO: 3000; WAN024CS4; Start 159; Stop 183
aaatgaatacgaagtgaaactggaa

SEQ ID NO: 343646 - DNA, 25 bp, Artificial
  probe
  misc_feature (1)..(25): SEQ ID NO: 3000; WAN024CS4; Start 412; Stop 436
ctttatcttaatggttctgttgacg

SEQ ID NO: 343647 - DNA, 25 bp, Artificial
  probe
  misc_feature (1)..(25): SEQ ID NO: 3000; WAN024CS4; Start 605; Stop 629
tctgtgaatgggttgtctactttga

SEQ ID NO: 343648 - DNA, 25 bp, Artificial
  probe
  misc_feature (1)..(25): SEQ ID NO: 3000; WAN024CS4; Start 615; Stop 639
ggttgtctactttgaaacaggtaag

SEQ ID NO: 343649 - DNA, 25 bp, Artificial
  probe
  misc_feature (1)..(25): SEQ ID NO: 3000; WAN024CS4; Start 610; Stop 634
gaatgggttgtctactttgaaacag

SEQ ID NO: 343650 - DNA, 25 bp, Artificial
  probe
  misc_feature (1)..(25): SEQ ID NO: 3000; WAN024CS4; Start 397; Stop 421
gaagcagcacttgatctttatctta

SEQ ID NO: 343651 - DNA, 25 bp, Artificial
  probe
  misc_feature (1)..(25): SEQ ID NO: 3000; WAN024CS4; Start 622; Stop 646
tactttgaaacaggtaagattgtcg

SEQ ID NO: 343652 - DNA, 25 bp, Artificial
  probe
  misc_feature (1)..(25): SEQ ID NO: 3000; WAN024CS4; Start 609; Stop 633
tgaatgggttgtctactttgaaaca

SEQ ID NO: 343653 - DNA, 25 bp, Artificial
  probe
  misc_feature (1)..(25): SEQ ID NO: 3000; WAN024CS4; Start 614; Stop 638
gggttgtctactttgaaacaggtaa

SEQ ID NO: 343654 - DNA, 25 bp, Artificial
  probe
  misc_feature (1)..(25): SEQ ID NO: 3001; WAN024CIS; Start 443; Stop 467
tcggagtgattggtgaagtattatc

SEQ ID NO: 343655 - DNA, 25 bp, Artificial
  probe
  misc_feature (1)..(25): SEQ ID NO: 3001; WAN024CIS; Start 442; Stop 466
ctcggagtgattggtgaagtattat

SEQ ID NO: 343656 - DNA, 25 bp, Artificial
  probe
  misc_feature (1)..(25): SEQ ID NO: 3001; WAN024CIS; Start 441; Stop 465
tctcggagtgattggtgaagtatta

SEQ ID NO: 343657 - DNA, 25 bp, Artificial
  probe
  misc_feature (1)..(25): SEQ ID NO: 3001; WAN024CIS; Start 451; Stop 475
attggtgaagtattatcagacgagg

SEQ ID NO: 343658 - DNA, 25 bp, Artificial
  probe
  misc_feature (1)..(25): SEQ ID NO: 3001; WAN024CIS; Start 249; Stop 273
ggcattatatacagaggcaacagaa

SEQ ID NO: 343659 - DNA, 25 bp, Artificial
  probe
  misc_feature (1)..(25): SEQ ID NO: 3001; WAN024CIS; Start 453; Stop 477
tggtgaagtattatcagacgaggat

SEQ ID NO: 343660 - DNA, 25 bp, Artificial
  probe
  misc_feature (1)..(25): SEQ ID NO: 3001; WAN024CIS; Start 450; Stop 474
gattggtgaagtattatcagacgag

SEQ ID NO: 343661 - DNA, 25 bp, Artificial
  probe
  misc_feature (1)..(25): SEQ ID NO: 3001; WAN024CIS; Start 452; Stop 476
ttggtgaagtattatcagacgagga

SEQ ID NO: 343662 - DNA, 25 bp, Artificial
  probe
  misc_feature (1)..(25): SEQ ID NO: 3001; WAN024CIS; Start 244; Stop 268
aagttggcattatatacagaggcaa

SEQ ID NO: 343663 - DNA, 25 bp, Artificial
  probe
  misc_feature (1)..(25): SEQ ID NO: 3001; WAN024CIS; Start 454; Stop 478
ggtgaagtattatcagacgaggata

SEQ ID NO: 343664 - DNA, 25 bp, Artificial
  probe
  misc_feature (1)..(25): SEQ ID NO: 3001; WAN024CIS; Start 247; Stop 271
ttggcattatatacagaggcaacag

SEQ ID NO: 343665 - DNA, 25 bp, Artificial
  probe
  misc_feature (1)..(25): SEQ ID NO: 3001; WAN024CIS; Start 248; Stop 272
tggcattatatacagaggcaacaga

SEQ ID NO: 343666 - DNA, 25 bp, Artificial
  probe
  misc_feature (1)..(25): SEQ ID NO: 3001; WAN024CIS; Start 128; Stop 152
tgtgcgaataccttaatgtatccaa

SEQ ID NO: 343667 - DNA, 25 bp, Artificial
  probe
  misc_feature (1)..(25): SEQ ID NO: 3001; WAN024CIS; Start 127; Stop 151
ttgtgcgaataccttaatgtatcca

SEQ ID NO: 343668 - DNA, 25 bp, Artificial
  probe
  misc_feature (1)..(25): SEQ ID NO: 3001; WAN024CIS; Start 126; Stop 150
attgtgcgaataccttaatgtatcc

SEQ ID NO: 343669 - DNA, 25 bp, Artificial
  probe
  misc_feature (1)..(25): SEQ ID NO: 3001; WAN024CIS; Start 440; Stop 464
gtctcggagtgattggtgaagtatt

SEQ ID NO: 343670 - DNA, 25 bp, Artificial
  probe
  misc_feature (1)..(25): SEQ ID NO: 3001; WAN024CIS; Start 311; Stop 335
cttacacggttcttgatgaagttca

SEQ ID NO: 343671 - DNA, 25 bp, Artificial
  probe
  misc_feature (1)..(25): SEQ ID NO: 3001; WAN024CIS; Start 653; Stop 677
tattgttattagcttcgaccgatca

SEQ ID NO: 343672 - DNA, 25 bp, Artificial
  probe
  misc_feature (1)..(25): SEQ ID NO: 3001; WAN024CIS; Start 651; Stop 675
actattgttattagcttcgaccgat

SEQ ID NO: 343673 - DNA, 25 bp, Artificial
  probe
  misc_feature (1)..(25): SEQ ID NO: 3001; WAN024CIS; Start 654; Stop 678
attgttattagcttcgaccgatcat

SEQ ID NO: 343674 - DNA, 25 bp, Artificial
  probe
  misc_feature (1)..(25): SEQ ID NO: 3001; WAN024CIS; Start 652; Stop 676
ctattgttattagcttcgaccgatc

SEQ ID NO: 343675 - DNA, 25 bp, Artificial
  probe
  misc_feature (1)..(25): SEQ ID NO: 3001; WAN024CIS; Start 24; Stop 48
tccaatgatagaagctaacttacca

SEQ ID NO: 343676 - DNA, 25 bp, Artificial
  probe
  misc_feature (1)..(25): SEQ ID NO: 3001; WAN024CIS; Start 655; Stop 679
ttgttattagcttcgaccgatcatc

SEQ ID NO: 343677 - DNA, 25 bp, Artificial
  probe
  misc_feature (1)..(25): SEQ ID NO: 3001; WAN024CIS; Start 650; Stop 674
aactattgttattagcttcgaccga

SEQ ID NO: 343678 - DNA, 25 bp, Artificial
  probe
  misc_feature (1)..(25): SEQ ID NO: 3001; WAN024CIS; Start 649; Stop 673
gaactattgttattagcttcgaccg

SEQ ID NO: 343679 - DNA, 25 bp, Artificial
  probe
  misc_feature (1)..(25): SEQ ID NO: 3001; WAN024CIS; Start 658; Stop 682
ttattagcttcgaccgatcatctct

SEQ ID NO: 343680 - DNA, 25 bp, Artificial
  probe
  misc_feature (1)..(25): SEQ ID NO: 3001; WAN024CIS; Start 657; Stop 681
gttattagcttcgaccgatcatctc

SEQ ID NO: 343681 - DNA, 25 bp, Artificial
  probe
  misc_feature (1)..(25): SEQ ID NO: 3001; WAN024CIS; Start 345; Stop 369
tattgctgagatgatagaaactgct

SEQ ID NO: 343682 - DNA, 25 bp, Artificial
  probe
  misc_feature (1)..(25): SEQ ID NO: 3001; WAN024CIS; Start 344; Stop 368
gtattgctgagatgatagaaactgc

SEQ ID NO: 343683 - DNA, 25 bp, Artificial
  probe
  misc_feature (1)..(25): SEQ ID NO: 3001; WAN024CIS; Start 343; Stop 367
cgtattgctgagatgatagaaactg

SEQ ID NO: 343684 - DNA, 25 bp, Artificial
  probe
  misc_feature (1)..(25): SEQ ID NO: 3001; WAN024CIS; Start 648; Stop 672
tgaactattgttattagcttcgacc

SEQ ID NO: 343685 - DNA, 25 bp, Artificial
  probe
  misc_feature (1)..(25): SEQ ID NO: 3001; WAN024CIS; Start 363; Stop 387
aactgctgagcgtgtatatctctac

SEQ ID NO: 343686 - DNA, 25 bp, Artificial
  probe
  misc_feature (1)..(25): SEQ ID NO: 3001; WAN024CIS; Start 379; Stop 403
tatctctacggtaaaggaagttctg

SEQ ID NO: 343687 - DNA, 25 bp, Artificial
  probe
  misc_feature (1)..(25): SEQ ID NO: 3002; WAN024G37; Start 981; Stop 1005
tgccaagattacggaagaatacaat

SEQ ID NO: 343688 - DNA, 25 bp, Artificial
  probe
  misc_feature (1)..(25): SEQ ID NO: 3002; WAN024G37; Start 1001; Stop 1025
acaatctcttgacaggcaataatct

SEQ ID NO: 343689 - DNA, 25 bp, Artificial
  probe
  misc_feature (1)..(25): SEQ ID NO: 3002; WAN024G37; Start 996; Stop 1020
agaatacaatctcttgacaggcaat

SEQ ID NO: 343690 - DNA, 25 bp, Artificial
  probe
  misc_feature (1)..(25): SEQ ID NO: 3002; WAN024G37; Start 1056; Stop 1080
gaagttggaagtcaatcttgtcaat

SEQ ID NO: 343691 - DNA, 25 bp, Artificial
  probe
  misc_feature (1)..(25): SEQ ID NO: 3002; WAN024G37; Start 919; Stop 943
gacctccttcatactattactcgta

SEQ ID NO: 343692 - DNA, 25 bp, Artificial
  probe
  misc_feature (1)..(25): SEQ ID NO: 3002; WAN024G37; Start 1055; Stop 1079
agaagttggaagtcaatcttgtcaa

SEQ ID NO: 343693 - DNA, 25 bp, Artificial
  probe
  misc_feature (1)..(25): SEQ ID NO: 3002; WAN024G37; Start 918; Stop 942
ggacctccttcatactattactcgt

SEQ ID NO: 343694 - DNA, 25 bp, Artificial
  probe
  misc_feature (1)..(25): SEQ ID NO: 3002; WAN024G37; Start 917; Stop 941
tggacctccttcatactattactcg

SEQ ID NO: 343695 - DNA, 25 bp, Artificial
  probe
  misc_feature (1)..(25): SEQ ID NO: 3002; WAN024G37; Start 916; Stop 940
ttggacctccttcatactattactc

SEQ ID NO: 343696 - DNA, 25 bp, Artificial
  probe
  misc_feature (1)..(25): SEQ ID NO: 3002; WAN024G37; Start 1002; Stop 1026
caatctcttgacaggcaataatctt

SEQ ID NO: 343697 - DNA, 25 bp, Artificial
  probe
  misc_feature (1)..(25): SEQ ID NO: 3002; WAN024G37; Start 980; Stop 1004
ttgccaagattacggaagaatacaa

SEQ ID NO: 343698 - DNA, 25 bp, Artificial
  probe
  misc_feature (1)..(25): SEQ ID NO: 3002; WAN024G37; Start 1057; Stop 1081
aagttggaagtcaatcttgtcaatt

SEQ ID NO: 343699 - DNA, 25 bp, Artificial
  probe
  misc_feature (1)..(25): SEQ ID NO: 3002; WAN024G37; Start 1000; Stop 1024
tacaatctcttgacaggcaataatc

SEQ ID NO: 343700 - DNA, 25 bp, Artificial
  probe
  misc_feature (1)..(25): SEQ ID NO: 3002; WAN024G37; Start 997; Stop 1021
gaatacaatctcttgacaggcaata

SEQ ID NO: 343701 - DNA, 25 bp, Artificial
  probe
  misc_feature (1)..(25): SEQ ID NO: 3002; WAN024G37; Start 695; Stop 719
cctacagtatgttggacaatgaaga

SEQ ID NO: 343702 - DNA, 25 bp, Artificial
  probe
  misc_feature (1)..(25): SEQ ID NO: 3002; WAN024G37; Start 1300; Stop 1324
gaattatctcgtctcatgttagcca

SEQ ID NO: 343703 - DNA, 25 bp, Artificial
  probe
  misc_feature (1)..(25): SEQ ID NO: 3002; WAN024G37; Start 998; Stop 1022
aatacaatctcttgacaggcaataa

SEQ ID NO: 343704 - DNA, 25 bp, Artificial
  probe
  misc_feature (1)..(25): SEQ ID NO: 3002; WAN024G37; Start 1302; Stop 1326
attatctcgtctcatgttagccatt

SEQ ID NO: 343705 - DNA, 25 bp, Artificial
  probe
  misc_feature (1)..(25): SEQ ID NO: 3002; WAN024G37; Start 1301; Stop 1325
aattatctcgtctcatgttagccat

SEQ ID NO: 343706 - DNA, 25 bp, Artificial
  probe
  misc_feature (1)..(25): SEQ ID NO: 3002; WAN024G37; Start 1516; Stop 1540
aagattagtaatgaccattcaacgg

SEQ ID NO: 343707 - DNA, 25 bp, Artificial
  probe
  misc_feature (1)..(25): SEQ ID NO: 3002; WAN024G37; Start 920; Stop 944
acctccttcatactattactcgtaa

SEQ ID NO: 343708 - DNA, 25 bp, Artificial
  probe
  misc_feature (1)..(25): SEQ ID NO: 3002; WAN024G37; Start 1305; Stop 1329
atctcgtctcatgttagccattaag

SEQ ID NO: 343709 - DNA, 25 bp, Artificial
  probe
  misc_feature (1)..(25): SEQ ID NO: 3002; WAN024G37; Start 1304; Stop 1328
tatctcgtctcatgttagccattaa

SEQ ID NO: 343710 - DNA, 25 bp, Artificial
  probe
  misc_feature (1)..(25): SEQ ID NO: 3002; WAN024G37; Start 1303; Stop 1327
ttatctcgtctcatgttagccatta

SEQ ID NO: 343711 - DNA, 25 bp, Artificial
  probe
  misc_feature (1)..(25): SEQ ID NO: 3002; WAN024G37; Start 369; Stop 393
tcttgtagatattcatggtcagcat

SEQ ID NO: 343712 - DNA, 25 bp, Artificial
  probe
  misc_feature (1)..(25): SEQ ID NO: 3002; WAN024G37; Start 1299; Stop 1323
ggaattatctcgtctcatgttagcc

SEQ ID NO: 343713 - DNA, 25 bp, Artificial
  probe
  misc_feature (1)..(25): SEQ ID NO: 3002; WAN024G37; Start 999; Stop 1023
atacaatctcttgacaggcaataat

SEQ ID NO: 343714 - DNA, 25 bp, Artificial
  probe
  misc_feature (1)..(25): SEQ ID NO: 3002; WAN024G37; Start 114; Stop 138
cattgatgccatgaatatgatgttg

SEQ ID NO: 343715 - DNA, 25 bp, Artificial
  probe
  misc_feature (1)..(25): SEQ ID NO: 3002; WAN024G37; Start 691; Stop 715
aatgcctacagtatgttggacaatg

SEQ ID NO: 343716 - DNA, 25 bp, Artificial
  probe
  misc_feature (1)..(25): SEQ ID NO: 3002; WAN024G37; Start 690; Stop 714
caatgcctacagtatgttggacaat

SEQ ID NO: 343717 - DNA, 25 bp, Artificial
  probe
  misc_feature (1)..(25): SEQ ID NO: 3002; WAN024G37; Start 696; Stop 720
ctacagtatgttggacaatgaagat

SEQ ID NO: 343718 - DNA, 25 bp, Artificial
  probe
  misc_feature (1)..(25): SEQ ID NO: 3002; WAN024G37; Start 1307; Stop 1331
ctcgtctcatgttagccattaagtc

SEQ ID NO: 343719 - DNA, 25 bp, Artificial
  probe
  misc_feature (1)..(25): SEQ ID NO: 3002; WAN024G37; Start 1309; Stop 1333
cgtctcatgttagccattaagtctg

SEQ ID NO: 343720 - DNA, 25 bp, Artificial
  probe
  misc_feature (1)..(25): SEQ ID NO: 3003; WAN024EV6; Start 221; Stop 245
cagcaagtagtggtgttatcaatat

SEQ ID NO: 343721 - DNA, 25 bp, Artificial
  probe
  misc_feature (1)..(25): SEQ ID NO: 3003; WAN024EV6; Start 220; Stop 244
acagcaagtagtggtgttatcaata

SEQ ID NO: 343722 - DNA, 25 bp, Artificial
  probe
  misc_feature (1)..(25): SEQ ID NO: 3003; WAN024EV6; Start 508; Stop 532
attggagtattgaaagaggaagtgt

SEQ ID NO: 343723 - DNA, 25 bp, Artificial
  probe
  misc_feature (1)..(25): SEQ ID NO: 3003; WAN024EV6; Start 222; Stop 246
agcaagtagtggtgttatcaatatt

SEQ ID NO: 343724 - DNA, 25 bp, Artificial
  probe
  misc_feature (1)..(25): SEQ ID NO: 3003; WAN024EV6; Start 509; Stop 533
ttggagtattgaaagaggaagtgta

SEQ ID NO: 343725 - DNA, 25 bp, Artificial
  probe
  misc_feature (1)..(25): SEQ ID NO: 3003; WAN024EV6; Start 405; Stop 429
tgttgtagaaattgaggcagactat

SEQ ID NO: 343726 - DNA, 25 bp, Artificial
  probe
  misc_feature (1)..(25): SEQ ID NO: 3003; WAN024EV6; Start 510; Stop 534
tggagtattgaaagaggaagtgtat

SEQ ID NO: 343727 - DNA, 25 bp, Artificial
  probe
  misc_feature (1)..(25): SEQ ID NO: 3003; WAN024EV6; Start 319; Stop 343
actttgaagaatttgcgagatatgt

SEQ ID NO: 343728 - DNA, 25 bp, Artificial
  probe
  misc_feature (1)..(25): SEQ ID NO: 3003; WAN024EV6; Start 404; Stop 428
gtgttgtagaaattgaggcagacta

SEQ ID NO: 343729 - DNA, 25 bp, Artificial
  probe
  misc_feature (1)..(25): SEQ ID NO: 3003; WAN024EV6; Start 145; Stop 169
atggctgaattggtcaaacatattg

SEQ ID NO: 343730 - DNA, 25 bp, Artificial
  probe
  misc_feature (1)..(25): SEQ ID NO: 3003; WAN024EV6; Start 511; Stop 535
ggagtattgaaagaggaagtgtatt

SEQ ID NO: 343731 - DNA, 25 bp, Artificial
  probe
  misc_feature (1)..(25): SEQ ID NO: 3003; WAN024EV6; Start 507; Stop 531
tattggagtattgaaagaggaagtg

SEQ ID NO: 343732 - DNA, 25 bp, Artificial
  probe
  misc_feature (1)..(25): SEQ ID NO: 3003; WAN024EV6; Start 320; Stop 344
ctttgaagaatttgcgagatatgtt

SEQ ID NO: 343733 - DNA, 25 bp, Artificial
  probe
  misc_feature (1)..(25): SEQ ID NO: 3003; WAN024EV6; Start 318; Stop 342
aactttgaagaatttgcgagatatg

SEQ ID NO: 343734 - DNA, 25 bp, Artificial
  probe
  misc_feature (1)..(25): SEQ ID NO: 3003; WAN024EV6; Start 406; Stop 430
gttgtagaaattgaggcagactata

SEQ ID NO: 343735 - DNA, 25 bp, Artificial
  probe
  misc_feature (1)..(25): SEQ ID NO: 3003; WAN024EV6; Start 407; Stop 431
ttgtagaaattgaggcagactatac

SEQ ID NO: 343736 - DNA, 25 bp, Artificial
  probe
  misc_feature (1)..(25): SEQ ID NO: 3003; WAN024EV6; Start 321; Stop 345
tttgaagaatttgcgagatatgttt

SEQ ID NO: 343737 - DNA, 25 bp, Artificial
  probe
  misc_feature (1)..(25): SEQ ID NO: 3003; WAN024EV6; Start 449; Stop 473
atgagtttgtagtaggttatggttt

SEQ ID NO: 343738 - DNA, 25 bp, Artificial
  probe
  misc_feature (1)..(25): SEQ ID NO: 3003; WAN024EV6; Start 448; Stop 472
aatgagtttgtagtaggttatggtt

SEQ ID NO: 343739 - DNA, 25 bp, Artificial
  probe
  misc_feature (1)..(25): SEQ ID NO: 3003; WAN024EV6; Start 447; Stop 471
aaatgagtttgtagtaggttatggt

SEQ ID NO: 343740 - DNA, 25 bp, Artificial
  probe
  misc_feature (1)..(25): SEQ ID NO: 3003; WAN024EV6; Start 34; Stop 58
tcacacgatgaaattacagaagcag

SEQ ID NO: 343741 - DNA, 25 bp, Artificial
  probe
  misc_feature (1)..(25): SEQ ID NO: 3003; WAN024EV6; Start 317; Stop 341
aaactttgaagaatttgcgagatat

SEQ ID NO: 343742 - DNA, 25 bp, Artificial
  probe
  misc_feature (1)..(25): SEQ ID NO: 3003; WAN024EV6; Start 142; Stop 166
tttatggctgaattggtcaaacata

SEQ ID NO: 343743 - DNA, 25 bp, Artificial
  probe
  misc_feature (1)..(25): SEQ ID NO: 3003; WAN024EV6; Start 462; Stop 486
aggttatggtttagactacaaagaa

SEQ ID NO: 343744 - DNA, 25 bp, Artificial
  probe
  misc_feature (1)..(25): SEQ ID NO: 3003; WAN024EV6; Start 223; Stop 247
gcaagtagtggtgttatcaatatta

SEQ ID NO: 343745 - DNA, 25 bp, Artificial
  probe
  misc_feature (1)..(25): SEQ ID NO: 3003; WAN024EV6; Start 39; Stop 63
cgatgaaattacagaagcagctaaa

SEQ ID NO: 343746 - DNA, 25 bp, Artificial
  probe
  misc_feature (1)..(25): SEQ ID NO: 3003; WAN024EV6; Start 144; Stop 168
tatggctgaattggtcaaacatatt

SEQ ID NO: 343747 - DNA, 25 bp, Artificial
  probe
  misc_feature (1)..(25): SEQ ID NO: 3003; WAN024EV6; Start 143; Stop 167
ttatggctgaattggtcaaacatat

SEQ ID NO: 343748 - DNA, 25 bp, Artificial
  probe
  misc_feature (1)..(25): SEQ ID NO: 3003; WAN024EV6; Start 65; Stop 89
aactaggtgctcaattaactaaaga

SEQ ID NO: 343749 - DNA, 25 bp, Artificial
  probe
  misc_feature (1)..(25): SEQ ID NO: 3003; WAN024EV6; Start 491; Stop 515
atcgtaatcttccttatattggagt

SEQ ID NO: 343750 - DNA, 25 bp, Artificial
  probe
  misc_feature (1)..(25): SEQ ID NO: 3003; WAN024EV6; Start 38; Stop 62
acgatgaaattacagaagcagctaa

SEQ ID NO: 343751 - DNA, 25 bp, Artificial
  probe
  misc_feature (1)..(25): SEQ ID NO: 3003; WAN024EV6; Start 248; Stop 272
aacaagatgtgactcaagatatcaa

SEQ ID NO: 343752 - DNA, 25 bp, Artificial
  probe
  misc_feature (1)..(25): SEQ ID NO: 3003; WAN024EV6; Start 506; Stop 530
atattggagtattgaaagaggaagt

SEQ ID NO: 343753 - DNA, 25 bp, Artificial
  probe
  misc_feature (1)..(25): SEQ ID NO: 3004; WAN024D7U; Start 58; Stop 82
atccagacttccacaggtaactata

SEQ ID NO: 343754 - DNA, 25 bp, Artificial
  probe
  misc_feature (1)..(25): SEQ ID NO: 3004; WAN024D7U; Start 57; Stop 81
catccagacttccacaggtaactat

SEQ ID NO: 343755 - DNA, 25 bp, Artificial
  probe
  misc_feature (1)..(25): SEQ ID NO: 3004; WAN024D7U; Start 59; Stop 83
tccagacttccacaggtaactatag

SEQ ID NO: 343756 - DNA, 25 bp, Artificial
  probe
  misc_feature (1)..(25): SEQ ID NO: 3004; WAN024D7U; Start 256; Stop 280
ccctacaatgcttctttctatccag

SEQ ID NO: 343757 - DNA, 25 bp, Artificial
  probe
  misc_feature (1)..(25): SEQ ID NO: 3004; WAN024D7U; Start 257; Stop 281
cctacaatgcttctttctatccaga

SEQ ID NO: 343758 - DNA, 25 bp, Artificial
  probe
  misc_feature (1)..(25): SEQ ID NO: 3004; WAN024D7U; Start 254; Stop 278
caccctacaatgcttctttctatcc

SEQ ID NO: 343759 - DNA, 25 bp, Artificial
  probe
  misc_feature (1)..(25): SEQ ID NO: 3004; WAN024D7U; Start 63; Stop 87
gacttccacaggtaactatagccat

SEQ ID NO: 343760 - DNA, 25 bp, Artificial
  probe
  misc_feature (1)..(25): SEQ ID NO: 3004; WAN024D7U; Start 255; Stop 279
accctacaatgcttctttctatcca

SEQ ID NO: 343761 - DNA, 25 bp, Artificial
  probe
  misc_feature (1)..(25): SEQ ID NO: 3004; WAN024D7U; Start 56; Stop 80
ccatccagacttccacaggtaacta

SEQ ID NO: 343762 - DNA, 25 bp, Artificial
  probe
  misc_feature (1)..(25): SEQ ID NO: 3004; WAN024D7U; Start 64; Stop 88
acttccacaggtaactatagccatg

SEQ ID NO: 343763 - DNA, 25 bp, Artificial
  probe
  misc_feature (1)..(25): SEQ ID NO: 3004; WAN024D7U; Start 259; Stop 283
tacaatgcttctttctatccagatg

SEQ ID NO: 343764 - DNA, 25 bp, Artificial
  probe
  misc_feature (1)..(25): SEQ ID NO: 3004; WAN024D7U; Start 260; Stop 284
acaatgcttctttctatccagatgc

SEQ ID NO: 343765 - DNA, 25 bp, Artificial
  probe
  misc_feature (1)..(25): SEQ ID NO: 3004; WAN024D7U; Start 61; Stop 85
cagacttccacaggtaactatagcc

SEQ ID NO: 343766 - DNA, 25 bp, Artificial
  probe
  misc_feature (1)..(25): SEQ ID NO: 3004; WAN024D7U; Start 60; Stop 84
ccagacttccacaggtaactatagc

SEQ ID NO: 343767 - DNA, 25 bp, Artificial
  probe
  misc_feature (1)..(25): SEQ ID NO: 3004; WAN024D7U; Start 258; Stop 282
ctacaatgcttctttctatccagat

SEQ ID NO: 343768 - DNA, 25 bp, Artificial
  probe
  misc_feature (1)..(25): SEQ ID NO: 3004; WAN024D7U; Start 66; Stop 90
ttccacaggtaactatagccatgtt

SEQ ID NO: 343769 - DNA, 25 bp, Artificial
  probe
  misc_feature (1)..(25): SEQ ID NO: 3004; WAN024D7U; Start 72; Stop 96
aggtaactatagccatgttgccatt

SEQ ID NO: 343770 - DNA, 25 bp, Artificial
  probe
  misc_feature (1)..(25): SEQ ID NO: 3004; WAN024D7U; Start 62; Stop 86
agacttccacaggtaactatagcca

SEQ ID NO: 343771 - DNA, 25 bp, Artificial
  probe
  misc_feature (1)..(25): SEQ ID NO: 3004; WAN024D7U; Start 65; Stop 89
cttccacaggtaactatagccatgt

SEQ ID NO: 343772 - DNA, 25 bp, Artificial
  probe
  misc_feature (1)..(25): SEQ ID NO: 3004; WAN024D7U; Start 67; Stop 91
tccacaggtaactatagccatgttg

SEQ ID NO: 343773 - DNA, 25 bp, Artificial
  probe
  misc_feature (1)..(25): SEQ ID NO: 3004; WAN024D7U; Start 71; Stop 95
caggtaactatagccatgttgccat

SEQ ID NO: 343774 - DNA, 25 bp, Artificial
  probe
  misc_feature (1)..(25): SEQ ID NO: 3004; WAN024D7U; Start 77; Stop 101
actatagccatgttgccatttattt

SEQ ID NO: 343775 - DNA, 25 bp, Artificial
  probe
  misc_feature (1)..(25): SEQ ID NO: 3004; WAN024D7U; Start 74; Stop 98
gtaactatagccatgttgccattta

SEQ ID NO: 343776 - DNA, 25 bp, Artificial
  probe
  misc_feature (1)..(25): SEQ ID NO: 3004; WAN024D7U; Start 79; Stop 103
tatagccatgttgccatttatttgg

SEQ ID NO: 343777 - DNA, 25 bp, Artificial
  probe
  misc_feature (1)..(25): SEQ ID NO: 3004; WAN024D7U; Start 76; Stop 100
aactatagccatgttgccatttatt

SEQ ID NO: 343778 - DNA, 25 bp, Artificial
  probe
  misc_feature (1)..(25): SEQ ID NO: 3004; WAN024D7U; Start 78; Stop 102
ctatagccatgttgccatttatttg

SEQ ID NO: 343779 - DNA, 25 bp, Artificial
  probe
  misc_feature (1)..(25): SEQ ID NO: 3004; WAN024D7U; Start 111; Stop 135
gatttatcatgctagtggacaggct

SEQ ID NO: 343780 - DNA, 25 bp, Artificial
  probe
  misc_feature (1)..(25): SEQ ID NO: 3004; WAN024D7U; Start 465; Stop 489
gcctctgttacaatgtaaagaaagg

SEQ ID NO: 343781 - DNA, 25 bp, Artificial
  probe
  misc_feature (1)..(25): SEQ ID NO: 3004; WAN024D7U; Start 464; Stop 488
cgcctctgttacaatgtaaagaaag

SEQ ID NO: 343782 - DNA, 25 bp, Artificial
  probe
  misc_feature (1)..(25): SEQ ID NO: 3004; WAN024D7U; Start 462; Stop 486
atcgcctctgttacaatgtaaagaa

SEQ ID NO: 343783 - DNA, 25 bp, Artificial
  probe
  misc_feature (1)..(25): SEQ ID NO: 3004; WAN024D7U; Start 112; Stop 136
atttatcatgctagtggacaggctg

SEQ ID NO: 343784 - DNA, 25 bp, Artificial
  probe
  misc_feature (1)..(25): SEQ ID NO: 3004; WAN024D7U; Start 73; Stop 97
ggtaactatagccatgttgccattt

SEQ ID NO: 343785 - DNA, 25 bp, Artificial
  probe
  misc_feature (1)..(25): SEQ ID NO: 3004; WAN024D7U; Start 463; Stop 487
tcgcctctgttacaatgtaaagaaa

SEQ ID NO: 343786 - DNA, 25 bp, Artificial
  probe
  misc_feature (1)..(25): SEQ ID NO: 3005; WAN024GJS; Start 690; Stop 714
gaatgatatttacttggctctgacc

SEQ ID NO: 343787 - DNA, 25 bp, Artificial
  probe
  misc_feature (1)..(25): SEQ ID NO: 3005; WAN024GJS; Start 374; Stop 398
aattagactggttccctgttcattt

SEQ ID NO: 343788 - DNA, 25 bp, Artificial
  probe
  misc_feature (1)..(25): SEQ ID NO: 3005; WAN024GJS; Start 373; Stop 397
aaattagactggttccctgttcatt

SEQ ID NO: 343789 - DNA, 25 bp, Artificial
  probe
  misc_feature (1)..(25): SEQ ID NO: 3005; WAN024GJS; Start 689; Stop 713
tgaatgatatttacttggctctgac

SEQ ID NO: 343790 - DNA, 25 bp, Artificial
  probe
  misc_feature (1)..(25): SEQ ID NO: 3005; WAN024GJS; Start 372; Stop 396
gaaattagactggttccctgttcat

SEQ ID NO: 343791 - DNA, 25 bp, Artificial
  probe
  misc_feature (1)..(25): SEQ ID NO: 3005; WAN024GJS; Start 676; Stop 700
cctgaggctagtttgaatgatattt

SEQ ID NO: 343792 - DNA, 25 bp, Artificial
  probe
  misc_feature (1)..(25): SEQ ID NO: 3005; WAN024GJS; Start 688; Stop 712
ttgaatgatatttacttggctctga

SEQ ID NO: 343793 - DNA, 25 bp, Artificial
  probe
  misc_feature (1)..(25): SEQ ID NO: 3005; WAN024GJS; Start 371; Stop 395
agaaattagactggttccctgttca

SEQ ID NO: 343794 - DNA, 25 bp, Artificial
  probe
  misc_feature (1)..(25): SEQ ID NO: 3005; WAN024GJS; Start 291; Stop 315
ggttgctatggcttacggtattgag

SEQ ID NO: 343795 - DNA, 25 bp, Artificial
  probe
  misc_feature (1)..(25): SEQ ID NO: 3005; WAN024GJS; Start 245; Stop 269
cgcctagtctgtatgaggaattgac

SEQ ID NO: 343796 - DNA, 25 bp, Artificial
  probe
  misc_feature (1)..(25): SEQ ID NO: 3005; WAN024GJS; Start 243; Stop 267
gacgcctagtctgtatgaggaattg

SEQ ID NO: 343797 - DNA, 25 bp, Artificial
  probe
  misc_feature (1)..(25): SEQ ID NO: 3005; WAN024GJS; Start 687; Stop 711
tttgaatgatatttacttggctctg

SEQ ID NO: 343798 - DNA, 25 bp, Artificial
  probe
  misc_feature (1)..(25): SEQ ID NO: 3005; WAN024GJS; Start 686; Stop 710
gtttgaatgatatttacttggctct

SEQ ID NO: 343799 - DNA, 25 bp, Artificial
  probe
  misc_feature (1)..(25): SEQ ID NO: 3005; WAN024GJS; Start 494; Stop 518
cgctggctatttctgatttgattca

SEQ ID NO: 343800 - DNA, 25 bp, Artificial
  probe
  misc_feature (1)..(25): SEQ ID NO: 3005; WAN024GJS; Start 370; Stop 394
cagaaattagactggttccctgttc

SEQ ID NO: 343801 - DNA, 25 bp, Artificial
  probe
  misc_feature (1)..(25): SEQ ID NO: 3005; WAN024GJS; Start 592; Stop 616
atgtgtgatgcctttgtcattcttc

SEQ ID NO: 343802 - DNA, 25 bp, Artificial
  probe
  misc_feature (1)..(25): SEQ ID NO: 3005; WAN024GJS; Start 493; Stop 517
ccgctggctatttctgatttgattc

SEQ ID NO: 343803 - DNA, 25 bp, Artificial
  probe
  misc_feature (1)..(25): SEQ ID NO: 3005; WAN024GJS; Start 691; Stop 715
aatgatatttacttggctctgacca

SEQ ID NO: 343804 - DNA, 25 bp, Artificial
  probe
  misc_feature (1)..(25): SEQ ID NO: 3005; WAN024GJS; Start 244; Stop 268
acgcctagtctgtatgaggaattga

SEQ ID NO: 343805 - DNA, 25 bp, Artificial
  probe
  misc_feature (1)..(25): SEQ ID NO: 3005; WAN024GJS; Start 491; Stop 515
atccgctggctatttctgatttgat

SEQ ID NO: 343806 - DNA, 25 bp, Artificial
  probe
  misc_feature (1)..(25): SEQ ID NO: 3005; WAN024GJS; Start 492; Stop 516
tccgctggctatttctgatttgatt

SEQ ID NO: 343807 - DNA, 25 bp, Artificial
  probe
  misc_feature (1)..(25): SEQ ID NO: 3005; WAN024GJS; Start 685; Stop 709
agtttgaatgatatttacttggctc

SEQ ID NO: 343808 - DNA, 25 bp, Artificial
  probe
  misc_feature (1)..(25): SEQ ID NO: 3005; WAN024GJS; Start 488; Stop 512
ttgatccgctggctatttctgattt

SEQ ID NO: 343809 - DNA, 25 bp, Artificial
  probe
  misc_feature (1)..(25): SEQ ID NO: 3005; WAN024GJS; Start 375; Stop 399
attagactggttccctgttcatttt

SEQ ID NO: 343810 - DNA, 25 bp, Artificial
  probe
  misc_feature (1)..(25): SEQ ID NO: 3005; WAN024GJS; Start 678; Stop 702
tgaggctagtttgaatgatatttac

SEQ ID NO: 343811 - DNA, 25 bp, Artificial
  probe
  misc_feature (1)..(25): SEQ ID NO: 3005; WAN024GJS; Start 593; Stop 617
tgtgtgatgcctttgtcattcttca

SEQ ID NO: 343812 - DNA, 25 bp, Artificial
  probe
  misc_feature (1)..(25): SEQ ID NO: 3005; WAN024GJS; Start 281; Stop 305
atatcgaaacggttgctatggctta

SEQ ID NO: 343813 - DNA, 25 bp, Artificial
  probe
  misc_feature (1)..(25): SEQ ID NO: 3005; WAN024GJS; Start 677; Stop 701
ctgaggctagtttgaatgatattta

SEQ ID NO: 343814 - DNA, 25 bp, Artificial
  probe
  misc_feature (1)..(25): SEQ ID NO: 3005; WAN024GJS; Start 288; Stop 312
aacggttgctatggcttacggtatt

SEQ ID NO: 343815 - DNA, 25 bp, Artificial
  probe
  misc_feature (1)..(25): SEQ ID NO: 3005; WAN024GJS; Start 490; Stop 514
gatccgctggctatttctgatttga

SEQ ID NO: 343816 - DNA, 25 bp, Artificial
  probe
  misc_feature (1)..(25): SEQ ID NO: 3005; WAN024GJS; Start 487; Stop 511
cttgatccgctggctatttctgatt

SEQ ID NO: 343817 - DNA, 25 bp, Artificial
  probe
  misc_feature (1)..(25): SEQ ID NO: 3005; WAN024GJS; Start 469; Stop 493
gatgagcctttccttggtcttgatc

SEQ ID NO: 343818 - DNA, 25 bp, Artificial
  probe
  misc_feature (1)..(25): SEQ ID NO: 3005; WAN024GJS; Start 426; Stop 450
gattatctgtgcttttgtggtggat

SEQ ID NO: 343819 - DNA, 25 bp, Artificial
  probe
  misc_feature (1)..(25): SEQ ID NO: 3006; WAN024FRY; Start 194; Stop 218
atatcaatgtcaaggtggctacgat

SEQ ID NO: 343820 - DNA, 25 bp, Artificial
  probe
  misc_feature (1)..(25): SEQ ID NO: 3006; WAN024FRY; Start 195; Stop 219
tatcaatgtcaaggtggctacgatt

SEQ ID NO: 343821 - DNA, 25 bp, Artificial
  probe
  misc_feature (1)..(25): SEQ ID NO: 3006; WAN024FRY; Start 157; Stop 181
aatgagttgttggctaaggtcaatg

SEQ ID NO: 343822 - DNA, 25 bp, Artificial
  probe
  misc_feature (1)..(25): SEQ ID NO: 3006; WAN024FRY; Start 156; Stop 180
caatgagttgttggctaaggtcaat

SEQ ID NO: 343823 - DNA, 25 bp, Artificial
  probe
  misc_feature (1)..(25): SEQ ID NO: 3006; WAN024FRY; Start 173; Stop 197
aggtcaatgtcttggcagatgatat

SEQ ID NO: 343824 - DNA, 25 bp, Artificial
  probe
  misc_feature (1)..(25): SEQ ID NO: 3006; WAN024FRY; Start 172; Stop 196
aaggtcaatgtcttggcagatgata

SEQ ID NO: 343825 - DNA, 25 bp, Artificial
  probe
  misc_feature (1)..(25): SEQ ID NO: 3006; WAN024FRY; Start 171; Stop 195
taaggtcaatgtcttggcagatgat

SEQ ID NO: 343826 - DNA, 25 bp, Artificial
  probe
  misc_feature (1)..(25): SEQ ID NO: 3006; WAN024FRY; Start 162; Stop 186
gttgttggctaaggtcaatgtcttg

SEQ ID NO: 343827 - DNA, 25 bp, Artificial
  probe
  misc_feature (1)..(25): SEQ ID NO: 3006; WAN024FRY; Start 170; Stop 194
ctaaggtcaatgtcttggcagatga

SEQ ID NO: 343828 - DNA, 25 bp, Artificial
  probe
  misc_feature (1)..(25): SEQ ID NO: 3006; WAN024FRY; Start 161; Stop 185
agttgttggctaaggtcaatgtctt

SEQ ID NO: 343829 - DNA, 25 bp, Artificial
  probe
  misc_feature (1)..(25): SEQ ID NO: 3006; WAN024FRY; Start 117; Stop 141
aaccttgacttcagatgtggatgtg

SEQ ID NO: 343830 - DNA, 25 bp, Artificial
  probe
  misc_feature (1)..(25): SEQ ID NO: 3006; WAN024FRY; Start 158; Stop 182
atgagttgttggctaaggtcaatgt

SEQ ID NO: 343831 - DNA, 25 bp, Artificial
  probe
  misc_feature (1)..(25): SEQ ID NO: 3006; WAN024FRY; Start 160; Stop 184
gagttgttggctaaggtcaatgtct

SEQ ID NO: 343832 - DNA, 25 bp, Artificial
  probe
  misc_feature (1)..(25): SEQ ID NO: 3006; WAN024FRY; Start 159; Stop 183
tgagttgttggctaaggtcaatgtc

SEQ ID NO: 343833 - DNA, 25 bp, Artificial
  probe
  misc_feature (1)..(25): SEQ ID NO: 3006; WAN024FRY; Start 174; Stop 198
ggtcaatgtcttggcagatgatatc

SEQ ID NO: 343834 - DNA, 25 bp, Artificial
  probe
  misc_feature (1)..(25): SEQ ID NO: 3006; WAN024FRY; Start 123; Stop 147
gacttcagatgtggatgtgaccttg

SEQ ID NO: 343835 - DNA, 25 bp, Artificial
  probe
  misc_feature (1)..(25): SEQ ID NO: 3006; WAN024FRY; Start 120; Stop 144
cttgacttcagatgtggatgtgacc

SEQ ID NO: 343836 - DNA, 25 bp, Artificial
  probe
  misc_feature (1)..(25): SEQ ID NO: 3006; WAN024FRY; Start 119; Stop 143
ccttgacttcagatgtggatgtgac

SEQ ID NO: 343837 - DNA, 25 bp, Artificial
  probe
  misc_feature (1)..(25): SEQ ID NO: 3006; WAN024FRY; Start 163; Stop 187
ttgttggctaaggtcaatgtcttgg

SEQ ID NO: 343838 - DNA, 25 bp, Artificial
  probe
  misc_feature (1)..(25): SEQ ID NO: 3006; WAN024FRY; Start 116; Stop 140
aaaccttgacttcagatgtggatgt

SEQ ID NO: 343839 - DNA, 25 bp, Artificial
  probe
  misc_feature (1)..(25): SEQ ID NO: 3006; WAN024FRY; Start 193; Stop 217
gatatcaatgtcaaggtggctacga

SEQ ID NO: 343840 - DNA, 25 bp, Artificial
  probe
  misc_feature (1)..(25): SEQ ID NO: 3006; WAN024FRY; Start 122; Stop 146
tgacttcagatgtggatgtgacctt

SEQ ID NO: 343841 - DNA, 25 bp, Artificial
  probe
  misc_feature (1)..(25): SEQ ID NO: 3006; WAN024FRY; Start 121; Stop 145
ttgacttcagatgtggatgtgacct

SEQ ID NO: 343842 - DNA, 25 bp, Artificial
  probe
  misc_feature (1)..(25): SEQ ID NO: 3006; WAN024FRY; Start 118; Stop 142
accttgacttcagatgtggatgtga

SEQ ID NO: 343843 - DNA, 25 bp, Artificial
  probe
  misc_feature (1)..(25): SEQ ID NO: 3006; WAN024FRY; Start 169; Stop 193
gctaaggtcaatgtcttggcagatg

SEQ ID NO: 343844 - DNA, 25 bp, Artificial
  probe
  misc_feature (1)..(25): SEQ ID NO: 3006; WAN024FRY; Start 50; Stop 74
tggtctatctgatcattactgtaca

SEQ ID NO: 343845 - DNA, 25 bp, Artificial
  probe
  misc_feature (1)..(25): SEQ ID NO: 3006; WAN024FRY; Start 6; Stop 30
agaagttgcatatattcttgttgcc

SEQ ID NO: 343846 - DNA, 25 bp, Artificial
  probe
  misc_feature (1)..(25): SEQ ID NO: 3006; WAN024FRY; Start 114; Stop 138
taaaaccttgacttcagatgtggat

SEQ ID NO: 343847 - DNA, 25 bp, Artificial
  probe
  misc_feature (1)..(25): SEQ ID NO: 3006; WAN024FRY; Start 107; Stop 131
agacgattaaaaccttgacttcaga

SEQ ID NO: 343848 - DNA, 25 bp, Artificial
  probe
  misc_feature (1)..(25): SEQ ID NO: 3006; WAN024FRY; Start 113; Stop 137
ttaaaaccttgacttcagatgtgga

SEQ ID NO: 343849 - DNA, 25 bp, Artificial
  probe
  misc_feature (1)..(25): SEQ ID NO: 3006; WAN024FRY; Start 112; Stop 136
attaaaaccttgacttcagatgtgg

SEQ ID NO: 343850 - DNA, 25 bp, Artificial
  probe
  misc_feature (1)..(25): SEQ ID NO: 3006; WAN024FRY; Start 110; Stop 134
cgattaaaaccttgacttcagatgt

SEQ ID NO: 343851 - DNA, 25 bp, Artificial
  probe
  misc_feature (1)..(25): SEQ ID NO: 3006; WAN024FRY; Start 109; Stop 133
acgattaaaaccttgacttcagatg

SEQ ID NO: 343852 - DNA, 25 bp, Artificial
  probe
  misc_feature (1)..(25): SEQ ID NO: 3007; WAN024DMI; Start 365; Stop 389
taggtgtctgtgtaggcttactgat

SEQ ID NO: 343853 - DNA, 25 bp, Artificial
  probe
  misc_feature (1)..(25): SEQ ID NO: 3007; WAN024DMI; Start 436; Stop 460
atcaatatcttaggtatgcttagcc

SEQ ID NO: 343854 - DNA, 25 bp, Artificial
  probe
  misc_feature (1)..(25): SEQ ID NO: 3007; WAN024DMI; Start 440; Stop 464
atatcttaggtatgcttagccttgg

SEQ ID NO: 343855 - DNA, 25 bp, Artificial
  probe
  misc_feature (1)..(25): SEQ ID NO: 3007; WAN024DMI; Start 441; Stop 465
tatcttaggtatgcttagccttggt

SEQ ID NO: 343856 - DNA, 25 bp, Artificial
  probe
  misc_feature (1)..(25): SEQ ID NO: 3007; WAN024DMI; Start 437; Stop 461
tcaatatcttaggtatgcttagcct

SEQ ID NO: 343857 - DNA, 25 bp, Artificial
  probe
  misc_feature (1)..(25): SEQ ID NO: 3007; WAN024DMI; Start 368; Stop 392
gtgtctgtgtaggcttactgattta

SEQ ID NO: 343858 - DNA, 25 bp, Artificial
  probe
  misc_feature (1)..(25): SEQ ID NO: 3007; WAN024DMI; Start 209; Stop 233
ttattccattaggtgtttgtttccc

SEQ ID NO: 343859 - DNA, 25 bp, Artificial
  probe
  misc_feature (1)..(25): SEQ ID NO: 3007; WAN024DMI; Start 442; Stop 466
atcttaggtatgcttagccttggtt

SEQ ID NO: 343860 - DNA, 25 bp, Artificial
  probe
  misc_feature (1)..(25): SEQ ID NO: 3007; WAN024DMI; Start 369; Stop 393
tgtctgtgtaggcttactgatttat

SEQ ID NO: 343861 - DNA, 25 bp, Artificial
  probe
  misc_feature (1)..(25): SEQ ID NO: 3007; WAN024DMI; Start 270; Stop 294
cgggacaggtttcttgattagttta

SEQ ID NO: 343862 - DNA, 25 bp, Artificial
  probe
  misc_feature (1)..(25): SEQ ID NO: 3007; WAN024DMI; Start 370; Stop 394
gtctgtgtaggcttactgatttatc

SEQ ID NO: 343863 - DNA, 25 bp, Artificial
  probe
  misc_feature (1)..(25): SEQ ID NO: 3007; WAN024DMI; Start 322; Stop 346
gcaataggtataacagatataacgg

SEQ ID NO: 343864 - DNA, 25 bp, Artificial
  probe
  misc_feature (1)..(25): SEQ ID NO: 3007; WAN024DMI; Start 255; Stop 279
tagtttaagaatagtcgggacaggt

SEQ ID NO: 343865 - DNA, 25 bp, Artificial
  probe
  misc_feature (1)..(25): SEQ ID NO: 3007; WAN024DMI; Start 439; Stop 463
aatatcttaggtatgcttagccttg

SEQ ID NO: 343866 - DNA, 25 bp, Artificial
  probe
  misc_feature (1)..(25): SEQ ID NO: 3007; WAN024DMI; Start 438; Stop 462
caatatcttaggtatgcttagcctt

SEQ ID NO: 343867 - DNA, 25 bp, Artificial
  probe
  misc_feature (1)..(25): SEQ ID NO: 3007; WAN024DMI; Start 257; Stop 281
gtttaagaatagtcgggacaggttt

SEQ ID NO: 343868 - DNA, 25 bp, Artificial
  probe
  misc_feature (1)..(25): SEQ ID NO: 3007; WAN024DMI; Start 254; Stop 278
ctagtttaagaatagtcgggacagg

SEQ ID NO: 343869 - DNA, 25 bp, Artificial
  probe
  misc_feature (1)..(25): SEQ ID NO: 3007; WAN024DMI; Start 271; Stop 295
gggacaggtttcttgattagtttat

SEQ ID NO: 343870 - DNA, 25 bp, Artificial
  probe
  misc_feature (1)..(25): SEQ ID NO: 3007; WAN024DMI; Start 355; Stop 379
ttaaatacgctaggtgtctgtgtag

SEQ ID NO: 343871 - DNA, 25 bp, Artificial
  probe
  misc_feature (1)..(25): SEQ ID NO: 3007; WAN024DMI; Start 258; Stop 282
tttaagaatagtcgggacaggtttc

SEQ ID NO: 343872 - DNA, 25 bp, Artificial
  probe
  misc_feature (1)..(25): SEQ ID NO: 3007; WAN024DMI; Start 366; Stop 390
aggtgtctgtgtaggcttactgatt

SEQ ID NO: 343873 - DNA, 25 bp, Artificial
  probe
  misc_feature (1)..(25): SEQ ID NO: 3007; WAN024DMI; Start 432; Stop 456
atggatcaatatcttaggtatgctt

SEQ ID NO: 343874 - DNA, 25 bp, Artificial
  probe
  misc_feature (1)..(25): SEQ ID NO: 3007; WAN024DMI; Start 431; Stop 455
aatggatcaatatcttaggtatgct

SEQ ID NO: 343875 - DNA, 25 bp, Artificial
  probe
  misc_feature (1)..(25): SEQ ID NO: 3007; WAN024DMI; Start 265; Stop 289
atagtcgggacaggtttcttgatta

SEQ ID NO: 343876 - DNA, 25 bp, Artificial
  probe
  misc_feature (1)..(25): SEQ ID NO: 3007; WAN024DMI; Start 256; Stop 280
agtttaagaatagtcgggacaggtt

SEQ ID NO: 343877 - DNA, 25 bp, Artificial
  probe
  misc_feature (1)..(25): SEQ ID NO: 3007; WAN024DMI; Start 364; Stop 388
ctaggtgtctgtgtaggcttactga

SEQ ID NO: 343878 - DNA, 25 bp, Artificial
  probe
  misc_feature (1)..(25): SEQ ID NO: 3007; WAN024DMI; Start 253; Stop 277
tctagtttaagaatagtcgggacag

SEQ ID NO: 343879 - DNA, 25 bp, Artificial
  probe
  misc_feature (1)..(25): SEQ ID NO: 3007; WAN024DMI; Start 435; Stop 459
gatcaatatcttaggtatgcttagc

SEQ ID NO: 343880 - DNA, 25 bp, Artificial
  probe
  misc_feature (1)..(25): SEQ ID NO: 3007; WAN024DMI; Start 252; Stop 276
atctagtttaagaatagtcgggaca

SEQ ID NO: 343881 - DNA, 25 bp, Artificial
  probe
  misc_feature (1)..(25): SEQ ID NO: 3007; WAN024DMI; Start 208; Stop 232
tttattccattaggtgtttgtttcc

SEQ ID NO: 343882 - DNA, 25 bp, Artificial
  probe
  misc_feature (1)..(25): SEQ ID NO: 3007; WAN024DMI; Start 266; Stop 290
tagtcgggacaggtttcttgattag

SEQ ID NO: 343883 - DNA, 25 bp, Artificial
  probe
  misc_feature (1)..(25): SEQ ID NO: 3007; WAN024DMI; Start 356; Stop 380
taaatacgctaggtgtctgtgtagg

SEQ ID NO: 343884 - DNA, 25 bp, Artificial
  probe
  misc_feature (1)..(25): SEQ ID NO: 3007; WAN024DMI; Start 289; Stop 313
agtttattgtttgagtgcttacagt

SEQ ID NO: 343885 - DNA, 25 bp, Artificial
  probe
  misc_feature (1)..(25): SEQ ID NO: 3008; WAN024EST; Start 349; Stop 373
ctcttggaacagttaggactaggag

SEQ ID NO: 343886 - DNA, 25 bp, Artificial
  probe
  misc_feature (1)..(25): SEQ ID NO: 3008; WAN024EST; Start 347; Stop 371
gactcttggaacagttaggactagg

SEQ ID NO: 343887 - DNA, 25 bp, Artificial
  probe
  misc_feature (1)..(25): SEQ ID NO: 3008; WAN024EST; Start 346; Stop 370
ggactcttggaacagttaggactag

SEQ ID NO: 343888 - DNA, 25 bp, Artificial
  probe
  misc_feature (1)..(25): SEQ ID NO: 3008; WAN024EST; Start 345; Stop 369
tggactcttggaacagttaggacta

SEQ ID NO: 343889 - DNA, 25 bp, Artificial
  probe
  misc_feature (1)..(25): SEQ ID NO: 3008; WAN024EST; Start 348; Stop 372
actcttggaacagttaggactagga

SEQ ID NO: 343890 - DNA, 25 bp, Artificial
  probe
  misc_feature (1)..(25): SEQ ID NO: 3008; WAN024EST; Start 437; Stop 461
gtgctatgatgattgacccagaaat

SEQ ID NO: 343891 - DNA, 25 bp, Artificial
  probe
  misc_feature (1)..(25): SEQ ID NO: 3008; WAN024EST; Start 351; Stop 375
cttggaacagttaggactaggagga

SEQ ID NO: 343892 - DNA, 25 bp, Artificial
  probe
  misc_feature (1)..(25): SEQ ID NO: 3008; WAN024EST; Start 350; Stop 374
tcttggaacagttaggactaggagg

SEQ ID NO: 343893 - DNA, 25 bp, Artificial
  probe
  misc_feature (1)..(25): SEQ ID NO: 3008; WAN024EST; Start 352; Stop 376
ttggaacagttaggactaggaggac

SEQ ID NO: 343894 - DNA, 25 bp, Artificial
  probe
  misc_feature (1)..(25): SEQ ID NO: 3008; WAN024EST; Start 596; Stop 620
tcgcagatgtattattgaaagtaga

SEQ ID NO: 343895 - DNA, 25 bp, Artificial
  probe
  misc_feature (1)..(25): SEQ ID NO: 3008; WAN024EST; Start 104; Stop 128
cttctggtggaggtaagacaactct

SEQ ID NO: 343896 - DNA, 25 bp, Artificial
  probe
  misc_feature (1)..(25): SEQ ID NO: 3008; WAN024EST; Start 597; Stop 621
cgcagatgtattattgaaagtagaa

SEQ ID NO: 343897 - DNA, 25 bp, Artificial
  probe
  misc_feature (1)..(25): SEQ ID NO: 3008; WAN024EST; Start 344; Stop 368
gtggactcttggaacagttaggact

SEQ ID NO: 343898 - DNA, 25 bp, Artificial
  probe
  misc_feature (1)..(25): SEQ ID NO: 3008; WAN024EST; Start 343; Stop 367
agtggactcttggaacagttaggac

SEQ ID NO: 343899 - DNA, 25 bp, Artificial
  probe
  misc_feature (1)..(25): SEQ ID NO: 3008; WAN024EST; Start 438; Stop 462
tgctatgatgattgacccagaaatc

SEQ ID NO: 343900 - DNA, 25 bp, Artificial
  probe
  misc_feature (1)..(25): SEQ ID NO: 3008; WAN024EST; Start 387; Stop 411
ctatcctttctcactatctggtggg

SEQ ID NO: 343901 - DNA, 25 bp, Artificial
  probe
  misc_feature (1)..(25): SEQ ID NO: 3008; WAN024EST; Start 386; Stop 410
cctatcctttctcactatctggtgg

SEQ ID NO: 343902 - DNA, 25 bp, Artificial
  probe
  misc_feature (1)..(25): SEQ ID NO: 3008; WAN024EST; Start 354; Stop 378
ggaacagttaggactaggaggacac

SEQ ID NO: 343903 - DNA, 25 bp, Artificial
  probe
  misc_feature (1)..(25): SEQ ID NO: 3008; WAN024EST; Start 507; Stop 531
tttggaagtggagaagctaatcttg

SEQ ID NO: 343904 - DNA, 25 bp, Artificial
  probe
  misc_feature (1)..(25): SEQ ID NO: 3008; WAN024EST; Start 506; Stop 530
gtttggaagtggagaagctaatctt

SEQ ID NO: 343905 - DNA, 25 bp, Artificial
  probe
  misc_feature (1)..(25): SEQ ID NO: 3008; WAN024EST; Start 508; Stop 532
ttggaagtggagaagctaatcttgc

SEQ ID NO: 343906 - DNA, 25 bp, Artificial
  probe
  misc_feature (1)..(25): SEQ ID NO: 3008; WAN024EST; Start 498; Stop 522
agaattacgtttggaagtggagaag

SEQ ID NO: 343907 - DNA, 25 bp, Artificial
  probe
  misc_feature (1)..(25): SEQ ID NO: 3008; WAN024EST; Start 595; Stop 619
atcgcagatgtattattgaaagtag

SEQ ID NO: 343908 - DNA, 25 bp, Artificial
  probe
  misc_feature (1)..(25): SEQ ID NO: 3008; WAN024EST; Start 497; Stop 521
cagaattacgtttggaagtggagaa

SEQ ID NO: 343909 - DNA, 25 bp, Artificial
  probe
  misc_feature (1)..(25): SEQ ID NO: 3008; WAN024EST; Start 153; Stop 177
aaccattgattcagggcaaatcttt

SEQ ID NO: 343910 - DNA, 25 bp, Artificial
  probe
  misc_feature (1)..(25): SEQ ID NO: 3008; WAN024EST; Start 152; Stop 176
aaaccattgattcagggcaaatctt

SEQ ID NO: 343911 - DNA, 25 bp, Artificial
  probe
  misc_feature (1)..(25): SEQ ID NO: 3008; WAN024EST; Start 436; Stop 460
cgtgctatgatgattgacccagaaa

SEQ ID NO: 343912 - DNA, 25 bp, Artificial
  probe
  misc_feature (1)..(25): SEQ ID NO: 3008; WAN024EST; Start 342; Stop 366
gagtggactcttggaacagttagga

SEQ ID NO: 343913 - DNA, 25 bp, Artificial
  probe
  misc_feature (1)..(25): SEQ ID NO: 3008; WAN024EST; Start 385; Stop 409
gcctatcctttctcactatctggtg

SEQ ID NO: 343914 - DNA, 25 bp, Artificial
  probe
  misc_feature (1)..(25): SEQ ID NO: 3008; WAN024EST; Start 355; Stop 379
gaacagttaggactaggaggacacg

SEQ ID NO: 343915 - DNA, 25 bp, Artificial
  probe
  misc_feature (1)..(25): SEQ ID NO: 3008; WAN024EST; Start 353; Stop 377
tggaacagttaggactaggaggaca

SEQ ID NO: 343916 - DNA, 25 bp, Artificial
  probe
  misc_feature (1)..(25): SEQ ID NO: 3008; WAN024EST; Start 176; Stop 200
tttataatggacaacctttagagct

SEQ ID NO: 343917 - DNA, 25 bp, Artificial
  probe
  misc_feature (1)..(25): SEQ ID NO: 3008; WAN024EST; Start 447; Stop 471
gattgacccagaaatcattggctac

SEQ ID NO: 343918 - DNA, 25 bp, Artificial
  probe
  misc_feature (1)..(25): SEQ ID NO: 3009; WAN024GNS; Start 1081; Stop 1105
acgattctaggttggaactattacg

SEQ ID NO: 343919 - DNA, 25 bp, Artificial
  probe
  misc_feature (1)..(25): SEQ ID NO: 3009; WAN024GNS; Start 1084; Stop 1108
attctaggttggaactattacggag

SEQ ID NO: 343920 - DNA, 25 bp, Artificial
  probe
  misc_feature (1)..(25): SEQ ID NO: 3009; WAN024GNS; Start 1083; Stop 1107
gattctaggttggaactattacgga

SEQ ID NO: 343921 - DNA, 25 bp, Artificial
  probe
  misc_feature (1)..(25): SEQ ID NO: 3009; WAN024GNS; Start 1087; Stop 1111
ctaggttggaactattacggagaac

SEQ ID NO: 343922 - DNA, 25 bp, Artificial
  probe
  misc_feature (1)..(25): SEQ ID NO: 3009; WAN024GNS; Start 1086; Stop 1110
tctaggttggaactattacggagaa

SEQ ID NO: 343923 - DNA, 25 bp, Artificial
  probe
  misc_feature (1)..(25): SEQ ID NO: 3009; WAN024GNS; Start 1085; Stop 1109
ttctaggttggaactattacggaga

SEQ ID NO: 343924 - DNA, 25 bp, Artificial
  probe
  misc_feature (1)..(25): SEQ ID NO: 3009; WAN024GNS; Start 1082; Stop 1106
cgattctaggttggaactattacgg

SEQ ID NO: 343925 - DNA, 25 bp, Artificial
  probe
  misc_feature (1)..(25): SEQ ID NO: 3009; WAN024GNS; Start 1198; Stop 1222
gagttggatatggtctggattatcg

SEQ ID NO: 343926 - DNA, 25 bp, Artificial
  probe
  misc_feature (1)..(25): SEQ ID NO: 3009; WAN024GNS; Start 1197; Stop 1221
cgagttggatatggtctggattatc

SEQ ID NO: 343927 - DNA, 25 bp, Artificial
  probe
  misc_feature (1)..(25): SEQ ID NO: 3009; WAN024GNS; Start 1088; Stop 1112
taggttggaactattacggagaacg

SEQ ID NO: 343928 - DNA, 25 bp, Artificial
  probe
  misc_feature (1)..(25): SEQ ID NO: 3009; WAN024GNS; Start 1080; Stop 1104
aacgattctaggttggaactattac

SEQ ID NO: 343929 - DNA, 25 bp, Artificial
  probe
  misc_feature (1)..(25): SEQ ID NO: 3009; WAN024GNS; Start 1196; Stop 1220
tcgagttggatatggtctggattat

SEQ ID NO: 343930 - DNA, 25 bp, Artificial
  probe
  misc_feature (1)..(25): SEQ ID NO: 3009; WAN024GNS; Start 1195; Stop 1219
atcgagttggatatggtctggatta

SEQ ID NO: 343931 - DNA, 25 bp, Artificial
  probe
  misc_feature (1)..(25): SEQ ID NO: 3009; WAN024GNS; Start 1199; Stop 1223
agttggatatggtctggattatcgc

SEQ ID NO: 343932 - DNA, 25 bp, Artificial
  probe
  misc_feature (1)..(25): SEQ ID NO: 3009; WAN024GNS; Start 703; Stop 727
acaatcgctttagtctttacctcag

SEQ ID NO: 343933 - DNA, 25 bp, Artificial
  probe
  misc_feature (1)..(25): SEQ ID NO: 3009; WAN024GNS; Start 212; Stop 236
ttggaacaggaaatatcataggagt

SEQ ID NO: 343934 - DNA, 25 bp, Artificial
  probe
  misc_feature (1)..(25): SEQ ID NO: 3009; WAN024GNS; Start 898; Stop 922
atgacaggaacctttattgataccc

SEQ ID NO: 343935 - DNA, 25 bp, Artificial
  probe
  misc_feature (1)..(25): SEQ ID NO: 3009; WAN024GNS; Start 702; Stop 726
cacaatcgctttagtctttacctca

SEQ ID NO: 343936 - DNA, 25 bp, Artificial
  probe
  misc_feature (1)..(25): SEQ ID NO: 3009; WAN024GNS; Start 1201; Stop 1225
ttggatatggtctggattatcgcag

SEQ ID NO: 343937 - DNA, 25 bp, Artificial
  probe
  misc_feature (1)..(25): SEQ ID NO: 3009; WAN024GNS; Start 211; Stop 235
gttggaacaggaaatatcataggag

SEQ ID NO: 343938 - DNA, 25 bp, Artificial
  probe
  misc_feature (1)..(25): SEQ ID NO: 3009; WAN024GNS; Start 862; Stop 886
aagacaaatgaaccagtagagcaag

SEQ ID NO: 343939 - DNA, 25 bp, Artificial
  probe
  misc_feature (1)..(25): SEQ ID NO: 3009; WAN024GNS; Start 215; Stop 239
gaacaggaaatatcataggagttgc

SEQ ID NO: 343940 - DNA, 25 bp, Artificial
  probe
  misc_feature (1)..(25): SEQ ID NO: 3009; WAN024GNS; Start 218; Stop 242
caggaaatatcataggagttgcgac

SEQ ID NO: 343941 - DNA, 25 bp, Artificial
  probe
  misc_feature (1)..(25): SEQ ID NO: 3009; WAN024GNS; Start 1200; Stop 1224
gttggatatggtctggattatcgca

SEQ ID NO: 343942 - DNA, 25 bp, Artificial
  probe
  misc_feature (1)..(25): SEQ ID NO: 3009; WAN024GNS; Start 1194; Stop 1218
tatcgagttggatatggtctggatt

SEQ ID NO: 343943 - DNA, 25 bp, Artificial
  probe
  misc_feature (1)..(25): SEQ ID NO: 3009; WAN024GNS; Start 1193; Stop 1217
ttatcgagttggatatggtctggat

SEQ ID NO: 343944 - DNA, 25 bp, Artificial
  probe
  misc_feature (1)..(25): SEQ ID NO: 3009; WAN024GNS; Start 213; Stop 237
tggaacaggaaatatcataggagtt

SEQ ID NO: 343945 - DNA, 25 bp, Artificial
  probe
  misc_feature (1)..(25): SEQ ID NO: 3009; WAN024GNS; Start 216; Stop 240
aacaggaaatatcataggagttgcg

SEQ ID NO: 343946 - DNA, 25 bp, Artificial
  probe
  misc_feature (1)..(25): SEQ ID NO: 3009; WAN024GNS; Start 861; Stop 885
caagacaaatgaaccagtagagcaa

SEQ ID NO: 343947 - DNA, 25 bp, Artificial
  probe
  misc_feature (1)..(25): SEQ ID NO: 3009; WAN024GNS; Start 214; Stop 238
ggaacaggaaatatcataggagttg

SEQ ID NO: 343948 - DNA, 25 bp, Artificial
  probe
  misc_feature (1)..(25): SEQ ID NO: 3009; WAN024GNS; Start 921; Stop 945
cctcatcatttgtactctaactggt

SEQ ID NO: 343949 - DNA, 25 bp, Artificial
  probe
  misc_feature (1)..(25): SEQ ID NO: 3009; WAN024GNS; Start 919; Stop 943
accctcatcatttgtactctaactg

SEQ ID NO: 343950 - DNA, 25 bp, Artificial
  probe
  misc_feature (1)..(25): SEQ ID NO: 3009; WAN024GNS; Start 1045; Stop 1069
ctcttgaccatcttccttgtacttt

SEQ ID NO: 343951 - DNA, 25 bp, Artificial
  probe
  misc_feature (1)..(25): SEQ ID NO: 3010; WAN024D8H; Start 253; Stop 277
ctagcaagtgacggtatgttgttaa

SEQ ID NO: 343952 - DNA, 25 bp, Artificial
  probe
  misc_feature (1)..(25): SEQ ID NO: 3010; WAN024D8H; Start 63; Stop 87
tcaattaggtgtggactataaagcc

SEQ ID NO: 343953 - DNA, 25 bp, Artificial
  probe
  misc_feature (1)..(25): SEQ ID NO: 3010; WAN024D8H; Start 254; Stop 278
tagcaagtgacggtatgttgttaaa

SEQ ID NO: 343954 - DNA, 25 bp, Artificial
  probe
  misc_feature (1)..(25): SEQ ID NO: 3010; WAN024D8H; Start 185; Stop 209
tcaaataccgtgaattagggctaaa

SEQ ID NO: 343955 - DNA, 25 bp, Artificial
  probe
  misc_feature (1)..(25): SEQ ID NO: 3010; WAN024D8H; Start 184; Stop 208
atcaaataccgtgaattagggctaa

SEQ ID NO: 343956 - DNA, 25 bp, Artificial
  probe
  misc_feature (1)..(25): SEQ ID NO: 3010; WAN024D8H; Start 129; Stop 153
gaattggctagaaacctcaggattt

SEQ ID NO: 343957 - DNA, 25 bp, Artificial
  probe
  misc_feature (1)..(25): SEQ ID NO: 3010; WAN024D8H; Start 62; Stop 86
atcaattaggtgtggactataaagc

SEQ ID NO: 343958 - DNA, 25 bp, Artificial
  probe
  misc_feature (1)..(25): SEQ ID NO: 3010; WAN024D8H; Start 183; Stop 207
tatcaaataccgtgaattagggcta

SEQ ID NO: 343959 - DNA, 25 bp, Artificial
  probe
  misc_feature (1)..(25): SEQ ID NO: 3010; WAN024D8H; Start 64; Stop 88
caattaggtgtggactataaagccg

SEQ ID NO: 343960 - DNA, 25 bp, Artificial
  probe
  misc_feature (1)..(25): SEQ ID NO: 3010; WAN024D8H; Start 138; Stop 162
agaaacctcaggatttgaattgaag

SEQ ID NO: 343961 - DNA, 25 bp, Artificial
  probe
  misc_feature (1)..(25): SEQ ID NO: 3010; WAN024D8H; Start 130; Stop 154
aattggctagaaacctcaggatttg

SEQ ID NO: 343962 - DNA, 25 bp, Artificial
  probe
  misc_feature (1)..(25): SEQ ID NO: 3010; WAN024D8H; Start 135; Stop 159
gctagaaacctcaggatttgaattg

SEQ ID NO: 343963 - DNA, 25 bp, Artificial
  probe
  misc_feature (1)..(25): SEQ ID NO: 3010; WAN024D8H; Start 103; Stop 127
gaaacacctagccaagaagtcattt

SEQ ID NO: 343964 - DNA, 25 bp, Artificial
  probe
  misc_feature (1)..(25): SEQ ID NO: 3010; WAN024D8H; Start 139; Stop 163
gaaacctcaggatttgaattgaagc

SEQ ID NO: 343965 - DNA, 25 bp, Artificial
  probe
  misc_feature (1)..(25): SEQ ID NO: 3010; WAN024D8H; Start 65; Stop 89
aattaggtgtggactataaagccgt

SEQ ID NO: 343966 - DNA, 25 bp, Artificial
  probe
  misc_feature (1)..(25): SEQ ID NO: 3010; WAN024D8H; Start 208; Stop 232
aaagataaggtaggaagtttgtcaa

SEQ ID NO: 343967 - DNA, 25 bp, Artificial
  probe
  misc_feature (1)..(25): SEQ ID NO: 3010; WAN024D8H; Start 134; Stop 158
ggctagaaacctcaggatttgaatt

SEQ ID NO: 343968 - DNA, 25 bp, Artificial
  probe
  misc_feature (1)..(25): SEQ ID NO: 3010; WAN024D8H; Start 141; Stop 165
aacctcaggatttgaattgaagcaa

SEQ ID NO: 343969 - DNA, 25 bp, Artificial
  probe
  misc_feature (1)..(25): SEQ ID NO: 3010; WAN024D8H; Start 140; Stop 164
aaacctcaggatttgaattgaagca

SEQ ID NO: 343970 - DNA, 25 bp, Artificial
  probe
  misc_feature (1)..(25): SEQ ID NO: 3010; WAN024D8H; Start 136; Stop 160
ctagaaacctcaggatttgaattga

SEQ ID NO: 343971 - DNA, 25 bp, Artificial
  probe
  misc_feature (1)..(25): SEQ ID NO: 3010; WAN024D8H; Start 182; Stop 206
gtatcaaataccgtgaattagggct

SEQ ID NO: 343972 - DNA, 25 bp, Artificial
  probe
  misc_feature (1)..(25): SEQ ID NO: 3010; WAN024D8H; Start 137; Stop 161
tagaaacctcaggatttgaattgaa

SEQ ID NO: 343973 - DNA, 25 bp, Artificial
  probe
  misc_feature (1)..(25): SEQ ID NO: 3010; WAN024D8H; Start 102; Stop 126
agaaacacctagccaagaagtcatt

SEQ ID NO: 343974 - DNA, 25 bp, Artificial
  probe
  misc_feature (1)..(25): SEQ ID NO: 3010; WAN024D8H; Start 101; Stop 125
aagaaacacctagccaagaagtcat

SEQ ID NO: 343975 - DNA, 25 bp, Artificial
  probe
  misc_feature (1)..(25): SEQ ID NO: 3010; WAN024D8H; Start 209; Stop 233
aagataaggtaggaagtttgtcaaa

SEQ ID NO: 343976 - DNA, 25 bp, Artificial
  probe
  misc_feature (1)..(25): SEQ ID NO: 3010; WAN024D8H; Start 133; Stop 157
tggctagaaacctcaggatttgaat

SEQ ID NO: 343977 - DNA, 25 bp, Artificial
  probe
  misc_feature (1)..(25): SEQ ID NO: 3010; WAN024D8H; Start 131; Stop 155
attggctagaaacctcaggatttga

SEQ ID NO: 343978 - DNA, 25 bp, Artificial
  probe
  misc_feature (1)..(25): SEQ ID NO: 3010; WAN024D8H; Start 128; Stop 152
tgaattggctagaaacctcaggatt

SEQ ID NO: 343979 - DNA, 25 bp, Artificial
  probe
  misc_feature (1)..(25): SEQ ID NO: 3010; WAN024D8H; Start 127; Stop 151
ttgaattggctagaaacctcaggat

SEQ ID NO: 343980 - DNA, 25 bp, Artificial
  probe
  misc_feature (1)..(25): SEQ ID NO: 3010; WAN024D8H; Start 132; Stop 156
ttggctagaaacctcaggatttgaa

SEQ ID NO: 343981 - DNA, 25 bp, Artificial
  probe
  misc_feature (1)..(25): SEQ ID NO: 3010; WAN024D8H; Start 126; Stop 150
tttgaattggctagaaacctcagga

SEQ ID NO: 343982 - DNA, 25 bp, Artificial
  probe
  misc_feature (1)..(25): SEQ ID NO: 3010; WAN024D8H; Start 100; Stop 124
gaagaaacacctagccaagaagtca

SEQ ID NO: 343983 - DNA, 25 bp, Artificial
  probe
  misc_feature (1)..(25): SEQ ID NO: 3010; WAN024D8H; Start 66; Stop 90
attaggtgtggactataaagccgtc

SEQ ID NO: 343984 - DNA, 25 bp, Artificial
  probe
  misc_feature (1)..(25): SEQ ID NO: 3011; WAN024AU8; Start 22; Stop 46
gatcaactagctgaactgacctacc

SEQ ID NO: 343985 - DNA, 25 bp, Artificial
  probe
  misc_feature (1)..(25): SEQ ID NO: 3011; WAN024AU8; Start 21; Stop 45
ggatcaactagctgaactgacctac

SEQ ID NO: 343986 - DNA, 25 bp, Artificial
  probe
  misc_feature (1)..(25): SEQ ID NO: 3011; WAN024AU8; Start 77; Stop 101
gcataaaggatgttccaaaactcta

SEQ ID NO: 343987 - DNA, 25 bp, Artificial
  probe
  misc_feature (1)..(25): SEQ ID NO: 3011; WAN024AU8; Start 83; Stop 107
aggatgttccaaaactctatcaaaa

SEQ ID NO: 343988 - DNA, 25 bp, Artificial
  probe
  misc_feature (1)..(25): SEQ ID NO: 3011; WAN024AU8; Start 82; Stop 106
aaggatgttccaaaactctatcaaa

SEQ ID NO: 343989 - DNA, 25 bp, Artificial
  probe
  misc_feature (1)..(25): SEQ ID NO: 3011; WAN024AU8; Start 81; Stop 105
aaaggatgttccaaaactctatcaa

SEQ ID NO: 343990 - DNA, 25 bp, Artificial
  probe
  misc_feature (1)..(25): SEQ ID NO: 3011; WAN024AU8; Start 76; Stop 100
ggcataaaggatgttccaaaactct

SEQ ID NO: 343991 - DNA, 25 bp, Artificial
  probe
  misc_feature (1)..(25): SEQ ID NO: 3011; WAN024AU8; Start 23; Stop 47
atcaactagctgaactgacctaccc

SEQ ID NO: 343992 - DNA, 25 bp, Artificial
  probe
  misc_feature (1)..(25): SEQ ID NO: 3011; WAN024AU8; Start 75; Stop 99
tggcataaaggatgttccaaaactc

SEQ ID NO: 343993 - DNA, 25 bp, Artificial
  probe
  misc_feature (1)..(25): SEQ ID NO: 3011; WAN024AU8; Start 80; Stop 104
taaaggatgttccaaaactctatca

SEQ ID NO: 343994 - DNA, 25 bp, Artificial
  probe
  misc_feature (1)..(25): SEQ ID NO: 3011; WAN024AU8; Start 78; Stop 102
cataaaggatgttccaaaactctat

SEQ ID NO: 343995 - DNA, 25 bp, Artificial
  probe
  misc_feature (1)..(25): SEQ ID NO: 3011; WAN024AU8; Start 79; Stop 103
ataaaggatgttccaaaactctatc

SEQ ID NO: 343996 - DNA, 25 bp, Artificial
  probe
  misc_feature (1)..(25): SEQ ID NO: 3011; WAN024AU8; Start 74; Stop 98
ttggcataaaggatgttccaaaact

SEQ ID NO: 343997 - DNA, 25 bp, Artificial
  probe
  misc_feature (1)..(25): SEQ ID NO: 3011; WAN024AU8; Start 28; Stop 52
ctagctgaactgacctacccctttg

SEQ ID NO: 343998 - DNA, 25 bp, Artificial
  probe
  misc_feature (1)..(25): SEQ ID NO: 3011; WAN024AU8; Start 27; Stop 51
actagctgaactgacctaccccttt

SEQ ID NO: 343999 - DNA, 25 bp, Artificial
  probe
  misc_feature (1)..(25): SEQ ID NO: 3011; WAN024AU8; Start 26; Stop 50
aactagctgaactgacctacccctt

SEQ ID NO: 344000 - DNA, 25 bp, Artificial
  probe
  misc_feature (1)..(25): SEQ ID NO: 3012; WAN024AU7; Start 76; Stop 100
ggcataaaggatgtttcaaaactct

SEQ ID NO: 344001 - DNA, 25 bp, Artificial
  probe
  misc_feature (1)..(25): SEQ ID NO: 3012; WAN024AU7; Start 75; Stop 99
tggcataaaggatgtttcaaaactc

SEQ ID NO: 344002 - DNA, 25 bp, Artificial
  probe
  misc_feature (1)..(25): SEQ ID NO: 3012; WAN024AU7; Start 74; Stop 98
ttggcataaaggatgtttcaaaact

SEQ ID NO: 344003 - DNA, 25 bp, Artificial
  probe
  misc_feature (1)..(25): SEQ ID NO: 3012; WAN024AU7; Start 77; Stop 101
gcataaaggatgtttcaaaactcta

SEQ ID NO: 344004 - DNA, 25 bp, Artificial
  probe
  misc_feature (1)..(25): SEQ ID NO: 3012; WAN024AU7; Start 73; Stop 97
tttggcataaaggatgtttcaaaac

SEQ ID NO: 344005 - DNA, 25 bp, Artificial
  probe
  misc_feature (1)..(25): SEQ ID NO: 3012; WAN024AU7; Start 72; Stop 96
ctttggcataaaggatgtttcaaaa

SEQ ID NO: 344006 - DNA, 25 bp, Artificial
  probe
  misc_feature (1)..(25): SEQ ID NO: 3012; WAN024AU7; Start 84; Stop 108
ggatgtttcaaaactctatctaact

SEQ ID NO: 344007 - DNA, 25 bp, Artificial
  probe
  misc_feature (1)..(25): SEQ ID NO: 3012; WAN024AU7; Start 83; Stop 107
aggatgtttcaaaactctatctaac

SEQ ID NO: 344008 - DNA, 25 bp, Artificial
  probe
  misc_feature (1)..(25): SEQ ID NO: 3012; WAN024AU7; Start 82; Stop 106
aaggatgtttcaaaactctatctaa

SEQ ID NO: 344009 - DNA, 25 bp, Artificial
  probe
  misc_feature (1)..(25): SEQ ID NO: 3012; WAN024AU7; Start 81; Stop 105
aaaggatgtttcaaaactctatcta

SEQ ID NO: 344010 - DNA, 25 bp, Artificial
  probe
  misc_feature (1)..(25): SEQ ID NO: 3012; WAN024AU7; Start 80; Stop 104
taaaggatgtttcaaaactctatct

SEQ ID NO: 344011 - DNA, 25 bp, Artificial
  probe
  misc_feature (1)..(25): SEQ ID NO: 3012; WAN024AU7; Start 78; Stop 102
cataaaggatgtttcaaaactctat

SEQ ID NO: 344012 - DNA, 25 bp, Artificial
  probe
  misc_feature (1)..(25): SEQ ID NO: 3012; WAN024AU7; Start 79; Stop 103
ataaaggatgtttcaaaactctatc

SEQ ID NO: 344013 - DNA, 25 bp, Artificial
  probe
  misc_feature (1)..(25): SEQ ID NO: 3013; WAN024GK8; Start 156; Stop 180
ataccatttaccgttagcgtttaca

SEQ ID NO: 344014 - DNA, 25 bp, Artificial
  probe
  misc_feature (1)..(25): SEQ ID NO: 3013; WAN024GK8; Start 157; Stop 181
taccatttaccgttagcgtttacaa

SEQ ID NO: 344015 - DNA, 25 bp, Artificial
  probe
  misc_feature (1)..(25): SEQ ID NO: 3013; WAN024GK8; Start 155; Stop 179
tataccatttaccgttagcgtttac

SEQ ID NO: 344016 - DNA, 25 bp, Artificial
  probe
  misc_feature (1)..(25): SEQ ID NO: 3013; WAN024GK8; Start 22; Stop 46
acaacaatttcgttctcatttccaa

SEQ ID NO: 344017 - DNA, 25 bp, Artificial
  probe
  misc_feature (1)..(25): SEQ ID NO: 3013; WAN024GK8; Start 21; Stop 45
tacaacaatttcgttctcatttcca

SEQ ID NO: 344018 - DNA, 25 bp, Artificial
  probe
  misc_feature (1)..(25): SEQ ID NO: 3013; WAN024GK8; Start 23; Stop 47
caacaatttcgttctcatttccaaa

SEQ ID NO: 344019 - DNA, 25 bp, Artificial
  probe
  misc_feature (1)..(25): SEQ ID NO: 3013; WAN024GK8; Start 158; Stop 182
accatttaccgttagcgtttacaag

SEQ ID NO: 344020 - DNA, 25 bp, Artificial
  probe
  misc_feature (1)..(25): SEQ ID NO: 3013; WAN024GK8; Start 13; Stop 37
tggtcaaatacaacaatttcgttct

SEQ ID NO: 344021 - DNA, 25 bp, Artificial
  probe
  misc_feature (1)..(25): SEQ ID NO: 3013; WAN024GK8; Start 14; Stop 38
ggtcaaatacaacaatttcgttctc

SEQ ID NO: 344022 - DNA, 25 bp, Artificial
  probe
  misc_feature (1)..(25): SEQ ID NO: 3013; WAN024GK8; Start 20; Stop 44
atacaacaatttcgttctcatttcc

SEQ ID NO: 344023 - DNA, 25 bp, Artificial
  probe
  misc_feature (1)..(25): SEQ ID NO: 3013; WAN024GK8; Start 12; Stop 36
ttggtcaaatacaacaatttcgttc

SEQ ID NO: 344024 - DNA, 25 bp, Artificial
  probe
  misc_feature (1)..(25): SEQ ID NO: 3013; WAN024GK8; Start 15; Stop 39
gtcaaatacaacaatttcgttctca

SEQ ID NO: 344025 - DNA, 25 bp, Artificial
  probe
  misc_feature (1)..(25): SEQ ID NO: 3013; WAN024GK8; Start 160; Stop 184
catttaccgttagcgtttacaaggg

SEQ ID NO: 344026 - DNA, 25 bp, Artificial
  probe
  misc_feature (1)..(25): SEQ ID NO: 3013; WAN024GK8; Start 159; Stop 183
ccatttaccgttagcgtttacaagg

SEQ ID NO: 344027 - DNA, 25 bp, Artificial
  probe
  misc_feature (1)..(25): SEQ ID NO: 3013; WAN024GK8; Start 11; Stop 35
tttggtcaaatacaacaatttcgtt

SEQ ID NO: 344028 - DNA, 25 bp, Artificial
  probe
  misc_feature (1)..(25): SEQ ID NO: 3013; WAN024GK8; Start 16; Stop 40
tcaaatacaacaatttcgttctcat

SEQ ID NO: 344029 - DNA, 25 bp, Artificial
  probe
  misc_feature (1)..(25): SEQ ID NO: 3013; WAN024GK8; Start 151; Stop 175
ctagtataccatttaccgttagcgt

SEQ ID NO: 344030 - DNA, 25 bp, Artificial
  probe
  misc_feature (1)..(25): SEQ ID NO: 3013; WAN024GK8; Start 153; Stop 177
agtataccatttaccgttagcgttt

SEQ ID NO: 344031 - DNA, 25 bp, Artificial
  probe
  misc_feature (1)..(25): SEQ ID NO: 3013; WAN024GK8; Start 152; Stop 176
tagtataccatttaccgttagcgtt

SEQ ID NO: 344032 - DNA, 25 bp, Artificial
  probe
  misc_feature (1)..(25): SEQ ID NO: 3013; WAN024GK8; Start 51; Stop 75
atccaacatggtattgatacatgct

SEQ ID NO: 344033 - DNA, 25 bp, Artificial
  probe
  misc_feature (1)..(25): SEQ ID NO: 3013; WAN024GK8; Start 154; Stop 178
gtataccatttaccgttagcgttta

SEQ ID NO: 344034 - DNA, 25 bp, Artificial
  probe
  misc_feature (1)..(25): SEQ ID NO: 3013; WAN024GK8; Start 56; Stop 80
acatggtattgatacatgctgtacc

SEQ ID NO: 344035 - DNA, 25 bp, Artificial
  probe
  misc_feature (1)..(25): SEQ ID NO: 3013; WAN024GK8; Start 55; Stop 79
aacatggtattgatacatgctgtac

SEQ ID NO: 344036 - DNA, 25 bp, Artificial
  probe
  misc_feature (1)..(25): SEQ ID NO: 3013; WAN024GK8; Start 54; Stop 78
caacatggtattgatacatgctgta

SEQ ID NO: 344037 - DNA, 25 bp, Artificial
  probe
  misc_feature (1)..(25): SEQ ID NO: 3013; WAN024GK8; Start 50; Stop 74
tatccaacatggtattgatacatgc

SEQ ID NO: 344038 - DNA, 25 bp, Artificial
  probe
  misc_feature (1)..(25): SEQ ID NO: 3013; WAN024GK8; Start 52; Stop 76
tccaacatggtattgatacatgctg

SEQ ID NO: 344039 - DNA, 25 bp, Artificial
  probe
  misc_feature (1)..(25): SEQ ID NO: 3013; WAN024GK8; Start 19; Stop 43
aatacaacaatttcgttctcatttc

SEQ ID NO: 344040 - DNA, 25 bp, Artificial
  probe
  misc_feature (1)..(25): SEQ ID NO: 3013; WAN024GK8; Start 93; Stop 117
accgactacaacgattttactcata

SEQ ID NO: 344041 - DNA, 25 bp, Artificial
  probe
  misc_feature (1)..(25): SEQ ID NO: 3013; WAN024GK8; Start 53; Stop 77
ccaacatggtattgatacatgctgt

SEQ ID NO: 344042 - DNA, 25 bp, Artificial
  probe
  misc_feature (1)..(25): SEQ ID NO: 3013; WAN024GK8; Start 17; Stop 41
caaatacaacaatttcgttctcatt

SEQ ID NO: 344043 - DNA, 25 bp, Artificial
  probe
  misc_feature (1)..(25): SEQ ID NO: 3013; WAN024GK8; Start 94; Stop 118
ccgactacaacgattttactcataa

SEQ ID NO: 344044 - DNA, 25 bp, Artificial
  probe
  misc_feature (1)..(25): SEQ ID NO: 3013; WAN024GK8; Start 92; Stop 116
caccgactacaacgattttactcat

SEQ ID NO: 344045 - DNA, 25 bp, Artificial
  probe
  misc_feature (1)..(25): SEQ ID NO: 3013; WAN024GK8; Start 150; Stop 174
actagtataccatttaccgttagcg

SEQ ID NO: 344046 - DNA, 25 bp, Artificial
  probe
  misc_feature (1)..(25): SEQ ID NO: 3014; WAN024DXW; Start 486; Stop 510
ccagattgcgactaatactcataca

SEQ ID NO: 344047 - DNA, 25 bp, Artificial
  probe
  misc_feature (1)..(25): SEQ ID NO: 3014; WAN024DXW; Start 491; Stop 515
ttgcgactaatactcatacactctt

SEQ ID NO: 344048 - DNA, 25 bp, Artificial
  probe
  misc_feature (1)..(25): SEQ ID NO: 3014; WAN024DXW; Start 490; Stop 514
attgcgactaatactcatacactct

SEQ ID NO: 344049 - DNA, 25 bp, Artificial
  probe
  misc_feature (1)..(25): SEQ ID NO: 3014; WAN024DXW; Start 488; Stop 512
agattgcgactaatactcatacact

SEQ ID NO: 344050 - DNA, 25 bp, Artificial
  probe
  misc_feature (1)..(25): SEQ ID NO: 3014; WAN024DXW; Start 487; Stop 511
cagattgcgactaatactcatacac

SEQ ID NO: 344051 - DNA, 25 bp, Artificial
  probe
  misc_feature (1)..(25): SEQ ID NO: 3014; WAN024DXW; Start 489; Stop 513
gattgcgactaatactcatacactc

SEQ ID NO: 344052 - DNA, 25 bp, Artificial
  probe
  misc_feature (1)..(25): SEQ ID NO: 3014; WAN024DXW; Start 485; Stop 509
gccagattgcgactaatactcatac

SEQ ID NO: 344053 - DNA, 25 bp, Artificial
  probe
  misc_feature (1)..(25): SEQ ID NO: 3014; WAN024DXW; Start 492; Stop 516
tgcgactaatactcatacactcttt

SEQ ID NO: 344054 - DNA, 25 bp, Artificial
  probe
  misc_feature (1)..(25): SEQ ID NO: 3014; WAN024DXW; Start 77; Stop 101
cttatttgctggatgtgattgagaa

SEQ ID NO: 344055 - DNA, 25 bp, Artificial
  probe
  misc_feature (1)..(25): SEQ ID NO: 3014; WAN024DXW; Start 494; Stop 518
cgactaatactcatacactctttgc

SEQ ID NO: 344056 - DNA, 25 bp, Artificial
  probe
  misc_feature (1)..(25): SEQ ID NO: 3014; WAN024DXW; Start 493; Stop 517
gcgactaatactcatacactctttg

SEQ ID NO: 344057 - DNA, 25 bp, Artificial
  probe
  misc_feature (1)..(25): SEQ ID NO: 3014; WAN024DXW; Start 88; Stop 112
gatgtgattgagaaattgactacgg

SEQ ID NO: 344058 - DNA, 25 bp, Artificial
  probe
  misc_feature (1)..(25): SEQ ID NO: 3014; WAN024DXW; Start 87; Stop 111
ggatgtgattgagaaattgactacg

SEQ ID NO: 344059 - DNA, 25 bp, Artificial
  probe
  misc_feature (1)..(25): SEQ ID NO: 3014; WAN024DXW; Start 78; Stop 102
ttatttgctggatgtgattgagaaa

SEQ ID NO: 344060 - DNA, 25 bp, Artificial
  probe
  misc_feature (1)..(25): SEQ ID NO: 3014; WAN024DXW; Start 937; Stop 961
ttgattgatatcgaacctgctatga

SEQ ID NO: 344061 - DNA, 25 bp, Artificial
  probe
  misc_feature (1)..(25): SEQ ID NO: 3014; WAN024DXW; Start 81; Stop 105
tttgctggatgtgattgagaaattg

SEQ ID NO: 344062 - DNA, 25 bp, Artificial
  probe
  misc_feature (1)..(25): SEQ ID NO: 3014; WAN024DXW; Start 733; Stop 757
ttacatggaactattcgtgccttga

SEQ ID NO: 344063 - DNA, 25 bp, Artificial
  probe
  misc_feature (1)..(25): SEQ ID NO: 3014; WAN024DXW; Start 939; Stop 963
gattgatatcgaacctgctatgaca

SEQ ID NO: 344064 - DNA, 25 bp, Artificial
  probe
  misc_feature (1)..(25): SEQ ID NO: 3014; WAN024DXW; Start 938; Stop 962
tgattgatatcgaacctgctatgac

SEQ ID NO: 344065 - DNA, 25 bp, Artificial
  probe
  misc_feature (1)..(25): SEQ ID NO: 3014; WAN024DXW; Start 86; Stop 110
tggatgtgattgagaaattgactac

SEQ ID NO: 344066 - DNA, 25 bp, Artificial
  probe
  misc_feature (1)..(25): SEQ ID NO: 3014; WAN024DXW; Start 936; Stop 960
gttgattgatatcgaacctgctatg

SEQ ID NO: 344067 - DNA, 25 bp, Artificial
  probe
  misc_feature (1)..(25): SEQ ID NO: 3014; WAN024DXW; Start 935; Stop 959
agttgattgatatcgaacctgctat

SEQ ID NO: 344068 - DNA, 25 bp, Artificial
  probe
  misc_feature (1)..(25): SEQ ID NO: 3014; WAN024DXW; Start 89; Stop 113
atgtgattgagaaattgactacggg

SEQ ID NO: 344069 - DNA, 25 bp, Artificial
  probe
  misc_feature (1)..(25): SEQ ID NO: 3014; WAN024DXW; Start 934; Stop 958
gagttgattgatatcgaacctgcta

SEQ ID NO: 344070 - DNA, 25 bp, Artificial
  probe
  misc_feature (1)..(25): SEQ ID NO: 3014; WAN024DXW; Start 85; Stop 109
ctggatgtgattgagaaattgacta

SEQ ID NO: 344071 - DNA, 25 bp, Artificial
  probe
  misc_feature (1)..(25): SEQ ID NO: 3014; WAN024DXW; Start 82; Stop 106
ttgctggatgtgattgagaaattga

SEQ ID NO: 344072 - DNA, 25 bp, Artificial
  probe
  misc_feature (1)..(25): SEQ ID NO: 3014; WAN024DXW; Start 76; Stop 100
gcttatttgctggatgtgattgaga

SEQ ID NO: 344073 - DNA, 25 bp, Artificial
  probe
  misc_feature (1)..(25): SEQ ID NO: 3014; WAN024DXW; Start 827; Stop 851
atatggaagtcgaagtggaactcaa

SEQ ID NO: 344074 - DNA, 25 bp, Artificial
  probe
  misc_feature (1)..(25): SEQ ID NO: 3014; WAN024DXW; Start 824; Stop 848
ttgatatggaagtcgaagtggaact

SEQ ID NO: 344075 - DNA, 25 bp, Artificial
  probe
  misc_feature (1)..(25): SEQ ID NO: 3014; WAN024DXW; Start 1053; Stop 1077
aatgagtcctaaggaagaagtctta

SEQ ID NO: 344076 - DNA, 25 bp, Artificial
  probe
  misc_feature (1)..(25): SEQ ID NO: 3014; WAN024DXW; Start 84; Stop 108
gctggatgtgattgagaaattgact

SEQ ID NO: 344077 - DNA, 25 bp, Artificial
  probe
  misc_feature (1)..(25): SEQ ID NO: 3014; WAN024DXW; Start 80; Stop 104
atttgctggatgtgattgagaaatt

SEQ ID NO: 344078 - DNA, 25 bp, Artificial
  probe
  misc_feature (1)..(25): SEQ ID NO: 3014; WAN024DXW; Start 2; Stop 26
tgttagatttgattcagactagacg

SEQ ID NO: 344079 - DNA, 25 bp, Artificial
  probe
  misc_feature (1)..(25): SEQ ID NO: 3015; WAN024D6V; Start 614; Stop 638
tctactaccatactgctcaggatat

SEQ ID NO: 344080 - DNA, 25 bp, Artificial
  probe
  misc_feature (1)..(25): SEQ ID NO: 3015; WAN024D6V; Start 613; Stop 637
atctactaccatactgctcaggata

SEQ ID NO: 344081 - DNA, 25 bp, Artificial
  probe
  misc_feature (1)..(25): SEQ ID NO: 3015; WAN024D6V; Start 1; Stop 25
atgttagcaagtgaagtgatccaag

SEQ ID NO: 344082 - DNA, 25 bp, Artificial
  probe
  misc_feature (1)..(25): SEQ ID NO: 3015; WAN024D6V; Start 615; Stop 639
ctactaccatactgctcaggatatg

SEQ ID NO: 344083 - DNA, 25 bp, Artificial
  probe
  misc_feature (1)..(25): SEQ ID NO: 3015; WAN024D6V; Start 616; Stop 640
tactaccatactgctcaggatatgc

SEQ ID NO: 344084 - DNA, 25 bp, Artificial
  probe
  misc_feature (1)..(25): SEQ ID NO: 3015; WAN024D6V; Start 515; Stop 539
agaagcctatttcaagagtagcaat

SEQ ID NO: 344085 - DNA, 25 bp, Artificial
  probe
  misc_feature (1)..(25): SEQ ID NO: 3015; WAN024D6V; Start 556; Stop 580
cagtctttctataaggatgctttgg

SEQ ID NO: 344086 - DNA, 25 bp, Artificial
  probe
  misc_feature (1)..(25): SEQ ID NO: 3015; WAN024D6V; Start 557; Stop 581
agtctttctataaggatgctttggc

SEQ ID NO: 344087 - DNA, 25 bp, Artificial
  probe
  misc_feature (1)..(25): SEQ ID NO: 3015; WAN024D6V; Start 514; Stop 538
cagaagcctatttcaagagtagcaa

SEQ ID NO: 344088 - DNA, 25 bp, Artificial
  probe
  misc_feature (1)..(25): SEQ ID NO: 3015; WAN024D6V; Start 517; Stop 541
aagcctatttcaagagtagcaattt

SEQ ID NO: 344089 - DNA, 25 bp, Artificial
  probe
  misc_feature (1)..(25): SEQ ID NO: 3015; WAN024D6V; Start 516; Stop 540
gaagcctatttcaagagtagcaatt

SEQ ID NO: 344090 - DNA, 25 bp, Artificial
  probe
  misc_feature (1)..(25): SEQ ID NO: 3015; WAN024D6V; Start 519; Stop 543
gcctatttcaagagtagcaatttgt

SEQ ID NO: 344091 - DNA, 25 bp, Artificial
  probe
  misc_feature (1)..(25): SEQ ID NO: 3015; WAN024D6V; Start 523; Stop 547
atttcaagagtagcaatttgtggtg

SEQ ID NO: 344092 - DNA, 25 bp, Artificial
  probe
  misc_feature (1)..(25): SEQ ID NO: 3015; WAN024D6V; Start 518; Stop 542
agcctatttcaagagtagcaatttg

SEQ ID NO: 344093 - DNA, 25 bp, Artificial
  probe
  misc_feature (1)..(25): SEQ ID NO: 3015; WAN024D6V; Start 83; Stop 107
aaattggcactttagacaagggtat

SEQ ID NO: 344094 - DNA, 25 bp, Artificial
  probe
  misc_feature (1)..(25): SEQ ID NO: 3015; WAN024D6V; Start 84; Stop 108
aattggcactttagacaagggtatc

SEQ ID NO: 344095 - DNA, 25 bp, Artificial
  probe
  misc_feature (1)..(25): SEQ ID NO: 3015; WAN024D6V; Start 522; Stop 546
tatttcaagagtagcaatttgtggt

SEQ ID NO: 344096 - DNA, 25 bp, Artificial
  probe
  misc_feature (1)..(25): SEQ ID NO: 3015; WAN024D6V; Start 617; Stop 641
actaccatactgctcaggatatgct

SEQ ID NO: 344097 - DNA, 25 bp, Artificial
  probe
  misc_feature (1)..(25): SEQ ID NO: 3015; WAN024D6V; Start 82; Stop 106
caaattggcactttagacaagggta

SEQ ID NO: 344098 - DNA, 25 bp, Artificial
  probe
  misc_feature (1)..(25): SEQ ID NO: 3015; WAN024D6V; Start 521; Stop 545
ctatttcaagagtagcaatttgtgg

SEQ ID NO: 344099 - DNA, 25 bp, Artificial
  probe
  misc_feature (1)..(25): SEQ ID NO: 3015; WAN024D6V; Start 520; Stop 544
cctatttcaagagtagcaatttgtg

SEQ ID NO: 344100 - DNA, 25 bp, Artificial
  probe
  misc_feature (1)..(25): SEQ ID NO: 3015; WAN024D6V; Start 460; Stop 484
caagtctttgacctagatagccttc

SEQ ID NO: 344101 - DNA, 25 bp, Artificial
  probe
  misc_feature (1)..(25): SEQ ID NO: 3015; WAN024D6V; Start 524; Stop 548
tttcaagagtagcaatttgtggtgg

SEQ ID NO: 344102 - DNA, 25 bp, Artificial
  probe
  misc_feature (1)..(25): SEQ ID NO: 3015; WAN024D6V; Start 281; Stop 305
cagtttatgtcagccataccaatat

SEQ ID NO: 344103 - DNA, 25 bp, Artificial
  probe
  misc_feature (1)..(25): SEQ ID NO: 3015; WAN024D6V; Start 280; Stop 304
gcagtttatgtcagccataccaata

SEQ ID NO: 344104 - DNA, 25 bp, Artificial
  probe
  misc_feature (1)..(25): SEQ ID NO: 3015; WAN024D6V; Start 248; Stop 272
agatttacatcgacctgattaagca

SEQ ID NO: 344105 - DNA, 25 bp, Artificial
  probe
  misc_feature (1)..(25): SEQ ID NO: 3015; WAN024D6V; Start 456; Stop 480
caagcaagtctttgacctagatagc

SEQ ID NO: 344106 - DNA, 25 bp, Artificial
  probe
  misc_feature (1)..(25): SEQ ID NO: 3015; WAN024D6V; Start 249; Stop 273
gatttacatcgacctgattaagcat

SEQ ID NO: 344107 - DNA, 25 bp, Artificial
  probe
  misc_feature (1)..(25): SEQ ID NO: 3015; WAN024D6V; Start 2; Stop 26
tgttagcaagtgaagtgatccaagc

SEQ ID NO: 344108 - DNA, 25 bp, Artificial
  probe
  misc_feature (1)..(25): SEQ ID NO: 3015; WAN024D6V; Start 251; Stop 275
tttacatcgacctgattaagcatga

SEQ ID NO: 344109 - DNA, 25 bp, Artificial
  probe
  misc_feature (1)..(25): SEQ ID NO: 3015; WAN024D6V; Start 250; Stop 274
atttacatcgacctgattaagcatg

SEQ ID NO: 344110 - DNA, 25 bp, Artificial
  probe
  misc_feature (1)..(25): SEQ ID NO: 3015; WAN024D6V; Start 527; Stop 551
caagagtagcaatttgtggtggaag

SEQ ID NO: 344111 - DNA, 25 bp, Artificial
  probe
  misc_feature (1)..(25): SEQ ID NO: 3015; WAN024D6V; Start 93; Stop 117
tttagacaagggtatccaaagggtc

SEQ ID NO: 344112 - DNA, 25 bp, Artificial
  probe
  misc_feature (1)..(25): SEQ ID NO: 3016; WAN024DKB; Start 115; Stop 139
tttctaggtcacttgctctttggaa

SEQ ID NO: 344113 - DNA, 25 bp, Artificial
  probe
  misc_feature (1)..(25): SEQ ID NO: 3016; WAN024DKB; Start 114; Stop 138
ctttctaggtcacttgctctttgga

SEQ ID NO: 344114 - DNA, 25 bp, Artificial
  probe
  misc_feature (1)..(25): SEQ ID NO: 3016; WAN024DKB; Start 118; Stop 142
ctaggtcacttgctctttggaactt

SEQ ID NO: 344115 - DNA, 25 bp, Artificial
  probe
  misc_feature (1)..(25): SEQ ID NO: 3016; WAN024DKB; Start 119; Stop 143
taggtcacttgctctttggaacttg

SEQ ID NO: 344116 - DNA, 25 bp, Artificial
  probe
  misc_feature (1)..(25): SEQ ID NO: 3016; WAN024DKB; Start 116; Stop 140
ttctaggtcacttgctctttggaac

SEQ ID NO: 344117 - DNA, 25 bp, Artificial
  probe
  misc_feature (1)..(25): SEQ ID NO: 3016; WAN024DKB; Start 154; Stop 178
ttatcaggaacagctattatcccag

SEQ ID NO: 344118 - DNA, 25 bp, Artificial
  probe
  misc_feature (1)..(25): SEQ ID NO: 3016; WAN024DKB; Start 153; Stop 177
tttatcaggaacagctattatccca

SEQ ID NO: 344119 - DNA, 25 bp, Artificial
  probe
  misc_feature (1)..(25): SEQ ID NO: 3016; WAN024DKB; Start 117; Stop 141
tctaggtcacttgctctttggaact

SEQ ID NO: 344120 - DNA, 25 bp, Artificial
  probe
  misc_feature (1)..(25): SEQ ID NO: 3016; WAN024DKB; Start 113; Stop 137
cctttctaggtcacttgctctttgg

SEQ ID NO: 344121 - DNA, 25 bp, Artificial
  probe
  misc_feature (1)..(25): SEQ ID NO: 3016; WAN024DKB; Start 155; Stop 179
tatcaggaacagctattatcccagc

SEQ ID NO: 344122 - DNA, 25 bp, Artificial
  probe
  misc_feature (1)..(25): SEQ ID NO: 3016; WAN024DKB; Start 147; Stop 171
gccagttttatcaggaacagctatt

SEQ ID NO: 344123 - DNA, 25 bp, Artificial
  probe
  misc_feature (1)..(25): SEQ ID NO: 3016; WAN024DKB; Start 148; Stop 172
ccagttttatcaggaacagctatta

SEQ ID NO: 344124 - DNA, 25 bp, Artificial
  probe
  misc_feature (1)..(25): SEQ ID NO: 3016; WAN024DKB; Start 112; Stop 136
gcctttctaggtcacttgctctttg

SEQ ID NO: 344125 - DNA, 25 bp, Artificial
  probe
  misc_feature (1)..(25): SEQ ID NO: 3016; WAN024DKB; Start 50; Stop 74
ctatgaccaatcgtggagagcgaat

SEQ ID NO: 344126 - DNA, 25 bp, Artificial
  probe
  misc_feature (1)..(25): SEQ ID NO: 3016; WAN024DKB; Start 66; Stop 90
agagcgaatgggatgttttggaaaa

SEQ ID NO: 344127 - DNA, 25 bp, Artificial
  probe
  misc_feature (1)..(25): SEQ ID NO: 3016; WAN024DKB; Start 152; Stop 176
ttttatcaggaacagctattatccc

SEQ ID NO: 344128 - DNA, 25 bp, Artificial
  probe
  misc_feature (1)..(25): SEQ ID NO: 3016; WAN024DKB; Start 51; Stop 75
tatgaccaatcgtggagagcgaatg

SEQ ID NO: 344129 - DNA, 25 bp, Artificial
  probe
  misc_feature (1)..(25): SEQ ID NO: 3016; WAN024DKB; Start 111; Stop 135
agcctttctaggtcacttgctcttt

SEQ ID NO: 344130 - DNA, 25 bp, Artificial
  probe
  misc_feature (1)..(25): SEQ ID NO: 3016; WAN024DKB; Start 65; Stop 89
gagagcgaatgggatgttttggaaa

SEQ ID NO: 344131 - DNA, 25 bp, Artificial
  probe
  misc_feature (1)..(25): SEQ ID NO: 3016; WAN024DKB; Start 151; Stop 175
gttttatcaggaacagctattatcc

SEQ ID NO: 344132 - DNA, 25 bp, Artificial
  probe
  misc_feature (1)..(25): SEQ ID NO: 3016; WAN024DKB; Start 149; Stop 173
cagttttatcaggaacagctattat

SEQ ID NO: 344133 - DNA, 25 bp, Artificial
  probe
  misc_feature (1)..(25): SEQ ID NO: 3016; WAN024DKB; Start 105; Stop 129
gatcggagcctttctaggtcacttg

SEQ ID NO: 344134 - DNA, 25 bp, Artificial
  probe
  misc_feature (1)..(25): SEQ ID NO: 3016; WAN024DKB; Start 88; Stop 112
aaaatgtttctcggttggatcggag

SEQ ID NO: 344135 - DNA, 25 bp, Artificial
  probe
  misc_feature (1)..(25): SEQ ID NO: 3016; WAN024DKB; Start 150; Stop 174
agttttatcaggaacagctattatc

SEQ ID NO: 344136 - DNA, 25 bp, Artificial
  probe
  misc_feature (1)..(25): SEQ ID NO: 3016; WAN024DKB; Start 146; Stop 170
ggccagttttatcaggaacagctat

SEQ ID NO: 344137 - DNA, 25 bp, Artificial
  probe
  misc_feature (1)..(25): SEQ ID NO: 3016; WAN024DKB; Start 40; Stop 64
ttagcaggtgctatgaccaatcgtg

SEQ ID NO: 344138 - DNA, 25 bp, Artificial
  probe
  misc_feature (1)..(25): SEQ ID NO: 3016; WAN024DKB; Start 39; Stop 63
tttagcaggtgctatgaccaatcgt

SEQ ID NO: 344139 - DNA, 25 bp, Artificial
  probe
  misc_feature (1)..(25): SEQ ID NO: 3016; WAN024DKB; Start 145; Stop 169
gggccagttttatcaggaacagcta

SEQ ID NO: 344140 - DNA, 25 bp, Artificial
  probe
  misc_feature (1)..(25): SEQ ID NO: 3016; WAN024DKB; Start 38; Stop 62
ttttagcaggtgctatgaccaatcg

SEQ ID NO: 344141 - DNA, 25 bp, Artificial
  probe
  misc_feature (1)..(25): SEQ ID NO: 3017; WAN024C95; Start 107; Stop 131
ctacaactagccactggatcactaa

SEQ ID NO: 344142 - DNA, 25 bp, Artificial
  probe
  misc_feature (1)..(25): SEQ ID NO: 3017; WAN024C95; Start 108; Stop 132
tacaactagccactggatcactaac

SEQ ID NO: 344143 - DNA, 25 bp, Artificial
  probe
  misc_feature (1)..(25): SEQ ID NO: 3017; WAN024C95; Start 92; Stop 116
aatacggtcttcaagctacaactag

SEQ ID NO: 344144 - DNA, 25 bp, Artificial
  probe
  misc_feature (1)..(25): SEQ ID NO: 3017; WAN024C95; Start 91; Stop 115
gaatacggtcttcaagctacaacta

SEQ ID NO: 344145 - DNA, 25 bp, Artificial
  probe
  misc_feature (1)..(25): SEQ ID NO: 3017; WAN024C95; Start 200; Stop 224
aaatcttcccacacaaatcatacac

SEQ ID NO: 344146 - DNA, 25 bp, Artificial
  probe
  misc_feature (1)..(25): SEQ ID NO: 3017; WAN024C95; Start 208; Stop 232
ccacacaaatcatacactgctaaag

SEQ ID NO: 344147 - DNA, 25 bp, Artificial
  probe
  misc_feature (1)..(25): SEQ ID NO: 3017; WAN024C95; Start 201; Stop 225
aatcttcccacacaaatcatacact

SEQ ID NO: 344148 - DNA, 25 bp, Artificial
  probe
  misc_feature (1)..(25): SEQ ID NO: 3017; WAN024C95; Start 202; Stop 226
atcttcccacacaaatcatacactg

SEQ ID NO: 344149 - DNA, 25 bp, Artificial
  probe
  misc_feature (1)..(25): SEQ ID NO: 3017; WAN024C95; Start 207; Stop 231
cccacacaaatcatacactgctaaa

SEQ ID NO: 344150 - DNA, 25 bp, Artificial
  probe
  misc_feature (1)..(25): SEQ ID NO: 3017; WAN024C95; Start 362; Stop 386
ctagccacaaattgccagttaaatg

SEQ ID NO: 344151 - DNA, 25 bp, Artificial
  probe
  misc_feature (1)..(25): SEQ ID NO: 3017; WAN024C95; Start 209; Stop 233
cacacaaatcatacactgctaaagc

SEQ ID NO: 344152 - DNA, 25 bp, Artificial
  probe
  misc_feature (1)..(25): SEQ ID NO: 3017; WAN024C95; Start 315; Stop 339
aatcgctggtgtatctgaagagatt

SEQ ID NO: 344153 - DNA, 25 bp, Artificial
  probe
  misc_feature (1)..(25): SEQ ID NO: 3017; WAN024C95; Start 366; Stop 390
ccacaaattgccagttaaatgtaaa

SEQ ID NO: 344154 - DNA, 25 bp, Artificial
  probe
  misc_feature (1)..(25): SEQ ID NO: 3017; WAN024C95; Start 365; Stop 389
gccacaaattgccagttaaatgtaa

SEQ ID NO: 344155 - DNA, 25 bp, Artificial
  probe
  misc_feature (1)..(25): SEQ ID NO: 3017; WAN024C95; Start 206; Stop 230
tcccacacaaatcatacactgctaa

SEQ ID NO: 344156 - DNA, 25 bp, Artificial
  probe
  misc_feature (1)..(25): SEQ ID NO: 3017; WAN024C95; Start 205; Stop 229
ttcccacacaaatcatacactgcta

SEQ ID NO: 344157 - DNA, 25 bp, Artificial
  probe
  misc_feature (1)..(25): SEQ ID NO: 3017; WAN024C95; Start 374; Stop 398
tgccagttaaatgtaaattcgtaaa

SEQ ID NO: 344158 - DNA, 25 bp, Artificial
  probe
  misc_feature (1)..(25): SEQ ID NO: 3017; WAN024C95; Start 373; Stop 397
ttgccagttaaatgtaaattcgtaa

SEQ ID NO: 344159 - DNA, 25 bp, Artificial
  probe
  misc_feature (1)..(25): SEQ ID NO: 3017; WAN024C95; Start 364; Stop 388
agccacaaattgccagttaaatgta

SEQ ID NO: 344160 - DNA, 25 bp, Artificial
  probe
  misc_feature (1)..(25): SEQ ID NO: 3017; WAN024C95; Start 363; Stop 387
tagccacaaattgccagttaaatgt

SEQ ID NO: 344161 - DNA, 25 bp, Artificial
  probe
  misc_feature (1)..(25): SEQ ID NO: 3017; WAN024C95; Start 211; Stop 235
cacaaatcatacactgctaaagcta

SEQ ID NO: 344162 - DNA, 25 bp, Artificial
  probe
  misc_feature (1)..(25): SEQ ID NO: 3017; WAN024C95; Start 371; Stop 395
aattgccagttaaatgtaaattcgt

SEQ ID NO: 344163 - DNA, 25 bp, Artificial
  probe
  misc_feature (1)..(25): SEQ ID NO: 3017; WAN024C95; Start 214; Stop 238
aaatcatacactgctaaagctatcg

SEQ ID NO: 344164 - DNA, 25 bp, Artificial
  probe
  misc_feature (1)..(25): SEQ ID NO: 3017; WAN024C95; Start 372; Stop 396
attgccagttaaatgtaaattcgta

SEQ ID NO: 344165 - DNA, 25 bp, Artificial
  probe
  misc_feature (1)..(25): SEQ ID NO: 3017; WAN024C95; Start 215; Stop 239
aatcatacactgctaaagctatcgg

SEQ ID NO: 344166 - DNA, 25 bp, Artificial
  probe
  misc_feature (1)..(25): SEQ ID NO: 3017; WAN024C95; Start 316; Stop 340
atcgctggtgtatctgaagagattg

SEQ ID NO: 344167 - DNA, 25 bp, Artificial
  probe
  misc_feature (1)..(25): SEQ ID NO: 3017; WAN024C95; Start 210; Stop 234
acacaaatcatacactgctaaagct

SEQ ID NO: 344168 - DNA, 25 bp, Artificial
  probe
  misc_feature (1)..(25): SEQ ID NO: 3017; WAN024C95; Start 313; Stop 337
gaaatcgctggtgtatctgaagaga

SEQ ID NO: 344169 - DNA, 25 bp, Artificial
  probe
  misc_feature (1)..(25): SEQ ID NO: 3017; WAN024C95; Start 74; Stop 98
aagaagtagcattcggtgaatacgg

SEQ ID NO: 344170 - DNA, 25 bp, Artificial
  probe
  misc_feature (1)..(25): SEQ ID NO: 3017; WAN024C95; Start 212; Stop 236
acaaatcatacactgctaaagctat

SEQ ID NO: 344171 - DNA, 25 bp, Artificial
  probe
  misc_feature (1)..(25): SEQ ID NO: 3017; WAN024C95; Start 287; Stop 311
cagttaaacgtggtaaagtgatgtt

SEQ ID NO: 344172 - DNA, 25 bp, Artificial
  probe
  misc_feature (1)..(25): SEQ ID NO: 3017; WAN024C95; Start 288; Stop 312
agttaaacgtggtaaagtgatgttc

SEQ ID NO: 344173 - DNA, 25 bp, Artificial
  probe
  misc_feature (1)..(25): SEQ ID NO: 3017; WAN024C95; Start 216; Stop 240
atcatacactgctaaagctatcggt

SEQ ID NO: 344174 - DNA, 25 bp, Artificial
  probe
  misc_feature (1)..(25): SEQ ID NO: 3018; WAN024D4Z; Start 168; Stop 192
gatagagagtgatggagagttacct

SEQ ID NO: 344175 - DNA, 25 bp, Artificial
  probe
  misc_feature (1)..(25): SEQ ID NO: 3018; WAN024D4Z; Start 167; Stop 191
tgatagagagtgatggagagttacc

SEQ ID NO: 344176 - DNA, 25 bp, Artificial
  probe
  misc_feature (1)..(25): SEQ ID NO: 3018; WAN024D4Z; Start 166; Stop 190
ttgatagagagtgatggagagttac

SEQ ID NO: 344177 - DNA, 25 bp, Artificial
  probe
  misc_feature (1)..(25): SEQ ID NO: 3018; WAN024D4Z; Start 169; Stop 193
atagagagtgatggagagttacctc

SEQ ID NO: 344178 - DNA, 25 bp, Artificial
  probe
  misc_feature (1)..(25): SEQ ID NO: 3018; WAN024D4Z; Start 27; Stop 51
ttattatgacgacacagacggaaca

SEQ ID NO: 344179 - DNA, 25 bp, Artificial
  probe
  misc_feature (1)..(25): SEQ ID NO: 3018; WAN024D4Z; Start 182; Stop 206
gagagttacctcagccatcagatat

SEQ ID NO: 344180 - DNA, 25 bp, Artificial
  probe
  misc_feature (1)..(25): SEQ ID NO: 3018; WAN024D4Z; Start 170; Stop 194
tagagagtgatggagagttacctca

SEQ ID NO: 344181 - DNA, 25 bp, Artificial
  probe
  misc_feature (1)..(25): SEQ ID NO: 3018; WAN024D4Z; Start 28; Stop 52
tattatgacgacacagacggaacag

SEQ ID NO: 344182 - DNA, 25 bp, Artificial
  probe
  misc_feature (1)..(25): SEQ ID NO: 3018; WAN024D4Z; Start 163; Stop 187
gatttgatagagagtgatggagagt

SEQ ID NO: 344183 - DNA, 25 bp, Artificial
  probe
  misc_feature (1)..(25): SEQ ID NO: 3018; WAN024D4Z; Start 161; Stop 185
cagatttgatagagagtgatggaga

SEQ ID NO: 344184 - DNA, 25 bp, Artificial
  probe
  misc_feature (1)..(25): SEQ ID NO: 3018; WAN024D4Z; Start 160; Stop 184
gcagatttgatagagagtgatggag

SEQ ID NO: 344185 - DNA, 25 bp, Artificial
  probe
  misc_feature (1)..(25): SEQ ID NO: 3018; WAN024D4Z; Start 162; Stop 186
agatttgatagagagtgatggagag

SEQ ID NO: 344186 - DNA, 25 bp, Artificial
  probe
  misc_feature (1)..(25): SEQ ID NO: 3018; WAN024D4Z; Start 164; Stop 188
atttgatagagagtgatggagagtt

SEQ ID NO: 344187 - DNA, 25 bp, Artificial
  probe
  misc_feature (1)..(25): SEQ ID NO: 3018; WAN024D4Z; Start 430; Stop 454
gcagataagaaagttcaagcctaac

SEQ ID NO: 344188 - DNA, 25 bp, Artificial
  probe
  misc_feature (1)..(25): SEQ ID NO: 3018; WAN024D4Z; Start 171; Stop 195
agagagtgatggagagttacctcag

SEQ ID NO: 344189 - DNA, 25 bp, Artificial
  probe
  misc_feature (1)..(25): SEQ ID NO: 3018; WAN024D4Z; Start 26; Stop 50
tttattatgacgacacagacggaac

SEQ ID NO: 344190 - DNA, 25 bp, Artificial
  probe
  misc_feature (1)..(25): SEQ ID NO: 3018; WAN024D4Z; Start 83; Stop 107
ttgaatactcagctacacaaggaga

SEQ ID NO: 344191 - DNA, 25 bp, Artificial
  probe
  misc_feature (1)..(25): SEQ ID NO: 3018; WAN024D4Z; Start 247; Stop 271
gatgaagatttcgtgtcaacctatg

SEQ ID NO: 344192 - DNA, 25 bp, Artificial
  probe
  misc_feature (1)..(25): SEQ ID NO: 3018; WAN024D4Z; Start 242; Stop 266
aagatgatgaagatttcgtgtcaac

SEQ ID NO: 344193 - DNA, 25 bp, Artificial
  probe
  misc_feature (1)..(25): SEQ ID NO: 3018; WAN024D4Z; Start 248; Stop 272
atgaagatttcgtgtcaacctatga

SEQ ID NO: 344194 - DNA, 25 bp, Artificial
  probe
  misc_feature (1)..(25): SEQ ID NO: 3018; WAN024D4Z; Start 246; Stop 270
tgatgaagatttcgtgtcaacctat

SEQ ID NO: 344195 - DNA, 25 bp, Artificial
  probe
  misc_feature (1)..(25): SEQ ID NO: 3018; WAN024D4Z; Start 245; Stop 269
atgatgaagatttcgtgtcaaccta

SEQ ID NO: 344196 - DNA, 25 bp, Artificial
  probe
  misc_feature (1)..(25): SEQ ID NO: 3018; WAN024D4Z; Start 165; Stop 189
tttgatagagagtgatggagagtta

SEQ ID NO: 344197 - DNA, 25 bp, Artificial
  probe
  misc_feature (1)..(25): SEQ ID NO: 3018; WAN024D4Z; Start 241; Stop 265
aaagatgatgaagatttcgtgtcaa

SEQ ID NO: 344198 - DNA, 25 bp, Artificial
  probe
  misc_feature (1)..(25): SEQ ID NO: 3018; WAN024D4Z; Start 181; Stop 205
ggagagttacctcagccatcagata

SEQ ID NO: 344199 - DNA, 25 bp, Artificial
  probe
  misc_feature (1)..(25): SEQ ID NO: 3018; WAN024D4Z; Start 84; Stop 108
tgaatactcagctacacaaggagag

SEQ ID NO: 344200 - DNA, 25 bp, Artificial
  probe
  misc_feature (1)..(25): SEQ ID NO: 3018; WAN024D4Z; Start 292; Stop 316
tctatggtatctgttgatgtatcag

SEQ ID NO: 344201 - DNA, 25 bp, Artificial
  probe
  misc_feature (1)..(25): SEQ ID NO: 3018; WAN024D4Z; Start 416; Stop 440
tgacagacgctattgcagataagaa

SEQ ID NO: 344202 - DNA, 25 bp, Artificial
  probe
  misc_feature (1)..(25): SEQ ID NO: 3018; WAN024D4Z; Start 415; Stop 439
ttgacagacgctattgcagataaga

SEQ ID NO: 344203 - DNA, 25 bp, Artificial
  probe
  misc_feature (1)..(25): SEQ ID NO: 3018; WAN024D4Z; Start 244; Stop 268
gatgatgaagatttcgtgtcaacct

SEQ ID NO: 344204 - DNA, 25 bp, Artificial
  probe
  misc_feature (1)..(25): SEQ ID NO: 3018; WAN024D4Z; Start 243; Stop 267
agatgatgaagatttcgtgtcaacc

SEQ ID NO: 344205 - DNA, 25 bp, Artificial
  probe
  misc_feature (1)..(25): SEQ ID NO: 3018; WAN024D4Z; Start 240; Stop 264
taaagatgatgaagatttcgtgtca

SEQ ID NO: 344206 - DNA, 25 bp, Artificial
  probe
  misc_feature (1)..(25): SEQ ID NO: 3018; WAN024D4Z; Start 291; Stop 315
ttctatggtatctgttgatgtatca

SEQ ID NO: 344207 - DNA, 25 bp, Artificial
  probe
  misc_feature (1)..(25): SEQ ID NO: 3019; WAN024DXN; Start 2240; Stop 2264
acatctggcacttgaactaactaat

SEQ ID NO: 344208 - DNA, 25 bp, Artificial
  probe
  misc_feature (1)..(25): SEQ ID NO: 3019; WAN024DXN; Start 2239; Stop 2263
gacatctggcacttgaactaactaa

SEQ ID NO: 344209 - DNA, 25 bp, Artificial
  probe
  misc_feature (1)..(25): SEQ ID NO: 3019; WAN024DXN; Start 258; Stop 282
cgaagttgaagaagttgaattggaa

SEQ ID NO: 344210 - DNA, 25 bp, Artificial
  probe
  misc_feature (1)..(25): SEQ ID NO: 3019; WAN024DXN; Start 260; Stop 284
aagttgaagaagttgaattggaacc

SEQ ID NO: 344211 - DNA, 25 bp, Artificial
  probe
  misc_feature (1)..(25): SEQ ID NO: 3019; WAN024DXN; Start 2238; Stop 2262
agacatctggcacttgaactaacta

SEQ ID NO: 344212 - DNA, 25 bp, Artificial
  probe
  misc_feature (1)..(25): SEQ ID NO: 3019; WAN024DXN; Start 582; Stop 606
tgacttggattcagttgattcttct

SEQ ID NO: 344213 - DNA, 25 bp, Artificial
  probe
  misc_feature (1)..(25): SEQ ID NO: 3019; WAN024DXN; Start 265; Stop 289
gaagaagttgaattggaaccatctc

SEQ ID NO: 344214 - DNA, 25 bp, Artificial
  probe
  misc_feature (1)..(25): SEQ ID NO: 3019; WAN024DXN; Start 263; Stop 287
ttgaagaagttgaattggaaccatc

SEQ ID NO: 344215 - DNA, 25 bp, Artificial
  probe
  misc_feature (1)..(25): SEQ ID NO: 3019; WAN024DXN; Start 262; Stop 286
gttgaagaagttgaattggaaccat

SEQ ID NO: 344216 - DNA, 25 bp, Artificial
  probe
  misc_feature (1)..(25): SEQ ID NO: 3019; WAN024DXN; Start 581; Stop 605
ttgacttggattcagttgattcttc

SEQ ID NO: 344217 - DNA, 25 bp, Artificial
  probe
  misc_feature (1)..(25): SEQ ID NO: 3019; WAN024DXN; Start 268; Stop 292
gaagttgaattggaaccatctcttg

SEQ ID NO: 344218 - DNA, 25 bp, Artificial
  probe
  misc_feature (1)..(25): SEQ ID NO: 3019; WAN024DXN; Start 267; Stop 291
agaagttgaattggaaccatctctt

SEQ ID NO: 344219 - DNA, 25 bp, Artificial
  probe
  misc_feature (1)..(25): SEQ ID NO: 3019; WAN024DXN; Start 266; Stop 290
aagaagttgaattggaaccatctct

SEQ ID NO: 344220 - DNA, 25 bp, Artificial
  probe
  misc_feature (1)..(25): SEQ ID NO: 3019; WAN024DXN; Start 259; Stop 283
gaagttgaagaagttgaattggaac

SEQ ID NO: 344221 - DNA, 25 bp, Artificial
  probe
  misc_feature (1)..(25): SEQ ID NO: 3019; WAN024DXN; Start 2199; Stop 2223
attcttctcatctgaccgtacaatc

SEQ ID NO: 344222 - DNA, 25 bp, Artificial
  probe
  misc_feature (1)..(25): SEQ ID NO: 3019; WAN024DXN; Start 264; Stop 288
tgaagaagttgaattggaaccatct

SEQ ID NO: 344223 - DNA, 25 bp, Artificial
  probe
  misc_feature (1)..(25): SEQ ID NO: 3019; WAN024DXN; Start 2198; Stop 2222
gattcttctcatctgaccgtacaat

SEQ ID NO: 344224 - DNA, 25 bp, Artificial
  probe
  misc_feature (1)..(25): SEQ ID NO: 3019; WAN024DXN; Start 837; Stop 861
aatggtgattcctgaattgattcgt

SEQ ID NO: 344225 - DNA, 25 bp, Artificial
  probe
  misc_feature (1)..(25): SEQ ID NO: 3019; WAN024DXN; Start 261; Stop 285
agttgaagaagttgaattggaacca

SEQ ID NO: 344226 - DNA, 25 bp, Artificial
  probe
  misc_feature (1)..(25): SEQ ID NO: 3019; WAN024DXN; Start 840; Stop 864
ggtgattcctgaattgattcgtctt

SEQ ID NO: 344227 - DNA, 25 bp, Artificial
  probe
  misc_feature (1)..(25): SEQ ID NO: 3019; WAN024DXN; Start 838; Stop 862
atggtgattcctgaattgattcgtc

SEQ ID NO: 344228 - DNA, 25 bp, Artificial
  probe
  misc_feature (1)..(25): SEQ ID NO: 3019; WAN024DXN; Start 2236; Stop 2260
gaagacatctggcacttgaactaac

SEQ ID NO: 344229 - DNA, 25 bp, Artificial
  probe
  misc_feature (1)..(25): SEQ ID NO: 3019; WAN024DXN; Start 583; Stop 607
gacttggattcagttgattcttcta

SEQ ID NO: 344230 - DNA, 25 bp, Artificial
  probe
  misc_feature (1)..(25): SEQ ID NO: 3019; WAN024DXN; Start 527; Stop 551
acgatattgatgttactggttatga

SEQ ID NO: 344231 - DNA, 25 bp, Artificial
  probe
  misc_feature (1)..(25): SEQ ID NO: 3019; WAN024DXN; Start 704; Stop 728
tccgtatcttccaacaatacttcat

SEQ ID NO: 344232 - DNA, 25 bp, Artificial
  probe
  misc_feature (1)..(25): SEQ ID NO: 3019; WAN024DXN; Start 703; Stop 727
ctccgtatcttccaacaatacttca

SEQ ID NO: 344233 - DNA, 25 bp, Artificial
  probe
  misc_feature (1)..(25): SEQ ID NO: 3019; WAN024DXN; Start 2237; Stop 2261
aagacatctggcacttgaactaact

SEQ ID NO: 344234 - DNA, 25 bp, Artificial
  probe
  misc_feature (1)..(25): SEQ ID NO: 3019; WAN024DXN; Start 256; Stop 280
atcgaagttgaagaagttgaattgg

SEQ ID NO: 344235 - DNA, 25 bp, Artificial
  probe
  misc_feature (1)..(25): SEQ ID NO: 3019; WAN024DXN; Start 584; Stop 608
acttggattcagttgattcttctat

SEQ ID NO: 344236 - DNA, 25 bp, Artificial
  probe
  misc_feature (1)..(25): SEQ ID NO: 3019; WAN024DXN; Start 839; Stop 863
tggtgattcctgaattgattcgtct

SEQ ID NO: 344237 - DNA, 25 bp, Artificial
  probe
  misc_feature (1)..(25): SEQ ID NO: 3019; WAN024DXN; Start 254; Stop 278
tgatcgaagttgaagaagttgaatt

SEQ ID NO: 344238 - DNA, 25 bp, Artificial
  probe
  misc_feature (1)..(25): SEQ ID NO: 3019; WAN024DXN; Start 253; Stop 277
ttgatcgaagttgaagaagttgaat

SEQ ID NO: 344239 - DNA, 25 bp, Artificial
  probe
  misc_feature (1)..(25): SEQ ID NO: 3019; WAN024DXN; Start 252; Stop 276
cttgatcgaagttgaagaagttgaa

SEQ ID NO: 344240 - DNA, 25 bp, Artificial
  probe
  misc_feature (1)..(25): SEQ ID NO: 3020; WAN024B8N; Start 875; Stop 899
cgatagattatactcaggctcatcc

SEQ ID NO: 344241 - DNA, 25 bp, Artificial
  probe
  misc_feature (1)..(25): SEQ ID NO: 3020; WAN024B8N; Start 874; Stop 898
acgatagattatactcaggctcatc

SEQ ID NO: 344242 - DNA, 25 bp, Artificial
  probe
  misc_feature (1)..(25): SEQ ID NO: 3020; WAN024B8N; Start 1109; Stop 1133
gcttcttgataggattgattctgct

SEQ ID NO: 344243 - DNA, 25 bp, Artificial
  probe
  misc_feature (1)..(25): SEQ ID NO: 3020; WAN024B8N; Start 872; Stop 896
ctacgatagattatactcaggctca

SEQ ID NO: 344244 - DNA, 25 bp, Artificial
  probe
  misc_feature (1)..(25): SEQ ID NO: 3020; WAN024B8N; Start 1112; Stop 1136
tcttgataggattgattctgctagg

SEQ ID NO: 344245 - DNA, 25 bp, Artificial
  probe
  misc_feature (1)..(25): SEQ ID NO: 3020; WAN024B8N; Start 1110; Stop 1134
cttcttgataggattgattctgcta

SEQ ID NO: 344246 - DNA, 25 bp, Artificial
  probe
  misc_feature (1)..(25): SEQ ID NO: 3020; WAN024B8N; Start 873; Stop 897
tacgatagattatactcaggctcat

SEQ ID NO: 344247 - DNA, 25 bp, Artificial
  probe
  misc_feature (1)..(25): SEQ ID NO: 3020; WAN024B8N; Start 1111; Stop 1135
ttcttgataggattgattctgctag

SEQ ID NO: 344248 - DNA, 25 bp, Artificial
  probe
  misc_feature (1)..(25): SEQ ID NO: 3020; WAN024B8N; Start 1102; Stop 1126
ttgatgagcttcttgataggattga

SEQ ID NO: 344249 - DNA, 25 bp, Artificial
  probe
  misc_feature (1)..(25): SEQ ID NO: 3020; WAN024B8N; Start 1103; Stop 1127
tgatgagcttcttgataggattgat

SEQ ID NO: 344250 - DNA, 25 bp, Artificial
  probe
  misc_feature (1)..(25): SEQ ID NO: 3020; WAN024B8N; Start 1106; Stop 1130
tgagcttcttgataggattgattct

SEQ ID NO: 344251 - DNA, 25 bp, Artificial
  probe
  misc_feature (1)..(25): SEQ ID NO: 3020; WAN024B8N; Start 1107; Stop 1131
gagcttcttgataggattgattctg

SEQ ID NO: 344252 - DNA, 25 bp, Artificial
  probe
  misc_feature (1)..(25): SEQ ID NO: 3020; WAN024B8N; Start 876; Stop 900
gatagattatactcaggctcatcct

SEQ ID NO: 344253 - DNA, 25 bp, Artificial
  probe
  misc_feature (1)..(25): SEQ ID NO: 3020; WAN024B8N; Start 1108; Stop 1132
agcttcttgataggattgattctgc

SEQ ID NO: 344254 - DNA, 25 bp, Artificial
  probe
  misc_feature (1)..(25): SEQ ID NO: 3020; WAN024B8N; Start 211; Stop 235
cttccagtagctcacacctataata

SEQ ID NO: 344255 - DNA, 25 bp, Artificial
  probe
  misc_feature (1)..(25): SEQ ID NO: 3020; WAN024B8N; Start 216; Stop 240
agtagctcacacctataatatctgg

SEQ ID NO: 344256 - DNA, 25 bp, Artificial
  probe
  misc_feature (1)..(25): SEQ ID NO: 3020; WAN024B8N; Start 214; Stop 238
ccagtagctcacacctataatatct

SEQ ID NO: 344257 - DNA, 25 bp, Artificial
  probe
  misc_feature (1)..(25): SEQ ID NO: 3020; WAN024B8N; Start 213; Stop 237
tccagtagctcacacctataatatc

SEQ ID NO: 344258 - DNA, 25 bp, Artificial
  probe
  misc_feature (1)..(25): SEQ ID NO: 3020; WAN024B8N; Start 1105; Stop 1129
atgagcttcttgataggattgattc

SEQ ID NO: 344259 - DNA, 25 bp, Artificial
  probe
  misc_feature (1)..(25): SEQ ID NO: 3020; WAN024B8N; Start 1104; Stop 1128
gatgagcttcttgataggattgatt

SEQ ID NO: 344260 - DNA, 25 bp, Artificial
  probe
  misc_feature (1)..(25): SEQ ID NO: 3020; WAN024B8N; Start 210; Stop 234
ccttccagtagctcacacctataat

SEQ ID NO: 344261 - DNA, 25 bp, Artificial
  probe
  misc_feature (1)..(25): SEQ ID NO: 3020; WAN024B8N; Start 871; Stop 895
tctacgatagattatactcaggctc

SEQ ID NO: 344262 - DNA, 25 bp, Artificial
  probe
  misc_feature (1)..(25): SEQ ID NO: 3020; WAN024B8N; Start 607; Stop 631
gtgattgcaggcttgattattacag

SEQ ID NO: 344263 - DNA, 25 bp, Artificial
  probe
  misc_feature (1)..(25): SEQ ID NO: 3020; WAN024B8N; Start 212; Stop 236
ttccagtagctcacacctataatat

SEQ ID NO: 344264 - DNA, 25 bp, Artificial
  probe
  misc_feature (1)..(25): SEQ ID NO: 3020; WAN024B8N; Start 259; Stop 283
ctcttgattcagatcggtggtctag

SEQ ID NO: 344265 - DNA, 25 bp, Artificial
  probe
  misc_feature (1)..(25): SEQ ID NO: 3020; WAN024B8N; Start 1265; Stop 1289
cacttatgtttatgggacgaattgg

SEQ ID NO: 344266 - DNA, 25 bp, Artificial
  probe
  misc_feature (1)..(25): SEQ ID NO: 3020; WAN024B8N; Start 553; Stop 577
aatttagggagcaccagtttatttg

SEQ ID NO: 344267 - DNA, 25 bp, Artificial
  probe
  misc_feature (1)..(25): SEQ ID NO: 3020; WAN024B8N; Start 549; Stop 573
tgataatttagggagcaccagttta

SEQ ID NO: 344268 - DNA, 25 bp, Artificial
  probe
  misc_feature (1)..(25): SEQ ID NO: 3020; WAN024B8N; Start 548; Stop 572
ttgataatttagggagcaccagttt

SEQ ID NO: 344269 - DNA, 25 bp, Artificial
  probe
  misc_feature (1)..(25): SEQ ID NO: 3020; WAN024B8N; Start 547; Stop 571
tttgataatttagggagcaccagtt

SEQ ID NO: 344270 - DNA, 25 bp, Artificial
  probe
  misc_feature (1)..(25): SEQ ID NO: 3020; WAN024B8N; Start 1266; Stop 1290
acttatgtttatgggacgaattggt

SEQ ID NO: 344271 - DNA, 25 bp, Artificial
  probe
  misc_feature (1)..(25): SEQ ID NO: 3020; WAN024B8N; Start 870; Stop 894
ttctacgatagattatactcaggct

SEQ ID NO: 344272 - DNA, 25 bp, Artificial
  probe
  misc_feature (1)..(25): SEQ ID NO: 3020; WAN024B8N; Start 608; Stop 632
tgattgcaggcttgattattacagg

SEQ ID NO: 344273 - DNA, 25 bp, Artificial
  probe
  misc_feature (1)..(25): SEQ ID NO: 3021; WAN024B7W; Start 84; Stop 108
aagcaattttggaacgaattctttc

SEQ ID NO: 344274 - DNA, 25 bp, Artificial
  probe
  misc_feature (1)..(25): SEQ ID NO: 3021; WAN024B7W; Start 100; Stop 124
aattctttcgaatgcgatctatact

SEQ ID NO: 344275 - DNA, 25 bp, Artificial
  probe
  misc_feature (1)..(25): SEQ ID NO: 3021; WAN024B7W; Start 99; Stop 123
gaattctttcgaatgcgatctatac

SEQ ID NO: 344276 - DNA, 25 bp, Artificial
  probe
  misc_feature (1)..(25): SEQ ID NO: 3021; WAN024B7W; Start 101; Stop 125
attctttcgaatgcgatctatacta

SEQ ID NO: 344277 - DNA, 25 bp, Artificial
  probe
  misc_feature (1)..(25): SEQ ID NO: 3021; WAN024B7W; Start 98; Stop 122
cgaattctttcgaatgcgatctata

SEQ ID NO: 344278 - DNA, 25 bp, Artificial
  probe
  misc_feature (1)..(25): SEQ ID NO: 3021; WAN024B7W; Start 97; Stop 121
acgaattctttcgaatgcgatctat

SEQ ID NO: 344279 - DNA, 25 bp, Artificial
  probe
  misc_feature (1)..(25): SEQ ID NO: 3021; WAN024B7W; Start 96; Stop 120
aacgaattctttcgaatgcgatcta

SEQ ID NO: 344280 - DNA, 25 bp, Artificial
  probe
  misc_feature (1)..(25): SEQ ID NO: 3021; WAN024B7W; Start 95; Stop 119
gaacgaattctttcgaatgcgatct

SEQ ID NO: 344281 - DNA, 25 bp, Artificial
  probe
  misc_feature (1)..(25): SEQ ID NO: 3021; WAN024B7W; Start 86; Stop 110
gcaattttggaacgaattctttcga

SEQ ID NO: 344282 - DNA, 25 bp, Artificial
  probe
  misc_feature (1)..(25): SEQ ID NO: 3021; WAN024B7W; Start 85; Stop 109
agcaattttggaacgaattctttcg

SEQ ID NO: 344283 - DNA, 25 bp, Artificial
  probe
  misc_feature (1)..(25): SEQ ID NO: 3021; WAN024B7W; Start 94; Stop 118
ggaacgaattctttcgaatgcgatc

SEQ ID NO: 344284 - DNA, 25 bp, Artificial
  probe
  misc_feature (1)..(25): SEQ ID NO: 3021; WAN024B7W; Start 91; Stop 115
tttggaacgaattctttcgaatgcg

SEQ ID NO: 344285 - DNA, 25 bp, Artificial
  probe
  misc_feature (1)..(25): SEQ ID NO: 3021; WAN024B7W; Start 87; Stop 111
caattttggaacgaattctttcgaa

SEQ ID NO: 344286 - DNA, 25 bp, Artificial
  probe
  misc_feature (1)..(25): SEQ ID NO: 3021; WAN024B7W; Start 89; Stop 113
attttggaacgaattctttcgaatg

SEQ ID NO: 344287 - DNA, 25 bp, Artificial
  probe
  misc_feature (1)..(25): SEQ ID NO: 3021; WAN024B7W; Start 93; Stop 117
tggaacgaattctttcgaatgcgat

SEQ ID NO: 344288 - DNA, 25 bp, Artificial
  probe
  misc_feature (1)..(25): SEQ ID NO: 3021; WAN024B7W; Start 90; Stop 114
ttttggaacgaattctttcgaatgc

SEQ ID NO: 344289 - DNA, 25 bp, Artificial
  probe
  misc_feature (1)..(25): SEQ ID NO: 3021; WAN024B7W; Start 88; Stop 112
aattttggaacgaattctttcgaat

SEQ ID NO: 344290 - DNA, 25 bp, Artificial
  probe
  misc_feature (1)..(25): SEQ ID NO: 3021; WAN024B7W; Start 92; Stop 116
ttggaacgaattctttcgaatgcga

SEQ ID NO: 344291 - DNA, 25 bp, Artificial
  probe
  misc_feature (1)..(25): SEQ ID NO: 3022; WAN024C7W; Start 260; Stop 284
ataatgctgtggctgatatggtaat

SEQ ID NO: 344292 - DNA, 25 bp, Artificial
  probe
  misc_feature (1)..(25): SEQ ID NO: 3022; WAN024C7W; Start 259; Stop 283
aataatgctgtggctgatatggtaa

SEQ ID NO: 344293 - DNA, 25 bp, Artificial
  probe
  misc_feature (1)..(25): SEQ ID NO: 3022; WAN024C7W; Start 258; Stop 282
gaataatgctgtggctgatatggta

SEQ ID NO: 344294 - DNA, 25 bp, Artificial
  probe
  misc_feature (1)..(25): SEQ ID NO: 3022; WAN024C7W; Start 261; Stop 285
taatgctgtggctgatatggtaatt

SEQ ID NO: 344295 - DNA, 25 bp, Artificial
  probe
  misc_feature (1)..(25): SEQ ID NO: 3022; WAN024C7W; Start 582; Stop 606
gttaggaatatctgatgaaggttgg

SEQ ID NO: 344296 - DNA, 25 bp, Artificial
  probe
  misc_feature (1)..(25): SEQ ID NO: 3022; WAN024C7W; Start 584; Stop 608
taggaatatctgatgaaggttggaa

SEQ ID NO: 344297 - DNA, 25 bp, Artificial
  probe
  misc_feature (1)..(25): SEQ ID NO: 3022; WAN024C7W; Start 583; Stop 607
ttaggaatatctgatgaaggttgga

SEQ ID NO: 344298 - DNA, 25 bp, Artificial
  probe
  misc_feature (1)..(25): SEQ ID NO: 3022; WAN024C7W; Start 266; Stop 290
ctgtggctgatatggtaattggatt

SEQ ID NO: 344299 - DNA, 25 bp, Artificial
  probe
  misc_feature (1)..(25): SEQ ID NO: 3022; WAN024C7W; Start 256; Stop 280
aagaataatgctgtggctgatatgg

SEQ ID NO: 344300 - DNA, 25 bp, Artificial
  probe
  misc_feature (1)..(25): SEQ ID NO: 3022; WAN024C7W; Start 267; Stop 291
tgtggctgatatggtaattggatta

SEQ ID NO: 344301 - DNA, 25 bp, Artificial
  probe
  misc_feature (1)..(25): SEQ ID NO: 3022; WAN024C7W; Start 579; Stop 603
tgagttaggaatatctgatgaaggt

SEQ ID NO: 344302 - DNA, 25 bp, Artificial
  probe
  misc_feature (1)..(25): SEQ ID NO: 3022; WAN024C7W; Start 576; Stop 600
aggtgagttaggaatatctgatgaa

SEQ ID NO: 344303 - DNA, 25 bp, Artificial
  probe
  misc_feature (1)..(25): SEQ ID NO: 3022; WAN024C7W; Start 575; Stop 599
aaggtgagttaggaatatctgatga

SEQ ID NO: 344304 - DNA, 25 bp, Artificial
  probe
  misc_feature (1)..(25): SEQ ID NO: 3022; WAN024C7W; Start 87; Stop 111
gtctactgatgaaggaagtgttgat

SEQ ID NO: 344305 - DNA, 25 bp, Artificial
  probe
  misc_feature (1)..(25): SEQ ID NO: 3022; WAN024C7W; Start 578; Stop 602
gtgagttaggaatatctgatgaagg

SEQ ID NO: 344306 - DNA, 25 bp, Artificial
  probe
  misc_feature (1)..(25): SEQ ID NO: 3022; WAN024C7W; Start 577; Stop 601
ggtgagttaggaatatctgatgaag

SEQ ID NO: 344307 - DNA, 25 bp, Artificial
  probe
  misc_feature (1)..(25): SEQ ID NO: 3022; WAN024C7W; Start 268; Stop 292
gtggctgatatggtaattggattaa

SEQ ID NO: 344308 - DNA, 25 bp, Artificial
  probe
  misc_feature (1)..(25): SEQ ID NO: 3022; WAN024C7W; Start 88; Stop 112
tctactgatgaaggaagtgttgata

SEQ ID NO: 344309 - DNA, 25 bp, Artificial
  probe
  misc_feature (1)..(25): SEQ ID NO: 3022; WAN024C7W; Start 86; Stop 110
agtctactgatgaaggaagtgttga

SEQ ID NO: 344310 - DNA, 25 bp, Artificial
  probe
  misc_feature (1)..(25): SEQ ID NO: 3022; WAN024C7W; Start 262; Stop 286
aatgctgtggctgatatggtaattg

SEQ ID NO: 344311 - DNA, 25 bp, Artificial
  probe
  misc_feature (1)..(25): SEQ ID NO: 3022; WAN024C7W; Start 581; Stop 605
agttaggaatatctgatgaaggttg

SEQ ID NO: 344312 - DNA, 25 bp, Artificial
  probe
  misc_feature (1)..(25): SEQ ID NO: 3022; WAN024C7W; Start 182; Stop 206
catcagagcaaggatacaatcttcg

SEQ ID NO: 344313 - DNA, 25 bp, Artificial
  probe
  misc_feature (1)..(25): SEQ ID NO: 3022; WAN024C7W; Start 183; Stop 207
atcagagcaaggatacaatcttcgt

SEQ ID NO: 344314 - DNA, 25 bp, Artificial
  probe
  misc_feature (1)..(25): SEQ ID NO: 3022; WAN024C7W; Start 181; Stop 205
gcatcagagcaaggatacaatcttc

SEQ ID NO: 344315 - DNA, 25 bp, Artificial
  probe
  misc_feature (1)..(25): SEQ ID NO: 3022; WAN024C7W; Start 580; Stop 604
gagttaggaatatctgatgaaggtt

SEQ ID NO: 344316 - DNA, 25 bp, Artificial
  probe
  misc_feature (1)..(25): SEQ ID NO: 3022; WAN024C7W; Start 257; Stop 281
agaataatgctgtggctgatatggt

SEQ ID NO: 344317 - DNA, 25 bp, Artificial
  probe
  misc_feature (1)..(25): SEQ ID NO: 3022; WAN024C7W; Start 89; Stop 113
ctactgatgaaggaagtgttgataa

SEQ ID NO: 344318 - DNA, 25 bp, Artificial
  probe
  misc_feature (1)..(25): SEQ ID NO: 3022; WAN024C7W; Start 184; Stop 208
tcagagcaaggatacaatcttcgtt

SEQ ID NO: 344319 - DNA, 25 bp, Artificial
  probe
  misc_feature (1)..(25): SEQ ID NO: 3022; WAN024C7W; Start 180; Stop 204
agcatcagagcaaggatacaatctt

SEQ ID NO: 344320 - DNA, 25 bp, Artificial
  probe
  misc_feature (1)..(25): SEQ ID NO: 3022; WAN024C7W; Start 179; Stop 203
aagcatcagagcaaggatacaatct

SEQ ID NO: 344321 - DNA, 25 bp, Artificial
  probe
  misc_feature (1)..(25): SEQ ID NO: 3022; WAN024C7W; Start 517; Stop 541
agtacaggtacatctaagaacatct

SEQ ID NO: 344322 - DNA, 25 bp, Artificial
  probe
  misc_feature (1)..(25): SEQ ID NO: 3022; WAN024C7W; Start 516; Stop 540
aagtacaggtacatctaagaacatc

SEQ ID NO: 344323 - DNA, 25 bp, Artificial
  probe
  misc_feature (1)..(25): SEQ ID NO: 3022; WAN024C7W; Start 820; Stop 844
acaagtaagaagcaagcattattaa

SEQ ID NO: 344324 - DNA, 25 bp, Artificial
  probe
  misc_feature (1)..(25): SEQ ID NO: 3023; WAN024DOW; Start 75; Stop 99
gtgtttgacgagtgaagaattgaaa

SEQ ID NO: 344325 - DNA, 25 bp, Artificial
  probe
  misc_feature (1)..(25): SEQ ID NO: 3023; WAN024DOW; Start 235; Stop 259
tttatgccgtttcaacaatcgctaa

SEQ ID NO: 344326 - DNA, 25 bp, Artificial
  probe
  misc_feature (1)..(25): SEQ ID NO: 3023; WAN024DOW; Start 123; Stop 147
gactggtaaagaatggatttgtcat

SEQ ID NO: 344327 - DNA, 25 bp, Artificial
  probe
  misc_feature (1)..(25): SEQ ID NO: 3023; WAN024DOW; Start 122; Stop 146
cgactggtaaagaatggatttgtca

SEQ ID NO: 344328 - DNA, 25 bp, Artificial
  probe
  misc_feature (1)..(25): SEQ ID NO: 3023; WAN024DOW; Start 199; Stop 223
cctgaagaatgggatactatctcct

SEQ ID NO: 344329 - DNA, 25 bp, Artificial
  probe
  misc_feature (1)..(25): SEQ ID NO: 3023; WAN024DOW; Start 198; Stop 222
tcctgaagaatgggatactatctcc

SEQ ID NO: 344330 - DNA, 25 bp, Artificial
  probe
  misc_feature (1)..(25): SEQ ID NO: 3023; WAN024DOW; Start 109; Stop 133
aaatggtatgtctcgactggtaaag

SEQ ID NO: 344331 - DNA, 25 bp, Artificial
  probe
  misc_feature (1)..(25): SEQ ID NO: 3023; WAN024DOW; Start 200; Stop 224
ctgaagaatgggatactatctcctt

SEQ ID NO: 344332 - DNA, 25 bp, Artificial
  probe
  misc_feature (1)..(25): SEQ ID NO: 3023; WAN024DOW; Start 240; Stop 264
gccgtttcaacaatcgctaactaat

SEQ ID NO: 344333 - DNA, 25 bp, Artificial
  probe
  misc_feature (1)..(25): SEQ ID NO: 3023; WAN024DOW; Start 120; Stop 144
ctcgactggtaaagaatggatttgt

SEQ ID NO: 344334 - DNA, 25 bp, Artificial
  probe
  misc_feature (1)..(25): SEQ ID NO: 3023; WAN024DOW; Start 201; Stop 225
tgaagaatgggatactatctccttt

SEQ ID NO: 344335 - DNA, 25 bp, Artificial
  probe
  misc_feature (1)..(25): SEQ ID NO: 3023; WAN024DOW; Start 119; Stop 143
tctcgactggtaaagaatggatttg

SEQ ID NO: 344336 - DNA, 25 bp, Artificial
  probe
  misc_feature (1)..(25): SEQ ID NO: 3023; WAN024DOW; Start 118; Stop 142
gtctcgactggtaaagaatggattt

SEQ ID NO: 344337 - DNA, 25 bp, Artificial
  probe
  misc_feature (1)..(25): SEQ ID NO: 3023; WAN024DOW; Start 202; Stop 226
gaagaatgggatactatctcctttg

SEQ ID NO: 344338 - DNA, 25 bp, Artificial
  probe
  misc_feature (1)..(25): SEQ ID NO: 3023; WAN024DOW; Start 115; Stop 139
tatgtctcgactggtaaagaatgga

SEQ ID NO: 344339 - DNA, 25 bp, Artificial
  probe
  misc_feature (1)..(25): SEQ ID NO: 3023; WAN024DOW; Start 114; Stop 138
gtatgtctcgactggtaaagaatgg

SEQ ID NO: 344340 - DNA, 25 bp, Artificial
  probe
  misc_feature (1)..(25): SEQ ID NO: 3023; WAN024DOW; Start 113; Stop 137
ggtatgtctcgactggtaaagaatg

SEQ ID NO: 344341 - DNA, 25 bp, Artificial
  probe
  misc_feature (1)..(25): SEQ ID NO: 3023; WAN024DOW; Start 236; Stop 260
ttatgccgtttcaacaatcgctaac

SEQ ID NO: 344342 - DNA, 25 bp, Artificial
  probe
  misc_feature (1)..(25): SEQ ID NO: 3023; WAN024DOW; Start 112; Stop 136
tggtatgtctcgactggtaaagaat

SEQ ID NO: 344343 - DNA, 25 bp, Artificial
  probe
  misc_feature (1)..(25): SEQ ID NO: 3023; WAN024DOW; Start 111; Stop 135
atggtatgtctcgactggtaaagaa

SEQ ID NO: 344344 - DNA, 25 bp, Artificial
  probe
  misc_feature (1)..(25): SEQ ID NO: 3023; WAN024DOW; Start 110; Stop 134
aatggtatgtctcgactggtaaaga

SEQ ID NO: 344345 - DNA, 25 bp, Artificial
  probe
  misc_feature (1)..(25): SEQ ID NO: 3023; WAN024DOW; Start 116; Stop 140
atgtctcgactggtaaagaatggat

SEQ ID NO: 344346 - DNA, 25 bp, Artificial
  probe
  misc_feature (1)..(25): SEQ ID NO: 3023; WAN024DOW; Start 124; Stop 148
actggtaaagaatggatttgtcatt

SEQ ID NO: 344347 - DNA, 25 bp, Artificial
  probe
  misc_feature (1)..(25): SEQ ID NO: 3023; WAN024DOW; Start 117; Stop 141
tgtctcgactggtaaagaatggatt

SEQ ID NO: 344348 - DNA, 25 bp, Artificial
  probe
  misc_feature (1)..(25): SEQ ID NO: 3023; WAN024DOW; Start 121; Stop 145
tcgactggtaaagaatggatttgtc

SEQ ID NO: 344349 - DNA, 25 bp, Artificial
  probe
  misc_feature (1)..(25): SEQ ID NO: 3023; WAN024DOW; Start 76; Stop 100
tgtttgacgagtgaagaattgaaaa

SEQ ID NO: 344350 - DNA, 25 bp, Artificial
  probe
  misc_feature (1)..(25): SEQ ID NO: 3023; WAN024DOW; Start 238; Stop 262
atgccgtttcaacaatcgctaacta

SEQ ID NO: 344351 - DNA, 25 bp, Artificial
  probe
  misc_feature (1)..(25): SEQ ID NO: 3023; WAN024DOW; Start 237; Stop 261
tatgccgtttcaacaatcgctaact

SEQ ID NO: 344352 - DNA, 25 bp, Artificial
  probe
  misc_feature (1)..(25): SEQ ID NO: 3023; WAN024DOW; Start 134; Stop 158
aatggatttgtcattcagatgatga

SEQ ID NO: 344353 - DNA, 25 bp, Artificial
  probe
  misc_feature (1)..(25): SEQ ID NO: 3023; WAN024DOW; Start 239; Stop 263
tgccgtttcaacaatcgctaactaa

SEQ ID NO: 344354 - DNA, 25 bp, Artificial
  probe
  misc_feature (1)..(25): SEQ ID NO: 3023; WAN024DOW; Start 234; Stop 258
ttttatgccgtttcaacaatcgcta

SEQ ID NO: 344355 - DNA, 25 bp, Artificial
  probe
  misc_feature (1)..(25): SEQ ID NO: 3023; WAN024DOW; Start 108; Stop 132
aaaatggtatgtctcgactggtaaa

SEQ ID NO: 344356 - DNA, 25 bp, Artificial
  probe
  misc_feature (1)..(25): SEQ ID NO: 3023; WAN024DOW; Start 107; Stop 131
gaaaatggtatgtctcgactggtaa

SEQ ID NO: 344357 - DNA, 25 bp, Artificial
  probe
  misc_feature (1)..(25): SEQ ID NO: 3024; WAN024CAO; Start 5; Stop 29
tcaactgtctgaaagcgaatgattt

SEQ ID NO: 344358 - DNA, 25 bp, Artificial
  probe
  misc_feature (1)..(25): SEQ ID NO: 3024; WAN024CAO; Start 63; Stop 87
tagagtaacacttatctcaaaggag

SEQ ID NO: 344359 - DNA, 25 bp, Artificial
  probe
  misc_feature (1)..(25): SEQ ID NO: 3024; WAN024CAO; Start 6; Stop 30
caactgtctgaaagcgaatgatttt

SEQ ID NO: 344360 - DNA, 25 bp, Artificial
  probe
  misc_feature (1)..(25): SEQ ID NO: 3024; WAN024CAO; Start 62; Stop 86
atagagtaacacttatctcaaagga

SEQ ID NO: 344361 - DNA, 25 bp, Artificial
  probe
  misc_feature (1)..(25): SEQ ID NO: 3024; WAN024CAO; Start 4; Stop 28
ttcaactgtctgaaagcgaatgatt

SEQ ID NO: 344362 - DNA, 25 bp, Artificial
  probe
  misc_feature (1)..(25): SEQ ID NO: 3024; WAN024CAO; Start 61; Stop 85
gatagagtaacacttatctcaaagg

SEQ ID NO: 344363 - DNA, 25 bp, Artificial
  probe
  misc_feature (1)..(25): SEQ ID NO: 3024; WAN024CAO; Start 3; Stop 27
gttcaactgtctgaaagcgaatgat

SEQ ID NO: 344364 - DNA, 25 bp, Artificial
  probe
  misc_feature (1)..(25): SEQ ID NO: 3024; WAN024CAO; Start 1; Stop 25
atgttcaactgtctgaaagcgaatg

SEQ ID NO: 344365 - DNA, 25 bp, Artificial
  probe
  misc_feature (1)..(25): SEQ ID NO: 3024; WAN024CAO; Start 7; Stop 31
aactgtctgaaagcgaatgattttc

SEQ ID NO: 344366 - DNA, 25 bp, Artificial
  probe
  misc_feature (1)..(25): SEQ ID NO: 3024; WAN024CAO; Start 2; Stop 26
tgttcaactgtctgaaagcgaatga

SEQ ID NO: 344367 - DNA, 25 bp, Artificial
  probe
  misc_feature (1)..(25): SEQ ID NO: 3024; WAN024CAO; Start 60; Stop 84
agatagagtaacacttatctcaaag

SEQ ID NO: 344368 - DNA, 25 bp, Artificial
  probe
  misc_feature (1)..(25): SEQ ID NO: 3024; WAN024CAO; Start 8; Stop 32
actgtctgaaagcgaatgattttca

SEQ ID NO: 344369 - DNA, 25 bp, Artificial
  probe
  misc_feature (1)..(25): SEQ ID NO: 3025; WAN024DU2; Start 215; Stop 239
acctttgtcattctattccttccat

SEQ ID NO: 344370 - DNA, 25 bp, Artificial
  probe
  misc_feature (1)..(25): SEQ ID NO: 3025; WAN024DU2; Start 214; Stop 238
aacctttgtcattctattccttcca

SEQ ID NO: 344371 - DNA, 25 bp, Artificial
  probe
  misc_feature (1)..(25): SEQ ID NO: 3025; WAN024DU2; Start 213; Stop 237
caacctttgtcattctattccttcc

SEQ ID NO: 344372 - DNA, 25 bp, Artificial
  probe
  misc_feature (1)..(25): SEQ ID NO: 3025; WAN024DU2; Start 216; Stop 240
cctttgtcattctattccttccata

SEQ ID NO: 344373 - DNA, 25 bp, Artificial
  probe
  misc_feature (1)..(25): SEQ ID NO: 3025; WAN024DU2; Start 12; Stop 36
aatgagcaattcctccaggatattg

SEQ ID NO: 344374 - DNA, 25 bp, Artificial
  probe
  misc_feature (1)..(25): SEQ ID NO: 3025; WAN024DU2; Start 220; Stop 244
tgtcattctattccttccataaagt

SEQ ID NO: 344375 - DNA, 25 bp, Artificial
  probe
  misc_feature (1)..(25): SEQ ID NO: 3025; WAN024DU2; Start 13; Stop 37
atgagcaattcctccaggatattgt

SEQ ID NO: 344376 - DNA, 25 bp, Artificial
  probe
  misc_feature (1)..(25): SEQ ID NO: 3025; WAN024DU2; Start 99; Stop 123
tcccgtaaacctctttaaattcctt

SEQ ID NO: 344377 - DNA, 25 bp, Artificial
  probe
  misc_feature (1)..(25): SEQ ID NO: 3025; WAN024DU2; Start 96; Stop 120
cactcccgtaaacctctttaaattc

SEQ ID NO: 344378 - DNA, 25 bp, Artificial
  probe
  misc_feature (1)..(25): SEQ ID NO: 3025; WAN024DU2; Start 14; Stop 38
tgagcaattcctccaggatattgtt

SEQ ID NO: 344379 - DNA, 25 bp, Artificial
  probe
  misc_feature (1)..(25): SEQ ID NO: 3025; WAN024DU2; Start 95; Stop 119
acactcccgtaaacctctttaaatt

SEQ ID NO: 344380 - DNA, 25 bp, Artificial
  probe
  misc_feature (1)..(25): SEQ ID NO: 3025; WAN024DU2; Start 100; Stop 124
cccgtaaacctctttaaattccttt

SEQ ID NO: 344381 - DNA, 25 bp, Artificial
  probe
  misc_feature (1)..(25): SEQ ID NO: 3025; WAN024DU2; Start 98; Stop 122
ctcccgtaaacctctttaaattcct

SEQ ID NO: 344382 - DNA, 25 bp, Artificial
  probe
  misc_feature (1)..(25): SEQ ID NO: 3025; WAN024DU2; Start 51; Stop 75
caacttctgtgacaaacgtatctac

SEQ ID NO: 344383 - DNA, 25 bp, Artificial
  probe
  misc_feature (1)..(25): SEQ ID NO: 3025; WAN024DU2; Start 97; Stop 121
actcccgtaaacctctttaaattcc

SEQ ID NO: 344384 - DNA, 25 bp, Artificial
  probe
  misc_feature (1)..(25): SEQ ID NO: 3025; WAN024DU2; Start 94; Stop 118
gacactcccgtaaacctctttaaat

SEQ ID NO: 344385 - DNA, 25 bp, Artificial
  probe
  misc_feature (1)..(25): SEQ ID NO: 3025; WAN024DU2; Start 92; Stop 116
gtgacactcccgtaaacctctttaa

SEQ ID NO: 344386 - DNA, 25 bp, Artificial
  probe
  misc_feature (1)..(25): SEQ ID NO: 3025; WAN024DU2; Start 52; Stop 76
aacttctgtgacaaacgtatctacc

SEQ ID NO: 344387 - DNA, 25 bp, Artificial
  probe
  misc_feature (1)..(25): SEQ ID NO: 3025; WAN024DU2; Start 11; Stop 35
aaatgagcaattcctccaggatatt

SEQ ID NO: 344388 - DNA, 25 bp, Artificial
  probe
  misc_feature (1)..(25): SEQ ID NO: 3025; WAN024DU2; Start 50; Stop 74
tcaacttctgtgacaaacgtatcta

SEQ ID NO: 344389 - DNA, 25 bp, Artificial
  probe
  misc_feature (1)..(25): SEQ ID NO: 3025; WAN024DU2; Start 217; Stop 241
ctttgtcattctattccttccataa

SEQ ID NO: 344390 - DNA, 25 bp, Artificial
  probe
  misc_feature (1)..(25): SEQ ID NO: 3025; WAN024DU2; Start 93; Stop 117
tgacactcccgtaaacctctttaaa

SEQ ID NO: 344391 - DNA, 25 bp, Artificial
  probe
  misc_feature (1)..(25): SEQ ID NO: 3025; WAN024DU2; Start 65; Stop 89
aacgtatctaccgaaccaaactgta

SEQ ID NO: 344392 - DNA, 25 bp, Artificial
  probe
  misc_feature (1)..(25): SEQ ID NO: 3025; WAN024DU2; Start 219; Stop 243
ttgtcattctattccttccataaag

SEQ ID NO: 344393 - DNA, 25 bp, Artificial
  probe
  misc_feature (1)..(25): SEQ ID NO: 3025; WAN024DU2; Start 55; Stop 79
ttctgtgacaaacgtatctaccgaa

SEQ ID NO: 344394 - DNA, 25 bp, Artificial
  probe
  misc_feature (1)..(25): SEQ ID NO: 3025; WAN024DU2; Start 63; Stop 87
caaacgtatctaccgaaccaaactg

SEQ ID NO: 344395 - DNA, 25 bp, Artificial
  probe
  misc_feature (1)..(25): SEQ ID NO: 3025; WAN024DU2; Start 61; Stop 85
gacaaacgtatctaccgaaccaaac

SEQ ID NO: 344396 - DNA, 25 bp, Artificial
  probe
  misc_feature (1)..(25): SEQ ID NO: 3025; WAN024DU2; Start 15; Stop 39
gagcaattcctccaggatattgttt

SEQ ID NO: 344397 - DNA, 25 bp, Artificial
  probe
  misc_feature (1)..(25): SEQ ID NO: 3025; WAN024DU2; Start 66; Stop 90
acgtatctaccgaaccaaactgtac

SEQ ID NO: 344398 - DNA, 25 bp, Artificial
  probe
  misc_feature (1)..(25): SEQ ID NO: 3025; WAN024DU2; Start 218; Stop 242
tttgtcattctattccttccataaa

SEQ ID NO: 344399 - DNA, 25 bp, Artificial
  probe
  misc_feature (1)..(25): SEQ ID NO: 3025; WAN024DU2; Start 64; Stop 88
aaacgtatctaccgaaccaaactgt

SEQ ID NO: 344400 - DNA, 25 bp, Artificial
  probe
  misc_feature (1)..(25): SEQ ID NO: 3025; WAN024DU2; Start 62; Stop 86
acaaacgtatctaccgaaccaaact

SEQ ID NO: 344401 - DNA, 25 bp, Artificial
  probe
  misc_feature (1)..(25): SEQ ID NO: 3025; WAN024DU2; Start 60; Stop 84
tgacaaacgtatctaccgaaccaaa

SEQ ID NO: 344402 - DNA, 25 bp, Artificial
  probe
  misc_feature (1)..(25): SEQ ID NO: 3026; WAN024G5P; Start 151; Stop 175
gttcacactgtcaggagcattatag

SEQ ID NO: 344403 - DNA, 25 bp, Artificial
  probe
  misc_feature (1)..(25): SEQ ID NO: 3026; WAN024G5P; Start 123; Stop 147
gctcattaatcaagttccagttcac

SEQ ID NO: 344404 - DNA, 25 bp, Artificial
  probe
  misc_feature (1)..(25): SEQ ID NO: 3026; WAN024G5P; Start 177; Stop 201
tattcatcgcacgctctctatcatc

SEQ ID NO: 344405 - DNA, 25 bp, Artificial
  probe
  misc_feature (1)..(25): SEQ ID NO: 3026; WAN024G5P; Start 176; Stop 200
ctattcatcgcacgctctctatcat

SEQ ID NO: 344406 - DNA, 25 bp, Artificial
  probe
  misc_feature (1)..(25): SEQ ID NO: 3026; WAN024G5P; Start 150; Stop 174
ggttcacactgtcaggagcattata

SEQ ID NO: 344407 - DNA, 25 bp, Artificial
  probe
  misc_feature (1)..(25): SEQ ID NO: 3026; WAN024G5P; Start 110; Stop 134
atactgtcttgacgctcattaatca

SEQ ID NO: 344408 - DNA, 25 bp, Artificial
  probe
  misc_feature (1)..(25): SEQ ID NO: 3026; WAN024G5P; Start 108; Stop 132
caatactgtcttgacgctcattaat

SEQ ID NO: 344409 - DNA, 25 bp, Artificial
  probe
  misc_feature (1)..(25): SEQ ID NO: 3026; WAN024G5P; Start 109; Stop 133
aatactgtcttgacgctcattaatc

SEQ ID NO: 344410 - DNA, 25 bp, Artificial
  probe
  misc_feature (1)..(25): SEQ ID NO: 3026; WAN024G5P; Start 122; Stop 146
cgctcattaatcaagttccagttca

SEQ ID NO: 344411 - DNA, 25 bp, Artificial
  probe
  misc_feature (1)..(25): SEQ ID NO: 3026; WAN024G5P; Start 121; Stop 145
acgctcattaatcaagttccagttc

SEQ ID NO: 344412 - DNA, 25 bp, Artificial
  probe
  misc_feature (1)..(25): SEQ ID NO: 3026; WAN024G5P; Start 120; Stop 144
gacgctcattaatcaagttccagtt

SEQ ID NO: 344413 - DNA, 25 bp, Artificial
  probe
  misc_feature (1)..(25): SEQ ID NO: 3026; WAN024G5P; Start 124; Stop 148
ctcattaatcaagttccagttcact

SEQ ID NO: 344414 - DNA, 25 bp, Artificial
  probe
  misc_feature (1)..(25): SEQ ID NO: 3026; WAN024G5P; Start 152; Stop 176
ttcacactgtcaggagcattatagc

SEQ ID NO: 344415 - DNA, 25 bp, Artificial
  probe
  misc_feature (1)..(25): SEQ ID NO: 3026; WAN024G5P; Start 251; Stop 275
aattcttgaccgatttccataaagg

SEQ ID NO: 344416 - DNA, 25 bp, Artificial
  probe
  misc_feature (1)..(25): SEQ ID NO: 3026; WAN024G5P; Start 252; Stop 276
attcttgaccgatttccataaaggc

SEQ ID NO: 344417 - DNA, 25 bp, Artificial
  probe
  misc_feature (1)..(25): SEQ ID NO: 3026; WAN024G5P; Start 248; Stop 272
ccaaattcttgaccgatttccataa

SEQ ID NO: 344418 - DNA, 25 bp, Artificial
  probe
  misc_feature (1)..(25): SEQ ID NO: 3026; WAN024G5P; Start 247; Stop 271
accaaattcttgaccgatttccata

SEQ ID NO: 344419 - DNA, 25 bp, Artificial
  probe
  misc_feature (1)..(25): SEQ ID NO: 3026; WAN024G5P; Start 95; Stop 119
tgacggataaactcaatactgtctt

SEQ ID NO: 344420 - DNA, 25 bp, Artificial
  probe
  misc_feature (1)..(25): SEQ ID NO: 3026; WAN024G5P; Start 96; Stop 120
gacggataaactcaatactgtcttg

SEQ ID NO: 344421 - DNA, 25 bp, Artificial
  probe
  misc_feature (1)..(25): SEQ ID NO: 3026; WAN024G5P; Start 83; Stop 107
aatcggatgacttgacggataaact

SEQ ID NO: 344422 - DNA, 25 bp, Artificial
  probe
  misc_feature (1)..(25): SEQ ID NO: 3026; WAN024G5P; Start 107; Stop 131
tcaatactgtcttgacgctcattaa

SEQ ID NO: 344423 - DNA, 25 bp, Artificial
  probe
  misc_feature (1)..(25): SEQ ID NO: 3026; WAN024G5P; Start 119; Stop 143
tgacgctcattaatcaagttccagt

SEQ ID NO: 344424 - DNA, 25 bp, Artificial
  probe
  misc_feature (1)..(25): SEQ ID NO: 3026; WAN024G5P; Start 190; Stop 214
ctctctatcatcatgggtcaactca

SEQ ID NO: 344425 - DNA, 25 bp, Artificial
  probe
  misc_feature (1)..(25): SEQ ID NO: 3026; WAN024G5P; Start 106; Stop 130
ctcaatactgtcttgacgctcatta

SEQ ID NO: 344426 - DNA, 25 bp, Artificial
  probe
  misc_feature (1)..(25): SEQ ID NO: 3026; WAN024G5P; Start 82; Stop 106
caatcggatgacttgacggataaac

SEQ ID NO: 344427 - DNA, 25 bp, Artificial
  probe
  misc_feature (1)..(25): SEQ ID NO: 3026; WAN024G5P; Start 191; Stop 215
tctctatcatcatgggtcaactcac

SEQ ID NO: 344428 - DNA, 25 bp, Artificial
  probe
  misc_feature (1)..(25): SEQ ID NO: 3026; WAN024G5P; Start 249; Stop 273
caaattcttgaccgatttccataaa

SEQ ID NO: 344429 - DNA, 25 bp, Artificial
  probe
  misc_feature (1)..(25): SEQ ID NO: 3026; WAN024G5P; Start 243; Stop 267
tacgaccaaattcttgaccgatttc

SEQ ID NO: 344430 - DNA, 25 bp, Artificial
  probe
  misc_feature (1)..(25): SEQ ID NO: 3026; WAN024G5P; Start 84; Stop 108
atcggatgacttgacggataaactc

SEQ ID NO: 344431 - DNA, 25 bp, Artificial
  probe
  misc_feature (1)..(25): SEQ ID NO: 3026; WAN024G5P; Start 246; Stop 270
gaccaaattcttgaccgatttccat

SEQ ID NO: 344432 - DNA, 25 bp, Artificial
  probe
  misc_feature (1)..(25): SEQ ID NO: 3026; WAN024G5P; Start 111; Stop 135
tactgtcttgacgctcattaatcaa

SEQ ID NO: 344433 - DNA, 25 bp, Artificial
  probe
  misc_feature (1)..(25): SEQ ID NO: 3026; WAN024G5P; Start 250; Stop 274
aaattcttgaccgatttccataaag

SEQ ID NO: 344434 - DNA, 25 bp, Artificial
  probe
  misc_feature (1)..(25): SEQ ID NO: 3026; WAN024G5P; Start 18; Stop 42
gcacaaagacatgatggtaaatttc

SEQ ID NO: 344435 - DNA, 25 bp, Artificial
  probe
  misc_feature (1)..(25): SEQ ID NO: 3027; WAN024EU9; Start 509; Stop 533
ttgattatatgattagcgtagccat

SEQ ID NO: 344436 - DNA, 25 bp, Artificial
  probe
  misc_feature (1)..(25): SEQ ID NO: 3027; WAN024EU9; Start 510; Stop 534
tgattatatgattagcgtagccatg

SEQ ID NO: 344437 - DNA, 25 bp, Artificial
  probe
  misc_feature (1)..(25): SEQ ID NO: 3027; WAN024EU9; Start 589; Stop 613
tatgaacaatcacaaggtcgtgtag

SEQ ID NO: 344438 - DNA, 25 bp, Artificial
  probe
  misc_feature (1)..(25): SEQ ID NO: 3027; WAN024EU9; Start 588; Stop 612
ctatgaacaatcacaaggtcgtgta

SEQ ID NO: 344439 - DNA, 25 bp, Artificial
  probe
  misc_feature (1)..(25): SEQ ID NO: 3027; WAN024EU9; Start 27; Stop 51
gaatcacactattatacatgaccgt

SEQ ID NO: 344440 - DNA, 25 bp, Artificial
  probe
  misc_feature (1)..(25): SEQ ID NO: 3027; WAN024EU9; Start 26; Stop 50
tgaatcacactattatacatgaccg

SEQ ID NO: 344441 - DNA, 25 bp, Artificial
  probe
  misc_feature (1)..(25): SEQ ID NO: 3027; WAN024EU9; Start 29; Stop 53
atcacactattatacatgaccgtgc

SEQ ID NO: 344442 - DNA, 25 bp, Artificial
  probe
  misc_feature (1)..(25): SEQ ID NO: 3027; WAN024EU9; Start 28; Stop 52
aatcacactattatacatgaccgtg

SEQ ID NO: 344443 - DNA, 25 bp, Artificial
  probe
  misc_feature (1)..(25): SEQ ID NO: 3027; WAN024EU9; Start 101; Stop 125
gaatcggactatctgctttggtatc

SEQ ID NO: 344444 - DNA, 25 bp, Artificial
  probe
  misc_feature (1)..(25): SEQ ID NO: 3027; WAN024EU9; Start 457; Stop 481
attggtttactgattgctatggtag

SEQ ID NO: 344445 - DNA, 25 bp, Artificial
  probe
  misc_feature (1)..(25): SEQ ID NO: 3027; WAN024EU9; Start 494; Stop 518
tggctagtggcttctttgattatat

SEQ ID NO: 344446 - DNA, 25 bp, Artificial
  probe
  misc_feature (1)..(25): SEQ ID NO: 3027; WAN024EU9; Start 493; Stop 517
ttggctagtggcttctttgattata

SEQ ID NO: 344447 - DNA, 25 bp, Artificial
  probe
  misc_feature (1)..(25): SEQ ID NO: 3027; WAN024EU9; Start 456; Stop 480
cattggtttactgattgctatggta

SEQ ID NO: 344448 - DNA, 25 bp, Artificial
  probe
  misc_feature (1)..(25): SEQ ID NO: 3027; WAN024EU9; Start 495; Stop 519
ggctagtggcttctttgattatatg

SEQ ID NO: 344449 - DNA, 25 bp, Artificial
  probe
  misc_feature (1)..(25): SEQ ID NO: 3027; WAN024EU9; Start 458; Stop 482
ttggtttactgattgctatggtagt

SEQ ID NO: 344450 - DNA, 25 bp, Artificial
  probe
  misc_feature (1)..(25): SEQ ID NO: 3027; WAN024EU9; Start 454; Stop 478
ctcattggtttactgattgctatgg

SEQ ID NO: 344451 - DNA, 25 bp, Artificial
  probe
  misc_feature (1)..(25): SEQ ID NO: 3027; WAN024EU9; Start 144; Stop 168
ctttcagtctcagttggtttacttg

SEQ ID NO: 344452 - DNA, 25 bp, Artificial
  probe
  misc_feature (1)..(25): SEQ ID NO: 3027; WAN024EU9; Start 143; Stop 167
tctttcagtctcagttggtttactt

SEQ ID NO: 344453 - DNA, 25 bp, Artificial
  probe
  misc_feature (1)..(25): SEQ ID NO: 3027; WAN024EU9; Start 141; Stop 165
ggtctttcagtctcagttggtttac

SEQ ID NO: 344454 - DNA, 25 bp, Artificial
  probe
  misc_feature (1)..(25): SEQ ID NO: 3027; WAN024EU9; Start 460; Stop 484
ggtttactgattgctatggtagtca

SEQ ID NO: 344455 - DNA, 25 bp, Artificial
  probe
  misc_feature (1)..(25): SEQ ID NO: 3027; WAN024EU9; Start 459; Stop 483
tggtttactgattgctatggtagtc

SEQ ID NO: 344456 - DNA, 25 bp, Artificial
  probe
  misc_feature (1)..(25): SEQ ID NO: 3027; WAN024EU9; Start 150; Stop 174
gtctcagttggtttacttgttgatg

SEQ ID NO: 344457 - DNA, 25 bp, Artificial
  probe
  misc_feature (1)..(25): SEQ ID NO: 3027; WAN024EU9; Start 149; Stop 173
agtctcagttggtttacttgttgat

SEQ ID NO: 344458 - DNA, 25 bp, Artificial
  probe
  misc_feature (1)..(25): SEQ ID NO: 3027; WAN024EU9; Start 455; Stop 479
tcattggtttactgattgctatggt

SEQ ID NO: 344459 - DNA, 25 bp, Artificial
  probe
  misc_feature (1)..(25): SEQ ID NO: 3027; WAN024EU9; Start 146; Stop 170
ttcagtctcagttggtttacttgtt

SEQ ID NO: 344460 - DNA, 25 bp, Artificial
  probe
  misc_feature (1)..(25): SEQ ID NO: 3027; WAN024EU9; Start 145; Stop 169
tttcagtctcagttggtttacttgt

SEQ ID NO: 344461 - DNA, 25 bp, Artificial
  probe
  misc_feature (1)..(25): SEQ ID NO: 3027; WAN024EU9; Start 102; Stop 126
aatcggactatctgctttggtatca

SEQ ID NO: 344462 - DNA, 25 bp, Artificial
  probe
  misc_feature (1)..(25): SEQ ID NO: 3027; WAN024EU9; Start 142; Stop 166
gtctttcagtctcagttggtttact

SEQ ID NO: 344463 - DNA, 25 bp, Artificial
  probe
  misc_feature (1)..(25): SEQ ID NO: 3027; WAN024EU9; Start 492; Stop 516
cttggctagtggcttctttgattat

SEQ ID NO: 344464 - DNA, 25 bp, Artificial
  probe
  misc_feature (1)..(25): SEQ ID NO: 3027; WAN024EU9; Start 453; Stop 477
tctcattggtttactgattgctatg

SEQ ID NO: 344465 - DNA, 25 bp, Artificial
  probe
  misc_feature (1)..(25): SEQ ID NO: 3027; WAN024EU9; Start 496; Stop 520
gctagtggcttctttgattatatga

SEQ ID NO: 344466 - DNA, 25 bp, Artificial
  probe
  misc_feature (1)..(25): SEQ ID NO: 3027; WAN024EU9; Start 508; Stop 532
tttgattatatgattagcgtagcca

SEQ ID NO: 344467 - DNA, 25 bp, Artificial
  probe
  misc_feature (1)..(25): SEQ ID NO: 3027; WAN024EU9; Start 461; Stop 485
gtttactgattgctatggtagtcaa

SEQ ID NO: 344468 - DNA, 25 bp, Artificial
  probe
  misc_feature (1)..(25): SEQ ID NO: 3028; WAN024DL8; Start 292; Stop 316
gttacaggacacattgatggtacag

SEQ ID NO: 344469 - DNA, 25 bp, Artificial
  probe
  misc_feature (1)..(25): SEQ ID NO: 3028; WAN024DL8; Start 293; Stop 317
ttacaggacacattgatggtacagg

SEQ ID NO: 344470 - DNA, 25 bp, Artificial
  probe
  misc_feature (1)..(25): SEQ ID NO: 3028; WAN024DL8; Start 437; Stop 461
ctgtcgctaaagtctccaaagtaaa

SEQ ID NO: 344471 - DNA, 25 bp, Artificial
  probe
  misc_feature (1)..(25): SEQ ID NO: 3028; WAN024DL8; Start 202; Stop 226
agtcgaacagctcttactctattaa

SEQ ID NO: 344472 - DNA, 25 bp, Artificial
  probe
  misc_feature (1)..(25): SEQ ID NO: 3028; WAN024DL8; Start 6; Stop 30
cacaggaataattgaagaaatcgga

SEQ ID NO: 344473 - DNA, 25 bp, Artificial
  probe
  misc_feature (1)..(25): SEQ ID NO: 3028; WAN024DL8; Start 36; Stop 60
tgaaagaatacagaaagactctcgt

SEQ ID NO: 344474 - DNA, 25 bp, Artificial
  probe
  misc_feature (1)..(25): SEQ ID NO: 3028; WAN024DL8; Start 290; Stop 314
tcgttacaggacacattgatggtac

SEQ ID NO: 344475 - DNA, 25 bp, Artificial
  probe
  misc_feature (1)..(25): SEQ ID NO: 3028; WAN024DL8; Start 438; Stop 462
tgtcgctaaagtctccaaagtaaac

SEQ ID NO: 344476 - DNA, 25 bp, Artificial
  probe
  misc_feature (1)..(25): SEQ ID NO: 3028; WAN024DL8; Start 7; Stop 31
acaggaataattgaagaaatcggaa

SEQ ID NO: 344477 - DNA, 25 bp, Artificial
  probe
  misc_feature (1)..(25): SEQ ID NO: 3028; WAN024DL8; Start 35; Stop 59
ttgaaagaatacagaaagactctcg

SEQ ID NO: 344478 - DNA, 25 bp, Artificial
  probe
  misc_feature (1)..(25): SEQ ID NO: 3028; WAN024DL8; Start 291; Stop 315
cgttacaggacacattgatggtaca

SEQ ID NO: 344479 - DNA, 25 bp, Artificial
  probe
  misc_feature (1)..(25): SEQ ID NO: 3028; WAN024DL8; Start 5; Stop 29
tcacaggaataattgaagaaatcgg

SEQ ID NO: 344480 - DNA, 25 bp, Artificial
  probe
  misc_feature (1)..(25): SEQ ID NO: 3028; WAN024DL8; Start 289; Stop 313
gtcgttacaggacacattgatggta

SEQ ID NO: 344481 - DNA, 25 bp, Artificial
  probe
  misc_feature (1)..(25): SEQ ID NO: 3028; WAN024DL8; Start 439; Stop 463
gtcgctaaagtctccaaagtaaact

SEQ ID NO: 344482 - DNA, 25 bp, Artificial
  probe
  misc_feature (1)..(25): SEQ ID NO: 3028; WAN024DL8; Start 294; Stop 318
tacaggacacattgatggtacagga

SEQ ID NO: 344483 - DNA, 25 bp, Artificial
  probe
  misc_feature (1)..(25): SEQ ID NO: 3028; WAN024DL8; Start 247; Stop 271
ctagaaagagccttatctgtcaacg

SEQ ID NO: 344484 - DNA, 25 bp, Artificial
  probe
  misc_feature (1)..(25): SEQ ID NO: 3028; WAN024DL8; Start 226; Stop 250
aaacatggaagtgaggtgaatctag

SEQ ID NO: 344485 - DNA, 25 bp, Artificial
  probe
  misc_feature (1)..(25): SEQ ID NO: 3028; WAN024DL8; Start 37; Stop 61
gaaagaatacagaaagactctcgta

SEQ ID NO: 344486 - DNA, 25 bp, Artificial
  probe
  misc_feature (1)..(25): SEQ ID NO: 3028; WAN024DL8; Start 466; Stop 490
tcagtatctgttatccctcatacct

SEQ ID NO: 344487 - DNA, 25 bp, Artificial
  probe
  misc_feature (1)..(25): SEQ ID NO: 3028; WAN024DL8; Start 228; Stop 252
acatggaagtgaggtgaatctagaa

SEQ ID NO: 344488 - DNA, 25 bp, Artificial
  probe
  misc_feature (1)..(25): SEQ ID NO: 3028; WAN024DL8; Start 227; Stop 251
aacatggaagtgaggtgaatctaga

SEQ ID NO: 344489 - DNA, 25 bp, Artificial
  probe
  misc_feature (1)..(25): SEQ ID NO: 3028; WAN024DL8; Start 8; Stop 32
caggaataattgaagaaatcggaaa

SEQ ID NO: 344490 - DNA, 25 bp, Artificial
  probe
  misc_feature (1)..(25): SEQ ID NO: 3028; WAN024DL8; Start 248; Stop 272
tagaaagagccttatctgtcaacgg

SEQ ID NO: 344491 - DNA, 25 bp, Artificial
  probe
  misc_feature (1)..(25): SEQ ID NO: 3028; WAN024DL8; Start 47; Stop 71
agaaagactctcgtaattgtaaact

SEQ ID NO: 344492 - DNA, 25 bp, Artificial
  probe
  misc_feature (1)..(25): SEQ ID NO: 3028; WAN024DL8; Start 46; Stop 70
cagaaagactctcgtaattgtaaac

SEQ ID NO: 344493 - DNA, 25 bp, Artificial
  probe
  misc_feature (1)..(25): SEQ ID NO: 3028; WAN024DL8; Start 468; Stop 492
agtatctgttatccctcataccttg

SEQ ID NO: 344494 - DNA, 25 bp, Artificial
  probe
  misc_feature (1)..(25): SEQ ID NO: 3028; WAN024DL8; Start 467; Stop 491
cagtatctgttatccctcatacctt

SEQ ID NO: 344495 - DNA, 25 bp, Artificial
  probe
  misc_feature (1)..(25): SEQ ID NO: 3028; WAN024DL8; Start 465; Stop 489
ttcagtatctgttatccctcatacc

SEQ ID NO: 344496 - DNA, 25 bp, Artificial
  probe
  misc_feature (1)..(25): SEQ ID NO: 3028; WAN024DL8; Start 405; Stop 429
aggatctattacaattgacggcatt

SEQ ID NO: 344497 - DNA, 25 bp, Artificial
  probe
  misc_feature (1)..(25): SEQ ID NO: 3028; WAN024DL8; Start 404; Stop 428
aaggatctattacaattgacggcat

SEQ ID NO: 344498 - DNA, 25 bp, Artificial
  probe
  misc_feature (1)..(25): SEQ ID NO: 3028; WAN024DL8; Start 436; Stop 460
actgtcgctaaagtctccaaagtaa

SEQ ID NO: 344499 - DNA, 25 bp, Artificial
  probe
  misc_feature (1)..(25): SEQ ID NO: 3028; WAN024DL8; Start 123; Stop 147
agcagtaaatggtatctgtcttaca

SEQ ID NO: 344500 - DNA, 25 bp, Artificial
  probe
  misc_feature (1)..(25): SEQ ID NO: 3028; WAN024DL8; Start 38; Stop 62
aaagaatacagaaagactctcgtaa

SEQ ID NO: 344501 - DNA, 25 bp, Artificial
  probe
  misc_feature (1)..(25): SEQ ID NO: 3029; WAN024GGP; Start 1; Stop 25
atgttcaggatggacaatagcataa

SEQ ID NO: 344502 - DNA, 25 bp, Artificial
  probe
  misc_feature (1)..(25): SEQ ID NO: 3029; WAN024GGP; Start 2; Stop 26
tgttcaggatggacaatagcataag

SEQ ID NO: 344503 - DNA, 25 bp, Artificial
  probe
  misc_feature (1)..(25): SEQ ID NO: 3029; WAN024GGP; Start 5; Stop 29
tcaggatggacaatagcataagcat

SEQ ID NO: 344504 - DNA, 25 bp, Artificial
  probe
  misc_feature (1)..(25): SEQ ID NO: 3029; WAN024GGP; Start 3; Stop 27
gttcaggatggacaatagcataagc

SEQ ID NO: 344505 - DNA, 25 bp, Artificial
  probe
  misc_feature (1)..(25): SEQ ID NO: 3029; WAN024GGP; Start 4; Stop 28
ttcaggatggacaatagcataagca

SEQ ID NO: 344506 - DNA, 25 bp, Artificial
  probe
  misc_feature (1)..(25): SEQ ID NO: 3029; WAN024GGP; Start 368; Stop 392
atatcatggagcagataagcatcat

SEQ ID NO: 344507 - DNA, 25 bp, Artificial
  probe
  misc_feature (1)..(25): SEQ ID NO: 3029; WAN024GGP; Start 367; Stop 391
catatcatggagcagataagcatca

SEQ ID NO: 344508 - DNA, 25 bp, Artificial
  probe
  misc_feature (1)..(25): SEQ ID NO: 3029; WAN024GGP; Start 47; Stop 71
atggaatgatggtctgtcacaatga

SEQ ID NO: 344509 - DNA, 25 bp, Artificial
  probe
  misc_feature (1)..(25): SEQ ID NO: 3029; WAN024GGP; Start 249; Stop 273
gttccaaactttccttcacaataga

SEQ ID NO: 344510 - DNA, 25 bp, Artificial
  probe
  misc_feature (1)..(25): SEQ ID NO: 3029; WAN024GGP; Start 288; Stop 312
catccgcatcatagtctccataaac

SEQ ID NO: 344511 - DNA, 25 bp, Artificial
  probe
  misc_feature (1)..(25): SEQ ID NO: 3029; WAN024GGP; Start 46; Stop 70
catggaatgatggtctgtcacaatg

SEQ ID NO: 344512 - DNA, 25 bp, Artificial
  probe
  misc_feature (1)..(25): SEQ ID NO: 3029; WAN024GGP; Start 250; Stop 274
ttccaaactttccttcacaatagaa

SEQ ID NO: 344513 - DNA, 25 bp, Artificial
  probe
  misc_feature (1)..(25): SEQ ID NO: 3029; WAN024GGP; Start 10; Stop 34
atggacaatagcataagcatctggc

SEQ ID NO: 344514 - DNA, 25 bp, Artificial
  probe
  misc_feature (1)..(25): SEQ ID NO: 3029; WAN024GGP; Start 248; Stop 272
tgttccaaactttccttcacaatag

SEQ ID NO: 344515 - DNA, 25 bp, Artificial
  probe
  misc_feature (1)..(25): SEQ ID NO: 3029; WAN024GGP; Start 326; Stop 350
ccttcttcaatagcctgacgaatcc

SEQ ID NO: 344516 - DNA, 25 bp, Artificial
  probe
  misc_feature (1)..(25): SEQ ID NO: 3029; WAN024GGP; Start 287; Stop 311
ccatccgcatcatagtctccataaa

SEQ ID NO: 344517 - DNA, 25 bp, Artificial
  probe
  misc_feature (1)..(25): SEQ ID NO: 3029; WAN024GGP; Start 67; Stop 91
aatgacatctactcccatagactga

SEQ ID NO: 344518 - DNA, 25 bp, Artificial
  probe
  misc_feature (1)..(25): SEQ ID NO: 3029; WAN024GGP; Start 66; Stop 90
caatgacatctactcccatagactg

SEQ ID NO: 344519 - DNA, 25 bp, Artificial
  probe
  misc_feature (1)..(25): SEQ ID NO: 3029; WAN024GGP; Start 65; Stop 89
acaatgacatctactcccatagact

SEQ ID NO: 344520 - DNA, 25 bp, Artificial
  probe
  misc_feature (1)..(25): SEQ ID NO: 3029; WAN024GGP; Start 64; Stop 88
cacaatgacatctactcccatagac

SEQ ID NO: 344521 - DNA, 25 bp, Artificial
  probe
  misc_feature (1)..(25): SEQ ID NO: 3029; WAN024GGP; Start 63; Stop 87
tcacaatgacatctactcccataga

SEQ ID NO: 344522 - DNA, 25 bp, Artificial
  probe
  misc_feature (1)..(25): SEQ ID NO: 3029; WAN024GGP; Start 68; Stop 92
atgacatctactcccatagactgag

SEQ ID NO: 344523 - DNA, 25 bp, Artificial
  probe
  misc_feature (1)..(25): SEQ ID NO: 3029; WAN024GGP; Start 327; Stop 351
cttcttcaatagcctgacgaatccg

SEQ ID NO: 344524 - DNA, 25 bp, Artificial
  probe
  misc_feature (1)..(25): SEQ ID NO: 3029; WAN024GGP; Start 13; Stop 37
gacaatagcataagcatctggcagg

SEQ ID NO: 344525 - DNA, 25 bp, Artificial
  probe
  misc_feature (1)..(25): SEQ ID NO: 3029; WAN024GGP; Start 12; Stop 36
ggacaatagcataagcatctggcag

SEQ ID NO: 344526 - DNA, 25 bp, Artificial
  probe
  misc_feature (1)..(25): SEQ ID NO: 3029; WAN024GGP; Start 9; Stop 33
gatggacaatagcataagcatctgg

SEQ ID NO: 344527 - DNA, 25 bp, Artificial
  probe
  misc_feature (1)..(25): SEQ ID NO: 3029; WAN024GGP; Start 8; Stop 32
ggatggacaatagcataagcatctg

SEQ ID NO: 344528 - DNA, 25 bp, Artificial
  probe
  misc_feature (1)..(25): SEQ ID NO: 3029; WAN024GGP; Start 7; Stop 31
aggatggacaatagcataagcatct

SEQ ID NO: 344529 - DNA, 25 bp, Artificial
  probe
  misc_feature (1)..(25): SEQ ID NO: 3029; WAN024GGP; Start 6; Stop 30
caggatggacaatagcataagcatc

SEQ ID NO: 344530 - DNA, 25 bp, Artificial
  probe
  misc_feature (1)..(25): SEQ ID NO: 3029; WAN024GGP; Start 263; Stop 287
ttcacaatagaagccgaagtcatgc

SEQ ID NO: 344531 - DNA, 25 bp, Artificial
  probe
  misc_feature (1)..(25): SEQ ID NO: 3029; WAN024GGP; Start 369; Stop 393
tatcatggagcagataagcatcatg

SEQ ID NO: 344532 - DNA, 25 bp, Artificial
  probe
  misc_feature (1)..(25): SEQ ID NO: 3029; WAN024GGP; Start 372; Stop 396
catggagcagataagcatcatgtaa

SEQ ID NO: 344533 - DNA, 25 bp, Artificial
  probe
  misc_feature (1)..(25): SEQ ID NO: 3029; WAN024GGP; Start 45; Stop 69
gcatggaatgatggtctgtcacaat

SEQ ID NO: 344534 - DNA, 25 bp, Artificial
  probe
  misc_feature (1)..(25): SEQ ID NO: 3030; WAN024GCE; Start 471; Stop 495
ttcaaccaatatcaagtatgctgct

SEQ ID NO: 344535 - DNA, 25 bp, Artificial
  probe
  misc_feature (1)..(25): SEQ ID NO: 3030; WAN024GCE; Start 474; Stop 498
aaccaatatcaagtatgctgctgtc

SEQ ID NO: 344536 - DNA, 25 bp, Artificial
  probe
  misc_feature (1)..(25): SEQ ID NO: 3030; WAN024GCE; Start 472; Stop 496
tcaaccaatatcaagtatgctgctg

SEQ ID NO: 344537 - DNA, 25 bp, Artificial
  probe
  misc_feature (1)..(25): SEQ ID NO: 3030; WAN024GCE; Start 476; Stop 500
ccaatatcaagtatgctgctgtctt

SEQ ID NO: 344538 - DNA, 25 bp, Artificial
  probe
  misc_feature (1)..(25): SEQ ID NO: 3030; WAN024GCE; Start 473; Stop 497
caaccaatatcaagtatgctgctgt

SEQ ID NO: 344539 - DNA, 25 bp, Artificial
  probe
  misc_feature (1)..(25): SEQ ID NO: 3030; WAN024GCE; Start 475; Stop 499
accaatatcaagtatgctgctgtct

SEQ ID NO: 344540 - DNA, 25 bp, Artificial
  probe
  misc_feature (1)..(25): SEQ ID NO: 3030; WAN024GCE; Start 487; Stop 511
tatgctgctgtcttgattaatacca

SEQ ID NO: 344541 - DNA, 25 bp, Artificial
  probe
  misc_feature (1)..(25): SEQ ID NO: 3030; WAN024GCE; Start 495; Stop 519
tgtcttgattaataccagtcagttg

SEQ ID NO: 344542 - DNA, 25 bp, Artificial
  probe
  misc_feature (1)..(25): SEQ ID NO: 3030; WAN024GCE; Start 470; Stop 494
tttcaaccaatatcaagtatgctgc

SEQ ID NO: 344543 - DNA, 25 bp, Artificial
  probe
  misc_feature (1)..(25): SEQ ID NO: 3030; WAN024GCE; Start 202; Stop 226
agggcaacagaagagattaaagatt

SEQ ID NO: 344544 - DNA, 25 bp, Artificial
  probe
  misc_feature (1)..(25): SEQ ID NO: 3030; WAN024GCE; Start 484; Stop 508
aagtatgctgctgtcttgattaata

SEQ ID NO: 344545 - DNA, 25 bp, Artificial
  probe
  misc_feature (1)..(25): SEQ ID NO: 3030; WAN024GCE; Start 25; Stop 49
tggtatgcggatgactttagttatt

SEQ ID NO: 344546 - DNA, 25 bp, Artificial
  probe
  misc_feature (1)..(25): SEQ ID NO: 3030; WAN024GCE; Start 24; Stop 48
atggtatgcggatgactttagttat

SEQ ID NO: 344547 - DNA, 25 bp, Artificial
  probe
  misc_feature (1)..(25): SEQ ID NO: 3030; WAN024GCE; Start 987; Stop 1011
tcttctgaaacaactgatgaccatt

SEQ ID NO: 344548 - DNA, 25 bp, Artificial
  probe
  misc_feature (1)..(25): SEQ ID NO: 3030; WAN024GCE; Start 203; Stop 227
gggcaacagaagagattaaagattt

SEQ ID NO: 344549 - DNA, 25 bp, Artificial
  probe
  misc_feature (1)..(25): SEQ ID NO: 3030; WAN024GCE; Start 493; Stop 517
gctgtcttgattaataccagtcagt

SEQ ID NO: 344550 - DNA, 25 bp, Artificial
  probe
  misc_feature (1)..(25): SEQ ID NO: 3030; WAN024GCE; Start 492; Stop 516
tgctgtcttgattaataccagtcag

SEQ ID NO: 344551 - DNA, 25 bp, Artificial
  probe
  misc_feature (1)..(25): SEQ ID NO: 3030; WAN024GCE; Start 491; Stop 515
ctgctgtcttgattaataccagtca

SEQ ID NO: 344552 - DNA, 25 bp, Artificial
  probe
  misc_feature (1)..(25): SEQ ID NO: 3030; WAN024GCE; Start 1033; Stop 1057
tatactgaggaggatggtgaaattg

SEQ ID NO: 344553 - DNA, 25 bp, Artificial
  probe
  misc_feature (1)..(25): SEQ ID NO: 3030; WAN024GCE; Start 201; Stop 225
tagggcaacagaagagattaaagat

SEQ ID NO: 344554 - DNA, 25 bp, Artificial
  probe
  misc_feature (1)..(25): SEQ ID NO: 3030; WAN024GCE; Start 200; Stop 224
atagggcaacagaagagattaaaga

SEQ ID NO: 344555 - DNA, 25 bp, Artificial
  probe
  misc_feature (1)..(25): SEQ ID NO: 3030; WAN024GCE; Start 193; Stop 217
gctataaatagggcaacagaagaga

SEQ ID NO: 344556 - DNA, 25 bp, Artificial
  probe
  misc_feature (1)..(25): SEQ ID NO: 3030; WAN024GCE; Start 991; Stop 1015
ctgaaacaactgatgaccattcttt

SEQ ID NO: 344557 - DNA, 25 bp, Artificial
  probe
  misc_feature (1)..(25): SEQ ID NO: 3030; WAN024GCE; Start 486; Stop 510
gtatgctgctgtcttgattaatacc

SEQ ID NO: 344558 - DNA, 25 bp, Artificial
  probe
  misc_feature (1)..(25): SEQ ID NO: 3030; WAN024GCE; Start 266; Stop 290
aacctaatgtcagttccaatacgga

SEQ ID NO: 344559 - DNA, 25 bp, Artificial
  probe
  misc_feature (1)..(25): SEQ ID NO: 3030; WAN024GCE; Start 1255; Stop 1279
actgtcaaagataataaacccaagg

SEQ ID NO: 344560 - DNA, 25 bp, Artificial
  probe
  misc_feature (1)..(25): SEQ ID NO: 3030; WAN024GCE; Start 988; Stop 1012
cttctgaaacaactgatgaccattc

SEQ ID NO: 344561 - DNA, 25 bp, Artificial
  probe
  misc_feature (1)..(25): SEQ ID NO: 3030; WAN024GCE; Start 1095; Stop 1119
acttgtttctgataatggaatcggt

SEQ ID NO: 344562 - DNA, 25 bp, Artificial
  probe
  misc_feature (1)..(25): SEQ ID NO: 3030; WAN024GCE; Start 26; Stop 50
ggtatgcggatgactttagttattt

SEQ ID NO: 344563 - DNA, 25 bp, Artificial
  probe
  misc_feature (1)..(25): SEQ ID NO: 3030; WAN024GCE; Start 380; Stop 404
taggacatatctaccagattcaggt

SEQ ID NO: 344564 - DNA, 25 bp, Artificial
  probe
  misc_feature (1)..(25): SEQ ID NO: 3030; WAN024GCE; Start 990; Stop 1014
tctgaaacaactgatgaccattctt

SEQ ID NO: 344565 - DNA, 25 bp, Artificial
  probe
  misc_feature (1)..(25): SEQ ID NO: 3030; WAN024GCE; Start 989; Stop 1013
ttctgaaacaactgatgaccattct

SEQ ID NO: 344566 - DNA, 25 bp, Artificial
  probe
  misc_feature (1)..(25): SEQ ID NO: 3030; WAN024GCE; Start 986; Stop 1010
ttcttctgaaacaactgatgaccat

SEQ ID NO: 344567 - DNA, 25 bp, Artificial
  probe
  misc_feature (1)..(25): SEQ ID NO: 3031; WAN024B5T; Start 220; Stop 244
gtcctcactctcttggctgtaatta

SEQ ID NO: 344568 - DNA, 25 bp, Artificial
  probe
  misc_feature (1)..(25): SEQ ID NO: 3031; WAN024B5T; Start 172; Stop 196
aataataaagccgtctactcccaag

SEQ ID NO: 344569 - DNA, 25 bp, Artificial
  probe
  misc_feature (1)..(25): SEQ ID NO: 3031; WAN024B5T; Start 171; Stop 195
gaataataaagccgtctactcccaa

SEQ ID NO: 344570 - DNA, 25 bp, Artificial
  probe
  misc_feature (1)..(25): SEQ ID NO: 3031; WAN024B5T; Start 169; Stop 193
ctgaataataaagccgtctactccc

SEQ ID NO: 344571 - DNA, 25 bp, Artificial
  probe
  misc_feature (1)..(25): SEQ ID NO: 3031; WAN024B5T; Start 252; Stop 276
ctatcattacctggtagccattctg

SEQ ID NO: 344572 - DNA, 25 bp, Artificial
  probe
  misc_feature (1)..(25): SEQ ID NO: 3031; WAN024B5T; Start 39; Stop 63
cataaacggcatcatagttattggt

SEQ ID NO: 344573 - DNA, 25 bp, Artificial
  probe
  misc_feature (1)..(25): SEQ ID NO: 3031; WAN024B5T; Start 170; Stop 194
tgaataataaagccgtctactccca

SEQ ID NO: 344574 - DNA, 25 bp, Artificial
  probe
  misc_feature (1)..(25): SEQ ID NO: 3031; WAN024B5T; Start 249; Stop 273
ttcctatcattacctggtagccatt

SEQ ID NO: 344575 - DNA, 25 bp, Artificial
  probe
  misc_feature (1)..(25): SEQ ID NO: 3031; WAN024B5T; Start 38; Stop 62
tcataaacggcatcatagttattgg

SEQ ID NO: 344576 - DNA, 25 bp, Artificial
  probe
  misc_feature (1)..(25): SEQ ID NO: 3031; WAN024B5T; Start 173; Stop 197
ataataaagccgtctactcccaaga

SEQ ID NO: 344577 - DNA, 25 bp, Artificial
  probe
  misc_feature (1)..(25): SEQ ID NO: 3031; WAN024B5T; Start 153; Stop 177
ggaaattagaggtcggctgaataat

SEQ ID NO: 344578 - DNA, 25 bp, Artificial
  probe
  misc_feature (1)..(25): SEQ ID NO: 3031; WAN024B5T; Start 40; Stop 64
ataaacggcatcatagttattggtt

SEQ ID NO: 344579 - DNA, 25 bp, Artificial
  probe
  misc_feature (1)..(25): SEQ ID NO: 3031; WAN024B5T; Start 251; Stop 275
cctatcattacctggtagccattct

SEQ ID NO: 344580 - DNA, 25 bp, Artificial
  probe
  misc_feature (1)..(25): SEQ ID NO: 3031; WAN024B5T; Start 250; Stop 274
tcctatcattacctggtagccattc

SEQ ID NO: 344581 - DNA, 25 bp, Artificial
  probe
  misc_feature (1)..(25): SEQ ID NO: 3031; WAN024B5T; Start 36; Stop 60
tgtcataaacggcatcatagttatt

SEQ ID NO: 344582 - DNA, 25 bp, Artificial
  probe
  misc_feature (1)..(25): SEQ ID NO: 3031; WAN024B5T; Start 253; Stop 277
tatcattacctggtagccattctgg

SEQ ID NO: 344583 - DNA, 25 bp, Artificial
  probe
  misc_feature (1)..(25): SEQ ID NO: 3031; WAN024B5T; Start 288; Stop 312
cctcaattcccttaacaatttggtt

SEQ ID NO: 344584 - DNA, 25 bp, Artificial
  probe
  misc_feature (1)..(25): SEQ ID NO: 3031; WAN024B5T; Start 246; Stop 270
tatttcctatcattacctggtagcc

SEQ ID NO: 344585 - DNA, 25 bp, Artificial
  probe
  misc_feature (1)..(25): SEQ ID NO: 3031; WAN024B5T; Start 157; Stop 181
attagaggtcggctgaataataaag

SEQ ID NO: 344586 - DNA, 25 bp, Artificial
  probe
  misc_feature (1)..(25): SEQ ID NO: 3031; WAN024B5T; Start 37; Stop 61
gtcataaacggcatcatagttattg

SEQ ID NO: 344587 - DNA, 25 bp, Artificial
  probe
  misc_feature (1)..(25): SEQ ID NO: 3031; WAN024B5T; Start 35; Stop 59
atgtcataaacggcatcatagttat

SEQ ID NO: 344588 - DNA, 25 bp, Artificial
  probe
  misc_feature (1)..(25): SEQ ID NO: 3031; WAN024B5T; Start 287; Stop 311
tcctcaattcccttaacaatttggt

SEQ ID NO: 344589 - DNA, 25 bp, Artificial
  probe
  misc_feature (1)..(25): SEQ ID NO: 3031; WAN024B5T; Start 286; Stop 310
atcctcaattcccttaacaatttgg

SEQ ID NO: 344590 - DNA, 25 bp, Artificial
  probe
  misc_feature (1)..(25): SEQ ID NO: 3031; WAN024B5T; Start 154; Stop 178
gaaattagaggtcggctgaataata

SEQ ID NO: 344591 - DNA, 25 bp, Artificial
  probe
  misc_feature (1)..(25): SEQ ID NO: 3031; WAN024B5T; Start 33; Stop 57
tcatgtcataaacggcatcatagtt

SEQ ID NO: 344592 - DNA, 25 bp, Artificial
  probe
  misc_feature (1)..(25): SEQ ID NO: 3031; WAN024B5T; Start 34; Stop 58
catgtcataaacggcatcatagtta

SEQ ID NO: 344593 - DNA, 25 bp, Artificial
  probe
  misc_feature (1)..(25): SEQ ID NO: 3031; WAN024B5T; Start 291; Stop 315
caattcccttaacaatttggtttga

SEQ ID NO: 344594 - DNA, 25 bp, Artificial
  probe
  misc_feature (1)..(25): SEQ ID NO: 3031; WAN024B5T; Start 290; Stop 314
tcaattcccttaacaatttggtttg

SEQ ID NO: 344595 - DNA, 25 bp, Artificial
  probe
  misc_feature (1)..(25): SEQ ID NO: 3031; WAN024B5T; Start 174; Stop 198
taataaagccgtctactcccaagag

SEQ ID NO: 344596 - DNA, 25 bp, Artificial
  probe
  misc_feature (1)..(25): SEQ ID NO: 3031; WAN024B5T; Start 156; Stop 180
aattagaggtcggctgaataataaa

SEQ ID NO: 344597 - DNA, 25 bp, Artificial
  probe
  misc_feature (1)..(25): SEQ ID NO: 3031; WAN024B5T; Start 155; Stop 179
aaattagaggtcggctgaataataa

SEQ ID NO: 344598 - DNA, 25 bp, Artificial
  probe
  misc_feature (1)..(25): SEQ ID NO: 3031; WAN024B5T; Start 80; Stop 104
cggtgttcatagagctgactatcaa

SEQ ID NO: 344599 - DNA, 25 bp, Artificial
  probe
  misc_feature (1)..(25): SEQ ID NO: 3031; WAN024B5T; Start 32; Stop 56
gtcatgtcataaacggcatcatagt

SEQ ID NO: 344600 - DNA, 25 bp, Artificial
  probe
  misc_feature (1)..(25): SEQ ID NO: 3032; WAN024F4O; Start 122; Stop 146
agcaaatcaactttaacatccagac

SEQ ID NO: 344601 - DNA, 25 bp, Artificial
  probe
  misc_feature (1)..(25): SEQ ID NO: 3032; WAN024F4O; Start 124; Stop 148
caaatcaactttaacatccagaccg

SEQ ID NO: 344602 - DNA, 25 bp, Artificial
  probe
  misc_feature (1)..(25): SEQ ID NO: 3032; WAN024F4O; Start 125; Stop 149
aaatcaactttaacatccagaccgt

SEQ ID NO: 344603 - DNA, 25 bp, Artificial
  probe
  misc_feature (1)..(25): SEQ ID NO: 3032; WAN024F4O; Start 123; Stop 147
gcaaatcaactttaacatccagacc

SEQ ID NO: 344604 - DNA, 25 bp, Artificial
  probe
  misc_feature (1)..(25): SEQ ID NO: 3032; WAN024F4O; Start 121; Stop 145
aagcaaatcaactttaacatccaga

SEQ ID NO: 344605 - DNA, 25 bp, Artificial
  probe
  misc_feature (1)..(25): SEQ ID NO: 3032; WAN024F4O; Start 126; Stop 150
aatcaactttaacatccagaccgtt

SEQ ID NO: 344606 - DNA, 25 bp, Artificial
  probe
  misc_feature (1)..(25): SEQ ID NO: 3032; WAN024F4O; Start 204; Stop 228
tttctgtagaatcgctatcaccaaa

SEQ ID NO: 344607 - DNA, 25 bp, Artificial
  probe
  misc_feature (1)..(25): SEQ ID NO: 3032; WAN024F4O; Start 240; Stop 264
gtccatctaagcctgtcatcatttg

SEQ ID NO: 344608 - DNA, 25 bp, Artificial
  probe
  misc_feature (1)..(25): SEQ ID NO: 3032; WAN024F4O; Start 118; Stop 142
gctaagcaaatcaactttaacatcc

SEQ ID NO: 344609 - DNA, 25 bp, Artificial
  probe
  misc_feature (1)..(25): SEQ ID NO: 3032; WAN024F4O; Start 203; Stop 227
gtttctgtagaatcgctatcaccaa

SEQ ID NO: 344610 - DNA, 25 bp, Artificial
  probe
  misc_feature (1)..(25): SEQ ID NO: 3032; WAN024F4O; Start 198; Stop 222
ctgtcgtttctgtagaatcgctatc

SEQ ID NO: 344611 - DNA, 25 bp, Artificial
  probe
  misc_feature (1)..(25): SEQ ID NO: 3032; WAN024F4O; Start 120; Stop 144
taagcaaatcaactttaacatccag

SEQ ID NO: 344612 - DNA, 25 bp, Artificial
  probe
  misc_feature (1)..(25): SEQ ID NO: 3032; WAN024F4O; Start 119; Stop 143
ctaagcaaatcaactttaacatcca

SEQ ID NO: 344613 - DNA, 25 bp, Artificial
  probe
  misc_feature (1)..(25): SEQ ID NO: 3032; WAN024F4O; Start 22; Stop 46
atgtccagagtcttcaaagatcatg

SEQ ID NO: 344614 - DNA, 25 bp, Artificial
  probe
  misc_feature (1)..(25): SEQ ID NO: 3032; WAN024F4O; Start 21; Stop 45
catgtccagagtcttcaaagatcat

SEQ ID NO: 344615 - DNA, 25 bp, Artificial
  probe
  misc_feature (1)..(25): SEQ ID NO: 3032; WAN024F4O; Start 241; Stop 265
tccatctaagcctgtcatcatttga

SEQ ID NO: 344616 - DNA, 25 bp, Artificial
  probe
  misc_feature (1)..(25): SEQ ID NO: 3032; WAN024F4O; Start 200; Stop 224
gtcgtttctgtagaatcgctatcac

SEQ ID NO: 344617 - DNA, 25 bp, Artificial
  probe
  misc_feature (1)..(25): SEQ ID NO: 3032; WAN024F4O; Start 197; Stop 221
tctgtcgtttctgtagaatcgctat

SEQ ID NO: 344618 - DNA, 25 bp, Artificial
  probe
  misc_feature (1)..(25): SEQ ID NO: 3032; WAN024F4O; Start 127; Stop 151
atcaactttaacatccagaccgtta

SEQ ID NO: 344619 - DNA, 25 bp, Artificial
  probe
  misc_feature (1)..(25): SEQ ID NO: 3032; WAN024F4O; Start 33; Stop 57
cttcaaagatcatggacttaggctg

SEQ ID NO: 344620 - DNA, 25 bp, Artificial
  probe
  misc_feature (1)..(25): SEQ ID NO: 3032; WAN024F4O; Start 199; Stop 223
tgtcgtttctgtagaatcgctatca

SEQ ID NO: 344621 - DNA, 25 bp, Artificial
  probe
  misc_feature (1)..(25): SEQ ID NO: 3032; WAN024F4O; Start 32; Stop 56
tcttcaaagatcatggacttaggct

SEQ ID NO: 344622 - DNA, 25 bp, Artificial
  probe
  misc_feature (1)..(25): SEQ ID NO: 3032; WAN024F4O; Start 239; Stop 263
cgtccatctaagcctgtcatcattt

SEQ ID NO: 344623 - DNA, 25 bp, Artificial
  probe
  misc_feature (1)..(25): SEQ ID NO: 3032; WAN024F4O; Start 31; Stop 55
gtcttcaaagatcatggacttaggc

SEQ ID NO: 344624 - DNA, 25 bp, Artificial
  probe
  misc_feature (1)..(25): SEQ ID NO: 3032; WAN024F4O; Start 201; Stop 225
tcgtttctgtagaatcgctatcacc

SEQ ID NO: 344625 - DNA, 25 bp, Artificial
  probe
  misc_feature (1)..(25): SEQ ID NO: 3032; WAN024F4O; Start 202; Stop 226
cgtttctgtagaatcgctatcacca

SEQ ID NO: 344626 - DNA, 25 bp, Artificial
  probe
  misc_feature (1)..(25): SEQ ID NO: 3032; WAN024F4O; Start 238; Stop 262
ccgtccatctaagcctgtcatcatt

SEQ ID NO: 344627 - DNA, 25 bp, Artificial
  probe
  misc_feature (1)..(25): SEQ ID NO: 3032; WAN024F4O; Start 206; Stop 230
tctgtagaatcgctatcaccaaaag

SEQ ID NO: 344628 - DNA, 25 bp, Artificial
  probe
  misc_feature (1)..(25): SEQ ID NO: 3032; WAN024F4O; Start 194; Stop 218
atttctgtcgtttctgtagaatcgc

SEQ ID NO: 344629 - DNA, 25 bp, Artificial
  probe
  misc_feature (1)..(25): SEQ ID NO: 3032; WAN024F4O; Start 34; Stop 58
ttcaaagatcatggacttaggctgc

SEQ ID NO: 344630 - DNA, 25 bp, Artificial
  probe
  misc_feature (1)..(25): SEQ ID NO: 3032; WAN024F4O; Start 196; Stop 220
ttctgtcgtttctgtagaatcgcta

SEQ ID NO: 344631 - DNA, 25 bp, Artificial
  probe
  misc_feature (1)..(25): SEQ ID NO: 3032; WAN024F4O; Start 23; Stop 47
tgtccagagtcttcaaagatcatgg

SEQ ID NO: 344632 - DNA, 25 bp, Artificial
  probe
  misc_feature (1)..(25): SEQ ID NO: 3032; WAN024F4O; Start 205; Stop 229
ttctgtagaatcgctatcaccaaaa

SEQ ID NO: 344633 - DNA, 25 bp, Artificial
  probe
  misc_feature (1)..(25): SEQ ID NO: 3033; WAN024BDF; Start 20; Stop 44
tctactaccagaactccatacatct

SEQ ID NO: 344634 - DNA, 25 bp, Artificial
  probe
  misc_feature (1)..(25): SEQ ID NO: 3033; WAN024BDF; Start 23; Stop 47
actaccagaactccatacatctatt

SEQ ID NO: 344635 - DNA, 25 bp, Artificial
  probe
  misc_feature (1)..(25): SEQ ID NO: 3033; WAN024BDF; Start 21; Stop 45
ctactaccagaactccatacatcta

SEQ ID NO: 344636 - DNA, 25 bp, Artificial
  probe
  misc_feature (1)..(25): SEQ ID NO: 3033; WAN024BDF; Start 22; Stop 46
tactaccagaactccatacatctat

SEQ ID NO: 344637 - DNA, 25 bp, Artificial
  probe
  misc_feature (1)..(25): SEQ ID NO: 3033; WAN024BDF; Start 154; Stop 178
tcattcatcttgcagcttatactct

SEQ ID NO: 344638 - DNA, 25 bp, Artificial
  probe
  misc_feature (1)..(25): SEQ ID NO: 3033; WAN024BDF; Start 127; Stop 151
gtcaacaacaacgtcaatacaagaa

SEQ ID NO: 344639 - DNA, 25 bp, Artificial
  probe
  misc_feature (1)..(25): SEQ ID NO: 3033; WAN024BDF; Start 2; Stop 26
tgttcatctctctccctttctacta

SEQ ID NO: 344640 - DNA, 25 bp, Artificial
  probe
  misc_feature (1)..(25): SEQ ID NO: 3033; WAN024BDF; Start 3; Stop 27
gttcatctctctccctttctactac

SEQ ID NO: 344641 - DNA, 25 bp, Artificial
  probe
  misc_feature (1)..(25): SEQ ID NO: 3033; WAN024BDF; Start 4; Stop 28
ttcatctctctccctttctactacc

SEQ ID NO: 344642 - DNA, 25 bp, Artificial
  probe
  misc_feature (1)..(25): SEQ ID NO: 3033; WAN024BDF; Start 1; Stop 25
atgttcatctctctccctttctact

SEQ ID NO: 344643 - DNA, 25 bp, Artificial
  probe
  misc_feature (1)..(25): SEQ ID NO: 3033; WAN024BDF; Start 155; Stop 179
cattcatcttgcagcttatactctt

SEQ ID NO: 344644 - DNA, 25 bp, Artificial
  probe
  misc_feature (1)..(25): SEQ ID NO: 3033; WAN024BDF; Start 67; Stop 91
atttcctaccagcctatcatctatg

SEQ ID NO: 344645 - DNA, 25 bp, Artificial
  probe
  misc_feature (1)..(25): SEQ ID NO: 3033; WAN024BDF; Start 157; Stop 181
ttcatcttgcagcttatactcttcg

SEQ ID NO: 344646 - DNA, 25 bp, Artificial
  probe
  misc_feature (1)..(25): SEQ ID NO: 3033; WAN024BDF; Start 156; Stop 180
attcatcttgcagcttatactcttc

SEQ ID NO: 344647 - DNA, 25 bp, Artificial
  probe
  misc_feature (1)..(25): SEQ ID NO: 3033; WAN024BDF; Start 153; Stop 177
atcattcatcttgcagcttatactc

SEQ ID NO: 344648 - DNA, 25 bp, Artificial
  probe
  misc_feature (1)..(25): SEQ ID NO: 3033; WAN024BDF; Start 6; Stop 30
catctctctccctttctactaccag

SEQ ID NO: 344649 - DNA, 25 bp, Artificial
  probe
  misc_feature (1)..(25): SEQ ID NO: 3033; WAN024BDF; Start 26; Stop 50
accagaactccatacatctatttcc

SEQ ID NO: 344650 - DNA, 25 bp, Artificial
  probe
  misc_feature (1)..(25): SEQ ID NO: 3033; WAN024BDF; Start 27; Stop 51
ccagaactccatacatctatttcct

SEQ ID NO: 344651 - DNA, 25 bp, Artificial
  probe
  misc_feature (1)..(25): SEQ ID NO: 3033; WAN024BDF; Start 152; Stop 176
aatcattcatcttgcagcttatact

SEQ ID NO: 344652 - DNA, 25 bp, Artificial
  probe
  misc_feature (1)..(25): SEQ ID NO: 3033; WAN024BDF; Start 5; Stop 29
tcatctctctccctttctactacca

SEQ ID NO: 344653 - DNA, 25 bp, Artificial
  probe
  misc_feature (1)..(25): SEQ ID NO: 3033; WAN024BDF; Start 66; Stop 90
aatttcctaccagcctatcatctat

SEQ ID NO: 344654 - DNA, 25 bp, Artificial
  probe
  misc_feature (1)..(25): SEQ ID NO: 3033; WAN024BDF; Start 158; Stop 182
tcatcttgcagcttatactcttcga

SEQ ID NO: 344655 - DNA, 25 bp, Artificial
  probe
  misc_feature (1)..(25): SEQ ID NO: 3033; WAN024BDF; Start 7; Stop 31
atctctctccctttctactaccaga

SEQ ID NO: 344656 - DNA, 25 bp, Artificial
  probe
  misc_feature (1)..(25): SEQ ID NO: 3033; WAN024BDF; Start 19; Stop 43
ttctactaccagaactccatacatc

SEQ ID NO: 344657 - DNA, 25 bp, Artificial
  probe
  misc_feature (1)..(25): SEQ ID NO: 3033; WAN024BDF; Start 68; Stop 92
tttcctaccagcctatcatctatga

SEQ ID NO: 344658 - DNA, 25 bp, Artificial
  probe
  misc_feature (1)..(25): SEQ ID NO: 3033; WAN024BDF; Start 126; Stop 150
tgtcaacaacaacgtcaatacaaga

SEQ ID NO: 344659 - DNA, 25 bp, Artificial
  probe
  misc_feature (1)..(25): SEQ ID NO: 3033; WAN024BDF; Start 29; Stop 53
agaactccatacatctatttcctgt

SEQ ID NO: 344660 - DNA, 25 bp, Artificial
  probe
  misc_feature (1)..(25): SEQ ID NO: 3033; WAN024BDF; Start 28; Stop 52
cagaactccatacatctatttcctg

SEQ ID NO: 344661 - DNA, 25 bp, Artificial
  probe
  misc_feature (1)..(25): SEQ ID NO: 3033; WAN024BDF; Start 69; Stop 93
ttcctaccagcctatcatctatgat

SEQ ID NO: 344662 - DNA, 25 bp, Artificial
  probe
  misc_feature (1)..(25): SEQ ID NO: 3033; WAN024BDF; Start 25; Stop 49
taccagaactccatacatctatttc

SEQ ID NO: 344663 - DNA, 25 bp, Artificial
  probe
  misc_feature (1)..(25): SEQ ID NO: 3033; WAN024BDF; Start 24; Stop 48
ctaccagaactccatacatctattt

SEQ ID NO: 344664 - DNA, 25 bp, Artificial
  probe
  misc_feature (1)..(25): SEQ ID NO: 3033; WAN024BDF; Start 128; Stop 152
tcaacaacaacgtcaatacaagaaa

SEQ ID NO: 344665 - DNA, 25 bp, Artificial
  probe
  misc_feature (1)..(25): SEQ ID NO: 3033; WAN024BDF; Start 65; Stop 89
aaatttcctaccagcctatcatcta

SEQ ID NO: 344666 - DNA, 25 bp, Artificial
  probe
  misc_feature (1)..(25): SEQ ID NO: 3034; WAN024DDF; Start 90; Stop 114
tcttaactatcttcactatctgcct

SEQ ID NO: 344667 - DNA, 25 bp, Artificial
  probe
  misc_feature (1)..(25): SEQ ID NO: 3034; WAN024DDF; Start 91; Stop 115
cttaactatcttcactatctgcctt

SEQ ID NO: 344668 - DNA, 25 bp, Artificial
  probe
  misc_feature (1)..(25): SEQ ID NO: 3034; WAN024DDF; Start 89; Stop 113
ttcttaactatcttcactatctgcc

SEQ ID NO: 344669 - DNA, 25 bp, Artificial
  probe
  misc_feature (1)..(25): SEQ ID NO: 3034; WAN024DDF; Start 96; Stop 120
ctatcttcactatctgcctttctca

SEQ ID NO: 344670 - DNA, 25 bp, Artificial
  probe
  misc_feature (1)..(25): SEQ ID NO: 3034; WAN024DDF; Start 95; Stop 119
actatcttcactatctgcctttctc

SEQ ID NO: 344671 - DNA, 25 bp, Artificial
  probe
  misc_feature (1)..(25): SEQ ID NO: 3034; WAN024DDF; Start 94; Stop 118
aactatcttcactatctgcctttct

SEQ ID NO: 344672 - DNA, 25 bp, Artificial
  probe
  misc_feature (1)..(25): SEQ ID NO: 3034; WAN024DDF; Start 88; Stop 112
cttcttaactatcttcactatctgc

SEQ ID NO: 344673 - DNA, 25 bp, Artificial
  probe
  misc_feature (1)..(25): SEQ ID NO: 3034; WAN024DDF; Start 93; Stop 117
taactatcttcactatctgcctttc

SEQ ID NO: 344674 - DNA, 25 bp, Artificial
  probe
  misc_feature (1)..(25): SEQ ID NO: 3034; WAN024DDF; Start 92; Stop 116
ttaactatcttcactatctgccttt

SEQ ID NO: 344675 - DNA, 25 bp, Artificial
  probe
  misc_feature (1)..(25): SEQ ID NO: 3034; WAN024DDF; Start 82; Stop 106
cctattcttcttaactatcttcact

SEQ ID NO: 344676 - DNA, 25 bp, Artificial
  probe
  misc_feature (1)..(25): SEQ ID NO: 3034; WAN024DDF; Start 81; Stop 105
tcctattcttcttaactatcttcac

SEQ ID NO: 344677 - DNA, 25 bp, Artificial
  probe
  misc_feature (1)..(25): SEQ ID NO: 3034; WAN024DDF; Start 87; Stop 111
tcttcttaactatcttcactatctg

SEQ ID NO: 344678 - DNA, 25 bp, Artificial
  probe
  misc_feature (1)..(25): SEQ ID NO: 3034; WAN024DDF; Start 16; Stop 40
ccccaacttctttatcttttcatta

SEQ ID NO: 344679 - DNA, 25 bp, Artificial
  probe
  misc_feature (1)..(25): SEQ ID NO: 3034; WAN024DDF; Start 17; Stop 41
cccaacttctttatcttttcattat

SEQ ID NO: 344680 - DNA, 25 bp, Artificial
  probe
  misc_feature (1)..(25): SEQ ID NO: 3034; WAN024DDF; Start 42; Stop 66
accatattttagaagttttccaaaa

SEQ ID NO: 344681 - DNA, 25 bp, Artificial
  probe
  misc_feature (1)..(25): SEQ ID NO: 3034; WAN024DDF; Start 74; Stop 98
aagaacatcctattcttcttaacta

SEQ ID NO: 344682 - DNA, 25 bp, Artificial
  probe
  misc_feature (1)..(25): SEQ ID NO: 3034; WAN024DDF; Start 73; Stop 97
aaagaacatcctattcttcttaact

SEQ ID NO: 344683 - DNA, 25 bp, Artificial
  probe
  misc_feature (1)..(25): SEQ ID NO: 3034; WAN024DDF; Start 72; Stop 96
aaaagaacatcctattcttcttaac

SEQ ID NO: 344684 - DNA, 25 bp, Artificial
  probe
  misc_feature (1)..(25): SEQ ID NO: 3035; WAN024DVA; Start 221; Stop 245
ctactattgccattgtcttgattgc

SEQ ID NO: 344685 - DNA, 25 bp, Artificial
  probe
  misc_feature (1)..(25): SEQ ID NO: 3035; WAN024DVA; Start 220; Stop 244
tctactattgccattgtcttgattg

SEQ ID NO: 344686 - DNA, 25 bp, Artificial
  probe
  misc_feature (1)..(25): SEQ ID NO: 3035; WAN024DVA; Start 219; Stop 243
ttctactattgccattgtcttgatt

SEQ ID NO: 344687 - DNA, 25 bp, Artificial
  probe
  misc_feature (1)..(25): SEQ ID NO: 3035; WAN024DVA; Start 222; Stop 246
tactattgccattgtcttgattgcg

SEQ ID NO: 344688 - DNA, 25 bp, Artificial
  probe
  misc_feature (1)..(25): SEQ ID NO: 3035; WAN024DVA; Start 408; Stop 432
gactatcagtgaagaacaggtcatt

SEQ ID NO: 344689 - DNA, 25 bp, Artificial
  probe
  misc_feature (1)..(25): SEQ ID NO: 3035; WAN024DVA; Start 402; Stop 426
gatcgtgactatcagtgaagaacag

SEQ ID NO: 344690 - DNA, 25 bp, Artificial
  probe
  misc_feature (1)..(25): SEQ ID NO: 3035; WAN024DVA; Start 403; Stop 427
atcgtgactatcagtgaagaacagg

SEQ ID NO: 344691 - DNA, 25 bp, Artificial
  probe
  misc_feature (1)..(25): SEQ ID NO: 3035; WAN024DVA; Start 470; Stop 494
cctttctctttcttcgtcctatgta

SEQ ID NO: 344692 - DNA, 25 bp, Artificial
  probe
  misc_feature (1)..(25): SEQ ID NO: 3035; WAN024DVA; Start 214; Stop 238
actgtttctactattgccattgtct

SEQ ID NO: 344693 - DNA, 25 bp, Artificial
  probe
  misc_feature (1)..(25): SEQ ID NO: 3035; WAN024DVA; Start 136; Stop 160
cagagtttgatgagtgataccctta

SEQ ID NO: 344694 - DNA, 25 bp, Artificial
  probe
  misc_feature (1)..(25): SEQ ID NO: 3035; WAN024DVA; Start 216; Stop 240
tgtttctactattgccattgtcttg

SEQ ID NO: 344695 - DNA, 25 bp, Artificial
  probe
  misc_feature (1)..(25): SEQ ID NO: 3035; WAN024DVA; Start 137; Stop 161
agagtttgatgagtgatacccttag

SEQ ID NO: 344696 - DNA, 25 bp, Artificial
  probe
  misc_feature (1)..(25): SEQ ID NO: 3035; WAN024DVA; Start 213; Stop 237
aactgtttctactattgccattgtc

SEQ ID NO: 344697 - DNA, 25 bp, Artificial
  probe
  misc_feature (1)..(25): SEQ ID NO: 3035; WAN024DVA; Start 217; Stop 241
gtttctactattgccattgtcttga

SEQ ID NO: 344698 - DNA, 25 bp, Artificial
  probe
  misc_feature (1)..(25): SEQ ID NO: 3035; WAN024DVA; Start 215; Stop 239
ctgtttctactattgccattgtctt

SEQ ID NO: 344699 - DNA, 25 bp, Artificial
  probe
  misc_feature (1)..(25): SEQ ID NO: 3035; WAN024DVA; Start 138; Stop 162
gagtttgatgagtgatacccttagc

SEQ ID NO: 344700 - DNA, 25 bp, Artificial
  probe
  misc_feature (1)..(25): SEQ ID NO: 3035; WAN024DVA; Start 212; Stop 236
caactgtttctactattgccattgt

SEQ ID NO: 344701 - DNA, 25 bp, Artificial
  probe
  misc_feature (1)..(25): SEQ ID NO: 3035; WAN024DVA; Start 211; Stop 235
ccaactgtttctactattgccattg

SEQ ID NO: 344702 - DNA, 25 bp, Artificial
  probe
  misc_feature (1)..(25): SEQ ID NO: 3035; WAN024DVA; Start 210; Stop 234
tccaactgtttctactattgccatt

SEQ ID NO: 344703 - DNA, 25 bp, Artificial
  probe
  misc_feature (1)..(25): SEQ ID NO: 3035; WAN024DVA; Start 469; Stop 493
acctttctctttcttcgtcctatgt

SEQ ID NO: 344704 - DNA, 25 bp, Artificial
  probe
  misc_feature (1)..(25): SEQ ID NO: 3035; WAN024DVA; Start 409; Stop 433
actatcagtgaagaacaggtcattt

SEQ ID NO: 344705 - DNA, 25 bp, Artificial
  probe
  misc_feature (1)..(25): SEQ ID NO: 3035; WAN024DVA; Start 218; Stop 242
tttctactattgccattgtcttgat

SEQ ID NO: 344706 - DNA, 25 bp, Artificial
  probe
  misc_feature (1)..(25): SEQ ID NO: 3035; WAN024DVA; Start 207; Stop 231
ttctccaactgtttctactattgcc

SEQ ID NO: 344707 - DNA, 25 bp, Artificial
  probe
  misc_feature (1)..(25): SEQ ID NO: 3035; WAN024DVA; Start 206; Stop 230
tttctccaactgtttctactattgc

SEQ ID NO: 344708 - DNA, 25 bp, Artificial
  probe
  misc_feature (1)..(25): SEQ ID NO: 3035; WAN024DVA; Start 209; Stop 233
ctccaactgtttctactattgccat

SEQ ID NO: 344709 - DNA, 25 bp, Artificial
  probe
  misc_feature (1)..(25): SEQ ID NO: 3035; WAN024DVA; Start 411; Stop 435
tatcagtgaagaacaggtcatttcc

SEQ ID NO: 344710 - DNA, 25 bp, Artificial
  probe
  misc_feature (1)..(25): SEQ ID NO: 3035; WAN024DVA; Start 410; Stop 434
ctatcagtgaagaacaggtcatttc

SEQ ID NO: 344711 - DNA, 25 bp, Artificial
  probe
  misc_feature (1)..(25): SEQ ID NO: 3035; WAN024DVA; Start 471; Stop 495
ctttctctttcttcgtcctatgtat

SEQ ID NO: 344712 - DNA, 25 bp, Artificial
  probe
  misc_feature (1)..(25): SEQ ID NO: 3035; WAN024DVA; Start 135; Stop 159
tcagagtttgatgagtgataccctt

SEQ ID NO: 344713 - DNA, 25 bp, Artificial
  probe
  misc_feature (1)..(25): SEQ ID NO: 3035; WAN024DVA; Start 631; Stop 655
attatggtcttgccagctagtattg

SEQ ID NO: 344714 - DNA, 25 bp, Artificial
  probe
  misc_feature (1)..(25): SEQ ID NO: 3035; WAN024DVA; Start 630; Stop 654
cattatggtcttgccagctagtatt

SEQ ID NO: 344715 - DNA, 25 bp, Artificial
  probe
  misc_feature (1)..(25): SEQ ID NO: 3035; WAN024DVA; Start 131; Stop 155
gtcgtcagagtttgatgagtgatac

SEQ ID NO: 344716 - DNA, 25 bp, Artificial
  probe
  misc_feature (1)..(25): SEQ ID NO: 3035; WAN024DVA; Start 139; Stop 163
agtttgatgagtgatacccttagcc

SEQ ID NO: 344717 - DNA, 25 bp, Artificial
  probe
  misc_feature (1)..(25): SEQ ID NO: 3036; WAN024CON; Start 30; Stop 54
tttccatagaaccctccatcgtttc

SEQ ID NO: 344718 - DNA, 25 bp, Artificial
  probe
  misc_feature (1)..(25): SEQ ID NO: 3036; WAN024CON; Start 29; Stop 53
gtttccatagaaccctccatcgttt

SEQ ID NO: 344719 - DNA, 25 bp, Artificial
  probe
  misc_feature (1)..(25): SEQ ID NO: 3036; WAN024CON; Start 44; Stop 68
tccatcgtttcgacctaatacattc

SEQ ID NO: 344720 - DNA, 25 bp, Artificial
  probe
  misc_feature (1)..(25): SEQ ID NO: 3036; WAN024CON; Start 43; Stop 67
ctccatcgtttcgacctaatacatt

SEQ ID NO: 344721 - DNA, 25 bp, Artificial
  probe
  misc_feature (1)..(25): SEQ ID NO: 3036; WAN024CON; Start 17; Stop 41
tttcagccactggtttccatagaac

SEQ ID NO: 344722 - DNA, 25 bp, Artificial
  probe
  misc_feature (1)..(25): SEQ ID NO: 3036; WAN024CON; Start 45; Stop 69
ccatcgtttcgacctaatacattcg

SEQ ID NO: 344723 - DNA, 25 bp, Artificial
  probe
  misc_feature (1)..(25): SEQ ID NO: 3036; WAN024CON; Start 42; Stop 66
cctccatcgtttcgacctaatacat

SEQ ID NO: 344724 - DNA, 25 bp, Artificial
  probe
  misc_feature (1)..(25): SEQ ID NO: 3036; WAN024CON; Start 1; Stop 25
atgttccaaaattccttttcagcca

SEQ ID NO: 344725 - DNA, 25 bp, Artificial
  probe
  misc_feature (1)..(25): SEQ ID NO: 3036; WAN024CON; Start 31; Stop 55
ttccatagaaccctccatcgtttcg

SEQ ID NO: 344726 - DNA, 25 bp, Artificial
  probe
  misc_feature (1)..(25): SEQ ID NO: 3036; WAN024CON; Start 8; Stop 32
aaaattccttttcagccactggttt

SEQ ID NO: 344727 - DNA, 25 bp, Artificial
  probe
  misc_feature (1)..(25): SEQ ID NO: 3036; WAN024CON; Start 9; Stop 33
aaattccttttcagccactggtttc

SEQ ID NO: 344728 - DNA, 25 bp, Artificial
  probe
  misc_feature (1)..(25): SEQ ID NO: 3036; WAN024CON; Start 4; Stop 28
ttccaaaattccttttcagccactg

SEQ ID NO: 344729 - DNA, 25 bp, Artificial
  probe
  misc_feature (1)..(25): SEQ ID NO: 3036; WAN024CON; Start 3; Stop 27
gttccaaaattccttttcagccact

SEQ ID NO: 344730 - DNA, 25 bp, Artificial
  probe
  misc_feature (1)..(25): SEQ ID NO: 3036; WAN024CON; Start 2; Stop 26
tgttccaaaattccttttcagccac

SEQ ID NO: 344731 - DNA, 25 bp, Artificial
  probe
  misc_feature (1)..(25): SEQ ID NO: 3036; WAN024CON; Start 7; Stop 31
caaaattccttttcagccactggtt

SEQ ID NO: 344732 - DNA, 25 bp, Artificial
  probe
  misc_feature (1)..(25): SEQ ID NO: 3036; WAN024CON; Start 16; Stop 40
ttttcagccactggtttccatagaa

SEQ ID NO: 344733 - DNA, 25 bp, Artificial
  probe
  misc_feature (1)..(25): SEQ ID NO: 3036; WAN024CON; Start 39; Stop 63
aaccctccatcgtttcgacctaata

SEQ ID NO: 344734 - DNA, 25 bp, Artificial
  probe
  misc_feature (1)..(25): SEQ ID NO: 3036; WAN024CON; Start 15; Stop 39
cttttcagccactggtttccataga

SEQ ID NO: 344735 - DNA, 25 bp, Artificial
  probe
  misc_feature (1)..(25): SEQ ID NO: 3036; WAN024CON; Start 52; Stop 76
ttcgacctaatacattcgagacgaa

SEQ ID NO: 344736 - DNA, 25 bp, Artificial
  probe
  misc_feature (1)..(25): SEQ ID NO: 3036; WAN024CON; Start 67; Stop 91
tcgagacgaattcagttagtcctga

SEQ ID NO: 344737 - DNA, 25 bp, Artificial
  probe
  misc_feature (1)..(25): SEQ ID NO: 3036; WAN024CON; Start 41; Stop 65
ccctccatcgtttcgacctaataca

SEQ ID NO: 344738 - DNA, 25 bp, Artificial
  probe
  misc_feature (1)..(25): SEQ ID NO: 3036; WAN024CON; Start 40; Stop 64
accctccatcgtttcgacctaatac

SEQ ID NO: 344739 - DNA, 25 bp, Artificial
  probe
  misc_feature (1)..(25): SEQ ID NO: 3036; WAN024CON; Start 10; Stop 34
aattccttttcagccactggtttcc

SEQ ID NO: 344740 - DNA, 25 bp, Artificial
  probe
  misc_feature (1)..(25): SEQ ID NO: 3036; WAN024CON; Start 66; Stop 90
ttcgagacgaattcagttagtcctg

SEQ ID NO: 344741 - DNA, 25 bp, Artificial
  probe
  misc_feature (1)..(25): SEQ ID NO: 3036; WAN024CON; Start 14; Stop 38
ccttttcagccactggtttccatag

SEQ ID NO: 344742 - DNA, 25 bp, Artificial
  probe
  misc_feature (1)..(25): SEQ ID NO: 3036; WAN024CON; Start 47; Stop 71
atcgtttcgacctaatacattcgag

SEQ ID NO: 344743 - DNA, 25 bp, Artificial
  probe
  misc_feature (1)..(25): SEQ ID NO: 3036; WAN024CON; Start 5; Stop 29
tccaaaattccttttcagccactgg

SEQ ID NO: 344744 - DNA, 25 bp, Artificial
  probe
  misc_feature (1)..(25): SEQ ID NO: 3036; WAN024CON; Start 46; Stop 70
catcgtttcgacctaatacattcga

SEQ ID NO: 344745 - DNA, 25 bp, Artificial
  probe
  misc_feature (1)..(25): SEQ ID NO: 3036; WAN024CON; Start 38; Stop 62
gaaccctccatcgtttcgacctaat

SEQ ID NO: 344746 - DNA, 25 bp, Artificial
  probe
  misc_feature (1)..(25): SEQ ID NO: 3036; WAN024CON; Start 50; Stop 74
gtttcgacctaatacattcgagacg

SEQ ID NO: 344747 - DNA, 25 bp, Artificial
  probe
  misc_feature (1)..(25): SEQ ID NO: 3036; WAN024CON; Start 49; Stop 73
cgtttcgacctaatacattcgagac

SEQ ID NO: 344748 - DNA, 25 bp, Artificial
  probe
  misc_feature (1)..(25): SEQ ID NO: 3036; WAN024CON; Start 51; Stop 75
tttcgacctaatacattcgagacga

SEQ ID NO: 344749 - DNA, 25 bp, Artificial
  probe
  misc_feature (1)..(25): SEQ ID NO: 3036; WAN024CON; Start 48; Stop 72
tcgtttcgacctaatacattcgaga

SEQ ID NO: 344750 - DNA, 25 bp, Artificial
  probe
  misc_feature (1)..(25): SEQ ID NO: 3037; WAN024F9U; Start 100; Stop 124
atgaccataaggacatcaccgacat

SEQ ID NO: 344751 - DNA, 25 bp, Artificial
  probe
  misc_feature (1)..(25): SEQ ID NO: 3037; WAN024F9U; Start 250; Stop 274
tctagaacaacaaggctaggaattc

SEQ ID NO: 344752 - DNA, 25 bp, Artificial
  probe
  misc_feature (1)..(25): SEQ ID NO: 3037; WAN024F9U; Start 11; Stop 35
ctactgtttccccattttctttgag

SEQ ID NO: 344753 - DNA, 25 bp, Artificial
  probe
  misc_feature (1)..(25): SEQ ID NO: 3037; WAN024F9U; Start 94; Stop 118
ttcacgatgaccataaggacatcac

SEQ ID NO: 344754 - DNA, 25 bp, Artificial
  probe
  misc_feature (1)..(25): SEQ ID NO: 3037; WAN024F9U; Start 10; Stop 34
gctactgtttccccattttctttga

SEQ ID NO: 344755 - DNA, 25 bp, Artificial
  probe
  misc_feature (1)..(25): SEQ ID NO: 3037; WAN024F9U; Start 101; Stop 125
tgaccataaggacatcaccgacatg

SEQ ID NO: 344756 - DNA, 25 bp, Artificial
  probe
  misc_feature (1)..(25): SEQ ID NO: 3037; WAN024F9U; Start 218; Stop 242
gattgacaaaacgaccgatttcctt

SEQ ID NO: 344757 - DNA, 25 bp, Artificial
  probe
  misc_feature (1)..(25): SEQ ID NO: 3037; WAN024F9U; Start 230; Stop 254
gaccgatttccttgtccttttctag

SEQ ID NO: 344758 - DNA, 25 bp, Artificial
  probe
  misc_feature (1)..(25): SEQ ID NO: 3037; WAN024F9U; Start 93; Stop 117
tttcacgatgaccataaggacatca

SEQ ID NO: 344759 - DNA, 25 bp, Artificial
  probe
  misc_feature (1)..(25): SEQ ID NO: 3037; WAN024F9U; Start 8; Stop 32
aagctactgtttccccattttcttt

SEQ ID NO: 344760 - DNA, 25 bp, Artificial
  probe
  misc_feature (1)..(25): SEQ ID NO: 3037; WAN024F9U; Start 219; Stop 243
attgacaaaacgaccgatttccttg

SEQ ID NO: 344761 - DNA, 25 bp, Artificial
  probe
  misc_feature (1)..(25): SEQ ID NO: 3037; WAN024F9U; Start 9; Stop 33
agctactgtttccccattttctttg

SEQ ID NO: 344762 - DNA, 25 bp, Artificial
  probe
  misc_feature (1)..(25): SEQ ID NO: 3037; WAN024F9U; Start 7; Stop 31
caagctactgtttccccattttctt

SEQ ID NO: 344763 - DNA, 25 bp, Artificial
  probe
  misc_feature (1)..(25): SEQ ID NO: 3037; WAN024F9U; Start 99; Stop 123
gatgaccataaggacatcaccgaca

SEQ ID NO: 344764 - DNA, 25 bp, Artificial
  probe
  misc_feature (1)..(25): SEQ ID NO: 3037; WAN024F9U; Start 95; Stop 119
tcacgatgaccataaggacatcacc

SEQ ID NO: 344765 - DNA, 25 bp, Artificial
  probe
  misc_feature (1)..(25): SEQ ID NO: 3037; WAN024F9U; Start 229; Stop 253
cgaccgatttccttgtccttttcta

SEQ ID NO: 344766 - DNA, 25 bp, Artificial
  probe
  misc_feature (1)..(25): SEQ ID NO: 3037; WAN024F9U; Start 106; Stop 130
ataaggacatcaccgacatgttctt

SEQ ID NO: 344767 - DNA, 25 bp, Artificial
  probe
  misc_feature (1)..(25): SEQ ID NO: 3037; WAN024F9U; Start 4; Stop 28
ttccaagctactgtttccccatttt

SEQ ID NO: 344768 - DNA, 25 bp, Artificial
  probe
  misc_feature (1)..(25): SEQ ID NO: 3037; WAN024F9U; Start 231; Stop 255
accgatttccttgtccttttctaga

SEQ ID NO: 344769 - DNA, 25 bp, Artificial
  probe
  misc_feature (1)..(25): SEQ ID NO: 3037; WAN024F9U; Start 226; Stop 250
aaacgaccgatttccttgtcctttt

SEQ ID NO: 344770 - DNA, 25 bp, Artificial
  probe
  misc_feature (1)..(25): SEQ ID NO: 3037; WAN024F9U; Start 225; Stop 249
aaaacgaccgatttccttgtccttt

SEQ ID NO: 344771 - DNA, 25 bp, Artificial
  probe
  misc_feature (1)..(25): SEQ ID NO: 3037; WAN024F9U; Start 92; Stop 116
ttttcacgatgaccataaggacatc

SEQ ID NO: 344772 - DNA, 25 bp, Artificial
  probe
  misc_feature (1)..(25): SEQ ID NO: 3037; WAN024F9U; Start 105; Stop 129
cataaggacatcaccgacatgttct

SEQ ID NO: 344773 - DNA, 25 bp, Artificial
  probe
  misc_feature (1)..(25): SEQ ID NO: 3037; WAN024F9U; Start 6; Stop 30
ccaagctactgtttccccattttct

SEQ ID NO: 344774 - DNA, 25 bp, Artificial
  probe
  misc_feature (1)..(25): SEQ ID NO: 3037; WAN024F9U; Start 5; Stop 29
tccaagctactgtttccccattttc

SEQ ID NO: 344775 - DNA, 25 bp, Artificial
  probe
  misc_feature (1)..(25): SEQ ID NO: 3037; WAN024F9U; Start 217; Stop 241
cgattgacaaaacgaccgatttcct

SEQ ID NO: 344776 - DNA, 25 bp, Artificial
  probe
  misc_feature (1)..(25): SEQ ID NO: 3037; WAN024F9U; Start 3; Stop 27
gttccaagctactgtttccccattt

SEQ ID NO: 344777 - DNA, 25 bp, Artificial
  probe
  misc_feature (1)..(25): SEQ ID NO: 3037; WAN024F9U; Start 227; Stop 251
aacgaccgatttccttgtccttttc

SEQ ID NO: 344778 - DNA, 25 bp, Artificial
  probe
  misc_feature (1)..(25): SEQ ID NO: 3037; WAN024F9U; Start 98; Stop 122
cgatgaccataaggacatcaccgac

SEQ ID NO: 344779 - DNA, 25 bp, Artificial
  probe
  misc_feature (1)..(25): SEQ ID NO: 3037; WAN024F9U; Start 224; Stop 248
caaaacgaccgatttccttgtcctt

SEQ ID NO: 344780 - DNA, 25 bp, Artificial
  probe
  misc_feature (1)..(25): SEQ ID NO: 3037; WAN024F9U; Start 104; Stop 128
ccataaggacatcaccgacatgttc

SEQ ID NO: 344781 - DNA, 25 bp, Artificial
  probe
  misc_feature (1)..(25): SEQ ID NO: 3037; WAN024F9U; Start 107; Stop 131
taaggacatcaccgacatgttcttt

SEQ ID NO: 344782 - DNA, 25 bp, Artificial
  probe
  misc_feature (1)..(25): SEQ ID NO: 3037; WAN024F9U; Start 1; Stop 25
atgttccaagctactgtttccccat

SEQ ID NO: 344783 - DNA, 25 bp, Artificial
  probe
  misc_feature (1)..(25): SEQ ID NO: 3038; WAN024DPP; Start 51; Stop 75
tagcagagggatggagaaattacta

SEQ ID NO: 344784 - DNA, 25 bp, Artificial
  probe
  misc_feature (1)..(25): SEQ ID NO: 3038; WAN024DPP; Start 49; Stop 73
tatagcagagggatggagaaattac

SEQ ID NO: 344785 - DNA, 25 bp, Artificial
  probe
  misc_feature (1)..(25): SEQ ID NO: 3038; WAN024DPP; Start 50; Stop 74
atagcagagggatggagaaattact

SEQ ID NO: 344786 - DNA, 25 bp, Artificial
  probe
  misc_feature (1)..(25): SEQ ID NO: 3038; WAN024DPP; Start 47; Stop 71
attatagcagagggatggagaaatt

SEQ ID NO: 344787 - DNA, 25 bp, Artificial
  probe
  misc_feature (1)..(25): SEQ ID NO: 3038; WAN024DPP; Start 45; Stop 69
ttattatagcagagggatggagaaa

SEQ ID NO: 344788 - DNA, 25 bp, Artificial
  probe
  misc_feature (1)..(25): SEQ ID NO: 3038; WAN024DPP; Start 44; Stop 68
tttattatagcagagggatggagaa

SEQ ID NO: 344789 - DNA, 25 bp, Artificial
  probe
  misc_feature (1)..(25): SEQ ID NO: 3038; WAN024DPP; Start 46; Stop 70
tattatagcagagggatggagaaat

SEQ ID NO: 344790 - DNA, 25 bp, Artificial
  probe
  misc_feature (1)..(25): SEQ ID NO: 3038; WAN024DPP; Start 48; Stop 72
ttatagcagagggatggagaaatta

SEQ ID NO: 344791 - DNA, 25 bp, Artificial
  probe
  misc_feature (1)..(25): SEQ ID NO: 3038; WAN024DPP; Start 52; Stop 76
agcagagggatggagaaattactag

SEQ ID NO: 344792 - DNA, 25 bp, Artificial
  probe
  misc_feature (1)..(25): SEQ ID NO: 3038; WAN024DPP; Start 54; Stop 78
cagagggatggagaaattactagcc

SEQ ID NO: 344793 - DNA, 25 bp, Artificial
  probe
  misc_feature (1)..(25): SEQ ID NO: 3038; WAN024DPP; Start 5; Stop 29
tccttcaaataaagaacctctctaa

SEQ ID NO: 344794 - DNA, 25 bp, Artificial
  probe
  misc_feature (1)..(25): SEQ ID NO: 3038; WAN024DPP; Start 4; Stop 28
ttccttcaaataaagaacctctcta

SEQ ID NO: 344795 - DNA, 25 bp, Artificial
  probe
  misc_feature (1)..(25): SEQ ID NO: 3038; WAN024DPP; Start 63; Stop 87
ggagaaattactagcccaaacccaa

SEQ ID NO: 344796 - DNA, 25 bp, Artificial
  probe
  misc_feature (1)..(25): SEQ ID NO: 3038; WAN024DPP; Start 53; Stop 77
gcagagggatggagaaattactagc

SEQ ID NO: 344797 - DNA, 25 bp, Artificial
  probe
  misc_feature (1)..(25): SEQ ID NO: 3038; WAN024DPP; Start 60; Stop 84
gatggagaaattactagcccaaacc

SEQ ID NO: 344798 - DNA, 25 bp, Artificial
  probe
  misc_feature (1)..(25): SEQ ID NO: 3038; WAN024DPP; Start 59; Stop 83
ggatggagaaattactagcccaaac

SEQ ID NO: 344799 - DNA, 25 bp, Artificial
  probe
  misc_feature (1)..(25): SEQ ID NO: 3038; WAN024DPP; Start 9; Stop 33
tcaaataaagaacctctctaatcct

SEQ ID NO: 344800 - DNA, 25 bp, Artificial
  probe
  misc_feature (1)..(25): SEQ ID NO: 3038; WAN024DPP; Start 43; Stop 67
ttttattatagcagagggatggaga

SEQ ID NO: 344801 - DNA, 25 bp, Artificial
  probe
  misc_feature (1)..(25): SEQ ID NO: 3038; WAN024DPP; Start 61; Stop 85
atggagaaattactagcccaaaccc

SEQ ID NO: 344802 - DNA, 25 bp, Artificial
  probe
  misc_feature (1)..(25): SEQ ID NO: 3038; WAN024DPP; Start 10; Stop 34
caaataaagaacctctctaatcctt

SEQ ID NO: 344803 - DNA, 25 bp, Artificial
  probe
  misc_feature (1)..(25): SEQ ID NO: 3038; WAN024DPP; Start 8; Stop 32
ttcaaataaagaacctctctaatcc

SEQ ID NO: 344804 - DNA, 25 bp, Artificial
  probe
  misc_feature (1)..(25): SEQ ID NO: 3038; WAN024DPP; Start 6; Stop 30
ccttcaaataaagaacctctctaat

SEQ ID NO: 344805 - DNA, 25 bp, Artificial
  probe
  misc_feature (1)..(25): SEQ ID NO: 3038; WAN024DPP; Start 58; Stop 82
gggatggagaaattactagcccaaa

SEQ ID NO: 344806 - DNA, 25 bp, Artificial
  probe
  misc_feature (1)..(25): SEQ ID NO: 3038; WAN024DPP; Start 2; Stop 26
tgttccttcaaataaagaacctctc

SEQ ID NO: 344807 - DNA, 25 bp, Artificial
  probe
  misc_feature (1)..(25): SEQ ID NO: 3038; WAN024DPP; Start 3; Stop 27
gttccttcaaataaagaacctctct

SEQ ID NO: 344808 - DNA, 25 bp, Artificial
  probe
  misc_feature (1)..(25): SEQ ID NO: 3038; WAN024DPP; Start 1; Stop 25
atgttccttcaaataaagaacctct

SEQ ID NO: 344809 - DNA, 25 bp, Artificial
  probe
  misc_feature (1)..(25): SEQ ID NO: 3038; WAN024DPP; Start 62; Stop 86
tggagaaattactagcccaaaccca

SEQ ID NO: 344810 - DNA, 25 bp, Artificial
  probe
  misc_feature (1)..(25): SEQ ID NO: 3038; WAN024DPP; Start 57; Stop 81
agggatggagaaattactagcccaa

SEQ ID NO: 344811 - DNA, 25 bp, Artificial
  probe
  misc_feature (1)..(25): SEQ ID NO: 3038; WAN024DPP; Start 7; Stop 31
cttcaaataaagaacctctctaatc

SEQ ID NO: 344812 - DNA, 25 bp, Artificial
  probe
  misc_feature (1)..(25): SEQ ID NO: 3038; WAN024DPP; Start 55; Stop 79
agagggatggagaaattactagccc

SEQ ID NO: 344813 - DNA, 25 bp, Artificial
  probe
  misc_feature (1)..(25): SEQ ID NO: 3038; WAN024DPP; Start 56; Stop 80
gagggatggagaaattactagccca

SEQ ID NO: 344814 - DNA, 25 bp, Artificial
  probe
  misc_feature (1)..(25): SEQ ID NO: 3038; WAN024DPP; Start 18; Stop 42
gaacctctctaatccttttatttct

SEQ ID NO: 344815 - DNA, 25 bp, Artificial
  probe
  misc_feature (1)..(25): SEQ ID NO: 3038; WAN024DPP; Start 17; Stop 41
agaacctctctaatccttttatttc

SEQ ID NO: 344816 - DNA, 25 bp, Artificial
  probe
  misc_feature (1)..(25): SEQ ID NO: 3039; WAN024C67; Start 224; Stop 248
taataacgagaagaaggattggtca

SEQ ID NO: 344817 - DNA, 25 bp, Artificial
  probe
  misc_feature (1)..(25): SEQ ID NO: 3039; WAN024C67; Start 225; Stop 249
aataacgagaagaaggattggtcac

SEQ ID NO: 344818 - DNA, 25 bp, Artificial
  probe
  misc_feature (1)..(25): SEQ ID NO: 3039; WAN024C67; Start 226; Stop 250
ataacgagaagaaggattggtcact

SEQ ID NO: 344819 - DNA, 25 bp, Artificial
  probe
  misc_feature (1)..(25): SEQ ID NO: 3039; WAN024C67; Start 223; Stop 247
ataataacgagaagaaggattggtc

SEQ ID NO: 344820 - DNA, 25 bp, Artificial
  probe
  misc_feature (1)..(25): SEQ ID NO: 3039; WAN024C67; Start 222; Stop 246
gataataacgagaagaaggattggt

SEQ ID NO: 344821 - DNA, 25 bp, Artificial
  probe
  misc_feature (1)..(25): SEQ ID NO: 3039; WAN024C67; Start 221; Stop 245
tgataataacgagaagaaggattgg

SEQ ID NO: 344822 - DNA, 25 bp, Artificial
  probe
  misc_feature (1)..(25): SEQ ID NO: 3039; WAN024C67; Start 227; Stop 251
taacgagaagaaggattggtcactt

SEQ ID NO: 344823 - DNA, 25 bp, Artificial
  probe
  misc_feature (1)..(25): SEQ ID NO: 3039; WAN024C67; Start 220; Stop 244
ttgataataacgagaagaaggattg

SEQ ID NO: 344824 - DNA, 25 bp, Artificial
  probe
  misc_feature (1)..(25): SEQ ID NO: 3039; WAN024C67; Start 231; Stop 255
gagaagaaggattggtcacttgctt

SEQ ID NO: 344825 - DNA, 25 bp, Artificial
  probe
  misc_feature (1)..(25): SEQ ID NO: 3039; WAN024C67; Start 228; Stop 252
aacgagaagaaggattggtcacttg

SEQ ID NO: 344826 - DNA, 25 bp, Artificial
  probe
  misc_feature (1)..(25): SEQ ID NO: 3039; WAN024C67; Start 66; Stop 90
agtattctttcatcagagacaaggt

SEQ ID NO: 344827 - DNA, 25 bp, Artificial
  probe
  misc_feature (1)..(25): SEQ ID NO: 3039; WAN024C67; Start 203; Stop 227
cgaacgacagtttcatcttgataat

SEQ ID NO: 344828 - DNA, 25 bp, Artificial
  probe
  misc_feature (1)..(25): SEQ ID NO: 3039; WAN024C67; Start 259; Stop 283
catctcctccaatttccgataagtg

SEQ ID NO: 344829 - DNA, 25 bp, Artificial
  probe
  misc_feature (1)..(25): SEQ ID NO: 3039; WAN024C67; Start 70; Stop 94
ttctttcatcagagacaaggtattg

SEQ ID NO: 344830 - DNA, 25 bp, Artificial
  probe
  misc_feature (1)..(25): SEQ ID NO: 3039; WAN024C67; Start 232; Stop 256
agaagaaggattggtcacttgcttg

SEQ ID NO: 344831 - DNA, 25 bp, Artificial
  probe
  misc_feature (1)..(25): SEQ ID NO: 3039; WAN024C67; Start 65; Stop 89
aagtattctttcatcagagacaagg

SEQ ID NO: 344832 - DNA, 25 bp, Artificial
  probe
  misc_feature (1)..(25): SEQ ID NO: 3039; WAN024C67; Start 219; Stop 243
cttgataataacgagaagaaggatt

SEQ ID NO: 344833 - DNA, 25 bp, Artificial
  probe
  misc_feature (1)..(25): SEQ ID NO: 3039; WAN024C67; Start 116; Stop 140
atttcataatcccaccagttcccaa

SEQ ID NO: 344834 - DNA, 25 bp, Artificial
  probe
  misc_feature (1)..(25): SEQ ID NO: 3039; WAN024C67; Start 207; Stop 231
cgacagtttcatcttgataataacg

SEQ ID NO: 344835 - DNA, 25 bp, Artificial
  probe
  misc_feature (1)..(25): SEQ ID NO: 3039; WAN024C67; Start 67; Stop 91
gtattctttcatcagagacaaggta

SEQ ID NO: 344836 - DNA, 25 bp, Artificial
  probe
  misc_feature (1)..(25): SEQ ID NO: 3039; WAN024C67; Start 270; Stop 294
atttccgataagtggcagtcagatt

SEQ ID NO: 344837 - DNA, 25 bp, Artificial
  probe
  misc_feature (1)..(25): SEQ ID NO: 3039; WAN024C67; Start 258; Stop 282
ccatctcctccaatttccgataagt

SEQ ID NO: 344838 - DNA, 25 bp, Artificial
  probe
  misc_feature (1)..(25): SEQ ID NO: 3039; WAN024C67; Start 69; Stop 93
attctttcatcagagacaaggtatt

SEQ ID NO: 344839 - DNA, 25 bp, Artificial
  probe
  misc_feature (1)..(25): SEQ ID NO: 3039; WAN024C67; Start 269; Stop 293
aatttccgataagtggcagtcagat

SEQ ID NO: 344840 - DNA, 25 bp, Artificial
  probe
  misc_feature (1)..(25): SEQ ID NO: 3039; WAN024C67; Start 271; Stop 295
tttccgataagtggcagtcagattt

SEQ ID NO: 344841 - DNA, 25 bp, Artificial
  probe
  misc_feature (1)..(25): SEQ ID NO: 3039; WAN024C67; Start 74; Stop 98
ttcatcagagacaaggtattgttga

SEQ ID NO: 344842 - DNA, 25 bp, Artificial
  probe
  misc_feature (1)..(25): SEQ ID NO: 3039; WAN024C67; Start 64; Stop 88
gaagtattctttcatcagagacaag

SEQ ID NO: 344843 - DNA, 25 bp, Artificial
  probe
  misc_feature (1)..(25): SEQ ID NO: 3039; WAN024C67; Start 75; Stop 99
tcatcagagacaaggtattgttgat

SEQ ID NO: 344844 - DNA, 25 bp, Artificial
  probe
  misc_feature (1)..(25): SEQ ID NO: 3039; WAN024C67; Start 77; Stop 101
atcagagacaaggtattgttgatgg

SEQ ID NO: 344845 - DNA, 25 bp, Artificial
  probe
  misc_feature (1)..(25): SEQ ID NO: 3039; WAN024C67; Start 202; Stop 226
tcgaacgacagtttcatcttgataa

SEQ ID NO: 344846 - DNA, 25 bp, Artificial
  probe
  misc_feature (1)..(25): SEQ ID NO: 3039; WAN024C67; Start 206; Stop 230
acgacagtttcatcttgataataac

SEQ ID NO: 344847 - DNA, 25 bp, Artificial
  probe
  misc_feature (1)..(25): SEQ ID NO: 3039; WAN024C67; Start 233; Stop 257
gaagaaggattggtcacttgcttgg

SEQ ID NO: 344848 - DNA, 25 bp, Artificial
  probe
  misc_feature (1)..(25): SEQ ID NO: 3039; WAN024C67; Start 216; Stop 240
catcttgataataacgagaagaagg

SEQ ID NO: 344849 - DNA, 25 bp, Artificial
  probe
  misc_feature (1)..(25): SEQ ID NO: 3040; WAN024COU; Start 72; Stop 96
tgagatattcacttccattgttgat

SEQ ID NO: 344850 - DNA, 25 bp, Artificial
  probe
  misc_feature (1)..(25): SEQ ID NO: 3040; WAN024COU; Start 71; Stop 95
atgagatattcacttccattgttga

SEQ ID NO: 344851 - DNA, 25 bp, Artificial
  probe
  misc_feature (1)..(25): SEQ ID NO: 3040; WAN024COU; Start 64; Stop 88
aacatcaatgagatattcacttcca

SEQ ID NO: 344852 - DNA, 25 bp, Artificial
  probe
  misc_feature (1)..(25): SEQ ID NO: 3040; WAN024COU; Start 65; Stop 89
acatcaatgagatattcacttccat

SEQ ID NO: 344853 - DNA, 25 bp, Artificial
  probe
  misc_feature (1)..(25): SEQ ID NO: 3040; WAN024COU; Start 50; Stop 74
gtagtaaaccacgaaacatcaatga

SEQ ID NO: 344854 - DNA, 25 bp, Artificial
  probe
  misc_feature (1)..(25): SEQ ID NO: 3040; WAN024COU; Start 53; Stop 77
gtaaaccacgaaacatcaatgagat

SEQ ID NO: 344855 - DNA, 25 bp, Artificial
  probe
  misc_feature (1)..(25): SEQ ID NO: 3040; WAN024COU; Start 51; Stop 75
tagtaaaccacgaaacatcaatgag

SEQ ID NO: 344856 - DNA, 25 bp, Artificial
  probe
  misc_feature (1)..(25): SEQ ID NO: 3040; WAN024COU; Start 52; Stop 76
agtaaaccacgaaacatcaatgaga

SEQ ID NO: 344857 - DNA, 25 bp, Artificial
  probe
  misc_feature (1)..(25): SEQ ID NO: 3040; WAN024COU; Start 57; Stop 81
accacgaaacatcaatgagatattc

SEQ ID NO: 344858 - DNA, 25 bp, Artificial
  probe
  misc_feature (1)..(25): SEQ ID NO: 3040; WAN024COU; Start 56; Stop 80
aaccacgaaacatcaatgagatatt

SEQ ID NO: 344859 - DNA, 25 bp, Artificial
  probe
  misc_feature (1)..(25): SEQ ID NO: 3040; WAN024COU; Start 55; Stop 79
aaaccacgaaacatcaatgagatat

SEQ ID NO: 344860 - DNA, 25 bp, Artificial
  probe
  misc_feature (1)..(25): SEQ ID NO: 3040; WAN024COU; Start 58; Stop 82
ccacgaaacatcaatgagatattca

SEQ ID NO: 344861 - DNA, 25 bp, Artificial
  probe
  misc_feature (1)..(25): SEQ ID NO: 3040; WAN024COU; Start 54; Stop 78
taaaccacgaaacatcaatgagata

SEQ ID NO: 344862 - DNA, 25 bp, Artificial
  probe
  misc_feature (1)..(25): SEQ ID NO: 3040; WAN024COU; Start 49; Stop 73
tgtagtaaaccacgaaacatcaatg

SEQ ID NO: 344863 - DNA, 25 bp, Artificial
  probe
  misc_feature (1)..(25): SEQ ID NO: 3040; WAN024COU; Start 59; Stop 83
cacgaaacatcaatgagatattcac

SEQ ID NO: 344864 - DNA, 25 bp, Artificial
  probe
  misc_feature (1)..(25): SEQ ID NO: 3040; WAN024COU; Start 60; Stop 84
acgaaacatcaatgagatattcact

SEQ ID NO: 344865 - DNA, 25 bp, Artificial
  probe
  misc_feature (1)..(25): SEQ ID NO: 3040; WAN024COU; Start 48; Stop 72
gtgtagtaaaccacgaaacatcaat

SEQ ID NO: 344866 - DNA, 25 bp, Artificial
  probe
  misc_feature (1)..(25): SEQ ID NO: 3040; WAN024COU; Start 75; Stop 99
gatattcacttccattgttgataga

SEQ ID NO: 344867 - DNA, 25 bp, Artificial
  probe
  misc_feature (1)..(25): SEQ ID NO: 3040; WAN024COU; Start 74; Stop 98
agatattcacttccattgttgatag

SEQ ID NO: 344868 - DNA, 25 bp, Artificial
  probe
  misc_feature (1)..(25): SEQ ID NO: 3040; WAN024COU; Start 73; Stop 97
gagatattcacttccattgttgata

SEQ ID NO: 344869 - DNA, 25 bp, Artificial
  probe
  misc_feature (1)..(25): SEQ ID NO: 3040; WAN024COU; Start 78; Stop 102
attcacttccattgttgatagaagc

SEQ ID NO: 344870 - DNA, 25 bp, Artificial
  probe
  misc_feature (1)..(25): SEQ ID NO: 3040; WAN024COU; Start 20; Stop 44
ttagcaatatatcgaggcttcatgt

SEQ ID NO: 344871 - DNA, 25 bp, Artificial
  probe
  misc_feature (1)..(25): SEQ ID NO: 3040; WAN024COU; Start 80; Stop 104
tcacttccattgttgatagaagcaa

SEQ ID NO: 344872 - DNA, 25 bp, Artificial
  probe
  misc_feature (1)..(25): SEQ ID NO: 3040; WAN024COU; Start 79; Stop 103
ttcacttccattgttgatagaagca

SEQ ID NO: 344873 - DNA, 25 bp, Artificial
  probe
  misc_feature (1)..(25): SEQ ID NO: 3040; WAN024COU; Start 70; Stop 94
aatgagatattcacttccattgttg

SEQ ID NO: 344874 - DNA, 25 bp, Artificial
  probe
  misc_feature (1)..(25): SEQ ID NO: 3040; WAN024COU; Start 21; Stop 45
tagcaatatatcgaggcttcatgtg

SEQ ID NO: 344875 - DNA, 25 bp, Artificial
  probe
  misc_feature (1)..(25): SEQ ID NO: 3040; WAN024COU; Start 61; Stop 85
cgaaacatcaatgagatattcactt

SEQ ID NO: 344876 - DNA, 25 bp, Artificial
  probe
  misc_feature (1)..(25): SEQ ID NO: 3040; WAN024COU; Start 76; Stop 100
atattcacttccattgttgatagaa

SEQ ID NO: 344877 - DNA, 25 bp, Artificial
  probe
  misc_feature (1)..(25): SEQ ID NO: 3040; WAN024COU; Start 66; Stop 90
catcaatgagatattcacttccatt

SEQ ID NO: 344878 - DNA, 25 bp, Artificial
  probe
  misc_feature (1)..(25): SEQ ID NO: 3040; WAN024COU; Start 63; Stop 87
aaacatcaatgagatattcacttcc

SEQ ID NO: 344879 - DNA, 25 bp, Artificial
  probe
  misc_feature (1)..(25): SEQ ID NO: 3040; WAN024COU; Start 84; Stop 108
ttccattgttgatagaagcaaacgt

SEQ ID NO: 344880 - DNA, 25 bp, Artificial
  probe
  misc_feature (1)..(25): SEQ ID NO: 3040; WAN024COU; Start 24; Stop 48
caatatatcgaggcttcatgtggcg

SEQ ID NO: 344881 - DNA, 25 bp, Artificial
  probe
  misc_feature (1)..(25): SEQ ID NO: 3040; WAN024COU; Start 82; Stop 106
acttccattgttgatagaagcaaac

SEQ ID NO: 344882 - DNA, 25 bp, Artificial
  probe
  misc_feature (1)..(25): SEQ ID NO: 3041; WAN024F3V; Start 59; Stop 83
tcaagaagaaattcaatggttcctg

SEQ ID NO: 344883 - DNA, 25 bp, Artificial
  probe
  misc_feature (1)..(25): SEQ ID NO: 3041; WAN024F3V; Start 192; Stop 216
tattcctttgaagagaacaatcccg

SEQ ID NO: 344884 - DNA, 25 bp, Artificial
  probe
  misc_feature (1)..(25): SEQ ID NO: 3041; WAN024F3V; Start 60; Stop 84
caagaagaaattcaatggttcctgc

SEQ ID NO: 344885 - DNA, 25 bp, Artificial
  probe
  misc_feature (1)..(25): SEQ ID NO: 3041; WAN024F3V; Start 58; Stop 82
atcaagaagaaattcaatggttcct

SEQ ID NO: 344886 - DNA, 25 bp, Artificial
  probe
  misc_feature (1)..(25): SEQ ID NO: 3041; WAN024F3V; Start 57; Stop 81
catcaagaagaaattcaatggttcc

SEQ ID NO: 344887 - DNA, 25 bp, Artificial
  probe
  misc_feature (1)..(25): SEQ ID NO: 3041; WAN024F3V; Start 191; Stop 215
ttattcctttgaagagaacaatccc

SEQ ID NO: 344888 - DNA, 25 bp, Artificial
  probe
  misc_feature (1)..(25): SEQ ID NO: 3041; WAN024F3V; Start 186; Stop 210
tttggttattcctttgaagagaaca

SEQ ID NO: 344889 - DNA, 25 bp, Artificial
  probe
  misc_feature (1)..(25): SEQ ID NO: 3041; WAN024F3V; Start 187; Stop 211
ttggttattcctttgaagagaacaa

SEQ ID NO: 344890 - DNA, 25 bp, Artificial
  probe
  misc_feature (1)..(25): SEQ ID NO: 3041; WAN024F3V; Start 188; Stop 212
tggttattcctttgaagagaacaat

SEQ ID NO: 344891 - DNA, 25 bp, Artificial
  probe
  misc_feature (1)..(25): SEQ ID NO: 3041; WAN024F3V; Start 4; Stop 28
ttctacctgaacacgagtattcatc

SEQ ID NO: 344892 - DNA, 25 bp, Artificial
  probe
  misc_feature (1)..(25): SEQ ID NO: 3041; WAN024F3V; Start 190; Stop 214
gttattcctttgaagagaacaatcc

SEQ ID NO: 344893 - DNA, 25 bp, Artificial
  probe
  misc_feature (1)..(25): SEQ ID NO: 3041; WAN024F3V; Start 189; Stop 213
ggttattcctttgaagagaacaatc

SEQ ID NO: 344894 - DNA, 25 bp, Artificial
  probe
  misc_feature (1)..(25): SEQ ID NO: 3041; WAN024F3V; Start 56; Stop 80
tcatcaagaagaaattcaatggttc

SEQ ID NO: 344895 - DNA, 25 bp, Artificial
  probe
  misc_feature (1)..(25): SEQ ID NO: 3041; WAN024F3V; Start 6; Stop 30
ctacctgaacacgagtattcatctc

SEQ ID NO: 344896 - DNA, 25 bp, Artificial
  probe
  misc_feature (1)..(25): SEQ ID NO: 3041; WAN024F3V; Start 5; Stop 29
tctacctgaacacgagtattcatct

SEQ ID NO: 344897 - DNA, 25 bp, Artificial
  probe
  misc_feature (1)..(25): SEQ ID NO: 3041; WAN024F3V; Start 84; Stop 108
cattctcatagccaacaaactctgc

SEQ ID NO: 344898 - DNA, 25 bp, Artificial
  probe
  misc_feature (1)..(25): SEQ ID NO: 3041; WAN024F3V; Start 83; Stop 107
gcattctcatagccaacaaactctg

SEQ ID NO: 344899 - DNA, 25 bp, Artificial
  probe
  misc_feature (1)..(25): SEQ ID NO: 3041; WAN024F3V; Start 69; Stop 93
attcaatggttcctgcattctcata

SEQ ID NO: 344900 - DNA, 25 bp, Artificial
  probe
  misc_feature (1)..(25): SEQ ID NO: 3041; WAN024F3V; Start 55; Stop 79
ttcatcaagaagaaattcaatggtt

SEQ ID NO: 344901 - DNA, 25 bp, Artificial
  probe
  misc_feature (1)..(25): SEQ ID NO: 3041; WAN024F3V; Start 10; Stop 34
ctgaacacgagtattcatctccatg

SEQ ID NO: 344902 - DNA, 25 bp, Artificial
  probe
  misc_feature (1)..(25): SEQ ID NO: 3041; WAN024F3V; Start 7; Stop 31
tacctgaacacgagtattcatctcc

SEQ ID NO: 344903 - DNA, 25 bp, Artificial
  probe
  misc_feature (1)..(25): SEQ ID NO: 3041; WAN024F3V; Start 193; Stop 217
attcctttgaagagaacaatcccgt

SEQ ID NO: 344904 - DNA, 25 bp, Artificial
  probe
  misc_feature (1)..(25): SEQ ID NO: 3041; WAN024F3V; Start 11; Stop 35
tgaacacgagtattcatctccatga

SEQ ID NO: 344905 - DNA, 25 bp, Artificial
  probe
  misc_feature (1)..(25): SEQ ID NO: 3041; WAN024F3V; Start 70; Stop 94
ttcaatggttcctgcattctcatag

SEQ ID NO: 344906 - DNA, 25 bp, Artificial
  probe
  misc_feature (1)..(25): SEQ ID NO: 3041; WAN024F3V; Start 68; Stop 92
aattcaatggttcctgcattctcat

SEQ ID NO: 344907 - DNA, 25 bp, Artificial
  probe
  misc_feature (1)..(25): SEQ ID NO: 3041; WAN024F3V; Start 194; Stop 218
ttcctttgaagagaacaatcccgtt

SEQ ID NO: 344908 - DNA, 25 bp, Artificial
  probe
  misc_feature (1)..(25): SEQ ID NO: 3041; WAN024F3V; Start 9; Stop 33
cctgaacacgagtattcatctccat

SEQ ID NO: 344909 - DNA, 25 bp, Artificial
  probe
  misc_feature (1)..(25): SEQ ID NO: 3041; WAN024F3V; Start 3; Stop 27
gttctacctgaacacgagtattcat

SEQ ID NO: 344910 - DNA, 25 bp, Artificial
  probe
  misc_feature (1)..(25): SEQ ID NO: 3041; WAN024F3V; Start 62; Stop 86
agaagaaattcaatggttcctgcat

SEQ ID NO: 344911 - DNA, 25 bp, Artificial
  probe
  misc_feature (1)..(25): SEQ ID NO: 3041; WAN024F3V; Start 61; Stop 85
aagaagaaattcaatggttcctgca

SEQ ID NO: 344912 - DNA, 25 bp, Artificial
  probe
  misc_feature (1)..(25): SEQ ID NO: 3041; WAN024F3V; Start 85; Stop 109
attctcatagccaacaaactctgcc

SEQ ID NO: 344913 - DNA, 25 bp, Artificial
  probe
  misc_feature (1)..(25): SEQ ID NO: 3041; WAN024F3V; Start 266; Stop 290
tcaatgtgccgagctggatagataa

SEQ ID NO: 344914 - DNA, 25 bp, Artificial
  probe
  misc_feature (1)..(25): SEQ ID NO: 3041; WAN024F3V; Start 183; Stop 207
ccttttggttattcctttgaagaga

SEQ ID NO: 344915 - DNA, 25 bp, Artificial
  probe
  misc_feature (1)..(25): SEQ ID NO: 3042; WAN024C9U; Start 64; Stop 88
tgtaataattcgctcagtcagatca

SEQ ID NO: 344916 - DNA, 25 bp, Artificial
  probe
  misc_feature (1)..(25): SEQ ID NO: 3042; WAN024C9U; Start 67; Stop 91
aataattcgctcagtcagatcattg

SEQ ID NO: 344917 - DNA, 25 bp, Artificial
  probe
  misc_feature (1)..(25): SEQ ID NO: 3042; WAN024C9U; Start 65; Stop 89
gtaataattcgctcagtcagatcat

SEQ ID NO: 344918 - DNA, 25 bp, Artificial
  probe
  misc_feature (1)..(25): SEQ ID NO: 3042; WAN024C9U; Start 68; Stop 92
ataattcgctcagtcagatcattga

SEQ ID NO: 344919 - DNA, 25 bp, Artificial
  probe
  misc_feature (1)..(25): SEQ ID NO: 3042; WAN024C9U; Start 66; Stop 90
taataattcgctcagtcagatcatt

SEQ ID NO: 344920 - DNA, 25 bp, Artificial
  probe
  misc_feature (1)..(25): SEQ ID NO: 3042; WAN024C9U; Start 63; Stop 87
ctgtaataattcgctcagtcagatc

SEQ ID NO: 344921 - DNA, 25 bp, Artificial
  probe
  misc_feature (1)..(25): SEQ ID NO: 3042; WAN024C9U; Start 21; Stop 45
tttcgtaaatcttaattccctgtgg

SEQ ID NO: 344922 - DNA, 25 bp, Artificial
  probe
  misc_feature (1)..(25): SEQ ID NO: 3042; WAN024C9U; Start 151; Stop 175
cttgtcaatcttgtccacatcaaat

SEQ ID NO: 344923 - DNA, 25 bp, Artificial
  probe
  misc_feature (1)..(25): SEQ ID NO: 3042; WAN024C9U; Start 154; Stop 178
gtcaatcttgtccacatcaaataca

SEQ ID NO: 344924 - DNA, 25 bp, Artificial
  probe
  misc_feature (1)..(25): SEQ ID NO: 3042; WAN024C9U; Start 153; Stop 177
tgtcaatcttgtccacatcaaatac

SEQ ID NO: 344925 - DNA, 25 bp, Artificial
  probe
  misc_feature (1)..(25): SEQ ID NO: 3042; WAN024C9U; Start 152; Stop 176
ttgtcaatcttgtccacatcaaata

SEQ ID NO: 344926 - DNA, 25 bp, Artificial
  probe
  misc_feature (1)..(25): SEQ ID NO: 3042; WAN024C9U; Start 60; Stop 84
tttctgtaataattcgctcagtcag

SEQ ID NO: 344927 - DNA, 25 bp, Artificial
  probe
  misc_feature (1)..(25): SEQ ID NO: 3042; WAN024C9U; Start 22; Stop 46
ttcgtaaatcttaattccctgtgga

SEQ ID NO: 344928 - DNA, 25 bp, Artificial
  probe
  misc_feature (1)..(25): SEQ ID NO: 3042; WAN024C9U; Start 59; Stop 83
atttctgtaataattcgctcagtca

SEQ ID NO: 344929 - DNA, 25 bp, Artificial
  probe
  misc_feature (1)..(25): SEQ ID NO: 3042; WAN024C9U; Start 150; Stop 174
ccttgtcaatcttgtccacatcaaa

SEQ ID NO: 344930 - DNA, 25 bp, Artificial
  probe
  misc_feature (1)..(25): SEQ ID NO: 3042; WAN024C9U; Start 20; Stop 44
atttcgtaaatcttaattccctgtg

SEQ ID NO: 344931 - DNA, 25 bp, Artificial
  probe
  misc_feature (1)..(25): SEQ ID NO: 3042; WAN024C9U; Start 58; Stop 82
aatttctgtaataattcgctcagtc

SEQ ID NO: 344932 - DNA, 25 bp, Artificial
  probe
  misc_feature (1)..(25): SEQ ID NO: 3042; WAN024C9U; Start 43; Stop 67
tggaaagcgactatgaatttctgta

SEQ ID NO: 344933 - DNA, 25 bp, Artificial
  probe
  misc_feature (1)..(25): SEQ ID NO: 3042; WAN024C9U; Start 44; Stop 68
ggaaagcgactatgaatttctgtaa

SEQ ID NO: 344934 - DNA, 25 bp, Artificial
  probe
  misc_feature (1)..(25): SEQ ID NO: 3042; WAN024C9U; Start 149; Stop 173
gccttgtcaatcttgtccacatcaa

SEQ ID NO: 344935 - DNA, 25 bp, Artificial
  probe
  misc_feature (1)..(25): SEQ ID NO: 3042; WAN024C9U; Start 110; Stop 134
ggtgtcacatccataaccttgtcag

SEQ ID NO: 344936 - DNA, 25 bp, Artificial
  probe
  misc_feature (1)..(25): SEQ ID NO: 3042; WAN024C9U; Start 147; Stop 171
gagccttgtcaatcttgtccacatc

SEQ ID NO: 344937 - DNA, 25 bp, Artificial
  probe
  misc_feature (1)..(25): SEQ ID NO: 3042; WAN024C9U; Start 111; Stop 135
gtgtcacatccataaccttgtcagc

SEQ ID NO: 344938 - DNA, 25 bp, Artificial
  probe
  misc_feature (1)..(25): SEQ ID NO: 3042; WAN024C9U; Start 61; Stop 85
ttctgtaataattcgctcagtcaga

SEQ ID NO: 344939 - DNA, 25 bp, Artificial
  probe
  misc_feature (1)..(25): SEQ ID NO: 3042; WAN024C9U; Start 62; Stop 86
tctgtaataattcgctcagtcagat

SEQ ID NO: 344940 - DNA, 25 bp, Artificial
  probe
  misc_feature (1)..(25): SEQ ID NO: 3042; WAN024C9U; Start 40; Stop 64
ctgtggaaagcgactatgaatttct

SEQ ID NO: 344941 - DNA, 25 bp, Artificial
  probe
  misc_feature (1)..(25): SEQ ID NO: 3042; WAN024C9U; Start 69; Stop 93
taattcgctcagtcagatcattgag

SEQ ID NO: 344942 - DNA, 25 bp, Artificial
  probe
  misc_feature (1)..(25): SEQ ID NO: 3042; WAN024C9U; Start 42; Stop 66
gtggaaagcgactatgaatttctgt

SEQ ID NO: 344943 - DNA, 25 bp, Artificial
  probe
  misc_feature (1)..(25): SEQ ID NO: 3042; WAN024C9U; Start 41; Stop 65
tgtggaaagcgactatgaatttctg

SEQ ID NO: 344944 - DNA, 25 bp, Artificial
  probe
  misc_feature (1)..(25): SEQ ID NO: 3042; WAN024C9U; Start 169; Stop 193
atcaaatacaacacgtctcccatct

SEQ ID NO: 344945 - DNA, 25 bp, Artificial
  probe
  misc_feature (1)..(25): SEQ ID NO: 3042; WAN024C9U; Start 168; Stop 192
catcaaatacaacacgtctcccatc

SEQ ID NO: 344946 - DNA, 25 bp, Artificial
  probe
  misc_feature (1)..(25): SEQ ID NO: 3042; WAN024C9U; Start 47; Stop 71
aagcgactatgaatttctgtaataa

SEQ ID NO: 344947 - DNA, 25 bp, Artificial
  probe
  misc_feature (1)..(25): SEQ ID NO: 3042; WAN024C9U; Start 46; Stop 70
aaagcgactatgaatttctgtaata

SEQ ID NO: 344948 - DNA, 25 bp, Artificial
  probe
  misc_feature (1)..(25): SEQ ID NO: 3043; WAN024D8P; Start 81; Stop 105
atattattatggagattctgcctgg

SEQ ID NO: 344949 - DNA, 25 bp, Artificial
  probe
  misc_feature (1)..(25): SEQ ID NO: 3043; WAN024D8P; Start 58; Stop 82
ttgtataacggtattggagggaaat

SEQ ID NO: 344950 - DNA, 25 bp, Artificial
  probe
  misc_feature (1)..(25): SEQ ID NO: 3043; WAN024D8P; Start 57; Stop 81
attgtataacggtattggagggaaa

SEQ ID NO: 344951 - DNA, 25 bp, Artificial
  probe
  misc_feature (1)..(25): SEQ ID NO: 3043; WAN024D8P; Start 56; Stop 80
cattgtataacggtattggagggaa

SEQ ID NO: 344952 - DNA, 25 bp, Artificial
  probe
  misc_feature (1)..(25): SEQ ID NO: 3043; WAN024D8P; Start 82; Stop 106
tattattatggagattctgcctggg

SEQ ID NO: 344953 - DNA, 25 bp, Artificial
  probe
  misc_feature (1)..(25): SEQ ID NO: 3043; WAN024D8P; Start 54; Stop 78
aacattgtataacggtattggaggg

SEQ ID NO: 344954 - DNA, 25 bp, Artificial
  probe
  misc_feature (1)..(25): SEQ ID NO: 3043; WAN024D8P; Start 83; Stop 107
attattatggagattctgcctggga

SEQ ID NO: 344955 - DNA, 25 bp, Artificial
  probe
  misc_feature (1)..(25): SEQ ID NO: 3043; WAN024D8P; Start 53; Stop 77
aaacattgtataacggtattggagg

SEQ ID NO: 344956 - DNA, 25 bp, Artificial
  probe
  misc_feature (1)..(25): SEQ ID NO: 3043; WAN024D8P; Start 59; Stop 83
tgtataacggtattggagggaaata

SEQ ID NO: 344957 - DNA, 25 bp, Artificial
  probe
  misc_feature (1)..(25): SEQ ID NO: 3043; WAN024D8P; Start 84; Stop 108
ttattatggagattctgcctgggaa

SEQ ID NO: 344958 - DNA, 25 bp, Artificial
  probe
  misc_feature (1)..(25): SEQ ID NO: 3043; WAN024D8P; Start 55; Stop 79
acattgtataacggtattggaggga

SEQ ID NO: 344959 - DNA, 25 bp, Artificial
  probe
  misc_feature (1)..(25): SEQ ID NO: 3043; WAN024D8P; Start 92; Stop 116
gagattctgcctgggaacatttaag

SEQ ID NO: 344960 - DNA, 25 bp, Artificial
  probe
  misc_feature (1)..(25): SEQ ID NO: 3043; WAN024D8P; Start 51; Stop 75
agaaacattgtataacggtattgga

SEQ ID NO: 344961 - DNA, 25 bp, Artificial
  probe
  misc_feature (1)..(25): SEQ ID NO: 3043; WAN024D8P; Start 94; Stop 118
gattctgcctgggaacatttaagag

SEQ ID NO: 344962 - DNA, 25 bp, Artificial
  probe
  misc_feature (1)..(25): SEQ ID NO: 3043; WAN024D8P; Start 52; Stop 76
gaaacattgtataacggtattggag

SEQ ID NO: 344963 - DNA, 25 bp, Artificial
  probe
  misc_feature (1)..(25): SEQ ID NO: 3043; WAN024D8P; Start 85; Stop 109
tattatggagattctgcctgggaac

SEQ ID NO: 344964 - DNA, 25 bp, Artificial
  probe
  misc_feature (1)..(25): SEQ ID NO: 3043; WAN024D8P; Start 93; Stop 117
agattctgcctgggaacatttaaga

SEQ ID NO: 344965 - DNA, 25 bp, Artificial
  probe
  misc_feature (1)..(25): SEQ ID NO: 3043; WAN024D8P; Start 60; Stop 84
gtataacggtattggagggaaatat

SEQ ID NO: 344966 - DNA, 25 bp, Artificial
  probe
  misc_feature (1)..(25): SEQ ID NO: 3043; WAN024D8P; Start 37; Stop 61
attcagcaaactttagaaacattgt

SEQ ID NO: 344967 - DNA, 25 bp, Artificial
  probe
  misc_feature (1)..(25): SEQ ID NO: 3043; WAN024D8P; Start 38; Stop 62
ttcagcaaactttagaaacattgta

SEQ ID NO: 344968 - DNA, 25 bp, Artificial
  probe
  misc_feature (1)..(25): SEQ ID NO: 3043; WAN024D8P; Start 91; Stop 115
ggagattctgcctgggaacatttaa

SEQ ID NO: 344969 - DNA, 25 bp, Artificial
  probe
  misc_feature (1)..(25): SEQ ID NO: 3043; WAN024D8P; Start 39; Stop 63
tcagcaaactttagaaacattgtat

SEQ ID NO: 344970 - DNA, 25 bp, Artificial
  probe
  misc_feature (1)..(25): SEQ ID NO: 3043; WAN024D8P; Start 80; Stop 104
aatattattatggagattctgcctg

SEQ ID NO: 344971 - DNA, 25 bp, Artificial
  probe
  misc_feature (1)..(25): SEQ ID NO: 3043; WAN024D8P; Start 36; Stop 60
aattcagcaaactttagaaacattg

SEQ ID NO: 344972 - DNA, 25 bp, Artificial
  probe
  misc_feature (1)..(25): SEQ ID NO: 3043; WAN024D8P; Start 64; Stop 88
aacggtattggagggaaatattatt

SEQ ID NO: 344973 - DNA, 25 bp, Artificial
  probe
  misc_feature (1)..(25): SEQ ID NO: 3043; WAN024D8P; Start 50; Stop 74
tagaaacattgtataacggtattgg

SEQ ID NO: 344974 - DNA, 25 bp, Artificial
  probe
  misc_feature (1)..(25): SEQ ID NO: 3043; WAN024D8P; Start 45; Stop 69
aactttagaaacattgtataacggt

SEQ ID NO: 344975 - DNA, 25 bp, Artificial
  probe
  misc_feature (1)..(25): SEQ ID NO: 3043; WAN024D8P; Start 5; Stop 29
tctactatccaaatagaactcaagc

SEQ ID NO: 344976 - DNA, 25 bp, Artificial
  probe
  misc_feature (1)..(25): SEQ ID NO: 3043; WAN024D8P; Start 95; Stop 119
attctgcctgggaacatttaagagc

SEQ ID NO: 344977 - DNA, 25 bp, Artificial
  probe
  misc_feature (1)..(25): SEQ ID NO: 3043; WAN024D8P; Start 35; Stop 59
aaattcagcaaactttagaaacatt

SEQ ID NO: 344978 - DNA, 25 bp, Artificial
  probe
  misc_feature (1)..(25): SEQ ID NO: 3043; WAN024D8P; Start 65; Stop 89
acggtattggagggaaatattatta

SEQ ID NO: 344979 - DNA, 25 bp, Artificial
  probe
  misc_feature (1)..(25): SEQ ID NO: 3043; WAN024D8P; Start 63; Stop 87
taacggtattggagggaaatattat

SEQ ID NO: 344980 - DNA, 25 bp, Artificial
  probe
  misc_feature (1)..(25): SEQ ID NO: 3043; WAN024D8P; Start 62; Stop 86
ataacggtattggagggaaatatta

SEQ ID NO: 344981 - DNA, 25 bp, Artificial
  probe
  misc_feature (1)..(25): SEQ ID NO: 3044; WAN024FOP; Start 154; Stop 178
tgcctgatcttggatattcaattct

SEQ ID NO: 344982 - DNA, 25 bp, Artificial
  probe
  misc_feature (1)..(25): SEQ ID NO: 3044; WAN024FOP; Start 153; Stop 177
ctgcctgatcttggatattcaattc

SEQ ID NO: 344983 - DNA, 25 bp, Artificial
  probe
  misc_feature (1)..(25): SEQ ID NO: 3044; WAN024FOP; Start 155; Stop 179
gcctgatcttggatattcaattctt

SEQ ID NO: 344984 - DNA, 25 bp, Artificial
  probe
  misc_feature (1)..(25): SEQ ID NO: 3044; WAN024FOP; Start 152; Stop 176
cctgcctgatcttggatattcaatt

SEQ ID NO: 344985 - DNA, 25 bp, Artificial
  probe
  misc_feature (1)..(25): SEQ ID NO: 3044; WAN024FOP; Start 201; Stop 225
ccaaaccaacatagataaagacacc

SEQ ID NO: 344986 - DNA, 25 bp, Artificial
  probe
  misc_feature (1)..(25): SEQ ID NO: 3044; WAN024FOP; Start 208; Stop 232
aacatagataaagacaccaccgaag

SEQ ID NO: 344987 - DNA, 25 bp, Artificial
  probe
  misc_feature (1)..(25): SEQ ID NO: 3044; WAN024FOP; Start 204; Stop 228
aaccaacatagataaagacaccacc

SEQ ID NO: 344988 - DNA, 25 bp, Artificial
  probe
  misc_feature (1)..(25): SEQ ID NO: 3044; WAN024FOP; Start 207; Stop 231
caacatagataaagacaccaccgaa

SEQ ID NO: 344989 - DNA, 25 bp, Artificial
  probe
  misc_feature (1)..(25): SEQ ID NO: 3044; WAN024FOP; Start 203; Stop 227
aaaccaacatagataaagacaccac

SEQ ID NO: 344990 - DNA, 25 bp, Artificial
  probe
  misc_feature (1)..(25): SEQ ID NO: 3044; WAN024FOP; Start 202; Stop 226
caaaccaacatagataaagacacca

SEQ ID NO: 344991 - DNA, 25 bp, Artificial
  probe
  misc_feature (1)..(25): SEQ ID NO: 3044; WAN024FOP; Start 308; Stop 332
ttcactacagaatcccagataaagc

SEQ ID NO: 344992 - DNA, 25 bp, Artificial
  probe
  misc_feature (1)..(25): SEQ ID NO: 3044; WAN024FOP; Start 306; Stop 330
ccttcactacagaatcccagataaa

SEQ ID NO: 344993 - DNA, 25 bp, Artificial
  probe
  misc_feature (1)..(25): SEQ ID NO: 3044; WAN024FOP; Start 305; Stop 329
tccttcactacagaatcccagataa

SEQ ID NO: 344994 - DNA, 25 bp, Artificial
  probe
  misc_feature (1)..(25): SEQ ID NO: 3044; WAN024FOP; Start 304; Stop 328
ttccttcactacagaatcccagata

SEQ ID NO: 344995 - DNA, 25 bp, Artificial
  probe
  misc_feature (1)..(25): SEQ ID NO: 3044; WAN024FOP; Start 200; Stop 224
tccaaaccaacatagataaagacac

SEQ ID NO: 344996 - DNA, 25 bp, Artificial
  probe
  misc_feature (1)..(25): SEQ ID NO: 3044; WAN024FOP; Start 303; Stop 327
tttccttcactacagaatcccagat

SEQ ID NO: 344997 - DNA, 25 bp, Artificial
  probe
  misc_feature (1)..(25): SEQ ID NO: 3044; WAN024FOP; Start 302; Stop 326
atttccttcactacagaatcccaga

SEQ ID NO: 344998 - DNA, 25 bp, Artificial
  probe
  misc_feature (1)..(25): SEQ ID NO: 3044; WAN024FOP; Start 296; Stop 320
cccttgatttccttcactacagaat

SEQ ID NO: 344999 - DNA, 25 bp, Artificial
  probe
  misc_feature (1)..(25): SEQ ID NO: 3044; WAN024FOP; Start 307; Stop 331
cttcactacagaatcccagataaag

SEQ ID NO: 345000 - DNA, 25 bp, Artificial
  probe
  misc_feature (1)..(25): SEQ ID NO: 3044; WAN024FOP; Start 291; Stop 315
tttcacccttgatttccttcactac

SEQ ID NO: 345001 - DNA, 25 bp, Artificial
  probe
  misc_feature (1)..(25): SEQ ID NO: 3044; WAN024FOP; Start 209; Stop 233
acatagataaagacaccaccgaagg

SEQ ID NO: 345002 - DNA, 25 bp, Artificial
  probe
  misc_feature (1)..(25): SEQ ID NO: 3044; WAN024FOP; Start 295; Stop 319
acccttgatttccttcactacagaa

SEQ ID NO: 345003 - DNA, 25 bp, Artificial
  probe
  misc_feature (1)..(25): SEQ ID NO: 3044; WAN024FOP; Start 199; Stop 223
gtccaaaccaacatagataaagaca

SEQ ID NO: 345004 - DNA, 25 bp, Artificial
  probe
  misc_feature (1)..(25): SEQ ID NO: 3044; WAN024FOP; Start 206; Stop 230
ccaacatagataaagacaccaccga

SEQ ID NO: 345005 - DNA, 25 bp, Artificial
  probe
  misc_feature (1)..(25): SEQ ID NO: 3044; WAN024FOP; Start 292; Stop 316
ttcacccttgatttccttcactaca

SEQ ID NO: 345006 - DNA, 25 bp, Artificial
  probe
  misc_feature (1)..(25): SEQ ID NO: 3044; WAN024FOP; Start 205; Stop 229
accaacatagataaagacaccaccg

SEQ ID NO: 345007 - DNA, 25 bp, Artificial
  probe
  misc_feature (1)..(25): SEQ ID NO: 3044; WAN024FOP; Start 198; Stop 222
ggtccaaaccaacatagataaagac

SEQ ID NO: 345008 - DNA, 25 bp, Artificial
  probe
  misc_feature (1)..(25): SEQ ID NO: 3044; WAN024FOP; Start 309; Stop 333
tcactacagaatcccagataaagct

SEQ ID NO: 345009 - DNA, 25 bp, Artificial
  probe
  misc_feature (1)..(25): SEQ ID NO: 3044; WAN024FOP; Start 299; Stop 323
ttgatttccttcactacagaatccc

SEQ ID NO: 345010 - DNA, 25 bp, Artificial
  probe
  misc_feature (1)..(25): SEQ ID NO: 3044; WAN024FOP; Start 294; Stop 318
cacccttgatttccttcactacaga

SEQ ID NO: 345011 - DNA, 25 bp, Artificial
  probe
  misc_feature (1)..(25): SEQ ID NO: 3044; WAN024FOP; Start 293; Stop 317
tcacccttgatttccttcactacag

SEQ ID NO: 345012 - DNA, 25 bp, Artificial
  probe
  misc_feature (1)..(25): SEQ ID NO: 3044; WAN024FOP; Start 197; Stop 221
gggtccaaaccaacatagataaaga

SEQ ID NO: 345013 - DNA, 25 bp, Artificial
  probe
  misc_feature (1)..(25): SEQ ID NO: 3044; WAN024FOP; Start 196; Stop 220
agggtccaaaccaacatagataaag

SEQ ID NO: 345014 - DNA, 25 bp, Artificial
  probe
  misc_feature (1)..(25): SEQ ID NO: 3045; WAN024CRR; Start 120; Stop 144
attcttccttcacaatcatagcaat

SEQ ID NO: 345015 - DNA, 25 bp, Artificial
  probe
  misc_feature (1)..(25): SEQ ID NO: 3045; WAN024CRR; Start 121; Stop 145
ttcttccttcacaatcatagcaata

SEQ ID NO: 345016 - DNA, 25 bp, Artificial
  probe
  misc_feature (1)..(25): SEQ ID NO: 3045; WAN024CRR; Start 119; Stop 143
tattcttccttcacaatcatagcaa

SEQ ID NO: 345017 - DNA, 25 bp, Artificial
  probe
  misc_feature (1)..(25): SEQ ID NO: 3045; WAN024CRR; Start 124; Stop 148
ttccttcacaatcatagcaatatca

SEQ ID NO: 345018 - DNA, 25 bp, Artificial
  probe
  misc_feature (1)..(25): SEQ ID NO: 3045; WAN024CRR; Start 125; Stop 149
tccttcacaatcatagcaatatcat

SEQ ID NO: 345019 - DNA, 25 bp, Artificial
  probe
  misc_feature (1)..(25): SEQ ID NO: 3045; WAN024CRR; Start 122; Stop 146
tcttccttcacaatcatagcaatat

SEQ ID NO: 345020 - DNA, 25 bp, Artificial
  probe
  misc_feature (1)..(25): SEQ ID NO: 3045; WAN024CRR; Start 118; Stop 142
atattcttccttcacaatcatagca

SEQ ID NO: 345021 - DNA, 25 bp, Artificial
  probe
  misc_feature (1)..(25): SEQ ID NO: 3045; WAN024CRR; Start 123; Stop 147
cttccttcacaatcatagcaatatc

SEQ ID NO: 345022 - DNA, 25 bp, Artificial
  probe
  misc_feature (1)..(25): SEQ ID NO: 3045; WAN024CRR; Start 117; Stop 141
catattcttccttcacaatcatagc

SEQ ID NO: 345023 - DNA, 25 bp, Artificial
  probe
  misc_feature (1)..(25): SEQ ID NO: 3045; WAN024CRR; Start 113; Stop 137
ttaccatattcttccttcacaatca

SEQ ID NO: 345024 - DNA, 25 bp, Artificial
  probe
  misc_feature (1)..(25): SEQ ID NO: 3045; WAN024CRR; Start 115; Stop 139
accatattcttccttcacaatcata

SEQ ID NO: 345025 - DNA, 25 bp, Artificial
  probe
  misc_feature (1)..(25): SEQ ID NO: 3045; WAN024CRR; Start 114; Stop 138
taccatattcttccttcacaatcat

SEQ ID NO: 345026 - DNA, 25 bp, Artificial
  probe
  misc_feature (1)..(25): SEQ ID NO: 3045; WAN024CRR; Start 116; Stop 140
ccatattcttccttcacaatcatag

SEQ ID NO: 345027 - DNA, 25 bp, Artificial
  probe
  misc_feature (1)..(25): SEQ ID NO: 3045; WAN024CRR; Start 140; Stop 164
gcaatatcataaatggctttcggaa

SEQ ID NO: 345028 - DNA, 25 bp, Artificial
  probe
  misc_feature (1)..(25): SEQ ID NO: 3045; WAN024CRR; Start 112; Stop 136
attaccatattcttccttcacaatc

SEQ ID NO: 345029 - DNA, 25 bp, Artificial
  probe
  misc_feature (1)..(25): SEQ ID NO: 3045; WAN024CRR; Start 126; Stop 150
ccttcacaatcatagcaatatcata

SEQ ID NO: 345030 - DNA, 25 bp, Artificial
  probe
  misc_feature (1)..(25): SEQ ID NO: 3045; WAN024CRR; Start 214; Stop 238
ctctttgaagtattggtctggcatc

SEQ ID NO: 345031 - DNA, 25 bp, Artificial
  probe
  misc_feature (1)..(25): SEQ ID NO: 3045; WAN024CRR; Start 141; Stop 165
caatatcataaatggctttcggaaa

SEQ ID NO: 345032 - DNA, 25 bp, Artificial
  probe
  misc_feature (1)..(25): SEQ ID NO: 3045; WAN024CRR; Start 213; Stop 237
actctttgaagtattggtctggcat

SEQ ID NO: 345033 - DNA, 25 bp, Artificial
  probe
  misc_feature (1)..(25): SEQ ID NO: 3045; WAN024CRR; Start 287; Stop 311
ggatggtagtagtttactccaagaa

SEQ ID NO: 345034 - DNA, 25 bp, Artificial
  probe
  misc_feature (1)..(25): SEQ ID NO: 3045; WAN024CRR; Start 109; Stop 133
gatattaccatattcttccttcaca

SEQ ID NO: 345035 - DNA, 25 bp, Artificial
  probe
  misc_feature (1)..(25): SEQ ID NO: 3045; WAN024CRR; Start 215; Stop 239
tctttgaagtattggtctggcatcc

SEQ ID NO: 345036 - DNA, 25 bp, Artificial
  probe
  misc_feature (1)..(25): SEQ ID NO: 3045; WAN024CRR; Start 108; Stop 132
ggatattaccatattcttccttcac

SEQ ID NO: 345037 - DNA, 25 bp, Artificial
  probe
  misc_feature (1)..(25): SEQ ID NO: 3045; WAN024CRR; Start 166; Stop 190
aatttcccaaccacgatatggattc

SEQ ID NO: 345038 - DNA, 25 bp, Artificial
  probe
  misc_feature (1)..(25): SEQ ID NO: 3045; WAN024CRR; Start 212; Stop 236
tactctttgaagtattggtctggca

SEQ ID NO: 345039 - DNA, 25 bp, Artificial
  probe
  misc_feature (1)..(25): SEQ ID NO: 3045; WAN024CRR; Start 24; Stop 48
gatacacgtcatcgataactccatt

SEQ ID NO: 345040 - DNA, 25 bp, Artificial
  probe
  misc_feature (1)..(25): SEQ ID NO: 3045; WAN024CRR; Start 138; Stop 162
tagcaatatcataaatggctttcgg

SEQ ID NO: 345041 - DNA, 25 bp, Artificial
  probe
  misc_feature (1)..(25): SEQ ID NO: 3045; WAN024CRR; Start 248; Stop 272
tgatattcctcaggatttgcttgtg

SEQ ID NO: 345042 - DNA, 25 bp, Artificial
  probe
  misc_feature (1)..(25): SEQ ID NO: 3045; WAN024CRR; Start 288; Stop 312
gatggtagtagtttactccaagaaa

SEQ ID NO: 345043 - DNA, 25 bp, Artificial
  probe
  misc_feature (1)..(25): SEQ ID NO: 3045; WAN024CRR; Start 111; Stop 135
tattaccatattcttccttcacaat

SEQ ID NO: 345044 - DNA, 25 bp, Artificial
  probe
  misc_feature (1)..(25): SEQ ID NO: 3045; WAN024CRR; Start 139; Stop 163
agcaatatcataaatggctttcgga

SEQ ID NO: 345045 - DNA, 25 bp, Artificial
  probe
  misc_feature (1)..(25): SEQ ID NO: 3045; WAN024CRR; Start 132; Stop 156
caatcatagcaatatcataaatggc

SEQ ID NO: 345046 - DNA, 25 bp, Artificial
  probe
  misc_feature (1)..(25): SEQ ID NO: 3045; WAN024CRR; Start 110; Stop 134
atattaccatattcttccttcacaa

SEQ ID NO: 345047 - DNA, 25 bp, Artificial
  probe
  misc_feature (1)..(25): SEQ ID NO: 3046; WAN024E2Z; Start 229; Stop 253
gataacgtatggaagcaagatagca

SEQ ID NO: 345048 - DNA, 25 bp, Artificial
  probe
  misc_feature (1)..(25): SEQ ID NO: 3046; WAN024E2Z; Start 230; Stop 254
ataacgtatggaagcaagatagcat

SEQ ID NO: 345049 - DNA, 25 bp, Artificial
  probe
  misc_feature (1)..(25): SEQ ID NO: 3046; WAN024E2Z; Start 231; Stop 255
taacgtatggaagcaagatagcatt

SEQ ID NO: 345050 - DNA, 25 bp, Artificial
  probe
  misc_feature (1)..(25): SEQ ID NO: 3046; WAN024E2Z; Start 227; Stop 251
cggataacgtatggaagcaagatag

SEQ ID NO: 345051 - DNA, 25 bp, Artificial
  probe
  misc_feature (1)..(25): SEQ ID NO: 3046; WAN024E2Z; Start 228; Stop 252
ggataacgtatggaagcaagatagc

SEQ ID NO: 345052 - DNA, 25 bp, Artificial
  probe
  misc_feature (1)..(25): SEQ ID NO: 3046; WAN024E2Z; Start 18; Stop 42
tttcgtcaattccttggtctctaaa

SEQ ID NO: 345053 - DNA, 25 bp, Artificial
  probe
  misc_feature (1)..(25): SEQ ID NO: 3046; WAN024E2Z; Start 235; Stop 259
gtatggaagcaagatagcatttgta

SEQ ID NO: 345054 - DNA, 25 bp, Artificial
  probe
  misc_feature (1)..(25): SEQ ID NO: 3046; WAN024E2Z; Start 236; Stop 260
tatggaagcaagatagcatttgtac

SEQ ID NO: 345055 - DNA, 25 bp, Artificial
  probe
  misc_feature (1)..(25): SEQ ID NO: 3046; WAN024E2Z; Start 234; Stop 258
cgtatggaagcaagatagcatttgt

SEQ ID NO: 345056 - DNA, 25 bp, Artificial
  probe
  misc_feature (1)..(25): SEQ ID NO: 3046; WAN024E2Z; Start 160; Stop 184
ttcatctgcacggtagtagttgtac

SEQ ID NO: 345057 - DNA, 25 bp, Artificial
  probe
  misc_feature (1)..(25): SEQ ID NO: 3046; WAN024E2Z; Start 163; Stop 187
atctgcacggtagtagttgtactta

SEQ ID NO: 345058 - DNA, 25 bp, Artificial
  probe
  misc_feature (1)..(25): SEQ ID NO: 3046; WAN024E2Z; Start 237; Stop 261
atggaagcaagatagcatttgtacg

SEQ ID NO: 345059 - DNA, 25 bp, Artificial
  probe
  misc_feature (1)..(25): SEQ ID NO: 3046; WAN024E2Z; Start 164; Stop 188
tctgcacggtagtagttgtacttag

SEQ ID NO: 345060 - DNA, 25 bp, Artificial
  probe
  misc_feature (1)..(25): SEQ ID NO: 3046; WAN024E2Z; Start 240; Stop 264
gaagcaagatagcatttgtacgacc

SEQ ID NO: 345061 - DNA, 25 bp, Artificial
  probe
  misc_feature (1)..(25): SEQ ID NO: 3046; WAN024E2Z; Start 239; Stop 263
ggaagcaagatagcatttgtacgac

SEQ ID NO: 345062 - DNA, 25 bp, Artificial
  probe
  misc_feature (1)..(25): SEQ ID NO: 3046; WAN024E2Z; Start 232; Stop 256
aacgtatggaagcaagatagcattt

SEQ ID NO: 345063 - DNA, 25 bp, Artificial
  probe
  misc_feature (1)..(25): SEQ ID NO: 3046; WAN024E2Z; Start 238; Stop 262
tggaagcaagatagcatttgtacga

SEQ ID NO: 345064 - DNA, 25 bp, Artificial
  probe
  misc_feature (1)..(25): SEQ ID NO: 3046; WAN024E2Z; Start 182; Stop 206
tacttaggccatgttgctgtcttag

SEQ ID NO: 345065 - DNA, 25 bp, Artificial
  probe
  misc_feature (1)..(25): SEQ ID NO: 3046; WAN024E2Z; Start 173; Stop 197
tagtagttgtacttaggccatgttg

SEQ ID NO: 345066 - DNA, 25 bp, Artificial
  probe
  misc_feature (1)..(25): SEQ ID NO: 3046; WAN024E2Z; Start 172; Stop 196
gtagtagttgtacttaggccatgtt

SEQ ID NO: 345067 - DNA, 25 bp, Artificial
  probe
  misc_feature (1)..(25): SEQ ID NO: 3046; WAN024E2Z; Start 162; Stop 186
catctgcacggtagtagttgtactt

SEQ ID NO: 345068 - DNA, 25 bp, Artificial
  probe
  misc_feature (1)..(25): SEQ ID NO: 3046; WAN024E2Z; Start 159; Stop 183
tttcatctgcacggtagtagttgta

SEQ ID NO: 345069 - DNA, 25 bp, Artificial
  probe
  misc_feature (1)..(25): SEQ ID NO: 3046; WAN024E2Z; Start 165; Stop 189
ctgcacggtagtagttgtacttagg

SEQ ID NO: 345070 - DNA, 25 bp, Artificial
  probe
  misc_feature (1)..(25): SEQ ID NO: 3046; WAN024E2Z; Start 181; Stop 205
gtacttaggccatgttgctgtctta

SEQ ID NO: 345071 - DNA, 25 bp, Artificial
  probe
  misc_feature (1)..(25): SEQ ID NO: 3046; WAN024E2Z; Start 233; Stop 257
acgtatggaagcaagatagcatttg

SEQ ID NO: 345072 - DNA, 25 bp, Artificial
  probe
  misc_feature (1)..(25): SEQ ID NO: 3046; WAN024E2Z; Start 29; Stop 53
ccttggtctctaaaattcatttgga

SEQ ID NO: 345073 - DNA, 25 bp, Artificial
  probe
  misc_feature (1)..(25): SEQ ID NO: 3046; WAN024E2Z; Start 28; Stop 52
tccttggtctctaaaattcatttgg

SEQ ID NO: 345074 - DNA, 25 bp, Artificial
  probe
  misc_feature (1)..(25): SEQ ID NO: 3046; WAN024E2Z; Start 226; Stop 250
acggataacgtatggaagcaagata

SEQ ID NO: 345075 - DNA, 25 bp, Artificial
  probe
  misc_feature (1)..(25): SEQ ID NO: 3046; WAN024E2Z; Start 247; Stop 271
gatagcatttgtacgaccgtggatt

SEQ ID NO: 345076 - DNA, 25 bp, Artificial
  probe
  misc_feature (1)..(25): SEQ ID NO: 3046; WAN024E2Z; Start 171; Stop 195
ggtagtagttgtacttaggccatgt

SEQ ID NO: 345077 - DNA, 25 bp, Artificial
  probe
  misc_feature (1)..(25): SEQ ID NO: 3046; WAN024E2Z; Start 224; Stop 248
taacggataacgtatggaagcaaga

SEQ ID NO: 345078 - DNA, 25 bp, Artificial
  probe
  misc_feature (1)..(25): SEQ ID NO: 3046; WAN024E2Z; Start 223; Stop 247
gtaacggataacgtatggaagcaag

SEQ ID NO: 345079 - DNA, 25 bp, Artificial
  probe
  misc_feature (1)..(25): SEQ ID NO: 3046; WAN024E2Z; Start 20; Stop 44
tcgtcaattccttggtctctaaaat

SEQ ID NO: 345080 - DNA, 25 bp, Artificial
  probe
  misc_feature (1)..(25): SEQ ID NO: 3047; WAN024G4T; Start 33; Stop 57
taacctcatccataggaagcaactg

SEQ ID NO: 345081 - DNA, 25 bp, Artificial
  probe
  misc_feature (1)..(25): SEQ ID NO: 3047; WAN024G4T; Start 32; Stop 56
gtaacctcatccataggaagcaact

SEQ ID NO: 345082 - DNA, 25 bp, Artificial
  probe
  misc_feature (1)..(25): SEQ ID NO: 3047; WAN024G4T; Start 260; Stop 284
tttggaatcccgataatcatggtac

SEQ ID NO: 345083 - DNA, 25 bp, Artificial
  probe
  misc_feature (1)..(25): SEQ ID NO: 3047; WAN024G4T; Start 259; Stop 283
gtttggaatcccgataatcatggta

SEQ ID NO: 345084 - DNA, 25 bp, Artificial
  probe
  misc_feature (1)..(25): SEQ ID NO: 3047; WAN024G4T; Start 273; Stop 297
taatcatggtacgcaaggtttcaat

SEQ ID NO: 345085 - DNA, 25 bp, Artificial
  probe
  misc_feature (1)..(25): SEQ ID NO: 3047; WAN024G4T; Start 272; Stop 296
ataatcatggtacgcaaggtttcaa

SEQ ID NO: 345086 - DNA, 25 bp, Artificial
  probe
  misc_feature (1)..(25): SEQ ID NO: 3047; WAN024G4T; Start 65; Stop 89
atagctccagtcaatgccaacttaa

SEQ ID NO: 345087 - DNA, 25 bp, Artificial
  probe
  misc_feature (1)..(25): SEQ ID NO: 3047; WAN024G4T; Start 309; Stop 333
gttctttctggcgagcaatcttatc

SEQ ID NO: 345088 - DNA, 25 bp, Artificial
  probe
  misc_feature (1)..(25): SEQ ID NO: 3047; WAN024G4T; Start 374; Stop 398
gtcacttgctctttggagttgatag

SEQ ID NO: 345089 - DNA, 25 bp, Artificial
  probe
  misc_feature (1)..(25): SEQ ID NO: 3047; WAN024G4T; Start 271; Stop 295
gataatcatggtacgcaaggtttca

SEQ ID NO: 345090 - DNA, 25 bp, Artificial
  probe
  misc_feature (1)..(25): SEQ ID NO: 3047; WAN024G4T; Start 310; Stop 334
ttctttctggcgagcaatcttatca

SEQ ID NO: 345091 - DNA, 25 bp, Artificial
  probe
  misc_feature (1)..(25): SEQ ID NO: 3047; WAN024G4T; Start 373; Stop 397
agtcacttgctctttggagttgata

SEQ ID NO: 345092 - DNA, 25 bp, Artificial
  probe
  misc_feature (1)..(25): SEQ ID NO: 3047; WAN024G4T; Start 64; Stop 88
gatagctccagtcaatgccaactta

SEQ ID NO: 345093 - DNA, 25 bp, Artificial
  probe
  misc_feature (1)..(25): SEQ ID NO: 3047; WAN024G4T; Start 31; Stop 55
ggtaacctcatccataggaagcaac

SEQ ID NO: 345094 - DNA, 25 bp, Artificial
  probe
  misc_feature (1)..(25): SEQ ID NO: 3047; WAN024G4T; Start 325; Stop 349
aatcttatcagccatgagcttcttg

SEQ ID NO: 345095 - DNA, 25 bp, Artificial
  probe
  misc_feature (1)..(25): SEQ ID NO: 3047; WAN024G4T; Start 324; Stop 348
caatcttatcagccatgagcttctt

SEQ ID NO: 345096 - DNA, 25 bp, Artificial
  probe
  misc_feature (1)..(25): SEQ ID NO: 3047; WAN024G4T; Start 274; Stop 298
aatcatggtacgcaaggtttcaatc

SEQ ID NO: 345097 - DNA, 25 bp, Artificial
  probe
  misc_feature (1)..(25): SEQ ID NO: 3047; WAN024G4T; Start 369; Stop 393
ttacagtcacttgctctttggagtt

SEQ ID NO: 345098 - DNA, 25 bp, Artificial
  probe
  misc_feature (1)..(25): SEQ ID NO: 3047; WAN024G4T; Start 368; Stop 392
tttacagtcacttgctctttggagt

SEQ ID NO: 345099 - DNA, 25 bp, Artificial
  probe
  misc_feature (1)..(25): SEQ ID NO: 3047; WAN024G4T; Start 270; Stop 294
cgataatcatggtacgcaaggtttc

SEQ ID NO: 345100 - DNA, 25 bp, Artificial
  probe
  misc_feature (1)..(25): SEQ ID NO: 3047; WAN024G4T; Start 86; Stop 110
ttaagtgcaacagtttcatcctcaa

SEQ ID NO: 345101 - DNA, 25 bp, Artificial
  probe
  misc_feature (1)..(25): SEQ ID NO: 3047; WAN024G4T; Start 87; Stop 111
taagtgcaacagtttcatcctcaaa

SEQ ID NO: 345102 - DNA, 25 bp, Artificial
  probe
  misc_feature (1)..(25): SEQ ID NO: 3047; WAN024G4T; Start 30; Stop 54
tggtaacctcatccataggaagcaa

SEQ ID NO: 345103 - DNA, 25 bp, Artificial
  probe
  misc_feature (1)..(25): SEQ ID NO: 3047; WAN024G4T; Start 261; Stop 285
ttggaatcccgataatcatggtacg

SEQ ID NO: 345104 - DNA, 25 bp, Artificial
  probe
  misc_feature (1)..(25): SEQ ID NO: 3047; WAN024G4T; Start 275; Stop 299
atcatggtacgcaaggtttcaatct

SEQ ID NO: 345105 - DNA, 25 bp, Artificial
  probe
  misc_feature (1)..(25): SEQ ID NO: 3047; WAN024G4T; Start 370; Stop 394
tacagtcacttgctctttggagttg

SEQ ID NO: 345106 - DNA, 25 bp, Artificial
  probe
  misc_feature (1)..(25): SEQ ID NO: 3047; WAN024G4T; Start 66; Stop 90
tagctccagtcaatgccaacttaag

SEQ ID NO: 345107 - DNA, 25 bp, Artificial
  probe
  misc_feature (1)..(25): SEQ ID NO: 3047; WAN024G4T; Start 161; Stop 185
gttttaagccattgttgaccttttg

SEQ ID NO: 345108 - DNA, 25 bp, Artificial
  probe
  misc_feature (1)..(25): SEQ ID NO: 3047; WAN024G4T; Start 162; Stop 186
ttttaagccattgttgaccttttgt

SEQ ID NO: 345109 - DNA, 25 bp, Artificial
  probe
  misc_feature (1)..(25): SEQ ID NO: 3047; WAN024G4T; Start 85; Stop 109
cttaagtgcaacagtttcatcctca

SEQ ID NO: 345110 - DNA, 25 bp, Artificial
  probe
  misc_feature (1)..(25): SEQ ID NO: 3047; WAN024G4T; Start 265; Stop 289
aatcccgataatcatggtacgcaag

SEQ ID NO: 345111 - DNA, 25 bp, Artificial
  probe
  misc_feature (1)..(25): SEQ ID NO: 3047; WAN024G4T; Start 264; Stop 288
gaatcccgataatcatggtacgcaa

SEQ ID NO: 345112 - DNA, 25 bp, Artificial
  probe
  misc_feature (1)..(25): SEQ ID NO: 3047; WAN024G4T; Start 311; Stop 335
tctttctggcgagcaatcttatcag

SEQ ID NO: 345113 - DNA, 25 bp, Artificial
  probe
  misc_feature (1)..(25): SEQ ID NO: 3048; WAN024D2O; Start 243; Stop 267
tccagtgttattagcattcggttat

SEQ ID NO: 345114 - DNA, 25 bp, Artificial
  probe
  misc_feature (1)..(25): SEQ ID NO: 3048; WAN024D2O; Start 242; Stop 266
ttccagtgttattagcattcggtta

SEQ ID NO: 345115 - DNA, 25 bp, Artificial
  probe
  misc_feature (1)..(25): SEQ ID NO: 3048; WAN024D2O; Start 244; Stop 268
ccagtgttattagcattcggttatt

SEQ ID NO: 345116 - DNA, 25 bp, Artificial
  probe
  misc_feature (1)..(25): SEQ ID NO: 3048; WAN024D2O; Start 531; Stop 555
tgcgaacagtctctataataatcct

SEQ ID NO: 345117 - DNA, 25 bp, Artificial
  probe
  misc_feature (1)..(25): SEQ ID NO: 3048; WAN024D2O; Start 248; Stop 272
tgttattagcattcggttattgtca

SEQ ID NO: 345118 - DNA, 25 bp, Artificial
  probe
  misc_feature (1)..(25): SEQ ID NO: 3048; WAN024D2O; Start 246; Stop 270
agtgttattagcattcggttattgt

SEQ ID NO: 345119 - DNA, 25 bp, Artificial
  probe
  misc_feature (1)..(25): SEQ ID NO: 3048; WAN024D2O; Start 247; Stop 271
gtgttattagcattcggttattgtc

SEQ ID NO: 345120 - DNA, 25 bp, Artificial
  probe
  misc_feature (1)..(25): SEQ ID NO: 3048; WAN024D2O; Start 245; Stop 269
cagtgttattagcattcggttattg

SEQ ID NO: 345121 - DNA, 25 bp, Artificial
  probe
  misc_feature (1)..(25): SEQ ID NO: 3048; WAN024D2O; Start 530; Stop 554
ttgcgaacagtctctataataatcc

SEQ ID NO: 345122 - DNA, 25 bp, Artificial
  probe
  misc_feature (1)..(25): SEQ ID NO: 3048; WAN024D2O; Start 464; Stop 488
cagatggcaatgctattagagagat

SEQ ID NO: 345123 - DNA, 25 bp, Artificial
  probe
  misc_feature (1)..(25): SEQ ID NO: 3048; WAN024D2O; Start 532; Stop 556
gcgaacagtctctataataatcctt

SEQ ID NO: 345124 - DNA, 25 bp, Artificial
  probe
  misc_feature (1)..(25): SEQ ID NO: 3048; WAN024D2O; Start 462; Stop 486
aacagatggcaatgctattagagag

SEQ ID NO: 345125 - DNA, 25 bp, Artificial
  probe
  misc_feature (1)..(25): SEQ ID NO: 3048; WAN024D2O; Start 461; Stop 485
gaacagatggcaatgctattagaga

SEQ ID NO: 345126 - DNA, 25 bp, Artificial
  probe
  misc_feature (1)..(25): SEQ ID NO: 3048; WAN024D2O; Start 465; Stop 489
agatggcaatgctattagagagata

SEQ ID NO: 345127 - DNA, 25 bp, Artificial
  probe
  misc_feature (1)..(25): SEQ ID NO: 3048; WAN024D2O; Start 458; Stop 482
atggaacagatggcaatgctattag

SEQ ID NO: 345128 - DNA, 25 bp, Artificial
  probe
  misc_feature (1)..(25): SEQ ID NO: 3048; WAN024D2O; Start 457; Stop 481
gatggaacagatggcaatgctatta

SEQ ID NO: 345129 - DNA, 25 bp, Artificial
  probe
  misc_feature (1)..(25): SEQ ID NO: 3048; WAN024D2O; Start 463; Stop 487
acagatggcaatgctattagagaga

SEQ ID NO: 345130 - DNA, 25 bp, Artificial
  probe
  misc_feature (1)..(25): SEQ ID NO: 3048; WAN024D2O; Start 249; Stop 273
gttattagcattcggttattgtcaa

SEQ ID NO: 345131 - DNA, 25 bp, Artificial
  probe
  misc_feature (1)..(25): SEQ ID NO: 3048; WAN024D2O; Start 460; Stop 484
ggaacagatggcaatgctattagag

SEQ ID NO: 345132 - DNA, 25 bp, Artificial
  probe
  misc_feature (1)..(25): SEQ ID NO: 3048; WAN024D2O; Start 468; Stop 492
tggcaatgctattagagagatagtt

SEQ ID NO: 345133 - DNA, 25 bp, Artificial
  probe
  misc_feature (1)..(25): SEQ ID NO: 3048; WAN024D2O; Start 467; Stop 491
atggcaatgctattagagagatagt

SEQ ID NO: 345134 - DNA, 25 bp, Artificial
  probe
  misc_feature (1)..(25): SEQ ID NO: 3048; WAN024D2O; Start 459; Stop 483
tggaacagatggcaatgctattaga

SEQ ID NO: 345135 - DNA, 25 bp, Artificial
  probe
  misc_feature (1)..(25): SEQ ID NO: 3048; WAN024D2O; Start 466; Stop 490
gatggcaatgctattagagagatag

SEQ ID NO: 345136 - DNA, 25 bp, Artificial
  probe
  misc_feature (1)..(25): SEQ ID NO: 3048; WAN024D2O; Start 240; Stop 264
atttccagtgttattagcattcggt

SEQ ID NO: 345137 - DNA, 25 bp, Artificial
  probe
  misc_feature (1)..(25): SEQ ID NO: 3048; WAN024D2O; Start 239; Stop 263
aatttccagtgttattagcattcgg

SEQ ID NO: 345138 - DNA, 25 bp, Artificial
  probe
  misc_feature (1)..(25): SEQ ID NO: 3048; WAN024D2O; Start 241; Stop 265
tttccagtgttattagcattcggtt

SEQ ID NO: 345139 - DNA, 25 bp, Artificial
  probe
  misc_feature (1)..(25): SEQ ID NO: 3048; WAN024D2O; Start 515; Stop 539
catatcagagattctttgcgaacag

SEQ ID NO: 345140 - DNA, 25 bp, Artificial
  probe
  misc_feature (1)..(25): SEQ ID NO: 3048; WAN024D2O; Start 516; Stop 540
atatcagagattctttgcgaacagt

SEQ ID NO: 345141 - DNA, 25 bp, Artificial
  probe
  misc_feature (1)..(25): SEQ ID NO: 3048; WAN024D2O; Start 513; Stop 537
aacatatcagagattctttgcgaac

SEQ ID NO: 345142 - DNA, 25 bp, Artificial
  probe
  misc_feature (1)..(25): SEQ ID NO: 3048; WAN024D2O; Start 523; Stop 547
agattctttgcgaacagtctctata

SEQ ID NO: 345143 - DNA, 25 bp, Artificial
  probe
  misc_feature (1)..(25): SEQ ID NO: 3048; WAN024D2O; Start 315; Stop 339
gaatttggtgttctacttctttggg

SEQ ID NO: 345144 - DNA, 25 bp, Artificial
  probe
  misc_feature (1)..(25): SEQ ID NO: 3048; WAN024D2O; Start 314; Stop 338
ggaatttggtgttctacttctttgg

SEQ ID NO: 345145 - DNA, 25 bp, Artificial
  probe
  misc_feature (1)..(25): SEQ ID NO: 3048; WAN024D2O; Start 514; Stop 538
acatatcagagattctttgcgaaca

SEQ ID NO: 345146 - DNA, 25 bp, Artificial
  probe
  misc_feature (1)..(25): SEQ ID NO: 3049; WAN024ERF; Start 784; Stop 808
attgttgaaggtgtaattccgattg

SEQ ID NO: 345147 - DNA, 25 bp, Artificial
  probe
  misc_feature (1)..(25): SEQ ID NO: 3049; WAN024ERF; Start 787; Stop 811
gttgaaggtgtaattccgattgtta

SEQ ID NO: 345148 - DNA, 25 bp, Artificial
  probe
  misc_feature (1)..(25): SEQ ID NO: 3049; WAN024ERF; Start 789; Stop 813
tgaaggtgtaattccgattgttatg

SEQ ID NO: 345149 - DNA, 25 bp, Artificial
  probe
  misc_feature (1)..(25): SEQ ID NO: 3049; WAN024ERF; Start 790; Stop 814
gaaggtgtaattccgattgttatga

SEQ ID NO: 345150 - DNA, 25 bp, Artificial
  probe
  misc_feature (1)..(25): SEQ ID NO: 3049; WAN024ERF; Start 810; Stop 834
tatgaataacttggttccaggtctc

SEQ ID NO: 345151 - DNA, 25 bp, Artificial
  probe
  misc_feature (1)..(25): SEQ ID NO: 3049; WAN024ERF; Start 809; Stop 833
ttatgaataacttggttccaggtct

SEQ ID NO: 345152 - DNA, 25 bp, Artificial
  probe
  misc_feature (1)..(25): SEQ ID NO: 3049; WAN024ERF; Start 388; Stop 412
ttaatgccaaccttgattattcctt

SEQ ID NO: 345153 - DNA, 25 bp, Artificial
  probe
  misc_feature (1)..(25): SEQ ID NO: 3049; WAN024ERF; Start 1039; Stop 1063
atgactgttgaagaagagattgatt

SEQ ID NO: 345154 - DNA, 25 bp, Artificial
  probe
  misc_feature (1)..(25): SEQ ID NO: 3049; WAN024ERF; Start 786; Stop 810
tgttgaaggtgtaattccgattgtt

SEQ ID NO: 345155 - DNA, 25 bp, Artificial
  probe
  misc_feature (1)..(25): SEQ ID NO: 3049; WAN024ERF; Start 785; Stop 809
ttgttgaaggtgtaattccgattgt

SEQ ID NO: 345156 - DNA, 25 bp, Artificial
  probe
  misc_feature (1)..(25): SEQ ID NO: 3049; WAN024ERF; Start 813; Stop 837
gaataacttggttccaggtctcatt

SEQ ID NO: 345157 - DNA, 25 bp, Artificial
  probe
  misc_feature (1)..(25): SEQ ID NO: 3049; WAN024ERF; Start 791; Stop 815
aaggtgtaattccgattgttatgaa

SEQ ID NO: 345158 - DNA, 25 bp, Artificial
  probe
  misc_feature (1)..(25): SEQ ID NO: 3049; WAN024ERF; Start 788; Stop 812
ttgaaggtgtaattccgattgttat

SEQ ID NO: 345159 - DNA, 25 bp, Artificial
  probe
  misc_feature (1)..(25): SEQ ID NO: 3049; WAN024ERF; Start 783; Stop 807
tattgttgaaggtgtaattccgatt

SEQ ID NO: 345160 - DNA, 25 bp, Artificial
  probe
  misc_feature (1)..(25): SEQ ID NO: 3049; WAN024ERF; Start 814; Stop 838
aataacttggttccaggtctcattg

SEQ ID NO: 345161 - DNA, 25 bp, Artificial
  probe
  misc_feature (1)..(25): SEQ ID NO: 3049; WAN024ERF; Start 782; Stop 806
atattgttgaaggtgtaattccgat

SEQ ID NO: 345162 - DNA, 25 bp, Artificial
  probe
  misc_feature (1)..(25): SEQ ID NO: 3049; WAN024ERF; Start 1036; Stop 1060
gttatgactgttgaagaagagattg

SEQ ID NO: 345163 - DNA, 25 bp, Artificial
  probe
  misc_feature (1)..(25): SEQ ID NO: 3049; WAN024ERF; Start 1037; Stop 1061
ttatgactgttgaagaagagattga

SEQ ID NO: 345164 - DNA, 25 bp, Artificial
  probe
  misc_feature (1)..(25): SEQ ID NO: 3049; WAN024ERF; Start 188; Stop 212
gtctcttgccagttgttattgctac

SEQ ID NO: 345165 - DNA, 25 bp, Artificial
  probe
  misc_feature (1)..(25): SEQ ID NO: 3049; WAN024ERF; Start 1038; Stop 1062
tatgactgttgaagaagagattgat

SEQ ID NO: 345166 - DNA, 25 bp, Artificial
  probe
  misc_feature (1)..(25): SEQ ID NO: 3049; WAN024ERF; Start 812; Stop 836
tgaataacttggttccaggtctcat

SEQ ID NO: 345167 - DNA, 25 bp, Artificial
  probe
  misc_feature (1)..(25): SEQ ID NO: 3049; WAN024ERF; Start 811; Stop 835
atgaataacttggttccaggtctca

SEQ ID NO: 345168 - DNA, 25 bp, Artificial
  probe
  misc_feature (1)..(25): SEQ ID NO: 3049; WAN024ERF; Start 919; Stop 943
cttatgttaccaaccatgactcgtc

SEQ ID NO: 345169 - DNA, 25 bp, Artificial
  probe
  misc_feature (1)..(25): SEQ ID NO: 3049; WAN024ERF; Start 1035; Stop 1059
agttatgactgttgaagaagagatt

SEQ ID NO: 345170 - DNA, 25 bp, Artificial
  probe
  misc_feature (1)..(25): SEQ ID NO: 3049; WAN024ERF; Start 781; Stop 805
aatattgttgaaggtgtaattccga

SEQ ID NO: 345171 - DNA, 25 bp, Artificial
  probe
  misc_feature (1)..(25): SEQ ID NO: 3049; WAN024ERF; Start 190; Stop 214
ctcttgccagttgttattgctacag

SEQ ID NO: 345172 - DNA, 25 bp, Artificial
  probe
  misc_feature (1)..(25): SEQ ID NO: 3049; WAN024ERF; Start 916; Stop 940
gtgcttatgttaccaaccatgactc

SEQ ID NO: 345173 - DNA, 25 bp, Artificial
  probe
  misc_feature (1)..(25): SEQ ID NO: 3049; WAN024ERF; Start 914; Stop 938
gagtgcttatgttaccaaccatgac

SEQ ID NO: 345174 - DNA, 25 bp, Artificial
  probe
  misc_feature (1)..(25): SEQ ID NO: 3049; WAN024ERF; Start 807; Stop 831
tgttatgaataacttggttccaggt

SEQ ID NO: 345175 - DNA, 25 bp, Artificial
  probe
  misc_feature (1)..(25): SEQ ID NO: 3049; WAN024ERF; Start 808; Stop 832
gttatgaataacttggttccaggtc

SEQ ID NO: 345176 - DNA, 25 bp, Artificial
  probe
  misc_feature (1)..(25): SEQ ID NO: 3049; WAN024ERF; Start 417; Stop 441
agcctctttggtaagtagtttgatt

SEQ ID NO: 345177 - DNA, 25 bp, Artificial
  probe
  misc_feature (1)..(25): SEQ ID NO: 3049; WAN024ERF; Start 37; Stop 61
acagccatttcctatatgattccaa

SEQ ID NO: 345178 - DNA, 25 bp, Artificial
  probe
  misc_feature (1)..(25): SEQ ID NO: 3049; WAN024ERF; Start 792; Stop 816
aggtgtaattccgattgttatgaat

SEQ ID NO: 345179 - DNA, 25 bp, Artificial
  probe
  misc_feature (1)..(25): SEQ ID NO: 3050; WAN024F5D; Start 211; Stop 235
cttgatgtcaaagatggcgatgaaa

SEQ ID NO: 345180 - DNA, 25 bp, Artificial
  probe
  misc_feature (1)..(25): SEQ ID NO: 3050; WAN024F5D; Start 215; Stop 239
atgtcaaagatggcgatgaaaagta

SEQ ID NO: 345181 - DNA, 25 bp, Artificial
  probe
  misc_feature (1)..(25): SEQ ID NO: 3050; WAN024F5D; Start 214; Stop 238
gatgtcaaagatggcgatgaaaagt

SEQ ID NO: 345182 - DNA, 25 bp, Artificial
  probe
  misc_feature (1)..(25): SEQ ID NO: 3050; WAN024F5D; Start 213; Stop 237
tgatgtcaaagatggcgatgaaaag

SEQ ID NO: 345183 - DNA, 25 bp, Artificial
  probe
  misc_feature (1)..(25): SEQ ID NO: 3050; WAN024F5D; Start 212; Stop 236
ttgatgtcaaagatggcgatgaaaa

SEQ ID NO: 345184 - DNA, 25 bp, Artificial
  probe
  misc_feature (1)..(25): SEQ ID NO: 3050; WAN024F5D; Start 210; Stop 234
tcttgatgtcaaagatggcgatgaa

SEQ ID NO: 345185 - DNA, 25 bp, Artificial
  probe
  misc_feature (1)..(25): SEQ ID NO: 3050; WAN024F5D; Start 209; Stop 233
gtcttgatgtcaaagatggcgatga

SEQ ID NO: 345186 - DNA, 25 bp, Artificial
  probe
  misc_feature (1)..(25): SEQ ID NO: 3050; WAN024F5D; Start 208; Stop 232
ggtcttgatgtcaaagatggcgatg

SEQ ID NO: 345187 - DNA, 25 bp, Artificial
  probe
  misc_feature (1)..(25): SEQ ID NO: 3050; WAN024F5D; Start 207; Stop 231
aggtcttgatgtcaaagatggcgat

SEQ ID NO: 345188 - DNA, 25 bp, Artificial
  probe
  misc_feature (1)..(25): SEQ ID NO: 3050; WAN024F5D; Start 202; Stop 226
cacgcaggtcttgatgtcaaagatg

SEQ ID NO: 345189 - DNA, 25 bp, Artificial
  probe
  misc_feature (1)..(25): SEQ ID NO: 3050; WAN024F5D; Start 155; Stop 179
tggttgctccaagtgttaaaactgg

SEQ ID NO: 345190 - DNA, 25 bp, Artificial
  probe
  misc_feature (1)..(25): SEQ ID NO: 3050; WAN024F5D; Start 206; Stop 230
caggtcttgatgtcaaagatggcga

SEQ ID NO: 345191 - DNA, 25 bp, Artificial
  probe
  misc_feature (1)..(25): SEQ ID NO: 3050; WAN024F5D; Start 154; Stop 178
ttggttgctccaagtgttaaaactg

SEQ ID NO: 345192 - DNA, 25 bp, Artificial
  probe
  misc_feature (1)..(25): SEQ ID NO: 3050; WAN024F5D; Start 156; Stop 180
ggttgctccaagtgttaaaactgga

SEQ ID NO: 345193 - DNA, 25 bp, Artificial
  probe
  misc_feature (1)..(25): SEQ ID NO: 3051; WAN024D43; Start 538; Stop 562
tctgtagatgttgttatgcctgatg

SEQ ID NO: 345194 - DNA, 25 bp, Artificial
  probe
  misc_feature (1)..(25): SEQ ID NO: 3051; WAN024D43; Start 537; Stop 561
atctgtagatgttgttatgcctgat

SEQ ID NO: 345195 - DNA, 25 bp, Artificial
  probe
  misc_feature (1)..(25): SEQ ID NO: 3051; WAN024D43; Start 536; Stop 560
tatctgtagatgttgttatgcctga

SEQ ID NO: 345196 - DNA, 25 bp, Artificial
  probe
  misc_feature (1)..(25): SEQ ID NO: 3051; WAN024D43; Start 191; Stop 215
aattacaattagcaggacagacttg

SEQ ID NO: 345197 - DNA, 25 bp, Artificial
  probe
  misc_feature (1)..(25): SEQ ID NO: 3051; WAN024D43; Start 192; Stop 216
attacaattagcaggacagacttgg

SEQ ID NO: 345198 - DNA, 25 bp, Artificial
  probe
  misc_feature (1)..(25): SEQ ID NO: 3051; WAN024D43; Start 539; Stop 563
ctgtagatgttgttatgcctgatgc

SEQ ID NO: 345199 - DNA, 25 bp, Artificial
  probe
  misc_feature (1)..(25): SEQ ID NO: 3051; WAN024D43; Start 535; Stop 559
atatctgtagatgttgttatgcctg

SEQ ID NO: 345200 - DNA, 25 bp, Artificial
  probe
  misc_feature (1)..(25): SEQ ID NO: 3051; WAN024D43; Start 107; Stop 131
caatgatagtgtcgaatggttatgc

SEQ ID NO: 345201 - DNA, 25 bp, Artificial
  probe
  misc_feature (1)..(25): SEQ ID NO: 3051; WAN024D43; Start 598; Stop 622
tctgagtatattcaatcaagttcgt

SEQ ID NO: 345202 - DNA, 25 bp, Artificial
  probe
  misc_feature (1)..(25): SEQ ID NO: 3051; WAN024D43; Start 602; Stop 626
agtatattcaatcaagttcgtacca

SEQ ID NO: 345203 - DNA, 25 bp, Artificial
  probe
  misc_feature (1)..(25): SEQ ID NO: 3051; WAN024D43; Start 597; Stop 621
gtctgagtatattcaatcaagttcg

SEQ ID NO: 345204 - DNA, 25 bp, Artificial
  probe
  misc_feature (1)..(25): SEQ ID NO: 3051; WAN024D43; Start 108; Stop 132
aatgatagtgtcgaatggttatgca

SEQ ID NO: 345205 - DNA, 25 bp, Artificial
  probe
  misc_feature (1)..(25): SEQ ID NO: 3051; WAN024D43; Start 601; Stop 625
gagtatattcaatcaagttcgtacc

SEQ ID NO: 345206 - DNA, 25 bp, Artificial
  probe
  misc_feature (1)..(25): SEQ ID NO: 3051; WAN024D43; Start 106; Stop 130
acaatgatagtgtcgaatggttatg

SEQ ID NO: 345207 - DNA, 25 bp, Artificial
  probe
  misc_feature (1)..(25): SEQ ID NO: 3051; WAN024D43; Start 166; Stop 190
gcatcagcagatttgtttgagtata

SEQ ID NO: 345208 - DNA, 25 bp, Artificial
  probe
  misc_feature (1)..(25): SEQ ID NO: 3051; WAN024D43; Start 190; Stop 214
aaattacaattagcaggacagactt

SEQ ID NO: 345209 - DNA, 25 bp, Artificial
  probe
  misc_feature (1)..(25): SEQ ID NO: 3051; WAN024D43; Start 607; Stop 631
attcaatcaagttcgtaccatttcg

SEQ ID NO: 345210 - DNA, 25 bp, Artificial
  probe
  misc_feature (1)..(25): SEQ ID NO: 3051; WAN024D43; Start 534; Stop 558
tatatctgtagatgttgttatgcct

SEQ ID NO: 345211 - DNA, 25 bp, Artificial
  probe
  misc_feature (1)..(25): SEQ ID NO: 3051; WAN024D43; Start 402; Stop 426
tagtcattcctttccaattcagatg

SEQ ID NO: 345212 - DNA, 25 bp, Artificial
  probe
  misc_feature (1)..(25): SEQ ID NO: 3051; WAN024D43; Start 603; Stop 627
gtatattcaatcaagttcgtaccat

SEQ ID NO: 345213 - DNA, 25 bp, Artificial
  probe
  misc_feature (1)..(25): SEQ ID NO: 3051; WAN024D43; Start 664; Stop 688
tcagaattatcggaaacagaagatt

SEQ ID NO: 345214 - DNA, 25 bp, Artificial
  probe
  misc_feature (1)..(25): SEQ ID NO: 3051; WAN024D43; Start 663; Stop 687
ttcagaattatcggaaacagaagat

SEQ ID NO: 345215 - DNA, 25 bp, Artificial
  probe
  misc_feature (1)..(25): SEQ ID NO: 3051; WAN024D43; Start 189; Stop 213
taaattacaattagcaggacagact

SEQ ID NO: 345216 - DNA, 25 bp, Artificial
  probe
  misc_feature (1)..(25): SEQ ID NO: 3051; WAN024D43; Start 596; Stop 620
tgtctgagtatattcaatcaagttc

SEQ ID NO: 345217 - DNA, 25 bp, Artificial
  probe
  misc_feature (1)..(25): SEQ ID NO: 3051; WAN024D43; Start 599; Stop 623
ctgagtatattcaatcaagttcgta

SEQ ID NO: 345218 - DNA, 25 bp, Artificial
  probe
  misc_feature (1)..(25): SEQ ID NO: 3051; WAN024D43; Start 665; Stop 689
cagaattatcggaaacagaagattt

SEQ ID NO: 345219 - DNA, 25 bp, Artificial
  probe
  misc_feature (1)..(25): SEQ ID NO: 3051; WAN024D43; Start 533; Stop 557
ttatatctgtagatgttgttatgcc

SEQ ID NO: 345220 - DNA, 25 bp, Artificial
  probe
  misc_feature (1)..(25): SEQ ID NO: 3051; WAN024D43; Start 600; Stop 624
tgagtatattcaatcaagttcgtac

SEQ ID NO: 345221 - DNA, 25 bp, Artificial
  probe
  misc_feature (1)..(25): SEQ ID NO: 3051; WAN024D43; Start 365; Stop 389
atcttaatcaacattcttcctacaa

SEQ ID NO: 345222 - DNA, 25 bp, Artificial
  probe
  misc_feature (1)..(25): SEQ ID NO: 3051; WAN024D43; Start 167; Stop 191
catcagcagatttgtttgagtataa

SEQ ID NO: 345223 - DNA, 25 bp, Artificial
  probe
  misc_feature (1)..(25): SEQ ID NO: 3051; WAN024D43; Start 267; Stop 291
aattataaagggtaagaagcgactt

SEQ ID NO: 345224 - DNA, 25 bp, Artificial
  probe
  misc_feature (1)..(25): SEQ ID NO: 3051; WAN024D43; Start 604; Stop 628
tatattcaatcaagttcgtaccatt

SEQ ID NO: 345225 - DNA, 25 bp, Artificial
  probe
  misc_feature (1)..(25): SEQ ID NO: 3051; WAN024D43; Start 606; Stop 630
tattcaatcaagttcgtaccatttc

SEQ ID NO: 345226 - DNA, 25 bp, Artificial
  probe
  misc_feature (1)..(25): SEQ ID NO: 3052; WAN024D6I; Start 101; Stop 125
taagagagttggcttctatcaaacg

SEQ ID NO: 345227 - DNA, 25 bp, Artificial
  probe
  misc_feature (1)..(25): SEQ ID NO: 3052; WAN024D6I; Start 100; Stop 124
ttaagagagttggcttctatcaaac

SEQ ID NO: 345228 - DNA, 25 bp, Artificial
  probe
  misc_feature (1)..(25): SEQ ID NO: 3052; WAN024D6I; Start 99; Stop 123
tttaagagagttggcttctatcaaa

SEQ ID NO: 345229 - DNA, 25 bp, Artificial
  probe
  misc_feature (1)..(25): SEQ ID NO: 3052; WAN024D6I; Start 230; Stop 254
caactggactagacatggatttgag

SEQ ID NO: 345230 - DNA, 25 bp, Artificial
  probe
  misc_feature (1)..(25): SEQ ID NO: 3052; WAN024D6I; Start 231; Stop 255
aactggactagacatggatttgagg

SEQ ID NO: 345231 - DNA, 25 bp, Artificial
  probe
  misc_feature (1)..(25): SEQ ID NO: 3052; WAN024D6I; Start 104; Stop 128
gagagttggcttctatcaaacgtag

SEQ ID NO: 345232 - DNA, 25 bp, Artificial
  probe
  misc_feature (1)..(25): SEQ ID NO: 3052; WAN024D6I; Start 103; Stop 127
agagagttggcttctatcaaacgta

SEQ ID NO: 345233 - DNA, 25 bp, Artificial
  probe
  misc_feature (1)..(25): SEQ ID NO: 3052; WAN024D6I; Start 236; Stop 260
gactagacatggatttgagggcttc

SEQ ID NO: 345234 - DNA, 25 bp, Artificial
  probe
  misc_feature (1)..(25): SEQ ID NO: 3052; WAN024D6I; Start 176; Stop 200
gtaccaattctttagagtcaatctc

SEQ ID NO: 345235 - DNA, 25 bp, Artificial
  probe
  misc_feature (1)..(25): SEQ ID NO: 3052; WAN024D6I; Start 80; Stop 104
tcaaggctgcttcttcaattttaag

SEQ ID NO: 345236 - DNA, 25 bp, Artificial
  probe
  misc_feature (1)..(25): SEQ ID NO: 3052; WAN024D6I; Start 229; Stop 253
gcaactggactagacatggatttga

SEQ ID NO: 345237 - DNA, 25 bp, Artificial
  probe
  misc_feature (1)..(25): SEQ ID NO: 3052; WAN024D6I; Start 79; Stop 103
gtcaaggctgcttcttcaattttaa

SEQ ID NO: 345238 - DNA, 25 bp, Artificial
  probe
  misc_feature (1)..(25): SEQ ID NO: 3052; WAN024D6I; Start 187; Stop 211
ttagagtcaatctctgccatgtgtc

SEQ ID NO: 345239 - DNA, 25 bp, Artificial
  probe
  misc_feature (1)..(25): SEQ ID NO: 3052; WAN024D6I; Start 102; Stop 126
aagagagttggcttctatcaaacgt

SEQ ID NO: 345240 - DNA, 25 bp, Artificial
  probe
  misc_feature (1)..(25): SEQ ID NO: 3052; WAN024D6I; Start 105; Stop 129
agagttggcttctatcaaacgtagg

SEQ ID NO: 345241 - DNA, 25 bp, Artificial
  probe
  misc_feature (1)..(25): SEQ ID NO: 3052; WAN024D6I; Start 78; Stop 102
tgtcaaggctgcttcttcaatttta

SEQ ID NO: 345242 - DNA, 25 bp, Artificial
  probe
  misc_feature (1)..(25): SEQ ID NO: 3052; WAN024D6I; Start 93; Stop 117
ttcaattttaagagagttggcttct

SEQ ID NO: 345243 - DNA, 25 bp, Artificial
  probe
  misc_feature (1)..(25): SEQ ID NO: 3052; WAN024D6I; Start 92; Stop 116
cttcaattttaagagagttggcttc

SEQ ID NO: 345244 - DNA, 25 bp, Artificial
  probe
  misc_feature (1)..(25): SEQ ID NO: 3052; WAN024D6I; Start 107; Stop 131
agttggcttctatcaaacgtaggtc

SEQ ID NO: 345245 - DNA, 25 bp, Artificial
  probe
  misc_feature (1)..(25): SEQ ID NO: 3052; WAN024D6I; Start 106; Stop 130
gagttggcttctatcaaacgtaggt

SEQ ID NO: 345246 - DNA, 25 bp, Artificial
  probe
  misc_feature (1)..(25): SEQ ID NO: 3052; WAN024D6I; Start 182; Stop 206
attctttagagtcaatctctgccat

SEQ ID NO: 345247 - DNA, 25 bp, Artificial
  probe
  misc_feature (1)..(25): SEQ ID NO: 3052; WAN024D6I; Start 181; Stop 205
aattctttagagtcaatctctgcca

SEQ ID NO: 345248 - DNA, 25 bp, Artificial
  probe
  misc_feature (1)..(25): SEQ ID NO: 3052; WAN024D6I; Start 180; Stop 204
caattctttagagtcaatctctgcc

SEQ ID NO: 345249 - DNA, 25 bp, Artificial
  probe
  misc_feature (1)..(25): SEQ ID NO: 3052; WAN024D6I; Start 179; Stop 203
ccaattctttagagtcaatctctgc

SEQ ID NO: 345250 - DNA, 25 bp, Artificial
  probe
  misc_feature (1)..(25): SEQ ID NO: 3052; WAN024D6I; Start 232; Stop 256
actggactagacatggatttgaggg

SEQ ID NO: 345251 - DNA, 25 bp, Artificial
  probe
  misc_feature (1)..(25): SEQ ID NO: 3052; WAN024D6I; Start 183; Stop 207
ttctttagagtcaatctctgccatg

SEQ ID NO: 345252 - DNA, 25 bp, Artificial
  probe
  misc_feature (1)..(25): SEQ ID NO: 3052; WAN024D6I; Start 241; Stop 265
gacatggatttgagggcttcaatag

SEQ ID NO: 345253 - DNA, 25 bp, Artificial
  probe
  misc_feature (1)..(25): SEQ ID NO: 3052; WAN024D6I; Start 98; Stop 122
ttttaagagagttggcttctatcaa

SEQ ID NO: 345254 - DNA, 25 bp, Artificial
  probe
  misc_feature (1)..(25): SEQ ID NO: 3052; WAN024D6I; Start 191; Stop 215
agtcaatctctgccatgtgtccatc

SEQ ID NO: 345255 - DNA, 25 bp, Artificial
  probe
  misc_feature (1)..(25): SEQ ID NO: 3052; WAN024D6I; Start 94; Stop 118
tcaattttaagagagttggcttcta

SEQ ID NO: 345256 - DNA, 25 bp, Artificial
  probe
  misc_feature (1)..(25): SEQ ID NO: 3052; WAN024D6I; Start 237; Stop 261
actagacatggatttgagggcttca

SEQ ID NO: 345257 - DNA, 25 bp, Artificial
  probe
  misc_feature (1)..(25): SEQ ID NO: 3052; WAN024D6I; Start 97; Stop 121
attttaagagagttggcttctatca

SEQ ID NO: 345258 - DNA, 25 bp, Artificial
  probe
  misc_feature (1)..(25): SEQ ID NO: 3052; WAN024D6I; Start 267; Stop 291
ttcttcagcttttccttcttggtaa

SEQ ID NO: 345259 - DNA, 25 bp, Artificial
  probe
  misc_feature (1)..(25): SEQ ID NO: 3053; WAN024GMP; Start 136; Stop 160
ctctactccgataacctcaatctct

SEQ ID NO: 345260 - DNA, 25 bp, Artificial
  probe
  misc_feature (1)..(25): SEQ ID NO: 3053; WAN024GMP; Start 137; Stop 161
tctactccgataacctcaatctctg

SEQ ID NO: 345261 - DNA, 25 bp, Artificial
  probe
  misc_feature (1)..(25): SEQ ID NO: 3053; WAN024GMP; Start 145; Stop 169
gataacctcaatctctggacttgtt

SEQ ID NO: 345262 - DNA, 25 bp, Artificial
  probe
  misc_feature (1)..(25): SEQ ID NO: 3053; WAN024GMP; Start 135; Stop 159
cctctactccgataacctcaatctc

SEQ ID NO: 345263 - DNA, 25 bp, Artificial
  probe
  misc_feature (1)..(25): SEQ ID NO: 3053; WAN024GMP; Start 138; Stop 162
ctactccgataacctcaatctctgg

SEQ ID NO: 345264 - DNA, 25 bp, Artificial
  probe
  misc_feature (1)..(25): SEQ ID NO: 3053; WAN024GMP; Start 144; Stop 168
cgataacctcaatctctggacttgt

SEQ ID NO: 345265 - DNA, 25 bp, Artificial
  probe
  misc_feature (1)..(25): SEQ ID NO: 3053; WAN024GMP; Start 143; Stop 167
ccgataacctcaatctctggacttg

SEQ ID NO: 345266 - DNA, 25 bp, Artificial
  probe
  misc_feature (1)..(25): SEQ ID NO: 3053; WAN024GMP; Start 146; Stop 170
ataacctcaatctctggacttgttt

SEQ ID NO: 345267 - DNA, 25 bp, Artificial
  probe
  misc_feature (1)..(25): SEQ ID NO: 3053; WAN024GMP; Start 147; Stop 171
taacctcaatctctggacttgtttc

SEQ ID NO: 345268 - DNA, 25 bp, Artificial
  probe
  misc_feature (1)..(25): SEQ ID NO: 3053; WAN024GMP; Start 139; Stop 163
tactccgataacctcaatctctgga

SEQ ID NO: 345269 - DNA, 25 bp, Artificial
  probe
  misc_feature (1)..(25): SEQ ID NO: 3053; WAN024GMP; Start 134; Stop 158
gcctctactccgataacctcaatct

SEQ ID NO: 345270 - DNA, 25 bp, Artificial
  probe
  misc_feature (1)..(25): SEQ ID NO: 3053; WAN024GMP; Start 142; Stop 166
tccgataacctcaatctctggactt

SEQ ID NO: 345271 - DNA, 25 bp, Artificial
  probe
  misc_feature (1)..(25): SEQ ID NO: 3053; WAN024GMP; Start 159; Stop 183
ctggacttgtttccttgatataggt

SEQ ID NO: 345272 - DNA, 25 bp, Artificial
  probe
  misc_feature (1)..(25): SEQ ID NO: 3053; WAN024GMP; Start 158; Stop 182
tctggacttgtttccttgatatagg

SEQ ID NO: 345273 - DNA, 25 bp, Artificial
  probe
  misc_feature (1)..(25): SEQ ID NO: 3053; WAN024GMP; Start 1; Stop 25
atgttgacgagttgcttcataggtc

SEQ ID NO: 345274 - DNA, 25 bp, Artificial
  probe
  misc_feature (1)..(25): SEQ ID NO: 3053; WAN024GMP; Start 154; Stop 178
aatctctggacttgtttccttgata

SEQ ID NO: 345275 - DNA, 25 bp, Artificial
  probe
  misc_feature (1)..(25): SEQ ID NO: 3053; WAN024GMP; Start 155; Stop 179
atctctggacttgtttccttgatat

SEQ ID NO: 345276 - DNA, 25 bp, Artificial
  probe
  misc_feature (1)..(25): SEQ ID NO: 3053; WAN024GMP; Start 153; Stop 177
caatctctggacttgtttccttgat

SEQ ID NO: 345277 - DNA, 25 bp, Artificial
  probe
  misc_feature (1)..(25): SEQ ID NO: 3053; WAN024GMP; Start 160; Stop 184
tggacttgtttccttgatataggta

SEQ ID NO: 345278 - DNA, 25 bp, Artificial
  probe
  misc_feature (1)..(25): SEQ ID NO: 3053; WAN024GMP; Start 156; Stop 180
tctctggacttgtttccttgatata

SEQ ID NO: 345279 - DNA, 25 bp, Artificial
  probe
  misc_feature (1)..(25): SEQ ID NO: 3053; WAN024GMP; Start 47; Stop 71
gcaatcccatcagcaaatttatcaa

SEQ ID NO: 345280 - DNA, 25 bp, Artificial
  probe
  misc_feature (1)..(25): SEQ ID NO: 3053; WAN024GMP; Start 157; Stop 181
ctctggacttgtttccttgatatag

SEQ ID NO: 345281 - DNA, 25 bp, Artificial
  probe
  misc_feature (1)..(25): SEQ ID NO: 3053; WAN024GMP; Start 141; Stop 165
ctccgataacctcaatctctggact

SEQ ID NO: 345282 - DNA, 25 bp, Artificial
  probe
  misc_feature (1)..(25): SEQ ID NO: 3053; WAN024GMP; Start 151; Stop 175
ctcaatctctggacttgtttccttg

SEQ ID NO: 345283 - DNA, 25 bp, Artificial
  probe
  misc_feature (1)..(25): SEQ ID NO: 3053; WAN024GMP; Start 45; Stop 69
cagcaatcccatcagcaaatttatc

SEQ ID NO: 345284 - DNA, 25 bp, Artificial
  probe
  misc_feature (1)..(25): SEQ ID NO: 3053; WAN024GMP; Start 161; Stop 185
ggacttgtttccttgatataggtag

SEQ ID NO: 345285 - DNA, 25 bp, Artificial
  probe
  misc_feature (1)..(25): SEQ ID NO: 3053; WAN024GMP; Start 46; Stop 70
agcaatcccatcagcaaatttatca

SEQ ID NO: 345286 - DNA, 25 bp, Artificial
  probe
  misc_feature (1)..(25): SEQ ID NO: 3053; WAN024GMP; Start 140; Stop 164
actccgataacctcaatctctggac

SEQ ID NO: 345287 - DNA, 25 bp, Artificial
  probe
  misc_feature (1)..(25): SEQ ID NO: 3053; WAN024GMP; Start 44; Stop 68
acagcaatcccatcagcaaatttat

SEQ ID NO: 345288 - DNA, 25 bp, Artificial
  probe
  misc_feature (1)..(25): SEQ ID NO: 3053; WAN024GMP; Start 48; Stop 72
caatcccatcagcaaatttatcaat

SEQ ID NO: 345289 - DNA, 25 bp, Artificial
  probe
  misc_feature (1)..(25): SEQ ID NO: 3053; WAN024GMP; Start 162; Stop 186
gacttgtttccttgatataggtaga

SEQ ID NO: 345290 - DNA, 25 bp, Artificial
  probe
  misc_feature (1)..(25): SEQ ID NO: 3053; WAN024GMP; Start 133; Stop 157
cgcctctactccgataacctcaatc

SEQ ID NO: 345291 - DNA, 25 bp, Artificial
  probe
  misc_feature (1)..(25): SEQ ID NO: 3053; WAN024GMP; Start 220; Stop 244
aaccaagacagcatcaaaatcaatc

SEQ ID NO: 345292 - DNA, 25 bp, Artificial
  probe
  misc_feature (1)..(25): SEQ ID NO: 3054; WAN024DWP; Start 35; Stop 59
cacatattgtagtaacgaagcacat

SEQ ID NO: 345293 - DNA, 25 bp, Artificial
  probe
  misc_feature (1)..(25): SEQ ID NO: 3054; WAN024DWP; Start 34; Stop 58
acacatattgtagtaacgaagcaca

SEQ ID NO: 345294 - DNA, 25 bp, Artificial
  probe
  misc_feature (1)..(25): SEQ ID NO: 3054; WAN024DWP; Start 39; Stop 63
tattgtagtaacgaagcacatagcc

SEQ ID NO: 345295 - DNA, 25 bp, Artificial
  probe
  misc_feature (1)..(25): SEQ ID NO: 3054; WAN024DWP; Start 38; Stop 62
atattgtagtaacgaagcacatagc

SEQ ID NO: 345296 - DNA, 25 bp, Artificial
  probe
  misc_feature (1)..(25): SEQ ID NO: 3054; WAN024DWP; Start 36; Stop 60
acatattgtagtaacgaagcacata

SEQ ID NO: 345297 - DNA, 25 bp, Artificial
  probe
  misc_feature (1)..(25): SEQ ID NO: 3054; WAN024DWP; Start 40; Stop 64
attgtagtaacgaagcacatagcct

SEQ ID NO: 345298 - DNA, 25 bp, Artificial
  probe
  misc_feature (1)..(25): SEQ ID NO: 3054; WAN024DWP; Start 41; Stop 65
ttgtagtaacgaagcacatagcctt

SEQ ID NO: 345299 - DNA, 25 bp, Artificial
  probe
  misc_feature (1)..(25): SEQ ID NO: 3054; WAN024DWP; Start 37; Stop 61
catattgtagtaacgaagcacatag

SEQ ID NO: 345300 - DNA, 25 bp, Artificial
  probe
  misc_feature (1)..(25): SEQ ID NO: 3054; WAN024DWP; Start 33; Stop 57
tacacatattgtagtaacgaagcac

SEQ ID NO: 345301 - DNA, 25 bp, Artificial
  probe
  misc_feature (1)..(25): SEQ ID NO: 3054; WAN024DWP; Start 44; Stop 68
tagtaacgaagcacatagccttctt

SEQ ID NO: 345302 - DNA, 25 bp, Artificial
  probe
  misc_feature (1)..(25): SEQ ID NO: 3054; WAN024DWP; Start 116; Stop 140
agaacagaatggctcaagaggctac

SEQ ID NO: 345303 - DNA, 25 bp, Artificial
  probe
  misc_feature (1)..(25): SEQ ID NO: 3054; WAN024DWP; Start 115; Stop 139
gagaacagaatggctcaagaggcta

SEQ ID NO: 345304 - DNA, 25 bp, Artificial
  probe
  misc_feature (1)..(25): SEQ ID NO: 3054; WAN024DWP; Start 47; Stop 71
taacgaagcacatagccttcttcat

SEQ ID NO: 345305 - DNA, 25 bp, Artificial
  probe
  misc_feature (1)..(25): SEQ ID NO: 3054; WAN024DWP; Start 43; Stop 67
gtagtaacgaagcacatagccttct

SEQ ID NO: 345306 - DNA, 25 bp, Artificial
  probe
  misc_feature (1)..(25): SEQ ID NO: 3054; WAN024DWP; Start 78; Stop 102
ctaccttaaaggctgttggacaaac

SEQ ID NO: 345307 - DNA, 25 bp, Artificial
  probe
  misc_feature (1)..(25): SEQ ID NO: 3054; WAN024DWP; Start 42; Stop 66
tgtagtaacgaagcacatagccttc

SEQ ID NO: 345308 - DNA, 25 bp, Artificial
  probe
  misc_feature (1)..(25): SEQ ID NO: 3054; WAN024DWP; Start 79; Stop 103
taccttaaaggctgttggacaaact

SEQ ID NO: 345309 - DNA, 25 bp, Artificial
  probe
  misc_feature (1)..(25): SEQ ID NO: 3054; WAN024DWP; Start 52; Stop 76
aagcacatagccttcttcattttca

SEQ ID NO: 345310 - DNA, 25 bp, Artificial
  probe
  misc_feature (1)..(25): SEQ ID NO: 3054; WAN024DWP; Start 53; Stop 77
agcacatagccttcttcattttcag

SEQ ID NO: 345311 - DNA, 25 bp, Artificial
  probe
  misc_feature (1)..(25): SEQ ID NO: 3054; WAN024DWP; Start 82; Stop 106
cttaaaggctgttggacaaacttgc

SEQ ID NO: 345312 - DNA, 25 bp, Artificial
  probe
  misc_feature (1)..(25): SEQ ID NO: 3054; WAN024DWP; Start 45; Stop 69
agtaacgaagcacatagccttcttc

SEQ ID NO: 345313 - DNA, 25 bp, Artificial
  probe
  misc_feature (1)..(25): SEQ ID NO: 3054; WAN024DWP; Start 102; Stop 126
cttgcggtatgctgagaacagaatg

SEQ ID NO: 345314 - DNA, 25 bp, Artificial
  probe
  misc_feature (1)..(25): SEQ ID NO: 3054; WAN024DWP; Start 48; Stop 72
aacgaagcacatagccttcttcatt

SEQ ID NO: 345315 - DNA, 25 bp, Artificial
  probe
  misc_feature (1)..(25): SEQ ID NO: 3054; WAN024DWP; Start 81; Stop 105
ccttaaaggctgttggacaaacttg

SEQ ID NO: 345316 - DNA, 25 bp, Artificial
  probe
  misc_feature (1)..(25): SEQ ID NO: 3054; WAN024DWP; Start 46; Stop 70
gtaacgaagcacatagccttcttca

SEQ ID NO: 345317 - DNA, 25 bp, Artificial
  probe
  misc_feature (1)..(25): SEQ ID NO: 3054; WAN024DWP; Start 155; Stop 179
cttccttcctgtctagcaagctgaa

SEQ ID NO: 345318 - DNA, 25 bp, Artificial
  probe
  misc_feature (1)..(25): SEQ ID NO: 3054; WAN024DWP; Start 101; Stop 125
acttgcggtatgctgagaacagaat

SEQ ID NO: 345319 - DNA, 25 bp, Artificial
  probe
  misc_feature (1)..(25): SEQ ID NO: 3054; WAN024DWP; Start 80; Stop 104
accttaaaggctgttggacaaactt

SEQ ID NO: 345320 - DNA, 25 bp, Artificial
  probe
  misc_feature (1)..(25): SEQ ID NO: 3054; WAN024DWP; Start 62; Stop 86
ccttcttcattttcagctaccttaa

SEQ ID NO: 345321 - DNA, 25 bp, Artificial
  probe
  misc_feature (1)..(25): SEQ ID NO: 3054; WAN024DWP; Start 61; Stop 85
gccttcttcattttcagctacctta

SEQ ID NO: 345322 - DNA, 25 bp, Artificial
  probe
  misc_feature (1)..(25): SEQ ID NO: 3054; WAN024DWP; Start 109; Stop 133
tatgctgagaacagaatggctcaag

SEQ ID NO: 345323 - DNA, 25 bp, Artificial
  probe
  misc_feature (1)..(25): SEQ ID NO: 3054; WAN024DWP; Start 100; Stop 124
aacttgcggtatgctgagaacagaa

SEQ ID NO: 345324 - DNA, 25 bp, Artificial
  probe
  misc_feature (1)..(25): SEQ ID NO: 3054; WAN024DWP; Start 4; Stop 28
ttgactttctggcacacgtacattt

SEQ ID NO: 345325 - DNA, 25 bp, Artificial
  probe
  misc_feature (1)..(25): SEQ ID NO: 3055; WAN024GBQ; Start 22; Stop 46
cagtgtccagtcatagtatccttac

SEQ ID NO: 345326 - DNA, 25 bp, Artificial
  probe
  misc_feature (1)..(25): SEQ ID NO: 3055; WAN024GBQ; Start 25; Stop 49
tgtccagtcatagtatccttaccaa

SEQ ID NO: 345327 - DNA, 25 bp, Artificial
  probe
  misc_feature (1)..(25): SEQ ID NO: 3055; WAN024GBQ; Start 21; Stop 45
ccagtgtccagtcatagtatcctta

SEQ ID NO: 345328 - DNA, 25 bp, Artificial
  probe
  misc_feature (1)..(25): SEQ ID NO: 3055; WAN024GBQ; Start 23; Stop 47
agtgtccagtcatagtatccttacc

SEQ ID NO: 345329 - DNA, 25 bp, Artificial
  probe
  misc_feature (1)..(25): SEQ ID NO: 3055; WAN024GBQ; Start 27; Stop 51
tccagtcatagtatccttaccaaga

SEQ ID NO: 345330 - DNA, 25 bp, Artificial
  probe
  misc_feature (1)..(25): SEQ ID NO: 3055; WAN024GBQ; Start 26; Stop 50
gtccagtcatagtatccttaccaag

SEQ ID NO: 345331 - DNA, 25 bp, Artificial
  probe
  misc_feature (1)..(25): SEQ ID NO: 3055; WAN024GBQ; Start 28; Stop 52
ccagtcatagtatccttaccaagag

SEQ ID NO: 345332 - DNA, 25 bp, Artificial
  probe
  misc_feature (1)..(25): SEQ ID NO: 3055; WAN024GBQ; Start 24; Stop 48
gtgtccagtcatagtatccttacca

SEQ ID NO: 345333 - DNA, 25 bp, Artificial
  probe
  misc_feature (1)..(25): SEQ ID NO: 3055; WAN024GBQ; Start 29; Stop 53
cagtcatagtatccttaccaagaga

SEQ ID NO: 345334 - DNA, 25 bp, Artificial
  probe
  misc_feature (1)..(25): SEQ ID NO: 3055; WAN024GBQ; Start 30; Stop 54
agtcatagtatccttaccaagagat

SEQ ID NO: 345335 - DNA, 25 bp, Artificial
  probe
  misc_feature (1)..(25): SEQ ID NO: 3055; WAN024GBQ; Start 38; Stop 62
tatccttaccaagagatacttcctc

SEQ ID NO: 345336 - DNA, 25 bp, Artificial
  probe
  misc_feature (1)..(25): SEQ ID NO: 3055; WAN024GBQ; Start 229; Stop 253
ttgacaaagttattagcatctggtg

SEQ ID NO: 345337 - DNA, 25 bp, Artificial
  probe
  misc_feature (1)..(25): SEQ ID NO: 3055; WAN024GBQ; Start 16; Stop 40
atttcccagtgtccagtcatagtat

SEQ ID NO: 345338 - DNA, 25 bp, Artificial
  probe
  misc_feature (1)..(25): SEQ ID NO: 3055; WAN024GBQ; Start 226; Stop 250
gcattgacaaagttattagcatctg

SEQ ID NO: 345339 - DNA, 25 bp, Artificial
  probe
  misc_feature (1)..(25): SEQ ID NO: 3055; WAN024GBQ; Start 109; Stop 133
ttaagaggagtttcacgaggaatat

SEQ ID NO: 345340 - DNA, 25 bp, Artificial
  probe
  misc_feature (1)..(25): SEQ ID NO: 3055; WAN024GBQ; Start 228; Stop 252
attgacaaagttattagcatctggt

SEQ ID NO: 345341 - DNA, 25 bp, Artificial
  probe
  misc_feature (1)..(25): SEQ ID NO: 3055; WAN024GBQ; Start 17; Stop 41
tttcccagtgtccagtcatagtatc

SEQ ID NO: 345342 - DNA, 25 bp, Artificial
  probe
  misc_feature (1)..(25): SEQ ID NO: 3055; WAN024GBQ; Start 15; Stop 39
gatttcccagtgtccagtcatagta

SEQ ID NO: 345343 - DNA, 25 bp, Artificial
  probe
  misc_feature (1)..(25): SEQ ID NO: 3055; WAN024GBQ; Start 227; Stop 251
cattgacaaagttattagcatctgg

SEQ ID NO: 345344 - DNA, 25 bp, Artificial
  probe
  misc_feature (1)..(25): SEQ ID NO: 3055; WAN024GBQ; Start 263; Stop 287
ttcctacagaatccagtaccaccaa

SEQ ID NO: 345345 - DNA, 25 bp, Artificial
  probe
  misc_feature (1)..(25): SEQ ID NO: 3055; WAN024GBQ; Start 266; Stop 290
ctacagaatccagtaccaccaaatg

SEQ ID NO: 345346 - DNA, 25 bp, Artificial
  probe
  misc_feature (1)..(25): SEQ ID NO: 3055; WAN024GBQ; Start 267; Stop 291
tacagaatccagtaccaccaaatga

SEQ ID NO: 345347 - DNA, 25 bp, Artificial
  probe
  misc_feature (1)..(25): SEQ ID NO: 3055; WAN024GBQ; Start 111; Stop 135
aagaggagtttcacgaggaatattt

SEQ ID NO: 345348 - DNA, 25 bp, Artificial
  probe
  misc_feature (1)..(25): SEQ ID NO: 3055; WAN024GBQ; Start 112; Stop 136
agaggagtttcacgaggaatatttc

SEQ ID NO: 345349 - DNA, 25 bp, Artificial
  probe
  misc_feature (1)..(25): SEQ ID NO: 3055; WAN024GBQ; Start 110; Stop 134
taagaggagtttcacgaggaatatt

SEQ ID NO: 345350 - DNA, 25 bp, Artificial
  probe
  misc_feature (1)..(25): SEQ ID NO: 3055; WAN024GBQ; Start 265; Stop 289
cctacagaatccagtaccaccaaat

SEQ ID NO: 345351 - DNA, 25 bp, Artificial
  probe
  misc_feature (1)..(25): SEQ ID NO: 3055; WAN024GBQ; Start 31; Stop 55
gtcatagtatccttaccaagagata

SEQ ID NO: 345352 - DNA, 25 bp, Artificial
  probe
  misc_feature (1)..(25): SEQ ID NO: 3055; WAN024GBQ; Start 262; Stop 286
attcctacagaatccagtaccacca

SEQ ID NO: 345353 - DNA, 25 bp, Artificial
  probe
  misc_feature (1)..(25): SEQ ID NO: 3055; WAN024GBQ; Start 39; Stop 63
atccttaccaagagatacttcctct

SEQ ID NO: 345354 - DNA, 25 bp, Artificial
  probe
  misc_feature (1)..(25): SEQ ID NO: 3055; WAN024GBQ; Start 40; Stop 64
tccttaccaagagatacttcctcta

SEQ ID NO: 345355 - DNA, 25 bp, Artificial
  probe
  misc_feature (1)..(25): SEQ ID NO: 3055; WAN024GBQ; Start 41; Stop 65
ccttaccaagagatacttcctctaa

SEQ ID NO: 345356 - DNA, 25 bp, Artificial
  probe
  misc_feature (1)..(25): SEQ ID NO: 3055; WAN024GBQ; Start 20; Stop 44
cccagtgtccagtcatagtatcctt

SEQ ID NO: 345357 - DNA, 25 bp, Artificial
  probe
  misc_feature (1)..(25): SEQ ID NO: 3055; WAN024GBQ; Start 18; Stop 42
ttcccagtgtccagtcatagtatcc

SEQ ID NO: 345358 - DNA, 25 bp, Artificial
  probe
  misc_feature (1)..(25): SEQ ID NO: 3056; WAN024C8O; Start 223; Stop 247
ttacggattgcttctggaacttctt

SEQ ID NO: 345359 - DNA, 25 bp, Artificial
  probe
  misc_feature (1)..(25): SEQ ID NO: 3056; WAN024C8O; Start 104; Stop 128
cttctacagcaggtttcaacaatac

SEQ ID NO: 345360 - DNA, 25 bp, Artificial
  probe
  misc_feature (1)..(25): SEQ ID NO: 3056; WAN024C8O; Start 109; Stop 133
acagcaggtttcaacaatactttag

SEQ ID NO: 345361 - DNA, 25 bp, Artificial
  probe
  misc_feature (1)..(25): SEQ ID NO: 3056; WAN024C8O; Start 107; Stop 131
ctacagcaggtttcaacaatacttt

SEQ ID NO: 345362 - DNA, 25 bp, Artificial
  probe
  misc_feature (1)..(25): SEQ ID NO: 3056; WAN024C8O; Start 106; Stop 130
tctacagcaggtttcaacaatactt

SEQ ID NO: 345363 - DNA, 25 bp, Artificial
  probe
  misc_feature (1)..(25): SEQ ID NO: 3056; WAN024C8O; Start 105; Stop 129
ttctacagcaggtttcaacaatact

SEQ ID NO: 345364 - DNA, 25 bp, Artificial
  probe
  misc_feature (1)..(25): SEQ ID NO: 3056; WAN024C8O; Start 10; Stop 34
ggagtgttagaaccaagtgatttag

SEQ ID NO: 345365 - DNA, 25 bp, Artificial
  probe
  misc_feature (1)..(25): SEQ ID NO: 3056; WAN024C8O; Start 110; Stop 134
cagcaggtttcaacaatactttagc

SEQ ID NO: 345366 - DNA, 25 bp, Artificial
  probe
  misc_feature (1)..(25): SEQ ID NO: 3056; WAN024C8O; Start 31; Stop 55
ttagatgtaatatctgccacacctg

SEQ ID NO: 345367 - DNA, 25 bp, Artificial
  probe
  misc_feature (1)..(25): SEQ ID NO: 3056; WAN024C8O; Start 224; Stop 248
tacggattgcttctggaacttcttg

SEQ ID NO: 345368 - DNA, 25 bp, Artificial
  probe
  misc_feature (1)..(25): SEQ ID NO: 3056; WAN024C8O; Start 108; Stop 132
tacagcaggtttcaacaatacttta

SEQ ID NO: 345369 - DNA, 25 bp, Artificial
  probe
  misc_feature (1)..(25): SEQ ID NO: 3056; WAN024C8O; Start 38; Stop 62
taatatctgccacacctgccaattc

SEQ ID NO: 345370 - DNA, 25 bp, Artificial
  probe
  misc_feature (1)..(25): SEQ ID NO: 3056; WAN024C8O; Start 11; Stop 35
gagtgttagaaccaagtgatttaga

SEQ ID NO: 345371 - DNA, 25 bp, Artificial
  probe
  misc_feature (1)..(25): SEQ ID NO: 3056; WAN024C8O; Start 37; Stop 61
gtaatatctgccacacctgccaatt

SEQ ID NO: 345372 - DNA, 25 bp, Artificial
  probe
  misc_feature (1)..(25): SEQ ID NO: 3056; WAN024C8O; Start 14; Stop 38
tgttagaaccaagtgatttagatgt

SEQ ID NO: 345373 - DNA, 25 bp, Artificial
  probe
  misc_feature (1)..(25): SEQ ID NO: 3056; WAN024C8O; Start 212; Stop 236
catctactgctttacggattgcttc

SEQ ID NO: 345374 - DNA, 25 bp, Artificial
  probe
  misc_feature (1)..(25): SEQ ID NO: 3056; WAN024C8O; Start 13; Stop 37
gtgttagaaccaagtgatttagatg

SEQ ID NO: 345375 - DNA, 25 bp, Artificial
  probe
  misc_feature (1)..(25): SEQ ID NO: 3056; WAN024C8O; Start 221; Stop 245
ctttacggattgcttctggaacttc

SEQ ID NO: 345376 - DNA, 25 bp, Artificial
  probe
  misc_feature (1)..(25): SEQ ID NO: 3056; WAN024C8O; Start 12; Stop 36
agtgttagaaccaagtgatttagat

SEQ ID NO: 345377 - DNA, 25 bp, Artificial
  probe
  misc_feature (1)..(25): SEQ ID NO: 3056; WAN024C8O; Start 213; Stop 237
atctactgctttacggattgcttct

SEQ ID NO: 345378 - DNA, 25 bp, Artificial
  probe
  misc_feature (1)..(25): SEQ ID NO: 3056; WAN024C8O; Start 210; Stop 234
atcatctactgctttacggattgct

SEQ ID NO: 345379 - DNA, 25 bp, Artificial
  probe
  misc_feature (1)..(25): SEQ ID NO: 3056; WAN024C8O; Start 209; Stop 233
catcatctactgctttacggattgc

SEQ ID NO: 345380 - DNA, 25 bp, Artificial
  probe
  misc_feature (1)..(25): SEQ ID NO: 3056; WAN024C8O; Start 211; Stop 235
tcatctactgctttacggattgctt

SEQ ID NO: 345381 - DNA, 25 bp, Artificial
  probe
  misc_feature (1)..(25): SEQ ID NO: 3056; WAN024C8O; Start 113; Stop 137
caggtttcaacaatactttagctcc

SEQ ID NO: 345382 - DNA, 25 bp, Artificial
  probe
  misc_feature (1)..(25): SEQ ID NO: 3056; WAN024C8O; Start 222; Stop 246
tttacggattgcttctggaacttct

SEQ ID NO: 345383 - DNA, 25 bp, Artificial
  probe
  misc_feature (1)..(25): SEQ ID NO: 3056; WAN024C8O; Start 116; Stop 140
gtttcaacaatactttagctccacc

SEQ ID NO: 345384 - DNA, 25 bp, Artificial
  probe
  misc_feature (1)..(25): SEQ ID NO: 3056; WAN024C8O; Start 115; Stop 139
ggtttcaacaatactttagctccac

SEQ ID NO: 345385 - DNA, 25 bp, Artificial
  probe
  misc_feature (1)..(25): SEQ ID NO: 3056; WAN024C8O; Start 114; Stop 138
aggtttcaacaatactttagctcca

SEQ ID NO: 345386 - DNA, 25 bp, Artificial
  probe
  misc_feature (1)..(25): SEQ ID NO: 3056; WAN024C8O; Start 103; Stop 127
ccttctacagcaggtttcaacaata

SEQ ID NO: 345387 - DNA, 25 bp, Artificial
  probe
  misc_feature (1)..(25): SEQ ID NO: 3056; WAN024C8O; Start 32; Stop 56
tagatgtaatatctgccacacctgc

SEQ ID NO: 345388 - DNA, 25 bp, Artificial
  probe
  misc_feature (1)..(25): SEQ ID NO: 3056; WAN024C8O; Start 121; Stop 145
aacaatactttagctccaccgaatt

SEQ ID NO: 345389 - DNA, 25 bp, Artificial
  probe
  misc_feature (1)..(25): SEQ ID NO: 3056; WAN024C8O; Start 112; Stop 136
gcaggtttcaacaatactttagctc

SEQ ID NO: 345390 - DNA, 25 bp, Artificial
  probe
  misc_feature (1)..(25): SEQ ID NO: 3056; WAN024C8O; Start 9; Stop 33
tggagtgttagaaccaagtgattta

SEQ ID NO: 345391 - DNA, 25 bp, Artificial
  probe
  misc_feature (1)..(25): SEQ ID NO: 3057; WAN024CMN; Start 26; Stop 50
tatctgtcaccaagtgtatcatcac

SEQ ID NO: 345392 - DNA, 25 bp, Artificial
  probe
  misc_feature (1)..(25): SEQ ID NO: 3057; WAN024CMN; Start 25; Stop 49
atatctgtcaccaagtgtatcatca

SEQ ID NO: 345393 - DNA, 25 bp, Artificial
  probe
  misc_feature (1)..(25): SEQ ID NO: 3057; WAN024CMN; Start 27; Stop 51
atctgtcaccaagtgtatcatcacc

SEQ ID NO: 345394 - DNA, 25 bp, Artificial
  probe
  misc_feature (1)..(25): SEQ ID NO: 3057; WAN024CMN; Start 29; Stop 53
ctgtcaccaagtgtatcatcaccaa

SEQ ID NO: 345395 - DNA, 25 bp, Artificial
  probe
  misc_feature (1)..(25): SEQ ID NO: 3057; WAN024CMN; Start 24; Stop 48
gatatctgtcaccaagtgtatcatc

SEQ ID NO: 345396 - DNA, 25 bp, Artificial
  probe
  misc_feature (1)..(25): SEQ ID NO: 3057; WAN024CMN; Start 21; Stop 45
gatgatatctgtcaccaagtgtatc

SEQ ID NO: 345397 - DNA, 25 bp, Artificial
  probe
  misc_feature (1)..(25): SEQ ID NO: 3057; WAN024CMN; Start 63; Stop 87
aacacaggagaatgtagatgcctac

SEQ ID NO: 345398 - DNA, 25 bp, Artificial
  probe
  misc_feature (1)..(25): SEQ ID NO: 3057; WAN024CMN; Start 62; Stop 86
aaacacaggagaatgtagatgccta

SEQ ID NO: 345399 - DNA, 25 bp, Artificial
  probe
  misc_feature (1)..(25): SEQ ID NO: 3057; WAN024CMN; Start 28; Stop 52
tctgtcaccaagtgtatcatcacca

SEQ ID NO: 345400 - DNA, 25 bp, Artificial
  probe
  misc_feature (1)..(25): SEQ ID NO: 3057; WAN024CMN; Start 20; Stop 44
agatgatatctgtcaccaagtgtat

SEQ ID NO: 345401 - DNA, 25 bp, Artificial
  probe
  misc_feature (1)..(25): SEQ ID NO: 3057; WAN024CMN; Start 30; Stop 54
tgtcaccaagtgtatcatcaccaaa

SEQ ID NO: 345402 - DNA, 25 bp, Artificial
  probe
  misc_feature (1)..(25): SEQ ID NO: 3057; WAN024CMN; Start 23; Stop 47
tgatatctgtcaccaagtgtatcat

SEQ ID NO: 345403 - DNA, 25 bp, Artificial
  probe
  misc_feature (1)..(25): SEQ ID NO: 3057; WAN024CMN; Start 22; Stop 46
atgatatctgtcaccaagtgtatca

SEQ ID NO: 345404 - DNA, 25 bp, Artificial
  probe
  misc_feature (1)..(25): SEQ ID NO: 3057; WAN024CMN; Start 31; Stop 55
gtcaccaagtgtatcatcaccaaaa

SEQ ID NO: 345405 - DNA, 25 bp, Artificial
  probe
  misc_feature (1)..(25): SEQ ID NO: 3057; WAN024CMN; Start 5; Stop 29
tgcaaaagtacacacagatgatatc

SEQ ID NO: 345406 - DNA, 25 bp, Artificial
  probe
  misc_feature (1)..(25): SEQ ID NO: 3057; WAN024CMN; Start 61; Stop 85
aaaacacaggagaatgtagatgcct

SEQ ID NO: 345407 - DNA, 25 bp, Artificial
  probe
  misc_feature (1)..(25): SEQ ID NO: 3057; WAN024CMN; Start 6; Stop 30
gcaaaagtacacacagatgatatct

SEQ ID NO: 345408 - DNA, 25 bp, Artificial
  probe
  misc_feature (1)..(25): SEQ ID NO: 3057; WAN024CMN; Start 3; Stop 27
gttgcaaaagtacacacagatgata

SEQ ID NO: 345409 - DNA, 25 bp, Artificial
  probe
  misc_feature (1)..(25): SEQ ID NO: 3057; WAN024CMN; Start 4; Stop 28
ttgcaaaagtacacacagatgatat

SEQ ID NO: 345410 - DNA, 25 bp, Artificial
  probe
  misc_feature (1)..(25): SEQ ID NO: 3057; WAN024CMN; Start 2; Stop 26
tgttgcaaaagtacacacagatgat

SEQ ID NO: 345411 - DNA, 25 bp, Artificial
  probe
  misc_feature (1)..(25): SEQ ID NO: 3057; WAN024CMN; Start 1; Stop 25
atgttgcaaaagtacacacagatga

SEQ ID NO: 345412 - DNA, 25 bp, Artificial
  probe
  misc_feature (1)..(25): SEQ ID NO: 3058; WAN024C8G; Start 152; Stop 176
ataacacgaccattacgacgaataa

SEQ ID NO: 345413 - DNA, 25 bp, Artificial
  probe
  misc_feature (1)..(25): SEQ ID NO: 3058; WAN024C8G; Start 145; Stop 169
aattaccataacacgaccattacga

SEQ ID NO: 345414 - DNA, 25 bp, Artificial
  probe
  misc_feature (1)..(25): SEQ ID NO: 3058; WAN024C8G; Start 146; Stop 170
attaccataacacgaccattacgac

SEQ ID NO: 345415 - DNA, 25 bp, Artificial
  probe
  misc_feature (1)..(25): SEQ ID NO: 3058; WAN024C8G; Start 151; Stop 175
cataacacgaccattacgacgaata

SEQ ID NO: 345416 - DNA, 25 bp, Artificial
  probe
  misc_feature (1)..(25): SEQ ID NO: 3058; WAN024C8G; Start 153; Stop 177
taacacgaccattacgacgaataac

SEQ ID NO: 345417 - DNA, 25 bp, Artificial
  probe
  misc_feature (1)..(25): SEQ ID NO: 3058; WAN024C8G; Start 24; Stop 48
acataagtcaatgagattactacgc

SEQ ID NO: 345418 - DNA, 25 bp, Artificial
  probe
  misc_feature (1)..(25): SEQ ID NO: 3058; WAN024C8G; Start 61; Stop 85
gaatatcaactccagcaatacgagc

SEQ ID NO: 345419 - DNA, 25 bp, Artificial
  probe
  misc_feature (1)..(25): SEQ ID NO: 3058; WAN024C8G; Start 155; Stop 179
acacgaccattacgacgaataactt

SEQ ID NO: 345420 - DNA, 25 bp, Artificial
  probe
  misc_feature (1)..(25): SEQ ID NO: 3058; WAN024C8G; Start 154; Stop 178
aacacgaccattacgacgaataact

SEQ ID NO: 345421 - DNA, 25 bp, Artificial
  probe
  misc_feature (1)..(25): SEQ ID NO: 3058; WAN024C8G; Start 60; Stop 84
ggaatatcaactccagcaatacgag

SEQ ID NO: 345422 - DNA, 25 bp, Artificial
  probe
  misc_feature (1)..(25): SEQ ID NO: 3058; WAN024C8G; Start 158; Stop 182
cgaccattacgacgaataactttac

SEQ ID NO: 345423 - DNA, 25 bp, Artificial
  probe
  misc_feature (1)..(25): SEQ ID NO: 3058; WAN024C8G; Start 6; Stop 30
gcaagtccgataccataaacataag

SEQ ID NO: 345424 - DNA, 25 bp, Artificial
  probe
  misc_feature (1)..(25): SEQ ID NO: 3058; WAN024C8G; Start 157; Stop 181
acgaccattacgacgaataacttta

SEQ ID NO: 345425 - DNA, 25 bp, Artificial
  probe
  misc_feature (1)..(25): SEQ ID NO: 3058; WAN024C8G; Start 93; Stop 117
tctcctttctatcttatccttgacg

SEQ ID NO: 345426 - DNA, 25 bp, Artificial
  probe
  misc_feature (1)..(25): SEQ ID NO: 3058; WAN024C8G; Start 9; Stop 33
agtccgataccataaacataagtca

SEQ ID NO: 345427 - DNA, 25 bp, Artificial
  probe
  misc_feature (1)..(25): SEQ ID NO: 3058; WAN024C8G; Start 160; Stop 184
accattacgacgaataactttacag

SEQ ID NO: 345428 - DNA, 25 bp, Artificial
  probe
  misc_feature (1)..(25): SEQ ID NO: 3058; WAN024C8G; Start 159; Stop 183
gaccattacgacgaataactttaca

SEQ ID NO: 345429 - DNA, 25 bp, Artificial
  probe
  misc_feature (1)..(25): SEQ ID NO: 3058; WAN024C8G; Start 147; Stop 171
ttaccataacacgaccattacgacg

SEQ ID NO: 345430 - DNA, 25 bp, Artificial
  probe
  misc_feature (1)..(25): SEQ ID NO: 3058; WAN024C8G; Start 142; Stop 166
gcaaattaccataacacgaccatta

SEQ ID NO: 345431 - DNA, 25 bp, Artificial
  probe
  misc_feature (1)..(25): SEQ ID NO: 3058; WAN024C8G; Start 144; Stop 168
aaattaccataacacgaccattacg

SEQ ID NO: 345432 - DNA, 25 bp, Artificial
  probe
  misc_feature (1)..(25): SEQ ID NO: 3058; WAN024C8G; Start 10; Stop 34
gtccgataccataaacataagtcaa

SEQ ID NO: 345433 - DNA, 25 bp, Artificial
  probe
  misc_feature (1)..(25): SEQ ID NO: 3058; WAN024C8G; Start 7; Stop 31
caagtccgataccataaacataagt

SEQ ID NO: 345434 - DNA, 25 bp, Artificial
  probe
  misc_feature (1)..(25): SEQ ID NO: 3058; WAN024C8G; Start 216; Stop 240
ctttcatttcttatccctccaagtt

SEQ ID NO: 345435 - DNA, 25 bp, Artificial
  probe
  misc_feature (1)..(25): SEQ ID NO: 3058; WAN024C8G; Start 177; Stop 201
ctttacagtattcgcaaattggttt

SEQ ID NO: 345436 - DNA, 25 bp, Artificial
  probe
  misc_feature (1)..(25): SEQ ID NO: 3058; WAN024C8G; Start 204; Stop 228
ccgatggtcttactttcatttctta

SEQ ID NO: 345437 - DNA, 25 bp, Artificial
  probe
  misc_feature (1)..(25): SEQ ID NO: 3058; WAN024C8G; Start 47; Stop 71
gcgtttgtcatttggaatatcaact

SEQ ID NO: 345438 - DNA, 25 bp, Artificial
  probe
  misc_feature (1)..(25): SEQ ID NO: 3058; WAN024C8G; Start 208; Stop 232
tggtcttactttcatttcttatccc

SEQ ID NO: 345439 - DNA, 25 bp, Artificial
  probe
  misc_feature (1)..(25): SEQ ID NO: 3058; WAN024C8G; Start 8; Stop 32
aagtccgataccataaacataagtc

SEQ ID NO: 345440 - DNA, 25 bp, Artificial
  probe
  misc_feature (1)..(25): SEQ ID NO: 3058; WAN024C8G; Start 150; Stop 174
ccataacacgaccattacgacgaat

SEQ ID NO: 345441 - DNA, 25 bp, Artificial
  probe
  misc_feature (1)..(25): SEQ ID NO: 3058; WAN024C8G; Start 176; Stop 200
actttacagtattcgcaaattggtt

SEQ ID NO: 345442 - DNA, 25 bp, Artificial
  probe
  misc_feature (1)..(25): SEQ ID NO: 3058; WAN024C8G; Start 175; Stop 199
aactttacagtattcgcaaattggt

SEQ ID NO: 345443 - DNA, 25 bp, Artificial
  probe
  misc_feature (1)..(25): SEQ ID NO: 3058; WAN024C8G; Start 48; Stop 72
cgtttgtcatttggaatatcaactc

SEQ ID NO: 345444 - DNA, 25 bp, Artificial
  probe
  misc_feature (1)..(25): SEQ ID NO: 3058; WAN024C8G; Start 143; Stop 167
caaattaccataacacgaccattac

SEQ ID NO: 345445 - DNA, 25 bp, Artificial
  probe
  misc_feature (1)..(25): SEQ ID NO: 3059; WAN024E2L; Start 163; Stop 187
ttgaacctcttcttggaacttacta

SEQ ID NO: 345446 - DNA, 25 bp, Artificial
  probe
  misc_feature (1)..(25): SEQ ID NO: 3059; WAN024E2L; Start 188; Stop 212
gccaacttgctgtctacaatataag

SEQ ID NO: 345447 - DNA, 25 bp, Artificial
  probe
  misc_feature (1)..(25): SEQ ID NO: 3059; WAN024E2L; Start 164; Stop 188
tgaacctcttcttggaacttactag

SEQ ID NO: 345448 - DNA, 25 bp, Artificial
  probe
  misc_feature (1)..(25): SEQ ID NO: 3059; WAN024E2L; Start 165; Stop 189
gaacctcttcttggaacttactagc

SEQ ID NO: 345449 - DNA, 25 bp, Artificial
  probe
  misc_feature (1)..(25): SEQ ID NO: 3059; WAN024E2L; Start 189; Stop 213
ccaacttgctgtctacaatataaga

SEQ ID NO: 345450 - DNA, 25 bp, Artificial
  probe
  misc_feature (1)..(25): SEQ ID NO: 3059; WAN024E2L; Start 166; Stop 190
aacctcttcttggaacttactagcc

SEQ ID NO: 345451 - DNA, 25 bp, Artificial
  probe
  misc_feature (1)..(25): SEQ ID NO: 3059; WAN024E2L; Start 162; Stop 186
tttgaacctcttcttggaacttact

SEQ ID NO: 345452 - DNA, 25 bp, Artificial
  probe
  misc_feature (1)..(25): SEQ ID NO: 3059; WAN024E2L; Start 155; Stop 179
ataagtgtttgaacctcttcttgga

SEQ ID NO: 345453 - DNA, 25 bp, Artificial
  probe
  misc_feature (1)..(25): SEQ ID NO: 3059; WAN024E2L; Start 156; Stop 180
taagtgtttgaacctcttcttggaa

SEQ ID NO: 345454 - DNA, 25 bp, Artificial
  probe
  misc_feature (1)..(25): SEQ ID NO: 3059; WAN024E2L; Start 161; Stop 185
gtttgaacctcttcttggaacttac

SEQ ID NO: 345455 - DNA, 25 bp, Artificial
  probe
  misc_feature (1)..(25): SEQ ID NO: 3059; WAN024E2L; Start 160; Stop 184
tgtttgaacctcttcttggaactta

SEQ ID NO: 345456 - DNA, 25 bp, Artificial
  probe
  misc_feature (1)..(25): SEQ ID NO: 3059; WAN024E2L; Start 103; Stop 127
gactgtccttcaaatatcttccaaa

SEQ ID NO: 345457 - DNA, 25 bp, Artificial
  probe
  misc_feature (1)..(25): SEQ ID NO: 3059; WAN024E2L; Start 187; Stop 211
agccaacttgctgtctacaatataa

SEQ ID NO: 345458 - DNA, 25 bp, Artificial
  probe
  misc_feature (1)..(25): SEQ ID NO: 3059; WAN024E2L; Start 186; Stop 210
tagccaacttgctgtctacaatata

SEQ ID NO: 345459 - DNA, 25 bp, Artificial
  probe
  misc_feature (1)..(25): SEQ ID NO: 3059; WAN024E2L; Start 185; Stop 209
ctagccaacttgctgtctacaatat

SEQ ID NO: 345460 - DNA, 25 bp, Artificial
  probe
  misc_feature (1)..(25): SEQ ID NO: 3059; WAN024E2L; Start 154; Stop 178
tataagtgtttgaacctcttcttgg

SEQ ID NO: 345461 - DNA, 25 bp, Artificial
  probe
  misc_feature (1)..(25): SEQ ID NO: 3059; WAN024E2L; Start 159; Stop 183
gtgtttgaacctcttcttggaactt

SEQ ID NO: 345462 - DNA, 25 bp, Artificial
  probe
  misc_feature (1)..(25): SEQ ID NO: 3059; WAN024E2L; Start 157; Stop 181
aagtgtttgaacctcttcttggaac

SEQ ID NO: 345463 - DNA, 25 bp, Artificial
  probe
  misc_feature (1)..(25): SEQ ID NO: 3059; WAN024E2L; Start 179; Stop 203
aacttactagccaacttgctgtcta

SEQ ID NO: 345464 - DNA, 25 bp, Artificial
  probe
  misc_feature (1)..(25): SEQ ID NO: 3059; WAN024E2L; Start 184; Stop 208
actagccaacttgctgtctacaata

SEQ ID NO: 345465 - DNA, 25 bp, Artificial
  probe
  misc_feature (1)..(25): SEQ ID NO: 3059; WAN024E2L; Start 183; Stop 207
tactagccaacttgctgtctacaat

SEQ ID NO: 345466 - DNA, 25 bp, Artificial
  probe
  misc_feature (1)..(25): SEQ ID NO: 3059; WAN024E2L; Start 182; Stop 206
ttactagccaacttgctgtctacaa

SEQ ID NO: 345467 - DNA, 25 bp, Artificial
  probe
  misc_feature (1)..(25): SEQ ID NO: 3059; WAN024E2L; Start 3; Stop 27
gttgcctcctttggatataattgtt

SEQ ID NO: 345468 - DNA, 25 bp, Artificial
  probe
  misc_feature (1)..(25): SEQ ID NO: 3059; WAN024E2L; Start 2; Stop 26
tgttgcctcctttggatataattgt

SEQ ID NO: 345469 - DNA, 25 bp, Artificial
  probe
  misc_feature (1)..(25): SEQ ID NO: 3059; WAN024E2L; Start 1; Stop 25
atgttgcctcctttggatataattg

SEQ ID NO: 345470 - DNA, 25 bp, Artificial
  probe
  misc_feature (1)..(25): SEQ ID NO: 3059; WAN024E2L; Start 167; Stop 191
acctcttcttggaacttactagcca

SEQ ID NO: 345471 - DNA, 25 bp, Artificial
  probe
  misc_feature (1)..(25): SEQ ID NO: 3059; WAN024E2L; Start 158; Stop 182
agtgtttgaacctcttcttggaact

SEQ ID NO: 345472 - DNA, 25 bp, Artificial
  probe
  misc_feature (1)..(25): SEQ ID NO: 3059; WAN024E2L; Start 85; Stop 109
ggtttgtgttcatcattggactgtc

SEQ ID NO: 345473 - DNA, 25 bp, Artificial
  probe
  misc_feature (1)..(25): SEQ ID NO: 3059; WAN024E2L; Start 181; Stop 205
cttactagccaacttgctgtctaca

SEQ ID NO: 345474 - DNA, 25 bp, Artificial
  probe
  misc_feature (1)..(25): SEQ ID NO: 3059; WAN024E2L; Start 180; Stop 204
acttactagccaacttgctgtctac

SEQ ID NO: 345475 - DNA, 25 bp, Artificial
  probe
  misc_feature (1)..(25): SEQ ID NO: 3059; WAN024E2L; Start 84; Stop 108
aggtttgtgttcatcattggactgt

SEQ ID NO: 345476 - DNA, 25 bp, Artificial
  probe
  misc_feature (1)..(25): SEQ ID NO: 3059; WAN024E2L; Start 91; Stop 115
tgttcatcattggactgtccttcaa

SEQ ID NO: 345477 - DNA, 25 bp, Artificial
  probe
  misc_feature (1)..(25): SEQ ID NO: 3059; WAN024E2L; Start 4; Stop 28
ttgcctcctttggatataattgtta

SEQ ID NO: 345478 - DNA, 25 bp, Artificial
  probe
  misc_feature (1)..(25): SEQ ID NO: 3060; WAN024CII; Start 59; Stop 83
aaagtgttgacaagcgaaagcagtt

SEQ ID NO: 345479 - DNA, 25 bp, Artificial
  probe
  misc_feature (1)..(25): SEQ ID NO: 3060; WAN024CII; Start 60; Stop 84
aagtgttgacaagcgaaagcagttg

SEQ ID NO: 345480 - DNA, 25 bp, Artificial
  probe
  misc_feature (1)..(25): SEQ ID NO: 3060; WAN024CII; Start 58; Stop 82
aaaagtgttgacaagcgaaagcagt

SEQ ID NO: 345481 - DNA, 25 bp, Artificial
  probe
  misc_feature (1)..(25): SEQ ID NO: 3061; WAN024B2O; Start 21; Stop 45
agagaagcactatgagaatacgatt

SEQ ID NO: 345482 - DNA, 25 bp, Artificial
  probe
  misc_feature (1)..(25): SEQ ID NO: 3061; WAN024B2O; Start 20; Stop 44
aagagaagcactatgagaatacgat

SEQ ID NO: 345483 - DNA, 25 bp, Artificial
  probe
  misc_feature (1)..(25): SEQ ID NO: 3061; WAN024B2O; Start 22; Stop 46
gagaagcactatgagaatacgattc

SEQ ID NO: 345484 - DNA, 25 bp, Artificial
  probe
  misc_feature (1)..(25): SEQ ID NO: 3061; WAN024B2O; Start 19; Stop 43
aaagagaagcactatgagaatacga

SEQ ID NO: 345485 - DNA, 25 bp, Artificial
  probe
  misc_feature (1)..(25): SEQ ID NO: 3061; WAN024B2O; Start 18; Stop 42
caaagagaagcactatgagaatacg

SEQ ID NO: 345486 - DNA, 25 bp, Artificial
  probe
  misc_feature (1)..(25): SEQ ID NO: 3061; WAN024B2O; Start 250; Stop 274
gtggactacattgattattacaaca

SEQ ID NO: 345487 - DNA, 25 bp, Artificial
  probe
  misc_feature (1)..(25): SEQ ID NO: 3061; WAN024B2O; Start 14; Stop 38
cattcaaagagaagcactatgagaa

SEQ ID NO: 345488 - DNA, 25 bp, Artificial
  probe
  misc_feature (1)..(25): SEQ ID NO: 3061; WAN024B2O; Start 13; Stop 37
gcattcaaagagaagcactatgaga

SEQ ID NO: 345489 - DNA, 25 bp, Artificial
  probe
  misc_feature (1)..(25): SEQ ID NO: 3061; WAN024B2O; Start 244; Stop 268
gctattgtggactacattgattatt

SEQ ID NO: 345490 - DNA, 25 bp, Artificial
  probe
  misc_feature (1)..(25): SEQ ID NO: 3061; WAN024B2O; Start 249; Stop 273
tgtggactacattgattattacaac

SEQ ID NO: 345491 - DNA, 25 bp, Artificial
  probe
  misc_feature (1)..(25): SEQ ID NO: 3061; WAN024B2O; Start 271; Stop 295
aacaacaagagaattaaggtaaagc

SEQ ID NO: 345492 - DNA, 25 bp, Artificial
  probe
  misc_feature (1)..(25): SEQ ID NO: 3061; WAN024B2O; Start 17; Stop 41
tcaaagagaagcactatgagaatac

SEQ ID NO: 345493 - DNA, 25 bp, Artificial
  probe
  misc_feature (1)..(25): SEQ ID NO: 3061; WAN024B2O; Start 243; Stop 267
agctattgtggactacattgattat

SEQ ID NO: 345494 - DNA, 25 bp, Artificial
  probe
  misc_feature (1)..(25): SEQ ID NO: 3061; WAN024B2O; Start 10; Stop 34
caggcattcaaagagaagcactatg

SEQ ID NO: 345495 - DNA, 25 bp, Artificial
  probe
  misc_feature (1)..(25): SEQ ID NO: 3061; WAN024B2O; Start 321; Stop 345
cagaactaaatccttcggactaact

SEQ ID NO: 345496 - DNA, 25 bp, Artificial
  probe
  misc_feature (1)..(25): SEQ ID NO: 3061; WAN024B2O; Start 12; Stop 36
ggcattcaaagagaagcactatgag

SEQ ID NO: 345497 - DNA, 25 bp, Artificial
  probe
  misc_feature (1)..(25): SEQ ID NO: 3061; WAN024B2O; Start 320; Stop 344
acagaactaaatccttcggactaac

SEQ ID NO: 345498 - DNA, 25 bp, Artificial
  probe
  misc_feature (1)..(25): SEQ ID NO: 3061; WAN024B2O; Start 317; Stop 341
aatacagaactaaatccttcggact

SEQ ID NO: 345499 - DNA, 25 bp, Artificial
  probe
  misc_feature (1)..(25): SEQ ID NO: 3061; WAN024B2O; Start 316; Stop 340
caatacagaactaaatccttcggac

SEQ ID NO: 345500 - DNA, 25 bp, Artificial
  probe
  misc_feature (1)..(25): SEQ ID NO: 3061; WAN024B2O; Start 251; Stop 275
tggactacattgattattacaacaa

SEQ ID NO: 345501 - DNA, 25 bp, Artificial
  probe
  misc_feature (1)..(25): SEQ ID NO: 3061; WAN024B2O; Start 9; Stop 33
acaggcattcaaagagaagcactat

SEQ ID NO: 345502 - DNA, 25 bp, Artificial
  probe
  misc_feature (1)..(25): SEQ ID NO: 3061; WAN024B2O; Start 315; Stop 339
gcaatacagaactaaatccttcgga

SEQ ID NO: 345503 - DNA, 25 bp, Artificial
  probe
  misc_feature (1)..(25): SEQ ID NO: 3061; WAN024B2O; Start 319; Stop 343
tacagaactaaatccttcggactaa

SEQ ID NO: 345504 - DNA, 25 bp, Artificial
  probe
  misc_feature (1)..(25): SEQ ID NO: 3061; WAN024B2O; Start 11; Stop 35
aggcattcaaagagaagcactatga

SEQ ID NO: 345505 - DNA, 25 bp, Artificial
  probe
  misc_feature (1)..(25): SEQ ID NO: 3061; WAN024B2O; Start 318; Stop 342
atacagaactaaatccttcggacta

SEQ ID NO: 345506 - DNA, 25 bp, Artificial
  probe
  misc_feature (1)..(25): SEQ ID NO: 3061; WAN024B2O; Start 16; Stop 40
ttcaaagagaagcactatgagaata

SEQ ID NO: 345507 - DNA, 25 bp, Artificial
  probe
  misc_feature (1)..(25): SEQ ID NO: 3061; WAN024B2O; Start 322; Stop 346
agaactaaatccttcggactaacta

SEQ ID NO: 345508 - DNA, 25 bp, Artificial
  probe
  misc_feature (1)..(25): SEQ ID NO: 3061; WAN024B2O; Start 252; Stop 276
ggactacattgattattacaacaac

SEQ ID NO: 345509 - DNA, 25 bp, Artificial
  probe
  misc_feature (1)..(25): SEQ ID NO: 3061; WAN024B2O; Start 8; Stop 32
aacaggcattcaaagagaagcacta

SEQ ID NO: 345510 - DNA, 25 bp, Artificial
  probe
  misc_feature (1)..(25): SEQ ID NO: 3061; WAN024B2O; Start 272; Stop 296
acaacaagagaattaaggtaaagct

SEQ ID NO: 345511 - DNA, 25 bp, Artificial
  probe
  misc_feature (1)..(25): SEQ ID NO: 3061; WAN024B2O; Start 3; Stop 27
gttggaacaggcattcaaagagaag

SEQ ID NO: 345512 - DNA, 25 bp, Artificial
  probe
  misc_feature (1)..(25): SEQ ID NO: 3061; WAN024B2O; Start 313; Stop 337
gtgcaatacagaactaaatccttcg

SEQ ID NO: 345513 - DNA, 25 bp, Artificial
  probe
  misc_feature (1)..(25): SEQ ID NO: 3061; WAN024B2O; Start 257; Stop 281
acattgattattacaacaacaagag

SEQ ID NO: 345514 - DNA, 25 bp, Artificial
  probe
  misc_feature (1)..(25): SEQ ID NO: 3062; WAN024CZJ; Start 32; Stop 56
agcaagcaatcaagaatatccagtt

SEQ ID NO: 345515 - DNA, 25 bp, Artificial
  probe
  misc_feature (1)..(25): SEQ ID NO: 3062; WAN024CZJ; Start 31; Stop 55
cagcaagcaatcaagaatatccagt

SEQ ID NO: 345516 - DNA, 25 bp, Artificial
  probe
  misc_feature (1)..(25): SEQ ID NO: 3062; WAN024CZJ; Start 28; Stop 52
gagcagcaagcaatcaagaatatcc

SEQ ID NO: 345517 - DNA, 25 bp, Artificial
  probe
  misc_feature (1)..(25): SEQ ID NO: 3062; WAN024CZJ; Start 27; Stop 51
ggagcagcaagcaatcaagaatatc

SEQ ID NO: 345518 - DNA, 25 bp, Artificial
  probe
  misc_feature (1)..(25): SEQ ID NO: 3062; WAN024CZJ; Start 30; Stop 54
gcagcaagcaatcaagaatatccag

SEQ ID NO: 345519 - DNA, 25 bp, Artificial
  probe
  misc_feature (1)..(25): SEQ ID NO: 3062; WAN024CZJ; Start 110; Stop 134
ctgttagtcgggttcttcatcatat

SEQ ID NO: 345520 - DNA, 25 bp, Artificial
  probe
  misc_feature (1)..(25): SEQ ID NO: 3062; WAN024CZJ; Start 33; Stop 57
gcaagcaatcaagaatatccagttt

SEQ ID NO: 345521 - DNA, 25 bp, Artificial
  probe
  misc_feature (1)..(25): SEQ ID NO: 3062; WAN024CZJ; Start 29; Stop 53
agcagcaagcaatcaagaatatcca

SEQ ID NO: 345522 - DNA, 25 bp, Artificial
  probe
  misc_feature (1)..(25): SEQ ID NO: 3062; WAN024CZJ; Start 170; Stop 194
aacatttgaaggaagatgggaaact

SEQ ID NO: 345523 - DNA, 25 bp, Artificial
  probe
  misc_feature (1)..(25): SEQ ID NO: 3062; WAN024CZJ; Start 171; Stop 195
acatttgaaggaagatgggaaactc

SEQ ID NO: 345524 - DNA, 25 bp, Artificial
  probe
  misc_feature (1)..(25): SEQ ID NO: 3062; WAN024CZJ; Start 173; Stop 197
atttgaaggaagatgggaaactcat

SEQ ID NO: 345525 - DNA, 25 bp, Artificial
  probe
  misc_feature (1)..(25): SEQ ID NO: 3062; WAN024CZJ; Start 169; Stop 193
caacatttgaaggaagatgggaaac

SEQ ID NO: 345526 - DNA, 25 bp, Artificial
  probe
  misc_feature (1)..(25): SEQ ID NO: 3062; WAN024CZJ; Start 91; Stop 115
aaagagtttgattgccttgctgtta

SEQ ID NO: 345527 - DNA, 25 bp, Artificial
  probe
  misc_feature (1)..(25): SEQ ID NO: 3062; WAN024CZJ; Start 172; Stop 196
catttgaaggaagatgggaaactca

SEQ ID NO: 345528 - DNA, 25 bp, Artificial
  probe
  misc_feature (1)..(25): SEQ ID NO: 3062; WAN024CZJ; Start 84; Stop 108
cttggagaaagagtttgattgcctt

SEQ ID NO: 345529 - DNA, 25 bp, Artificial
  probe
  misc_feature (1)..(25): SEQ ID NO: 3062; WAN024CZJ; Start 85; Stop 109
ttggagaaagagtttgattgccttg

SEQ ID NO: 345530 - DNA, 25 bp, Artificial
  probe
  misc_feature (1)..(25): SEQ ID NO: 3062; WAN024CZJ; Start 92; Stop 116
aagagtttgattgccttgctgttag

SEQ ID NO: 345531 - DNA, 25 bp, Artificial
  probe
  misc_feature (1)..(25): SEQ ID NO: 3062; WAN024CZJ; Start 109; Stop 133
gctgttagtcgggttcttcatcata

SEQ ID NO: 345532 - DNA, 25 bp, Artificial
  probe
  misc_feature (1)..(25): SEQ ID NO: 3062; WAN024CZJ; Start 235; Stop 259
ggatttgatttagctgaactggaaa

SEQ ID NO: 345533 - DNA, 25 bp, Artificial
  probe
  misc_feature (1)..(25): SEQ ID NO: 3062; WAN024CZJ; Start 233; Stop 257
atggatttgatttagctgaactgga

SEQ ID NO: 345534 - DNA, 25 bp, Artificial
  probe
  misc_feature (1)..(25): SEQ ID NO: 3062; WAN024CZJ; Start 232; Stop 256
catggatttgatttagctgaactgg

SEQ ID NO: 345535 - DNA, 25 bp, Artificial
  probe
  misc_feature (1)..(25): SEQ ID NO: 3062; WAN024CZJ; Start 78; Stop 102
aaatcccttggagaaagagtttgat

SEQ ID NO: 345536 - DNA, 25 bp, Artificial
  probe
  misc_feature (1)..(25): SEQ ID NO: 3062; WAN024CZJ; Start 234; Stop 258
tggatttgatttagctgaactggaa

SEQ ID NO: 345537 - DNA, 25 bp, Artificial
  probe
  misc_feature (1)..(25): SEQ ID NO: 3062; WAN024CZJ; Start 287; Stop 311
ctgtgcatagtcagattctctatag

SEQ ID NO: 345538 - DNA, 25 bp, Artificial
  probe
  misc_feature (1)..(25): SEQ ID NO: 3062; WAN024CZJ; Start 80; Stop 104
atcccttggagaaagagtttgattg

SEQ ID NO: 345539 - DNA, 25 bp, Artificial
  probe
  misc_feature (1)..(25): SEQ ID NO: 3062; WAN024CZJ; Start 94; Stop 118
gagtttgattgccttgctgttagtc

SEQ ID NO: 345540 - DNA, 25 bp, Artificial
  probe
  misc_feature (1)..(25): SEQ ID NO: 3062; WAN024CZJ; Start 79; Stop 103
aatcccttggagaaagagtttgatt

SEQ ID NO: 345541 - DNA, 25 bp, Artificial
  probe
  misc_feature (1)..(25): SEQ ID NO: 3062; WAN024CZJ; Start 231; Stop 255
tcatggatttgatttagctgaactg

SEQ ID NO: 345542 - DNA, 25 bp, Artificial
  probe
  misc_feature (1)..(25): SEQ ID NO: 3062; WAN024CZJ; Start 90; Stop 114
gaaagagtttgattgccttgctgtt

SEQ ID NO: 345543 - DNA, 25 bp, Artificial
  probe
  misc_feature (1)..(25): SEQ ID NO: 3062; WAN024CZJ; Start 93; Stop 117
agagtttgattgccttgctgttagt

SEQ ID NO: 345544 - DNA, 25 bp, Artificial
  probe
  misc_feature (1)..(25): SEQ ID NO: 3062; WAN024CZJ; Start 88; Stop 112
gagaaagagtttgattgccttgctg

SEQ ID NO: 345545 - DNA, 25 bp, Artificial
  probe
  misc_feature (1)..(25): SEQ ID NO: 3062; WAN024CZJ; Start 83; Stop 107
ccttggagaaagagtttgattgcct

SEQ ID NO: 345546 - DNA, 25 bp, Artificial
  probe
  misc_feature (1)..(25): SEQ ID NO: 3062; WAN024CZJ; Start 111; Stop 135
tgttagtcgggttcttcatcatatg

SEQ ID NO: 345547 - DNA, 25 bp, Artificial
  probe
  misc_feature (1)..(25): SEQ ID NO: 3063; WAN024G3J; Start 295; Stop 319
ttagaagccaatcaggttgaagaat

SEQ ID NO: 345548 - DNA, 25 bp, Artificial
  probe
  misc_feature (1)..(25): SEQ ID NO: 3063; WAN024G3J; Start 298; Stop 322
gaagccaatcaggttgaagaattag

SEQ ID NO: 345549 - DNA, 25 bp, Artificial
  probe
  misc_feature (1)..(25): SEQ ID NO: 3063; WAN024G3J; Start 297; Stop 321
agaagccaatcaggttgaagaatta

SEQ ID NO: 345550 - DNA, 25 bp, Artificial
  probe
  misc_feature (1)..(25): SEQ ID NO: 3063; WAN024G3J; Start 296; Stop 320
tagaagccaatcaggttgaagaatt

SEQ ID NO: 345551 - DNA, 25 bp, Artificial
  probe
  misc_feature (1)..(25): SEQ ID NO: 3063; WAN024G3J; Start 294; Stop 318
cttagaagccaatcaggttgaagaa

SEQ ID NO: 345552 - DNA, 25 bp, Artificial
  probe
  misc_feature (1)..(25): SEQ ID NO: 3063; WAN024G3J; Start 299; Stop 323
aagccaatcaggttgaagaattagg

SEQ ID NO: 345553 - DNA, 25 bp, Artificial
  probe
  misc_feature (1)..(25): SEQ ID NO: 3063; WAN024G3J; Start 292; Stop 316
ctcttagaagccaatcaggttgaag

SEQ ID NO: 345554 - DNA, 25 bp, Artificial
  probe
  misc_feature (1)..(25): SEQ ID NO: 3063; WAN024G3J; Start 291; Stop 315
tctcttagaagccaatcaggttgaa

SEQ ID NO: 345555 - DNA, 25 bp, Artificial
  probe
  misc_feature (1)..(25): SEQ ID NO: 3063; WAN024G3J; Start 288; Stop 312
ttgtctcttagaagccaatcaggtt

SEQ ID NO: 345556 - DNA, 25 bp, Artificial
  probe
  misc_feature (1)..(25): SEQ ID NO: 3063; WAN024G3J; Start 290; Stop 314
gtctcttagaagccaatcaggttga

SEQ ID NO: 345557 - DNA, 25 bp, Artificial
  probe
  misc_feature (1)..(25): SEQ ID NO: 3063; WAN024G3J; Start 289; Stop 313
tgtctcttagaagccaatcaggttg

SEQ ID NO: 345558 - DNA, 25 bp, Artificial
  probe
  misc_feature (1)..(25): SEQ ID NO: 3063; WAN024G3J; Start 308; Stop 332
aggttgaagaattagggtttgagat

SEQ ID NO: 345559 - DNA, 25 bp, Artificial
  probe
  misc_feature (1)..(25): SEQ ID NO: 3063; WAN024G3J; Start 307; Stop 331
caggttgaagaattagggtttgaga

SEQ ID NO: 345560 - DNA, 25 bp, Artificial
  probe
  misc_feature (1)..(25): SEQ ID NO: 3063; WAN024G3J; Start 284; Stop 308
atgtttgtctcttagaagccaatca

SEQ ID NO: 345561 - DNA, 25 bp, Artificial
  probe
  misc_feature (1)..(25): SEQ ID NO: 3063; WAN024G3J; Start 283; Stop 307
aatgtttgtctcttagaagccaatc

SEQ ID NO: 345562 - DNA, 25 bp, Artificial
  probe
  misc_feature (1)..(25): SEQ ID NO: 3063; WAN024G3J; Start 282; Stop 306
gaatgtttgtctcttagaagccaat

SEQ ID NO: 345563 - DNA, 25 bp, Artificial
  probe
  misc_feature (1)..(25): SEQ ID NO: 3063; WAN024G3J; Start 281; Stop 305
agaatgtttgtctcttagaagccaa

SEQ ID NO: 345564 - DNA, 25 bp, Artificial
  probe
  misc_feature (1)..(25): SEQ ID NO: 3063; WAN024G3J; Start 305; Stop 329
atcaggttgaagaattagggtttga

SEQ ID NO: 345565 - DNA, 25 bp, Artificial
  probe
  misc_feature (1)..(25): SEQ ID NO: 3063; WAN024G3J; Start 285; Stop 309
tgtttgtctcttagaagccaatcag

SEQ ID NO: 345566 - DNA, 25 bp, Artificial
  probe
  misc_feature (1)..(25): SEQ ID NO: 3063; WAN024G3J; Start 304; Stop 328
aatcaggttgaagaattagggtttg

SEQ ID NO: 345567 - DNA, 25 bp, Artificial
  probe
  misc_feature (1)..(25): SEQ ID NO: 3063; WAN024G3J; Start 303; Stop 327
caatcaggttgaagaattagggttt

SEQ ID NO: 345568 - DNA, 25 bp, Artificial
  probe
  misc_feature (1)..(25): SEQ ID NO: 3063; WAN024G3J; Start 309; Stop 333
ggttgaagaattagggtttgagata

SEQ ID NO: 345569 - DNA, 25 bp, Artificial
  probe
  misc_feature (1)..(25): SEQ ID NO: 3063; WAN024G3J; Start 306; Stop 330
tcaggttgaagaattagggtttgag

SEQ ID NO: 345570 - DNA, 25 bp, Artificial
  probe
  misc_feature (1)..(25): SEQ ID NO: 3063; WAN024G3J; Start 114; Stop 138
aattgcccttcgttctcttaaacat

SEQ ID NO: 345571 - DNA, 25 bp, Artificial
  probe
  misc_feature (1)..(25): SEQ ID NO: 3063; WAN024G3J; Start 302; Stop 326
ccaatcaggttgaagaattagggtt

SEQ ID NO: 345572 - DNA, 25 bp, Artificial
  probe
  misc_feature (1)..(25): SEQ ID NO: 3063; WAN024G3J; Start 163; Stop 187
gcagaatttccaaacctcatcatct

SEQ ID NO: 345573 - DNA, 25 bp, Artificial
  probe
  misc_feature (1)..(25): SEQ ID NO: 3063; WAN024G3J; Start 286; Stop 310
gtttgtctcttagaagccaatcagg

SEQ ID NO: 345574 - DNA, 25 bp, Artificial
  probe
  misc_feature (1)..(25): SEQ ID NO: 3063; WAN024G3J; Start 180; Stop 204
catcatctggtcaactttgaacaag

SEQ ID NO: 345575 - DNA, 25 bp, Artificial
  probe
  misc_feature (1)..(25): SEQ ID NO: 3063; WAN024G3J; Start 293; Stop 317
tcttagaagccaatcaggttgaaga

SEQ ID NO: 345576 - DNA, 25 bp, Artificial
  probe
  misc_feature (1)..(25): SEQ ID NO: 3063; WAN024G3J; Start 179; Stop 203
tcatcatctggtcaactttgaacaa

SEQ ID NO: 345577 - DNA, 25 bp, Artificial
  probe
  misc_feature (1)..(25): SEQ ID NO: 3063; WAN024G3J; Start 118; Stop 142
gcccttcgttctcttaaacatgata

SEQ ID NO: 345578 - DNA, 25 bp, Artificial
  probe
  misc_feature (1)..(25): SEQ ID NO: 3063; WAN024G3J; Start 287; Stop 311
tttgtctcttagaagccaatcaggt

SEQ ID NO: 345579 - DNA, 25 bp, Artificial
  probe
  misc_feature (1)..(25): SEQ ID NO: 3063; WAN024G3J; Start 178; Stop 202
ctcatcatctggtcaactttgaaca

SEQ ID NO: 345580 - DNA, 25 bp, Artificial
  probe
  misc_feature (1)..(25): SEQ ID NO: 3064; WAN024ETO; Start 17; Stop 41
tagatagcagagaagaaaggcattt

SEQ ID NO: 345581 - DNA, 25 bp, Artificial
  probe
  misc_feature (1)..(25): SEQ ID NO: 3064; WAN024ETO; Start 13; Stop 37
aaagtagatagcagagaagaaaggc

SEQ ID NO: 345582 - DNA, 25 bp, Artificial
  probe
  misc_feature (1)..(25): SEQ ID NO: 3064; WAN024ETO; Start 10; Stop 34
agcaaagtagatagcagagaagaaa

SEQ ID NO: 345583 - DNA, 25 bp, Artificial
  probe
  misc_feature (1)..(25): SEQ ID NO: 3064; WAN024ETO; Start 132; Stop 156
tttcttcttgagtagtcgcttcttt

SEQ ID NO: 345584 - DNA, 25 bp, Artificial
  probe
  misc_feature (1)..(25): SEQ ID NO: 3064; WAN024ETO; Start 16; Stop 40
gtagatagcagagaagaaaggcatt

SEQ ID NO: 345585 - DNA, 25 bp, Artificial
  probe
  misc_feature (1)..(25): SEQ ID NO: 3064; WAN024ETO; Start 9; Stop 33
cagcaaagtagatagcagagaagaa

SEQ ID NO: 345586 - DNA, 25 bp, Artificial
  probe
  misc_feature (1)..(25): SEQ ID NO: 3064; WAN024ETO; Start 37; Stop 61
catttgaaggaggatagggaaacat

SEQ ID NO: 345587 - DNA, 25 bp, Artificial
  probe
  misc_feature (1)..(25): SEQ ID NO: 3064; WAN024ETO; Start 11; Stop 35
gcaaagtagatagcagagaagaaag

SEQ ID NO: 345588 - DNA, 25 bp, Artificial
  probe
  misc_feature (1)..(25): SEQ ID NO: 3064; WAN024ETO; Start 38; Stop 62
atttgaaggaggatagggaaacatc

SEQ ID NO: 345589 - DNA, 25 bp, Artificial
  probe
  misc_feature (1)..(25): SEQ ID NO: 3064; WAN024ETO; Start 20; Stop 44
atagcagagaagaaaggcatttgaa

SEQ ID NO: 345590 - DNA, 25 bp, Artificial
  probe
  misc_feature (1)..(25): SEQ ID NO: 3064; WAN024ETO; Start 29; Stop 53
aagaaaggcatttgaaggaggatag

SEQ ID NO: 345591 - DNA, 25 bp, Artificial
  probe
  misc_feature (1)..(25): SEQ ID NO: 3064; WAN024ETO; Start 28; Stop 52
gaagaaaggcatttgaaggaggata

SEQ ID NO: 345592 - DNA, 25 bp, Artificial
  probe
  misc_feature (1)..(25): SEQ ID NO: 3064; WAN024ETO; Start 133; Stop 157
ttcttcttgagtagtcgcttctttg

SEQ ID NO: 345593 - DNA, 25 bp, Artificial
  probe
  misc_feature (1)..(25): SEQ ID NO: 3064; WAN024ETO; Start 15; Stop 39
agtagatagcagagaagaaaggcat

SEQ ID NO: 345594 - DNA, 25 bp, Artificial
  probe
  misc_feature (1)..(25): SEQ ID NO: 3064; WAN024ETO; Start 12; Stop 36
caaagtagatagcagagaagaaagg

SEQ ID NO: 345595 - DNA, 25 bp, Artificial
  probe
  misc_feature (1)..(25): SEQ ID NO: 3064; WAN024ETO; Start 19; Stop 43
gatagcagagaagaaaggcatttga

SEQ ID NO: 345596 - DNA, 25 bp, Artificial
  probe
  misc_feature (1)..(25): SEQ ID NO: 3064; WAN024ETO; Start 18; Stop 42
agatagcagagaagaaaggcatttg

SEQ ID NO: 345597 - DNA, 25 bp, Artificial
  probe
  misc_feature (1)..(25): SEQ ID NO: 3064; WAN024ETO; Start 14; Stop 38
aagtagatagcagagaagaaaggca

SEQ ID NO: 345598 - DNA, 25 bp, Artificial
  probe
  misc_feature (1)..(25): SEQ ID NO: 3064; WAN024ETO; Start 21; Stop 45
tagcagagaagaaaggcatttgaag

SEQ ID NO: 345599 - DNA, 25 bp, Artificial
  probe
  misc_feature (1)..(25): SEQ ID NO: 3064; WAN024ETO; Start 135; Stop 159
cttcttgagtagtcgcttctttgag

SEQ ID NO: 345600 - DNA, 25 bp, Artificial
  probe
  misc_feature (1)..(25): SEQ ID NO: 3064; WAN024ETO; Start 134; Stop 158
tcttcttgagtagtcgcttctttga

SEQ ID NO: 345601 - DNA, 25 bp, Artificial
  probe
  misc_feature (1)..(25): SEQ ID NO: 3064; WAN024ETO; Start 24; Stop 48
cagagaagaaaggcatttgaaggag

SEQ ID NO: 345602 - DNA, 25 bp, Artificial
  probe
  misc_feature (1)..(25): SEQ ID NO: 3064; WAN024ETO; Start 136; Stop 160
ttcttgagtagtcgcttctttgaga

SEQ ID NO: 345603 - DNA, 25 bp, Artificial
  probe
  misc_feature (1)..(25): SEQ ID NO: 3064; WAN024ETO; Start 27; Stop 51
agaagaaaggcatttgaaggaggat

SEQ ID NO: 345604 - DNA, 25 bp, Artificial
  probe
  misc_feature (1)..(25): SEQ ID NO: 3064; WAN024ETO; Start 30; Stop 54
agaaaggcatttgaaggaggatagg

SEQ ID NO: 345605 - DNA, 25 bp, Artificial
  probe
  misc_feature (1)..(25): SEQ ID NO: 3064; WAN024ETO; Start 8; Stop 32
gcagcaaagtagatagcagagaaga

SEQ ID NO: 345606 - DNA, 25 bp, Artificial
  probe
  misc_feature (1)..(25): SEQ ID NO: 3064; WAN024ETO; Start 36; Stop 60
gcatttgaaggaggatagggaaaca

SEQ ID NO: 345607 - DNA, 25 bp, Artificial
  probe
  misc_feature (1)..(25): SEQ ID NO: 3064; WAN024ETO; Start 26; Stop 50
gagaagaaaggcatttgaaggagga

SEQ ID NO: 345608 - DNA, 25 bp, Artificial
  probe
  misc_feature (1)..(25): SEQ ID NO: 3064; WAN024ETO; Start 25; Stop 49
agagaagaaaggcatttgaaggagg

SEQ ID NO: 345609 - DNA, 25 bp, Artificial
  probe
  misc_feature (1)..(25): SEQ ID NO: 3064; WAN024ETO; Start 137; Stop 161
tcttgagtagtcgcttctttgagac

SEQ ID NO: 345610 - DNA, 25 bp, Artificial
  probe
  misc_feature (1)..(25): SEQ ID NO: 3064; WAN024ETO; Start 31; Stop 55
gaaaggcatttgaaggaggataggg

SEQ ID NO: 345611 - DNA, 25 bp, Artificial
  probe
  misc_feature (1)..(25): SEQ ID NO: 3064; WAN024ETO; Start 7; Stop 31
ggcagcaaagtagatagcagagaag

SEQ ID NO: 345612 - DNA, 25 bp, Artificial
  probe
  misc_feature (1)..(25): SEQ ID NO: 3064; WAN024ETO; Start 35; Stop 59
ggcatttgaaggaggatagggaaac

SEQ ID NO: 345613 - DNA, 25 bp, Artificial
  probe
  misc_feature (1)..(25): SEQ ID NO: 3065; WAN024CEZ; Start 6; Stop 30
ggtattccaaatgcgtaatgtagat

SEQ ID NO: 345614 - DNA, 25 bp, Artificial
  probe
  misc_feature (1)..(25): SEQ ID NO: 3065; WAN024CEZ; Start 5; Stop 29
tggtattccaaatgcgtaatgtaga

SEQ ID NO: 345615 - DNA, 25 bp, Artificial
  probe
  misc_feature (1)..(25): SEQ ID NO: 3065; WAN024CEZ; Start 9; Stop 33
attccaaatgcgtaatgtagataaa

SEQ ID NO: 345616 - DNA, 25 bp, Artificial
  probe
  misc_feature (1)..(25): SEQ ID NO: 3065; WAN024CEZ; Start 60; Stop 84
aaacagtgattacgcagataaataa

SEQ ID NO: 345617 - DNA, 25 bp, Artificial
  probe
  misc_feature (1)..(25): SEQ ID NO: 3065; WAN024CEZ; Start 7; Stop 31
gtattccaaatgcgtaatgtagata

SEQ ID NO: 345618 - DNA, 25 bp, Artificial
  probe
  misc_feature (1)..(25): SEQ ID NO: 3065; WAN024CEZ; Start 8; Stop 32
tattccaaatgcgtaatgtagataa

SEQ ID NO: 345619 - DNA, 25 bp, Artificial
  probe
  misc_feature (1)..(25): SEQ ID NO: 3065; WAN024CEZ; Start 11; Stop 35
tccaaatgcgtaatgtagataaaac

SEQ ID NO: 345620 - DNA, 25 bp, Artificial
  probe
  misc_feature (1)..(25): SEQ ID NO: 3065; WAN024CEZ; Start 12; Stop 36
ccaaatgcgtaatgtagataaaaca

SEQ ID NO: 345621 - DNA, 25 bp, Artificial
  probe
  misc_feature (1)..(25): SEQ ID NO: 3065; WAN024CEZ; Start 10; Stop 34
ttccaaatgcgtaatgtagataaaa

SEQ ID NO: 345622 - DNA, 25 bp, Artificial
  probe
  misc_feature (1)..(25): SEQ ID NO: 3065; WAN024CEZ; Start 59; Stop 83
aaaacagtgattacgcagataaata

SEQ ID NO: 345623 - DNA, 25 bp, Artificial
  probe
  misc_feature (1)..(25): SEQ ID NO: 3065; WAN024CEZ; Start 4; Stop 28
ttggtattccaaatgcgtaatgtag

SEQ ID NO: 345624 - DNA, 25 bp, Artificial
  probe
  misc_feature (1)..(25): SEQ ID NO: 3065; WAN024CEZ; Start 3; Stop 27
gttggtattccaaatgcgtaatgta

SEQ ID NO: 345625 - DNA, 25 bp, Artificial
  probe
  misc_feature (1)..(25): SEQ ID NO: 3065; WAN024CEZ; Start 1; Stop 25
atgttggtattccaaatgcgtaatg

SEQ ID NO: 345626 - DNA, 25 bp, Artificial
  probe
  misc_feature (1)..(25): SEQ ID NO: 3065; WAN024CEZ; Start 2; Stop 26
tgttggtattccaaatgcgtaatgt

SEQ ID NO: 345627 - DNA, 25 bp, Artificial
  probe
  misc_feature (1)..(25): SEQ ID NO: 3065; WAN024CEZ; Start 15; Stop 39
aatgcgtaatgtagataaaacatct

SEQ ID NO: 345628 - DNA, 25 bp, Artificial
  probe
  misc_feature (1)..(25): SEQ ID NO: 3065; WAN024CEZ; Start 13; Stop 37
caaatgcgtaatgtagataaaacat

SEQ ID NO: 345629 - DNA, 25 bp, Artificial
  probe
  misc_feature (1)..(25): SEQ ID NO: 3065; WAN024CEZ; Start 14; Stop 38
aaatgcgtaatgtagataaaacatc

SEQ ID NO: 345630 - DNA, 25 bp, Artificial
  probe
  misc_feature (1)..(25): SEQ ID NO: 3065; WAN024CEZ; Start 16; Stop 40
atgcgtaatgtagataaaacatcta

SEQ ID NO: 345631 - DNA, 25 bp, Artificial
  probe
  misc_feature (1)..(25): SEQ ID NO: 3066; WAN024FHM; Start 75; Stop 99
cggtgctattgattatatccttgga

SEQ ID NO: 345632 - DNA, 25 bp, Artificial
  probe
  misc_feature (1)..(25): SEQ ID NO: 3066; WAN024FHM; Start 495; Stop 519
tgtctggaatgatgaagaagttaga

SEQ ID NO: 345633 - DNA, 25 bp, Artificial
  probe
  misc_feature (1)..(25): SEQ ID NO: 3066; WAN024FHM; Start 494; Stop 518
ttgtctggaatgatgaagaagttag

SEQ ID NO: 345634 - DNA, 25 bp, Artificial
  probe
  misc_feature (1)..(25): SEQ ID NO: 3066; WAN024FHM; Start 496; Stop 520
gtctggaatgatgaagaagttagat

SEQ ID NO: 345635 - DNA, 25 bp, Artificial
  probe
  misc_feature (1)..(25): SEQ ID NO: 3066; WAN024FHM; Start 76; Stop 100
ggtgctattgattatatccttggaa

SEQ ID NO: 345636 - DNA, 25 bp, Artificial
  probe
  misc_feature (1)..(25): SEQ ID NO: 3066; WAN024FHM; Start 438; Stop 462
cttcgccaatatcggtaaatacatc

SEQ ID NO: 345637 - DNA, 25 bp, Artificial
  probe
  misc_feature (1)..(25): SEQ ID NO: 3066; WAN024FHM; Start 440; Stop 464
tcgccaatatcggtaaatacatctt

SEQ ID NO: 345638 - DNA, 25 bp, Artificial
  probe
  misc_feature (1)..(25): SEQ ID NO: 3066; WAN024FHM; Start 439; Stop 463
ttcgccaatatcggtaaatacatct

SEQ ID NO: 345639 - DNA, 25 bp, Artificial
  probe
  misc_feature (1)..(25): SEQ ID NO: 3066; WAN024FHM; Start 435; Stop 459
aaacttcgccaatatcggtaaatac

SEQ ID NO: 345640 - DNA, 25 bp, Artificial
  probe
  misc_feature (1)..(25): SEQ ID NO: 3066; WAN024FHM; Start 441; Stop 465
cgccaatatcggtaaatacatcttt

SEQ ID NO: 345641 - DNA, 25 bp, Artificial
  probe
  misc_feature (1)..(25): SEQ ID NO: 3066; WAN024FHM; Start 437; Stop 461
acttcgccaatatcggtaaatacat

SEQ ID NO: 345642 - DNA, 25 bp, Artificial
  probe
  misc_feature (1)..(25): SEQ ID NO: 3066; WAN024FHM; Start 434; Stop 458
gaaacttcgccaatatcggtaaata

SEQ ID NO: 345643 - DNA, 25 bp, Artificial
  probe
  misc_feature (1)..(25): SEQ ID NO: 3066; WAN024FHM; Start 436; Stop 460
aacttcgccaatatcggtaaataca

SEQ ID NO: 345644 - DNA, 25 bp, Artificial
  probe
  misc_feature (1)..(25): SEQ ID NO: 3066; WAN024FHM; Start 425; Stop 449
gtattcaaggaaacttcgccaatat

SEQ ID NO: 345645 - DNA, 25 bp, Artificial
  probe
  misc_feature (1)..(25): SEQ ID NO: 3066; WAN024FHM; Start 426; Stop 450
tattcaaggaaacttcgccaatatc

SEQ ID NO: 345646 - DNA, 25 bp, Artificial
  probe
  misc_feature (1)..(25): SEQ ID NO: 3066; WAN024FHM; Start 487; Stop 511
gctttatttgtctggaatgatgaag

SEQ ID NO: 345647 - DNA, 25 bp, Artificial
  probe
  misc_feature (1)..(25): SEQ ID NO: 3066; WAN024FHM; Start 497; Stop 521
tctggaatgatgaagaagttagata

SEQ ID NO: 345648 - DNA, 25 bp, Artificial
  probe
  misc_feature (1)..(25): SEQ ID NO: 3066; WAN024FHM; Start 492; Stop 516
atttgtctggaatgatgaagaagtt

SEQ ID NO: 345649 - DNA, 25 bp, Artificial
  probe
  misc_feature (1)..(25): SEQ ID NO: 3066; WAN024FHM; Start 424; Stop 448
ggtattcaaggaaacttcgccaata

SEQ ID NO: 345650 - DNA, 25 bp, Artificial
  probe
  misc_feature (1)..(25): SEQ ID NO: 3066; WAN024FHM; Start 433; Stop 457
ggaaacttcgccaatatcggtaaat

SEQ ID NO: 345651 - DNA, 25 bp, Artificial
  probe
  misc_feature (1)..(25): SEQ ID NO: 3066; WAN024FHM; Start 388; Stop 412
tggttgatttacaatttcgttcagc

SEQ ID NO: 345652 - DNA, 25 bp, Artificial
  probe
  misc_feature (1)..(25): SEQ ID NO: 3066; WAN024FHM; Start 493; Stop 517
tttgtctggaatgatgaagaagtta

SEQ ID NO: 345653 - DNA, 25 bp, Artificial
  probe
  misc_feature (1)..(25): SEQ ID NO: 3066; WAN024FHM; Start 387; Stop 411
ttggttgatttacaatttcgttcag

SEQ ID NO: 345654 - DNA, 25 bp, Artificial
  probe
  misc_feature (1)..(25): SEQ ID NO: 3066; WAN024FHM; Start 491; Stop 515
tatttgtctggaatgatgaagaagt

SEQ ID NO: 345655 - DNA, 25 bp, Artificial
  probe
  misc_feature (1)..(25): SEQ ID NO: 3066; WAN024FHM; Start 427; Stop 451
attcaaggaaacttcgccaatatcg

SEQ ID NO: 345656 - DNA, 25 bp, Artificial
  probe
  misc_feature (1)..(25): SEQ ID NO: 3066; WAN024FHM; Start 73; Stop 97
tccggtgctattgattatatccttg

SEQ ID NO: 345657 - DNA, 25 bp, Artificial
  probe
  misc_feature (1)..(25): SEQ ID NO: 3066; WAN024FHM; Start 72; Stop 96
gtccggtgctattgattatatcctt

SEQ ID NO: 345658 - DNA, 25 bp, Artificial
  probe
  misc_feature (1)..(25): SEQ ID NO: 3066; WAN024FHM; Start 70; Stop 94
ttgtccggtgctattgattatatcc

SEQ ID NO: 345659 - DNA, 25 bp, Artificial
  probe
  misc_feature (1)..(25): SEQ ID NO: 3066; WAN024FHM; Start 386; Stop 410
tttggttgatttacaatttcgttca

SEQ ID NO: 345660 - DNA, 25 bp, Artificial
  probe
  misc_feature (1)..(25): SEQ ID NO: 3066; WAN024FHM; Start 225; Stop 249
catcatcatttccatcatcgccttc

SEQ ID NO: 345661 - DNA, 25 bp, Artificial
  probe
  misc_feature (1)..(25): SEQ ID NO: 3066; WAN024FHM; Start 484; Stop 508
ggagctttatttgtctggaatgatg

SEQ ID NO: 345662 - DNA, 25 bp, Artificial
  probe
  misc_feature (1)..(25): SEQ ID NO: 3066; WAN024FHM; Start 74; Stop 98
ccggtgctattgattatatccttgg

SEQ ID NO: 345663 - DNA, 25 bp, Artificial
  probe
  misc_feature (1)..(25): SEQ ID NO: 3066; WAN024FHM; Start 71; Stop 95
tgtccggtgctattgattatatcct

SEQ ID NO: 345664 - DNA, 25 bp, Artificial
  probe
  misc_feature (1)..(25): SEQ ID NO: 3067; WAN024GF8; Start 270; Stop 294
gctccaagtccttgataatctccat

SEQ ID NO: 345665 - DNA, 25 bp, Artificial
  probe
  misc_feature (1)..(25): SEQ ID NO: 3067; WAN024GF8; Start 230; Stop 254
aagagaccaatcgttccacagtaga

SEQ ID NO: 345666 - DNA, 25 bp, Artificial
  probe
  misc_feature (1)..(25): SEQ ID NO: 3067; WAN024GF8; Start 229; Stop 253
caagagaccaatcgttccacagtag

SEQ ID NO: 345667 - DNA, 25 bp, Artificial
  probe
  misc_feature (1)..(25): SEQ ID NO: 3067; WAN024GF8; Start 6; Stop 30
gttcttcaaacagcaagttcttctg

SEQ ID NO: 345668 - DNA, 25 bp, Artificial
  probe
  misc_feature (1)..(25): SEQ ID NO: 3067; WAN024GF8; Start 231; Stop 255
agagaccaatcgttccacagtagac

SEQ ID NO: 345669 - DNA, 25 bp, Artificial
  probe
  misc_feature (1)..(25): SEQ ID NO: 3067; WAN024GF8; Start 233; Stop 257
agaccaatcgttccacagtagactc

SEQ ID NO: 345670 - DNA, 25 bp, Artificial
  probe
  misc_feature (1)..(25): SEQ ID NO: 3067; WAN024GF8; Start 232; Stop 256
gagaccaatcgttccacagtagact

SEQ ID NO: 345671 - DNA, 25 bp, Artificial
  probe
  misc_feature (1)..(25): SEQ ID NO: 3067; WAN024GF8; Start 7; Stop 31
ttcttcaaacagcaagttcttctgg

SEQ ID NO: 345672 - DNA, 25 bp, Artificial
  probe
  misc_feature (1)..(25): SEQ ID NO: 3067; WAN024GF8; Start 60; Stop 84
aacgagcttgtttacgatagagaac

SEQ ID NO: 345673 - DNA, 25 bp, Artificial
  probe
  misc_feature (1)..(25): SEQ ID NO: 3067; WAN024GF8; Start 269; Stop 293
ggctccaagtccttgataatctcca

SEQ ID NO: 345674 - DNA, 25 bp, Artificial
  probe
  misc_feature (1)..(25): SEQ ID NO: 3067; WAN024GF8; Start 234; Stop 258
gaccaatcgttccacagtagactcc

SEQ ID NO: 345675 - DNA, 25 bp, Artificial
  probe
  misc_feature (1)..(25): SEQ ID NO: 3067; WAN024GF8; Start 59; Stop 83
aaacgagcttgtttacgatagagaa

SEQ ID NO: 345676 - DNA, 25 bp, Artificial
  probe
  misc_feature (1)..(25): SEQ ID NO: 3067; WAN024GF8; Start 228; Stop 252
gcaagagaccaatcgttccacagta

SEQ ID NO: 345677 - DNA, 25 bp, Artificial
  probe
  misc_feature (1)..(25): SEQ ID NO: 3067; WAN024GF8; Start 58; Stop 82
gaaacgagcttgtttacgatagaga

SEQ ID NO: 345678 - DNA, 25 bp, Artificial
  probe
  misc_feature (1)..(25): SEQ ID NO: 3067; WAN024GF8; Start 236; Stop 260
ccaatcgttccacagtagactccac

SEQ ID NO: 345679 - DNA, 25 bp, Artificial
  probe
  misc_feature (1)..(25): SEQ ID NO: 3067; WAN024GF8; Start 4; Stop 28
ttgttcttcaaacagcaagttcttc

SEQ ID NO: 345680 - DNA, 25 bp, Artificial
  probe
  misc_feature (1)..(25): SEQ ID NO: 3067; WAN024GF8; Start 3; Stop 27
gttgttcttcaaacagcaagttctt

SEQ ID NO: 345681 - DNA, 25 bp, Artificial
  probe
  misc_feature (1)..(25): SEQ ID NO: 3067; WAN024GF8; Start 1; Stop 25
atgttgttcttcaaacagcaagttc

SEQ ID NO: 345682 - DNA, 25 bp, Artificial
  probe
  misc_feature (1)..(25): SEQ ID NO: 3067; WAN024GF8; Start 5; Stop 29
tgttcttcaaacagcaagttcttct

SEQ ID NO: 345683 - DNA, 25 bp, Artificial
  probe
  misc_feature (1)..(25): SEQ ID NO: 3067; WAN024GF8; Start 57; Stop 81
ggaaacgagcttgtttacgatagag

SEQ ID NO: 345684 - DNA, 25 bp, Artificial
  probe
  misc_feature (1)..(25): SEQ ID NO: 3067; WAN024GF8; Start 55; Stop 79
ctggaaacgagcttgtttacgatag

SEQ ID NO: 345685 - DNA, 25 bp, Artificial
  probe
  misc_feature (1)..(25): SEQ ID NO: 3067; WAN024GF8; Start 2; Stop 26
tgttgttcttcaaacagcaagttct

SEQ ID NO: 345686 - DNA, 25 bp, Artificial
  probe
  misc_feature (1)..(25): SEQ ID NO: 3067; WAN024GF8; Start 56; Stop 80
tggaaacgagcttgtttacgataga

SEQ ID NO: 345687 - DNA, 25 bp, Artificial
  probe
  misc_feature (1)..(25): SEQ ID NO: 3067; WAN024GF8; Start 8; Stop 32
tcttcaaacagcaagttcttctggc

SEQ ID NO: 345688 - DNA, 25 bp, Artificial
  probe
  misc_feature (1)..(25): SEQ ID NO: 3067; WAN024GF8; Start 62; Stop 86
cgagcttgtttacgatagagaacag

SEQ ID NO: 345689 - DNA, 25 bp, Artificial
  probe
  misc_feature (1)..(25): SEQ ID NO: 3067; WAN024GF8; Start 63; Stop 87
gagcttgtttacgatagagaacagc

SEQ ID NO: 345690 - DNA, 25 bp, Artificial
  probe
  misc_feature (1)..(25): SEQ ID NO: 3067; WAN024GF8; Start 61; Stop 85
acgagcttgtttacgatagagaaca

SEQ ID NO: 345691 - DNA, 25 bp, Artificial
  probe
  misc_feature (1)..(25): SEQ ID NO: 3067; WAN024GF8; Start 9; Stop 33
cttcaaacagcaagttcttctggct

SEQ ID NO: 345692 - DNA, 25 bp, Artificial
  probe
  misc_feature (1)..(25): SEQ ID NO: 3067; WAN024GF8; Start 54; Stop 78
gctggaaacgagcttgtttacgata

SEQ ID NO: 345693 - DNA, 25 bp, Artificial
  probe
  misc_feature (1)..(25): SEQ ID NO: 3067; WAN024GF8; Start 64; Stop 88
agcttgtttacgatagagaacagct

SEQ ID NO: 345694 - DNA, 25 bp, Artificial
  probe
  misc_feature (1)..(25): SEQ ID NO: 3067; WAN024GF8; Start 53; Stop 77
agctggaaacgagcttgtttacgat

SEQ ID NO: 345695 - DNA, 25 bp, Artificial
  probe
  misc_feature (1)..(25): SEQ ID NO: 3068; WAN024GAP; Start 63; Stop 87
atcatcttctttacccgcattcata

SEQ ID NO: 345696 - DNA, 25 bp, Artificial
  probe
  misc_feature (1)..(25): SEQ ID NO: 3068; WAN024GAP; Start 55; Stop 79
atcttctcatcatcttctttacccg

SEQ ID NO: 345697 - DNA, 25 bp, Artificial
  probe
  misc_feature (1)..(25): SEQ ID NO: 3068; WAN024GAP; Start 64; Stop 88
tcatcttctttacccgcattcatag

SEQ ID NO: 345698 - DNA, 25 bp, Artificial
  probe
  misc_feature (1)..(25): SEQ ID NO: 3068; WAN024GAP; Start 95; Stop 119
gaagaaactcagcattggtaattcc

SEQ ID NO: 345699 - DNA, 25 bp, Artificial
  probe
  misc_feature (1)..(25): SEQ ID NO: 3068; WAN024GAP; Start 94; Stop 118
cgaagaaactcagcattggtaattc

SEQ ID NO: 345700 - DNA, 25 bp, Artificial
  probe
  misc_feature (1)..(25): SEQ ID NO: 3068; WAN024GAP; Start 93; Stop 117
acgaagaaactcagcattggtaatt

SEQ ID NO: 345701 - DNA, 25 bp, Artificial
  probe
  misc_feature (1)..(25): SEQ ID NO: 3068; WAN024GAP; Start 62; Stop 86
catcatcttctttacccgcattcat

SEQ ID NO: 345702 - DNA, 25 bp, Artificial
  probe
  misc_feature (1)..(25): SEQ ID NO: 3068; WAN024GAP; Start 45; Stop 69
acgaactgaaatcttctcatcatct

SEQ ID NO: 345703 - DNA, 25 bp, Artificial
  probe
  misc_feature (1)..(25): SEQ ID NO: 3068; WAN024GAP; Start 44; Stop 68
cacgaactgaaatcttctcatcatc

SEQ ID NO: 345704 - DNA, 25 bp, Artificial
  probe
  misc_feature (1)..(25): SEQ ID NO: 3068; WAN024GAP; Start 43; Stop 67
tcacgaactgaaatcttctcatcat

SEQ ID NO: 345705 - DNA, 25 bp, Artificial
  probe
  misc_feature (1)..(25): SEQ ID NO: 3068; WAN024GAP; Start 40; Stop 64
aactcacgaactgaaatcttctcat

SEQ ID NO: 345706 - DNA, 25 bp, Artificial
  probe
  misc_feature (1)..(25): SEQ ID NO: 3068; WAN024GAP; Start 39; Stop 63
aaactcacgaactgaaatcttctca

SEQ ID NO: 345707 - DNA, 25 bp, Artificial
  probe
  misc_feature (1)..(25): SEQ ID NO: 3068; WAN024GAP; Start 54; Stop 78
aatcttctcatcatcttctttaccc

SEQ ID NO: 345708 - DNA, 25 bp, Artificial
  probe
  misc_feature (1)..(25): SEQ ID NO: 3068; WAN024GAP; Start 46; Stop 70
cgaactgaaatcttctcatcatctt

SEQ ID NO: 345709 - DNA, 25 bp, Artificial
  probe
  misc_feature (1)..(25): SEQ ID NO: 3068; WAN024GAP; Start 42; Stop 66
ctcacgaactgaaatcttctcatca

SEQ ID NO: 345710 - DNA, 25 bp, Artificial
  probe
  misc_feature (1)..(25): SEQ ID NO: 3068; WAN024GAP; Start 41; Stop 65
actcacgaactgaaatcttctcatc

SEQ ID NO: 345711 - DNA, 25 bp, Artificial
  probe
  misc_feature (1)..(25): SEQ ID NO: 3068; WAN024GAP; Start 38; Stop 62
taaactcacgaactgaaatcttctc

SEQ ID NO: 345712 - DNA, 25 bp, Artificial
  probe
  misc_feature (1)..(25): SEQ ID NO: 3068; WAN024GAP; Start 92; Stop 116
cacgaagaaactcagcattggtaat

SEQ ID NO: 345713 - DNA, 25 bp, Artificial
  probe
  misc_feature (1)..(25): SEQ ID NO: 3068; WAN024GAP; Start 60; Stop 84
ctcatcatcttctttacccgcattc

SEQ ID NO: 345714 - DNA, 25 bp, Artificial
  probe
  misc_feature (1)..(25): SEQ ID NO: 3068; WAN024GAP; Start 29; Stop 53
gcttagtaataaactcacgaactga

SEQ ID NO: 345715 - DNA, 25 bp, Artificial
  probe
  misc_feature (1)..(25): SEQ ID NO: 3068; WAN024GAP; Start 59; Stop 83
tctcatcatcttctttacccgcatt

SEQ ID NO: 345716 - DNA, 25 bp, Artificial
  probe
  misc_feature (1)..(25): SEQ ID NO: 3068; WAN024GAP; Start 58; Stop 82
ttctcatcatcttctttacccgcat

SEQ ID NO: 345717 - DNA, 25 bp, Artificial
  probe
  misc_feature (1)..(25): SEQ ID NO: 3068; WAN024GAP; Start 65; Stop 89
catcttctttacccgcattcatagc

SEQ ID NO: 345718 - DNA, 25 bp, Artificial
  probe
  misc_feature (1)..(25): SEQ ID NO: 3068; WAN024GAP; Start 37; Stop 61
ataaactcacgaactgaaatcttct

SEQ ID NO: 345719 - DNA, 25 bp, Artificial
  probe
  misc_feature (1)..(25): SEQ ID NO: 3068; WAN024GAP; Start 61; Stop 85
tcatcatcttctttacccgcattca

SEQ ID NO: 345720 - DNA, 25 bp, Artificial
  probe
  misc_feature (1)..(25): SEQ ID NO: 3068; WAN024GAP; Start 56; Stop 80
tcttctcatcatcttctttacccgc

SEQ ID NO: 345721 - DNA, 25 bp, Artificial
  probe
  misc_feature (1)..(25): SEQ ID NO: 3068; WAN024GAP; Start 49; Stop 73
actgaaatcttctcatcatcttctt

SEQ ID NO: 345722 - DNA, 25 bp, Artificial
  probe
  misc_feature (1)..(25): SEQ ID NO: 3068; WAN024GAP; Start 48; Stop 72
aactgaaatcttctcatcatcttct

SEQ ID NO: 345723 - DNA, 25 bp, Artificial
  probe
  misc_feature (1)..(25): SEQ ID NO: 3068; WAN024GAP; Start 36; Stop 60
aataaactcacgaactgaaatcttc

SEQ ID NO: 345724 - DNA, 25 bp, Artificial
  probe
  misc_feature (1)..(25): SEQ ID NO: 3068; WAN024GAP; Start 108; Stop 132
attggtaattccagggatttctgat

SEQ ID NO: 345725 - DNA, 25 bp, Artificial
  probe
  misc_feature (1)..(25): SEQ ID NO: 3068; WAN024GAP; Start 57; Stop 81
cttctcatcatcttctttacccgca

SEQ ID NO: 345726 - DNA, 25 bp, Artificial
  probe
  misc_feature (1)..(25): SEQ ID NO: 3068; WAN024GAP; Start 47; Stop 71
gaactgaaatcttctcatcatcttc

SEQ ID NO: 345727 - DNA, 25 bp, Artificial
  probe
  misc_feature (1)..(25): SEQ ID NO: 3068; WAN024GAP; Start 109; Stop 133
ttggtaattccagggatttctgatg

SEQ ID NO: 345728 - DNA, 25 bp, Artificial
  probe
  misc_feature (1)..(25): SEQ ID NO: 3069; WAN024D55; Start 9; Stop 33
aactcctttgtttaatgctaacttt

SEQ ID NO: 345729 - DNA, 25 bp, Artificial
  probe
  misc_feature (1)..(25): SEQ ID NO: 3069; WAN024D55; Start 10; Stop 34
actcctttgtttaatgctaacttta

SEQ ID NO: 345730 - DNA, 25 bp, Artificial
  probe
  misc_feature (1)..(25): SEQ ID NO: 3069; WAN024D55; Start 8; Stop 32
aaactcctttgtttaatgctaactt

SEQ ID NO: 345731 - DNA, 25 bp, Artificial
  probe
  misc_feature (1)..(25): SEQ ID NO: 3069; WAN024D55; Start 11; Stop 35
ctcctttgtttaatgctaactttat

SEQ ID NO: 345732 - DNA, 25 bp, Artificial
  probe
  misc_feature (1)..(25): SEQ ID NO: 3069; WAN024D55; Start 12; Stop 36
tcctttgtttaatgctaactttatt

SEQ ID NO: 345733 - DNA, 25 bp, Artificial
  probe
  misc_feature (1)..(25): SEQ ID NO: 3069; WAN024D55; Start 7; Stop 31
aaaactcctttgtttaatgctaact

SEQ ID NO: 345734 - DNA, 25 bp, Artificial
  probe
  misc_feature (1)..(25): SEQ ID NO: 3069; WAN024D55; Start 39; Stop 63
actccttataaaagagaatgtcaag

SEQ ID NO: 345735 - DNA, 25 bp, Artificial
  probe
  misc_feature (1)..(25): SEQ ID NO: 3069; WAN024D55; Start 40; Stop 64
ctccttataaaagagaatgtcaaga

SEQ ID NO: 345736 - DNA, 25 bp, Artificial
  probe
  misc_feature (1)..(25): SEQ ID NO: 3069; WAN024D55; Start 41; Stop 65
tccttataaaagagaatgtcaagaa

SEQ ID NO: 345737 - DNA, 25 bp, Artificial
  probe
  misc_feature (1)..(25): SEQ ID NO: 3069; WAN024D55; Start 2; Stop 26
tgtttaaaactcctttgtttaatgc

SEQ ID NO: 345738 - DNA, 25 bp, Artificial
  probe
  misc_feature (1)..(25): SEQ ID NO: 3069; WAN024D55; Start 6; Stop 30
taaaactcctttgtttaatgctaac

SEQ ID NO: 345739 - DNA, 25 bp, Artificial
  probe
  misc_feature (1)..(25): SEQ ID NO: 3069; WAN024D55; Start 3; Stop 27
gtttaaaactcctttgtttaatgct

SEQ ID NO: 345740 - DNA, 25 bp, Artificial
  probe
  misc_feature (1)..(25): SEQ ID NO: 3069; WAN024D55; Start 42; Stop 66
ccttataaaagagaatgtcaagaaa

SEQ ID NO: 345741 - DNA, 25 bp, Artificial
  probe
  misc_feature (1)..(25): SEQ ID NO: 3069; WAN024D55; Start 38; Stop 62
tactccttataaaagagaatgtcaa

SEQ ID NO: 345742 - DNA, 25 bp, Artificial
  probe
  misc_feature (1)..(25): SEQ ID NO: 3069; WAN024D55; Start 37; Stop 61
ttactccttataaaagagaatgtca

SEQ ID NO: 345743 - DNA, 25 bp, Artificial
  probe
  misc_feature (1)..(25): SEQ ID NO: 3069; WAN024D55; Start 5; Stop 29
ttaaaactcctttgtttaatgctaa

SEQ ID NO: 345744 - DNA, 25 bp, Artificial
  probe
  misc_feature (1)..(25): SEQ ID NO: 3069; WAN024D55; Start 4; Stop 28
tttaaaactcctttgtttaatgcta

SEQ ID NO: 345745 - DNA, 25 bp, Artificial
  probe
  misc_feature (1)..(25): SEQ ID NO: 3069; WAN024D55; Start 1; Stop 25
atgtttaaaactcctttgtttaatg

SEQ ID NO: 345746 - DNA, 25 bp, Artificial
  probe
  misc_feature (1)..(25): SEQ ID NO: 3070; WAN024G7T; Start 241; Stop 265
aacaccatcaatgataatgcctcta

SEQ ID NO: 345747 - DNA, 25 bp, Artificial
  probe
  misc_feature (1)..(25): SEQ ID NO: 3070; WAN024G7T; Start 234; Stop 258
ttccaccaacaccatcaatgataat

SEQ ID NO: 345748 - DNA, 25 bp, Artificial
  probe
  misc_feature (1)..(25): SEQ ID NO: 3070; WAN024G7T; Start 242; Stop 266
acaccatcaatgataatgcctctag

SEQ ID NO: 345749 - DNA, 25 bp, Artificial
  probe
  misc_feature (1)..(25): SEQ ID NO: 3070; WAN024G7T; Start 235; Stop 259
tccaccaacaccatcaatgataatg

SEQ ID NO: 345750 - DNA, 25 bp, Artificial
  probe
  misc_feature (1)..(25): SEQ ID NO: 3070; WAN024G7T; Start 240; Stop 264
caacaccatcaatgataatgcctct

SEQ ID NO: 345751 - DNA, 25 bp, Artificial
  probe
  misc_feature (1)..(25): SEQ ID NO: 3070; WAN024G7T; Start 233; Stop 257
gttccaccaacaccatcaatgataa

SEQ ID NO: 345752 - DNA, 25 bp, Artificial
  probe
  misc_feature (1)..(25): SEQ ID NO: 3070; WAN024G7T; Start 243; Stop 267
caccatcaatgataatgcctctagc

SEQ ID NO: 345753 - DNA, 25 bp, Artificial
  probe
  misc_feature (1)..(25): SEQ ID NO: 3070; WAN024G7T; Start 285; Stop 309
aactctgacaggcaatctctatctg

SEQ ID NO: 345754 - DNA, 25 bp, Artificial
  probe
  misc_feature (1)..(25): SEQ ID NO: 3070; WAN024G7T; Start 239; Stop 263
ccaacaccatcaatgataatgcctc

SEQ ID NO: 345755 - DNA, 25 bp, Artificial
  probe
  misc_feature (1)..(25): SEQ ID NO: 3070; WAN024G7T; Start 156; Stop 180
gcttgtgcttgctatgatttatact

SEQ ID NO: 345756 - DNA, 25 bp, Artificial
  probe
  misc_feature (1)..(25): SEQ ID NO: 3070; WAN024G7T; Start 159; Stop 183
tgtgcttgctatgatttatactgaa

SEQ ID NO: 345757 - DNA, 25 bp, Artificial
  probe
  misc_feature (1)..(25): SEQ ID NO: 3070; WAN024G7T; Start 158; Stop 182
ttgtgcttgctatgatttatactga

SEQ ID NO: 345758 - DNA, 25 bp, Artificial
  probe
  misc_feature (1)..(25): SEQ ID NO: 3070; WAN024G7T; Start 284; Stop 308
aaactctgacaggcaatctctatct

SEQ ID NO: 345759 - DNA, 25 bp, Artificial
  probe
  misc_feature (1)..(25): SEQ ID NO: 3070; WAN024G7T; Start 283; Stop 307
caaactctgacaggcaatctctatc

SEQ ID NO: 345760 - DNA, 25 bp, Artificial
  probe
  misc_feature (1)..(25): SEQ ID NO: 3070; WAN024G7T; Start 238; Stop 262
accaacaccatcaatgataatgcct

SEQ ID NO: 345761 - DNA, 25 bp, Artificial
  probe
  misc_feature (1)..(25): SEQ ID NO: 3070; WAN024G7T; Start 237; Stop 261
caccaacaccatcaatgataatgcc

SEQ ID NO: 345762 - DNA, 25 bp, Artificial
  probe
  misc_feature (1)..(25): SEQ ID NO: 3070; WAN024G7T; Start 236; Stop 260
ccaccaacaccatcaatgataatgc

SEQ ID NO: 345763 - DNA, 25 bp, Artificial
  probe
  misc_feature (1)..(25): SEQ ID NO: 3070; WAN024G7T; Start 157; Stop 181
cttgtgcttgctatgatttatactg

SEQ ID NO: 345764 - DNA, 25 bp, Artificial
  probe
  misc_feature (1)..(25): SEQ ID NO: 3070; WAN024G7T; Start 201; Stop 225
cgatgttatgcagtctagtgagtct

SEQ ID NO: 345765 - DNA, 25 bp, Artificial
  probe
  misc_feature (1)..(25): SEQ ID NO: 3070; WAN024G7T; Start 202; Stop 226
gatgttatgcagtctagtgagtctg

SEQ ID NO: 345766 - DNA, 25 bp, Artificial
  probe
  misc_feature (1)..(25): SEQ ID NO: 3070; WAN024G7T; Start 576; Stop 600
catcatcaaatgtttcactctcttt

SEQ ID NO: 345767 - DNA, 25 bp, Artificial
  probe
  misc_feature (1)..(25): SEQ ID NO: 3070; WAN024G7T; Start 282; Stop 306
tcaaactctgacaggcaatctctat

SEQ ID NO: 345768 - DNA, 25 bp, Artificial
  probe
  misc_feature (1)..(25): SEQ ID NO: 3070; WAN024G7T; Start 162; Stop 186
gcttgctatgatttatactgaaaca

SEQ ID NO: 345769 - DNA, 25 bp, Artificial
  probe
  misc_feature (1)..(25): SEQ ID NO: 3070; WAN024G7T; Start 161; Stop 185
tgcttgctatgatttatactgaaac

SEQ ID NO: 345770 - DNA, 25 bp, Artificial
  probe
  misc_feature (1)..(25): SEQ ID NO: 3070; WAN024G7T; Start 160; Stop 184
gtgcttgctatgatttatactgaaa

SEQ ID NO: 345771 - DNA, 25 bp, Artificial
  probe
  misc_feature (1)..(25): SEQ ID NO: 3070; WAN024G7T; Start 281; Stop 305
ttcaaactctgacaggcaatctcta

SEQ ID NO: 345772 - DNA, 25 bp, Artificial
  probe
  misc_feature (1)..(25): SEQ ID NO: 3070; WAN024G7T; Start 70; Stop 94
gttcatcaagatgtcaaacaagtca

SEQ ID NO: 345773 - DNA, 25 bp, Artificial
  probe
  misc_feature (1)..(25): SEQ ID NO: 3070; WAN024G7T; Start 72; Stop 96
tcatcaagatgtcaaacaagtcatg

SEQ ID NO: 345774 - DNA, 25 bp, Artificial
  probe
  misc_feature (1)..(25): SEQ ID NO: 3070; WAN024G7T; Start 71; Stop 95
ttcatcaagatgtcaaacaagtcat

SEQ ID NO: 345775 - DNA, 25 bp, Artificial
  probe
  misc_feature (1)..(25): SEQ ID NO: 3070; WAN024G7T; Start 69; Stop 93
cgttcatcaagatgtcaaacaagtc

SEQ ID NO: 345776 - DNA, 25 bp, Artificial
  probe
  misc_feature (1)..(25): SEQ ID NO: 3070; WAN024G7T; Start 279; Stop 303
cattcaaactctgacaggcaatctc

SEQ ID NO: 345777 - DNA, 25 bp, Artificial
  probe
  misc_feature (1)..(25): SEQ ID NO: 3070; WAN024G7T; Start 286; Stop 310
actctgacaggcaatctctatctgg

SEQ ID NO: 345778 - DNA, 25 bp, Artificial
  probe
  misc_feature (1)..(25): SEQ ID NO: 3070; WAN024G7T; Start 280; Stop 304
attcaaactctgacaggcaatctct

SEQ ID NO: 345779 - DNA, 25 bp, Artificial
  probe
  misc_feature (1)..(25): SEQ ID NO: 3071; WAN024CWQ; Start 122; Stop 146
cagacgtattccatcatattagcga

SEQ ID NO: 345780 - DNA, 25 bp, Artificial
  probe
  misc_feature (1)..(25): SEQ ID NO: 3071; WAN024CWQ; Start 120; Stop 144
cacagacgtattccatcatattagc

SEQ ID NO: 345781 - DNA, 25 bp, Artificial
  probe
  misc_feature (1)..(25): SEQ ID NO: 3071; WAN024CWQ; Start 121; Stop 145
acagacgtattccatcatattagcg

SEQ ID NO: 345782 - DNA, 25 bp, Artificial
  probe
  misc_feature (1)..(25): SEQ ID NO: 3071; WAN024CWQ; Start 117; Stop 141
ccacacagacgtattccatcatatt

SEQ ID NO: 345783 - DNA, 25 bp, Artificial
  probe
  misc_feature (1)..(25): SEQ ID NO: 3071; WAN024CWQ; Start 261; Stop 285
tagagttctcatcgacaaccaagta

SEQ ID NO: 345784 - DNA, 25 bp, Artificial
  probe
  misc_feature (1)..(25): SEQ ID NO: 3071; WAN024CWQ; Start 123; Stop 147
agacgtattccatcatattagcgaa

SEQ ID NO: 345785 - DNA, 25 bp, Artificial
  probe
  misc_feature (1)..(25): SEQ ID NO: 3071; WAN024CWQ; Start 116; Stop 140
tccacacagacgtattccatcatat

SEQ ID NO: 345786 - DNA, 25 bp, Artificial
  probe
  misc_feature (1)..(25): SEQ ID NO: 3071; WAN024CWQ; Start 115; Stop 139
atccacacagacgtattccatcata

SEQ ID NO: 345787 - DNA, 25 bp, Artificial
  probe
  misc_feature (1)..(25): SEQ ID NO: 3071; WAN024CWQ; Start 114; Stop 138
tatccacacagacgtattccatcat

SEQ ID NO: 345788 - DNA, 25 bp, Artificial
  probe
  misc_feature (1)..(25): SEQ ID NO: 3071; WAN024CWQ; Start 126; Stop 150
cgtattccatcatattagcgaaact

SEQ ID NO: 345789 - DNA, 25 bp, Artificial
  probe
  misc_feature (1)..(25): SEQ ID NO: 3071; WAN024CWQ; Start 118; Stop 142
cacacagacgtattccatcatatta

SEQ ID NO: 345790 - DNA, 25 bp, Artificial
  probe
  misc_feature (1)..(25): SEQ ID NO: 3071; WAN024CWQ; Start 262; Stop 286
agagttctcatcgacaaccaagtaa

SEQ ID NO: 345791 - DNA, 25 bp, Artificial
  probe
  misc_feature (1)..(25): SEQ ID NO: 3071; WAN024CWQ; Start 137; Stop 161
atattagcgaaactttcattgagcc

SEQ ID NO: 345792 - DNA, 25 bp, Artificial
  probe
  misc_feature (1)..(25): SEQ ID NO: 3071; WAN024CWQ; Start 119; Stop 143
acacagacgtattccatcatattag

SEQ ID NO: 345793 - DNA, 25 bp, Artificial
  probe
  misc_feature (1)..(25): SEQ ID NO: 3071; WAN024CWQ; Start 136; Stop 160
catattagcgaaactttcattgagc

SEQ ID NO: 345794 - DNA, 25 bp, Artificial
  probe
  misc_feature (1)..(25): SEQ ID NO: 3071; WAN024CWQ; Start 138; Stop 162
tattagcgaaactttcattgagcca

SEQ ID NO: 345795 - DNA, 25 bp, Artificial
  probe
  misc_feature (1)..(25): SEQ ID NO: 3071; WAN024CWQ; Start 130; Stop 154
ttccatcatattagcgaaactttca

SEQ ID NO: 345796 - DNA, 25 bp, Artificial
  probe
  misc_feature (1)..(25): SEQ ID NO: 3071; WAN024CWQ; Start 258; Stop 282
atgtagagttctcatcgacaaccaa

SEQ ID NO: 345797 - DNA, 25 bp, Artificial
  probe
  misc_feature (1)..(25): SEQ ID NO: 3071; WAN024CWQ; Start 257; Stop 281
aatgtagagttctcatcgacaacca

SEQ ID NO: 345798 - DNA, 25 bp, Artificial
  probe
  misc_feature (1)..(25): SEQ ID NO: 3071; WAN024CWQ; Start 113; Stop 137
gtatccacacagacgtattccatca

SEQ ID NO: 345799 - DNA, 25 bp, Artificial
  probe
  misc_feature (1)..(25): SEQ ID NO: 3071; WAN024CWQ; Start 131; Stop 155
tccatcatattagcgaaactttcat

SEQ ID NO: 345800 - DNA, 25 bp, Artificial
  probe
  misc_feature (1)..(25): SEQ ID NO: 3071; WAN024CWQ; Start 260; Stop 284
gtagagttctcatcgacaaccaagt

SEQ ID NO: 345801 - DNA, 25 bp, Artificial
  probe
  misc_feature (1)..(25): SEQ ID NO: 3071; WAN024CWQ; Start 177; Stop 201
atttcatagtcacgaggttcccaaa

SEQ ID NO: 345802 - DNA, 25 bp, Artificial
  probe
  misc_feature (1)..(25): SEQ ID NO: 3071; WAN024CWQ; Start 139; Stop 163
attagcgaaactttcattgagccaa

SEQ ID NO: 345803 - DNA, 25 bp, Artificial
  probe
  misc_feature (1)..(25): SEQ ID NO: 3071; WAN024CWQ; Start 259; Stop 283
tgtagagttctcatcgacaaccaag

SEQ ID NO: 345804 - DNA, 25 bp, Artificial
  probe
  misc_feature (1)..(25): SEQ ID NO: 3071; WAN024CWQ; Start 132; Stop 156
ccatcatattagcgaaactttcatt

SEQ ID NO: 345805 - DNA, 25 bp, Artificial
  probe
  misc_feature (1)..(25): SEQ ID NO: 3071; WAN024CWQ; Start 283; Stop 307
gtaaacttcacggtaggtcacaaga

SEQ ID NO: 345806 - DNA, 25 bp, Artificial
  probe
  misc_feature (1)..(25): SEQ ID NO: 3071; WAN024CWQ; Start 140; Stop 164
ttagcgaaactttcattgagccaaa

SEQ ID NO: 345807 - DNA, 25 bp, Artificial
  probe
  misc_feature (1)..(25): SEQ ID NO: 3071; WAN024CWQ; Start 282; Stop 306
agtaaacttcacggtaggtcacaag

SEQ ID NO: 345808 - DNA, 25 bp, Artificial
  probe
  misc_feature (1)..(25): SEQ ID NO: 3071; WAN024CWQ; Start 251; Stop 275
ctagcaaatgtagagttctcatcga

SEQ ID NO: 345809 - DNA, 25 bp, Artificial
  probe
  misc_feature (1)..(25): SEQ ID NO: 3071; WAN024CWQ; Start 112; Stop 136
ggtatccacacagacgtattccatc

SEQ ID NO: 345810 - DNA, 25 bp, Artificial
  probe
  misc_feature (1)..(25): SEQ ID NO: 3071; WAN024CWQ; Start 252; Stop 276
tagcaaatgtagagttctcatcgac

SEQ ID NO: 345811 - DNA, 25 bp, Artificial
  probe
  misc_feature (1)..(25): SEQ ID NO: 3071; WAN024CWQ; Start 266; Stop 290
ttctcatcgacaaccaagtaaactt

SEQ ID NO: 345812 - DNA, 25 bp, Artificial
  probe
  misc_feature (1)..(25): SEQ ID NO: 3072; WAN024D4O; Start 1085; Stop 1109
atcaagaagatagaagaacagatcg

SEQ ID NO: 345813 - DNA, 25 bp, Artificial
  probe
  misc_feature (1)..(25): SEQ ID NO: 3072; WAN024D4O; Start 1086; Stop 1110
tcaagaagatagaagaacagatcga

SEQ ID NO: 345814 - DNA, 25 bp, Artificial
  probe
  misc_feature (1)..(25): SEQ ID NO: 3072; WAN024D4O; Start 983; Stop 1007
gtaatcatctagtcagtctagcgac

SEQ ID NO: 345815 - DNA, 25 bp, Artificial
  probe
  misc_feature (1)..(25): SEQ ID NO: 3072; WAN024D4O; Start 982; Stop 1006
agtaatcatctagtcagtctagcga

SEQ ID NO: 345816 - DNA, 25 bp, Artificial
  probe
  misc_feature (1)..(25): SEQ ID NO: 3072; WAN024D4O; Start 981; Stop 1005
gagtaatcatctagtcagtctagcg

SEQ ID NO: 345817 - DNA, 25 bp, Artificial
  probe
  misc_feature (1)..(25): SEQ ID NO: 3072; WAN024D4O; Start 3; Stop 27
gtttaatggtcgggtattgaaagaa

SEQ ID NO: 345818 - DNA, 25 bp, Artificial
  probe
  misc_feature (1)..(25): SEQ ID NO: 3072; WAN024D4O; Start 2; Stop 26
tgtttaatggtcgggtattgaaaga

SEQ ID NO: 345819 - DNA, 25 bp, Artificial
  probe
  misc_feature (1)..(25): SEQ ID NO: 3072; WAN024D4O; Start 1; Stop 25
atgtttaatggtcgggtattgaaag

SEQ ID NO: 345820 - DNA, 25 bp, Artificial
  probe
  misc_feature (1)..(25): SEQ ID NO: 3072; WAN024D4O; Start 108; Stop 132
gtccaacgaaacgaaacctaaatta

SEQ ID NO: 345821 - DNA, 25 bp, Artificial
  probe
  misc_feature (1)..(25): SEQ ID NO: 3072; WAN024D4O; Start 980; Stop 1004
tgagtaatcatctagtcagtctagc

SEQ ID NO: 345822 - DNA, 25 bp, Artificial
  probe
  misc_feature (1)..(25): SEQ ID NO: 3072; WAN024D4O; Start 109; Stop 133
tccaacgaaacgaaacctaaattat

SEQ ID NO: 345823 - DNA, 25 bp, Artificial
  probe
  misc_feature (1)..(25): SEQ ID NO: 3072; WAN024D4O; Start 7; Stop 31
aatggtcgggtattgaaagaattac

SEQ ID NO: 345824 - DNA, 25 bp, Artificial
  probe
  misc_feature (1)..(25): SEQ ID NO: 3072; WAN024D4O; Start 786; Stop 810
attgaagtcggatttgaatgtttcg

SEQ ID NO: 345825 - DNA, 25 bp, Artificial
  probe
  misc_feature (1)..(25): SEQ ID NO: 3072; WAN024D4O; Start 851; Stop 875
tgactccaaagcaacattcttactt

SEQ ID NO: 345826 - DNA, 25 bp, Artificial
  probe
  misc_feature (1)..(25): SEQ ID NO: 3072; WAN024D4O; Start 114; Stop 138
cgaaacgaaacctaaattatcaacc

SEQ ID NO: 345827 - DNA, 25 bp, Artificial
  probe
  misc_feature (1)..(25): SEQ ID NO: 3072; WAN024D4O; Start 110; Stop 134
ccaacgaaacgaaacctaaattatc

SEQ ID NO: 345828 - DNA, 25 bp, Artificial
  probe
  misc_feature (1)..(25): SEQ ID NO: 3072; WAN024D4O; Start 945; Stop 969
accaagcaaagtaaagagtattctg

SEQ ID NO: 345829 - DNA, 25 bp, Artificial
  probe
  misc_feature (1)..(25): SEQ ID NO: 3072; WAN024D4O; Start 849; Stop 873
attgactccaaagcaacattcttac

SEQ ID NO: 345830 - DNA, 25 bp, Artificial
  probe
  misc_feature (1)..(25): SEQ ID NO: 3072; WAN024D4O; Start 949; Stop 973
agcaaagtaaagagtattctggacg

SEQ ID NO: 345831 - DNA, 25 bp, Artificial
  probe
  misc_feature (1)..(25): SEQ ID NO: 3072; WAN024D4O; Start 41; Stop 65
atggtttaagtagagcagaattagc

SEQ ID NO: 345832 - DNA, 25 bp, Artificial
  probe
  misc_feature (1)..(25): SEQ ID NO: 3072; WAN024D4O; Start 847; Stop 871
ttattgactccaaagcaacattctt

SEQ ID NO: 345833 - DNA, 25 bp, Artificial
  probe
  misc_feature (1)..(25): SEQ ID NO: 3072; WAN024D4O; Start 182; Stop 206
ttgaacaggaagaagagagcattcg

SEQ ID NO: 345834 - DNA, 25 bp, Artificial
  probe
  misc_feature (1)..(25): SEQ ID NO: 3072; WAN024D4O; Start 4; Stop 28
tttaatggtcgggtattgaaagaat

SEQ ID NO: 345835 - DNA, 25 bp, Artificial
  probe
  misc_feature (1)..(25): SEQ ID NO: 3072; WAN024D4O; Start 948; Stop 972
aagcaaagtaaagagtattctggac

SEQ ID NO: 345836 - DNA, 25 bp, Artificial
  probe
  misc_feature (1)..(25): SEQ ID NO: 3072; WAN024D4O; Start 947; Stop 971
caagcaaagtaaagagtattctgga

SEQ ID NO: 345837 - DNA, 25 bp, Artificial
  probe
  misc_feature (1)..(25): SEQ ID NO: 3072; WAN024D4O; Start 8; Stop 32
atggtcgggtattgaaagaattacg

SEQ ID NO: 345838 - DNA, 25 bp, Artificial
  probe
  misc_feature (1)..(25): SEQ ID NO: 3072; WAN024D4O; Start 181; Stop 205
tttgaacaggaagaagagagcattc

SEQ ID NO: 345839 - DNA, 25 bp, Artificial
  probe
  misc_feature (1)..(25): SEQ ID NO: 3072; WAN024D4O; Start 850; Stop 874
ttgactccaaagcaacattcttact

SEQ ID NO: 345840 - DNA, 25 bp, Artificial
  probe
  misc_feature (1)..(25): SEQ ID NO: 3072; WAN024D4O; Start 846; Stop 870
attattgactccaaagcaacattct

SEQ ID NO: 345841 - DNA, 25 bp, Artificial
  probe
  misc_feature (1)..(25): SEQ ID NO: 3072; WAN024D4O; Start 5; Stop 29
ttaatggtcgggtattgaaagaatt

SEQ ID NO: 345842 - DNA, 25 bp, Artificial
  probe
  misc_feature (1)..(25): SEQ ID NO: 3072; WAN024D4O; Start 107; Stop 131
agtccaacgaaacgaaacctaaatt

SEQ ID NO: 345843 - DNA, 25 bp, Artificial
  probe
  misc_feature (1)..(25): SEQ ID NO: 3072; WAN024D4O; Start 845; Stop 869
gattattgactccaaagcaacattc

SEQ ID NO: 345844 - DNA, 25 bp, Artificial
  probe
  misc_feature (1)..(25): SEQ ID NO: 3072; WAN024D4O; Start 74; Stop 98
ttaatttaacggaacaagccatttg

SEQ ID NO: 345845 - DNA, 25 bp, Artificial
  probe
  misc_feature (1)..(25): SEQ ID NO: 3073; WAN024BHJ; Start 205; Stop 229
gctaagaatcaacttcataaggaac

SEQ ID NO: 345846 - DNA, 25 bp, Artificial
  probe
  misc_feature (1)..(25): SEQ ID NO: 3073; WAN024BHJ; Start 65; Stop 89
gactatctgatatgtctgtccaaga

SEQ ID NO: 345847 - DNA, 25 bp, Artificial
  probe
  misc_feature (1)..(25): SEQ ID NO: 3073; WAN024BHJ; Start 208; Stop 232
aagaatcaacttcataaggaacaat

SEQ ID NO: 345848 - DNA, 25 bp, Artificial
  probe
  misc_feature (1)..(25): SEQ ID NO: 3073; WAN024BHJ; Start 204; Stop 228
agctaagaatcaacttcataaggaa

SEQ ID NO: 345849 - DNA, 25 bp, Artificial
  probe
  misc_feature (1)..(25): SEQ ID NO: 3073; WAN024BHJ; Start 203; Stop 227
aagctaagaatcaacttcataagga

SEQ ID NO: 345850 - DNA, 25 bp, Artificial
  probe
  misc_feature (1)..(25): SEQ ID NO: 3073; WAN024BHJ; Start 209; Stop 233
agaatcaacttcataaggaacaatt

SEQ ID NO: 345851 - DNA, 25 bp, Artificial
  probe
  misc_feature (1)..(25): SEQ ID NO: 3073; WAN024BHJ; Start 206; Stop 230
ctaagaatcaacttcataaggaaca

SEQ ID NO: 345852 - DNA, 25 bp, Artificial
  probe
  misc_feature (1)..(25): SEQ ID NO: 3073; WAN024BHJ; Start 66; Stop 90
actatctgatatgtctgtccaagat

SEQ ID NO: 345853 - DNA, 25 bp, Artificial
  probe
  misc_feature (1)..(25): SEQ ID NO: 3073; WAN024BHJ; Start 67; Stop 91
ctatctgatatgtctgtccaagatc

SEQ ID NO: 345854 - DNA, 25 bp, Artificial
  probe
  misc_feature (1)..(25): SEQ ID NO: 3073; WAN024BHJ; Start 207; Stop 231
taagaatcaacttcataaggaacaa

SEQ ID NO: 345855 - DNA, 25 bp, Artificial
  probe
  misc_feature (1)..(25): SEQ ID NO: 3073; WAN024BHJ; Start 188; Stop 212
acgacacattaaaggaagctaagaa

SEQ ID NO: 345856 - DNA, 25 bp, Artificial
  probe
  misc_feature (1)..(25): SEQ ID NO: 3073; WAN024BHJ; Start 189; Stop 213
cgacacattaaaggaagctaagaat

SEQ ID NO: 345857 - DNA, 25 bp, Artificial
  probe
  misc_feature (1)..(25): SEQ ID NO: 3073; WAN024BHJ; Start 187; Stop 211
gacgacacattaaaggaagctaaga

SEQ ID NO: 345858 - DNA, 25 bp, Artificial
  probe
  misc_feature (1)..(25): SEQ ID NO: 3073; WAN024BHJ; Start 191; Stop 215
acacattaaaggaagctaagaatca

SEQ ID NO: 345859 - DNA, 25 bp, Artificial
  probe
  misc_feature (1)..(25): SEQ ID NO: 3073; WAN024BHJ; Start 186; Stop 210
ggacgacacattaaaggaagctaag

SEQ ID NO: 345860 - DNA, 25 bp, Artificial
  probe
  misc_feature (1)..(25): SEQ ID NO: 3073; WAN024BHJ; Start 54; Stop 78
gctgattcatagactatctgatatg

SEQ ID NO: 345861 - DNA, 25 bp, Artificial
  probe
  misc_feature (1)..(25): SEQ ID NO: 3073; WAN024BHJ; Start 190; Stop 214
gacacattaaaggaagctaagaatc

SEQ ID NO: 345862 - DNA, 25 bp, Artificial
  probe
  misc_feature (1)..(25): SEQ ID NO: 3073; WAN024BHJ; Start 185; Stop 209
tggacgacacattaaaggaagctaa

SEQ ID NO: 345863 - DNA, 25 bp, Artificial
  probe
  misc_feature (1)..(25): SEQ ID NO: 3073; WAN024BHJ; Start 184; Stop 208
ttggacgacacattaaaggaagcta

SEQ ID NO: 345864 - DNA, 25 bp, Artificial
  probe
  misc_feature (1)..(25): SEQ ID NO: 3073; WAN024BHJ; Start 211; Stop 235
aatcaacttcataaggaacaattgg

SEQ ID NO: 345865 - DNA, 25 bp, Artificial
  probe
  misc_feature (1)..(25): SEQ ID NO: 3073; WAN024BHJ; Start 64; Stop 88
agactatctgatatgtctgtccaag

SEQ ID NO: 345866 - DNA, 25 bp, Artificial
  probe
  misc_feature (1)..(25): SEQ ID NO: 3073; WAN024BHJ; Start 52; Stop 76
aagctgattcatagactatctgata

SEQ ID NO: 345867 - DNA, 25 bp, Artificial
  probe
  misc_feature (1)..(25): SEQ ID NO: 3073; WAN024BHJ; Start 193; Stop 217
acattaaaggaagctaagaatcaac

SEQ ID NO: 345868 - DNA, 25 bp, Artificial
  probe
  misc_feature (1)..(25): SEQ ID NO: 3073; WAN024BHJ; Start 192; Stop 216
cacattaaaggaagctaagaatcaa

SEQ ID NO: 345869 - DNA, 25 bp, Artificial
  probe
  misc_feature (1)..(25): SEQ ID NO: 3073; WAN024BHJ; Start 53; Stop 77
agctgattcatagactatctgatat

SEQ ID NO: 345870 - DNA, 25 bp, Artificial
  probe
  misc_feature (1)..(25): SEQ ID NO: 3073; WAN024BHJ; Start 194; Stop 218
cattaaaggaagctaagaatcaact

SEQ ID NO: 345871 - DNA, 25 bp, Artificial
  probe
  misc_feature (1)..(25): SEQ ID NO: 3073; WAN024BHJ; Start 200; Stop 224
aggaagctaagaatcaacttcataa

SEQ ID NO: 345872 - DNA, 25 bp, Artificial
  probe
  misc_feature (1)..(25): SEQ ID NO: 3073; WAN024BHJ; Start 199; Stop 223
aaggaagctaagaatcaacttcata

SEQ ID NO: 345873 - DNA, 25 bp, Artificial
  probe
  misc_feature (1)..(25): SEQ ID NO: 3073; WAN024BHJ; Start 202; Stop 226
gaagctaagaatcaacttcataagg

SEQ ID NO: 345874 - DNA, 25 bp, Artificial
  probe
  misc_feature (1)..(25): SEQ ID NO: 3073; WAN024BHJ; Start 201; Stop 225
ggaagctaagaatcaacttcataag

SEQ ID NO: 345875 - DNA, 25 bp, Artificial
  probe
  misc_feature (1)..(25): SEQ ID NO: 3073; WAN024BHJ; Start 183; Stop 207
tttggacgacacattaaaggaagct

SEQ ID NO: 345876 - DNA, 25 bp, Artificial
  probe
  misc_feature (1)..(25): SEQ ID NO: 3073; WAN024BHJ; Start 63; Stop 87
tagactatctgatatgtctgtccaa

SEQ ID NO: 345877 - DNA, 25 bp, Artificial
  probe
  misc_feature (1)..(25): SEQ ID NO: 3073; WAN024BHJ; Start 51; Stop 75
aaagctgattcatagactatctgat

SEQ ID NO: 345878 - DNA, 25 bp, Artificial
  probe
  misc_feature (1)..(25): SEQ ID NO: 3074; WAN024FLO; Start 210; Stop 234
tggctctaatcatatctctcctcat

SEQ ID NO: 345879 - DNA, 25 bp, Artificial
  probe
  misc_feature (1)..(25): SEQ ID NO: 3074; WAN024FLO; Start 209; Stop 233
atggctctaatcatatctctcctca

SEQ ID NO: 345880 - DNA, 25 bp, Artificial
  probe
  misc_feature (1)..(25): SEQ ID NO: 3074; WAN024FLO; Start 504; Stop 528
aataggagagaattgctggataaca

SEQ ID NO: 345881 - DNA, 25 bp, Artificial
  probe
  misc_feature (1)..(25): SEQ ID NO: 3074; WAN024FLO; Start 500; Stop 524
ttgtaataggagagaattgctggat

SEQ ID NO: 345882 - DNA, 25 bp, Artificial
  probe
  misc_feature (1)..(25): SEQ ID NO: 3074; WAN024FLO; Start 499; Stop 523
attgtaataggagagaattgctgga

SEQ ID NO: 345883 - DNA, 25 bp, Artificial
  probe
  misc_feature (1)..(25): SEQ ID NO: 3074; WAN024FLO; Start 208; Stop 232
gatggctctaatcatatctctcctc

SEQ ID NO: 345884 - DNA, 25 bp, Artificial
  probe
  misc_feature (1)..(25): SEQ ID NO: 3074; WAN024FLO; Start 501; Stop 525
tgtaataggagagaattgctggata

SEQ ID NO: 345885 - DNA, 25 bp, Artificial
  probe
  misc_feature (1)..(25): SEQ ID NO: 3074; WAN024FLO; Start 498; Stop 522
tattgtaataggagagaattgctgg

SEQ ID NO: 345886 - DNA, 25 bp, Artificial
  probe
  misc_feature (1)..(25): SEQ ID NO: 3074; WAN024FLO; Start 211; Stop 235
ggctctaatcatatctctcctcatg

SEQ ID NO: 345887 - DNA, 25 bp, Artificial
  probe
  misc_feature (1)..(25): SEQ ID NO: 3074; WAN024FLO; Start 505; Stop 529
ataggagagaattgctggataacag

SEQ ID NO: 345888 - DNA, 25 bp, Artificial
  probe
  misc_feature (1)..(25): SEQ ID NO: 3074; WAN024FLO; Start 314; Stop 338
gtatagagcaaggaggtacggttaa

SEQ ID NO: 345889 - DNA, 25 bp, Artificial
  probe
  misc_feature (1)..(25): SEQ ID NO: 3074; WAN024FLO; Start 503; Stop 527
taataggagagaattgctggataac

SEQ ID NO: 345890 - DNA, 25 bp, Artificial
  probe
  misc_feature (1)..(25): SEQ ID NO: 3074; WAN024FLO; Start 502; Stop 526
gtaataggagagaattgctggataa

SEQ ID NO: 345891 - DNA, 25 bp, Artificial
  probe
  misc_feature (1)..(25): SEQ ID NO: 3074; WAN024FLO; Start 313; Stop 337
tgtatagagcaaggaggtacggtta

SEQ ID NO: 345892 - DNA, 25 bp, Artificial
  probe
  misc_feature (1)..(25): SEQ ID NO: 3074; WAN024FLO; Start 207; Stop 231
agatggctctaatcatatctctcct

SEQ ID NO: 345893 - DNA, 25 bp, Artificial
  probe
  misc_feature (1)..(25): SEQ ID NO: 3074; WAN024FLO; Start 206; Stop 230
aagatggctctaatcatatctctcc

SEQ ID NO: 345894 - DNA, 25 bp, Artificial
  probe
  misc_feature (1)..(25): SEQ ID NO: 3074; WAN024FLO; Start 307; Stop 331
aatttgtgtatagagcaaggaggta

SEQ ID NO: 345895 - DNA, 25 bp, Artificial
  probe
  misc_feature (1)..(25): SEQ ID NO: 3074; WAN024FLO; Start 306; Stop 330
taatttgtgtatagagcaaggaggt

SEQ ID NO: 345896 - DNA, 25 bp, Artificial
  probe
  misc_feature (1)..(25): SEQ ID NO: 3074; WAN024FLO; Start 324; Stop 348
aggaggtacggttaaattaggagat

SEQ ID NO: 345897 - DNA, 25 bp, Artificial
  probe
  misc_feature (1)..(25): SEQ ID NO: 3074; WAN024FLO; Start 323; Stop 347
aaggaggtacggttaaattaggaga

SEQ ID NO: 345898 - DNA, 25 bp, Artificial
  probe
  misc_feature (1)..(25): SEQ ID NO: 3074; WAN024FLO; Start 322; Stop 346
caaggaggtacggttaaattaggag

SEQ ID NO: 345899 - DNA, 25 bp, Artificial
  probe
  misc_feature (1)..(25): SEQ ID NO: 3074; WAN024FLO; Start 315; Stop 339
tatagagcaaggaggtacggttaaa

SEQ ID NO: 345900 - DNA, 25 bp, Artificial
  probe
  misc_feature (1)..(25): SEQ ID NO: 3074; WAN024FLO; Start 325; Stop 349
ggaggtacggttaaattaggagata

SEQ ID NO: 345901 - DNA, 25 bp, Artificial
  probe
  misc_feature (1)..(25): SEQ ID NO: 3074; WAN024FLO; Start 497; Stop 521
ttattgtaataggagagaattgctg

SEQ ID NO: 345902 - DNA, 25 bp, Artificial
  probe
  misc_feature (1)..(25): SEQ ID NO: 3074; WAN024FLO; Start 496; Stop 520
gttattgtaataggagagaattgct

SEQ ID NO: 345903 - DNA, 25 bp, Artificial
  probe
  misc_feature (1)..(25): SEQ ID NO: 3074; WAN024FLO; Start 495; Stop 519
agttattgtaataggagagaattgc

SEQ ID NO: 345904 - DNA, 25 bp, Artificial
  probe
  misc_feature (1)..(25): SEQ ID NO: 3074; WAN024FLO; Start 308; Stop 332
atttgtgtatagagcaaggaggtac

SEQ ID NO: 345905 - DNA, 25 bp, Artificial
  probe
  misc_feature (1)..(25): SEQ ID NO: 3074; WAN024FLO; Start 319; Stop 343
gagcaaggaggtacggttaaattag

SEQ ID NO: 345906 - DNA, 25 bp, Artificial
  probe
  misc_feature (1)..(25): SEQ ID NO: 3074; WAN024FLO; Start 305; Stop 329
ttaatttgtgtatagagcaaggagg

SEQ ID NO: 345907 - DNA, 25 bp, Artificial
  probe
  misc_feature (1)..(25): SEQ ID NO: 3074; WAN024FLO; Start 316; Stop 340
atagagcaaggaggtacggttaaat

SEQ ID NO: 345908 - DNA, 25 bp, Artificial
  probe
  misc_feature (1)..(25): SEQ ID NO: 3074; WAN024FLO; Start 318; Stop 342
agagcaaggaggtacggttaaatta

SEQ ID NO: 345909 - DNA, 25 bp, Artificial
  probe
  misc_feature (1)..(25): SEQ ID NO: 3074; WAN024FLO; Start 317; Stop 341
tagagcaaggaggtacggttaaatt

SEQ ID NO: 345910 - DNA, 25 bp, Artificial
  probe
  misc_feature (1)..(25): SEQ ID NO: 3074; WAN024FLO; Start 448; Stop 472
aatggacataggatctattatcagg

SEQ ID NO: 345911 - DNA, 25 bp, Artificial
  probe
  misc_feature (1)..(25): SEQ ID NO: 3075; WAN024FN3; Start 961; Stop 985
tcttctgatgtaggaattgtcaact

SEQ ID NO: 345912 - DNA, 25 bp, Artificial
  probe
  misc_feature (1)..(25): SEQ ID NO: 3075; WAN024FN3; Start 960; Stop 984
ctcttctgatgtaggaattgtcaac

SEQ ID NO: 345913 - DNA, 25 bp, Artificial
  probe
  misc_feature (1)..(25): SEQ ID NO: 3075; WAN024FN3; Start 959; Stop 983
tctcttctgatgtaggaattgtcaa

SEQ ID NO: 345914 - DNA, 25 bp, Artificial
  probe
  misc_feature (1)..(25): SEQ ID NO: 3075; WAN024FN3; Start 958; Stop 982
atctcttctgatgtaggaattgtca

SEQ ID NO: 345915 - DNA, 25 bp, Artificial
  probe
  misc_feature (1)..(25): SEQ ID NO: 3075; WAN024FN3; Start 962; Stop 986
cttctgatgtaggaattgtcaacta

SEQ ID NO: 345916 - DNA, 25 bp, Artificial
  probe
  misc_feature (1)..(25): SEQ ID NO: 3075; WAN024FN3; Start 167; Stop 191
atggtgttagagtcattcgttggaa

SEQ ID NO: 345917 - DNA, 25 bp, Artificial
  probe
  misc_feature (1)..(25): SEQ ID NO: 3075; WAN024FN3; Start 957; Stop 981
tatctcttctgatgtaggaattgtc

SEQ ID NO: 345918 - DNA, 25 bp, Artificial
  probe
  misc_feature (1)..(25): SEQ ID NO: 3075; WAN024FN3; Start 115; Stop 139
gtgctgacctattgttatccatcac

SEQ ID NO: 345919 - DNA, 25 bp, Artificial
  probe
  misc_feature (1)..(25): SEQ ID NO: 3075; WAN024FN3; Start 964; Stop 988
tctgatgtaggaattgtcaactatt

SEQ ID NO: 345920 - DNA, 25 bp, Artificial
  probe
  misc_feature (1)..(25): SEQ ID NO: 3075; WAN024FN3; Start 963; Stop 987
ttctgatgtaggaattgtcaactat

SEQ ID NO: 345921 - DNA, 25 bp, Artificial
  probe
  misc_feature (1)..(25): SEQ ID NO: 3075; WAN024FN3; Start 982; Stop 1006
aactatttgtctggaggaatcactg

SEQ ID NO: 345922 - DNA, 25 bp, Artificial
  probe
  misc_feature (1)..(25): SEQ ID NO: 3075; WAN024FN3; Start 394; Stop 418
tggcatagacaatcattcaagcgat

SEQ ID NO: 345923 - DNA, 25 bp, Artificial
  probe
  misc_feature (1)..(25): SEQ ID NO: 3075; WAN024FN3; Start 956; Stop 980
ttatctcttctgatgtaggaattgt

SEQ ID NO: 345924 - DNA, 25 bp, Artificial
  probe
  misc_feature (1)..(25): SEQ ID NO: 3075; WAN024FN3; Start 118; Stop 142
ctgacctattgttatccatcacgta

SEQ ID NO: 345925 - DNA, 25 bp, Artificial
  probe
  misc_feature (1)..(25): SEQ ID NO: 3075; WAN024FN3; Start 119; Stop 143
tgacctattgttatccatcacgtac

SEQ ID NO: 345926 - DNA, 25 bp, Artificial
  probe
  misc_feature (1)..(25): SEQ ID NO: 3075; WAN024FN3; Start 977; Stop 1001
ttgtcaactatttgtctggaggaat

SEQ ID NO: 345927 - DNA, 25 bp, Artificial
  probe
  misc_feature (1)..(25): SEQ ID NO: 3075; WAN024FN3; Start 976; Stop 1000
attgtcaactatttgtctggaggaa

SEQ ID NO: 345928 - DNA, 25 bp, Artificial
  probe
  misc_feature (1)..(25): SEQ ID NO: 3075; WAN024FN3; Start 116; Stop 140
tgctgacctattgttatccatcacg

SEQ ID NO: 345929 - DNA, 25 bp, Artificial
  probe
  misc_feature (1)..(25): SEQ ID NO: 3075; WAN024FN3; Start 21; Stop 45
aaccactcatacttatcttcctaat

SEQ ID NO: 345930 - DNA, 25 bp, Artificial
  probe
  misc_feature (1)..(25): SEQ ID NO: 3075; WAN024FN3; Start 981; Stop 1005
caactatttgtctggaggaatcact

SEQ ID NO: 345931 - DNA, 25 bp, Artificial
  probe
  misc_feature (1)..(25): SEQ ID NO: 3075; WAN024FN3; Start 980; Stop 1004
tcaactatttgtctggaggaatcac

SEQ ID NO: 345932 - DNA, 25 bp, Artificial
  probe
  misc_feature (1)..(25): SEQ ID NO: 3075; WAN024FN3; Start 979; Stop 1003
gtcaactatttgtctggaggaatca

SEQ ID NO: 345933 - DNA, 25 bp, Artificial
  probe
  misc_feature (1)..(25): SEQ ID NO: 3075; WAN024FN3; Start 978; Stop 1002
tgtcaactatttgtctggaggaatc

SEQ ID NO: 345934 - DNA, 25 bp, Artificial
  probe
  misc_feature (1)..(25): SEQ ID NO: 3075; WAN024FN3; Start 975; Stop 999
aattgtcaactatttgtctggagga

SEQ ID NO: 345935 - DNA, 25 bp, Artificial
  probe
  misc_feature (1)..(25): SEQ ID NO: 3075; WAN024FN3; Start 974; Stop 998
gaattgtcaactatttgtctggagg

SEQ ID NO: 345936 - DNA, 25 bp, Artificial
  probe
  misc_feature (1)..(25): SEQ ID NO: 3075; WAN024FN3; Start 973; Stop 997
ggaattgtcaactatttgtctggag

SEQ ID NO: 345937 - DNA, 25 bp, Artificial
  probe
  misc_feature (1)..(25): SEQ ID NO: 3075; WAN024FN3; Start 972; Stop 996
aggaattgtcaactatttgtctgga

SEQ ID NO: 345938 - DNA, 25 bp, Artificial
  probe
  misc_feature (1)..(25): SEQ ID NO: 3075; WAN024FN3; Start 391; Stop 415
cattggcatagacaatcattcaagc

SEQ ID NO: 345939 - DNA, 25 bp, Artificial
  probe
  misc_feature (1)..(25): SEQ ID NO: 3075; WAN024FN3; Start 390; Stop 414
gcattggcatagacaatcattcaag

SEQ ID NO: 345940 - DNA, 25 bp, Artificial
  probe
  misc_feature (1)..(25): SEQ ID NO: 3075; WAN024FN3; Start 120; Stop 144
gacctattgttatccatcacgtaca

SEQ ID NO: 345941 - DNA, 25 bp, Artificial
  probe
  misc_feature (1)..(25): SEQ ID NO: 3075; WAN024FN3; Start 156; Stop 180
agaagtgataaatggtgttagagtc

SEQ ID NO: 345942 - DNA, 25 bp, Artificial
  probe
  misc_feature (1)..(25): SEQ ID NO: 3075; WAN024FN3; Start 155; Stop 179
gagaagtgataaatggtgttagagt

SEQ ID NO: 345943 - DNA, 25 bp, Artificial
  probe
  misc_feature (1)..(25): SEQ ID NO: 3075; WAN024FN3; Start 395; Stop 419
ggcatagacaatcattcaagcgatt

SEQ ID NO: 345944 - DNA, 25 bp, Artificial
  probe
  misc_feature (1)..(25): SEQ ID NO: 3076; WAN024DQA; Start 47; Stop 71
acagtcttggtaaggtcaatatgat

SEQ ID NO: 345945 - DNA, 25 bp, Artificial
  probe
  misc_feature (1)..(25): SEQ ID NO: 3076; WAN024DQA; Start 48; Stop 72
cagtcttggtaaggtcaatatgatt

SEQ ID NO: 345946 - DNA, 25 bp, Artificial
  probe
  misc_feature (1)..(25): SEQ ID NO: 3076; WAN024DQA; Start 46; Stop 70
gacagtcttggtaaggtcaatatga

SEQ ID NO: 345947 - DNA, 25 bp, Artificial
  probe
  misc_feature (1)..(25): SEQ ID NO: 3076; WAN024DQA; Start 45; Stop 69
agacagtcttggtaaggtcaatatg

SEQ ID NO: 345948 - DNA, 25 bp, Artificial
  probe
  misc_feature (1)..(25): SEQ ID NO: 3076; WAN024DQA; Start 184; Stop 208
ctacttctccgacttcctccactaa

SEQ ID NO: 345949 - DNA, 25 bp, Artificial
  probe
  misc_feature (1)..(25): SEQ ID NO: 3076; WAN024DQA; Start 83; Stop 107
attgcgacggtgtagtaaatgatat

SEQ ID NO: 345950 - DNA, 25 bp, Artificial
  probe
  misc_feature (1)..(25): SEQ ID NO: 3076; WAN024DQA; Start 5; Stop 29
ttatgttggtaattaatggctgcgg

SEQ ID NO: 345951 - DNA, 25 bp, Artificial
  probe
  misc_feature (1)..(25): SEQ ID NO: 3076; WAN024DQA; Start 185; Stop 209
tacttctccgacttcctccactaac

SEQ ID NO: 345952 - DNA, 25 bp, Artificial
  probe
  misc_feature (1)..(25): SEQ ID NO: 3076; WAN024DQA; Start 82; Stop 106
gattgcgacggtgtagtaaatgata

SEQ ID NO: 345953 - DNA, 25 bp, Artificial
  probe
  misc_feature (1)..(25): SEQ ID NO: 3076; WAN024DQA; Start 49; Stop 73
agtcttggtaaggtcaatatgatta

SEQ ID NO: 345954 - DNA, 25 bp, Artificial
  probe
  misc_feature (1)..(25): SEQ ID NO: 3076; WAN024DQA; Start 188; Stop 212
ttctccgacttcctccactaacttc

SEQ ID NO: 345955 - DNA, 25 bp, Artificial
  probe
  misc_feature (1)..(25): SEQ ID NO: 3076; WAN024DQA; Start 187; Stop 211
cttctccgacttcctccactaactt

SEQ ID NO: 345956 - DNA, 25 bp, Artificial
  probe
  misc_feature (1)..(25): SEQ ID NO: 3076; WAN024DQA; Start 6; Stop 30
tatgttggtaattaatggctgcggt

SEQ ID NO: 345957 - DNA, 25 bp, Artificial
  probe
  misc_feature (1)..(25): SEQ ID NO: 3076; WAN024DQA; Start 4; Stop 28
tttatgttggtaattaatggctgcg

SEQ ID NO: 345958 - DNA, 25 bp, Artificial
  probe
  misc_feature (1)..(25): SEQ ID NO: 3076; WAN024DQA; Start 3; Stop 27
gtttatgttggtaattaatggctgc

SEQ ID NO: 345959 - DNA, 25 bp, Artificial
  probe
  misc_feature (1)..(25): SEQ ID NO: 3076; WAN024DQA; Start 183; Stop 207
actacttctccgacttcctccacta

SEQ ID NO: 345960 - DNA, 25 bp, Artificial
  probe
  misc_feature (1)..(25): SEQ ID NO: 3076; WAN024DQA; Start 50; Stop 74
gtcttggtaaggtcaatatgattaa

SEQ ID NO: 345961 - DNA, 25 bp, Artificial
  probe
  misc_feature (1)..(25): SEQ ID NO: 3076; WAN024DQA; Start 66; Stop 90
tatgattaatagctacgattgcgac

SEQ ID NO: 345962 - DNA, 25 bp, Artificial
  probe
  misc_feature (1)..(25): SEQ ID NO: 3076; WAN024DQA; Start 67; Stop 91
atgattaatagctacgattgcgacg

SEQ ID NO: 345963 - DNA, 25 bp, Artificial
  probe
  misc_feature (1)..(25): SEQ ID NO: 3076; WAN024DQA; Start 65; Stop 89
atatgattaatagctacgattgcga

SEQ ID NO: 345964 - DNA, 25 bp, Artificial
  probe
  misc_feature (1)..(25): SEQ ID NO: 3076; WAN024DQA; Start 2; Stop 26
tgtttatgttggtaattaatggctg

SEQ ID NO: 345965 - DNA, 25 bp, Artificial
  probe
  misc_feature (1)..(25): SEQ ID NO: 3076; WAN024DQA; Start 44; Stop 68
aagacagtcttggtaaggtcaatat

SEQ ID NO: 345966 - DNA, 25 bp, Artificial
  probe
  misc_feature (1)..(25): SEQ ID NO: 3076; WAN024DQA; Start 7; Stop 31
atgttggtaattaatggctgcggtt

SEQ ID NO: 345967 - DNA, 25 bp, Artificial
  probe
  misc_feature (1)..(25): SEQ ID NO: 3076; WAN024DQA; Start 84; Stop 108
ttgcgacggtgtagtaaatgatatc

SEQ ID NO: 345968 - DNA, 25 bp, Artificial
  probe
  misc_feature (1)..(25): SEQ ID NO: 3076; WAN024DQA; Start 79; Stop 103
tacgattgcgacggtgtagtaaatg

SEQ ID NO: 345969 - DNA, 25 bp, Artificial
  probe
  misc_feature (1)..(25): SEQ ID NO: 3076; WAN024DQA; Start 64; Stop 88
aatatgattaatagctacgattgcg

SEQ ID NO: 345970 - DNA, 25 bp, Artificial
  probe
  misc_feature (1)..(25): SEQ ID NO: 3076; WAN024DQA; Start 54; Stop 78
tggtaaggtcaatatgattaatagc

SEQ ID NO: 345971 - DNA, 25 bp, Artificial
  probe
  misc_feature (1)..(25): SEQ ID NO: 3076; WAN024DQA; Start 189; Stop 213
tctccgacttcctccactaacttca

SEQ ID NO: 345972 - DNA, 25 bp, Artificial
  probe
  misc_feature (1)..(25): SEQ ID NO: 3076; WAN024DQA; Start 186; Stop 210
acttctccgacttcctccactaact

SEQ ID NO: 345973 - DNA, 25 bp, Artificial
  probe
  misc_feature (1)..(25): SEQ ID NO: 3076; WAN024DQA; Start 81; Stop 105
cgattgcgacggtgtagtaaatgat

SEQ ID NO: 345974 - DNA, 25 bp, Artificial
  probe
  misc_feature (1)..(25): SEQ ID NO: 3076; WAN024DQA; Start 1; Stop 25
atgtttatgttggtaattaatggct

SEQ ID NO: 345975 - DNA, 25 bp, Artificial
  probe
  misc_feature (1)..(25): SEQ ID NO: 3076; WAN024DQA; Start 182; Stop 206
gactacttctccgacttcctccact

SEQ ID NO: 345976 - DNA, 25 bp, Artificial
  probe
  misc_feature (1)..(25): SEQ ID NO: 3076; WAN024DQA; Start 55; Stop 79
ggtaaggtcaatatgattaatagct

SEQ ID NO: 345977 - DNA, 25 bp, Artificial
  probe
  misc_feature (1)..(25): SEQ ID NO: 3077; WAN024B5Q; Start 14; Stop 38
aaccaccagcatactttaacaaatc

SEQ ID NO: 345978 - DNA, 25 bp, Artificial
  probe
  misc_feature (1)..(25): SEQ ID NO: 3077; WAN024B5Q; Start 18; Stop 42
accagcatactttaacaaatcctct

SEQ ID NO: 345979 - DNA, 25 bp, Artificial
  probe
  misc_feature (1)..(25): SEQ ID NO: 3077; WAN024B5Q; Start 17; Stop 41
caccagcatactttaacaaatcctc

SEQ ID NO: 345980 - DNA, 25 bp, Artificial
  probe
  misc_feature (1)..(25): SEQ ID NO: 3077; WAN024B5Q; Start 13; Stop 37
aaaccaccagcatactttaacaaat

SEQ ID NO: 345981 - DNA, 25 bp, Artificial
  probe
  misc_feature (1)..(25): SEQ ID NO: 3077; WAN024B5Q; Start 41; Stop 65
ctaaatctgctggaaactcactcat

SEQ ID NO: 345982 - DNA, 25 bp, Artificial
  probe
  misc_feature (1)..(25): SEQ ID NO: 3077; WAN024B5Q; Start 84; Stop 108
tgctactaatccatttgctgtgaaa

SEQ ID NO: 345983 - DNA, 25 bp, Artificial
  probe
  misc_feature (1)..(25): SEQ ID NO: 3077; WAN024B5Q; Start 39; Stop 63
ctctaaatctgctggaaactcactc

SEQ ID NO: 345984 - DNA, 25 bp, Artificial
  probe
  misc_feature (1)..(25): SEQ ID NO: 3077; WAN024B5Q; Start 29; Stop 53
ttaacaaatcctctaaatctgctgg

SEQ ID NO: 345985 - DNA, 25 bp, Artificial
  probe
  misc_feature (1)..(25): SEQ ID NO: 3077; WAN024B5Q; Start 16; Stop 40
ccaccagcatactttaacaaatcct

SEQ ID NO: 345986 - DNA, 25 bp, Artificial
  probe
  misc_feature (1)..(25): SEQ ID NO: 3077; WAN024B5Q; Start 19; Stop 43
ccagcatactttaacaaatcctcta

SEQ ID NO: 345987 - DNA, 25 bp, Artificial
  probe
  misc_feature (1)..(25): SEQ ID NO: 3077; WAN024B5Q; Start 83; Stop 107
gtgctactaatccatttgctgtgaa

SEQ ID NO: 345988 - DNA, 25 bp, Artificial
  probe
  misc_feature (1)..(25): SEQ ID NO: 3077; WAN024B5Q; Start 40; Stop 64
tctaaatctgctggaaactcactca

SEQ ID NO: 345989 - DNA, 25 bp, Artificial
  probe
  misc_feature (1)..(25): SEQ ID NO: 3077; WAN024B5Q; Start 12; Stop 36
taaaccaccagcatactttaacaaa

SEQ ID NO: 345990 - DNA, 25 bp, Artificial
  probe
  misc_feature (1)..(25): SEQ ID NO: 3077; WAN024B5Q; Start 15; Stop 39
accaccagcatactttaacaaatcc

SEQ ID NO: 345991 - DNA, 25 bp, Artificial
  probe
  misc_feature (1)..(25): SEQ ID NO: 3077; WAN024B5Q; Start 11; Stop 35
ataaaccaccagcatactttaacaa

SEQ ID NO: 345992 - DNA, 25 bp, Artificial
  probe
  misc_feature (1)..(25): SEQ ID NO: 3077; WAN024B5Q; Start 10; Stop 34
aataaaccaccagcatactttaaca

SEQ ID NO: 345993 - DNA, 25 bp, Artificial
  probe
  misc_feature (1)..(25): SEQ ID NO: 3077; WAN024B5Q; Start 85; Stop 109
gctactaatccatttgctgtgaaat

SEQ ID NO: 345994 - DNA, 25 bp, Artificial
  probe
  misc_feature (1)..(25): SEQ ID NO: 3077; WAN024B5Q; Start 42; Stop 66
taaatctgctggaaactcactcatg

SEQ ID NO: 345995 - DNA, 25 bp, Artificial
  probe
  misc_feature (1)..(25): SEQ ID NO: 3077; WAN024B5Q; Start 171; Stop 195
acttgtcatattgaaatccttcctt

SEQ ID NO: 345996 - DNA, 25 bp, Artificial
  probe
  misc_feature (1)..(25): SEQ ID NO: 3077; WAN024B5Q; Start 170; Stop 194
aacttgtcatattgaaatccttcct

SEQ ID NO: 345997 - DNA, 25 bp, Artificial
  probe
  misc_feature (1)..(25): SEQ ID NO: 3077; WAN024B5Q; Start 38; Stop 62
cctctaaatctgctggaaactcact

SEQ ID NO: 345998 - DNA, 25 bp, Artificial
  probe
  misc_feature (1)..(25): SEQ ID NO: 3077; WAN024B5Q; Start 34; Stop 58
aaatcctctaaatctgctggaaact

SEQ ID NO: 345999 - DNA, 25 bp, Artificial
  probe
  misc_feature (1)..(25): SEQ ID NO: 3077; WAN024B5Q; Start 33; Stop 57
caaatcctctaaatctgctggaaac

SEQ ID NO: 346000 - DNA, 25 bp, Artificial
  probe
  misc_feature (1)..(25): SEQ ID NO: 3077; WAN024B5Q; Start 30; Stop 54
taacaaatcctctaaatctgctgga

SEQ ID NO: 346001 - DNA, 25 bp, Artificial
  probe
  misc_feature (1)..(25): SEQ ID NO: 3077; WAN024B5Q; Start 32; Stop 56
acaaatcctctaaatctgctggaaa

SEQ ID NO: 346002 - DNA, 25 bp, Artificial
  probe
  misc_feature (1)..(25): SEQ ID NO: 3077; WAN024B5Q; Start 31; Stop 55
aacaaatcctctaaatctgctggaa

SEQ ID NO: 346003 - DNA, 25 bp, Artificial
  probe
  misc_feature (1)..(25): SEQ ID NO: 3077; WAN024B5Q; Start 35; Stop 59
aatcctctaaatctgctggaaactc

SEQ ID NO: 346004 - DNA, 25 bp, Artificial
  probe
  misc_feature (1)..(25): SEQ ID NO: 3077; WAN024B5Q; Start 169; Stop 193
aaacttgtcatattgaaatccttcc

SEQ ID NO: 346005 - DNA, 25 bp, Artificial
  probe
  misc_feature (1)..(25): SEQ ID NO: 3077; WAN024B5Q; Start 82; Stop 106
agtgctactaatccatttgctgtga

SEQ ID NO: 346006 - DNA, 25 bp, Artificial
  probe
  misc_feature (1)..(25): SEQ ID NO: 3077; WAN024B5Q; Start 28; Stop 52
tttaacaaatcctctaaatctgctg

SEQ ID NO: 346007 - DNA, 25 bp, Artificial
  probe
  misc_feature (1)..(25): SEQ ID NO: 3077; WAN024B5Q; Start 26; Stop 50
actttaacaaatcctctaaatctgc

SEQ ID NO: 346008 - DNA, 25 bp, Artificial
  probe
  misc_feature (1)..(25): SEQ ID NO: 3077; WAN024B5Q; Start 36; Stop 60
atcctctaaatctgctggaaactca

SEQ ID NO: 346009 - DNA, 25 bp, Artificial
  probe
  misc_feature (1)..(25): SEQ ID NO: 3077; WAN024B5Q; Start 86; Stop 110
ctactaatccatttgctgtgaaatt

SEQ ID NO: 346010 - DNA, 25 bp, Artificial
  probe
  misc_feature (1)..(25): SEQ ID NO: 3078; WAN024F4K; Start 733; Stop 757
gaatggactctcttgattatcggaa

SEQ ID NO: 346011 - DNA, 25 bp, Artificial
  probe
  misc_feature (1)..(25): SEQ ID NO: 3078; WAN024F4K; Start 734; Stop 758
aatggactctcttgattatcggaat

SEQ ID NO: 346012 - DNA, 25 bp, Artificial
  probe
  misc_feature (1)..(25): SEQ ID NO: 3078; WAN024F4K; Start 739; Stop 763
actctcttgattatcggaattgtgt

SEQ ID NO: 346013 - DNA, 25 bp, Artificial
  probe
  misc_feature (1)..(25): SEQ ID NO: 3078; WAN024F4K; Start 738; Stop 762
gactctcttgattatcggaattgtg

SEQ ID NO: 346014 - DNA, 25 bp, Artificial
  probe
  misc_feature (1)..(25): SEQ ID NO: 3078; WAN024F4K; Start 737; Stop 761
ggactctcttgattatcggaattgt

SEQ ID NO: 346015 - DNA, 25 bp, Artificial
  probe
  misc_feature (1)..(25): SEQ ID NO: 3078; WAN024F4K; Start 736; Stop 760
tggactctcttgattatcggaattg

SEQ ID NO: 346016 - DNA, 25 bp, Artificial
  probe
  misc_feature (1)..(25): SEQ ID NO: 3078; WAN024F4K; Start 735; Stop 759
atggactctcttgattatcggaatt

SEQ ID NO: 346017 - DNA, 25 bp, Artificial
  probe
  misc_feature (1)..(25): SEQ ID NO: 3078; WAN024F4K; Start 354; Stop 378
gcttctaggtggagttatcttctat

SEQ ID NO: 346018 - DNA, 25 bp, Artificial
  probe
  misc_feature (1)..(25): SEQ ID NO: 3078; WAN024F4K; Start 740; Stop 764
ctctcttgattatcggaattgtgta

SEQ ID NO: 346019 - DNA, 25 bp, Artificial
  probe
  misc_feature (1)..(25): SEQ ID NO: 3078; WAN024F4K; Start 743; Stop 767
tcttgattatcggaattgtgtatgt

SEQ ID NO: 346020 - DNA, 25 bp, Artificial
  probe
  misc_feature (1)..(25): SEQ ID NO: 3078; WAN024F4K; Start 742; Stop 766
ctcttgattatcggaattgtgtatg

SEQ ID NO: 346021 - DNA, 25 bp, Artificial
  probe
  misc_feature (1)..(25): SEQ ID NO: 3078; WAN024F4K; Start 741; Stop 765
tctcttgattatcggaattgtgtat

SEQ ID NO: 346022 - DNA, 25 bp, Artificial
  probe
  misc_feature (1)..(25): SEQ ID NO: 3078; WAN024F4K; Start 744; Stop 768
cttgattatcggaattgtgtatgtt

SEQ ID NO: 346023 - DNA, 25 bp, Artificial
  probe
  misc_feature (1)..(25): SEQ ID NO: 3078; WAN024F4K; Start 549; Stop 573
tgcctatggagttattgcctatgtg

SEQ ID NO: 346024 - DNA, 25 bp, Artificial
  probe
  misc_feature (1)..(25): SEQ ID NO: 3078; WAN024F4K; Start 353; Stop 377
agcttctaggtggagttatcttcta

SEQ ID NO: 346025 - DNA, 25 bp, Artificial
  probe
  misc_feature (1)..(25): SEQ ID NO: 3078; WAN024F4K; Start 350; Stop 374
ttcagcttctaggtggagttatctt

SEQ ID NO: 346026 - DNA, 25 bp, Artificial
  probe
  misc_feature (1)..(25): SEQ ID NO: 3078; WAN024F4K; Start 357; Stop 381
tctaggtggagttatcttctatctt

SEQ ID NO: 346027 - DNA, 25 bp, Artificial
  probe
  misc_feature (1)..(25): SEQ ID NO: 3078; WAN024F4K; Start 356; Stop 380
ttctaggtggagttatcttctatct

SEQ ID NO: 346028 - DNA, 25 bp, Artificial
  probe
  misc_feature (1)..(25): SEQ ID NO: 3078; WAN024F4K; Start 352; Stop 376
cagcttctaggtggagttatcttct

SEQ ID NO: 346029 - DNA, 25 bp, Artificial
  probe
  misc_feature (1)..(25): SEQ ID NO: 3078; WAN024F4K; Start 351; Stop 375
tcagcttctaggtggagttatcttc

SEQ ID NO: 346030 - DNA, 25 bp, Artificial
  probe
  misc_feature (1)..(25): SEQ ID NO: 3078; WAN024F4K; Start 349; Stop 373
cttcagcttctaggtggagttatct

SEQ ID NO: 346031 - DNA, 25 bp, Artificial
  probe
  misc_feature (1)..(25): SEQ ID NO: 3078; WAN024F4K; Start 348; Stop 372
tcttcagcttctaggtggagttatc

SEQ ID NO: 346032 - DNA, 25 bp, Artificial
  probe
  misc_feature (1)..(25): SEQ ID NO: 3078; WAN024F4K; Start 568; Stop 592
tatgtgcaaggtcagatggatattc

SEQ ID NO: 346033 - DNA, 25 bp, Artificial
  probe
  misc_feature (1)..(25): SEQ ID NO: 3078; WAN024F4K; Start 567; Stop 591
ctatgtgcaaggtcagatggatatt

SEQ ID NO: 346034 - DNA, 25 bp, Artificial
  probe
  misc_feature (1)..(25): SEQ ID NO: 3078; WAN024F4K; Start 355; Stop 379
cttctaggtggagttatcttctatc

SEQ ID NO: 346035 - DNA, 25 bp, Artificial
  probe
  misc_feature (1)..(25): SEQ ID NO: 3078; WAN024F4K; Start 347; Stop 371
ctcttcagcttctaggtggagttat

SEQ ID NO: 346036 - DNA, 25 bp, Artificial
  probe
  misc_feature (1)..(25): SEQ ID NO: 3078; WAN024F4K; Start 802; Stop 826
tatttcaaactgacaggtggtaaac

SEQ ID NO: 346037 - DNA, 25 bp, Artificial
  probe
  misc_feature (1)..(25): SEQ ID NO: 3078; WAN024F4K; Start 800; Stop 824
gttatttcaaactgacaggtggtaa

SEQ ID NO: 346038 - DNA, 25 bp, Artificial
  probe
  misc_feature (1)..(25): SEQ ID NO: 3078; WAN024F4K; Start 572; Stop 596
tgcaaggtcagatggatattcttct

SEQ ID NO: 346039 - DNA, 25 bp, Artificial
  probe
  misc_feature (1)..(25): SEQ ID NO: 3078; WAN024F4K; Start 571; Stop 595
gtgcaaggtcagatggatattcttc

SEQ ID NO: 346040 - DNA, 25 bp, Artificial
  probe
  misc_feature (1)..(25): SEQ ID NO: 3078; WAN024F4K; Start 569; Stop 593
atgtgcaaggtcagatggatattct

SEQ ID NO: 346041 - DNA, 25 bp, Artificial
  probe
  misc_feature (1)..(25): SEQ ID NO: 3078; WAN024F4K; Start 801; Stop 825
ttatttcaaactgacaggtggtaaa

SEQ ID NO: 346042 - DNA, 25 bp, Artificial
  probe
  misc_feature (1)..(25): SEQ ID NO: 3078; WAN024F4K; Start 550; Stop 574
gcctatggagttattgcctatgtgc

SEQ ID NO: 346043 - DNA, 25 bp, Artificial
  probe
  misc_feature (1)..(25): SEQ ID NO: 3079; WAN024DFU; Start 267; Stop 291
tgtaggtcaagatgatattggtgtt

SEQ ID NO: 346044 - DNA, 25 bp, Artificial
  probe
  misc_feature (1)..(25): SEQ ID NO: 3079; WAN024DFU; Start 65; Stop 89
atctatatacagtcgttgaggaagc

SEQ ID NO: 346045 - DNA, 25 bp, Artificial
  probe
  misc_feature (1)..(25): SEQ ID NO: 3079; WAN024DFU; Start 268; Stop 292
gtaggtcaagatgatattggtgttg

SEQ ID NO: 346046 - DNA, 25 bp, Artificial
  probe
  misc_feature (1)..(25): SEQ ID NO: 3079; WAN024DFU; Start 266; Stop 290
atgtaggtcaagatgatattggtgt

SEQ ID NO: 346047 - DNA, 25 bp, Artificial
  probe
  misc_feature (1)..(25): SEQ ID NO: 3079; WAN024DFU; Start 66; Stop 90
tctatatacagtcgttgaggaagcc

SEQ ID NO: 346048 - DNA, 25 bp, Artificial
  probe
  misc_feature (1)..(25): SEQ ID NO: 3079; WAN024DFU; Start 265; Stop 289
catgtaggtcaagatgatattggtg

SEQ ID NO: 346049 - DNA, 25 bp, Artificial
  probe
  misc_feature (1)..(25): SEQ ID NO: 3079; WAN024DFU; Start 69; Stop 93
atatacagtcgttgaggaagcctta

SEQ ID NO: 346050 - DNA, 25 bp, Artificial
  probe
  misc_feature (1)..(25): SEQ ID NO: 3079; WAN024DFU; Start 70; Stop 94
tatacagtcgttgaggaagccttaa

SEQ ID NO: 346051 - DNA, 25 bp, Artificial
  probe
  misc_feature (1)..(25): SEQ ID NO: 3079; WAN024DFU; Start 64; Stop 88
aatctatatacagtcgttgaggaag

SEQ ID NO: 346052 - DNA, 25 bp, Artificial
  probe
  misc_feature (1)..(25): SEQ ID NO: 3079; WAN024DFU; Start 68; Stop 92
tatatacagtcgttgaggaagcctt

SEQ ID NO: 346053 - DNA, 25 bp, Artificial
  probe
  misc_feature (1)..(25): SEQ ID NO: 3079; WAN024DFU; Start 505; Stop 529
ggtgggatacagacgaaacatatta

SEQ ID NO: 346054 - DNA, 25 bp, Artificial
  probe
  misc_feature (1)..(25): SEQ ID NO: 3079; WAN024DFU; Start 560; Stop 584
tttcaatcatttcggcaatatcgta

SEQ ID NO: 346055 - DNA, 25 bp, Artificial
  probe
  misc_feature (1)..(25): SEQ ID NO: 3079; WAN024DFU; Start 67; Stop 91
ctatatacagtcgttgaggaagcct

SEQ ID NO: 346056 - DNA, 25 bp, Artificial
  probe
  misc_feature (1)..(25): SEQ ID NO: 3079; WAN024DFU; Start 561; Stop 585
ttcaatcatttcggcaatatcgtat

SEQ ID NO: 346057 - DNA, 25 bp, Artificial
  probe
  misc_feature (1)..(25): SEQ ID NO: 3079; WAN024DFU; Start 559; Stop 583
gtttcaatcatttcggcaatatcgt

SEQ ID NO: 346058 - DNA, 25 bp, Artificial
  probe
  misc_feature (1)..(25): SEQ ID NO: 3079; WAN024DFU; Start 562; Stop 586
tcaatcatttcggcaatatcgtatg

SEQ ID NO: 346059 - DNA, 25 bp, Artificial
  probe
  misc_feature (1)..(25): SEQ ID NO: 3079; WAN024DFU; Start 506; Stop 530
gtgggatacagacgaaacatattaa

SEQ ID NO: 346060 - DNA, 25 bp, Artificial
  probe
  misc_feature (1)..(25): SEQ ID NO: 3079; WAN024DFU; Start 502; Stop 526
attggtgggatacagacgaaacata

SEQ ID NO: 346061 - DNA, 25 bp, Artificial
  probe
  misc_feature (1)..(25): SEQ ID NO: 3079; WAN024DFU; Start 558; Stop 582
cgtttcaatcatttcggcaatatcg

SEQ ID NO: 346062 - DNA, 25 bp, Artificial
  probe
  misc_feature (1)..(25): SEQ ID NO: 3079; WAN024DFU; Start 504; Stop 528
tggtgggatacagacgaaacatatt

SEQ ID NO: 346063 - DNA, 25 bp, Artificial
  probe
  misc_feature (1)..(25): SEQ ID NO: 3079; WAN024DFU; Start 503; Stop 527
ttggtgggatacagacgaaacatat

SEQ ID NO: 346064 - DNA, 25 bp, Artificial
  probe
  misc_feature (1)..(25): SEQ ID NO: 3079; WAN024DFU; Start 31; Stop 55
tttatttgtggaacgactacttgcc

SEQ ID NO: 346065 - DNA, 25 bp, Artificial
  probe
  misc_feature (1)..(25): SEQ ID NO: 3079; WAN024DFU; Start 557; Stop 581
gcgtttcaatcatttcggcaatatc

SEQ ID NO: 346066 - DNA, 25 bp, Artificial
  probe
  misc_feature (1)..(25): SEQ ID NO: 3079; WAN024DFU; Start 507; Stop 531
tgggatacagacgaaacatattaaa

SEQ ID NO: 346067 - DNA, 25 bp, Artificial
  probe
  misc_feature (1)..(25): SEQ ID NO: 3079; WAN024DFU; Start 271; Stop 295
ggtcaagatgatattggtgttgatg

SEQ ID NO: 346068 - DNA, 25 bp, Artificial
  probe
  misc_feature (1)..(25): SEQ ID NO: 3079; WAN024DFU; Start 270; Stop 294
aggtcaagatgatattggtgttgat

SEQ ID NO: 346069 - DNA, 25 bp, Artificial
  probe
  misc_feature (1)..(25): SEQ ID NO: 3079; WAN024DFU; Start 269; Stop 293
taggtcaagatgatattggtgttga

SEQ ID NO: 346070 - DNA, 25 bp, Artificial
  probe
  misc_feature (1)..(25): SEQ ID NO: 3079; WAN024DFU; Start 272; Stop 296
gtcaagatgatattggtgttgatga

SEQ ID NO: 346071 - DNA, 25 bp, Artificial
  probe
  misc_feature (1)..(25): SEQ ID NO: 3079; WAN024DFU; Start 508; Stop 532
gggatacagacgaaacatattaaag

SEQ ID NO: 346072 - DNA, 25 bp, Artificial
  probe
  misc_feature (1)..(25): SEQ ID NO: 3079; WAN024DFU; Start 274; Stop 298
caagatgatattggtgttgatgaaa

SEQ ID NO: 346073 - DNA, 25 bp, Artificial
  probe
  misc_feature (1)..(25): SEQ ID NO: 3079; WAN024DFU; Start 501; Stop 525
aattggtgggatacagacgaaacat

SEQ ID NO: 346074 - DNA, 25 bp, Artificial
  probe
  misc_feature (1)..(25): SEQ ID NO: 3079; WAN024DFU; Start 273; Stop 297
tcaagatgatattggtgttgatgaa

SEQ ID NO: 346075 - DNA, 25 bp, Artificial
  probe
  misc_feature (1)..(25): SEQ ID NO: 3079; WAN024DFU; Start 513; Stop 537
acagacgaaacatattaaagacatt

SEQ ID NO: 346076 - DNA, 25 bp, Artificial
  probe
  misc_feature (1)..(25): SEQ ID NO: 3080; WAN024GIB; Start 28; Stop 52
aaagatagtctactcctgcttgaaa

SEQ ID NO: 346077 - DNA, 25 bp, Artificial
  probe
  misc_feature (1)..(25): SEQ ID NO: 3080; WAN024GIB; Start 26; Stop 50
gtaaagatagtctactcctgcttga

SEQ ID NO: 346078 - DNA, 25 bp, Artificial
  probe
  misc_feature (1)..(25): SEQ ID NO: 3080; WAN024GIB; Start 27; Stop 51
taaagatagtctactcctgcttgaa

SEQ ID NO: 346079 - DNA, 25 bp, Artificial
  probe
  misc_feature (1)..(25): SEQ ID NO: 3080; WAN024GIB; Start 25; Stop 49
agtaaagatagtctactcctgcttg

SEQ ID NO: 346080 - DNA, 25 bp, Artificial
  probe
  misc_feature (1)..(25): SEQ ID NO: 3080; WAN024GIB; Start 23; Stop 47
gaagtaaagatagtctactcctgct

SEQ ID NO: 346081 - DNA, 25 bp, Artificial
  probe
  misc_feature (1)..(25): SEQ ID NO: 3080; WAN024GIB; Start 22; Stop 46
agaagtaaagatagtctactcctgc

SEQ ID NO: 346082 - DNA, 25 bp, Artificial
  probe
  misc_feature (1)..(25): SEQ ID NO: 3080; WAN024GIB; Start 24; Stop 48
aagtaaagatagtctactcctgctt

SEQ ID NO: 346083 - DNA, 25 bp, Artificial
  probe
  misc_feature (1)..(25): SEQ ID NO: 3080; WAN024GIB; Start 21; Stop 45
cagaagtaaagatagtctactcctg

SEQ ID NO: 346084 - DNA, 25 bp, Artificial
  probe
  misc_feature (1)..(25): SEQ ID NO: 3080; WAN024GIB; Start 20; Stop 44
tcagaagtaaagatagtctactcct

SEQ ID NO: 346085 - DNA, 25 bp, Artificial
  probe
  misc_feature (1)..(25): SEQ ID NO: 3080; WAN024GIB; Start 29; Stop 53
aagatagtctactcctgcttgaaaa

SEQ ID NO: 346086 - DNA, 25 bp, Artificial
  probe
  misc_feature (1)..(25): SEQ ID NO: 3080; WAN024GIB; Start 19; Stop 43
ttcagaagtaaagatagtctactcc

SEQ ID NO: 346087 - DNA, 25 bp, Artificial
  probe
  misc_feature (1)..(25): SEQ ID NO: 3080; WAN024GIB; Start 63; Stop 87
agaaatagtacgtagggtagcgatc

SEQ ID NO: 346088 - DNA, 25 bp, Artificial
  probe
  misc_feature (1)..(25): SEQ ID NO: 3080; WAN024GIB; Start 62; Stop 86
cagaaatagtacgtagggtagcgat

SEQ ID NO: 346089 - DNA, 25 bp, Artificial
  probe
  misc_feature (1)..(25): SEQ ID NO: 3080; WAN024GIB; Start 58; Stop 82
aaaccagaaatagtacgtagggtag

SEQ ID NO: 346090 - DNA, 25 bp, Artificial
  probe
  misc_feature (1)..(25): SEQ ID NO: 3080; WAN024GIB; Start 59; Stop 83
aaccagaaatagtacgtagggtagc

SEQ ID NO: 346091 - DNA, 25 bp, Artificial
  probe
  misc_feature (1)..(25): SEQ ID NO: 3080; WAN024GIB; Start 18; Stop 42
cttcagaagtaaagatagtctactc

SEQ ID NO: 346092 - DNA, 25 bp, Artificial
  probe
  misc_feature (1)..(25): SEQ ID NO: 3080; WAN024GIB; Start 61; Stop 85
ccagaaatagtacgtagggtagcga

SEQ ID NO: 346093 - DNA, 25 bp, Artificial
  probe
  misc_feature (1)..(25): SEQ ID NO: 3080; WAN024GIB; Start 17; Stop 41
tcttcagaagtaaagatagtctact

SEQ ID NO: 346094 - DNA, 25 bp, Artificial
  probe
  misc_feature (1)..(25): SEQ ID NO: 3080; WAN024GIB; Start 3; Stop 27
gtttcatctagaaatcttcagaagt

SEQ ID NO: 346095 - DNA, 25 bp, Artificial
  probe
  misc_feature (1)..(25): SEQ ID NO: 3080; WAN024GIB; Start 2; Stop 26
tgtttcatctagaaatcttcagaag

SEQ ID NO: 346096 - DNA, 25 bp, Artificial
  probe
  misc_feature (1)..(25): SEQ ID NO: 3080; WAN024GIB; Start 60; Stop 84
accagaaatagtacgtagggtagcg

SEQ ID NO: 346097 - DNA, 25 bp, Artificial
  probe
  misc_feature (1)..(25): SEQ ID NO: 3080; WAN024GIB; Start 57; Stop 81
aaaaccagaaatagtacgtagggta

SEQ ID NO: 346098 - DNA, 25 bp, Artificial
  probe
  misc_feature (1)..(25): SEQ ID NO: 3080; WAN024GIB; Start 1; Stop 25
atgtttcatctagaaatcttcagaa

SEQ ID NO: 346099 - DNA, 25 bp, Artificial
  probe
  misc_feature (1)..(25): SEQ ID NO: 3080; WAN024GIB; Start 6; Stop 30
tcatctagaaatcttcagaagtaaa

SEQ ID NO: 346100 - DNA, 25 bp, Artificial
  probe
  misc_feature (1)..(25): SEQ ID NO: 3080; WAN024GIB; Start 5; Stop 29
ttcatctagaaatcttcagaagtaa

SEQ ID NO: 346101 - DNA, 25 bp, Artificial
  probe
  misc_feature (1)..(25): SEQ ID NO: 3080; WAN024GIB; Start 7; Stop 31
catctagaaatcttcagaagtaaag

SEQ ID NO: 346102 - DNA, 25 bp, Artificial
  probe
  misc_feature (1)..(25): SEQ ID NO: 3080; WAN024GIB; Start 4; Stop 28
tttcatctagaaatcttcagaagta

SEQ ID NO: 346103 - DNA, 25 bp, Artificial
  probe
  misc_feature (1)..(25): SEQ ID NO: 3080; WAN024GIB; Start 8; Stop 32
atctagaaatcttcagaagtaaaga

SEQ ID NO: 346104 - DNA, 25 bp, Artificial
  probe
  misc_feature (1)..(25): SEQ ID NO: 3080; WAN024GIB; Start 16; Stop 40
atcttcagaagtaaagatagtctac

SEQ ID NO: 346105 - DNA, 25 bp, Artificial
  probe
  misc_feature (1)..(25): SEQ ID NO: 3080; WAN024GIB; Start 14; Stop 38
aaatcttcagaagtaaagatagtct

SEQ ID NO: 346106 - DNA, 25 bp, Artificial
  probe
  misc_feature (1)..(25): SEQ ID NO: 3080; WAN024GIB; Start 12; Stop 36
agaaatcttcagaagtaaagatagt

SEQ ID NO: 346107 - DNA, 25 bp, Artificial
  probe
  misc_feature (1)..(25): SEQ ID NO: 3080; WAN024GIB; Start 13; Stop 37
gaaatcttcagaagtaaagatagtc

SEQ ID NO: 346108 - DNA, 25 bp, Artificial
  probe
  misc_feature (1)..(25): SEQ ID NO: 3080; WAN024GIB; Start 9; Stop 33
tctagaaatcttcagaagtaaagat

SEQ ID NO: 346109 - DNA, 25 bp, Artificial
  probe
  misc_feature (1)..(25): SEQ ID NO: 3081; WAN024F3W; Start 882; Stop 906
tcaggtagaacatccagtaacagag

SEQ ID NO: 346110 - DNA, 25 bp, Artificial
  probe
  misc_feature (1)..(25): SEQ ID NO: 3081; WAN024F3W; Start 1135; Stop 1159
accattccgccttattatgatagta

SEQ ID NO: 346111 - DNA, 25 bp, Artificial
  probe
  misc_feature (1)..(25): SEQ ID NO: 3081; WAN024F3W; Start 1134; Stop 1158
taccattccgccttattatgatagt

SEQ ID NO: 346112 - DNA, 25 bp, Artificial
  probe
  misc_feature (1)..(25): SEQ ID NO: 3081; WAN024F3W; Start 881; Stop 905
ttcaggtagaacatccagtaacaga

SEQ ID NO: 346113 - DNA, 25 bp, Artificial
  probe
  misc_feature (1)..(25): SEQ ID NO: 3081; WAN024F3W; Start 884; Stop 908
aggtagaacatccagtaacagagtt

SEQ ID NO: 346114 - DNA, 25 bp, Artificial
  probe
  misc_feature (1)..(25): SEQ ID NO: 3081; WAN024F3W; Start 972; Stop 996
taagcaagaagatattgtcctacgc

SEQ ID NO: 346115 - DNA, 25 bp, Artificial
  probe
  misc_feature (1)..(25): SEQ ID NO: 3081; WAN024F3W; Start 883; Stop 907
caggtagaacatccagtaacagagt

SEQ ID NO: 346116 - DNA, 25 bp, Artificial
  probe
  misc_feature (1)..(25): SEQ ID NO: 3081; WAN024F3W; Start 967; Stop 991
tctgttaagcaagaagatattgtcc

SEQ ID NO: 346117 - DNA, 25 bp, Artificial
  probe
  misc_feature (1)..(25): SEQ ID NO: 3081; WAN024F3W; Start 163; Stop 187
aaggcaacagagtcttatctcaata

SEQ ID NO: 346118 - DNA, 25 bp, Artificial
  probe
  misc_feature (1)..(25): SEQ ID NO: 3081; WAN024F3W; Start 1130; Stop 1154
gttataccattccgccttattatga

SEQ ID NO: 346119 - DNA, 25 bp, Artificial
  probe
  misc_feature (1)..(25): SEQ ID NO: 3081; WAN024F3W; Start 968; Stop 992
ctgttaagcaagaagatattgtcct

SEQ ID NO: 346120 - DNA, 25 bp, Artificial
  probe
  misc_feature (1)..(25): SEQ ID NO: 3081; WAN024F3W; Start 450; Stop 474
aattggctatcctgttatgctcaag

SEQ ID NO: 346121 - DNA, 25 bp, Artificial
  probe
  misc_feature (1)..(25): SEQ ID NO: 3081; WAN024F3W; Start 1067; Stop 1091
ttactaatctctatctgccaagtgg

SEQ ID NO: 346122 - DNA, 25 bp, Artificial
  probe
  misc_feature (1)..(25): SEQ ID NO: 3081; WAN024F3W; Start 164; Stop 188
aggcaacagagtcttatctcaatat

SEQ ID NO: 346123 - DNA, 25 bp, Artificial
  probe
  misc_feature (1)..(25): SEQ ID NO: 3081; WAN024F3W; Start 1068; Stop 1092
tactaatctctatctgccaagtggt

SEQ ID NO: 346124 - DNA, 25 bp, Artificial
  probe
  misc_feature (1)..(25): SEQ ID NO: 3081; WAN024F3W; Start 971; Stop 995
ttaagcaagaagatattgtcctacg

SEQ ID NO: 346125 - DNA, 25 bp, Artificial
  probe
  misc_feature (1)..(25): SEQ ID NO: 3081; WAN024F3W; Start 162; Stop 186
caaggcaacagagtcttatctcaat

SEQ ID NO: 346126 - DNA, 25 bp, Artificial
  probe
  misc_feature (1)..(25): SEQ ID NO: 3081; WAN024F3W; Start 1049; Stop 1073
ctccaagtccaggtaagattactaa

SEQ ID NO: 346127 - DNA, 25 bp, Artificial
  probe
  misc_feature (1)..(25): SEQ ID NO: 3081; WAN024F3W; Start 965; Stop 989
tgtctgttaagcaagaagatattgt

SEQ ID NO: 346128 - DNA, 25 bp, Artificial
  probe
  misc_feature (1)..(25): SEQ ID NO: 3081; WAN024F3W; Start 1142; Stop 1166
cgccttattatgatagtatgattgc

SEQ ID NO: 346129 - DNA, 25 bp, Artificial
  probe
  misc_feature (1)..(25): SEQ ID NO: 3081; WAN024F3W; Start 1136; Stop 1160
ccattccgccttattatgatagtat

SEQ ID NO: 346130 - DNA, 25 bp, Artificial
  probe
  misc_feature (1)..(25): SEQ ID NO: 3081; WAN024F3W; Start 1133; Stop 1157
ataccattccgccttattatgatag

SEQ ID NO: 346131 - DNA, 25 bp, Artificial
  probe
  misc_feature (1)..(25): SEQ ID NO: 3081; WAN024F3W; Start 1048; Stop 1072
gctccaagtccaggtaagattacta

SEQ ID NO: 346132 - DNA, 25 bp, Artificial
  probe
  misc_feature (1)..(25): SEQ ID NO: 3081; WAN024F3W; Start 1050; Stop 1074
tccaagtccaggtaagattactaat

SEQ ID NO: 346133 - DNA, 25 bp, Artificial
  probe
  misc_feature (1)..(25): SEQ ID NO: 3081; WAN024F3W; Start 966; Stop 990
gtctgttaagcaagaagatattgtc

SEQ ID NO: 346134 - DNA, 25 bp, Artificial
  probe
  misc_feature (1)..(25): SEQ ID NO: 3081; WAN024F3W; Start 305; Stop 329
ttatcggtccatctggtcatgttat

SEQ ID NO: 346135 - DNA, 25 bp, Artificial
  probe
  misc_feature (1)..(25): SEQ ID NO: 3081; WAN024F3W; Start 1131; Stop 1155
ttataccattccgccttattatgat

SEQ ID NO: 346136 - DNA, 25 bp, Artificial
  probe
  misc_feature (1)..(25): SEQ ID NO: 3081; WAN024F3W; Start 1143; Stop 1167
gccttattatgatagtatgattgcc

SEQ ID NO: 346137 - DNA, 25 bp, Artificial
  probe
  misc_feature (1)..(25): SEQ ID NO: 3081; WAN024F3W; Start 1069; Stop 1093
actaatctctatctgccaagtggtg

SEQ ID NO: 346138 - DNA, 25 bp, Artificial
  probe
  misc_feature (1)..(25): SEQ ID NO: 3081; WAN024F3W; Start 1066; Stop 1090
attactaatctctatctgccaagtg

SEQ ID NO: 346139 - DNA, 25 bp, Artificial
  probe
  misc_feature (1)..(25): SEQ ID NO: 3081; WAN024F3W; Start 1127; Stop 1151
caggttataccattccgccttatta

SEQ ID NO: 346140 - DNA, 25 bp, Artificial
  probe
  misc_feature (1)..(25): SEQ ID NO: 3081; WAN024F3W; Start 388; Stop 412
gttataccaggttcagatggagaag

SEQ ID NO: 346141 - DNA, 25 bp, Artificial
  probe
  misc_feature (1)..(25): SEQ ID NO: 3081; WAN024F3W; Start 969; Stop 993
tgttaagcaagaagatattgtccta

SEQ ID NO: 346142 - DNA, 25 bp, Artificial
  probe
  misc_feature (1)..(25): SEQ ID NO: 3082; WAN024EZX; Start 1881; Stop 1905
gactatgatgttgattgtgaccttg

SEQ ID NO: 346143 - DNA, 25 bp, Artificial
  probe
  misc_feature (1)..(25): SEQ ID NO: 3082; WAN024EZX; Start 1874; Stop 1898
tggatacgactatgatgttgattgt

SEQ ID NO: 346144 - DNA, 25 bp, Artificial
  probe
  misc_feature (1)..(25): SEQ ID NO: 3082; WAN024EZX; Start 1882; Stop 1906
actatgatgttgattgtgaccttgt

SEQ ID NO: 346145 - DNA, 25 bp, Artificial
  probe
  misc_feature (1)..(25): SEQ ID NO: 3082; WAN024EZX; Start 1875; Stop 1899
ggatacgactatgatgttgattgtg

SEQ ID NO: 346146 - DNA, 25 bp, Artificial
  probe
  misc_feature (1)..(25): SEQ ID NO: 3082; WAN024EZX; Start 1872; Stop 1896
actggatacgactatgatgttgatt

SEQ ID NO: 346147 - DNA, 25 bp, Artificial
  probe
  misc_feature (1)..(25): SEQ ID NO: 3082; WAN024EZX; Start 1873; Stop 1897
ctggatacgactatgatgttgattg

SEQ ID NO: 346148 - DNA, 25 bp, Artificial
  probe
  misc_feature (1)..(25): SEQ ID NO: 3082; WAN024EZX; Start 1878; Stop 1902
tacgactatgatgttgattgtgacc

SEQ ID NO: 346149 - DNA, 25 bp, Artificial
  probe
  misc_feature (1)..(25): SEQ ID NO: 3082; WAN024EZX; Start 1877; Stop 1901
atacgactatgatgttgattgtgac

SEQ ID NO: 346150 - DNA, 25 bp, Artificial
  probe
  misc_feature (1)..(25): SEQ ID NO: 3082; WAN024EZX; Start 1880; Stop 1904
cgactatgatgttgattgtgacctt

SEQ ID NO: 346151 - DNA, 25 bp, Artificial
  probe
  misc_feature (1)..(25): SEQ ID NO: 3082; WAN024EZX; Start 1871; Stop 1895
tactggatacgactatgatgttgat

SEQ ID NO: 346152 - DNA, 25 bp, Artificial
  probe
  misc_feature (1)..(25): SEQ ID NO: 3082; WAN024EZX; Start 1876; Stop 1900
gatacgactatgatgttgattgtga

SEQ ID NO: 346153 - DNA, 25 bp, Artificial
  probe
  misc_feature (1)..(25): SEQ ID NO: 3082; WAN024EZX; Start 1869; Stop 1893
tgtactggatacgactatgatgttg

SEQ ID NO: 346154 - DNA, 25 bp, Artificial
  probe
  misc_feature (1)..(25): SEQ ID NO: 3082; WAN024EZX; Start 1868; Stop 1892
gtgtactggatacgactatgatgtt

SEQ ID NO: 346155 - DNA, 25 bp, Artificial
  probe
  misc_feature (1)..(25): SEQ ID NO: 3082; WAN024EZX; Start 1870; Stop 1894
gtactggatacgactatgatgttga

SEQ ID NO: 346156 - DNA, 25 bp, Artificial
  probe
  misc_feature (1)..(25): SEQ ID NO: 3082; WAN024EZX; Start 1863; Stop 1887
gattggtgtactggatacgactatg

SEQ ID NO: 346157 - DNA, 25 bp, Artificial
  probe
  misc_feature (1)..(25): SEQ ID NO: 3082; WAN024EZX; Start 1865; Stop 1889
ttggtgtactggatacgactatgat

SEQ ID NO: 346158 - DNA, 25 bp, Artificial
  probe
  misc_feature (1)..(25): SEQ ID NO: 3082; WAN024EZX; Start 1864; Stop 1888
attggtgtactggatacgactatga

SEQ ID NO: 346159 - DNA, 25 bp, Artificial
  probe
  misc_feature (1)..(25): SEQ ID NO: 3082; WAN024EZX; Start 1862; Stop 1886
tgattggtgtactggatacgactat

SEQ ID NO: 346160 - DNA, 25 bp, Artificial
  probe
  misc_feature (1)..(25): SEQ ID NO: 3082; WAN024EZX; Start 1879; Stop 1903
acgactatgatgttgattgtgacct

SEQ ID NO: 346161 - DNA, 25 bp, Artificial
  probe
  misc_feature (1)..(25): SEQ ID NO: 3082; WAN024EZX; Start 1888; Stop 1912
atgttgattgtgaccttgtctatct

SEQ ID NO: 346162 - DNA, 25 bp, Artificial
  probe
  misc_feature (1)..(25): SEQ ID NO: 3082; WAN024EZX; Start 1883; Stop 1907
ctatgatgttgattgtgaccttgtc

SEQ ID NO: 346163 - DNA, 25 bp, Artificial
  probe
  misc_feature (1)..(25): SEQ ID NO: 3082; WAN024EZX; Start 1887; Stop 1911
gatgttgattgtgaccttgtctatc

SEQ ID NO: 346164 - DNA, 25 bp, Artificial
  probe
  misc_feature (1)..(25): SEQ ID NO: 3082; WAN024EZX; Start 1886; Stop 1910
tgatgttgattgtgaccttgtctat

SEQ ID NO: 346165 - DNA, 25 bp, Artificial
  probe
  misc_feature (1)..(25): SEQ ID NO: 3082; WAN024EZX; Start 1885; Stop 1909
atgatgttgattgtgaccttgtcta

SEQ ID NO: 346166 - DNA, 25 bp, Artificial
  probe
  misc_feature (1)..(25): SEQ ID NO: 3082; WAN024EZX; Start 1884; Stop 1908
tatgatgttgattgtgaccttgtct

SEQ ID NO: 346167 - DNA, 25 bp, Artificial
  probe
  misc_feature (1)..(25): SEQ ID NO: 3082; WAN024EZX; Start 1867; Stop 1891
ggtgtactggatacgactatgatgt

SEQ ID NO: 346168 - DNA, 25 bp, Artificial
  probe
  misc_feature (1)..(25): SEQ ID NO: 3082; WAN024EZX; Start 1866; Stop 1890
tggtgtactggatacgactatgatg

SEQ ID NO: 346169 - DNA, 25 bp, Artificial
  probe
  misc_feature (1)..(25): SEQ ID NO: 3082; WAN024EZX; Start 1889; Stop 1913
tgttgattgtgaccttgtctatctg

SEQ ID NO: 346170 - DNA, 25 bp, Artificial
  probe
  misc_feature (1)..(25): SEQ ID NO: 3082; WAN024EZX; Start 1861; Stop 1885
gtgattggtgtactggatacgacta

SEQ ID NO: 346171 - DNA, 25 bp, Artificial
  probe
  misc_feature (1)..(25): SEQ ID NO: 3082; WAN024EZX; Start 9; Stop 33
attaaccaataagttagcggtatcg

SEQ ID NO: 346172 - DNA, 25 bp, Artificial
  probe
  misc_feature (1)..(25): SEQ ID NO: 3082; WAN024EZX; Start 7; Stop 31
cgattaaccaataagttagcggtat

SEQ ID NO: 346173 - DNA, 25 bp, Artificial
  probe
  misc_feature (1)..(25): SEQ ID NO: 3082; WAN024EZX; Start 1890; Stop 1914
gttgattgtgaccttgtctatctgc

SEQ ID NO: 346174 - DNA, 25 bp, Artificial
  probe
  misc_feature (1)..(25): SEQ ID NO: 3082; WAN024EZX; Start 322; Stop 346
aaggagttagtggtatttgggattc

SEQ ID NO: 346175 - DNA, 25 bp, Artificial
  probe
  misc_feature (1)..(25): SEQ ID NO: 3083; WAN024ETG; Start 982; Stop 1006
tatggtgtagttggaatgattgtcg

SEQ ID NO: 346176 - DNA, 25 bp, Artificial
  probe
  misc_feature (1)..(25): SEQ ID NO: 3083; WAN024ETG; Start 107; Stop 131
gcgtgcttaatacaattatgattcc

SEQ ID NO: 346177 - DNA, 25 bp, Artificial
  probe
  misc_feature (1)..(25): SEQ ID NO: 3083; WAN024ETG; Start 645; Stop 669
gattgctcgctatattagtggagtt

SEQ ID NO: 346178 - DNA, 25 bp, Artificial
  probe
  misc_feature (1)..(25): SEQ ID NO: 3083; WAN024ETG; Start 252; Stop 276
aatggtcataggtgttgtctatctc

SEQ ID NO: 346179 - DNA, 25 bp, Artificial
  probe
  misc_feature (1)..(25): SEQ ID NO: 3083; WAN024ETG; Start 251; Stop 275
gaatggtcataggtgttgtctatct

SEQ ID NO: 346180 - DNA, 25 bp, Artificial
  probe
  misc_feature (1)..(25): SEQ ID NO: 3083; WAN024ETG; Start 253; Stop 277
atggtcataggtgttgtctatctct

SEQ ID NO: 346181 - DNA, 25 bp, Artificial
  probe
  misc_feature (1)..(25): SEQ ID NO: 3083; WAN024ETG; Start 254; Stop 278
tggtcataggtgttgtctatctctt

SEQ ID NO: 346182 - DNA, 25 bp, Artificial
  probe
  misc_feature (1)..(25): SEQ ID NO: 3083; WAN024ETG; Start 250; Stop 274
ggaatggtcataggtgttgtctatc

SEQ ID NO: 346183 - DNA, 25 bp, Artificial
  probe
  misc_feature (1)..(25): SEQ ID NO: 3083; WAN024ETG; Start 255; Stop 279
ggtcataggtgttgtctatctctta

SEQ ID NO: 346184 - DNA, 25 bp, Artificial
  probe
  misc_feature (1)..(25): SEQ ID NO: 3083; WAN024ETG; Start 256; Stop 280
gtcataggtgttgtctatctcttac

SEQ ID NO: 346185 - DNA, 25 bp, Artificial
  probe
  misc_feature (1)..(25): SEQ ID NO: 3083; WAN024ETG; Start 108; Stop 132
cgtgcttaatacaattatgattcca

SEQ ID NO: 346186 - DNA, 25 bp, Artificial
  probe
  misc_feature (1)..(25): SEQ ID NO: 3083; WAN024ETG; Start 106; Stop 130
agcgtgcttaatacaattatgattc

SEQ ID NO: 346187 - DNA, 25 bp, Artificial
  probe
  misc_feature (1)..(25): SEQ ID NO: 3083; WAN024ETG; Start 875; Stop 899
ttgttcagcaggtagatggcaatat

SEQ ID NO: 346188 - DNA, 25 bp, Artificial
  probe
  misc_feature (1)..(25): SEQ ID NO: 3083; WAN024ETG; Start 876; Stop 900
tgttcagcaggtagatggcaatatc

SEQ ID NO: 346189 - DNA, 25 bp, Artificial
  probe
  misc_feature (1)..(25): SEQ ID NO: 3083; WAN024ETG; Start 103; Stop 127
gttagcgtgcttaatacaattatga

SEQ ID NO: 346190 - DNA, 25 bp, Artificial
  probe
  misc_feature (1)..(25): SEQ ID NO: 3083; WAN024ETG; Start 257; Stop 281
tcataggtgttgtctatctcttacc

SEQ ID NO: 346191 - DNA, 25 bp, Artificial
  probe
  misc_feature (1)..(25): SEQ ID NO: 3083; WAN024ETG; Start 102; Stop 126
tgttagcgtgcttaatacaattatg

SEQ ID NO: 346192 - DNA, 25 bp, Artificial
  probe
  misc_feature (1)..(25): SEQ ID NO: 3083; WAN024ETG; Start 1079; Stop 1103
tgaaagaacgagaaagagaattagc

SEQ ID NO: 346193 - DNA, 25 bp, Artificial
  probe
  misc_feature (1)..(25): SEQ ID NO: 3083; WAN024ETG; Start 880; Stop 904
cagcaggtagatggcaatatcttat

SEQ ID NO: 346194 - DNA, 25 bp, Artificial
  probe
  misc_feature (1)..(25): SEQ ID NO: 3083; WAN024ETG; Start 673; Stop 697
attgacgcaatcattataggttgtt

SEQ ID NO: 346195 - DNA, 25 bp, Artificial
  probe
  misc_feature (1)..(25): SEQ ID NO: 3083; WAN024ETG; Start 452; Stop 476
taaatagcgtatcaaatagtgtggg

SEQ ID NO: 346196 - DNA, 25 bp, Artificial
  probe
  misc_feature (1)..(25): SEQ ID NO: 3083; WAN024ETG; Start 337; Stop 361
cgagtacaagacttaatcatagact

SEQ ID NO: 346197 - DNA, 25 bp, Artificial
  probe
  misc_feature (1)..(25): SEQ ID NO: 3083; WAN024ETG; Start 881; Stop 905
agcaggtagatggcaatatcttata

SEQ ID NO: 346198 - DNA, 25 bp, Artificial
  probe
  misc_feature (1)..(25): SEQ ID NO: 3083; WAN024ETG; Start 879; Stop 903
tcagcaggtagatggcaatatctta

SEQ ID NO: 346199 - DNA, 25 bp, Artificial
  probe
  misc_feature (1)..(25): SEQ ID NO: 3083; WAN024ETG; Start 889; Stop 913
gatggcaatatcttatatcctcgaa

SEQ ID NO: 346200 - DNA, 25 bp, Artificial
  probe
  misc_feature (1)..(25): SEQ ID NO: 3083; WAN024ETG; Start 674; Stop 698
ttgacgcaatcattataggttgttt

SEQ ID NO: 346201 - DNA, 25 bp, Artificial
  probe
  misc_feature (1)..(25): SEQ ID NO: 3083; WAN024ETG; Start 549; Stop 573
attagatggacataaattcttgccc

SEQ ID NO: 346202 - DNA, 25 bp, Artificial
  probe
  misc_feature (1)..(25): SEQ ID NO: 3083; WAN024ETG; Start 646; Stop 670
attgctcgctatattagtggagttt

SEQ ID NO: 346203 - DNA, 25 bp, Artificial
  probe
  misc_feature (1)..(25): SEQ ID NO: 3083; WAN024ETG; Start 647; Stop 671
ttgctcgctatattagtggagtttc

SEQ ID NO: 346204 - DNA, 25 bp, Artificial
  probe
  misc_feature (1)..(25): SEQ ID NO: 3083; WAN024ETG; Start 874; Stop 898
gttgttcagcaggtagatggcaata

SEQ ID NO: 346205 - DNA, 25 bp, Artificial
  probe
  misc_feature (1)..(25): SEQ ID NO: 3083; WAN024ETG; Start 760; Stop 784
ggtgtagccaatttaattccttatg

SEQ ID NO: 346206 - DNA, 25 bp, Artificial
  probe
  misc_feature (1)..(25): SEQ ID NO: 3083; WAN024ETG; Start 105; Stop 129
tagcgtgcttaatacaattatgatt

SEQ ID NO: 346207 - DNA, 25 bp, Artificial
  probe
  misc_feature (1)..(25): SEQ ID NO: 3083; WAN024ETG; Start 104; Stop 128
ttagcgtgcttaatacaattatgat

SEQ ID NO: 346208 - DNA, 25 bp, Artificial
  probe
  misc_feature (1)..(25): SEQ ID NO: 3084; WAN024DUU; Start 72; Stop 96
agagataagattcaacagtcgcaat

SEQ ID NO: 346209 - DNA, 25 bp, Artificial
  probe
  misc_feature (1)..(25): SEQ ID NO: 3084; WAN024DUU; Start 71; Stop 95
gagagataagattcaacagtcgcaa

SEQ ID NO: 346210 - DNA, 25 bp, Artificial
  probe
  misc_feature (1)..(25): SEQ ID NO: 3084; WAN024DUU; Start 68; Stop 92
ttggagagataagattcaacagtcg

SEQ ID NO: 346211 - DNA, 25 bp, Artificial
  probe
  misc_feature (1)..(25): SEQ ID NO: 3084; WAN024DUU; Start 70; Stop 94
ggagagataagattcaacagtcgca

SEQ ID NO: 346212 - DNA, 25 bp, Artificial
  probe
  misc_feature (1)..(25): SEQ ID NO: 3084; WAN024DUU; Start 69; Stop 93
tggagagataagattcaacagtcgc

SEQ ID NO: 346213 - DNA, 25 bp, Artificial
  probe
  misc_feature (1)..(25): SEQ ID NO: 3084; WAN024DUU; Start 76; Stop 100
ataagattcaacagtcgcaatcaag

SEQ ID NO: 346214 - DNA, 25 bp, Artificial
  probe
  misc_feature (1)..(25): SEQ ID NO: 3084; WAN024DUU; Start 75; Stop 99
gataagattcaacagtcgcaatcaa

SEQ ID NO: 346215 - DNA, 25 bp, Artificial
  probe
  misc_feature (1)..(25): SEQ ID NO: 3084; WAN024DUU; Start 73; Stop 97
gagataagattcaacagtcgcaatc

SEQ ID NO: 346216 - DNA, 25 bp, Artificial
  probe
  misc_feature (1)..(25): SEQ ID NO: 3084; WAN024DUU; Start 74; Stop 98
agataagattcaacagtcgcaatca

SEQ ID NO: 346217 - DNA, 25 bp, Artificial
  probe
  misc_feature (1)..(25): SEQ ID NO: 3084; WAN024DUU; Start 132; Stop 156
tatttccaccattatagtcagaggc

SEQ ID NO: 346218 - DNA, 25 bp, Artificial
  probe
  misc_feature (1)..(25): SEQ ID NO: 3084; WAN024DUU; Start 127; Stop 151
accgttatttccaccattatagtca

SEQ ID NO: 346219 - DNA, 25 bp, Artificial
  probe
  misc_feature (1)..(25): SEQ ID NO: 3084; WAN024DUU; Start 77; Stop 101
taagattcaacagtcgcaatcaagt

SEQ ID NO: 346220 - DNA, 25 bp, Artificial
  probe
  misc_feature (1)..(25): SEQ ID NO: 3084; WAN024DUU; Start 3; Stop 27
gtttctcagatgtgctactttcaag

SEQ ID NO: 346221 - DNA, 25 bp, Artificial
  probe
  misc_feature (1)..(25): SEQ ID NO: 3084; WAN024DUU; Start 1; Stop 25
atgtttctcagatgtgctactttca

SEQ ID NO: 346222 - DNA, 25 bp, Artificial
  probe
  misc_feature (1)..(25): SEQ ID NO: 3084; WAN024DUU; Start 128; Stop 152
ccgttatttccaccattatagtcag

SEQ ID NO: 346223 - DNA, 25 bp, Artificial
  probe
  misc_feature (1)..(25): SEQ ID NO: 3084; WAN024DUU; Start 2; Stop 26
tgtttctcagatgtgctactttcaa

SEQ ID NO: 346224 - DNA, 25 bp, Artificial
  probe
  misc_feature (1)..(25): SEQ ID NO: 3084; WAN024DUU; Start 139; Stop 163
accattatagtcagaggcactgttc

SEQ ID NO: 346225 - DNA, 25 bp, Artificial
  probe
  misc_feature (1)..(25): SEQ ID NO: 3084; WAN024DUU; Start 138; Stop 162
caccattatagtcagaggcactgtt

SEQ ID NO: 346226 - DNA, 25 bp, Artificial
  probe
  misc_feature (1)..(25): SEQ ID NO: 3084; WAN024DUU; Start 78; Stop 102
aagattcaacagtcgcaatcaagtt

SEQ ID NO: 346227 - DNA, 25 bp, Artificial
  probe
  misc_feature (1)..(25): SEQ ID NO: 3084; WAN024DUU; Start 133; Stop 157
atttccaccattatagtcagaggca

SEQ ID NO: 346228 - DNA, 25 bp, Artificial
  probe
  misc_feature (1)..(25): SEQ ID NO: 3084; WAN024DUU; Start 129; Stop 153
cgttatttccaccattatagtcaga

SEQ ID NO: 346229 - DNA, 25 bp, Artificial
  probe
  misc_feature (1)..(25): SEQ ID NO: 3084; WAN024DUU; Start 135; Stop 159
ttccaccattatagtcagaggcact

SEQ ID NO: 346230 - DNA, 25 bp, Artificial
  probe
  misc_feature (1)..(25): SEQ ID NO: 3084; WAN024DUU; Start 126; Stop 150
taccgttatttccaccattatagtc

SEQ ID NO: 346231 - DNA, 25 bp, Artificial
  probe
  misc_feature (1)..(25): SEQ ID NO: 3084; WAN024DUU; Start 140; Stop 164
ccattatagtcagaggcactgttcc

SEQ ID NO: 346232 - DNA, 25 bp, Artificial
  probe
  misc_feature (1)..(25): SEQ ID NO: 3084; WAN024DUU; Start 67; Stop 91
tttggagagataagattcaacagtc

SEQ ID NO: 346233 - DNA, 25 bp, Artificial
  probe
  misc_feature (1)..(25): SEQ ID NO: 3084; WAN024DUU; Start 66; Stop 90
ctttggagagataagattcaacagt

SEQ ID NO: 346234 - DNA, 25 bp, Artificial
  probe
  misc_feature (1)..(25): SEQ ID NO: 3084; WAN024DUU; Start 131; Stop 155
ttatttccaccattatagtcagagg

SEQ ID NO: 346235 - DNA, 25 bp, Artificial
  probe
  misc_feature (1)..(25): SEQ ID NO: 3084; WAN024DUU; Start 125; Stop 149
gtaccgttatttccaccattatagt

SEQ ID NO: 346236 - DNA, 25 bp, Artificial
  probe
  misc_feature (1)..(25): SEQ ID NO: 3084; WAN024DUU; Start 134; Stop 158
tttccaccattatagtcagaggcac

SEQ ID NO: 346237 - DNA, 25 bp, Artificial
  probe
  misc_feature (1)..(25): SEQ ID NO: 3084; WAN024DUU; Start 136; Stop 160
tccaccattatagtcagaggcactg

SEQ ID NO: 346238 - DNA, 25 bp, Artificial
  probe
  misc_feature (1)..(25): SEQ ID NO: 3084; WAN024DUU; Start 32; Stop 56
ctgacagcagactcaacatcttcac

SEQ ID NO: 346239 - DNA, 25 bp, Artificial
  probe
  misc_feature (1)..(25): SEQ ID NO: 3084; WAN024DUU; Start 130; Stop 154
gttatttccaccattatagtcagag

SEQ ID NO: 346240 - DNA, 25 bp, Artificial
  probe
  misc_feature (1)..(25): SEQ ID NO: 3084; WAN024DUU; Start 137; Stop 161
ccaccattatagtcagaggcactgt

SEQ ID NO: 346241 - DNA, 25 bp, Artificial
  probe
  misc_feature (1)..(25): SEQ ID NO: 3085; WAN024GDD; Start 118; Stop 142
caactctatgttccaactcaagaag

SEQ ID NO: 346242 - DNA, 25 bp, Artificial
  probe
  misc_feature (1)..(25): SEQ ID NO: 3085; WAN024GDD; Start 17; Stop 41
atcgctctggcttgattatctatct

SEQ ID NO: 346243 - DNA, 25 bp, Artificial
  probe
  misc_feature (1)..(25): SEQ ID NO: 3085; WAN024GDD; Start 119; Stop 143
aactctatgttccaactcaagaagt

SEQ ID NO: 346244 - DNA, 25 bp, Artificial
  probe
  misc_feature (1)..(25): SEQ ID NO: 3085; WAN024GDD; Start 18; Stop 42
tcgctctggcttgattatctatctt

SEQ ID NO: 346245 - DNA, 25 bp, Artificial
  probe
  misc_feature (1)..(25): SEQ ID NO: 3085; WAN024GDD; Start 120; Stop 144
actctatgttccaactcaagaagtg

SEQ ID NO: 346246 - DNA, 25 bp, Artificial
  probe
  misc_feature (1)..(25): SEQ ID NO: 3085; WAN024GDD; Start 117; Stop 141
acaactctatgttccaactcaagaa

SEQ ID NO: 346247 - DNA, 25 bp, Artificial
  probe
  misc_feature (1)..(25): SEQ ID NO: 3085; WAN024GDD; Start 113; Stop 137
acttacaactctatgttccaactca

SEQ ID NO: 346248 - DNA, 25 bp, Artificial
  probe
  misc_feature (1)..(25): SEQ ID NO: 3085; WAN024GDD; Start 108; Stop 132
tcgttacttacaactctatgttcca

SEQ ID NO: 346249 - DNA, 25 bp, Artificial
  probe
  misc_feature (1)..(25): SEQ ID NO: 3085; WAN024GDD; Start 116; Stop 140
tacaactctatgttccaactcaaga

SEQ ID NO: 346250 - DNA, 25 bp, Artificial
  probe
  misc_feature (1)..(25): SEQ ID NO: 3085; WAN024GDD; Start 109; Stop 133
cgttacttacaactctatgttccaa

SEQ ID NO: 346251 - DNA, 25 bp, Artificial
  probe
  misc_feature (1)..(25): SEQ ID NO: 3085; WAN024GDD; Start 115; Stop 139
ttacaactctatgttccaactcaag

SEQ ID NO: 346252 - DNA, 25 bp, Artificial
  probe
  misc_feature (1)..(25): SEQ ID NO: 3085; WAN024GDD; Start 114; Stop 138
cttacaactctatgttccaactcaa

SEQ ID NO: 346253 - DNA, 25 bp, Artificial
  probe
  misc_feature (1)..(25): SEQ ID NO: 3085; WAN024GDD; Start 107; Stop 131
atcgttacttacaactctatgttcc

SEQ ID NO: 346254 - DNA, 25 bp, Artificial
  probe
  misc_feature (1)..(25): SEQ ID NO: 3085; WAN024GDD; Start 16; Stop 40
aatcgctctggcttgattatctatc

SEQ ID NO: 346255 - DNA, 25 bp, Artificial
  probe
  misc_feature (1)..(25): SEQ ID NO: 3085; WAN024GDD; Start 112; Stop 136
tacttacaactctatgttccaactc

SEQ ID NO: 346256 - DNA, 25 bp, Artificial
  probe
  misc_feature (1)..(25): SEQ ID NO: 3085; WAN024GDD; Start 15; Stop 39
caatcgctctggcttgattatctat

SEQ ID NO: 346257 - DNA, 25 bp, Artificial
  probe
  misc_feature (1)..(25): SEQ ID NO: 3085; WAN024GDD; Start 121; Stop 145
ctctatgttccaactcaagaagtgg

SEQ ID NO: 346258 - DNA, 25 bp, Artificial
  probe
  misc_feature (1)..(25): SEQ ID NO: 3085; WAN024GDD; Start 110; Stop 134
gttacttacaactctatgttccaac

SEQ ID NO: 346259 - DNA, 25 bp, Artificial
  probe
  misc_feature (1)..(25): SEQ ID NO: 3085; WAN024GDD; Start 87; Stop 111
tacctatcattccaagaaacatcgt

SEQ ID NO: 346260 - DNA, 25 bp, Artificial
  probe
  misc_feature (1)..(25): SEQ ID NO: 3085; WAN024GDD; Start 19; Stop 43
cgctctggcttgattatctatcttt

SEQ ID NO: 346261 - DNA, 25 bp, Artificial
  probe
  misc_feature (1)..(25): SEQ ID NO: 3085; WAN024GDD; Start 111; Stop 135
ttacttacaactctatgttccaact

SEQ ID NO: 346262 - DNA, 25 bp, Artificial
  probe
  misc_feature (1)..(25): SEQ ID NO: 3085; WAN024GDD; Start 106; Stop 130
catcgttacttacaactctatgttc

SEQ ID NO: 346263 - DNA, 25 bp, Artificial
  probe
  misc_feature (1)..(25): SEQ ID NO: 3085; WAN024GDD; Start 97; Stop 121
tccaagaaacatcgttacttacaac

SEQ ID NO: 346264 - DNA, 25 bp, Artificial
  probe
  misc_feature (1)..(25): SEQ ID NO: 3085; WAN024GDD; Start 98; Stop 122
ccaagaaacatcgttacttacaact

SEQ ID NO: 346265 - DNA, 25 bp, Artificial
  probe
  misc_feature (1)..(25): SEQ ID NO: 3085; WAN024GDD; Start 88; Stop 112
acctatcattccaagaaacatcgtt

SEQ ID NO: 346266 - DNA, 25 bp, Artificial
  probe
  misc_feature (1)..(25): SEQ ID NO: 3085; WAN024GDD; Start 192; Stop 216
tagggtttgtcatatccaagagttg

SEQ ID NO: 346267 - DNA, 25 bp, Artificial
  probe
  misc_feature (1)..(25): SEQ ID NO: 3085; WAN024GDD; Start 190; Stop 214
gttagggtttgtcatatccaagagt

SEQ ID NO: 346268 - DNA, 25 bp, Artificial
  probe
  misc_feature (1)..(25): SEQ ID NO: 3085; WAN024GDD; Start 189; Stop 213
agttagggtttgtcatatccaagag

SEQ ID NO: 346269 - DNA, 25 bp, Artificial
  probe
  misc_feature (1)..(25): SEQ ID NO: 3085; WAN024GDD; Start 191; Stop 215
ttagggtttgtcatatccaagagtt

SEQ ID NO: 346270 - DNA, 25 bp, Artificial
  probe
  misc_feature (1)..(25): SEQ ID NO: 3085; WAN024GDD; Start 188; Stop 212
aagttagggtttgtcatatccaaga

SEQ ID NO: 346271 - DNA, 25 bp, Artificial
  probe
  misc_feature (1)..(25): SEQ ID NO: 3085; WAN024GDD; Start 86; Stop 110
ttacctatcattccaagaaacatcg

SEQ ID NO: 346272 - DNA, 25 bp, Artificial
  probe
  misc_feature (1)..(25): SEQ ID NO: 3085; WAN024GDD; Start 92; Stop 116
atcattccaagaaacatcgttactt

SEQ ID NO: 346273 - DNA, 25 bp, Artificial
  probe
  misc_feature (1)..(25): SEQ ID NO: 3085; WAN024GDD; Start 96; Stop 120
ttccaagaaacatcgttacttacaa

SEQ ID NO: 346274 - DNA, 25 bp, Artificial
  probe
  misc_feature (1)..(25): SEQ ID NO: 3086; WAN024FRI; Start 49; Stop 73
agtttaggagaaagtatagatgtca

SEQ ID NO: 346275 - DNA, 25 bp, Artificial
  probe
  misc_feature (1)..(25): SEQ ID NO: 3086; WAN024FRI; Start 47; Stop 71
tgagtttaggagaaagtatagatgt

SEQ ID NO: 346276 - DNA, 25 bp, Artificial
  probe
  misc_feature (1)..(25): SEQ ID NO: 3086; WAN024FRI; Start 48; Stop 72
gagtttaggagaaagtatagatgtc

SEQ ID NO: 346277 - DNA, 25 bp, Artificial
  probe
  misc_feature (1)..(25): SEQ ID NO: 3086; WAN024FRI; Start 50; Stop 74
gtttaggagaaagtatagatgtcaa

SEQ ID NO: 346278 - DNA, 25 bp, Artificial
  probe
  misc_feature (1)..(25): SEQ ID NO: 3086; WAN024FRI; Start 46; Stop 70
atgagtttaggagaaagtatagatg

SEQ ID NO: 346279 - DNA, 25 bp, Artificial
  probe
  misc_feature (1)..(25): SEQ ID NO: 3086; WAN024FRI; Start 51; Stop 75
tttaggagaaagtatagatgtcaat

SEQ ID NO: 346280 - DNA, 25 bp, Artificial
  probe
  misc_feature (1)..(25): SEQ ID NO: 3086; WAN024FRI; Start 39; Stop 63
tgtattaatgagtttaggagaaagt

SEQ ID NO: 346281 - DNA, 25 bp, Artificial
  probe
  misc_feature (1)..(25): SEQ ID NO: 3086; WAN024FRI; Start 35; Stop 59
agaatgtattaatgagtttaggaga

SEQ ID NO: 346282 - DNA, 25 bp, Artificial
  probe
  misc_feature (1)..(25): SEQ ID NO: 3086; WAN024FRI; Start 33; Stop 57
agagaatgtattaatgagtttagga

SEQ ID NO: 346283 - DNA, 25 bp, Artificial
  probe
  misc_feature (1)..(25): SEQ ID NO: 3086; WAN024FRI; Start 34; Stop 58
gagaatgtattaatgagtttaggag

SEQ ID NO: 346284 - DNA, 25 bp, Artificial
  probe
  misc_feature (1)..(25): SEQ ID NO: 3087; WAN024FVG; Start 685; Stop 709
aatccaacaatcaatagagtaggtg

SEQ ID NO: 346285 - DNA, 25 bp, Artificial
  probe
  misc_feature (1)..(25): SEQ ID NO: 3087; WAN024FVG; Start 686; Stop 710
atccaacaatcaatagagtaggtga

SEQ ID NO: 346286 - DNA, 25 bp, Artificial
  probe
  misc_feature (1)..(25): SEQ ID NO: 3087; WAN024FVG; Start 362; Stop 386
attcaacgaatgactattggtggaa

SEQ ID NO: 346287 - DNA, 25 bp, Artificial
  probe
  misc_feature (1)..(25): SEQ ID NO: 3087; WAN024FVG; Start 361; Stop 385
aattcaacgaatgactattggtgga

SEQ ID NO: 346288 - DNA, 25 bp, Artificial
  probe
  misc_feature (1)..(25): SEQ ID NO: 3087; WAN024FVG; Start 398; Stop 422
tctactatatgattgacgatgcagg

SEQ ID NO: 346289 - DNA, 25 bp, Artificial
  probe
  misc_feature (1)..(25): SEQ ID NO: 3087; WAN024FVG; Start 389; Stop 413
aattgaccgtctactatatgattga

SEQ ID NO: 346290 - DNA, 25 bp, Artificial
  probe
  misc_feature (1)..(25): SEQ ID NO: 3087; WAN024FVG; Start 684; Stop 708
taatccaacaatcaatagagtaggt

SEQ ID NO: 346291 - DNA, 25 bp, Artificial
  probe
  misc_feature (1)..(25): SEQ ID NO: 3087; WAN024FVG; Start 625; Stop 649
gttattggagtggtttgtgtgattt

SEQ ID NO: 346292 - DNA, 25 bp, Artificial
  probe
  misc_feature (1)..(25): SEQ ID NO: 3087; WAN024FVG; Start 616; Stop 640
cgtttagttgttattggagtggttt

SEQ ID NO: 346293 - DNA, 25 bp, Artificial
  probe
  misc_feature (1)..(25): SEQ ID NO: 3087; WAN024FVG; Start 613; Stop 637
cttcgtttagttgttattggagtgg

SEQ ID NO: 346294 - DNA, 25 bp, Artificial
  probe
  misc_feature (1)..(25): SEQ ID NO: 3087; WAN024FVG; Start 390; Stop 414
attgaccgtctactatatgattgac

SEQ ID NO: 346295 - DNA, 25 bp, Artificial
  probe
  misc_feature (1)..(25): SEQ ID NO: 3087; WAN024FVG; Start 652; Stop 676
gttgtgatgggaaatgtgttagttt

SEQ ID NO: 346296 - DNA, 25 bp, Artificial
  probe
  misc_feature (1)..(25): SEQ ID NO: 3087; WAN024FVG; Start 619; Stop 643
ttagttgttattggagtggtttgtg

SEQ ID NO: 346297 - DNA, 25 bp, Artificial
  probe
  misc_feature (1)..(25): SEQ ID NO: 3087; WAN024FVG; Start 620; Stop 644
tagttgttattggagtggtttgtgt

SEQ ID NO: 346298 - DNA, 25 bp, Artificial
  probe
  misc_feature (1)..(25): SEQ ID NO: 3087; WAN024FVG; Start 615; Stop 639
tcgtttagttgttattggagtggtt

SEQ ID NO: 346299 - DNA, 25 bp, Artificial
  probe
  misc_feature (1)..(25): SEQ ID NO: 3087; WAN024FVG; Start 614; Stop 638
ttcgtttagttgttattggagtggt

SEQ ID NO: 346300 - DNA, 25 bp, Artificial
  probe
  misc_feature (1)..(25): SEQ ID NO: 3087; WAN024FVG; Start 612; Stop 636
tcttcgtttagttgttattggagtg

SEQ ID NO: 346301 - DNA, 25 bp, Artificial
  probe
  misc_feature (1)..(25): SEQ ID NO: 3087; WAN024FVG; Start 257; Stop 281
tgattgatggtaatttgaatggagc

SEQ ID NO: 346302 - DNA, 25 bp, Artificial
  probe
  misc_feature (1)..(25): SEQ ID NO: 3087; WAN024FVG; Start 73; Stop 97
ctcatcgctttatttgctctcattg

SEQ ID NO: 346303 - DNA, 25 bp, Artificial
  probe
  misc_feature (1)..(25): SEQ ID NO: 3087; WAN024FVG; Start 72; Stop 96
tctcatcgctttatttgctctcatt

SEQ ID NO: 346304 - DNA, 25 bp, Artificial
  probe
  misc_feature (1)..(25): SEQ ID NO: 3087; WAN024FVG; Start 618; Stop 642
tttagttgttattggagtggtttgt

SEQ ID NO: 346305 - DNA, 25 bp, Artificial
  probe
  misc_feature (1)..(25): SEQ ID NO: 3087; WAN024FVG; Start 624; Stop 648
tgttattggagtggtttgtgtgatt

SEQ ID NO: 346306 - DNA, 25 bp, Artificial
  probe
  misc_feature (1)..(25): SEQ ID NO: 3087; WAN024FVG; Start 623; Stop 647
ttgttattggagtggtttgtgtgat

SEQ ID NO: 346307 - DNA, 25 bp, Artificial
  probe
  misc_feature (1)..(25): SEQ ID NO: 3087; WAN024FVG; Start 617; Stop 641
gtttagttgttattggagtggtttg

SEQ ID NO: 346308 - DNA, 25 bp, Artificial
  probe
  misc_feature (1)..(25): SEQ ID NO: 3087; WAN024FVG; Start 653; Stop 677
ttgtgatgggaaatgtgttagttta

SEQ ID NO: 346309 - DNA, 25 bp, Artificial
  probe
  misc_feature (1)..(25): SEQ ID NO: 3087; WAN024FVG; Start 611; Stop 635
ttcttcgtttagttgttattggagt

SEQ ID NO: 346310 - DNA, 25 bp, Artificial
  probe
  misc_feature (1)..(25): SEQ ID NO: 3087; WAN024FVG; Start 71; Stop 95
ctctcatcgctttatttgctctcat

SEQ ID NO: 346311 - DNA, 25 bp, Artificial
  probe
  misc_feature (1)..(25): SEQ ID NO: 3087; WAN024FVG; Start 648; Stop 672
tttggttgtgatgggaaatgtgtta

SEQ ID NO: 346312 - DNA, 25 bp, Artificial
  probe
  misc_feature (1)..(25): SEQ ID NO: 3087; WAN024FVG; Start 654; Stop 678
tgtgatgggaaatgtgttagtttat

SEQ ID NO: 346313 - DNA, 25 bp, Artificial
  probe
  misc_feature (1)..(25): SEQ ID NO: 3087; WAN024FVG; Start 555; Stop 579
taaagaattgaacgcaaatggtgaa

SEQ ID NO: 346314 - DNA, 25 bp, Artificial
  probe
  misc_feature (1)..(25): SEQ ID NO: 3087; WAN024FVG; Start 552; Stop 576
ctctaaagaattgaacgcaaatggt

SEQ ID NO: 346315 - DNA, 25 bp, Artificial
  probe
  misc_feature (1)..(25): SEQ ID NO: 3087; WAN024FVG; Start 551; Stop 575
actctaaagaattgaacgcaaatgg

SEQ ID NO: 346316 - DNA, 25 bp, Artificial
  probe
  misc_feature (1)..(25): SEQ ID NO: 3087; WAN024FVG; Start 912; Stop 936
aagagatacagtccttcttgttgaa

SEQ ID NO: 346317 - DNA, 25 bp, Artificial
  probe
  misc_feature (1)..(25): SEQ ID NO: 3088; WAN024D6J; Start 23; Stop 47
cttcttccactgcgacgataatagt

SEQ ID NO: 346318 - DNA, 25 bp, Artificial
  probe
  misc_feature (1)..(25): SEQ ID NO: 3088; WAN024D6J; Start 22; Stop 46
ccttcttccactgcgacgataatag

SEQ ID NO: 346319 - DNA, 25 bp, Artificial
  probe
  misc_feature (1)..(25): SEQ ID NO: 3088; WAN024D6J; Start 24; Stop 48
ttcttccactgcgacgataatagtc

SEQ ID NO: 346320 - DNA, 25 bp, Artificial
  probe
  misc_feature (1)..(25): SEQ ID NO: 3088; WAN024D6J; Start 21; Stop 45
tccttcttccactgcgacgataata

SEQ ID NO: 346321 - DNA, 25 bp, Artificial
  probe
  misc_feature (1)..(25): SEQ ID NO: 3088; WAN024D6J; Start 88; Stop 112
ttagaaacctctgtaccagtgattc

SEQ ID NO: 346322 - DNA, 25 bp, Artificial
  probe
  misc_feature (1)..(25): SEQ ID NO: 3088; WAN024D6J; Start 87; Stop 111
cttagaaacctctgtaccagtgatt

SEQ ID NO: 346323 - DNA, 25 bp, Artificial
  probe
  misc_feature (1)..(25): SEQ ID NO: 3088; WAN024D6J; Start 100; Stop 124
gtaccagtgattcccataccgatac

SEQ ID NO: 346324 - DNA, 25 bp, Artificial
  probe
  misc_feature (1)..(25): SEQ ID NO: 3088; WAN024D6J; Start 89; Stop 113
tagaaacctctgtaccagtgattcc

SEQ ID NO: 346325 - DNA, 25 bp, Artificial
  probe
  misc_feature (1)..(25): SEQ ID NO: 3088; WAN024D6J; Start 86; Stop 110
ccttagaaacctctgtaccagtgat

SEQ ID NO: 346326 - DNA, 25 bp, Artificial
  probe
  misc_feature (1)..(25): SEQ ID NO: 3088; WAN024D6J; Start 99; Stop 123
tgtaccagtgattcccataccgata

SEQ ID NO: 346327 - DNA, 25 bp, Artificial
  probe
  misc_feature (1)..(25): SEQ ID NO: 3088; WAN024D6J; Start 54; Stop 78
gttatcatctgcaagaatcatatca

SEQ ID NO: 346328 - DNA, 25 bp, Artificial
  probe
  misc_feature (1)..(25): SEQ ID NO: 3088; WAN024D6J; Start 101; Stop 125
taccagtgattcccataccgatacc

SEQ ID NO: 346329 - DNA, 25 bp, Artificial
  probe
  misc_feature (1)..(25): SEQ ID NO: 3088; WAN024D6J; Start 40; Stop 64
ataatagtcgcaaagttatcatctg

SEQ ID NO: 346330 - DNA, 25 bp, Artificial
  probe
  misc_feature (1)..(25): SEQ ID NO: 3088; WAN024D6J; Start 53; Stop 77
agttatcatctgcaagaatcatatc

SEQ ID NO: 346331 - DNA, 25 bp, Artificial
  probe
  misc_feature (1)..(25): SEQ ID NO: 3088; WAN024D6J; Start 50; Stop 74
caaagttatcatctgcaagaatcat

SEQ ID NO: 346332 - DNA, 25 bp, Artificial
  probe
  misc_feature (1)..(25): SEQ ID NO: 3088; WAN024D6J; Start 93; Stop 117
aacctctgtaccagtgattcccata

SEQ ID NO: 346333 - DNA, 25 bp, Artificial
  probe
  misc_feature (1)..(25): SEQ ID NO: 3088; WAN024D6J; Start 41; Stop 65
taatagtcgcaaagttatcatctgc

SEQ ID NO: 346334 - DNA, 25 bp, Artificial
  probe
  misc_feature (1)..(25): SEQ ID NO: 3088; WAN024D6J; Start 55; Stop 79
ttatcatctgcaagaatcatatcag

SEQ ID NO: 346335 - DNA, 25 bp, Artificial
  probe
  misc_feature (1)..(25): SEQ ID NO: 3088; WAN024D6J; Start 52; Stop 76
aagttatcatctgcaagaatcatat

SEQ ID NO: 346336 - DNA, 25 bp, Artificial
  probe
  misc_feature (1)..(25): SEQ ID NO: 3088; WAN024D6J; Start 59; Stop 83
catctgcaagaatcatatcagaagc

SEQ ID NO: 346337 - DNA, 25 bp, Artificial
  probe
  misc_feature (1)..(25): SEQ ID NO: 3088; WAN024D6J; Start 1; Stop 25
atgtttgagaagaccttacgtcctt

SEQ ID NO: 346338 - DNA, 25 bp, Artificial
  probe
  misc_feature (1)..(25): SEQ ID NO: 3088; WAN024D6J; Start 85; Stop 109
cccttagaaacctctgtaccagtga

SEQ ID NO: 346339 - DNA, 25 bp, Artificial
  probe
  misc_feature (1)..(25): SEQ ID NO: 3088; WAN024D6J; Start 60; Stop 84
atctgcaagaatcatatcagaagcc

SEQ ID NO: 346340 - DNA, 25 bp, Artificial
  probe
  misc_feature (1)..(25): SEQ ID NO: 3088; WAN024D6J; Start 173; Stop 197
tcatggcaacgactttaccttgttt

SEQ ID NO: 346341 - DNA, 25 bp, Artificial
  probe
  misc_feature (1)..(25): SEQ ID NO: 3088; WAN024D6J; Start 94; Stop 118
acctctgtaccagtgattcccatac

SEQ ID NO: 346342 - DNA, 25 bp, Artificial
  probe
  misc_feature (1)..(25): SEQ ID NO: 3088; WAN024D6J; Start 58; Stop 82
tcatctgcaagaatcatatcagaag

SEQ ID NO: 346343 - DNA, 25 bp, Artificial
  probe
  misc_feature (1)..(25): SEQ ID NO: 3088; WAN024D6J; Start 36; Stop 60
gacgataatagtcgcaaagttatca

SEQ ID NO: 346344 - DNA, 25 bp, Artificial
  probe
  misc_feature (1)..(25): SEQ ID NO: 3088; WAN024D6J; Start 92; Stop 116
aaacctctgtaccagtgattcccat

SEQ ID NO: 346345 - DNA, 25 bp, Artificial
  probe
  misc_feature (1)..(25): SEQ ID NO: 3088; WAN024D6J; Start 49; Stop 73
gcaaagttatcatctgcaagaatca

SEQ ID NO: 346346 - DNA, 25 bp, Artificial
  probe
  misc_feature (1)..(25): SEQ ID NO: 3088; WAN024D6J; Start 37; Stop 61
acgataatagtcgcaaagttatcat

SEQ ID NO: 346347 - DNA, 25 bp, Artificial
  probe
  misc_feature (1)..(25): SEQ ID NO: 3088; WAN024D6J; Start 20; Stop 44
gtccttcttccactgcgacgataat

SEQ ID NO: 346348 - DNA, 25 bp, Artificial
  probe
  misc_feature (1)..(25): SEQ ID NO: 3088; WAN024D6J; Start 207; Stop 231
cttgacgatacgaaccttgtgttct

SEQ ID NO: 346349 - DNA, 25 bp, Artificial
  probe
  misc_feature (1)..(25): SEQ ID NO: 3088; WAN024D6J; Start 57; Stop 81
atcatctgcaagaatcatatcagaa

SEQ ID NO: 346350 - DNA, 25 bp, Artificial
  probe
  misc_feature (1)..(25): SEQ ID NO: 3089; WAN024DWL; Start 206; Stop 230
gttacgaatggtgtatcaatcactc

SEQ ID NO: 346351 - DNA, 25 bp, Artificial
  probe
  misc_feature (1)..(25): SEQ ID NO: 3089; WAN024DWL; Start 207; Stop 231
ttacgaatggtgtatcaatcactcc

SEQ ID NO: 346352 - DNA, 25 bp, Artificial
  probe
  misc_feature (1)..(25): SEQ ID NO: 3089; WAN024DWL; Start 205; Stop 229
cgttacgaatggtgtatcaatcact

SEQ ID NO: 346353 - DNA, 25 bp, Artificial
  probe
  misc_feature (1)..(25): SEQ ID NO: 3089; WAN024DWL; Start 128; Stop 152
tcttcaaagcggataaagtcttcat

SEQ ID NO: 346354 - DNA, 25 bp, Artificial
  probe
  misc_feature (1)..(25): SEQ ID NO: 3089; WAN024DWL; Start 131; Stop 155
tcaaagcggataaagtcttcatagg

SEQ ID NO: 346355 - DNA, 25 bp, Artificial
  probe
  misc_feature (1)..(25): SEQ ID NO: 3089; WAN024DWL; Start 130; Stop 154
ttcaaagcggataaagtcttcatag

SEQ ID NO: 346356 - DNA, 25 bp, Artificial
  probe
  misc_feature (1)..(25): SEQ ID NO: 3089; WAN024DWL; Start 129; Stop 153
cttcaaagcggataaagtcttcata

SEQ ID NO: 346357 - DNA, 25 bp, Artificial
  probe
  misc_feature (1)..(25): SEQ ID NO: 3089; WAN024DWL; Start 147; Stop 171
cttcataggcttcgtgagttgtctt

SEQ ID NO: 346358 - DNA, 25 bp, Artificial
  probe
  misc_feature (1)..(25): SEQ ID NO: 3089; WAN024DWL; Start 143; Stop 167
aagtcttcataggcttcgtgagttg

SEQ ID NO: 346359 - DNA, 25 bp, Artificial
  probe
  misc_feature (1)..(25): SEQ ID NO: 3089; WAN024DWL; Start 140; Stop 164
ataaagtcttcataggcttcgtgag

SEQ ID NO: 346360 - DNA, 25 bp, Artificial
  probe
  misc_feature (1)..(25): SEQ ID NO: 3089; WAN024DWL; Start 139; Stop 163
gataaagtcttcataggcttcgtga

SEQ ID NO: 346361 - DNA, 25 bp, Artificial
  probe
  misc_feature (1)..(25): SEQ ID NO: 3089; WAN024DWL; Start 138; Stop 162
ggataaagtcttcataggcttcgtg

SEQ ID NO: 346362 - DNA, 25 bp, Artificial
  probe
  misc_feature (1)..(25): SEQ ID NO: 3089; WAN024DWL; Start 127; Stop 151
gtcttcaaagcggataaagtcttca

SEQ ID NO: 346363 - DNA, 25 bp, Artificial
  probe
  misc_feature (1)..(25): SEQ ID NO: 3089; WAN024DWL; Start 204; Stop 228
ccgttacgaatggtgtatcaatcac

SEQ ID NO: 346364 - DNA, 25 bp, Artificial
  probe
  misc_feature (1)..(25): SEQ ID NO: 3089; WAN024DWL; Start 208; Stop 232
tacgaatggtgtatcaatcactccg

SEQ ID NO: 346365 - DNA, 25 bp, Artificial
  probe
  misc_feature (1)..(25): SEQ ID NO: 3089; WAN024DWL; Start 141; Stop 165
taaagtcttcataggcttcgtgagt

SEQ ID NO: 346366 - DNA, 25 bp, Artificial
  probe
  misc_feature (1)..(25): SEQ ID NO: 3089; WAN024DWL; Start 126; Stop 150
ggtcttcaaagcggataaagtcttc

SEQ ID NO: 346367 - DNA, 25 bp, Artificial
  probe
  misc_feature (1)..(25): SEQ ID NO: 3089; WAN024DWL; Start 132; Stop 156
caaagcggataaagtcttcataggc

SEQ ID NO: 346368 - DNA, 25 bp, Artificial
  probe
  misc_feature (1)..(25): SEQ ID NO: 3089; WAN024DWL; Start 88; Stop 112
tggttggaaatagatatactcgttt

SEQ ID NO: 346369 - DNA, 25 bp, Artificial
  probe
  misc_feature (1)..(25): SEQ ID NO: 3089; WAN024DWL; Start 87; Stop 111
ttggttggaaatagatatactcgtt

SEQ ID NO: 346370 - DNA, 25 bp, Artificial
  probe
  misc_feature (1)..(25): SEQ ID NO: 3089; WAN024DWL; Start 86; Stop 110
tttggttggaaatagatatactcgt

SEQ ID NO: 346371 - DNA, 25 bp, Artificial
  probe
  misc_feature (1)..(25): SEQ ID NO: 3089; WAN024DWL; Start 203; Stop 227
accgttacgaatggtgtatcaatca

SEQ ID NO: 346372 - DNA, 25 bp, Artificial
  probe
  misc_feature (1)..(25): SEQ ID NO: 3089; WAN024DWL; Start 146; Stop 170
tcttcataggcttcgtgagttgtct

SEQ ID NO: 346373 - DNA, 25 bp, Artificial
  probe
  misc_feature (1)..(25): SEQ ID NO: 3089; WAN024DWL; Start 145; Stop 169
gtcttcataggcttcgtgagttgtc

SEQ ID NO: 346374 - DNA, 25 bp, Artificial
  probe
  misc_feature (1)..(25): SEQ ID NO: 3089; WAN024DWL; Start 137; Stop 161
cggataaagtcttcataggcttcgt

SEQ ID NO: 346375 - DNA, 25 bp, Artificial
  probe
  misc_feature (1)..(25): SEQ ID NO: 3089; WAN024DWL; Start 211; Stop 235
gaatggtgtatcaatcactccgttt

SEQ ID NO: 346376 - DNA, 25 bp, Artificial
  probe
  misc_feature (1)..(25): SEQ ID NO: 3089; WAN024DWL; Start 210; Stop 234
cgaatggtgtatcaatcactccgtt

SEQ ID NO: 346377 - DNA, 25 bp, Artificial
  probe
  misc_feature (1)..(25): SEQ ID NO: 3089; WAN024DWL; Start 142; Stop 166
aaagtcttcataggcttcgtgagtt

SEQ ID NO: 346378 - DNA, 25 bp, Artificial
  probe
  misc_feature (1)..(25): SEQ ID NO: 3089; WAN024DWL; Start 174; Stop 198
catagactgtgatgttgtcatccac

SEQ ID NO: 346379 - DNA, 25 bp, Artificial
  probe
  misc_feature (1)..(25): SEQ ID NO: 3089; WAN024DWL; Start 144; Stop 168
agtcttcataggcttcgtgagttgt

SEQ ID NO: 346380 - DNA, 25 bp, Artificial
  probe
  misc_feature (1)..(25): SEQ ID NO: 3089; WAN024DWL; Start 173; Stop 197
tcatagactgtgatgttgtcatcca

SEQ ID NO: 346381 - DNA, 25 bp, Artificial
  probe
  misc_feature (1)..(25): SEQ ID NO: 3089; WAN024DWL; Start 97; Stop 121
atagatatactcgtttccgatgtcc

SEQ ID NO: 346382 - DNA, 25 bp, Artificial
  probe
  misc_feature (1)..(25): SEQ ID NO: 3089; WAN024DWL; Start 239; Stop 263
taaataccctcacggtgttcttgtt

SEQ ID NO: 346383 - DNA, 25 bp, Artificial
  probe
  misc_feature (1)..(25): SEQ ID NO: 3090; WAN024DWU; Start 1386; Stop 1410
tatgatgactgaagagcaagcaata

SEQ ID NO: 346384 - DNA, 25 bp, Artificial
  probe
  misc_feature (1)..(25): SEQ ID NO: 3090; WAN024DWU; Start 1385; Stop 1409
ttatgatgactgaagagcaagcaat

SEQ ID NO: 346385 - DNA, 25 bp, Artificial
  probe
  misc_feature (1)..(25): SEQ ID NO: 3090; WAN024DWU; Start 1514; Stop 1538
aagaattggaattaagattggcgtt

SEQ ID NO: 346386 - DNA, 25 bp, Artificial
  probe
  misc_feature (1)..(25): SEQ ID NO: 3090; WAN024DWU; Start 1392; Stop 1416
gactgaagagcaagcaatacaacta

SEQ ID NO: 346387 - DNA, 25 bp, Artificial
  probe
  misc_feature (1)..(25): SEQ ID NO: 3090; WAN024DWU; Start 1515; Stop 1539
agaattggaattaagattggcgtta

SEQ ID NO: 346388 - DNA, 25 bp, Artificial
  probe
  misc_feature (1)..(25): SEQ ID NO: 3090; WAN024DWU; Start 1387; Stop 1411
atgatgactgaagagcaagcaatac

SEQ ID NO: 346389 - DNA, 25 bp, Artificial
  probe
  misc_feature (1)..(25): SEQ ID NO: 3090; WAN024DWU; Start 1513; Stop 1537
caagaattggaattaagattggcgt

SEQ ID NO: 346390 - DNA, 25 bp, Artificial
  probe
  misc_feature (1)..(25): SEQ ID NO: 3090; WAN024DWU; Start 1512; Stop 1536
acaagaattggaattaagattggcg

SEQ ID NO: 346391 - DNA, 25 bp, Artificial
  probe
  misc_feature (1)..(25): SEQ ID NO: 3090; WAN024DWU; Start 1211; Stop 1235
atggtgttagttcttcattgatgtt

SEQ ID NO: 346392 - DNA, 25 bp, Artificial
  probe
  misc_feature (1)..(25): SEQ ID NO: 3090; WAN024DWU; Start 1389; Stop 1413
gatgactgaagagcaagcaatacaa

SEQ ID NO: 346393 - DNA, 25 bp, Artificial
  probe
  misc_feature (1)..(25): SEQ ID NO: 3090; WAN024DWU; Start 1384; Stop 1408
gttatgatgactgaagagcaagcaa

SEQ ID NO: 346394 - DNA, 25 bp, Artificial
  probe
  misc_feature (1)..(25): SEQ ID NO: 3090; WAN024DWU; Start 1511; Stop 1535
cacaagaattggaattaagattggc

SEQ ID NO: 346395 - DNA, 25 bp, Artificial
  probe
  misc_feature (1)..(25): SEQ ID NO: 3090; WAN024DWU; Start 1393; Stop 1417
actgaagagcaagcaatacaactag

SEQ ID NO: 346396 - DNA, 25 bp, Artificial
  probe
  misc_feature (1)..(25): SEQ ID NO: 3090; WAN024DWU; Start 1212; Stop 1236
tggtgttagttcttcattgatgtta

SEQ ID NO: 346397 - DNA, 25 bp, Artificial
  probe
  misc_feature (1)..(25): SEQ ID NO: 3090; WAN024DWU; Start 1390; Stop 1414
atgactgaagagcaagcaatacaac

SEQ ID NO: 346398 - DNA, 25 bp, Artificial
  probe
  misc_feature (1)..(25): SEQ ID NO: 3090; WAN024DWU; Start 1582; Stop 1606
ccagtgctagaacaacttattacca

SEQ ID NO: 346399 - DNA, 25 bp, Artificial
  probe
  misc_feature (1)..(25): SEQ ID NO: 3090; WAN024DWU; Start 1581; Stop 1605
accagtgctagaacaacttattacc

SEQ ID NO: 346400 - DNA, 25 bp, Artificial
  probe
  misc_feature (1)..(25): SEQ ID NO: 3090; WAN024DWU; Start 1203; Stop 1227
ttgtcctaatggtgttagttcttca

SEQ ID NO: 346401 - DNA, 25 bp, Artificial
  probe
  misc_feature (1)..(25): SEQ ID NO: 3090; WAN024DWU; Start 1583; Stop 1607
cagtgctagaacaacttattaccaa

SEQ ID NO: 346402 - DNA, 25 bp, Artificial
  probe
  misc_feature (1)..(25): SEQ ID NO: 3090; WAN024DWU; Start 1204; Stop 1228
tgtcctaatggtgttagttcttcat

SEQ ID NO: 346403 - DNA, 25 bp, Artificial
  probe
  misc_feature (1)..(25): SEQ ID NO: 3090; WAN024DWU; Start 1516; Stop 1540
gaattggaattaagattggcgttaa

SEQ ID NO: 346404 - DNA, 25 bp, Artificial
  probe
  misc_feature (1)..(25): SEQ ID NO: 3090; WAN024DWU; Start 1855; Stop 1879
gataatccagaacaagaggtaagat

SEQ ID NO: 346405 - DNA, 25 bp, Artificial
  probe
  misc_feature (1)..(25): SEQ ID NO: 3090; WAN024DWU; Start 1578; Stop 1602
tgtaccagtgctagaacaacttatt

SEQ ID NO: 346406 - DNA, 25 bp, Artificial
  probe
  misc_feature (1)..(25): SEQ ID NO: 3090; WAN024DWU; Start 1380; Stop 1404
ttcggttatgatgactgaagagcaa

SEQ ID NO: 346407 - DNA, 25 bp, Artificial
  probe
  misc_feature (1)..(25): SEQ ID NO: 3090; WAN024DWU; Start 786; Stop 810
ttctgaggatgattatcgctatatc

SEQ ID NO: 346408 - DNA, 25 bp, Artificial
  probe
  misc_feature (1)..(25): SEQ ID NO: 3090; WAN024DWU; Start 1510; Stop 1534
acacaagaattggaattaagattgg

SEQ ID NO: 346409 - DNA, 25 bp, Artificial
  probe
  misc_feature (1)..(25): SEQ ID NO: 3090; WAN024DWU; Start 1580; Stop 1604
taccagtgctagaacaacttattac

SEQ ID NO: 346410 - DNA, 25 bp, Artificial
  probe
  misc_feature (1)..(25): SEQ ID NO: 3090; WAN024DWU; Start 1388; Stop 1412
tgatgactgaagagcaagcaataca

SEQ ID NO: 346411 - DNA, 25 bp, Artificial
  probe
  misc_feature (1)..(25): SEQ ID NO: 3090; WAN024DWU; Start 1213; Stop 1237
ggtgttagttcttcattgatgttaa

SEQ ID NO: 346412 - DNA, 25 bp, Artificial
  probe
  misc_feature (1)..(25): SEQ ID NO: 3090; WAN024DWU; Start 1391; Stop 1415
tgactgaagagcaagcaatacaact

SEQ ID NO: 346413 - DNA, 25 bp, Artificial
  probe
  misc_feature (1)..(25): SEQ ID NO: 3090; WAN024DWU; Start 1381; Stop 1405
tcggttatgatgactgaagagcaag

SEQ ID NO: 346414 - DNA, 25 bp, Artificial
  probe
  misc_feature (1)..(25): SEQ ID NO: 3090; WAN024DWU; Start 1579; Stop 1603
gtaccagtgctagaacaacttatta

SEQ ID NO: 346415 - DNA, 25 bp, Artificial
  probe
  misc_feature (1)..(25): SEQ ID NO: 3090; WAN024DWU; Start 833; Stop 857
ttgaaggtgaagtagatgttgctcc

SEQ ID NO: 346416 - DNA, 25 bp, Artificial
  probe
  misc_feature (1)..(25): SEQ ID NO: 3091; WAN024DSP; Start 663; Stop 687
gcataagttagatgaatcaacgcaa

SEQ ID NO: 346417 - DNA, 25 bp, Artificial
  probe
  misc_feature (1)..(25): SEQ ID NO: 3091; WAN024DSP; Start 757; Stop 781
aatggcttatcttcttcgtcgaatt

SEQ ID NO: 346418 - DNA, 25 bp, Artificial
  probe
  misc_feature (1)..(25): SEQ ID NO: 3091; WAN024DSP; Start 302; Stop 326
agtatttgcgtggattaagtgtttc

SEQ ID NO: 346419 - DNA, 25 bp, Artificial
  probe
  misc_feature (1)..(25): SEQ ID NO: 3091; WAN024DSP; Start 301; Stop 325
gagtatttgcgtggattaagtgttt

SEQ ID NO: 346420 - DNA, 25 bp, Artificial
  probe
  misc_feature (1)..(25): SEQ ID NO: 3091; WAN024DSP; Start 303; Stop 327
gtatttgcgtggattaagtgtttca

SEQ ID NO: 346421 - DNA, 25 bp, Artificial
  probe
  misc_feature (1)..(25): SEQ ID NO: 3091; WAN024DSP; Start 661; Stop 685
ttgcataagttagatgaatcaacgc

SEQ ID NO: 346422 - DNA, 25 bp, Artificial
  probe
  misc_feature (1)..(25): SEQ ID NO: 3091; WAN024DSP; Start 224; Stop 248
tgagtgagatccaattagatagaag

SEQ ID NO: 346423 - DNA, 25 bp, Artificial
  probe
  misc_feature (1)..(25): SEQ ID NO: 3091; WAN024DSP; Start 304; Stop 328
tatttgcgtggattaagtgtttcaa

SEQ ID NO: 346424 - DNA, 25 bp, Artificial
  probe
  misc_feature (1)..(25): SEQ ID NO: 3091; WAN024DSP; Start 225; Stop 249
gagtgagatccaattagatagaaga

SEQ ID NO: 346425 - DNA, 25 bp, Artificial
  probe
  misc_feature (1)..(25): SEQ ID NO: 3091; WAN024DSP; Start 300; Stop 324
ggagtatttgcgtggattaagtgtt

SEQ ID NO: 346426 - DNA, 25 bp, Artificial
  probe
  misc_feature (1)..(25): SEQ ID NO: 3091; WAN024DSP; Start 472; Stop 496
caggagatagaagctctaatcgtta

SEQ ID NO: 346427 - DNA, 25 bp, Artificial
  probe
  misc_feature (1)..(25): SEQ ID NO: 3091; WAN024DSP; Start 471; Stop 495
acaggagatagaagctctaatcgtt

SEQ ID NO: 346428 - DNA, 25 bp, Artificial
  probe
  misc_feature (1)..(25): SEQ ID NO: 3091; WAN024DSP; Start 470; Stop 494
aacaggagatagaagctctaatcgt

SEQ ID NO: 346429 - DNA, 25 bp, Artificial
  probe
  misc_feature (1)..(25): SEQ ID NO: 3091; WAN024DSP; Start 603; Stop 627
gcaacatacccatactgtagagtta

SEQ ID NO: 346430 - DNA, 25 bp, Artificial
  probe
  misc_feature (1)..(25): SEQ ID NO: 3091; WAN024DSP; Start 598; Stop 622
aaagagcaacatacccatactgtag

SEQ ID NO: 346431 - DNA, 25 bp, Artificial
  probe
  misc_feature (1)..(25): SEQ ID NO: 3091; WAN024DSP; Start 664; Stop 688
cataagttagatgaatcaacgcaaa

SEQ ID NO: 346432 - DNA, 25 bp, Artificial
  probe
  misc_feature (1)..(25): SEQ ID NO: 3091; WAN024DSP; Start 599; Stop 623
aagagcaacatacccatactgtaga

SEQ ID NO: 346433 - DNA, 25 bp, Artificial
  probe
  misc_feature (1)..(25): SEQ ID NO: 3091; WAN024DSP; Start 473; Stop 497
aggagatagaagctctaatcgttaa

SEQ ID NO: 346434 - DNA, 25 bp, Artificial
  probe
  misc_feature (1)..(25): SEQ ID NO: 3091; WAN024DSP; Start 602; Stop 626
agcaacatacccatactgtagagtt

SEQ ID NO: 346435 - DNA, 25 bp, Artificial
  probe
  misc_feature (1)..(25): SEQ ID NO: 3091; WAN024DSP; Start 600; Stop 624
agagcaacatacccatactgtagag

SEQ ID NO: 346436 - DNA, 25 bp, Artificial
  probe
  misc_feature (1)..(25): SEQ ID NO: 3091; WAN024DSP; Start 226; Stop 250
agtgagatccaattagatagaagaa

SEQ ID NO: 346437 - DNA, 25 bp, Artificial
  probe
  misc_feature (1)..(25): SEQ ID NO: 3091; WAN024DSP; Start 601; Stop 625
gagcaacatacccatactgtagagt

SEQ ID NO: 346438 - DNA, 25 bp, Artificial
  probe
  misc_feature (1)..(25): SEQ ID NO: 3091; WAN024DSP; Start 758; Stop 782
atggcttatcttcttcgtcgaattc

SEQ ID NO: 346439 - DNA, 25 bp, Artificial
  probe
  misc_feature (1)..(25): SEQ ID NO: 3091; WAN024DSP; Start 517; Stop 541
gatttagatcgaaagaaggcaaagg

SEQ ID NO: 346440 - DNA, 25 bp, Artificial
  probe
  misc_feature (1)..(25): SEQ ID NO: 3091; WAN024DSP; Start 186; Stop 210
agctgctaaacaagtcgatgaatat

SEQ ID NO: 346441 - DNA, 25 bp, Artificial
  probe
  misc_feature (1)..(25): SEQ ID NO: 3091; WAN024DSP; Start 187; Stop 211
gctgctaaacaagtcgatgaatata

SEQ ID NO: 346442 - DNA, 25 bp, Artificial
  probe
  misc_feature (1)..(25): SEQ ID NO: 3091; WAN024DSP; Start 185; Stop 209
aagctgctaaacaagtcgatgaata

SEQ ID NO: 346443 - DNA, 25 bp, Artificial
  probe
  misc_feature (1)..(25): SEQ ID NO: 3091; WAN024DSP; Start 180; Stop 204
tatgaaagctgctaaacaagtcgat

SEQ ID NO: 346444 - DNA, 25 bp, Artificial
  probe
  misc_feature (1)..(25): SEQ ID NO: 3091; WAN024DSP; Start 179; Stop 203
atatgaaagctgctaaacaagtcga

SEQ ID NO: 346445 - DNA, 25 bp, Artificial
  probe
  misc_feature (1)..(25): SEQ ID NO: 3091; WAN024DSP; Start 482; Stop 506
aagctctaatcgttaaacataaggg

SEQ ID NO: 346446 - DNA, 25 bp, Artificial
  probe
  misc_feature (1)..(25): SEQ ID NO: 3091; WAN024DSP; Start 695; Stop 719
aactacagaaactgatcgcagaaag

SEQ ID NO: 346447 - DNA, 25 bp, Artificial
  probe
  misc_feature (1)..(25): SEQ ID NO: 3091; WAN024DSP; Start 762; Stop 786
cttatcttcttcgtcgaattcaggc

SEQ ID NO: 346448 - DNA, 25 bp, Artificial
  probe
  misc_feature (1)..(25): SEQ ID NO: 3091; WAN024DSP; Start 761; Stop 785
gcttatcttcttcgtcgaattcagg

SEQ ID NO: 346449 - DNA, 25 bp, Artificial
  probe
  misc_feature (1)..(25): SEQ ID NO: 3092; WAN024DSR; Start 850; Stop 874
gatcaacaagctgaagaagactatg

SEQ ID NO: 346450 - DNA, 25 bp, Artificial
  probe
  misc_feature (1)..(25): SEQ ID NO: 3092; WAN024DSR; Start 488; Stop 512
gtcgtaactacccaaccaatactta

SEQ ID NO: 346451 - DNA, 25 bp, Artificial
  probe
  misc_feature (1)..(25): SEQ ID NO: 3092; WAN024DSR; Start 851; Stop 875
atcaacaagctgaagaagactatgc

SEQ ID NO: 346452 - DNA, 25 bp, Artificial
  probe
  misc_feature (1)..(25): SEQ ID NO: 3092; WAN024DSR; Start 154; Stop 178
atggcaaagacagaacataggaaag

SEQ ID NO: 346453 - DNA, 25 bp, Artificial
  probe
  misc_feature (1)..(25): SEQ ID NO: 3092; WAN024DSR; Start 186; Stop 210
acaagtcgtcgatgaatatatagaa

SEQ ID NO: 346454 - DNA, 25 bp, Artificial
  probe
  misc_feature (1)..(25): SEQ ID NO: 3092; WAN024DSR; Start 185; Stop 209
aacaagtcgtcgatgaatatataga

SEQ ID NO: 346455 - DNA, 25 bp, Artificial
  probe
  misc_feature (1)..(25): SEQ ID NO: 3092; WAN024DSR; Start 152; Stop 176
atatggcaaagacagaacataggaa

SEQ ID NO: 346456 - DNA, 25 bp, Artificial
  probe
  misc_feature (1)..(25): SEQ ID NO: 3092; WAN024DSR; Start 151; Stop 175
aatatggcaaagacagaacatagga

SEQ ID NO: 346457 - DNA, 25 bp, Artificial
  probe
  misc_feature (1)..(25): SEQ ID NO: 3092; WAN024DSR; Start 153; Stop 177
tatggcaaagacagaacataggaaa

SEQ ID NO: 346458 - DNA, 25 bp, Artificial
  probe
  misc_feature (1)..(25): SEQ ID NO: 3092; WAN024DSR; Start 489; Stop 513
tcgtaactacccaaccaatacttac

SEQ ID NO: 346459 - DNA, 25 bp, Artificial
  probe
  misc_feature (1)..(25): SEQ ID NO: 3092; WAN024DSR; Start 485; Stop 509
atcgtcgtaactacccaaccaatac

SEQ ID NO: 346460 - DNA, 25 bp, Artificial
  probe
  misc_feature (1)..(25): SEQ ID NO: 3092; WAN024DSR; Start 180; Stop 204
tgctaaacaagtcgtcgatgaatat

SEQ ID NO: 346461 - DNA, 25 bp, Artificial
  probe
  misc_feature (1)..(25): SEQ ID NO: 3092; WAN024DSR; Start 487; Stop 511
cgtcgtaactacccaaccaatactt

SEQ ID NO: 346462 - DNA, 25 bp, Artificial
  probe
  misc_feature (1)..(25): SEQ ID NO: 3092; WAN024DSR; Start 150; Stop 174
taatatggcaaagacagaacatagg

SEQ ID NO: 346463 - DNA, 25 bp, Artificial
  probe
  misc_feature (1)..(25): SEQ ID NO: 3092; WAN024DSR; Start 181; Stop 205
gctaaacaagtcgtcgatgaatata

SEQ ID NO: 346464 - DNA, 25 bp, Artificial
  probe
  misc_feature (1)..(25): SEQ ID NO: 3092; WAN024DSR; Start 484; Stop 508
gatcgtcgtaactacccaaccaata

SEQ ID NO: 346465 - DNA, 25 bp, Artificial
  probe
  misc_feature (1)..(25): SEQ ID NO: 3092; WAN024DSR; Start 179; Stop 203
ctgctaaacaagtcgtcgatgaata

SEQ ID NO: 346466 - DNA, 25 bp, Artificial
  probe
  misc_feature (1)..(25): SEQ ID NO: 3092; WAN024DSR; Start 849; Stop 873
tgatcaacaagctgaagaagactat

SEQ ID NO: 346467 - DNA, 25 bp, Artificial
  probe
  misc_feature (1)..(25): SEQ ID NO: 3092; WAN024DSR; Start 848; Stop 872
atgatcaacaagctgaagaagacta

SEQ ID NO: 346468 - DNA, 25 bp, Artificial
  probe
  misc_feature (1)..(25): SEQ ID NO: 3092; WAN024DSR; Start 148; Stop 172
tctaatatggcaaagacagaacata

SEQ ID NO: 346469 - DNA, 25 bp, Artificial
  probe
  misc_feature (1)..(25): SEQ ID NO: 3092; WAN024DSR; Start 486; Stop 510
tcgtcgtaactacccaaccaatact

SEQ ID NO: 346470 - DNA, 25 bp, Artificial
  probe
  misc_feature (1)..(25): SEQ ID NO: 3092; WAN024DSR; Start 847; Stop 871
gatgatcaacaagctgaagaagact

SEQ ID NO: 346471 - DNA, 25 bp, Artificial
  probe
  misc_feature (1)..(25): SEQ ID NO: 3092; WAN024DSR; Start 846; Stop 870
agatgatcaacaagctgaagaagac

SEQ ID NO: 346472 - DNA, 25 bp, Artificial
  probe
  misc_feature (1)..(25): SEQ ID NO: 3092; WAN024DSR; Start 149; Stop 173
ctaatatggcaaagacagaacatag

SEQ ID NO: 346473 - DNA, 25 bp, Artificial
  probe
  misc_feature (1)..(25): SEQ ID NO: 3092; WAN024DSR; Start 852; Stop 876
tcaacaagctgaagaagactatgct

SEQ ID NO: 346474 - DNA, 25 bp, Artificial
  probe
  misc_feature (1)..(25): SEQ ID NO: 3092; WAN024DSR; Start 843; Stop 867
aacagatgatcaacaagctgaagaa

SEQ ID NO: 346475 - DNA, 25 bp, Artificial
  probe
  misc_feature (1)..(25): SEQ ID NO: 3092; WAN024DSR; Start 845; Stop 869
cagatgatcaacaagctgaagaaga

SEQ ID NO: 346476 - DNA, 25 bp, Artificial
  probe
  misc_feature (1)..(25): SEQ ID NO: 3092; WAN024DSR; Start 612; Stop 636
cacaattaagcaagcaaaagagaaa

SEQ ID NO: 346477 - DNA, 25 bp, Artificial
  probe
  misc_feature (1)..(25): SEQ ID NO: 3092; WAN024DSR; Start 170; Stop 194
ataggaaagctgctaaacaagtcgt

SEQ ID NO: 346478 - DNA, 25 bp, Artificial
  probe
  misc_feature (1)..(25): SEQ ID NO: 3092; WAN024DSR; Start 160; Stop 184
aagacagaacataggaaagctgcta

SEQ ID NO: 346479 - DNA, 25 bp, Artificial
  probe
  misc_feature (1)..(25): SEQ ID NO: 3092; WAN024DSR; Start 657; Stop 681
ggctacaaggttagaaaacatcaag

SEQ ID NO: 346480 - DNA, 25 bp, Artificial
  probe
  misc_feature (1)..(25): SEQ ID NO: 3092; WAN024DSR; Start 155; Stop 179
tggcaaagacagaacataggaaagc

SEQ ID NO: 346481 - DNA, 25 bp, Artificial
  probe
  misc_feature (1)..(25): SEQ ID NO: 3092; WAN024DSR; Start 656; Stop 680
aggctacaaggttagaaaacatcaa

SEQ ID NO: 346482 - DNA, 25 bp, Artificial
  probe
  misc_feature (1)..(25): SEQ ID NO: 3094; WAN024DSN; Start 67; Stop 91
agtgtagtagttgctagtcttgtta

SEQ ID NO: 346483 - DNA, 25 bp, Artificial
  probe
  misc_feature (1)..(25): SEQ ID NO: 3094; WAN024DSN; Start 66; Stop 90
tagtgtagtagttgctagtcttgtt

SEQ ID NO: 346484 - DNA, 25 bp, Artificial
  probe
  misc_feature (1)..(25): SEQ ID NO: 3094; WAN024DSN; Start 70; Stop 94
gtagtagttgctagtcttgttatgg

SEQ ID NO: 346485 - DNA, 25 bp, Artificial
  probe
  misc_feature (1)..(25): SEQ ID NO: 3094; WAN024DSN; Start 862; Stop 886
aatgatgcgaagtcttcagattcta

SEQ ID NO: 346486 - DNA, 25 bp, Artificial
  probe
  misc_feature (1)..(25): SEQ ID NO: 3094; WAN024DSN; Start 863; Stop 887
atgatgcgaagtcttcagattctag

SEQ ID NO: 346487 - DNA, 25 bp, Artificial
  probe
  misc_feature (1)..(25): SEQ ID NO: 3094; WAN024DSN; Start 871; Stop 895
aagtcttcagattctagcgtaggtg

SEQ ID NO: 346488 - DNA, 25 bp, Artificial
  probe
  misc_feature (1)..(25): SEQ ID NO: 3094; WAN024DSN; Start 69; Stop 93
tgtagtagttgctagtcttgttatg

SEQ ID NO: 346489 - DNA, 25 bp, Artificial
  probe
  misc_feature (1)..(25): SEQ ID NO: 3094; WAN024DSN; Start 68; Stop 92
gtgtagtagttgctagtcttgttat

SEQ ID NO: 346490 - DNA, 25 bp, Artificial
  probe
  misc_feature (1)..(25): SEQ ID NO: 3094; WAN024DSN; Start 870; Stop 894
gaagtcttcagattctagcgtaggt

SEQ ID NO: 346491 - DNA, 25 bp, Artificial
  probe
  misc_feature (1)..(25): SEQ ID NO: 3094; WAN024DSN; Start 671; Stop 695
aggctacaaggttagaagaaatcaa

SEQ ID NO: 346492 - DNA, 25 bp, Artificial
  probe
  misc_feature (1)..(25): SEQ ID NO: 3094; WAN024DSN; Start 219; Stop 243
aatgttgagtgagatccaagaatat

SEQ ID NO: 346493 - DNA, 25 bp, Artificial
  probe
  misc_feature (1)..(25): SEQ ID NO: 3094; WAN024DSN; Start 670; Stop 694
gaggctacaaggttagaagaaatca

SEQ ID NO: 346494 - DNA, 25 bp, Artificial
  probe
  misc_feature (1)..(25): SEQ ID NO: 3094; WAN024DSN; Start 669; Stop 693
tgaggctacaaggttagaagaaatc

SEQ ID NO: 346495 - DNA, 25 bp, Artificial
  probe
  misc_feature (1)..(25): SEQ ID NO: 3094; WAN024DSN; Start 668; Stop 692
ctgaggctacaaggttagaagaaat

SEQ ID NO: 346496 - DNA, 25 bp, Artificial
  probe
  misc_feature (1)..(25): SEQ ID NO: 3094; WAN024DSN; Start 672; Stop 696
ggctacaaggttagaagaaatcaag

SEQ ID NO: 346497 - DNA, 25 bp, Artificial
  probe
  misc_feature (1)..(25): SEQ ID NO: 3094; WAN024DSN; Start 64; Stop 88
gctagtgtagtagttgctagtcttg

SEQ ID NO: 346498 - DNA, 25 bp, Artificial
  probe
  misc_feature (1)..(25): SEQ ID NO: 3094; WAN024DSN; Start 502; Stop 526
gatttccgtaactacccaaccaata

SEQ ID NO: 346499 - DNA, 25 bp, Artificial
  probe
  misc_feature (1)..(25): SEQ ID NO: 3094; WAN024DSN; Start 778; Stop 802
gtggatactaaagagcaaggtaaac

SEQ ID NO: 346500 - DNA, 25 bp, Artificial
  probe
  misc_feature (1)..(25): SEQ ID NO: 3094; WAN024DSN; Start 65; Stop 89
ctagtgtagtagttgctagtcttgt

SEQ ID NO: 346501 - DNA, 25 bp, Artificial
  probe
  misc_feature (1)..(25): SEQ ID NO: 3094; WAN024DSN; Start 503; Stop 527
atttccgtaactacccaaccaatac

SEQ ID NO: 346502 - DNA, 25 bp, Artificial
  probe
  misc_feature (1)..(25): SEQ ID NO: 3094; WAN024DSN; Start 506; Stop 530
tccgtaactacccaaccaatactta

SEQ ID NO: 346503 - DNA, 25 bp, Artificial
  probe
  misc_feature (1)..(25): SEQ ID NO: 3094; WAN024DSN; Start 935; Stop 959
aaagtcagacagaacataggaaaga

SEQ ID NO: 346504 - DNA, 25 bp, Artificial
  probe
  misc_feature (1)..(25): SEQ ID NO: 3094; WAN024DSN; Start 676; Stop 700
acaaggttagaagaaatcaagacag

SEQ ID NO: 346505 - DNA, 25 bp, Artificial
  probe
  misc_feature (1)..(25): SEQ ID NO: 3094; WAN024DSN; Start 496; Stop 520
gaagaagatttccgtaactacccaa

SEQ ID NO: 346506 - DNA, 25 bp, Artificial
  probe
  misc_feature (1)..(25): SEQ ID NO: 3094; WAN024DSN; Start 936; Stop 960
aagtcagacagaacataggaaagat

SEQ ID NO: 346507 - DNA, 25 bp, Artificial
  probe
  misc_feature (1)..(25): SEQ ID NO: 3094; WAN024DSN; Start 680; Stop 704
ggttagaagaaatcaagacagaacg

SEQ ID NO: 346508 - DNA, 25 bp, Artificial
  probe
  misc_feature (1)..(25): SEQ ID NO: 3094; WAN024DSN; Start 785; Stop 809
ctaaagagcaaggtaaaccaaagag

SEQ ID NO: 346509 - DNA, 25 bp, Artificial
  probe
  misc_feature (1)..(25): SEQ ID NO: 3094; WAN024DSN; Start 784; Stop 808
actaaagagcaaggtaaaccaaaga

SEQ ID NO: 346510 - DNA, 25 bp, Artificial
  probe
  misc_feature (1)..(25): SEQ ID NO: 3094; WAN024DSN; Start 673; Stop 697
gctacaaggttagaagaaatcaaga

SEQ ID NO: 346511 - DNA, 25 bp, Artificial
  probe
  misc_feature (1)..(25): SEQ ID NO: 3094; WAN024DSN; Start 916; Stop 940
tcccttaatatggcaaatgaaagtc

SEQ ID NO: 346512 - DNA, 25 bp, Artificial
  probe
  misc_feature (1)..(25): SEQ ID NO: 3094; WAN024DSN; Start 497; Stop 521
aagaagatttccgtaactacccaac

SEQ ID NO: 346513 - DNA, 25 bp, Artificial
  probe
  misc_feature (1)..(25): SEQ ID NO: 3094; WAN024DSN; Start 937; Stop 961
agtcagacagaacataggaaagatg

SEQ ID NO: 346514 - DNA, 25 bp, Artificial
  probe
  misc_feature (1)..(25): SEQ ID NO: 3094; WAN024DSN; Start 780; Stop 804
ggatactaaagagcaaggtaaacca

SEQ ID NO: 346515 - DNA, 25 bp, Artificial
  probe
  misc_feature (1)..(25): SEQ ID NO: 3095; WAN024DSF; Start 1421; Stop 1445
gcgtaccagatattaatcaggagaa

SEQ ID NO: 346516 - DNA, 25 bp, Artificial
  probe
  misc_feature (1)..(25): SEQ ID NO: 3095; WAN024DSF; Start 1419; Stop 1443
aagcgtaccagatattaatcaggag

SEQ ID NO: 346517 - DNA, 25 bp, Artificial
  probe
  misc_feature (1)..(25): SEQ ID NO: 3095; WAN024DSF; Start 1415; Stop 1439
aaccaagcgtaccagatattaatca

SEQ ID NO: 346518 - DNA, 25 bp, Artificial
  probe
  misc_feature (1)..(25): SEQ ID NO: 3095; WAN024DSF; Start 1418; Stop 1442
caagcgtaccagatattaatcagga

SEQ ID NO: 346519 - DNA, 25 bp, Artificial
  probe
  misc_feature (1)..(25): SEQ ID NO: 3095; WAN024DSF; Start 1416; Stop 1440
accaagcgtaccagatattaatcag

SEQ ID NO: 346520 - DNA, 25 bp, Artificial
  probe
  misc_feature (1)..(25): SEQ ID NO: 3095; WAN024DSF; Start 1420; Stop 1444
agcgtaccagatattaatcaggaga

SEQ ID NO: 346521 - DNA, 25 bp, Artificial
  probe
  misc_feature (1)..(25): SEQ ID NO: 3095; WAN024DSF; Start 1464; Stop 1488
tatagcaacatacatgagcaagatt

SEQ ID NO: 346522 - DNA, 25 bp, Artificial
  probe
  misc_feature (1)..(25): SEQ ID NO: 3095; WAN024DSF; Start 1229; Stop 1253
aagaagttgttgacaagagcaagaa

SEQ ID NO: 346523 - DNA, 25 bp, Artificial
  probe
  misc_feature (1)..(25): SEQ ID NO: 3095; WAN024DSF; Start 1417; Stop 1441
ccaagcgtaccagatattaatcagg

SEQ ID NO: 346524 - DNA, 25 bp, Artificial
  probe
  misc_feature (1)..(25): SEQ ID NO: 3095; WAN024DSF; Start 1230; Stop 1254
agaagttgttgacaagagcaagaag

SEQ ID NO: 346525 - DNA, 25 bp, Artificial
  probe
  misc_feature (1)..(25): SEQ ID NO: 3095; WAN024DSF; Start 1205; Stop 1229
ataatgagactagaacttatgcgaa

SEQ ID NO: 346526 - DNA, 25 bp, Artificial
  probe
  misc_feature (1)..(25): SEQ ID NO: 3095; WAN024DSF; Start 831; Stop 855
tatggatgctaagaaagttgtggaa

SEQ ID NO: 346527 - DNA, 25 bp, Artificial
  probe
  misc_feature (1)..(25): SEQ ID NO: 3095; WAN024DSF; Start 830; Stop 854
ttatggatgctaagaaagttgtgga

SEQ ID NO: 346528 - DNA, 25 bp, Artificial
  probe
  misc_feature (1)..(25): SEQ ID NO: 3095; WAN024DSF; Start 655; Stop 679
ttagataactcaaccaaagaaacgc

SEQ ID NO: 346529 - DNA, 25 bp, Artificial
  probe
  misc_feature (1)..(25): SEQ ID NO: 3095; WAN024DSF; Start 83; Stop 107
gtttgttcttaggaggagtagttca

SEQ ID NO: 346530 - DNA, 25 bp, Artificial
  probe
  misc_feature (1)..(25): SEQ ID NO: 3095; WAN024DSF; Start 526; Stop 550
gctcaagtccaaatacctcaagata

SEQ ID NO: 346531 - DNA, 25 bp, Artificial
  probe
  misc_feature (1)..(25): SEQ ID NO: 3095; WAN024DSF; Start 82; Stop 106
agtttgttcttaggaggagtagttc

SEQ ID NO: 346532 - DNA, 25 bp, Artificial
  probe
  misc_feature (1)..(25): SEQ ID NO: 3095; WAN024DSF; Start 1265; Stop 1289
agacagcagtgacaatggatgaatt

SEQ ID NO: 346533 - DNA, 25 bp, Artificial
  probe
  misc_feature (1)..(25): SEQ ID NO: 3095; WAN024DSF; Start 835; Stop 859
gatgctaagaaagttgtggaagaat

SEQ ID NO: 346534 - DNA, 25 bp, Artificial
  probe
  misc_feature (1)..(25): SEQ ID NO: 3095; WAN024DSF; Start 736; Stop 760
gaaacgatagacaaagcgaaagaaa

SEQ ID NO: 346535 - DNA, 25 bp, Artificial
  probe
  misc_feature (1)..(25): SEQ ID NO: 3095; WAN024DSF; Start 737; Stop 761
aaacgatagacaaagcgaaagaaac

SEQ ID NO: 346536 - DNA, 25 bp, Artificial
  probe
  misc_feature (1)..(25): SEQ ID NO: 3095; WAN024DSF; Start 837; Stop 861
tgctaagaaagttgtggaagaatac

SEQ ID NO: 346537 - DNA, 25 bp, Artificial
  probe
  misc_feature (1)..(25): SEQ ID NO: 3095; WAN024DSF; Start 732; Stop 756
taaggaaacgatagacaaagcgaaa

SEQ ID NO: 346538 - DNA, 25 bp, Artificial
  probe
  misc_feature (1)..(25): SEQ ID NO: 3095; WAN024DSF; Start 110; Stop 134
cagaagaggttagaagagggaataa

SEQ ID NO: 346539 - DNA, 25 bp, Artificial
  probe
  misc_feature (1)..(25): SEQ ID NO: 3095; WAN024DSF; Start 1463; Stop 1487
ctatagcaacatacatgagcaagat

SEQ ID NO: 346540 - DNA, 25 bp, Artificial
  probe
  misc_feature (1)..(25): SEQ ID NO: 3095; WAN024DSF; Start 731; Stop 755
ttaaggaaacgatagacaaagcgaa

SEQ ID NO: 346541 - DNA, 25 bp, Artificial
  probe
  misc_feature (1)..(25): SEQ ID NO: 3095; WAN024DSF; Start 527; Stop 551
ctcaagtccaaatacctcaagatac

SEQ ID NO: 346542 - DNA, 25 bp, Artificial
  probe
  misc_feature (1)..(25): SEQ ID NO: 3095; WAN024DSF; Start 751; Stop 775
gcgaaagaaactctgtctacctata

SEQ ID NO: 346543 - DNA, 25 bp, Artificial
  probe
  misc_feature (1)..(25): SEQ ID NO: 3095; WAN024DSF; Start 741; Stop 765
gatagacaaagcgaaagaaactctg

SEQ ID NO: 346544 - DNA, 25 bp, Artificial
  probe
  misc_feature (1)..(25): SEQ ID NO: 3095; WAN024DSF; Start 834; Stop 858
ggatgctaagaaagttgtggaagaa

SEQ ID NO: 346545 - DNA, 25 bp, Artificial
  probe
  misc_feature (1)..(25): SEQ ID NO: 3095; WAN024DSF; Start 1136; Stop 1160
acaaactagacgatgaaacaaagac

SEQ ID NO: 346546 - DNA, 25 bp, Artificial
  probe
  misc_feature (1)..(25): SEQ ID NO: 3095; WAN024DSF; Start 1131; Stop 1155
cttgaacaaactagacgatgaaaca

SEQ ID NO: 346547 - DNA, 25 bp, Artificial
  probe
  misc_feature (1)..(25): SEQ ID NO: 3095; WAN024DSF; Start 79; Stop 103
gctagtttgttcttaggaggagtag

SEQ ID NO: 346548 - DNA, 25 bp, Artificial
  probe
  misc_feature (1)..(25): SEQ ID NO: 3096; WAN024DSM; Start 187; Stop 211
atcaatatagaacgagataaggcaa

SEQ ID NO: 346549 - DNA, 25 bp, Artificial
  probe
  misc_feature (1)..(25): SEQ ID NO: 3096; WAN024DSM; Start 186; Stop 210
aatcaatatagaacgagataaggca

SEQ ID NO: 346550 - DNA, 25 bp, Artificial
  probe
  misc_feature (1)..(25): SEQ ID NO: 3096; WAN024DSM; Start 862; Stop 886
gaacaacaagctgaagaagactatg

SEQ ID NO: 346551 - DNA, 25 bp, Artificial
  probe
  misc_feature (1)..(25): SEQ ID NO: 3096; WAN024DSM; Start 542; Stop 566
agaaggttgaagaagctaagaagaa

SEQ ID NO: 346552 - DNA, 25 bp, Artificial
  probe
  misc_feature (1)..(25): SEQ ID NO: 3096; WAN024DSM; Start 541; Stop 565
aagaaggttgaagaagctaagaaga

SEQ ID NO: 346553 - DNA, 25 bp, Artificial
  probe
  misc_feature (1)..(25): SEQ ID NO: 3096; WAN024DSM; Start 861; Stop 885
tgaacaacaagctgaagaagactat

SEQ ID NO: 346554 - DNA, 25 bp, Artificial
  probe
  misc_feature (1)..(25): SEQ ID NO: 3096; WAN024DSM; Start 540; Stop 564
gaagaaggttgaagaagctaagaag

SEQ ID NO: 346555 - DNA, 25 bp, Artificial
  probe
  misc_feature (1)..(25): SEQ ID NO: 3096; WAN024DSM; Start 860; Stop 884
ctgaacaacaagctgaagaagacta

SEQ ID NO: 346556 - DNA, 25 bp, Artificial
  probe
  misc_feature (1)..(25): SEQ ID NO: 3096; WAN024DSM; Start 168; Stop 192
tcagacagaacaaggagaaatcaat

SEQ ID NO: 346557 - DNA, 25 bp, Artificial
  probe
  misc_feature (1)..(25): SEQ ID NO: 3096; WAN024DSM; Start 193; Stop 217
atagaacgagataaggcaaagacag

SEQ ID NO: 346558 - DNA, 25 bp, Artificial
  probe
  misc_feature (1)..(25): SEQ ID NO: 3096; WAN024DSM; Start 192; Stop 216
tatagaacgagataaggcaaagaca

SEQ ID NO: 346559 - DNA, 25 bp, Artificial
  probe
  misc_feature (1)..(25): SEQ ID NO: 3096; WAN024DSM; Start 214; Stop 238
acagcggtcagtgaatataaagaaa

SEQ ID NO: 346560 - DNA, 25 bp, Artificial
  probe
  misc_feature (1)..(25): SEQ ID NO: 3096; WAN024DSM; Start 164; Stop 188
aaagtcagacagaacaaggagaaat

SEQ ID NO: 346561 - DNA, 25 bp, Artificial
  probe
  misc_feature (1)..(25): SEQ ID NO: 3096; WAN024DSM; Start 589; Stop 613
gattaccgtaactacccaaccatta

SEQ ID NO: 346562 - DNA, 25 bp, Artificial
  probe
  misc_feature (1)..(25): SEQ ID NO: 3096; WAN024DSM; Start 583; Stop 607
gaagaagattaccgtaactacccaa

SEQ ID NO: 346563 - DNA, 25 bp, Artificial
  probe
  misc_feature (1)..(25): SEQ ID NO: 3096; WAN024DSM; Start 863; Stop 887
aacaacaagctgaagaagactatgc

SEQ ID NO: 346564 - DNA, 25 bp, Artificial
  probe
  misc_feature (1)..(25): SEQ ID NO: 3096; WAN024DSM; Start 584; Stop 608
aagaagattaccgtaactacccaac

SEQ ID NO: 346565 - DNA, 25 bp, Artificial
  probe
  misc_feature (1)..(25): SEQ ID NO: 3096; WAN024DSM; Start 165; Stop 189
aagtcagacagaacaaggagaaatc

SEQ ID NO: 346566 - DNA, 25 bp, Artificial
  probe
  misc_feature (1)..(25): SEQ ID NO: 3096; WAN024DSM; Start 169; Stop 193
cagacagaacaaggagaaatcaata

SEQ ID NO: 346567 - DNA, 25 bp, Artificial
  probe
  misc_feature (1)..(25): SEQ ID NO: 3096; WAN024DSM; Start 733; Stop 757
aaagcgaaagttgagagtgaagaaa

SEQ ID NO: 346568 - DNA, 25 bp, Artificial
  probe
  misc_feature (1)..(25): SEQ ID NO: 3096; WAN024DSM; Start 582; Stop 606
agaagaagattaccgtaactaccca

SEQ ID NO: 346569 - DNA, 25 bp, Artificial
  probe
  misc_feature (1)..(25): SEQ ID NO: 3096; WAN024DSM; Start 167; Stop 191
gtcagacagaacaaggagaaatcaa

SEQ ID NO: 346570 - DNA, 25 bp, Artificial
  probe
  misc_feature (1)..(25): SEQ ID NO: 3096; WAN024DSM; Start 754; Stop 778
gaaactgaggctacaaggttagaaa

SEQ ID NO: 346571 - DNA, 25 bp, Artificial
  probe
  misc_feature (1)..(25): SEQ ID NO: 3096; WAN024DSM; Start 751; Stop 775
gaagaaactgaggctacaaggttag

SEQ ID NO: 346572 - DNA, 25 bp, Artificial
  probe
  misc_feature (1)..(25): SEQ ID NO: 3096; WAN024DSM; Start 366; Stop 390
cgaaatacagggacttattacaaca

SEQ ID NO: 346573 - DNA, 25 bp, Artificial
  probe
  misc_feature (1)..(25): SEQ ID NO: 3096; WAN024DSM; Start 753; Stop 777
agaaactgaggctacaaggttagaa

SEQ ID NO: 346574 - DNA, 25 bp, Artificial
  probe
  misc_feature (1)..(25): SEQ ID NO: 3096; WAN024DSM; Start 752; Stop 776
aagaaactgaggctacaaggttaga

SEQ ID NO: 346575 - DNA, 25 bp, Artificial
  probe
  misc_feature (1)..(25): SEQ ID NO: 3096; WAN024DSM; Start 191; Stop 215
atatagaacgagataaggcaaagac

SEQ ID NO: 346576 - DNA, 25 bp, Artificial
  probe
  misc_feature (1)..(25): SEQ ID NO: 3096; WAN024DSM; Start 588; Stop 612
agattaccgtaactacccaaccatt

SEQ ID NO: 346577 - DNA, 25 bp, Artificial
  probe
  misc_feature (1)..(25): SEQ ID NO: 3096; WAN024DSM; Start 587; Stop 611
aagattaccgtaactacccaaccat

SEQ ID NO: 346578 - DNA, 25 bp, Artificial
  probe
  misc_feature (1)..(25): SEQ ID NO: 3096; WAN024DSM; Start 166; Stop 190
agtcagacagaacaaggagaaatca

SEQ ID NO: 346579 - DNA, 25 bp, Artificial
  probe
  misc_feature (1)..(25): SEQ ID NO: 3096; WAN024DSM; Start 750; Stop 774
tgaagaaactgaggctacaaggtta

SEQ ID NO: 346580 - DNA, 25 bp, Artificial
  probe
  misc_feature (1)..(25): SEQ ID NO: 3096; WAN024DSM; Start 580; Stop 604
aaagaagaagattaccgtaactacc

SEQ ID NO: 346581 - DNA, 25 bp, Artificial
  probe
  misc_feature (1)..(25): SEQ ID NO: 3097; WAN024DSQ; Start 349; Stop 373
gaacaagctgagactacaaggttaa

SEQ ID NO: 346582 - DNA, 25 bp, Artificial
  probe
  misc_feature (1)..(25): SEQ ID NO: 3097; WAN024DSQ; Start 348; Stop 372
tgaacaagctgagactacaaggtta

SEQ ID NO: 346583 - DNA, 25 bp, Artificial
  probe
  misc_feature (1)..(25): SEQ ID NO: 3097; WAN024DSQ; Start 378; Stop 402
aatcaagacagatcgtgaagaagct

SEQ ID NO: 346584 - DNA, 25 bp, Artificial
  probe
  misc_feature (1)..(25): SEQ ID NO: 3097; WAN024DSQ; Start 50; Stop 74
ttagtgttggagtagctagtgtagt

SEQ ID NO: 346585 - DNA, 25 bp, Artificial
  probe
  misc_feature (1)..(25): SEQ ID NO: 3097; WAN024DSQ; Start 377; Stop 401
aaatcaagacagatcgtgaagaagc

SEQ ID NO: 346586 - DNA, 25 bp, Artificial
  probe
  misc_feature (1)..(25): SEQ ID NO: 3097; WAN024DSQ; Start 350; Stop 374
aacaagctgagactacaaggttaaa

SEQ ID NO: 346587 - DNA, 25 bp, Artificial
  probe
  misc_feature (1)..(25): SEQ ID NO: 3097; WAN024DSQ; Start 379; Stop 403
atcaagacagatcgtgaagaagctg

SEQ ID NO: 346588 - DNA, 25 bp, Artificial
  probe
  misc_feature (1)..(25): SEQ ID NO: 3097; WAN024DSQ; Start 273; Stop 297
gagcagaattcaaacggagtatttc

SEQ ID NO: 346589 - DNA, 25 bp, Artificial
  probe
  misc_feature (1)..(25): SEQ ID NO: 3097; WAN024DSQ; Start 381; Stop 405
caagacagatcgtgaagaagctgag

SEQ ID NO: 346590 - DNA, 25 bp, Artificial
  probe
  misc_feature (1)..(25): SEQ ID NO: 3097; WAN024DSQ; Start 47; Stop 71
aatttagtgttggagtagctagtgt

SEQ ID NO: 346591 - DNA, 25 bp, Artificial
  probe
  misc_feature (1)..(25): SEQ ID NO: 3097; WAN024DSQ; Start 49; Stop 73
tttagtgttggagtagctagtgtag

SEQ ID NO: 346592 - DNA, 25 bp, Artificial
  probe
  misc_feature (1)..(25): SEQ ID NO: 3097; WAN024DSQ; Start 393; Stop 417
tgaagaagctgagctaaaggttaaa

SEQ ID NO: 346593 - DNA, 25 bp, Artificial
  probe
  misc_feature (1)..(25): SEQ ID NO: 3097; WAN024DSQ; Start 48; Stop 72
atttagtgttggagtagctagtgta

SEQ ID NO: 346594 - DNA, 25 bp, Artificial
  probe
  misc_feature (1)..(25): SEQ ID NO: 3097; WAN024DSQ; Start 46; Stop 70
aaatttagtgttggagtagctagtg

SEQ ID NO: 346595 - DNA, 25 bp, Artificial
  probe
  misc_feature (1)..(25): SEQ ID NO: 3097; WAN024DSQ; Start 272; Stop 296
tgagcagaattcaaacggagtattt

SEQ ID NO: 346596 - DNA, 25 bp, Artificial
  probe
  misc_feature (1)..(25): SEQ ID NO: 3097; WAN024DSQ; Start 42; Stop 66
tcgtaaatttagtgttggagtagct

SEQ ID NO: 346597 - DNA, 25 bp, Artificial
  probe
  misc_feature (1)..(25): SEQ ID NO: 3097; WAN024DSQ; Start 392; Stop 416
gtgaagaagctgagctaaaggttaa

SEQ ID NO: 346598 - DNA, 25 bp, Artificial
  probe
  misc_feature (1)..(25): SEQ ID NO: 3097; WAN024DSQ; Start 380; Stop 404
tcaagacagatcgtgaagaagctga

SEQ ID NO: 346599 - DNA, 25 bp, Artificial
  probe
  misc_feature (1)..(25): SEQ ID NO: 3097; WAN024DSQ; Start 41; Stop 65
ttcgtaaatttagtgttggagtagc

SEQ ID NO: 346600 - DNA, 25 bp, Artificial
  probe
  misc_feature (1)..(25): SEQ ID NO: 3097; WAN024DSQ; Start 376; Stop 400
aaaatcaagacagatcgtgaagaag

SEQ ID NO: 346601 - DNA, 25 bp, Artificial
  probe
  misc_feature (1)..(25): SEQ ID NO: 3097; WAN024DSQ; Start 43; Stop 67
cgtaaatttagtgttggagtagcta

SEQ ID NO: 346602 - DNA, 25 bp, Artificial
  probe
  misc_feature (1)..(25): SEQ ID NO: 3097; WAN024DSQ; Start 351; Stop 375
acaagctgagactacaaggttaaaa

SEQ ID NO: 346603 - DNA, 25 bp, Artificial
  probe
  misc_feature (1)..(25): SEQ ID NO: 3097; WAN024DSQ; Start 306; Stop 330
aaagaagttgaaagctgagttggca

SEQ ID NO: 346604 - DNA, 25 bp, Artificial
  probe
  misc_feature (1)..(25): SEQ ID NO: 3097; WAN024DSQ; Start 308; Stop 332
agaagttgaaagctgagttggcaaa

SEQ ID NO: 346605 - DNA, 25 bp, Artificial
  probe
  misc_feature (1)..(25): SEQ ID NO: 3097; WAN024DSQ; Start 307; Stop 331
aagaagttgaaagctgagttggcaa

SEQ ID NO: 346606 - DNA, 25 bp, Artificial
  probe
  misc_feature (1)..(25): SEQ ID NO: 3097; WAN024DSQ; Start 385; Stop 409
acagatcgtgaagaagctgagctaa

SEQ ID NO: 346607 - DNA, 25 bp, Artificial
  probe
  misc_feature (1)..(25): SEQ ID NO: 3097; WAN024DSQ; Start 275; Stop 299
gcagaattcaaacggagtatttcta

SEQ ID NO: 346608 - DNA, 25 bp, Artificial
  probe
  misc_feature (1)..(25): SEQ ID NO: 3097; WAN024DSQ; Start 274; Stop 298
agcagaattcaaacggagtatttct

SEQ ID NO: 346609 - DNA, 25 bp, Artificial
  probe
  misc_feature (1)..(25): SEQ ID NO: 3097; WAN024DSQ; Start 387; Stop 411
agatcgtgaagaagctgagctaaag

SEQ ID NO: 346610 - DNA, 25 bp, Artificial
  probe
  misc_feature (1)..(25): SEQ ID NO: 3097; WAN024DSQ; Start 38; Stop 62
caattcgtaaatttagtgttggagt

SEQ ID NO: 346611 - DNA, 25 bp, Artificial
  probe
  misc_feature (1)..(25): SEQ ID NO: 3097; WAN024DSQ; Start 45; Stop 69
taaatttagtgttggagtagctagt

SEQ ID NO: 346612 - DNA, 25 bp, Artificial
  probe
  misc_feature (1)..(25): SEQ ID NO: 3097; WAN024DSQ; Start 391; Stop 415
cgtgaagaagctgagctaaaggtta

SEQ ID NO: 346613 - DNA, 25 bp, Artificial
  probe
  misc_feature (1)..(25): SEQ ID NO: 3097; WAN024DSQ; Start 37; Stop 61
tcaattcgtaaatttagtgttggag

SEQ ID NO: 346614 - DNA, 25 bp, Artificial
  probe
  misc_feature (1)..(25): SEQ ID NO: 3098; WAN024COQ; Start 37; Stop 61
gaagtaacaaatacgaggacaaccc

SEQ ID NO: 346615 - DNA, 25 bp, Artificial
  probe
  misc_feature (1)..(25): SEQ ID NO: 3098; WAN024COQ; Start 4; Stop 28
tttggaataagcgtgaaacagagtt

SEQ ID NO: 346616 - DNA, 25 bp, Artificial
  probe
  misc_feature (1)..(25): SEQ ID NO: 3098; WAN024COQ; Start 36; Stop 60
cgaagtaacaaatacgaggacaacc

SEQ ID NO: 346617 - DNA, 25 bp, Artificial
  probe
  misc_feature (1)..(25): SEQ ID NO: 3098; WAN024COQ; Start 29; Stop 53
tacatggcgaagtaacaaatacgag

SEQ ID NO: 346618 - DNA, 25 bp, Artificial
  probe
  misc_feature (1)..(25): SEQ ID NO: 3098; WAN024COQ; Start 40; Stop 64
gtaacaaatacgaggacaaccctac

SEQ ID NO: 346619 - DNA, 25 bp, Artificial
  probe
  misc_feature (1)..(25): SEQ ID NO: 3098; WAN024COQ; Start 39; Stop 63
agtaacaaatacgaggacaacccta

SEQ ID NO: 346620 - DNA, 25 bp, Artificial
  probe
  misc_feature (1)..(25): SEQ ID NO: 3098; WAN024COQ; Start 35; Stop 59
gcgaagtaacaaatacgaggacaac

SEQ ID NO: 346621 - DNA, 25 bp, Artificial
  probe
  misc_feature (1)..(25): SEQ ID NO: 3098; WAN024COQ; Start 27; Stop 51
tttacatggcgaagtaacaaatacg

SEQ ID NO: 346622 - DNA, 25 bp, Artificial
  probe
  misc_feature (1)..(25): SEQ ID NO: 3098; WAN024COQ; Start 24; Stop 48
gagtttacatggcgaagtaacaaat

SEQ ID NO: 346623 - DNA, 25 bp, Artificial
  probe
  misc_feature (1)..(25): SEQ ID NO: 3098; WAN024COQ; Start 38; Stop 62
aagtaacaaatacgaggacaaccct

SEQ ID NO: 346624 - DNA, 25 bp, Artificial
  probe
  misc_feature (1)..(25): SEQ ID NO: 3098; WAN024COQ; Start 28; Stop 52
ttacatggcgaagtaacaaatacga

SEQ ID NO: 346625 - DNA, 25 bp, Artificial
  probe
  misc_feature (1)..(25): SEQ ID NO: 3098; WAN024COQ; Start 26; Stop 50
gtttacatggcgaagtaacaaatac

SEQ ID NO: 346626 - DNA, 25 bp, Artificial
  probe
  misc_feature (1)..(25): SEQ ID NO: 3098; WAN024COQ; Start 23; Stop 47
agagtttacatggcgaagtaacaaa

SEQ ID NO: 346627 - DNA, 25 bp, Artificial
  probe
  misc_feature (1)..(25): SEQ ID NO: 3098; WAN024COQ; Start 25; Stop 49
agtttacatggcgaagtaacaaata

SEQ ID NO: 346628 - DNA, 25 bp, Artificial
  probe
  misc_feature (1)..(25): SEQ ID NO: 3098; WAN024COQ; Start 32; Stop 56
atggcgaagtaacaaatacgaggac

SEQ ID NO: 346629 - DNA, 25 bp, Artificial
  probe
  misc_feature (1)..(25): SEQ ID NO: 3098; WAN024COQ; Start 8; Stop 32
gaataagcgtgaaacagagtttaca

SEQ ID NO: 346630 - DNA, 25 bp, Artificial
  probe
  misc_feature (1)..(25): SEQ ID NO: 3098; WAN024COQ; Start 41; Stop 65
taacaaatacgaggacaaccctacg

SEQ ID NO: 346631 - DNA, 25 bp, Artificial
  probe
  misc_feature (1)..(25): SEQ ID NO: 3098; WAN024COQ; Start 22; Stop 46
cagagtttacatggcgaagtaacaa

SEQ ID NO: 346632 - DNA, 25 bp, Artificial
  probe
  misc_feature (1)..(25): SEQ ID NO: 3098; WAN024COQ; Start 20; Stop 44
aacagagtttacatggcgaagtaac

SEQ ID NO: 346633 - DNA, 25 bp, Artificial
  probe
  misc_feature (1)..(25): SEQ ID NO: 3098; WAN024COQ; Start 7; Stop 31
ggaataagcgtgaaacagagtttac

SEQ ID NO: 346634 - DNA, 25 bp, Artificial
  probe
  misc_feature (1)..(25): SEQ ID NO: 3098; WAN024COQ; Start 9; Stop 33
aataagcgtgaaacagagtttacat

SEQ ID NO: 346635 - DNA, 25 bp, Artificial
  probe
  misc_feature (1)..(25): SEQ ID NO: 3098; WAN024COQ; Start 6; Stop 30
tggaataagcgtgaaacagagttta

SEQ ID NO: 346636 - DNA, 25 bp, Artificial
  probe
  misc_feature (1)..(25): SEQ ID NO: 3098; WAN024COQ; Start 34; Stop 58
ggcgaagtaacaaatacgaggacaa

SEQ ID NO: 346637 - DNA, 25 bp, Artificial
  probe
  misc_feature (1)..(25): SEQ ID NO: 3098; WAN024COQ; Start 10; Stop 34
ataagcgtgaaacagagtttacatg

SEQ ID NO: 346638 - DNA, 25 bp, Artificial
  probe
  misc_feature (1)..(25): SEQ ID NO: 3098; WAN024COQ; Start 5; Stop 29
ttggaataagcgtgaaacagagttt

SEQ ID NO: 346639 - DNA, 25 bp, Artificial
  probe
  misc_feature (1)..(25): SEQ ID NO: 3098; WAN024COQ; Start 19; Stop 43
aaacagagtttacatggcgaagtaa

SEQ ID NO: 346640 - DNA, 25 bp, Artificial
  probe
  misc_feature (1)..(25): SEQ ID NO: 3098; WAN024COQ; Start 31; Stop 55
catggcgaagtaacaaatacgagga

SEQ ID NO: 346641 - DNA, 25 bp, Artificial
  probe
  misc_feature (1)..(25): SEQ ID NO: 3098; WAN024COQ; Start 18; Stop 42
gaaacagagtttacatggcgaagta

SEQ ID NO: 346642 - DNA, 25 bp, Artificial
  probe
  misc_feature (1)..(25): SEQ ID NO: 3098; WAN024COQ; Start 11; Stop 35
taagcgtgaaacagagtttacatgg

SEQ ID NO: 346643 - DNA, 25 bp, Artificial
  probe
  misc_feature (1)..(25): SEQ ID NO: 3098; WAN024COQ; Start 21; Stop 45
acagagtttacatggcgaagtaaca

SEQ ID NO: 346644 - DNA, 25 bp, Artificial
  probe
  misc_feature (1)..(25): SEQ ID NO: 3098; WAN024COQ; Start 3; Stop 27
gtttggaataagcgtgaaacagagt

SEQ ID NO: 346645 - DNA, 25 bp, Artificial
  probe
  misc_feature (1)..(25): SEQ ID NO: 3098; WAN024COQ; Start 30; Stop 54
acatggcgaagtaacaaatacgagg

SEQ ID NO: 346646 - DNA, 25 bp, Artificial
  probe
  misc_feature (1)..(25): SEQ ID NO: 3098; WAN024COQ; Start 33; Stop 57
tggcgaagtaacaaatacgaggaca

SEQ ID NO: 346647 - DNA, 25 bp, Artificial
  probe
  misc_feature (1)..(25): SEQ ID NO: 3099; WAN024DKP; Start 287; Stop 311
caggcgaagtgcttgattaactaat

SEQ ID NO: 346648 - DNA, 25 bp, Artificial
  probe
  misc_feature (1)..(25): SEQ ID NO: 3099; WAN024DKP; Start 286; Stop 310
tcaggcgaagtgcttgattaactaa

SEQ ID NO: 346649 - DNA, 25 bp, Artificial
  probe
  misc_feature (1)..(25): SEQ ID NO: 3099; WAN024DKP; Start 88; Stop 112
gtaaacaaagttatcgttgaaggtg

SEQ ID NO: 346650 - DNA, 25 bp, Artificial
  probe
  misc_feature (1)..(25): SEQ ID NO: 3099; WAN024DKP; Start 87; Stop 111
agtaaacaaagttatcgttgaaggt

SEQ ID NO: 346651 - DNA, 25 bp, Artificial
  probe
  misc_feature (1)..(25): SEQ ID NO: 3099; WAN024DKP; Start 92; Stop 116
acaaagttatcgttgaaggtgttaa

SEQ ID NO: 346652 - DNA, 25 bp, Artificial
  probe
  misc_feature (1)..(25): SEQ ID NO: 3099; WAN024DKP; Start 89; Stop 113
taaacaaagttatcgttgaaggtgt

SEQ ID NO: 346653 - DNA, 25 bp, Artificial
  probe
  misc_feature (1)..(25): SEQ ID NO: 3099; WAN024DKP; Start 86; Stop 110
aagtaaacaaagttatcgttgaagg

SEQ ID NO: 346654 - DNA, 25 bp, Artificial
  probe
  misc_feature (1)..(25): SEQ ID NO: 3099; WAN024DKP; Start 165; Stop 189
tatcatcgagaaagaagcagctatc

SEQ ID NO: 346655 - DNA, 25 bp, Artificial
  probe
  misc_feature (1)..(25): SEQ ID NO: 3099; WAN024DKP; Start 164; Stop 188
gtatcatcgagaaagaagcagctat

SEQ ID NO: 346656 - DNA, 25 bp, Artificial
  probe
  misc_feature (1)..(25): SEQ ID NO: 3099; WAN024DKP; Start 157; Stop 181
caaggtggtatcatcgagaaagaag

SEQ ID NO: 346657 - DNA, 25 bp, Artificial
  probe
  misc_feature (1)..(25): SEQ ID NO: 3099; WAN024DKP; Start 156; Stop 180
tcaaggtggtatcatcgagaaagaa

SEQ ID NO: 346658 - DNA, 25 bp, Artificial
  probe
  misc_feature (1)..(25): SEQ ID NO: 3099; WAN024DKP; Start 285; Stop 309
atcaggcgaagtgcttgattaacta

SEQ ID NO: 346659 - DNA, 25 bp, Artificial
  probe
  misc_feature (1)..(25): SEQ ID NO: 3099; WAN024DKP; Start 152; Stop 176
ttcctcaaggtggtatcatcgagaa

SEQ ID NO: 346660 - DNA, 25 bp, Artificial
  probe
  misc_feature (1)..(25): SEQ ID NO: 3099; WAN024DKP; Start 163; Stop 187
ggtatcatcgagaaagaagcagcta

SEQ ID NO: 346661 - DNA, 25 bp, Artificial
  probe
  misc_feature (1)..(25): SEQ ID NO: 3099; WAN024DKP; Start 151; Stop 175
cttcctcaaggtggtatcatcgaga

SEQ ID NO: 346662 - DNA, 25 bp, Artificial
  probe
  misc_feature (1)..(25): SEQ ID NO: 3099; WAN024DKP; Start 155; Stop 179
ctcaaggtggtatcatcgagaaaga

SEQ ID NO: 346663 - DNA, 25 bp, Artificial
  probe
  misc_feature (1)..(25): SEQ ID NO: 3099; WAN024DKP; Start 76; Stop 100
gcccttccaaaagtaaacaaagtta

SEQ ID NO: 346664 - DNA, 25 bp, Artificial
  probe
  misc_feature (1)..(25): SEQ ID NO: 3099; WAN024DKP; Start 166; Stop 190
atcatcgagaaagaagcagctatcc

SEQ ID NO: 346665 - DNA, 25 bp, Artificial
  probe
  misc_feature (1)..(25): SEQ ID NO: 3099; WAN024DKP; Start 176; Stop 200
aagaagcagctatccacgtatcaaa

SEQ ID NO: 346666 - DNA, 25 bp, Artificial
  probe
  misc_feature (1)..(25): SEQ ID NO: 3099; WAN024DKP; Start 175; Stop 199
aaagaagcagctatccacgtatcaa

SEQ ID NO: 346667 - DNA, 25 bp, Artificial
  probe
  misc_feature (1)..(25): SEQ ID NO: 3099; WAN024DKP; Start 158; Stop 182
aaggtggtatcatcgagaaagaagc

SEQ ID NO: 346668 - DNA, 25 bp, Artificial
  probe
  misc_feature (1)..(25): SEQ ID NO: 3099; WAN024DKP; Start 85; Stop 109
aaagtaaacaaagttatcgttgaag

SEQ ID NO: 346669 - DNA, 25 bp, Artificial
  probe
  misc_feature (1)..(25): SEQ ID NO: 3099; WAN024DKP; Start 173; Stop 197
agaaagaagcagctatccacgtatc

SEQ ID NO: 346670 - DNA, 25 bp, Artificial
  probe
  misc_feature (1)..(25): SEQ ID NO: 3099; WAN024DKP; Start 172; Stop 196
gagaaagaagcagctatccacgtat

SEQ ID NO: 346671 - DNA, 25 bp, Artificial
  probe
  misc_feature (1)..(25): SEQ ID NO: 3099; WAN024DKP; Start 144; Stop 168
taacgagcttcctcaaggtggtatc

SEQ ID NO: 346672 - DNA, 25 bp, Artificial
  probe
  misc_feature (1)..(25): SEQ ID NO: 3099; WAN024DKP; Start 143; Stop 167
ctaacgagcttcctcaaggtggtat

SEQ ID NO: 346673 - DNA, 25 bp, Artificial
  probe
  misc_feature (1)..(25): SEQ ID NO: 3099; WAN024DKP; Start 174; Stop 198
gaaagaagcagctatccacgtatca

SEQ ID NO: 346674 - DNA, 25 bp, Artificial
  probe
  misc_feature (1)..(25): SEQ ID NO: 3099; WAN024DKP; Start 75; Stop 99
tgcccttccaaaagtaaacaaagtt

SEQ ID NO: 346675 - DNA, 25 bp, Artificial
  probe
  misc_feature (1)..(25): SEQ ID NO: 3099; WAN024DKP; Start 90; Stop 114
aaacaaagttatcgttgaaggtgtt

SEQ ID NO: 346676 - DNA, 25 bp, Artificial
  probe
  misc_feature (1)..(25): SEQ ID NO: 3099; WAN024DKP; Start 154; Stop 178
cctcaaggtggtatcatcgagaaag

SEQ ID NO: 346677 - DNA, 25 bp, Artificial
  probe
  misc_feature (1)..(25): SEQ ID NO: 3099; WAN024DKP; Start 177; Stop 201
agaagcagctatccacgtatcaaac

SEQ ID NO: 346678 - DNA, 25 bp, Artificial
  probe
  misc_feature (1)..(25): SEQ ID NO: 3099; WAN024DKP; Start 91; Stop 115
aacaaagttatcgttgaaggtgtta

SEQ ID NO: 346679 - DNA, 25 bp, Artificial
  probe
  misc_feature (1)..(25): SEQ ID NO: 3099; WAN024DKP; Start 74; Stop 98
ctgcccttccaaaagtaaacaaagt

SEQ ID NO: 346680 - DNA, 25 bp, Artificial
  probe
  misc_feature (1)..(25): SEQ ID NO: 3100; WAN024FQB; Start 122; Stop 146
cagatgattctcctctattatgcga

SEQ ID NO: 346681 - DNA, 25 bp, Artificial
  probe
  misc_feature (1)..(25): SEQ ID NO: 3100; WAN024FQB; Start 121; Stop 145
acagatgattctcctctattatgcg

SEQ ID NO: 346682 - DNA, 25 bp, Artificial
  probe
  misc_feature (1)..(25): SEQ ID NO: 3100; WAN024FQB; Start 114; Stop 138
tggttctacagatgattctcctcta

SEQ ID NO: 346683 - DNA, 25 bp, Artificial
  probe
  misc_feature (1)..(25): SEQ ID NO: 3100; WAN024FQB; Start 112; Stop 136
gatggttctacagatgattctcctc

SEQ ID NO: 346684 - DNA, 25 bp, Artificial
  probe
  misc_feature (1)..(25): SEQ ID NO: 3100; WAN024FQB; Start 110; Stop 134
atgatggttctacagatgattctcc

SEQ ID NO: 346685 - DNA, 25 bp, Artificial
  probe
  misc_feature (1)..(25): SEQ ID NO: 3100; WAN024FQB; Start 113; Stop 137
atggttctacagatgattctcctct

SEQ ID NO: 346686 - DNA, 25 bp, Artificial
  probe
  misc_feature (1)..(25): SEQ ID NO: 3100; WAN024FQB; Start 131; Stop 155
ctcctctattatgcgaagattatgc

SEQ ID NO: 346687 - DNA, 25 bp, Artificial
  probe
  misc_feature (1)..(25): SEQ ID NO: 3100; WAN024FQB; Start 111; Stop 135
tgatggttctacagatgattctcct

SEQ ID NO: 346688 - DNA, 25 bp, Artificial
  probe
  misc_feature (1)..(25): SEQ ID NO: 3100; WAN024FQB; Start 126; Stop 150
tgattctcctctattatgcgaagat

SEQ ID NO: 346689 - DNA, 25 bp, Artificial
  probe
  misc_feature (1)..(25): SEQ ID NO: 3100; WAN024FQB; Start 125; Stop 149
atgattctcctctattatgcgaaga

SEQ ID NO: 346690 - DNA, 25 bp, Artificial
  probe
  misc_feature (1)..(25): SEQ ID NO: 3100; WAN024FQB; Start 124; Stop 148
gatgattctcctctattatgcgaag

SEQ ID NO: 346691 - DNA, 25 bp, Artificial
  probe
  misc_feature (1)..(25): SEQ ID NO: 3100; WAN024FQB; Start 123; Stop 147
agatgattctcctctattatgcgaa

SEQ ID NO: 346692 - DNA, 25 bp, Artificial
  probe
  misc_feature (1)..(25): SEQ ID NO: 3100; WAN024FQB; Start 115; Stop 139
ggttctacagatgattctcctctat

SEQ ID NO: 346693 - DNA, 25 bp, Artificial
  probe
  misc_feature (1)..(25): SEQ ID NO: 3100; WAN024FQB; Start 717; Stop 741
aagagagtacattcagattccagaa

SEQ ID NO: 346694 - DNA, 25 bp, Artificial
  probe
  misc_feature (1)..(25): SEQ ID NO: 3100; WAN024FQB; Start 109; Stop 133
aatgatggttctacagatgattctc

SEQ ID NO: 346695 - DNA, 25 bp, Artificial
  probe
  misc_feature (1)..(25): SEQ ID NO: 3100; WAN024FQB; Start 127; Stop 151
gattctcctctattatgcgaagatt

SEQ ID NO: 346696 - DNA, 25 bp, Artificial
  probe
  misc_feature (1)..(25): SEQ ID NO: 3100; WAN024FQB; Start 130; Stop 154
tctcctctattatgcgaagattatg

SEQ ID NO: 346697 - DNA, 25 bp, Artificial
  probe
  misc_feature (1)..(25): SEQ ID NO: 3100; WAN024FQB; Start 120; Stop 144
tacagatgattctcctctattatgc

SEQ ID NO: 346698 - DNA, 25 bp, Artificial
  probe
  misc_feature (1)..(25): SEQ ID NO: 3100; WAN024FQB; Start 116; Stop 140
gttctacagatgattctcctctatt

SEQ ID NO: 346699 - DNA, 25 bp, Artificial
  probe
  misc_feature (1)..(25): SEQ ID NO: 3100; WAN024FQB; Start 396; Stop 420
agactcagactataaagatttggct

SEQ ID NO: 346700 - DNA, 25 bp, Artificial
  probe
  misc_feature (1)..(25): SEQ ID NO: 3100; WAN024FQB; Start 829; Stop 853
aaagataaagagttgttgagagtcg

SEQ ID NO: 346701 - DNA, 25 bp, Artificial
  probe
  misc_feature (1)..(25): SEQ ID NO: 3100; WAN024FQB; Start 616; Stop 640
tacaattactatcgtagggaaggga

SEQ ID NO: 346702 - DNA, 25 bp, Artificial
  probe
  misc_feature (1)..(25): SEQ ID NO: 3100; WAN024FQB; Start 399; Stop 423
ctcagactataaagatttggcttcg

SEQ ID NO: 346703 - DNA, 25 bp, Artificial
  probe
  misc_feature (1)..(25): SEQ ID NO: 3100; WAN024FQB; Start 718; Stop 742
agagagtacattcagattccagaat

SEQ ID NO: 346704 - DNA, 25 bp, Artificial
  probe
  misc_feature (1)..(25): SEQ ID NO: 3100; WAN024FQB; Start 624; Stop 648
ctatcgtagggaagggagtattgtt

SEQ ID NO: 346705 - DNA, 25 bp, Artificial
  probe
  misc_feature (1)..(25): SEQ ID NO: 3100; WAN024FQB; Start 224; Stop 248
gagtttctaaagcgagttcagattg

SEQ ID NO: 346706 - DNA, 25 bp, Artificial
  probe
  misc_feature (1)..(25): SEQ ID NO: 3100; WAN024FQB; Start 129; Stop 153
ttctcctctattatgcgaagattat

SEQ ID NO: 346707 - DNA, 25 bp, Artificial
  probe
  misc_feature (1)..(25): SEQ ID NO: 3100; WAN024FQB; Start 128; Stop 152
attctcctctattatgcgaagatta

SEQ ID NO: 346708 - DNA, 25 bp, Artificial
  probe
  misc_feature (1)..(25): SEQ ID NO: 3100; WAN024FQB; Start 229; Stop 253
tctaaagcgagttcagattggattt

SEQ ID NO: 346709 - DNA, 25 bp, Artificial
  probe
  misc_feature (1)..(25): SEQ ID NO: 3100; WAN024FQB; Start 228; Stop 252
ttctaaagcgagttcagattggatt

SEQ ID NO: 346710 - DNA, 25 bp, Artificial
  probe
  misc_feature (1)..(25): SEQ ID NO: 3100; WAN024FQB; Start 227; Stop 251
tttctaaagcgagttcagattggat

SEQ ID NO: 346711 - DNA, 25 bp, Artificial
  probe
  misc_feature (1)..(25): SEQ ID NO: 3100; WAN024FQB; Start 96; Stop 120
ggtaatccttgtaaatgatggttct

SEQ ID NO: 346712 - DNA, 25 bp, Artificial
  probe
  misc_feature (1)..(25): SEQ ID NO: 3100; WAN024FQB; Start 395; Stop 419
aagactcagactataaagatttggc

SEQ ID NO: 346713 - DNA, 25 bp, Artificial
  probe
  misc_feature (1)..(25): SEQ ID NO: 3101; WAN024F2L; Start 206; Stop 230
ggaggattaaggtattcttcttcgt

SEQ ID NO: 346714 - DNA, 25 bp, Artificial
  probe
  misc_feature (1)..(25): SEQ ID NO: 3101; WAN024F2L; Start 205; Stop 229
tggaggattaaggtattcttcttcg

SEQ ID NO: 346715 - DNA, 25 bp, Artificial
  probe
  misc_feature (1)..(25): SEQ ID NO: 3101; WAN024F2L; Start 213; Stop 237
taaggtattcttcttcgttgacagc

SEQ ID NO: 346716 - DNA, 25 bp, Artificial
  probe
  misc_feature (1)..(25): SEQ ID NO: 3101; WAN024F2L; Start 203; Stop 227
actggaggattaaggtattcttctt

SEQ ID NO: 346717 - DNA, 25 bp, Artificial
  probe
  misc_feature (1)..(25): SEQ ID NO: 3101; WAN024F2L; Start 212; Stop 236
ttaaggtattcttcttcgttgacag

SEQ ID NO: 346718 - DNA, 25 bp, Artificial
  probe
  misc_feature (1)..(25): SEQ ID NO: 3101; WAN024F2L; Start 209; Stop 233
ggattaaggtattcttcttcgttga

SEQ ID NO: 346719 - DNA, 25 bp, Artificial
  probe
  misc_feature (1)..(25): SEQ ID NO: 3101; WAN024F2L; Start 208; Stop 232
aggattaaggtattcttcttcgttg

SEQ ID NO: 346720 - DNA, 25 bp, Artificial
  probe
  misc_feature (1)..(25): SEQ ID NO: 3101; WAN024F2L; Start 207; Stop 231
gaggattaaggtattcttcttcgtt

SEQ ID NO: 346721 - DNA, 25 bp, Artificial
  probe
  misc_feature (1)..(25): SEQ ID NO: 3101; WAN024F2L; Start 204; Stop 228
ctggaggattaaggtattcttcttc

SEQ ID NO: 346722 - DNA, 25 bp, Artificial
  probe
  misc_feature (1)..(25): SEQ ID NO: 3101; WAN024F2L; Start 211; Stop 235
attaaggtattcttcttcgttgaca

SEQ ID NO: 346723 - DNA, 25 bp, Artificial
  probe
  misc_feature (1)..(25): SEQ ID NO: 3101; WAN024F2L; Start 202; Stop 226
tactggaggattaaggtattcttct

SEQ ID NO: 346724 - DNA, 25 bp, Artificial
  probe
  misc_feature (1)..(25): SEQ ID NO: 3101; WAN024F2L; Start 200; Stop 224
tctactggaggattaaggtattctt

SEQ ID NO: 346725 - DNA, 25 bp, Artificial
  probe
  misc_feature (1)..(25): SEQ ID NO: 3101; WAN024F2L; Start 199; Stop 223
ctctactggaggattaaggtattct

SEQ ID NO: 346726 - DNA, 25 bp, Artificial
  probe
  misc_feature (1)..(25): SEQ ID NO: 3101; WAN024F2L; Start 215; Stop 239
aggtattcttcttcgttgacagcat

SEQ ID NO: 346727 - DNA, 25 bp, Artificial
  probe
  misc_feature (1)..(25): SEQ ID NO: 3101; WAN024F2L; Start 201; Stop 225
ctactggaggattaaggtattcttc

SEQ ID NO: 346728 - DNA, 25 bp, Artificial
  probe
  misc_feature (1)..(25): SEQ ID NO: 3101; WAN024F2L; Start 282; Stop 306
ggatgatcttaccgatgataacatt

SEQ ID NO: 346729 - DNA, 25 bp, Artificial
  probe
  misc_feature (1)..(25): SEQ ID NO: 3101; WAN024F2L; Start 210; Stop 234
gattaaggtattcttcttcgttgac

SEQ ID NO: 346730 - DNA, 25 bp, Artificial
  probe
  misc_feature (1)..(25): SEQ ID NO: 3101; WAN024F2L; Start 214; Stop 238
aaggtattcttcttcgttgacagca

SEQ ID NO: 346731 - DNA, 25 bp, Artificial
  probe
  misc_feature (1)..(25): SEQ ID NO: 3101; WAN024F2L; Start 178; Stop 202
tgtttcttcatttccttcttcctct

SEQ ID NO: 346732 - DNA, 25 bp, Artificial
  probe
  misc_feature (1)..(25): SEQ ID NO: 3101; WAN024F2L; Start 175; Stop 199
tgttgtttcttcatttccttcttcc

SEQ ID NO: 346733 - DNA, 25 bp, Artificial
  probe
  misc_feature (1)..(25): SEQ ID NO: 3101; WAN024F2L; Start 182; Stop 206
tcttcatttccttcttcctctactg

SEQ ID NO: 346734 - DNA, 25 bp, Artificial
  probe
  misc_feature (1)..(25): SEQ ID NO: 3101; WAN024F2L; Start 176; Stop 200
gttgtttcttcatttccttcttcct

SEQ ID NO: 346735 - DNA, 25 bp, Artificial
  probe
  misc_feature (1)..(25): SEQ ID NO: 3101; WAN024F2L; Start 105; Stop 129
cgggttctctcattctctcttattc

SEQ ID NO: 346736 - DNA, 25 bp, Artificial
  probe
  misc_feature (1)..(25): SEQ ID NO: 3101; WAN024F2L; Start 183; Stop 207
cttcatttccttcttcctctactgg

SEQ ID NO: 346737 - DNA, 25 bp, Artificial
  probe
  misc_feature (1)..(25): SEQ ID NO: 3101; WAN024F2L; Start 177; Stop 201
ttgtttcttcatttccttcttcctc

SEQ ID NO: 346738 - DNA, 25 bp, Artificial
  probe
  misc_feature (1)..(25): SEQ ID NO: 3101; WAN024F2L; Start 216; Stop 240
ggtattcttcttcgttgacagcatg

SEQ ID NO: 346739 - DNA, 25 bp, Artificial
  probe
  misc_feature (1)..(25): SEQ ID NO: 3101; WAN024F2L; Start 170; Stop 194
acttctgttgtttcttcatttcctt

SEQ ID NO: 346740 - DNA, 25 bp, Artificial
  probe
  misc_feature (1)..(25): SEQ ID NO: 3101; WAN024F2L; Start 106; Stop 130
gggttctctcattctctcttattct

SEQ ID NO: 346741 - DNA, 25 bp, Artificial
  probe
  misc_feature (1)..(25): SEQ ID NO: 3101; WAN024F2L; Start 104; Stop 128
tcgggttctctcattctctcttatt

SEQ ID NO: 346742 - DNA, 25 bp, Artificial
  probe
  misc_feature (1)..(25): SEQ ID NO: 3101; WAN024F2L; Start 111; Stop 135
ctctcattctctcttattctactgt

SEQ ID NO: 346743 - DNA, 25 bp, Artificial
  probe
  misc_feature (1)..(25): SEQ ID NO: 3101; WAN024F2L; Start 107; Stop 131
ggttctctcattctctcttattcta

SEQ ID NO: 346744 - DNA, 25 bp, Artificial
  probe
  misc_feature (1)..(25): SEQ ID NO: 3101; WAN024F2L; Start 181; Stop 205
ttcttcatttccttcttcctctact

SEQ ID NO: 346745 - DNA, 25 bp, Artificial
  probe
  misc_feature (1)..(25): SEQ ID NO: 3101; WAN024F2L; Start 218; Stop 242
tattcttcttcgttgacagcatgtg

SEQ ID NO: 346746 - DNA, 25 bp, Artificial
  probe
  misc_feature (1)..(25): SEQ ID NO: 3102; WAN024DSC; Start 359; Stop 383
cctcaacatacgaagaactacagaa

SEQ ID NO: 346747 - DNA, 25 bp, Artificial
  probe
  misc_feature (1)..(25): SEQ ID NO: 3102; WAN024DSC; Start 354; Stop 378
atcaacctcaacatacgaagaacta

SEQ ID NO: 346748 - DNA, 25 bp, Artificial
  probe
  misc_feature (1)..(25): SEQ ID NO: 3102; WAN024DSC; Start 353; Stop 377
aatcaacctcaacatacgaagaact

SEQ ID NO: 346749 - DNA, 25 bp, Artificial
  probe
  misc_feature (1)..(25): SEQ ID NO: 3102; WAN024DSC; Start 352; Stop 376
caatcaacctcaacatacgaagaac

SEQ ID NO: 346750 - DNA, 25 bp, Artificial
  probe
  misc_feature (1)..(25): SEQ ID NO: 3102; WAN024DSC; Start 351; Stop 375
tcaatcaacctcaacatacgaagaa

SEQ ID NO: 346751 - DNA, 25 bp, Artificial
  probe
  misc_feature (1)..(25): SEQ ID NO: 3102; WAN024DSC; Start 357; Stop 381
aacctcaacatacgaagaactacag

SEQ ID NO: 346752 - DNA, 25 bp, Artificial
  probe
  misc_feature (1)..(25): SEQ ID NO: 3102; WAN024DSC; Start 355; Stop 379
tcaacctcaacatacgaagaactac

SEQ ID NO: 346753 - DNA, 25 bp, Artificial
  probe
  misc_feature (1)..(25): SEQ ID NO: 3102; WAN024DSC; Start 356; Stop 380
caacctcaacatacgaagaactaca

SEQ ID NO: 346754 - DNA, 25 bp, Artificial
  probe
  misc_feature (1)..(25): SEQ ID NO: 3102; WAN024DSC; Start 390; Stop 414
gatggagagtcaatcagaagtagat

SEQ ID NO: 346755 - DNA, 25 bp, Artificial
  probe
  misc_feature (1)..(25): SEQ ID NO: 3102; WAN024DSC; Start 349; Stop 373
attcaatcaacctcaacatacgaag

SEQ ID NO: 346756 - DNA, 25 bp, Artificial
  probe
  misc_feature (1)..(25): SEQ ID NO: 3102; WAN024DSC; Start 350; Stop 374
ttcaatcaacctcaacatacgaaga

SEQ ID NO: 346757 - DNA, 25 bp, Artificial
  probe
  misc_feature (1)..(25): SEQ ID NO: 3102; WAN024DSC; Start 358; Stop 382
acctcaacatacgaagaactacaga

SEQ ID NO: 346758 - DNA, 25 bp, Artificial
  probe
  misc_feature (1)..(25): SEQ ID NO: 3102; WAN024DSC; Start 348; Stop 372
aattcaatcaacctcaacatacgaa

SEQ ID NO: 346759 - DNA, 25 bp, Artificial
  probe
  misc_feature (1)..(25): SEQ ID NO: 3102; WAN024DSC; Start 392; Stop 416
tggagagtcaatcagaagtagataa

SEQ ID NO: 346760 - DNA, 25 bp, Artificial
  probe
  misc_feature (1)..(25): SEQ ID NO: 3102; WAN024DSC; Start 347; Stop 371
taattcaatcaacctcaacatacga

SEQ ID NO: 346761 - DNA, 25 bp, Artificial
  probe
  misc_feature (1)..(25): SEQ ID NO: 3102; WAN024DSC; Start 391; Stop 415
atggagagtcaatcagaagtagata

SEQ ID NO: 346762 - DNA, 25 bp, Artificial
  probe
  misc_feature (1)..(25): SEQ ID NO: 3102; WAN024DSC; Start 1066; Stop 1090
aatgcctataatgaggtcagagatt

SEQ ID NO: 346763 - DNA, 25 bp, Artificial
  probe
  misc_feature (1)..(25): SEQ ID NO: 3102; WAN024DSC; Start 346; Stop 370
ataattcaatcaacctcaacatacg

SEQ ID NO: 346764 - DNA, 25 bp, Artificial
  probe
  misc_feature (1)..(25): SEQ ID NO: 3102; WAN024DSC; Start 810; Stop 834
agaagaagaagctaagttgaaggaa

SEQ ID NO: 346765 - DNA, 25 bp, Artificial
  probe
  misc_feature (1)..(25): SEQ ID NO: 3102; WAN024DSC; Start 811; Stop 835
gaagaagaagctaagttgaaggaag

SEQ ID NO: 346766 - DNA, 25 bp, Artificial
  probe
  misc_feature (1)..(25): SEQ ID NO: 3102; WAN024DSC; Start 809; Stop 833
cagaagaagaagctaagttgaagga

SEQ ID NO: 346767 - DNA, 25 bp, Artificial
  probe
  misc_feature (1)..(25): SEQ ID NO: 3102; WAN024DSC; Start 1067; Stop 1091
atgcctataatgaggtcagagatta

SEQ ID NO: 346768 - DNA, 25 bp, Artificial
  probe
  misc_feature (1)..(25): SEQ ID NO: 3102; WAN024DSC; Start 202; Stop 226
cgagataaggtaaagaaagaggtca

SEQ ID NO: 346769 - DNA, 25 bp, Artificial
  probe
  misc_feature (1)..(25): SEQ ID NO: 3102; WAN024DSC; Start 201; Stop 225
acgagataaggtaaagaaagaggtc

SEQ ID NO: 346770 - DNA, 25 bp, Artificial
  probe
  misc_feature (1)..(25): SEQ ID NO: 3102; WAN024DSC; Start 205; Stop 229
gataaggtaaagaaagaggtcaggg

SEQ ID NO: 346771 - DNA, 25 bp, Artificial
  probe
  misc_feature (1)..(25): SEQ ID NO: 3102; WAN024DSC; Start 210; Stop 234
ggtaaagaaagaggtcagggaatat

SEQ ID NO: 346772 - DNA, 25 bp, Artificial
  probe
  misc_feature (1)..(25): SEQ ID NO: 3102; WAN024DSC; Start 204; Stop 228
agataaggtaaagaaagaggtcagg

SEQ ID NO: 346773 - DNA, 25 bp, Artificial
  probe
  misc_feature (1)..(25): SEQ ID NO: 3102; WAN024DSC; Start 209; Stop 233
aggtaaagaaagaggtcagggaata

SEQ ID NO: 346774 - DNA, 25 bp, Artificial
  probe
  misc_feature (1)..(25): SEQ ID NO: 3102; WAN024DSC; Start 206; Stop 230
ataaggtaaagaaagaggtcaggga

SEQ ID NO: 346775 - DNA, 25 bp, Artificial
  probe
  misc_feature (1)..(25): SEQ ID NO: 3102; WAN024DSC; Start 200; Stop 224
aacgagataaggtaaagaaagaggt

SEQ ID NO: 346776 - DNA, 25 bp, Artificial
  probe
  misc_feature (1)..(25): SEQ ID NO: 3102; WAN024DSC; Start 207; Stop 231
taaggtaaagaaagaggtcagggaa

SEQ ID NO: 346777 - DNA, 25 bp, Artificial
  probe
  misc_feature (1)..(25): SEQ ID NO: 3102; WAN024DSC; Start 362; Stop 386
caacatacgaagaactacagaaact

SEQ ID NO: 346778 - DNA, 25 bp, Artificial
  probe
  misc_feature (1)..(25): SEQ ID NO: 3102; WAN024DSC; Start 361; Stop 385
tcaacatacgaagaactacagaaac

SEQ ID NO: 346779 - DNA, 25 bp, Artificial
  probe
  misc_feature (1)..(25): SEQ ID NO: 3103; WAN024DCJ; Start 314; Stop 338
aatccttactatcttccgttccttg

SEQ ID NO: 346780 - DNA, 25 bp, Artificial
  probe
  misc_feature (1)..(25): SEQ ID NO: 3103; WAN024DCJ; Start 313; Stop 337
gaatccttactatcttccgttcctt

SEQ ID NO: 346781 - DNA, 25 bp, Artificial
  probe
  misc_feature (1)..(25): SEQ ID NO: 3103; WAN024DCJ; Start 310; Stop 334
tctgaatccttactatcttccgttc

SEQ ID NO: 346782 - DNA, 25 bp, Artificial
  probe
  misc_feature (1)..(25): SEQ ID NO: 3103; WAN024DCJ; Start 315; Stop 339
atccttactatcttccgttccttgt

SEQ ID NO: 346783 - DNA, 25 bp, Artificial
  probe
  misc_feature (1)..(25): SEQ ID NO: 3103; WAN024DCJ; Start 311; Stop 335
ctgaatccttactatcttccgttcc

SEQ ID NO: 346784 - DNA, 25 bp, Artificial
  probe
  misc_feature (1)..(25): SEQ ID NO: 3103; WAN024DCJ; Start 451; Stop 475
cttactctgtcaaggcactatcttc

SEQ ID NO: 346785 - DNA, 25 bp, Artificial
  probe
  misc_feature (1)..(25): SEQ ID NO: 3103; WAN024DCJ; Start 312; Stop 336
tgaatccttactatcttccgttcct

SEQ ID NO: 346786 - DNA, 25 bp, Artificial
  probe
  misc_feature (1)..(25): SEQ ID NO: 3103; WAN024DCJ; Start 316; Stop 340
tccttactatcttccgttccttgtt

SEQ ID NO: 346787 - DNA, 25 bp, Artificial
  probe
  misc_feature (1)..(25): SEQ ID NO: 3103; WAN024DCJ; Start 309; Stop 333
atctgaatccttactatcttccgtt

SEQ ID NO: 346788 - DNA, 25 bp, Artificial
  probe
  misc_feature (1)..(25): SEQ ID NO: 3103; WAN024DCJ; Start 308; Stop 332
tatctgaatccttactatcttccgt

SEQ ID NO: 346789 - DNA, 25 bp, Artificial
  probe
  misc_feature (1)..(25): SEQ ID NO: 3103; WAN024DCJ; Start 452; Stop 476
ttactctgtcaaggcactatcttcc

SEQ ID NO: 346790 - DNA, 25 bp, Artificial
  probe
  misc_feature (1)..(25): SEQ ID NO: 3103; WAN024DCJ; Start 307; Stop 331
ttatctgaatccttactatcttccg

SEQ ID NO: 346791 - DNA, 25 bp, Artificial
  probe
  misc_feature (1)..(25): SEQ ID NO: 3103; WAN024DCJ; Start 192; Stop 216
ttgctggatttctgactctttctta

SEQ ID NO: 346792 - DNA, 25 bp, Artificial
  probe
  misc_feature (1)..(25): SEQ ID NO: 3103; WAN024DCJ; Start 317; Stop 341
ccttactatcttccgttccttgttt

SEQ ID NO: 346793 - DNA, 25 bp, Artificial
  probe
  misc_feature (1)..(25): SEQ ID NO: 3103; WAN024DCJ; Start 191; Stop 215
attgctggatttctgactctttctt

SEQ ID NO: 346794 - DNA, 25 bp, Artificial
  probe
  misc_feature (1)..(25): SEQ ID NO: 3103; WAN024DCJ; Start 586; Stop 610
gttcagacttgtcaacttgctcttg

SEQ ID NO: 346795 - DNA, 25 bp, Artificial
  probe
  misc_feature (1)..(25): SEQ ID NO: 3103; WAN024DCJ; Start 193; Stop 217
tgctggatttctgactctttcttac

SEQ ID NO: 346796 - DNA, 25 bp, Artificial
  probe
  misc_feature (1)..(25): SEQ ID NO: 3103; WAN024DCJ; Start 190; Stop 214
aattgctggatttctgactctttct

SEQ ID NO: 346797 - DNA, 25 bp, Artificial
  probe
  misc_feature (1)..(25): SEQ ID NO: 3103; WAN024DCJ; Start 189; Stop 213
taattgctggatttctgactctttc

SEQ ID NO: 346798 - DNA, 25 bp, Artificial
  probe
  misc_feature (1)..(25): SEQ ID NO: 3103; WAN024DCJ; Start 187; Stop 211
cttaattgctggatttctgactctt

SEQ ID NO: 346799 - DNA, 25 bp, Artificial
  probe
  misc_feature (1)..(25): SEQ ID NO: 3103; WAN024DCJ; Start 195; Stop 219
ctggatttctgactctttcttacgg

SEQ ID NO: 346800 - DNA, 25 bp, Artificial
  probe
  misc_feature (1)..(25): SEQ ID NO: 3103; WAN024DCJ; Start 44; Stop 68
ctagtttagtttctgtctctgctga

SEQ ID NO: 346801 - DNA, 25 bp, Artificial
  probe
  misc_feature (1)..(25): SEQ ID NO: 3103; WAN024DCJ; Start 188; Stop 212
ttaattgctggatttctgactcttt

SEQ ID NO: 346802 - DNA, 25 bp, Artificial
  probe
  misc_feature (1)..(25): SEQ ID NO: 3103; WAN024DCJ; Start 299; Stop 323
cagtcatcttatctgaatccttact

SEQ ID NO: 346803 - DNA, 25 bp, Artificial
  probe
  misc_feature (1)..(25): SEQ ID NO: 3103; WAN024DCJ; Start 380; Stop 404
catttgctttcacatctttgagaga

SEQ ID NO: 346804 - DNA, 25 bp, Artificial
  probe
  misc_feature (1)..(25): SEQ ID NO: 3103; WAN024DCJ; Start 255; Stop 279
aagtagactgaccacaatcactcct

SEQ ID NO: 346805 - DNA, 25 bp, Artificial
  probe
  misc_feature (1)..(25): SEQ ID NO: 3103; WAN024DCJ; Start 254; Stop 278
caagtagactgaccacaatcactcc

SEQ ID NO: 346806 - DNA, 25 bp, Artificial
  probe
  misc_feature (1)..(25): SEQ ID NO: 3103; WAN024DCJ; Start 11; Stop 35
tgagtttgtcaaggattgctttaag

SEQ ID NO: 346807 - DNA, 25 bp, Artificial
  probe
  misc_feature (1)..(25): SEQ ID NO: 3103; WAN024DCJ; Start 381; Stop 405
atttgctttcacatctttgagagag

SEQ ID NO: 346808 - DNA, 25 bp, Artificial
  probe
  misc_feature (1)..(25): SEQ ID NO: 3103; WAN024DCJ; Start 186; Stop 210
gcttaattgctggatttctgactct

SEQ ID NO: 346809 - DNA, 25 bp, Artificial
  probe
  misc_feature (1)..(25): SEQ ID NO: 3103; WAN024DCJ; Start 387; Stop 411
tttcacatctttgagagagtccaag

SEQ ID NO: 346810 - DNA, 25 bp, Artificial
  probe
  misc_feature (1)..(25): SEQ ID NO: 3103; WAN024DCJ; Start 386; Stop 410
ctttcacatctttgagagagtccaa

SEQ ID NO: 346811 - DNA, 25 bp, Artificial
  probe
  misc_feature (1)..(25): SEQ ID NO: 3103; WAN024DCJ; Start 45; Stop 69
tagtttagtttctgtctctgctgag

SEQ ID NO: 346812 - DNA, 25 bp, Artificial
  probe
  misc_feature (1)..(25): SEQ ID NO: 3104; WAN024EY6; Start 659; Stop 683
ttgctattatcctcgctatcctaac

SEQ ID NO: 346813 - DNA, 25 bp, Artificial
  probe
  misc_feature (1)..(25): SEQ ID NO: 3104; WAN024EY6; Start 658; Stop 682
cttgctattatcctcgctatcctaa

SEQ ID NO: 346814 - DNA, 25 bp, Artificial
  probe
  misc_feature (1)..(25): SEQ ID NO: 3104; WAN024EY6; Start 665; Stop 689
ttatcctcgctatcctaaccatcat

SEQ ID NO: 346815 - DNA, 25 bp, Artificial
  probe
  misc_feature (1)..(25): SEQ ID NO: 3104; WAN024EY6; Start 664; Stop 688
attatcctcgctatcctaaccatca

SEQ ID NO: 346816 - DNA, 25 bp, Artificial
  probe
  misc_feature (1)..(25): SEQ ID NO: 3104; WAN024EY6; Start 654; Stop 678
catccttgctattatcctcgctatc

SEQ ID NO: 346817 - DNA, 25 bp, Artificial
  probe
  misc_feature (1)..(25): SEQ ID NO: 3104; WAN024EY6; Start 663; Stop 687
tattatcctcgctatcctaaccatc

SEQ ID NO: 346818 - DNA, 25 bp, Artificial
  probe
  misc_feature (1)..(25): SEQ ID NO: 3104; WAN024EY6; Start 662; Stop 686
ctattatcctcgctatcctaaccat

SEQ ID NO: 346819 - DNA, 25 bp, Artificial
  probe
  misc_feature (1)..(25): SEQ ID NO: 3104; WAN024EY6; Start 653; Stop 677
tcatccttgctattatcctcgctat

SEQ ID NO: 346820 - DNA, 25 bp, Artificial
  probe
  misc_feature (1)..(25): SEQ ID NO: 3104; WAN024EY6; Start 19; Stop 43
cgtggattagttgtattgctcttat

SEQ ID NO: 346821 - DNA, 25 bp, Artificial
  probe
  misc_feature (1)..(25): SEQ ID NO: 3104; WAN024EY6; Start 666; Stop 690
tatcctcgctatcctaaccatcatc

SEQ ID NO: 346822 - DNA, 25 bp, Artificial
  probe
  misc_feature (1)..(25): SEQ ID NO: 3104; WAN024EY6; Start 657; Stop 681
ccttgctattatcctcgctatccta

SEQ ID NO: 346823 - DNA, 25 bp, Artificial
  probe
  misc_feature (1)..(25): SEQ ID NO: 3104; WAN024EY6; Start 25; Stop 49
ttagttgtattgctcttatggtcca

SEQ ID NO: 346824 - DNA, 25 bp, Artificial
  probe
  misc_feature (1)..(25): SEQ ID NO: 3104; WAN024EY6; Start 18; Stop 42
gcgtggattagttgtattgctctta

SEQ ID NO: 346825 - DNA, 25 bp, Artificial
  probe
  misc_feature (1)..(25): SEQ ID NO: 3104; WAN024EY6; Start 661; Stop 685
gctattatcctcgctatcctaacca

SEQ ID NO: 346826 - DNA, 25 bp, Artificial
  probe
  misc_feature (1)..(25): SEQ ID NO: 3104; WAN024EY6; Start 660; Stop 684
tgctattatcctcgctatcctaacc

SEQ ID NO: 346827 - DNA, 25 bp, Artificial
  probe
  misc_feature (1)..(25): SEQ ID NO: 3104; WAN024EY6; Start 24; Stop 48
attagttgtattgctcttatggtcc

SEQ ID NO: 346828 - DNA, 25 bp, Artificial
  probe
  misc_feature (1)..(25): SEQ ID NO: 3104; WAN024EY6; Start 22; Stop 46
ggattagttgtattgctcttatggt

SEQ ID NO: 346829 - DNA, 25 bp, Artificial
  probe
  misc_feature (1)..(25): SEQ ID NO: 3104; WAN024EY6; Start 21; Stop 45
tggattagttgtattgctcttatgg

SEQ ID NO: 346830 - DNA, 25 bp, Artificial
  probe
  misc_feature (1)..(25): SEQ ID NO: 3104; WAN024EY6; Start 655; Stop 679
atccttgctattatcctcgctatcc

SEQ ID NO: 346831 - DNA, 25 bp, Artificial
  probe
  misc_feature (1)..(25): SEQ ID NO: 3104; WAN024EY6; Start 652; Stop 676
ctcatccttgctattatcctcgcta

SEQ ID NO: 346832 - DNA, 25 bp, Artificial
  probe
  misc_feature (1)..(25): SEQ ID NO: 3104; WAN024EY6; Start 54; Stop 78
tggcaatgctcactatcataatact

SEQ ID NO: 346833 - DNA, 25 bp, Artificial
  probe
  misc_feature (1)..(25): SEQ ID NO: 3104; WAN024EY6; Start 51; Stop 75
caatggcaatgctcactatcataat

SEQ ID NO: 346834 - DNA, 25 bp, Artificial
  probe
  misc_feature (1)..(25): SEQ ID NO: 3104; WAN024EY6; Start 55; Stop 79
ggcaatgctcactatcataatactg

SEQ ID NO: 346835 - DNA, 25 bp, Artificial
  probe
  misc_feature (1)..(25): SEQ ID NO: 3104; WAN024EY6; Start 49; Stop 73
atcaatggcaatgctcactatcata

SEQ ID NO: 346836 - DNA, 25 bp, Artificial
  probe
  misc_feature (1)..(25): SEQ ID NO: 3104; WAN024EY6; Start 50; Stop 74
tcaatggcaatgctcactatcataa

SEQ ID NO: 346837 - DNA, 25 bp, Artificial
  probe
  misc_feature (1)..(25): SEQ ID NO: 3104; WAN024EY6; Start 53; Stop 77
atggcaatgctcactatcataatac

SEQ ID NO: 346838 - DNA, 25 bp, Artificial
  probe
  misc_feature (1)..(25): SEQ ID NO: 3104; WAN024EY6; Start 20; Stop 44
gtggattagttgtattgctcttatg

SEQ ID NO: 346839 - DNA, 25 bp, Artificial
  probe
  misc_feature (1)..(25): SEQ ID NO: 3104; WAN024EY6; Start 26; Stop 50
tagttgtattgctcttatggtccat

SEQ ID NO: 346840 - DNA, 25 bp, Artificial
  probe
  misc_feature (1)..(25): SEQ ID NO: 3104; WAN024EY6; Start 27; Stop 51
agttgtattgctcttatggtccatc

SEQ ID NO: 346841 - DNA, 25 bp, Artificial
  probe
  misc_feature (1)..(25): SEQ ID NO: 3104; WAN024EY6; Start 29; Stop 53
ttgtattgctcttatggtccatcaa

SEQ ID NO: 346842 - DNA, 25 bp, Artificial
  probe
  misc_feature (1)..(25): SEQ ID NO: 3104; WAN024EY6; Start 28; Stop 52
gttgtattgctcttatggtccatca

SEQ ID NO: 346843 - DNA, 25 bp, Artificial
  probe
  misc_feature (1)..(25): SEQ ID NO: 3104; WAN024EY6; Start 667; Stop 691
atcctcgctatcctaaccatcatct

SEQ ID NO: 346844 - DNA, 25 bp, Artificial
  probe
  misc_feature (1)..(25): SEQ ID NO: 3104; WAN024EY6; Start 656; Stop 680
tccttgctattatcctcgctatcct

SEQ ID NO: 346845 - DNA, 25 bp, Artificial
  probe
  misc_feature (1)..(25): SEQ ID NO: 3105; WAN024CCS; Start 127; Stop 151
atggaacgcaatctggaagttatga

SEQ ID NO: 346846 - DNA, 25 bp, Artificial
  probe
  misc_feature (1)..(25): SEQ ID NO: 3105; WAN024CCS; Start 136; Stop 160
aatctggaagttatgaaagcctctg

SEQ ID NO: 346847 - DNA, 25 bp, Artificial
  probe
  misc_feature (1)..(25): SEQ ID NO: 3105; WAN024CCS; Start 135; Stop 159
caatctggaagttatgaaagcctct

SEQ ID NO: 346848 - DNA, 25 bp, Artificial
  probe
  misc_feature (1)..(25): SEQ ID NO: 3105; WAN024CCS; Start 128; Stop 152
tggaacgcaatctggaagttatgaa

SEQ ID NO: 346849 - DNA, 25 bp, Artificial
  probe
  misc_feature (1)..(25): SEQ ID NO: 3105; WAN024CCS; Start 130; Stop 154
gaacgcaatctggaagttatgaaag

SEQ ID NO: 346850 - DNA, 25 bp, Artificial
  probe
  misc_feature (1)..(25): SEQ ID NO: 3105; WAN024CCS; Start 73; Stop 97
attacaacagagtttgaattgaccg

SEQ ID NO: 346851 - DNA, 25 bp, Artificial
  probe
  misc_feature (1)..(25): SEQ ID NO: 3105; WAN024CCS; Start 126; Stop 150
catggaacgcaatctggaagttatg

SEQ ID NO: 346852 - DNA, 25 bp, Artificial
  probe
  misc_feature (1)..(25): SEQ ID NO: 3105; WAN024CCS; Start 125; Stop 149
tcatggaacgcaatctggaagttat

SEQ ID NO: 346853 - DNA, 25 bp, Artificial
  probe
  misc_feature (1)..(25): SEQ ID NO: 3105; WAN024CCS; Start 137; Stop 161
atctggaagttatgaaagcctctgt

SEQ ID NO: 346854 - DNA, 25 bp, Artificial
  probe
  misc_feature (1)..(25): SEQ ID NO: 3105; WAN024CCS; Start 72; Stop 96
gattacaacagagtttgaattgacc

SEQ ID NO: 346855 - DNA, 25 bp, Artificial
  probe
  misc_feature (1)..(25): SEQ ID NO: 3105; WAN024CCS; Start 142; Stop 166
gaagttatgaaagcctctgtccaac

SEQ ID NO: 346856 - DNA, 25 bp, Artificial
  probe
  misc_feature (1)..(25): SEQ ID NO: 3105; WAN024CCS; Start 129; Stop 153
ggaacgcaatctggaagttatgaaa

SEQ ID NO: 346857 - DNA, 25 bp, Artificial
  probe
  misc_feature (1)..(25): SEQ ID NO: 3105; WAN024CCS; Start 138; Stop 162
tctggaagttatgaaagcctctgtc

SEQ ID NO: 346858 - DNA, 25 bp, Artificial
  probe
  misc_feature (1)..(25): SEQ ID NO: 3105; WAN024CCS; Start 134; Stop 158
gcaatctggaagttatgaaagcctc

SEQ ID NO: 346859 - DNA, 25 bp, Artificial
  probe
  misc_feature (1)..(25): SEQ ID NO: 3105; WAN024CCS; Start 71; Stop 95
tgattacaacagagtttgaattgac

SEQ ID NO: 346860 - DNA, 25 bp, Artificial
  probe
  misc_feature (1)..(25): SEQ ID NO: 3105; WAN024CCS; Start 145; Stop 169
gttatgaaagcctctgtccaacttg

SEQ ID NO: 346861 - DNA, 25 bp, Artificial
  probe
  misc_feature (1)..(25): SEQ ID NO: 3105; WAN024CCS; Start 124; Stop 148
ctcatggaacgcaatctggaagtta

SEQ ID NO: 346862 - DNA, 25 bp, Artificial
  probe
  misc_feature (1)..(25): SEQ ID NO: 3105; WAN024CCS; Start 131; Stop 155
aacgcaatctggaagttatgaaagc

SEQ ID NO: 346863 - DNA, 25 bp, Artificial
  probe
  misc_feature (1)..(25): SEQ ID NO: 3105; WAN024CCS; Start 581; Stop 605
gtcaagctattgcctttgtcattaa

SEQ ID NO: 346864 - DNA, 25 bp, Artificial
  probe
  misc_feature (1)..(25): SEQ ID NO: 3105; WAN024CCS; Start 582; Stop 606
tcaagctattgcctttgtcattaaa

SEQ ID NO: 346865 - DNA, 25 bp, Artificial
  probe
  misc_feature (1)..(25): SEQ ID NO: 3105; WAN024CCS; Start 580; Stop 604
agtcaagctattgcctttgtcatta

SEQ ID NO: 346866 - DNA, 25 bp, Artificial
  probe
  misc_feature (1)..(25): SEQ ID NO: 3105; WAN024CCS; Start 10; Stop 34
tctatcaaagaattggtcgagcaag

SEQ ID NO: 346867 - DNA, 25 bp, Artificial
  probe
  misc_feature (1)..(25): SEQ ID NO: 3105; WAN024CCS; Start 47; Stop 71
ttcaaggaaatgtcgcagaactcat

SEQ ID NO: 346868 - DNA, 25 bp, Artificial
  probe
  misc_feature (1)..(25): SEQ ID NO: 3105; WAN024CCS; Start 70; Stop 94
atgattacaacagagtttgaattga

SEQ ID NO: 346869 - DNA, 25 bp, Artificial
  probe
  misc_feature (1)..(25): SEQ ID NO: 3105; WAN024CCS; Start 579; Stop 603
cagtcaagctattgcctttgtcatt

SEQ ID NO: 346870 - DNA, 25 bp, Artificial
  probe
  misc_feature (1)..(25): SEQ ID NO: 3105; WAN024CCS; Start 55; Stop 79
aatgtcgcagaactcatgattacaa

SEQ ID NO: 346871 - DNA, 25 bp, Artificial
  probe
  misc_feature (1)..(25): SEQ ID NO: 3105; WAN024CCS; Start 69; Stop 93
catgattacaacagagtttgaattg

SEQ ID NO: 346872 - DNA, 25 bp, Artificial
  probe
  misc_feature (1)..(25): SEQ ID NO: 3105; WAN024CCS; Start 174; Stop 198
caatgaaaataaatctcgtagtggc

SEQ ID NO: 346873 - DNA, 25 bp, Artificial
  probe
  misc_feature (1)..(25): SEQ ID NO: 3105; WAN024CCS; Start 58; Stop 82
gtcgcagaactcatgattacaacag

SEQ ID NO: 346874 - DNA, 25 bp, Artificial
  probe
  misc_feature (1)..(25): SEQ ID NO: 3105; WAN024CCS; Start 297; Stop 321
agtcaatgaacacaatgccaaaatg

SEQ ID NO: 346875 - DNA, 25 bp, Artificial
  probe
  misc_feature (1)..(25): SEQ ID NO: 3105; WAN024CCS; Start 296; Stop 320
cagtcaatgaacacaatgccaaaat

SEQ ID NO: 346876 - DNA, 25 bp, Artificial
  probe
  misc_feature (1)..(25): SEQ ID NO: 3105; WAN024CCS; Start 59; Stop 83
tcgcagaactcatgattacaacaga

SEQ ID NO: 346877 - DNA, 25 bp, Artificial
  probe
  misc_feature (1)..(25): SEQ ID NO: 3105; WAN024CCS; Start 133; Stop 157
cgcaatctggaagttatgaaagcct

SEQ ID NO: 346878 - DNA, 25 bp, Artificial
  probe
  misc_feature (1)..(25): SEQ ID NO: 3106; WAN024CED; Start 317; Stop 341
tagaacctattcgccaagatgatga

SEQ ID NO: 346879 - DNA, 25 bp, Artificial
  probe
  misc_feature (1)..(25): SEQ ID NO: 3106; WAN024CED; Start 693; Stop 717
ggaagaacaagtgagaggaattgaa

SEQ ID NO: 346880 - DNA, 25 bp, Artificial
  probe
  misc_feature (1)..(25): SEQ ID NO: 3106; WAN024CED; Start 316; Stop 340
ctagaacctattcgccaagatgatg

SEQ ID NO: 346881 - DNA, 25 bp, Artificial
  probe
  misc_feature (1)..(25): SEQ ID NO: 3106; WAN024CED; Start 67; Stop 91
gctcaacaagtacaacaacattatt

SEQ ID NO: 346882 - DNA, 25 bp, Artificial
  probe
  misc_feature (1)..(25): SEQ ID NO: 3106; WAN024CED; Start 318; Stop 342
agaacctattcgccaagatgatgaa

SEQ ID NO: 346883 - DNA, 25 bp, Artificial
  probe
  misc_feature (1)..(25): SEQ ID NO: 3106; WAN024CED; Start 65; Stop 89
cagctcaacaagtacaacaacatta

SEQ ID NO: 346884 - DNA, 25 bp, Artificial
  probe
  misc_feature (1)..(25): SEQ ID NO: 3106; WAN024CED; Start 66; Stop 90
agctcaacaagtacaacaacattat

SEQ ID NO: 346885 - DNA, 25 bp, Artificial
  probe
  misc_feature (1)..(25): SEQ ID NO: 3106; WAN024CED; Start 307; Stop 331
gtagataagctagaacctattcgcc

SEQ ID NO: 346886 - DNA, 25 bp, Artificial
  probe
  misc_feature (1)..(25): SEQ ID NO: 3106; WAN024CED; Start 306; Stop 330
agtagataagctagaacctattcgc

SEQ ID NO: 346887 - DNA, 25 bp, Artificial
  probe
  misc_feature (1)..(25): SEQ ID NO: 3106; WAN024CED; Start 308; Stop 332
tagataagctagaacctattcgcca

SEQ ID NO: 346888 - DNA, 25 bp, Artificial
  probe
  misc_feature (1)..(25): SEQ ID NO: 3106; WAN024CED; Start 329; Stop 353
gccaagatgatgaatatggaggatt

SEQ ID NO: 346889 - DNA, 25 bp, Artificial
  probe
  misc_feature (1)..(25): SEQ ID NO: 3106; WAN024CED; Start 60; Stop 84
aattccagctcaacaagtacaacaa

SEQ ID NO: 346890 - DNA, 25 bp, Artificial
  probe
  misc_feature (1)..(25): SEQ ID NO: 3106; WAN024CED; Start 310; Stop 334
gataagctagaacctattcgccaag

SEQ ID NO: 346891 - DNA, 25 bp, Artificial
  probe
  misc_feature (1)..(25): SEQ ID NO: 3106; WAN024CED; Start 325; Stop 349
attcgccaagatgatgaatatggag

SEQ ID NO: 346892 - DNA, 25 bp, Artificial
  probe
  misc_feature (1)..(25): SEQ ID NO: 3106; WAN024CED; Start 319; Stop 343
gaacctattcgccaagatgatgaat

SEQ ID NO: 346893 - DNA, 25 bp, Artificial
  probe
  misc_feature (1)..(25): SEQ ID NO: 3106; WAN024CED; Start 312; Stop 336
taagctagaacctattcgccaagat

SEQ ID NO: 346894 - DNA, 25 bp, Artificial
  probe
  misc_feature (1)..(25): SEQ ID NO: 3106; WAN024CED; Start 311; Stop 335
ataagctagaacctattcgccaaga

SEQ ID NO: 346895 - DNA, 25 bp, Artificial
  probe
  misc_feature (1)..(25): SEQ ID NO: 3106; WAN024CED; Start 309; Stop 333
agataagctagaacctattcgccaa

SEQ ID NO: 346896 - DNA, 25 bp, Artificial
  probe
  misc_feature (1)..(25): SEQ ID NO: 3106; WAN024CED; Start 315; Stop 339
gctagaacctattcgccaagatgat

SEQ ID NO: 346897 - DNA, 25 bp, Artificial
  probe
  misc_feature (1)..(25): SEQ ID NO: 3106; WAN024CED; Start 153; Stop 177
aggagggtatctaataggtcaaatg

SEQ ID NO: 346898 - DNA, 25 bp, Artificial
  probe
  misc_feature (1)..(25): SEQ ID NO: 3106; WAN024CED; Start 752; Stop 776
atcaacgccaatttaagtatgctaa

SEQ ID NO: 346899 - DNA, 25 bp, Artificial
  probe
  misc_feature (1)..(25): SEQ ID NO: 3106; WAN024CED; Start 750; Stop 774
ttatcaacgccaatttaagtatgct

SEQ ID NO: 346900 - DNA, 25 bp, Artificial
  probe
  misc_feature (1)..(25): SEQ ID NO: 3106; WAN024CED; Start 154; Stop 178
ggagggtatctaataggtcaaatga

SEQ ID NO: 346901 - DNA, 25 bp, Artificial
  probe
  misc_feature (1)..(25): SEQ ID NO: 3106; WAN024CED; Start 61; Stop 85
attccagctcaacaagtacaacaac

SEQ ID NO: 346902 - DNA, 25 bp, Artificial
  probe
  misc_feature (1)..(25): SEQ ID NO: 3106; WAN024CED; Start 305; Stop 329
cagtagataagctagaacctattcg

SEQ ID NO: 346903 - DNA, 25 bp, Artificial
  probe
  misc_feature (1)..(25): SEQ ID NO: 3106; WAN024CED; Start 151; Stop 175
aaaggagggtatctaataggtcaaa

SEQ ID NO: 346904 - DNA, 25 bp, Artificial
  probe
  misc_feature (1)..(25): SEQ ID NO: 3106; WAN024CED; Start 749; Stop 773
gttatcaacgccaatttaagtatgc

SEQ ID NO: 346905 - DNA, 25 bp, Artificial
  probe
  misc_feature (1)..(25): SEQ ID NO: 3106; WAN024CED; Start 753; Stop 777
tcaacgccaatttaagtatgctaaa

SEQ ID NO: 346906 - DNA, 25 bp, Artificial
  probe
  misc_feature (1)..(25): SEQ ID NO: 3106; WAN024CED; Start 205; Stop 229
gatttagatgtcactctgaagggaa

SEQ ID NO: 346907 - DNA, 25 bp, Artificial
  probe
  misc_feature (1)..(25): SEQ ID NO: 3106; WAN024CED; Start 202; Stop 226
atggatttagatgtcactctgaagg

SEQ ID NO: 346908 - DNA, 25 bp, Artificial
  probe
  misc_feature (1)..(25): SEQ ID NO: 3106; WAN024CED; Start 173; Stop 197
aaatgattggactagataagcgaac

SEQ ID NO: 346909 - DNA, 25 bp, Artificial
  probe
  misc_feature (1)..(25): SEQ ID NO: 3106; WAN024CED; Start 686; Stop 710
ataattgggaagaacaagtgagagg

SEQ ID NO: 346910 - DNA, 25 bp, Artificial
  probe
  misc_feature (1)..(25): SEQ ID NO: 3106; WAN024CED; Start 206; Stop 230
atttagatgtcactctgaagggaac

SEQ ID NO: 346911 - DNA, 25 bp, Artificial
  probe
  misc_feature (1)..(25): SEQ ID NO: 3107; WAN024DTF; Start 44; Stop 68
gaaccctctacaatttccagtcaaa

SEQ ID NO: 346912 - DNA, 25 bp, Artificial
  probe
  misc_feature (1)..(25): SEQ ID NO: 3107; WAN024DTF; Start 45; Stop 69
aaccctctacaatttccagtcaaat

SEQ ID NO: 346913 - DNA, 25 bp, Artificial
  probe
  misc_feature (1)..(25): SEQ ID NO: 3107; WAN024DTF; Start 46; Stop 70
accctctacaatttccagtcaaata

SEQ ID NO: 346914 - DNA, 25 bp, Artificial
  probe
  misc_feature (1)..(25): SEQ ID NO: 3107; WAN024DTF; Start 43; Stop 67
agaaccctctacaatttccagtcaa

SEQ ID NO: 346915 - DNA, 25 bp, Artificial
  probe
  misc_feature (1)..(25): SEQ ID NO: 3107; WAN024DTF; Start 47; Stop 71
ccctctacaatttccagtcaaataa

SEQ ID NO: 346916 - DNA, 25 bp, Artificial
  probe
  misc_feature (1)..(25): SEQ ID NO: 3107; WAN024DTF; Start 42; Stop 66
gagaaccctctacaatttccagtca

SEQ ID NO: 346917 - DNA, 25 bp, Artificial
  probe
  misc_feature (1)..(25): SEQ ID NO: 3107; WAN024DTF; Start 59; Stop 83
tccagtcaaataaattgcattcgtt

SEQ ID NO: 346918 - DNA, 25 bp, Artificial
  probe
  misc_feature (1)..(25): SEQ ID NO: 3107; WAN024DTF; Start 58; Stop 82
ttccagtcaaataaattgcattcgt

SEQ ID NO: 346919 - DNA, 25 bp, Artificial
  probe
  misc_feature (1)..(25): SEQ ID NO: 3107; WAN024DTF; Start 37; Stop 61
atttcgagaaccctctacaatttcc

SEQ ID NO: 346920 - DNA, 25 bp, Artificial
  probe
  misc_feature (1)..(25): SEQ ID NO: 3107; WAN024DTF; Start 60; Stop 84
ccagtcaaataaattgcattcgttt

SEQ ID NO: 346921 - DNA, 25 bp, Artificial
  probe
  misc_feature (1)..(25): SEQ ID NO: 3107; WAN024DTF; Start 36; Stop 60
aatttcgagaaccctctacaatttc

SEQ ID NO: 346922 - DNA, 25 bp, Artificial
  probe
  misc_feature (1)..(25): SEQ ID NO: 3107; WAN024DTF; Start 57; Stop 81
tttccagtcaaataaattgcattcg

SEQ ID NO: 346923 - DNA, 25 bp, Artificial
  probe
  misc_feature (1)..(25): SEQ ID NO: 3107; WAN024DTF; Start 48; Stop 72
cctctacaatttccagtcaaataaa

SEQ ID NO: 346924 - DNA, 25 bp, Artificial
  probe
  misc_feature (1)..(25): SEQ ID NO: 3107; WAN024DTF; Start 41; Stop 65
cgagaaccctctacaatttccagtc

SEQ ID NO: 346925 - DNA, 25 bp, Artificial
  probe
  misc_feature (1)..(25): SEQ ID NO: 3107; WAN024DTF; Start 38; Stop 62
tttcgagaaccctctacaatttcca

SEQ ID NO: 346926 - DNA, 25 bp, Artificial
  probe
  misc_feature (1)..(25): SEQ ID NO: 3107; WAN024DTF; Start 39; Stop 63
ttcgagaaccctctacaatttccag

SEQ ID NO: 346927 - DNA, 25 bp, Artificial
  probe
  misc_feature (1)..(25): SEQ ID NO: 3107; WAN024DTF; Start 75; Stop 99
gcattcgttttctcaagcaggtata

SEQ ID NO: 346928 - DNA, 25 bp, Artificial
  probe
  misc_feature (1)..(25): SEQ ID NO: 3107; WAN024DTF; Start 56; Stop 80
atttccagtcaaataaattgcattc

SEQ ID NO: 346929 - DNA, 25 bp, Artificial
  probe
  misc_feature (1)..(25): SEQ ID NO: 3107; WAN024DTF; Start 40; Stop 64
tcgagaaccctctacaatttccagt

SEQ ID NO: 346930 - DNA, 25 bp, Artificial
  probe
  misc_feature (1)..(25): SEQ ID NO: 3107; WAN024DTF; Start 8; Stop 32
ctcttgtccttattttaaccattca

SEQ ID NO: 346931 - DNA, 25 bp, Artificial
  probe
  misc_feature (1)..(25): SEQ ID NO: 3107; WAN024DTF; Start 79; Stop 103
tcgttttctcaagcaggtatactag

SEQ ID NO: 346932 - DNA, 25 bp, Artificial
  probe
  misc_feature (1)..(25): SEQ ID NO: 3107; WAN024DTF; Start 78; Stop 102
ttcgttttctcaagcaggtatacta

SEQ ID NO: 346933 - DNA, 25 bp, Artificial
  probe
  misc_feature (1)..(25): SEQ ID NO: 3107; WAN024DTF; Start 77; Stop 101
attcgttttctcaagcaggtatact

SEQ ID NO: 346934 - DNA, 25 bp, Artificial
  probe
  misc_feature (1)..(25): SEQ ID NO: 3107; WAN024DTF; Start 76; Stop 100
cattcgttttctcaagcaggtatac

SEQ ID NO: 346935 - DNA, 25 bp, Artificial
  probe
  misc_feature (1)..(25): SEQ ID NO: 3107; WAN024DTF; Start 68; Stop 92
ataaattgcattcgttttctcaagc

SEQ ID NO: 346936 - DNA, 25 bp, Artificial
  probe
  misc_feature (1)..(25): SEQ ID NO: 3107; WAN024DTF; Start 7; Stop 31
tctcttgtccttattttaaccattc

SEQ ID NO: 346937 - DNA, 25 bp, Artificial
  probe
  misc_feature (1)..(25): SEQ ID NO: 3107; WAN024DTF; Start 35; Stop 59
aaatttcgagaaccctctacaattt

SEQ ID NO: 346938 - DNA, 25 bp, Artificial
  probe
  misc_feature (1)..(25): SEQ ID NO: 3107; WAN024DTF; Start 4; Stop 28
ttttctcttgtccttattttaacca

SEQ ID NO: 346939 - DNA, 25 bp, Artificial
  probe
  misc_feature (1)..(25): SEQ ID NO: 3107; WAN024DTF; Start 49; Stop 73
ctctacaatttccagtcaaataaat

SEQ ID NO: 346940 - DNA, 25 bp, Artificial
  probe
  misc_feature (1)..(25): SEQ ID NO: 3107; WAN024DTF; Start 6; Stop 30
ttctcttgtccttattttaaccatt

SEQ ID NO: 346941 - DNA, 25 bp, Artificial
  probe
  misc_feature (1)..(25): SEQ ID NO: 3107; WAN024DTF; Start 5; Stop 29
tttctcttgtccttattttaaccat

SEQ ID NO: 346942 - DNA, 25 bp, Artificial
  probe
  misc_feature (1)..(25): SEQ ID NO: 3107; WAN024DTF; Start 61; Stop 85
cagtcaaataaattgcattcgtttt

SEQ ID NO: 346943 - DNA, 25 bp, Artificial
  probe
  misc_feature (1)..(25): SEQ ID NO: 3107; WAN024DTF; Start 3; Stop 27
gttttctcttgtccttattttaacc

SEQ ID NO: 346944 - DNA, 25 bp, Artificial
  probe
  misc_feature (1)..(25): SEQ ID NO: 3108; WAN024D5K; Start 721; Stop 745
tatctcggaacctactacatcttga

SEQ ID NO: 346945 - DNA, 25 bp, Artificial
  probe
  misc_feature (1)..(25): SEQ ID NO: 3108; WAN024D5K; Start 357; Stop 381
tctaagtgctgttattattctggct

SEQ ID NO: 346946 - DNA, 25 bp, Artificial
  probe
  misc_feature (1)..(25): SEQ ID NO: 3108; WAN024D5K; Start 353; Stop 377
tggctctaagtgctgttattattct

SEQ ID NO: 346947 - DNA, 25 bp, Artificial
  probe
  misc_feature (1)..(25): SEQ ID NO: 3108; WAN024D5K; Start 348; Stop 372
tgtattggctctaagtgctgttatt

SEQ ID NO: 346948 - DNA, 25 bp, Artificial
  probe
  misc_feature (1)..(25): SEQ ID NO: 3108; WAN024D5K; Start 356; Stop 380
ctctaagtgctgttattattctggc

SEQ ID NO: 346949 - DNA, 25 bp, Artificial
  probe
  misc_feature (1)..(25): SEQ ID NO: 3108; WAN024D5K; Start 355; Stop 379
gctctaagtgctgttattattctgg

SEQ ID NO: 346950 - DNA, 25 bp, Artificial
  probe
  misc_feature (1)..(25): SEQ ID NO: 3108; WAN024D5K; Start 354; Stop 378
ggctctaagtgctgttattattctg

SEQ ID NO: 346951 - DNA, 25 bp, Artificial
  probe
  misc_feature (1)..(25): SEQ ID NO: 3108; WAN024D5K; Start 720; Stop 744
ttatctcggaacctactacatcttg

SEQ ID NO: 346952 - DNA, 25 bp, Artificial
  probe
  misc_feature (1)..(25): SEQ ID NO: 3108; WAN024D5K; Start 347; Stop 371
ctgtattggctctaagtgctgttat

SEQ ID NO: 346953 - DNA, 25 bp, Artificial
  probe
  misc_feature (1)..(25): SEQ ID NO: 3108; WAN024D5K; Start 352; Stop 376
ttggctctaagtgctgttattattc

SEQ ID NO: 346954 - DNA, 25 bp, Artificial
  probe
  misc_feature (1)..(25): SEQ ID NO: 3108; WAN024D5K; Start 358; Stop 382
ctaagtgctgttattattctggctt

SEQ ID NO: 346955 - DNA, 25 bp, Artificial
  probe
  misc_feature (1)..(25): SEQ ID NO: 3108; WAN024D5K; Start 349; Stop 373
gtattggctctaagtgctgttatta

SEQ ID NO: 346956 - DNA, 25 bp, Artificial
  probe
  misc_feature (1)..(25): SEQ ID NO: 3108; WAN024D5K; Start 351; Stop 375
attggctctaagtgctgttattatt

SEQ ID NO: 346957 - DNA, 25 bp, Artificial
  probe
  misc_feature (1)..(25): SEQ ID NO: 3108; WAN024D5K; Start 722; Stop 746
atctcggaacctactacatcttgag

SEQ ID NO: 346958 - DNA, 25 bp, Artificial
  probe
  misc_feature (1)..(25): SEQ ID NO: 3108; WAN024D5K; Start 628; Stop 652
ttctatgtcaattcactggtaggac

SEQ ID NO: 346959 - DNA, 25 bp, Artificial
  probe
  misc_feature (1)..(25): SEQ ID NO: 3108; WAN024D5K; Start 630; Stop 654
ctatgtcaattcactggtaggactc

SEQ ID NO: 346960 - DNA, 25 bp, Artificial
  probe
  misc_feature (1)..(25): SEQ ID NO: 3108; WAN024D5K; Start 636; Stop 660
caattcactggtaggactcaatgac

SEQ ID NO: 346961 - DNA, 25 bp, Artificial
  probe
  misc_feature (1)..(25): SEQ ID NO: 3108; WAN024D5K; Start 635; Stop 659
tcaattcactggtaggactcaatga

SEQ ID NO: 346962 - DNA, 25 bp, Artificial
  probe
  misc_feature (1)..(25): SEQ ID NO: 3108; WAN024D5K; Start 724; Stop 748
ctcggaacctactacatcttgagaa

SEQ ID NO: 346963 - DNA, 25 bp, Artificial
  probe
  misc_feature (1)..(25): SEQ ID NO: 3108; WAN024D5K; Start 629; Stop 653
tctatgtcaattcactggtaggact

SEQ ID NO: 346964 - DNA, 25 bp, Artificial
  probe
  misc_feature (1)..(25): SEQ ID NO: 3108; WAN024D5K; Start 350; Stop 374
tattggctctaagtgctgttattat

SEQ ID NO: 346965 - DNA, 25 bp, Artificial
  probe
  misc_feature (1)..(25): SEQ ID NO: 3108; WAN024D5K; Start 631; Stop 655
tatgtcaattcactggtaggactca

SEQ ID NO: 346966 - DNA, 25 bp, Artificial
  probe
  misc_feature (1)..(25): SEQ ID NO: 3108; WAN024D5K; Start 634; Stop 658
gtcaattcactggtaggactcaatg

SEQ ID NO: 346967 - DNA, 25 bp, Artificial
  probe
  misc_feature (1)..(25): SEQ ID NO: 3108; WAN024D5K; Start 633; Stop 657
tgtcaattcactggtaggactcaat

SEQ ID NO: 346968 - DNA, 25 bp, Artificial
  probe
  misc_feature (1)..(25): SEQ ID NO: 3108; WAN024D5K; Start 632; Stop 656
atgtcaattcactggtaggactcaa

SEQ ID NO: 346969 - DNA, 25 bp, Artificial
  probe
  misc_feature (1)..(25): SEQ ID NO: 3108; WAN024D5K; Start 346; Stop 370
gctgtattggctctaagtgctgtta

SEQ ID NO: 346970 - DNA, 25 bp, Artificial
  probe
  misc_feature (1)..(25): SEQ ID NO: 3108; WAN024D5K; Start 292; Stop 316
catatcatcacagccaaactaatcg

SEQ ID NO: 346971 - DNA, 25 bp, Artificial
  probe
  misc_feature (1)..(25): SEQ ID NO: 3108; WAN024D5K; Start 291; Stop 315
ccatatcatcacagccaaactaatc

SEQ ID NO: 346972 - DNA, 25 bp, Artificial
  probe
  misc_feature (1)..(25): SEQ ID NO: 3108; WAN024D5K; Start 290; Stop 314
accatatcatcacagccaaactaat

SEQ ID NO: 346973 - DNA, 25 bp, Artificial
  probe
  misc_feature (1)..(25): SEQ ID NO: 3108; WAN024D5K; Start 39; Stop 63
taacaagtggtatttagccctctac

SEQ ID NO: 346974 - DNA, 25 bp, Artificial
  probe
  misc_feature (1)..(25): SEQ ID NO: 3108; WAN024D5K; Start 726; Stop 750
cggaacctactacatcttgagaaat

SEQ ID NO: 346975 - DNA, 25 bp, Artificial
  probe
  misc_feature (1)..(25): SEQ ID NO: 3108; WAN024D5K; Start 221; Stop 245
ttaaacgcttcaaaggtagtgtcta

SEQ ID NO: 346976 - DNA, 25 bp, Artificial
  probe
  misc_feature (1)..(25): SEQ ID NO: 3108; WAN024D5K; Start 320; Stop 344
cctttatctggtcattgattagcac

SEQ ID NO: 346977 - DNA, 25 bp, Artificial
  probe
  misc_feature (1)..(25): SEQ ID NO: 3109; WAN024DP6; Start 64; Stop 88
tttgaaaatctacaacaagttcact

SEQ ID NO: 346978 - DNA, 25 bp, Artificial
  probe
  misc_feature (1)..(25): SEQ ID NO: 3109; WAN024DP6; Start 63; Stop 87
ttttgaaaatctacaacaagttcac

SEQ ID NO: 346979 - DNA, 25 bp, Artificial
  probe
  misc_feature (1)..(25): SEQ ID NO: 3109; WAN024DP6; Start 62; Stop 86
attttgaaaatctacaacaagttca

SEQ ID NO: 346980 - DNA, 25 bp, Artificial
  probe
  misc_feature (1)..(25): SEQ ID NO: 3110; WAN024C75; Start 166; Stop 190
cgtatcaataactggctgactaatc

SEQ ID NO: 346981 - DNA, 25 bp, Artificial
  probe
  misc_feature (1)..(25): SEQ ID NO: 3110; WAN024C75; Start 165; Stop 189
gcgtatcaataactggctgactaat

SEQ ID NO: 346982 - DNA, 25 bp, Artificial
  probe
  misc_feature (1)..(25): SEQ ID NO: 3110; WAN024C75; Start 167; Stop 191
gtatcaataactggctgactaatct

SEQ ID NO: 346983 - DNA, 25 bp, Artificial
  probe
  misc_feature (1)..(25): SEQ ID NO: 3110; WAN024C75; Start 173; Stop 197
ataactggctgactaatctttggaa

SEQ ID NO: 346984 - DNA, 25 bp, Artificial
  probe
  misc_feature (1)..(25): SEQ ID NO: 3110; WAN024C75; Start 172; Stop 196
aataactggctgactaatctttgga

SEQ ID NO: 346985 - DNA, 25 bp, Artificial
  probe
  misc_feature (1)..(25): SEQ ID NO: 3110; WAN024C75; Start 168; Stop 192
tatcaataactggctgactaatctt

SEQ ID NO: 346986 - DNA, 25 bp, Artificial
  probe
  misc_feature (1)..(25): SEQ ID NO: 3110; WAN024C75; Start 174; Stop 198
taactggctgactaatctttggaag

SEQ ID NO: 346987 - DNA, 25 bp, Artificial
  probe
  misc_feature (1)..(25): SEQ ID NO: 3110; WAN024C75; Start 153; Stop 177
tagcaaactccagcgtatcaataac

SEQ ID NO: 346988 - DNA, 25 bp, Artificial
  probe
  misc_feature (1)..(25): SEQ ID NO: 3110; WAN024C75; Start 171; Stop 195
caataactggctgactaatctttgg

SEQ ID NO: 346989 - DNA, 25 bp, Artificial
  probe
  misc_feature (1)..(25): SEQ ID NO: 3110; WAN024C75; Start 152; Stop 176
ctagcaaactccagcgtatcaataa

SEQ ID NO: 346990 - DNA, 25 bp, Artificial
  probe
  misc_feature (1)..(25): SEQ ID NO: 3110; WAN024C75; Start 127; Stop 151
gcgtttatactcaggatagaggttt

SEQ ID NO: 346991 - DNA, 25 bp, Artificial
  probe
  misc_feature (1)..(25): SEQ ID NO: 3110; WAN024C75; Start 170; Stop 194
tcaataactggctgactaatctttg

SEQ ID NO: 346992 - DNA, 25 bp, Artificial
  probe
  misc_feature (1)..(25): SEQ ID NO: 3110; WAN024C75; Start 151; Stop 175
tctagcaaactccagcgtatcaata

SEQ ID NO: 346993 - DNA, 25 bp, Artificial
  probe
  misc_feature (1)..(25): SEQ ID NO: 3110; WAN024C75; Start 128; Stop 152
cgtttatactcaggatagaggtttc

SEQ ID NO: 346994 - DNA, 25 bp, Artificial
  probe
  misc_feature (1)..(25): SEQ ID NO: 3110; WAN024C75; Start 124; Stop 148
atggcgtttatactcaggatagagg

SEQ ID NO: 346995 - DNA, 25 bp, Artificial
  probe
  misc_feature (1)..(25): SEQ ID NO: 3110; WAN024C75; Start 169; Stop 193
atcaataactggctgactaatcttt

SEQ ID NO: 346996 - DNA, 25 bp, Artificial
  probe
  misc_feature (1)..(25): SEQ ID NO: 3110; WAN024C75; Start 164; Stop 188
agcgtatcaataactggctgactaa

SEQ ID NO: 346997 - DNA, 25 bp, Artificial
  probe
  misc_feature (1)..(25): SEQ ID NO: 3110; WAN024C75; Start 126; Stop 150
ggcgtttatactcaggatagaggtt

SEQ ID NO: 346998 - DNA, 25 bp, Artificial
  probe
  misc_feature (1)..(25): SEQ ID NO: 3110; WAN024C75; Start 123; Stop 147
catggcgtttatactcaggatagag

SEQ ID NO: 346999 - DNA, 25 bp, Artificial
  probe
  misc_feature (1)..(25): SEQ ID NO: 3110; WAN024C75; Start 154; Stop 178
agcaaactccagcgtatcaataact

SEQ ID NO: 347000 - DNA, 25 bp, Artificial
  probe
  misc_feature (1)..(25): SEQ ID NO: 3110; WAN024C75; Start 133; Stop 157
atactcaggatagaggtttctagca

SEQ ID NO: 347001 - DNA, 25 bp, Artificial
  probe
  misc_feature (1)..(25): SEQ ID NO: 3110; WAN024C75; Start 134; Stop 158
tactcaggatagaggtttctagcaa

SEQ ID NO: 347002 - DNA, 25 bp, Artificial
  probe
  misc_feature (1)..(25): SEQ ID NO: 3110; WAN024C75; Start 211; Stop 235
ataattagcattcataaagccaacg

SEQ ID NO: 347003 - DNA, 25 bp, Artificial
  probe
  misc_feature (1)..(25): SEQ ID NO: 3110; WAN024C75; Start 150; Stop 174
ttctagcaaactccagcgtatcaat

SEQ ID NO: 347004 - DNA, 25 bp, Artificial
  probe
  misc_feature (1)..(25): SEQ ID NO: 3110; WAN024C75; Start 135; Stop 159
actcaggatagaggtttctagcaaa

SEQ ID NO: 347005 - DNA, 25 bp, Artificial
  probe
  misc_feature (1)..(25): SEQ ID NO: 3110; WAN024C75; Start 213; Stop 237
aattagcattcataaagccaacgtc

SEQ ID NO: 347006 - DNA, 25 bp, Artificial
  probe
  misc_feature (1)..(25): SEQ ID NO: 3110; WAN024C75; Start 212; Stop 236
taattagcattcataaagccaacgt

SEQ ID NO: 347007 - DNA, 25 bp, Artificial
  probe
  misc_feature (1)..(25): SEQ ID NO: 3110; WAN024C75; Start 149; Stop 173
tttctagcaaactccagcgtatcaa

SEQ ID NO: 347008 - DNA, 25 bp, Artificial
  probe
  misc_feature (1)..(25): SEQ ID NO: 3110; WAN024C75; Start 220; Stop 244
attcataaagccaacgtcaaaggta

SEQ ID NO: 347009 - DNA, 25 bp, Artificial
  probe
  misc_feature (1)..(25): SEQ ID NO: 3110; WAN024C75; Start 132; Stop 156
tatactcaggatagaggtttctagc

SEQ ID NO: 347010 - DNA, 25 bp, Artificial
  probe
  misc_feature (1)..(25): SEQ ID NO: 3110; WAN024C75; Start 125; Stop 149
tggcgtttatactcaggatagaggt

SEQ ID NO: 347011 - DNA, 25 bp, Artificial
  probe
  misc_feature (1)..(25): SEQ ID NO: 3110; WAN024C75; Start 214; Stop 238
attagcattcataaagccaacgtca

SEQ ID NO: 347012 - DNA, 25 bp, Artificial
  probe
  misc_feature (1)..(25): SEQ ID NO: 3110; WAN024C75; Start 221; Stop 245
ttcataaagccaacgtcaaaggtag

SEQ ID NO: 347013 - DNA, 25 bp, Artificial
  probe
  misc_feature (1)..(25): SEQ ID NO: 3111; WAN024EVS; Start 236; Stop 260
ttcatcaaatcaagttctaacacgc

SEQ ID NO: 347014 - DNA, 25 bp, Artificial
  probe
  misc_feature (1)..(25): SEQ ID NO: 3111; WAN024EVS; Start 230; Stop 254
acgacattcatcaaatcaagttcta

SEQ ID NO: 347015 - DNA, 25 bp, Artificial
  probe
  misc_feature (1)..(25): SEQ ID NO: 3111; WAN024EVS; Start 229; Stop 253
aacgacattcatcaaatcaagttct

SEQ ID NO: 347016 - DNA, 25 bp, Artificial
  probe
  misc_feature (1)..(25): SEQ ID NO: 3111; WAN024EVS; Start 228; Stop 252
caacgacattcatcaaatcaagttc

SEQ ID NO: 347017 - DNA, 25 bp, Artificial
  probe
  misc_feature (1)..(25): SEQ ID NO: 3111; WAN024EVS; Start 227; Stop 251
gcaacgacattcatcaaatcaagtt

SEQ ID NO: 347018 - DNA, 25 bp, Artificial
  probe
  misc_feature (1)..(25): SEQ ID NO: 3111; WAN024EVS; Start 235; Stop 259
attcatcaaatcaagttctaacacg

SEQ ID NO: 347019 - DNA, 25 bp, Artificial
  probe
  misc_feature (1)..(25): SEQ ID NO: 3111; WAN024EVS; Start 185; Stop 209
ttattcatgcgttcttcaaagtcac

SEQ ID NO: 347020 - DNA, 25 bp, Artificial
  probe
  misc_feature (1)..(25): SEQ ID NO: 3111; WAN024EVS; Start 184; Stop 208
attattcatgcgttcttcaaagtca

SEQ ID NO: 347021 - DNA, 25 bp, Artificial
  probe
  misc_feature (1)..(25): SEQ ID NO: 3111; WAN024EVS; Start 231; Stop 255
cgacattcatcaaatcaagttctaa

SEQ ID NO: 347022 - DNA, 25 bp, Artificial
  probe
  misc_feature (1)..(25): SEQ ID NO: 3111; WAN024EVS; Start 157; Stop 181
gccatcttcttcaatatccttgatg

SEQ ID NO: 347023 - DNA, 25 bp, Artificial
  probe
  misc_feature (1)..(25): SEQ ID NO: 3111; WAN024EVS; Start 173; Stop 197
tccttgatgatattattcatgcgtt

SEQ ID NO: 347024 - DNA, 25 bp, Artificial
  probe
  misc_feature (1)..(25): SEQ ID NO: 3111; WAN024EVS; Start 186; Stop 210
tattcatgcgttcttcaaagtcacc

SEQ ID NO: 347025 - DNA, 25 bp, Artificial
  probe
  misc_feature (1)..(25): SEQ ID NO: 3111; WAN024EVS; Start 174; Stop 198
ccttgatgatattattcatgcgttc

SEQ ID NO: 347026 - DNA, 25 bp, Artificial
  probe
  misc_feature (1)..(25): SEQ ID NO: 3111; WAN024EVS; Start 172; Stop 196
atccttgatgatattattcatgcgt

SEQ ID NO: 347027 - DNA, 25 bp, Artificial
  probe
  misc_feature (1)..(25): SEQ ID NO: 3111; WAN024EVS; Start 183; Stop 207
tattattcatgcgttcttcaaagtc

SEQ ID NO: 347028 - DNA, 25 bp, Artificial
  probe
  misc_feature (1)..(25): SEQ ID NO: 3111; WAN024EVS; Start 233; Stop 257
acattcatcaaatcaagttctaaca

SEQ ID NO: 347029 - DNA, 25 bp, Artificial
  probe
  misc_feature (1)..(25): SEQ ID NO: 3111; WAN024EVS; Start 158; Stop 182
ccatcttcttcaatatccttgatga

SEQ ID NO: 347030 - DNA, 25 bp, Artificial
  probe
  misc_feature (1)..(25): SEQ ID NO: 3111; WAN024EVS; Start 234; Stop 258
cattcatcaaatcaagttctaacac

SEQ ID NO: 347031 - DNA, 25 bp, Artificial
  probe
  misc_feature (1)..(25): SEQ ID NO: 3111; WAN024EVS; Start 225; Stop 249
ctgcaacgacattcatcaaatcaag

SEQ ID NO: 347032 - DNA, 25 bp, Artificial
  probe
  misc_feature (1)..(25): SEQ ID NO: 3111; WAN024EVS; Start 178; Stop 202
gatgatattattcatgcgttcttca

SEQ ID NO: 347033 - DNA, 25 bp, Artificial
  probe
  misc_feature (1)..(25): SEQ ID NO: 3111; WAN024EVS; Start 177; Stop 201
tgatgatattattcatgcgttcttc

SEQ ID NO: 347034 - DNA, 25 bp, Artificial
  probe
  misc_feature (1)..(25): SEQ ID NO: 3111; WAN024EVS; Start 175; Stop 199
cttgatgatattattcatgcgttct

SEQ ID NO: 347035 - DNA, 25 bp, Artificial
  probe
  misc_feature (1)..(25): SEQ ID NO: 3111; WAN024EVS; Start 182; Stop 206
atattattcatgcgttcttcaaagt

SEQ ID NO: 347036 - DNA, 25 bp, Artificial
  probe
  misc_feature (1)..(25): SEQ ID NO: 3111; WAN024EVS; Start 232; Stop 256
gacattcatcaaatcaagttctaac

SEQ ID NO: 347037 - DNA, 25 bp, Artificial
  probe
  misc_feature (1)..(25): SEQ ID NO: 3111; WAN024EVS; Start 226; Stop 250
tgcaacgacattcatcaaatcaagt

SEQ ID NO: 347038 - DNA, 25 bp, Artificial
  probe
  misc_feature (1)..(25): SEQ ID NO: 3111; WAN024EVS; Start 180; Stop 204
tgatattattcatgcgttcttcaaa

SEQ ID NO: 347039 - DNA, 25 bp, Artificial
  probe
  misc_feature (1)..(25): SEQ ID NO: 3111; WAN024EVS; Start 181; Stop 205
gatattattcatgcgttcttcaaag

SEQ ID NO: 347040 - DNA, 25 bp, Artificial
  probe
  misc_feature (1)..(25): SEQ ID NO: 3111; WAN024EVS; Start 179; Stop 203
atgatattattcatgcgttcttcaa

SEQ ID NO: 347041 - DNA, 25 bp, Artificial
  probe
  misc_feature (1)..(25): SEQ ID NO: 3111; WAN024EVS; Start 176; Stop 200
ttgatgatattattcatgcgttctt

SEQ ID NO: 347042 - DNA, 25 bp, Artificial
  probe
  misc_feature (1)..(25): SEQ ID NO: 3111; WAN024EVS; Start 171; Stop 195
tatccttgatgatattattcatgcg

SEQ ID NO: 347043 - DNA, 25 bp, Artificial
  probe
  misc_feature (1)..(25): SEQ ID NO: 3111; WAN024EVS; Start 224; Stop 248
cctgcaacgacattcatcaaatcaa

SEQ ID NO: 347044 - DNA, 25 bp, Artificial
  probe
  misc_feature (1)..(25): SEQ ID NO: 3111; WAN024EVS; Start 187; Stop 211
attcatgcgttcttcaaagtcacca

SEQ ID NO: 347045 - DNA, 25 bp, Artificial
  probe
  misc_feature (1)..(25): SEQ ID NO: 3111; WAN024EVS; Start 156; Stop 180
ggccatcttcttcaatatccttgat

SEQ ID NO: 347046 - DNA, 25 bp, Artificial
  probe
  misc_feature (1)..(25): SEQ ID NO: 3112; WAN024CGI; Start 175; Stop 199
aatgacgctaagattgttgagttct

SEQ ID NO: 347047 - DNA, 25 bp, Artificial
  probe
  misc_feature (1)..(25): SEQ ID NO: 3112; WAN024CGI; Start 176; Stop 200
atgacgctaagattgttgagttctg

SEQ ID NO: 347048 - DNA, 25 bp, Artificial
  probe
  misc_feature (1)..(25): SEQ ID NO: 3112; WAN024CGI; Start 224; Stop 248
tagaagaacaacaagcggtagaact

SEQ ID NO: 347049 - DNA, 25 bp, Artificial
  probe
  misc_feature (1)..(25): SEQ ID NO: 3112; WAN024CGI; Start 223; Stop 247
gtagaagaacaacaagcggtagaac

SEQ ID NO: 347050 - DNA, 25 bp, Artificial
  probe
  misc_feature (1)..(25): SEQ ID NO: 3112; WAN024CGI; Start 165; Stop 189
attactgtccaatgacgctaagatt

SEQ ID NO: 347051 - DNA, 25 bp, Artificial
  probe
  misc_feature (1)..(25): SEQ ID NO: 3112; WAN024CGI; Start 163; Stop 187
ttattactgtccaatgacgctaaga

SEQ ID NO: 347052 - DNA, 25 bp, Artificial
  probe
  misc_feature (1)..(25): SEQ ID NO: 3112; WAN024CGI; Start 164; Stop 188
tattactgtccaatgacgctaagat

SEQ ID NO: 347053 - DNA, 25 bp, Artificial
  probe
  misc_feature (1)..(25): SEQ ID NO: 3112; WAN024CGI; Start 222; Stop 246
tgtagaagaacaacaagcggtagaa

SEQ ID NO: 347054 - DNA, 25 bp, Artificial
  probe
  misc_feature (1)..(25): SEQ ID NO: 3112; WAN024CGI; Start 95; Stop 119
cccaagagcgtaaagagaagattat

SEQ ID NO: 347055 - DNA, 25 bp, Artificial
  probe
  misc_feature (1)..(25): SEQ ID NO: 3112; WAN024CGI; Start 116; Stop 140
ttattgactcatacagactttcgca

SEQ ID NO: 347056 - DNA, 25 bp, Artificial
  probe
  misc_feature (1)..(25): SEQ ID NO: 3112; WAN024CGI; Start 117; Stop 141
tattgactcatacagactttcgcag

SEQ ID NO: 347057 - DNA, 25 bp, Artificial
  probe
  misc_feature (1)..(25): SEQ ID NO: 3112; WAN024CGI; Start 115; Stop 139
attattgactcatacagactttcgc

SEQ ID NO: 347058 - DNA, 25 bp, Artificial
  probe
  misc_feature (1)..(25): SEQ ID NO: 3112; WAN024CGI; Start 125; Stop 149
catacagactttcgcagatgatttc

SEQ ID NO: 347059 - DNA, 25 bp, Artificial
  probe
  misc_feature (1)..(25): SEQ ID NO: 3112; WAN024CGI; Start 96; Stop 120
ccaagagcgtaaagagaagattatt

SEQ ID NO: 347060 - DNA, 25 bp, Artificial
  probe
  misc_feature (1)..(25): SEQ ID NO: 3112; WAN024CGI; Start 182; Stop 206
ctaagattgttgagttctgggagta

SEQ ID NO: 347061 - DNA, 25 bp, Artificial
  probe
  misc_feature (1)..(25): SEQ ID NO: 3112; WAN024CGI; Start 126; Stop 150
atacagactttcgcagatgatttcc

SEQ ID NO: 347062 - DNA, 25 bp, Artificial
  probe
  misc_feature (1)..(25): SEQ ID NO: 3112; WAN024CGI; Start 184; Stop 208
aagattgttgagttctgggagtatg

SEQ ID NO: 347063 - DNA, 25 bp, Artificial
  probe
  misc_feature (1)..(25): SEQ ID NO: 3112; WAN024CGI; Start 110; Stop 134
agaagattattgactcatacagact

SEQ ID NO: 347064 - DNA, 25 bp, Artificial
  probe
  misc_feature (1)..(25): SEQ ID NO: 3112; WAN024CGI; Start 100; Stop 124
gagcgtaaagagaagattattgact

SEQ ID NO: 347065 - DNA, 25 bp, Artificial
  probe
  misc_feature (1)..(25): SEQ ID NO: 3112; WAN024CGI; Start 99; Stop 123
agagcgtaaagagaagattattgac

SEQ ID NO: 347066 - DNA, 25 bp, Artificial
  probe
  misc_feature (1)..(25): SEQ ID NO: 3112; WAN024CGI; Start 174; Stop 198
caatgacgctaagattgttgagttc

SEQ ID NO: 347067 - DNA, 25 bp, Artificial
  probe
  misc_feature (1)..(25): SEQ ID NO: 3112; WAN024CGI; Start 183; Stop 207
taagattgttgagttctgggagtat

SEQ ID NO: 347068 - DNA, 25 bp, Artificial
  probe
  misc_feature (1)..(25): SEQ ID NO: 3112; WAN024CGI; Start 94; Stop 118
acccaagagcgtaaagagaagatta

SEQ ID NO: 347069 - DNA, 25 bp, Artificial
  probe
  misc_feature (1)..(25): SEQ ID NO: 3112; WAN024CGI; Start 166; Stop 190
ttactgtccaatgacgctaagattg

SEQ ID NO: 347070 - DNA, 25 bp, Artificial
  probe
  misc_feature (1)..(25): SEQ ID NO: 3112; WAN024CGI; Start 225; Stop 249
agaagaacaacaagcggtagaactg

SEQ ID NO: 347071 - DNA, 25 bp, Artificial
  probe
  misc_feature (1)..(25): SEQ ID NO: 3112; WAN024CGI; Start 177; Stop 201
tgacgctaagattgttgagttctgg

SEQ ID NO: 347072 - DNA, 25 bp, Artificial
  probe
  misc_feature (1)..(25): SEQ ID NO: 3112; WAN024CGI; Start 129; Stop 153
cagactttcgcagatgatttccaat

SEQ ID NO: 347073 - DNA, 25 bp, Artificial
  probe
  misc_feature (1)..(25): SEQ ID NO: 3112; WAN024CGI; Start 98; Stop 122
aagagcgtaaagagaagattattga

SEQ ID NO: 347074 - DNA, 25 bp, Artificial
  probe
  misc_feature (1)..(25): SEQ ID NO: 3112; WAN024CGI; Start 102; Stop 126
gcgtaaagagaagattattgactca

SEQ ID NO: 347075 - DNA, 25 bp, Artificial
  probe
  misc_feature (1)..(25): SEQ ID NO: 3112; WAN024CGI; Start 160; Stop 184
tctttattactgtccaatgacgcta

SEQ ID NO: 347076 - DNA, 25 bp, Artificial
  probe
  misc_feature (1)..(25): SEQ ID NO: 3112; WAN024CGI; Start 158; Stop 182
tttctttattactgtccaatgacgc

SEQ ID NO: 347077 - DNA, 25 bp, Artificial
  probe
  misc_feature (1)..(25): SEQ ID NO: 3112; WAN024CGI; Start 173; Stop 197
ccaatgacgctaagattgttgagtt

SEQ ID NO: 347078 - DNA, 25 bp, Artificial
  probe
  misc_feature (1)..(25): SEQ ID NO: 3112; WAN024CGI; Start 159; Stop 183
ttctttattactgtccaatgacgct

SEQ ID NO: 347079 - DNA, 25 bp, Artificial
  probe
  misc_feature (1)..(25): SEQ ID NO: 3113; WAN024DKM; Start 629; Stop 653
gtagccgtatcacttcatctatcat

SEQ ID NO: 347080 - DNA, 25 bp, Artificial
  probe
  misc_feature (1)..(25): SEQ ID NO: 3113; WAN024DKM; Start 232; Stop 256
tatatcaccgcttctattgttgtcc

SEQ ID NO: 347081 - DNA, 25 bp, Artificial
  probe
  misc_feature (1)..(25): SEQ ID NO: 3113; WAN024DKM; Start 230; Stop 254
cctatatcaccgcttctattgttgt

SEQ ID NO: 347082 - DNA, 25 bp, Artificial
  probe
  misc_feature (1)..(25): SEQ ID NO: 3113; WAN024DKM; Start 231; Stop 255
ctatatcaccgcttctattgttgtc

SEQ ID NO: 347083 - DNA, 25 bp, Artificial
  probe
  misc_feature (1)..(25): SEQ ID NO: 3113; WAN024DKM; Start 630; Stop 654
tagccgtatcacttcatctatcatt

SEQ ID NO: 347084 - DNA, 25 bp, Artificial
  probe
  misc_feature (1)..(25): SEQ ID NO: 3113; WAN024DKM; Start 343; Stop 367
cgttatattgctctagttctcgctt

SEQ ID NO: 347085 - DNA, 25 bp, Artificial
  probe
  misc_feature (1)..(25): SEQ ID NO: 3113; WAN024DKM; Start 453; Stop 477
tctgacgattggtatcatcttaaca

SEQ ID NO: 347086 - DNA, 25 bp, Artificial
  probe
  misc_feature (1)..(25): SEQ ID NO: 3113; WAN024DKM; Start 479; Stop 503
ctggtagtatgattgtcacttggtt

SEQ ID NO: 347087 - DNA, 25 bp, Artificial
  probe
  misc_feature (1)..(25): SEQ ID NO: 3113; WAN024DKM; Start 628; Stop 652
agtagccgtatcacttcatctatca

SEQ ID NO: 347088 - DNA, 25 bp, Artificial
  probe
  misc_feature (1)..(25): SEQ ID NO: 3113; WAN024DKM; Start 480; Stop 504
tggtagtatgattgtcacttggttg

SEQ ID NO: 347089 - DNA, 25 bp, Artificial
  probe
  misc_feature (1)..(25): SEQ ID NO: 3113; WAN024DKM; Start 731; Stop 755
ttccaatccaatatactaaggttgc

SEQ ID NO: 347090 - DNA, 25 bp, Artificial
  probe
  misc_feature (1)..(25): SEQ ID NO: 3113; WAN024DKM; Start 570; Stop 594
ttcctcaattccagagatgattcag

SEQ ID NO: 347091 - DNA, 25 bp, Artificial
  probe
  misc_feature (1)..(25): SEQ ID NO: 3113; WAN024DKM; Start 341; Stop 365
ctcgttatattgctctagttctcgc

SEQ ID NO: 347092 - DNA, 25 bp, Artificial
  probe
  misc_feature (1)..(25): SEQ ID NO: 3113; WAN024DKM; Start 455; Stop 479
tgacgattggtatcatcttaacagc

SEQ ID NO: 347093 - DNA, 25 bp, Artificial
  probe
  misc_feature (1)..(25): SEQ ID NO: 3113; WAN024DKM; Start 340; Stop 364
actcgttatattgctctagttctcg

SEQ ID NO: 347094 - DNA, 25 bp, Artificial
  probe
  misc_feature (1)..(25): SEQ ID NO: 3113; WAN024DKM; Start 342; Stop 366
tcgttatattgctctagttctcgct

SEQ ID NO: 347095 - DNA, 25 bp, Artificial
  probe
  misc_feature (1)..(25): SEQ ID NO: 3113; WAN024DKM; Start 481; Stop 505
ggtagtatgattgtcacttggttgg

SEQ ID NO: 347096 - DNA, 25 bp, Artificial
  probe
  misc_feature (1)..(25): SEQ ID NO: 3113; WAN024DKM; Start 452; Stop 476
ttctgacgattggtatcatcttaac

SEQ ID NO: 347097 - DNA, 25 bp, Artificial
  probe
  misc_feature (1)..(25): SEQ ID NO: 3113; WAN024DKM; Start 337; Stop 361
gctactcgttatattgctctagttc

SEQ ID NO: 347098 - DNA, 25 bp, Artificial
  probe
  misc_feature (1)..(25): SEQ ID NO: 3113; WAN024DKM; Start 454; Stop 478
ctgacgattggtatcatcttaacag

SEQ ID NO: 347099 - DNA, 25 bp, Artificial
  probe
  misc_feature (1)..(25): SEQ ID NO: 3113; WAN024DKM; Start 233; Stop 257
atatcaccgcttctattgttgtcca

SEQ ID NO: 347100 - DNA, 25 bp, Artificial
  probe
  misc_feature (1)..(25): SEQ ID NO: 3113; WAN024DKM; Start 923; Stop 947
caactacttctccaactggtattgc

SEQ ID NO: 347101 - DNA, 25 bp, Artificial
  probe
  misc_feature (1)..(25): SEQ ID NO: 3113; WAN024DKM; Start 922; Stop 946
gcaactacttctccaactggtattg

SEQ ID NO: 347102 - DNA, 25 bp, Artificial
  probe
  misc_feature (1)..(25): SEQ ID NO: 3113; WAN024DKM; Start 86; Stop 110
ttcgtatcggaactagcattacagt

SEQ ID NO: 347103 - DNA, 25 bp, Artificial
  probe
  misc_feature (1)..(25): SEQ ID NO: 3113; WAN024DKM; Start 700; Stop 724
acaacttatgttcaacaagcagaat

SEQ ID NO: 347104 - DNA, 25 bp, Artificial
  probe
  misc_feature (1)..(25): SEQ ID NO: 3113; WAN024DKM; Start 1227; Stop 1251
ctctacaggtatcgaaggaatcaag

SEQ ID NO: 347105 - DNA, 25 bp, Artificial
  probe
  misc_feature (1)..(25): SEQ ID NO: 3113; WAN024DKM; Start 1225; Stop 1249
atctctacaggtatcgaaggaatca

SEQ ID NO: 347106 - DNA, 25 bp, Artificial
  probe
  misc_feature (1)..(25): SEQ ID NO: 3113; WAN024DKM; Start 1226; Stop 1250
tctctacaggtatcgaaggaatcaa

SEQ ID NO: 347107 - DNA, 25 bp, Artificial
  probe
  misc_feature (1)..(25): SEQ ID NO: 3113; WAN024DKM; Start 234; Stop 258
tatcaccgcttctattgttgtccaa

SEQ ID NO: 347108 - DNA, 25 bp, Artificial
  probe
  misc_feature (1)..(25): SEQ ID NO: 3113; WAN024DKM; Start 456; Stop 480
gacgattggtatcatcttaacagct

SEQ ID NO: 347109 - DNA, 25 bp, Artificial
  probe
  misc_feature (1)..(25): SEQ ID NO: 3113; WAN024DKM; Start 699; Stop 723
tacaacttatgttcaacaagcagaa

SEQ ID NO: 347110 - DNA, 25 bp, Artificial
  probe
  misc_feature (1)..(25): SEQ ID NO: 3113; WAN024DKM; Start 698; Stop 722
ttacaacttatgttcaacaagcaga

SEQ ID NO: 347111 - DNA, 25 bp, Artificial
  probe
  misc_feature (1)..(25): SEQ ID NO: 3113; WAN024DKM; Start 703; Stop 727
acttatgttcaacaagcagaataca

SEQ ID NO: 347112 - DNA, 25 bp, Artificial
  probe
  misc_feature (1)..(25): SEQ ID NO: 3114; WAN024F4S; Start 361; Stop 385
aacaacaccaacaattccacacata

SEQ ID NO: 347113 - DNA, 25 bp, Artificial
  probe
  misc_feature (1)..(25): SEQ ID NO: 3114; WAN024F4S; Start 362; Stop 386
acaacaccaacaattccacacatag

SEQ ID NO: 347114 - DNA, 25 bp, Artificial
  probe
  misc_feature (1)..(25): SEQ ID NO: 3114; WAN024F4S; Start 360; Stop 384
caacaacaccaacaattccacacat

SEQ ID NO: 347115 - DNA, 25 bp, Artificial
  probe
  misc_feature (1)..(25): SEQ ID NO: 3114; WAN024F4S; Start 291; Stop 315
cagaatcatagccacggtattcaag

SEQ ID NO: 347116 - DNA, 25 bp, Artificial
  probe
  misc_feature (1)..(25): SEQ ID NO: 3114; WAN024F4S; Start 174; Stop 198
gagtatgtccgataccagttgttcc

SEQ ID NO: 347117 - DNA, 25 bp, Artificial
  probe
  misc_feature (1)..(25): SEQ ID NO: 3114; WAN024F4S; Start 173; Stop 197
cgagtatgtccgataccagttgttc

SEQ ID NO: 347118 - DNA, 25 bp, Artificial
  probe
  misc_feature (1)..(25): SEQ ID NO: 3114; WAN024F4S; Start 357; Stop 381
ttccaacaacaccaacaattccaca

SEQ ID NO: 347119 - DNA, 25 bp, Artificial
  probe
  misc_feature (1)..(25): SEQ ID NO: 3114; WAN024F4S; Start 292; Stop 316
agaatcatagccacggtattcaagc

SEQ ID NO: 347120 - DNA, 25 bp, Artificial
  probe
  misc_feature (1)..(25): SEQ ID NO: 3114; WAN024F4S; Start 337; Stop 361
aatatcagttgcatttgtgtttcca

SEQ ID NO: 347121 - DNA, 25 bp, Artificial
  probe
  misc_feature (1)..(25): SEQ ID NO: 3114; WAN024F4S; Start 356; Stop 380
tttccaacaacaccaacaattccac

SEQ ID NO: 347122 - DNA, 25 bp, Artificial
  probe
  misc_feature (1)..(25): SEQ ID NO: 3114; WAN024F4S; Start 338; Stop 362
atatcagttgcatttgtgtttccaa

SEQ ID NO: 347123 - DNA, 25 bp, Artificial
  probe
  misc_feature (1)..(25): SEQ ID NO: 3114; WAN024F4S; Start 290; Stop 314
gcagaatcatagccacggtattcaa

SEQ ID NO: 347124 - DNA, 25 bp, Artificial
  probe
  misc_feature (1)..(25): SEQ ID NO: 3114; WAN024F4S; Start 172; Stop 196
acgagtatgtccgataccagttgtt

SEQ ID NO: 347125 - DNA, 25 bp, Artificial
  probe
  misc_feature (1)..(25): SEQ ID NO: 3114; WAN024F4S; Start 171; Stop 195
aacgagtatgtccgataccagttgt

SEQ ID NO: 347126 - DNA, 25 bp, Artificial
  probe
  misc_feature (1)..(25): SEQ ID NO: 3114; WAN024F4S; Start 355; Stop 379
gtttccaacaacaccaacaattcca

SEQ ID NO: 347127 - DNA, 25 bp, Artificial
  probe
  misc_feature (1)..(25): SEQ ID NO: 3114; WAN024F4S; Start 336; Stop 360
aaatatcagttgcatttgtgtttcc

SEQ ID NO: 347128 - DNA, 25 bp, Artificial
  probe
  misc_feature (1)..(25): SEQ ID NO: 3114; WAN024F4S; Start 358; Stop 382
tccaacaacaccaacaattccacac

SEQ ID NO: 347129 - DNA, 25 bp, Artificial
  probe
  misc_feature (1)..(25): SEQ ID NO: 3114; WAN024F4S; Start 258; Stop 282
ggttatcagcaccatctaggacaaa

SEQ ID NO: 347130 - DNA, 25 bp, Artificial
  probe
  misc_feature (1)..(25): SEQ ID NO: 3114; WAN024F4S; Start 177; Stop 201
tatgtccgataccagttgttccctc

SEQ ID NO: 347131 - DNA, 25 bp, Artificial
  probe
  misc_feature (1)..(25): SEQ ID NO: 3114; WAN024F4S; Start 359; Stop 383
ccaacaacaccaacaattccacaca

SEQ ID NO: 347132 - DNA, 25 bp, Artificial
  probe
  misc_feature (1)..(25): SEQ ID NO: 3114; WAN024F4S; Start 259; Stop 283
gttatcagcaccatctaggacaaaa

SEQ ID NO: 347133 - DNA, 25 bp, Artificial
  probe
  misc_feature (1)..(25): SEQ ID NO: 3114; WAN024F4S; Start 169; Stop 193
ccaacgagtatgtccgataccagtt

SEQ ID NO: 347134 - DNA, 25 bp, Artificial
  probe
  misc_feature (1)..(25): SEQ ID NO: 3114; WAN024F4S; Start 293; Stop 317
gaatcatagccacggtattcaagct

SEQ ID NO: 347135 - DNA, 25 bp, Artificial
  probe
  misc_feature (1)..(25): SEQ ID NO: 3114; WAN024F4S; Start 323; Stop 347
agcccttgaatcaaaatatcagttg

SEQ ID NO: 347136 - DNA, 25 bp, Artificial
  probe
  misc_feature (1)..(25): SEQ ID NO: 3114; WAN024F4S; Start 322; Stop 346
aagcccttgaatcaaaatatcagtt

SEQ ID NO: 347137 - DNA, 25 bp, Artificial
  probe
  misc_feature (1)..(25): SEQ ID NO: 3114; WAN024F4S; Start 321; Stop 345
caagcccttgaatcaaaatatcagt

SEQ ID NO: 347138 - DNA, 25 bp, Artificial
  probe
  misc_feature (1)..(25): SEQ ID NO: 3114; WAN024F4S; Start 324; Stop 348
gcccttgaatcaaaatatcagttgc

SEQ ID NO: 347139 - DNA, 25 bp, Artificial
  probe
  misc_feature (1)..(25): SEQ ID NO: 3114; WAN024F4S; Start 176; Stop 200
gtatgtccgataccagttgttccct

SEQ ID NO: 347140 - DNA, 25 bp, Artificial
  probe
  misc_feature (1)..(25): SEQ ID NO: 3114; WAN024F4S; Start 175; Stop 199
agtatgtccgataccagttgttccc

SEQ ID NO: 347141 - DNA, 25 bp, Artificial
  probe
  misc_feature (1)..(25): SEQ ID NO: 3114; WAN024F4S; Start 325; Stop 349
cccttgaatcaaaatatcagttgca

SEQ ID NO: 347142 - DNA, 25 bp, Artificial
  probe
  misc_feature (1)..(25): SEQ ID NO: 3114; WAN024F4S; Start 170; Stop 194
caacgagtatgtccgataccagttg

SEQ ID NO: 347143 - DNA, 25 bp, Artificial
  probe
  misc_feature (1)..(25): SEQ ID NO: 3114; WAN024F4S; Start 339; Stop 363
tatcagttgcatttgtgtttccaac

SEQ ID NO: 347144 - DNA, 25 bp, Artificial
  probe
  misc_feature (1)..(25): SEQ ID NO: 3114; WAN024F4S; Start 326; Stop 350
ccttgaatcaaaatatcagttgcat

SEQ ID NO: 347145 - DNA, 25 bp, Artificial
  probe
  misc_feature (1)..(25): SEQ ID NO: 3115; WAN024F98; Start 77; Stop 101
agattgctgagtatttgtctttgaa

SEQ ID NO: 347146 - DNA, 25 bp, Artificial
  probe
  misc_feature (1)..(25): SEQ ID NO: 3115; WAN024F98; Start 80; Stop 104
ttgctgagtatttgtctttgaatca

SEQ ID NO: 347147 - DNA, 25 bp, Artificial
  probe
  misc_feature (1)..(25): SEQ ID NO: 3115; WAN024F98; Start 79; Stop 103
attgctgagtatttgtctttgaatc

SEQ ID NO: 347148 - DNA, 25 bp, Artificial
  probe
  misc_feature (1)..(25): SEQ ID NO: 3115; WAN024F98; Start 78; Stop 102
gattgctgagtatttgtctttgaat

SEQ ID NO: 347149 - DNA, 25 bp, Artificial
  probe
  misc_feature (1)..(25): SEQ ID NO: 3115; WAN024F98; Start 81; Stop 105
tgctgagtatttgtctttgaatcaa

SEQ ID NO: 347150 - DNA, 25 bp, Artificial
  probe
  misc_feature (1)..(25): SEQ ID NO: 3115; WAN024F98; Start 72; Stop 96
agataagattgctgagtatttgtct

SEQ ID NO: 347151 - DNA, 25 bp, Artificial
  probe
  misc_feature (1)..(25): SEQ ID NO: 3115; WAN024F98; Start 71; Stop 95
aagataagattgctgagtatttgtc

SEQ ID NO: 347152 - DNA, 25 bp, Artificial
  probe
  misc_feature (1)..(25): SEQ ID NO: 3115; WAN024F98; Start 70; Stop 94
caagataagattgctgagtatttgt

SEQ ID NO: 347153 - DNA, 25 bp, Artificial
  probe
  misc_feature (1)..(25): SEQ ID NO: 3115; WAN024F98; Start 8; Stop 32
tgataaatgtatgtgatgttggaaa

SEQ ID NO: 347154 - DNA, 25 bp, Artificial
  probe
  misc_feature (1)..(25): SEQ ID NO: 3115; WAN024F98; Start 69; Stop 93
tcaagataagattgctgagtatttg

SEQ ID NO: 347155 - DNA, 25 bp, Artificial
  probe
  misc_feature (1)..(25): SEQ ID NO: 3115; WAN024F98; Start 76; Stop 100
aagattgctgagtatttgtctttga

SEQ ID NO: 347156 - DNA, 25 bp, Artificial
  probe
  misc_feature (1)..(25): SEQ ID NO: 3115; WAN024F98; Start 143; Stop 167
tcacgaatggatttaagtaactaat

SEQ ID NO: 347157 - DNA, 25 bp, Artificial
  probe
  misc_feature (1)..(25): SEQ ID NO: 3115; WAN024F98; Start 142; Stop 166
atcacgaatggatttaagtaactaa

SEQ ID NO: 347158 - DNA, 25 bp, Artificial
  probe
  misc_feature (1)..(25): SEQ ID NO: 3115; WAN024F98; Start 63; Stop 87
tcttactcaagataagattgctgag

SEQ ID NO: 347159 - DNA, 25 bp, Artificial
  probe
  misc_feature (1)..(25): SEQ ID NO: 3115; WAN024F98; Start 75; Stop 99
taagattgctgagtatttgtctttg

SEQ ID NO: 347160 - DNA, 25 bp, Artificial
  probe
  misc_feature (1)..(25): SEQ ID NO: 3115; WAN024F98; Start 140; Stop 164
atatcacgaatggatttaagtaact

SEQ ID NO: 347161 - DNA, 25 bp, Artificial
  probe
  misc_feature (1)..(25): SEQ ID NO: 3115; WAN024F98; Start 73; Stop 97
gataagattgctgagtatttgtctt

SEQ ID NO: 347162 - DNA, 25 bp, Artificial
  probe
  misc_feature (1)..(25): SEQ ID NO: 3115; WAN024F98; Start 82; Stop 106
gctgagtatttgtctttgaatcaaa

SEQ ID NO: 347163 - DNA, 25 bp, Artificial
  probe
  misc_feature (1)..(25): SEQ ID NO: 3115; WAN024F98; Start 139; Stop 163
aatatcacgaatggatttaagtaac

SEQ ID NO: 347164 - DNA, 25 bp, Artificial
  probe
  misc_feature (1)..(25): SEQ ID NO: 3115; WAN024F98; Start 141; Stop 165
tatcacgaatggatttaagtaacta

SEQ ID NO: 347165 - DNA, 25 bp, Artificial
  probe
  misc_feature (1)..(25): SEQ ID NO: 3115; WAN024F98; Start 74; Stop 98
ataagattgctgagtatttgtcttt

SEQ ID NO: 347166 - DNA, 25 bp, Artificial
  probe
  misc_feature (1)..(25): SEQ ID NO: 3115; WAN024F98; Start 9; Stop 33
gataaatgtatgtgatgttggaaaa

SEQ ID NO: 347167 - DNA, 25 bp, Artificial
  probe
  misc_feature (1)..(25): SEQ ID NO: 3115; WAN024F98; Start 104; Stop 128
aaagcatgattgccaaaatggaaaa

SEQ ID NO: 347168 - DNA, 25 bp, Artificial
  probe
  misc_feature (1)..(25): SEQ ID NO: 3115; WAN024F98; Start 103; Stop 127
caaagcatgattgccaaaatggaaa

SEQ ID NO: 347169 - DNA, 25 bp, Artificial
  probe
  misc_feature (1)..(25): SEQ ID NO: 3115; WAN024F98; Start 68; Stop 92
ctcaagataagattgctgagtattt

SEQ ID NO: 347170 - DNA, 25 bp, Artificial
  probe
  misc_feature (1)..(25): SEQ ID NO: 3115; WAN024F98; Start 101; Stop 125
atcaaagcatgattgccaaaatgga

SEQ ID NO: 347171 - DNA, 25 bp, Artificial
  probe
  misc_feature (1)..(25): SEQ ID NO: 3115; WAN024F98; Start 102; Stop 126
tcaaagcatgattgccaaaatggaa

SEQ ID NO: 347172 - DNA, 25 bp, Artificial
  probe
  misc_feature (1)..(25): SEQ ID NO: 3115; WAN024F98; Start 96; Stop 120
tttgaatcaaagcatgattgccaaa

SEQ ID NO: 347173 - DNA, 25 bp, Artificial
  probe
  misc_feature (1)..(25): SEQ ID NO: 3115; WAN024F98; Start 99; Stop 123
gaatcaaagcatgattgccaaaatg

SEQ ID NO: 347174 - DNA, 25 bp, Artificial
  probe
  misc_feature (1)..(25): SEQ ID NO: 3115; WAN024F98; Start 98; Stop 122
tgaatcaaagcatgattgccaaaat

SEQ ID NO: 347175 - DNA, 25 bp, Artificial
  probe
  misc_feature (1)..(25): SEQ ID NO: 3115; WAN024F98; Start 97; Stop 121
ttgaatcaaagcatgattgccaaaa

SEQ ID NO: 347176 - DNA, 25 bp, Artificial
  probe
  misc_feature (1)..(25): SEQ ID NO: 3115; WAN024F98; Start 100; Stop 124
aatcaaagcatgattgccaaaatgg

SEQ ID NO: 347177 - DNA, 25 bp, Artificial
  probe
  misc_feature (1)..(25): SEQ ID NO: 3115; WAN024F98; Start 55; Stop 79
tcttcaaatcttactcaagataaga

SEQ ID NO: 347178 - DNA, 25 bp, Artificial
  probe
  misc_feature (1)..(25): SEQ ID NO: 3116; WAN024B86; Start 273; Stop 297
ctgtcatccaactaccatccactat

SEQ ID NO: 347179 - DNA, 25 bp, Artificial
  probe
  misc_feature (1)..(25): SEQ ID NO: 3116; WAN024B86; Start 241; Stop 265
gcttatttgactgaaatagcttctg

SEQ ID NO: 347180 - DNA, 25 bp, Artificial
  probe
  misc_feature (1)..(25): SEQ ID NO: 3116; WAN024B86; Start 242; Stop 266
cttatttgactgaaatagcttctga

SEQ ID NO: 347181 - DNA, 25 bp, Artificial
  probe
  misc_feature (1)..(25): SEQ ID NO: 3117; WAN024G4D; Start 423; Stop 447
caatgctggtgttctcttgattaac

SEQ ID NO: 347182 - DNA, 25 bp, Artificial
  probe
  misc_feature (1)..(25): SEQ ID NO: 3117; WAN024G4D; Start 75; Stop 99
gtcactctgtagacacaatagtcat

SEQ ID NO: 347183 - DNA, 25 bp, Artificial
  probe
  misc_feature (1)..(25): SEQ ID NO: 3117; WAN024G4D; Start 73; Stop 97
aagtcactctgtagacacaatagtc

SEQ ID NO: 347184 - DNA, 25 bp, Artificial
  probe
  misc_feature (1)..(25): SEQ ID NO: 3117; WAN024G4D; Start 72; Stop 96
gaagtcactctgtagacacaatagt

SEQ ID NO: 347185 - DNA, 25 bp, Artificial
  probe
  misc_feature (1)..(25): SEQ ID NO: 3117; WAN024G4D; Start 71; Stop 95
tgaagtcactctgtagacacaatag

SEQ ID NO: 347186 - DNA, 25 bp, Artificial
  probe
  misc_feature (1)..(25): SEQ ID NO: 3117; WAN024G4D; Start 69; Stop 93
gatgaagtcactctgtagacacaat

SEQ ID NO: 347187 - DNA, 25 bp, Artificial
  probe
  misc_feature (1)..(25): SEQ ID NO: 3117; WAN024G4D; Start 74; Stop 98
agtcactctgtagacacaatagtca

SEQ ID NO: 347188 - DNA, 25 bp, Artificial
  probe
  misc_feature (1)..(25): SEQ ID NO: 3117; WAN024G4D; Start 76; Stop 100
tcactctgtagacacaatagtcatt

SEQ ID NO: 347189 - DNA, 25 bp, Artificial
  probe
  misc_feature (1)..(25): SEQ ID NO: 3117; WAN024G4D; Start 70; Stop 94
atgaagtcactctgtagacacaata

SEQ ID NO: 347190 - DNA, 25 bp, Artificial
  probe
  misc_feature (1)..(25): SEQ ID NO: 3117; WAN024G4D; Start 689; Stop 713
ctcaggataagccttggaatcaatt

SEQ ID NO: 347191 - DNA, 25 bp, Artificial
  probe
  misc_feature (1)..(25): SEQ ID NO: 3117; WAN024G4D; Start 1153; Stop 1177
tatgaaggtatctatccaagctcca

SEQ ID NO: 347192 - DNA, 25 bp, Artificial
  probe
  misc_feature (1)..(25): SEQ ID NO: 3117; WAN024G4D; Start 33; Stop 57
aggtgattacgcttatattcgacaa

SEQ ID NO: 347193 - DNA, 25 bp, Artificial
  probe
  misc_feature (1)..(25): SEQ ID NO: 3117; WAN024G4D; Start 1152; Stop 1176
atatgaaggtatctatccaagctcc

SEQ ID NO: 347194 - DNA, 25 bp, Artificial
  probe
  misc_feature (1)..(25): SEQ ID NO: 3117; WAN024G4D; Start 1156; Stop 1180
gaaggtatctatccaagctccattc

SEQ ID NO: 347195 - DNA, 25 bp, Artificial
  probe
  misc_feature (1)..(25): SEQ ID NO: 3117; WAN024G4D; Start 1155; Stop 1179
tgaaggtatctatccaagctccatt

SEQ ID NO: 347196 - DNA, 25 bp, Artificial
  probe
  misc_feature (1)..(25): SEQ ID NO: 3117; WAN024G4D; Start 32; Stop 56
caggtgattacgcttatattcgaca

SEQ ID NO: 347197 - DNA, 25 bp, Artificial
  probe
  misc_feature (1)..(25): SEQ ID NO: 3117; WAN024G4D; Start 1154; Stop 1178
atgaaggtatctatccaagctccat

SEQ ID NO: 347198 - DNA, 25 bp, Artificial
  probe
  misc_feature (1)..(25): SEQ ID NO: 3117; WAN024G4D; Start 688; Stop 712
tctcaggataagccttggaatcaat

SEQ ID NO: 347199 - DNA, 25 bp, Artificial
  probe
  misc_feature (1)..(25): SEQ ID NO: 3117; WAN024G4D; Start 749; Stop 773
actctttgatggattggtctgttat

SEQ ID NO: 347200 - DNA, 25 bp, Artificial
  probe
  misc_feature (1)..(25): SEQ ID NO: 3117; WAN024G4D; Start 747; Stop 771
atactctttgatggattggtctgtt

SEQ ID NO: 347201 - DNA, 25 bp, Artificial
  probe
  misc_feature (1)..(25): SEQ ID NO: 3117; WAN024G4D; Start 746; Stop 770
aatactctttgatggattggtctgt

SEQ ID NO: 347202 - DNA, 25 bp, Artificial
  probe
  misc_feature (1)..(25): SEQ ID NO: 3117; WAN024G4D; Start 322; Stop 346
gatttgattgtgactggtgatttga

SEQ ID NO: 347203 - DNA, 25 bp, Artificial
  probe
  misc_feature (1)..(25): SEQ ID NO: 3117; WAN024G4D; Start 744; Stop 768
ggaatactctttgatggattggtct

SEQ ID NO: 347204 - DNA, 25 bp, Artificial
  probe
  misc_feature (1)..(25): SEQ ID NO: 3117; WAN024G4D; Start 687; Stop 711
ttctcaggataagccttggaatcaa

SEQ ID NO: 347205 - DNA, 25 bp, Artificial
  probe
  misc_feature (1)..(25): SEQ ID NO: 3117; WAN024G4D; Start 323; Stop 347
atttgattgtgactggtgatttgac

SEQ ID NO: 347206 - DNA, 25 bp, Artificial
  probe
  misc_feature (1)..(25): SEQ ID NO: 3117; WAN024G4D; Start 321; Stop 345
tgatttgattgtgactggtgatttg

SEQ ID NO: 347207 - DNA, 25 bp, Artificial
  probe
  misc_feature (1)..(25): SEQ ID NO: 3117; WAN024G4D; Start 320; Stop 344
gtgatttgattgtgactggtgattt

SEQ ID NO: 347208 - DNA, 25 bp, Artificial
  probe
  misc_feature (1)..(25): SEQ ID NO: 3117; WAN024G4D; Start 745; Stop 769
gaatactctttgatggattggtctg

SEQ ID NO: 347209 - DNA, 25 bp, Artificial
  probe
  misc_feature (1)..(25): SEQ ID NO: 3117; WAN024G4D; Start 748; Stop 772
tactctttgatggattggtctgtta

SEQ ID NO: 347210 - DNA, 25 bp, Artificial
  probe
  misc_feature (1)..(25): SEQ ID NO: 3117; WAN024G4D; Start 1157; Stop 1181
aaggtatctatccaagctccattcc

SEQ ID NO: 347211 - DNA, 25 bp, Artificial
  probe
  misc_feature (1)..(25): SEQ ID NO: 3117; WAN024G4D; Start 976; Stop 1000
accgtatatccaaattccttaccaa

SEQ ID NO: 347212 - DNA, 25 bp, Artificial
  probe
  misc_feature (1)..(25): SEQ ID NO: 3117; WAN024G4D; Start 750; Stop 774
ctctttgatggattggtctgttatt

SEQ ID NO: 347213 - DNA, 25 bp, Artificial
  probe
  misc_feature (1)..(25): SEQ ID NO: 3117; WAN024G4D; Start 743; Stop 767
gggaatactctttgatggattggtc

SEQ ID NO: 347214 - DNA, 25 bp, Artificial
  probe
  misc_feature (1)..(25): SEQ ID NO: 3118; WAN024BHD; Start 68; Stop 92
ctttgttacagaagggattgattgc

SEQ ID NO: 347215 - DNA, 25 bp, Artificial
  probe
  misc_feature (1)..(25): SEQ ID NO: 3118; WAN024BHD; Start 67; Stop 91
tctttgttacagaagggattgattg

SEQ ID NO: 347216 - DNA, 25 bp, Artificial
  probe
  misc_feature (1)..(25): SEQ ID NO: 3118; WAN024BHD; Start 66; Stop 90
gtctttgttacagaagggattgatt

SEQ ID NO: 347217 - DNA, 25 bp, Artificial
  probe
  misc_feature (1)..(25): SEQ ID NO: 3118; WAN024BHD; Start 65; Stop 89
tgtctttgttacagaagggattgat

SEQ ID NO: 347218 - DNA, 25 bp, Artificial
  probe
  misc_feature (1)..(25): SEQ ID NO: 3118; WAN024BHD; Start 64; Stop 88
atgtctttgttacagaagggattga

SEQ ID NO: 347219 - DNA, 25 bp, Artificial
  probe
  misc_feature (1)..(25): SEQ ID NO: 3118; WAN024BHD; Start 61; Stop 85
gctatgtctttgttacagaagggat

SEQ ID NO: 347220 - DNA, 25 bp, Artificial
  probe
  misc_feature (1)..(25): SEQ ID NO: 3118; WAN024BHD; Start 22; Stop 46
tttgtttatggagtagacgcaagtg

SEQ ID NO: 347221 - DNA, 25 bp, Artificial
  probe
  misc_feature (1)..(25): SEQ ID NO: 3118; WAN024BHD; Start 63; Stop 87
tatgtctttgttacagaagggattg

SEQ ID NO: 347222 - DNA, 25 bp, Artificial
  probe
  misc_feature (1)..(25): SEQ ID NO: 3118; WAN024BHD; Start 62; Stop 86
ctatgtctttgttacagaagggatt

SEQ ID NO: 347223 - DNA, 25 bp, Artificial
  probe
  misc_feature (1)..(25): SEQ ID NO: 3118; WAN024BHD; Start 58; Stop 82
caagctatgtctttgttacagaagg

SEQ ID NO: 347224 - DNA, 25 bp, Artificial
  probe
  misc_feature (1)..(25): SEQ ID NO: 3118; WAN024BHD; Start 59; Stop 83
aagctatgtctttgttacagaaggg

SEQ ID NO: 347225 - DNA, 25 bp, Artificial
  probe
  misc_feature (1)..(25): SEQ ID NO: 3118; WAN024BHD; Start 169; Stop 193
aatgccattcttgaaattgtcggtg

SEQ ID NO: 347226 - DNA, 25 bp, Artificial
  probe
  misc_feature (1)..(25): SEQ ID NO: 3118; WAN024BHD; Start 60; Stop 84
agctatgtctttgttacagaaggga

SEQ ID NO: 347227 - DNA, 25 bp, Artificial
  probe
  misc_feature (1)..(25): SEQ ID NO: 3118; WAN024BHD; Start 16; Stop 40
aaaggttttgtttatggagtagacg

SEQ ID NO: 347228 - DNA, 25 bp, Artificial
  probe
  misc_feature (1)..(25): SEQ ID NO: 3118; WAN024BHD; Start 20; Stop 44
gttttgtttatggagtagacgcaag

SEQ ID NO: 347229 - DNA, 25 bp, Artificial
  probe
  misc_feature (1)..(25): SEQ ID NO: 3118; WAN024BHD; Start 17; Stop 41
aaggttttgtttatggagtagacgc

SEQ ID NO: 347230 - DNA, 25 bp, Artificial
  probe
  misc_feature (1)..(25): SEQ ID NO: 3118; WAN024BHD; Start 21; Stop 45
ttttgtttatggagtagacgcaagt

SEQ ID NO: 347231 - DNA, 25 bp, Artificial
  probe
  misc_feature (1)..(25): SEQ ID NO: 3118; WAN024BHD; Start 163; Stop 187
gttcggaatgccattcttgaaattg

SEQ ID NO: 347232 - DNA, 25 bp, Artificial
  probe
  misc_feature (1)..(25): SEQ ID NO: 3118; WAN024BHD; Start 19; Stop 43
ggttttgtttatggagtagacgcaa

SEQ ID NO: 347233 - DNA, 25 bp, Artificial
  probe
  misc_feature (1)..(25): SEQ ID NO: 3118; WAN024BHD; Start 164; Stop 188
ttcggaatgccattcttgaaattgt

SEQ ID NO: 347234 - DNA, 25 bp, Artificial
  probe
  misc_feature (1)..(25): SEQ ID NO: 3118; WAN024BHD; Start 162; Stop 186
tgttcggaatgccattcttgaaatt

SEQ ID NO: 347235 - DNA, 25 bp, Artificial
  probe
  misc_feature (1)..(25): SEQ ID NO: 3118; WAN024BHD; Start 23; Stop 47
ttgtttatggagtagacgcaagtgc

SEQ ID NO: 347236 - DNA, 25 bp, Artificial
  probe
  misc_feature (1)..(25): SEQ ID NO: 3118; WAN024BHD; Start 18; Stop 42
aggttttgtttatggagtagacgca

SEQ ID NO: 347237 - DNA, 25 bp, Artificial
  probe
  misc_feature (1)..(25): SEQ ID NO: 3118; WAN024BHD; Start 165; Stop 189
tcggaatgccattcttgaaattgtc

SEQ ID NO: 347238 - DNA, 25 bp, Artificial
  probe
  misc_feature (1)..(25): SEQ ID NO: 3118; WAN024BHD; Start 56; Stop 80
cacaagctatgtctttgttacagaa

SEQ ID NO: 347239 - DNA, 25 bp, Artificial
  probe
  misc_feature (1)..(25): SEQ ID NO: 3118; WAN024BHD; Start 57; Stop 81
acaagctatgtctttgttacagaag

SEQ ID NO: 347240 - DNA, 25 bp, Artificial
  probe
  misc_feature (1)..(25): SEQ ID NO: 3118; WAN024BHD; Start 168; Stop 192
gaatgccattcttgaaattgtcggt

SEQ ID NO: 347241 - DNA, 25 bp, Artificial
  probe
  misc_feature (1)..(25): SEQ ID NO: 3118; WAN024BHD; Start 161; Stop 185
gtgttcggaatgccattcttgaaat

SEQ ID NO: 347242 - DNA, 25 bp, Artificial
  probe
  misc_feature (1)..(25): SEQ ID NO: 3118; WAN024BHD; Start 52; Stop 76
tttgcacaagctatgtctttgttac

SEQ ID NO: 347243 - DNA, 25 bp, Artificial
  probe
  misc_feature (1)..(25): SEQ ID NO: 3118; WAN024BHD; Start 51; Stop 75
gtttgcacaagctatgtctttgtta

SEQ ID NO: 347244 - DNA, 25 bp, Artificial
  probe
  misc_feature (1)..(25): SEQ ID NO: 3118; WAN024BHD; Start 55; Stop 79
gcacaagctatgtctttgttacaga

SEQ ID NO: 347245 - DNA, 25 bp, Artificial
  probe
  misc_feature (1)..(25): SEQ ID NO: 3118; WAN024BHD; Start 8; Stop 32
cgcattttaaaggttttgtttatgg

SEQ ID NO: 347246 - DNA, 25 bp, Artificial
  probe
  misc_feature (1)..(25): SEQ ID NO: 3118; WAN024BHD; Start 15; Stop 39
taaaggttttgtttatggagtagac

SEQ ID NO: 347247 - DNA, 25 bp, Artificial
  probe
  misc_feature (1)..(25): SEQ ID NO: 3119; WAN024BHW; Start 136; Stop 160
aatcatatctcacacctcaatcctt

SEQ ID NO: 347248 - DNA, 25 bp, Artificial
  probe
  misc_feature (1)..(25): SEQ ID NO: 3119; WAN024BHW; Start 138; Stop 162
tcatatctcacacctcaatccttat

SEQ ID NO: 347249 - DNA, 25 bp, Artificial
  probe
  misc_feature (1)..(25): SEQ ID NO: 3119; WAN024BHW; Start 137; Stop 161
atcatatctcacacctcaatcctta

SEQ ID NO: 347250 - DNA, 25 bp, Artificial
  probe
  misc_feature (1)..(25): SEQ ID NO: 3119; WAN024BHW; Start 135; Stop 159
taatcatatctcacacctcaatcct

SEQ ID NO: 347251 - DNA, 25 bp, Artificial
  probe
  misc_feature (1)..(25): SEQ ID NO: 3119; WAN024BHW; Start 139; Stop 163
catatctcacacctcaatccttatt

SEQ ID NO: 347252 - DNA, 25 bp, Artificial
  probe
  misc_feature (1)..(25): SEQ ID NO: 3119; WAN024BHW; Start 142; Stop 166
atctcacacctcaatccttattatt

SEQ ID NO: 347253 - DNA, 25 bp, Artificial
  probe
  misc_feature (1)..(25): SEQ ID NO: 3119; WAN024BHW; Start 718; Stop 742
aaagtgaatttatttgagaagggca

SEQ ID NO: 347254 - DNA, 25 bp, Artificial
  probe
  misc_feature (1)..(25): SEQ ID NO: 3119; WAN024BHW; Start 647; Stop 671
agcgtctctttaatgtttggttaga

SEQ ID NO: 347255 - DNA, 25 bp, Artificial
  probe
  misc_feature (1)..(25): SEQ ID NO: 3119; WAN024BHW; Start 127; Stop 151
gatcaaggtaatcatatctcacacc

SEQ ID NO: 347256 - DNA, 25 bp, Artificial
  probe
  misc_feature (1)..(25): SEQ ID NO: 3119; WAN024BHW; Start 719; Stop 743
aagtgaatttatttgagaagggcaa

SEQ ID NO: 347257 - DNA, 25 bp, Artificial
  probe
  misc_feature (1)..(25): SEQ ID NO: 3119; WAN024BHW; Start 646; Stop 670
gagcgtctctttaatgtttggttag

SEQ ID NO: 347258 - DNA, 25 bp, Artificial
  probe
  misc_feature (1)..(25): SEQ ID NO: 3119; WAN024BHW; Start 144; Stop 168
ctcacacctcaatccttattattgt

SEQ ID NO: 347259 - DNA, 25 bp, Artificial
  probe
  misc_feature (1)..(25): SEQ ID NO: 3119; WAN024BHW; Start 141; Stop 165
tatctcacacctcaatccttattat

SEQ ID NO: 347260 - DNA, 25 bp, Artificial
  probe
  misc_feature (1)..(25): SEQ ID NO: 3119; WAN024BHW; Start 140; Stop 164
atatctcacacctcaatccttatta

SEQ ID NO: 347261 - DNA, 25 bp, Artificial
  probe
  misc_feature (1)..(25): SEQ ID NO: 3119; WAN024BHW; Start 143; Stop 167
tctcacacctcaatccttattattg

SEQ ID NO: 347262 - DNA, 25 bp, Artificial
  probe
  misc_feature (1)..(25): SEQ ID NO: 3119; WAN024BHW; Start 147; Stop 171
acacctcaatccttattattgtgaa

SEQ ID NO: 347263 - DNA, 25 bp, Artificial
  probe
  misc_feature (1)..(25): SEQ ID NO: 3119; WAN024BHW; Start 467; Stop 491
caacatttgacaaggtgatggactg

SEQ ID NO: 347264 - DNA, 25 bp, Artificial
  probe
  misc_feature (1)..(25): SEQ ID NO: 3119; WAN024BHW; Start 464; Stop 488
tagcaacatttgacaaggtgatgga

SEQ ID NO: 347265 - DNA, 25 bp, Artificial
  probe
  misc_feature (1)..(25): SEQ ID NO: 3119; WAN024BHW; Start 148; Stop 172
cacctcaatccttattattgtgaat

SEQ ID NO: 347266 - DNA, 25 bp, Artificial
  probe
  misc_feature (1)..(25): SEQ ID NO: 3119; WAN024BHW; Start 468; Stop 492
aacatttgacaaggtgatggactgt

SEQ ID NO: 347267 - DNA, 25 bp, Artificial
  probe
  misc_feature (1)..(25): SEQ ID NO: 3119; WAN024BHW; Start 720; Stop 744
agtgaatttatttgagaagggcaaa

SEQ ID NO: 347268 - DNA, 25 bp, Artificial
  probe
  misc_feature (1)..(25): SEQ ID NO: 3119; WAN024BHW; Start 717; Stop 741
aaaagtgaatttatttgagaagggc

SEQ ID NO: 347269 - DNA, 25 bp, Artificial
  probe
  misc_feature (1)..(25): SEQ ID NO: 3119; WAN024BHW; Start 149; Stop 173
acctcaatccttattattgtgaatt

SEQ ID NO: 347270 - DNA, 25 bp, Artificial
  probe
  misc_feature (1)..(25): SEQ ID NO: 3119; WAN024BHW; Start 581; Stop 605
tgtacagaagattggatataacagg

SEQ ID NO: 347271 - DNA, 25 bp, Artificial
  probe
  misc_feature (1)..(25): SEQ ID NO: 3119; WAN024BHW; Start 466; Stop 490
gcaacatttgacaaggtgatggact

SEQ ID NO: 347272 - DNA, 25 bp, Artificial
  probe
  misc_feature (1)..(25): SEQ ID NO: 3119; WAN024BHW; Start 465; Stop 489
agcaacatttgacaaggtgatggac

SEQ ID NO: 347273 - DNA, 25 bp, Artificial
  probe
  misc_feature (1)..(25): SEQ ID NO: 3119; WAN024BHW; Start 492; Stop 516
tcgtagtggctacatgttcaatatg

SEQ ID NO: 347274 - DNA, 25 bp, Artificial
  probe
  misc_feature (1)..(25): SEQ ID NO: 3119; WAN024BHW; Start 491; Stop 515
gtcgtagtggctacatgttcaatat

SEQ ID NO: 347275 - DNA, 25 bp, Artificial
  probe
  misc_feature (1)..(25): SEQ ID NO: 3119; WAN024BHW; Start 146; Stop 170
cacacctcaatccttattattgtga

SEQ ID NO: 347276 - DNA, 25 bp, Artificial
  probe
  misc_feature (1)..(25): SEQ ID NO: 3119; WAN024BHW; Start 145; Stop 169
tcacacctcaatccttattattgtg

SEQ ID NO: 347277 - DNA, 25 bp, Artificial
  probe
  misc_feature (1)..(25): SEQ ID NO: 3119; WAN024BHW; Start 126; Stop 150
tgatcaaggtaatcatatctcacac

SEQ ID NO: 347278 - DNA, 25 bp, Artificial
  probe
  misc_feature (1)..(25): SEQ ID NO: 3119; WAN024BHW; Start 494; Stop 518
gtagtggctacatgttcaatatgtt

SEQ ID NO: 347279 - DNA, 25 bp, Artificial
  probe
  misc_feature (1)..(25): SEQ ID NO: 3119; WAN024BHW; Start 493; Stop 517
cgtagtggctacatgttcaatatgt

SEQ ID NO: 347280 - DNA, 25 bp, Artificial
  probe
  misc_feature (1)..(25): SEQ ID NO: 3120; WAN024BI8; Start 336; Stop 360
aaatctctttgtaattcaggctggc

SEQ ID NO: 347281 - DNA, 25 bp, Artificial
  probe
  misc_feature (1)..(25): SEQ ID NO: 3120; WAN024BI8; Start 337; Stop 361
aatctctttgtaattcaggctggct

SEQ ID NO: 347282 - DNA, 25 bp, Artificial
  probe
  misc_feature (1)..(25): SEQ ID NO: 3120; WAN024BI8; Start 338; Stop 362
atctctttgtaattcaggctggctc

SEQ ID NO: 347283 - DNA, 25 bp, Artificial
  probe
  misc_feature (1)..(25): SEQ ID NO: 3120; WAN024BI8; Start 335; Stop 359
aaaatctctttgtaattcaggctgg

SEQ ID NO: 347284 - DNA, 25 bp, Artificial
  probe
  misc_feature (1)..(25): SEQ ID NO: 3120; WAN024BI8; Start 333; Stop 357
cgaaaatctctttgtaattcaggct

SEQ ID NO: 347285 - DNA, 25 bp, Artificial
  probe
  misc_feature (1)..(25): SEQ ID NO: 3120; WAN024BI8; Start 334; Stop 358
gaaaatctctttgtaattcaggctg

SEQ ID NO: 347286 - DNA, 25 bp, Artificial
  probe
  misc_feature (1)..(25): SEQ ID NO: 3120; WAN024BI8; Start 561; Stop 585
aaaagcaaaagaacagttggaacac

SEQ ID NO: 347287 - DNA, 25 bp, Artificial
  probe
  misc_feature (1)..(25): SEQ ID NO: 3120; WAN024BI8; Start 339; Stop 363
tctctttgtaattcaggctggctct

SEQ ID NO: 347288 - DNA, 25 bp, Artificial
  probe
  misc_feature (1)..(25): SEQ ID NO: 3120; WAN024BI8; Start 340; Stop 364
ctctttgtaattcaggctggctctg

SEQ ID NO: 347289 - DNA, 25 bp, Artificial
  probe
  misc_feature (1)..(25): SEQ ID NO: 3120; WAN024BI8; Start 562; Stop 586
aaagcaaaagaacagttggaacaca

SEQ ID NO: 347290 - DNA, 25 bp, Artificial
  probe
  misc_feature (1)..(25): SEQ ID NO: 3120; WAN024BI8; Start 332; Stop 356
tcgaaaatctctttgtaattcaggc

SEQ ID NO: 347291 - DNA, 25 bp, Artificial
  probe
  misc_feature (1)..(25): SEQ ID NO: 3120; WAN024BI8; Start 342; Stop 366
ctttgtaattcaggctggctctgtg

SEQ ID NO: 347292 - DNA, 25 bp, Artificial
  probe
  misc_feature (1)..(25): SEQ ID NO: 3120; WAN024BI8; Start 344; Stop 368
ttgtaattcaggctggctctgtgtc

SEQ ID NO: 347293 - DNA, 25 bp, Artificial
  probe
  misc_feature (1)..(25): SEQ ID NO: 3120; WAN024BI8; Start 563; Stop 587
aagcaaaagaacagttggaacacac

SEQ ID NO: 347294 - DNA, 25 bp, Artificial
  probe
  misc_feature (1)..(25): SEQ ID NO: 3120; WAN024BI8; Start 566; Stop 590
caaaagaacagttggaacacacagg

SEQ ID NO: 347295 - DNA, 25 bp, Artificial
  probe
  misc_feature (1)..(25): SEQ ID NO: 3120; WAN024BI8; Start 341; Stop 365
tctttgtaattcaggctggctctgt

SEQ ID NO: 347296 - DNA, 25 bp, Artificial
  probe
  misc_feature (1)..(25): SEQ ID NO: 3120; WAN024BI8; Start 371; Stop 395
cgaatccgacagctcttcttcaaag

SEQ ID NO: 347297 - DNA, 25 bp, Artificial
  probe
  misc_feature (1)..(25): SEQ ID NO: 3120; WAN024BI8; Start 565; Stop 589
gcaaaagaacagttggaacacacag

SEQ ID NO: 347298 - DNA, 25 bp, Artificial
  probe
  misc_feature (1)..(25): SEQ ID NO: 3120; WAN024BI8; Start 343; Stop 367
tttgtaattcaggctggctctgtgt

SEQ ID NO: 347299 - DNA, 25 bp, Artificial
  probe
  misc_feature (1)..(25): SEQ ID NO: 3120; WAN024BI8; Start 564; Stop 588
agcaaaagaacagttggaacacaca

SEQ ID NO: 347300 - DNA, 25 bp, Artificial
  probe
  misc_feature (1)..(25): SEQ ID NO: 3120; WAN024BI8; Start 370; Stop 394
ccgaatccgacagctcttcttcaaa

SEQ ID NO: 347301 - DNA, 25 bp, Artificial
  probe
  misc_feature (1)..(25): SEQ ID NO: 3121; WAN024FWL; Start 355; Stop 379
attcaagagttcattcgtcaggtta

SEQ ID NO: 347302 - DNA, 25 bp, Artificial
  probe
  misc_feature (1)..(25): SEQ ID NO: 3121; WAN024FWL; Start 356; Stop 380
ttcaagagttcattcgtcaggttaa

SEQ ID NO: 347303 - DNA, 25 bp, Artificial
  probe
  misc_feature (1)..(25): SEQ ID NO: 3121; WAN024FWL; Start 357; Stop 381
tcaagagttcattcgtcaggttaag

SEQ ID NO: 347304 - DNA, 25 bp, Artificial
  probe
  misc_feature (1)..(25): SEQ ID NO: 3121; WAN024FWL; Start 354; Stop 378
aattcaagagttcattcgtcaggtt

SEQ ID NO: 347305 - DNA, 25 bp, Artificial
  probe
  misc_feature (1)..(25): SEQ ID NO: 3121; WAN024FWL; Start 359; Stop 383
aagagttcattcgtcaggttaagga

SEQ ID NO: 347306 - DNA, 25 bp, Artificial
  probe
  misc_feature (1)..(25): SEQ ID NO: 3121; WAN024FWL; Start 358; Stop 382
caagagttcattcgtcaggttaagg

SEQ ID NO: 347307 - DNA, 25 bp, Artificial
  probe
  misc_feature (1)..(25): SEQ ID NO: 3121; WAN024FWL; Start 362; Stop 386
agttcattcgtcaggttaaggagaa

SEQ ID NO: 347308 - DNA, 25 bp, Artificial
  probe
  misc_feature (1)..(25): SEQ ID NO: 3121; WAN024FWL; Start 361; Stop 385
gagttcattcgtcaggttaaggaga

SEQ ID NO: 347309 - DNA, 25 bp, Artificial
  probe
  misc_feature (1)..(25): SEQ ID NO: 3121; WAN024FWL; Start 360; Stop 384
agagttcattcgtcaggttaaggag

SEQ ID NO: 347310 - DNA, 25 bp, Artificial
  probe
  misc_feature (1)..(25): SEQ ID NO: 3121; WAN024FWL; Start 478; Stop 502
ttatcaggctacacatcctacagtc

SEQ ID NO: 347311 - DNA, 25 bp, Artificial
  probe
  misc_feature (1)..(25): SEQ ID NO: 3121; WAN024FWL; Start 477; Stop 501
cttatcaggctacacatcctacagt

SEQ ID NO: 347312 - DNA, 25 bp, Artificial
  probe
  misc_feature (1)..(25): SEQ ID NO: 3121; WAN024FWL; Start 470; Stop 494
gaacaaccttatcaggctacacatc

SEQ ID NO: 347313 - DNA, 25 bp, Artificial
  probe
  misc_feature (1)..(25): SEQ ID NO: 3121; WAN024FWL; Start 474; Stop 498
aaccttatcaggctacacatcctac

SEQ ID NO: 347314 - DNA, 25 bp, Artificial
  probe
  misc_feature (1)..(25): SEQ ID NO: 3121; WAN024FWL; Start 473; Stop 497
caaccttatcaggctacacatccta

SEQ ID NO: 347315 - DNA, 25 bp, Artificial
  probe
  misc_feature (1)..(25): SEQ ID NO: 3121; WAN024FWL; Start 270; Stop 294
gaaagaagttgatgaattggcagaa

SEQ ID NO: 347316 - DNA, 25 bp, Artificial
  probe
  misc_feature (1)..(25): SEQ ID NO: 3121; WAN024FWL; Start 268; Stop 292
atgaaagaagttgatgaattggcag

SEQ ID NO: 347317 - DNA, 25 bp, Artificial
  probe
  misc_feature (1)..(25): SEQ ID NO: 3121; WAN024FWL; Start 364; Stop 388
ttcattcgtcaggttaaggagaaat

SEQ ID NO: 347318 - DNA, 25 bp, Artificial
  probe
  misc_feature (1)..(25): SEQ ID NO: 3121; WAN024FWL; Start 476; Stop 500
ccttatcaggctacacatcctacag

SEQ ID NO: 347319 - DNA, 25 bp, Artificial
  probe
  misc_feature (1)..(25): SEQ ID NO: 3121; WAN024FWL; Start 365; Stop 389
tcattcgtcaggttaaggagaaata

SEQ ID NO: 347320 - DNA, 25 bp, Artificial
  probe
  misc_feature (1)..(25): SEQ ID NO: 3121; WAN024FWL; Start 267; Stop 291
tatgaaagaagttgatgaattggca

SEQ ID NO: 347321 - DNA, 25 bp, Artificial
  probe
  misc_feature (1)..(25): SEQ ID NO: 3121; WAN024FWL; Start 353; Stop 377
aaattcaagagttcattcgtcaggt

SEQ ID NO: 347322 - DNA, 25 bp, Artificial
  probe
  misc_feature (1)..(25): SEQ ID NO: 3121; WAN024FWL; Start 352; Stop 376
gaaattcaagagttcattcgtcagg

SEQ ID NO: 347323 - DNA, 25 bp, Artificial
  probe
  misc_feature (1)..(25): SEQ ID NO: 3121; WAN024FWL; Start 351; Stop 375
ggaaattcaagagttcattcgtcag

SEQ ID NO: 347324 - DNA, 25 bp, Artificial
  probe
  misc_feature (1)..(25): SEQ ID NO: 3121; WAN024FWL; Start 269; Stop 293
tgaaagaagttgatgaattggcaga

SEQ ID NO: 347325 - DNA, 25 bp, Artificial
  probe
  misc_feature (1)..(25): SEQ ID NO: 3121; WAN024FWL; Start 271; Stop 295
aaagaagttgatgaattggcagaac

SEQ ID NO: 347326 - DNA, 25 bp, Artificial
  probe
  misc_feature (1)..(25): SEQ ID NO: 3121; WAN024FWL; Start 363; Stop 387
gttcattcgtcaggttaaggagaaa

SEQ ID NO: 347327 - DNA, 25 bp, Artificial
  probe
  misc_feature (1)..(25): SEQ ID NO: 3121; WAN024FWL; Start 349; Stop 373
ttggaaattcaagagttcattcgtc

SEQ ID NO: 347328 - DNA, 25 bp, Artificial
  probe
  misc_feature (1)..(25): SEQ ID NO: 3121; WAN024FWL; Start 343; Stop 367
gatggtttggaaattcaagagttca

SEQ ID NO: 347329 - DNA, 25 bp, Artificial
  probe
  misc_feature (1)..(25): SEQ ID NO: 3121; WAN024FWL; Start 348; Stop 372
tttggaaattcaagagttcattcgt

SEQ ID NO: 347330 - DNA, 25 bp, Artificial
  probe
  misc_feature (1)..(25): SEQ ID NO: 3121; WAN024FWL; Start 339; Stop 363
ctacgatggtttggaaattcaagag

SEQ ID NO: 347331 - DNA, 25 bp, Artificial
  probe
  misc_feature (1)..(25): SEQ ID NO: 3121; WAN024FWL; Start 278; Stop 302
ttgatgaattggcagaactggacat

SEQ ID NO: 347332 - DNA, 25 bp, Artificial
  probe
  misc_feature (1)..(25): SEQ ID NO: 3121; WAN024FWL; Start 266; Stop 290
ctatgaaagaagttgatgaattggc

SEQ ID NO: 347333 - DNA, 25 bp, Artificial
  probe
  misc_feature (1)..(25): SEQ ID NO: 3121; WAN024FWL; Start 350; Stop 374
tggaaattcaagagttcattcgtca

SEQ ID NO: 347334 - DNA, 25 bp, Artificial
  probe
  misc_feature (1)..(25): SEQ ID NO: 3122; WAN024DY9; Start 114; Stop 138
accagtgacaactagaatatcttca

SEQ ID NO: 347335 - DNA, 25 bp, Artificial
  probe
  misc_feature (1)..(25): SEQ ID NO: 3122; WAN024DY9; Start 115; Stop 139
ccagtgacaactagaatatcttcaa

SEQ ID NO: 347336 - DNA, 25 bp, Artificial
  probe
  misc_feature (1)..(25): SEQ ID NO: 3122; WAN024DY9; Start 171; Stop 195
ctggatagttggtttgtctacgatt

SEQ ID NO: 347337 - DNA, 25 bp, Artificial
  probe
  misc_feature (1)..(25): SEQ ID NO: 3122; WAN024DY9; Start 172; Stop 196
tggatagttggtttgtctacgattg

SEQ ID NO: 347338 - DNA, 25 bp, Artificial
  probe
  misc_feature (1)..(25): SEQ ID NO: 3122; WAN024DY9; Start 113; Stop 137
taccagtgacaactagaatatcttc

SEQ ID NO: 347339 - DNA, 25 bp, Artificial
  probe
  misc_feature (1)..(25): SEQ ID NO: 3122; WAN024DY9; Start 173; Stop 197
ggatagttggtttgtctacgattgg

SEQ ID NO: 347340 - DNA, 25 bp, Artificial
  probe
  misc_feature (1)..(25): SEQ ID NO: 3122; WAN024DY9; Start 186; Stop 210
gtctacgattggcaacatttctttg

SEQ ID NO: 347341 - DNA, 25 bp, Artificial
  probe
  misc_feature (1)..(25): SEQ ID NO: 3122; WAN024DY9; Start 112; Stop 136
ttaccagtgacaactagaatatctt

SEQ ID NO: 347342 - DNA, 25 bp, Artificial
  probe
  misc_feature (1)..(25): SEQ ID NO: 3122; WAN024DY9; Start 174; Stop 198
gatagttggtttgtctacgattggc

SEQ ID NO: 347343 - DNA, 25 bp, Artificial
  probe
  misc_feature (1)..(25): SEQ ID NO: 3122; WAN024DY9; Start 170; Stop 194
actggatagttggtttgtctacgat

SEQ ID NO: 347344 - DNA, 25 bp, Artificial
  probe
  misc_feature (1)..(25): SEQ ID NO: 3122; WAN024DY9; Start 185; Stop 209
tgtctacgattggcaacatttcttt

SEQ ID NO: 347345 - DNA, 25 bp, Artificial
  probe
  misc_feature (1)..(25): SEQ ID NO: 3122; WAN024DY9; Start 184; Stop 208
ttgtctacgattggcaacatttctt

SEQ ID NO: 347346 - DNA, 25 bp, Artificial
  probe
  misc_feature (1)..(25): SEQ ID NO: 3122; WAN024DY9; Start 183; Stop 207
tttgtctacgattggcaacatttct

SEQ ID NO: 347347 - DNA, 25 bp, Artificial
  probe
  misc_feature (1)..(25): SEQ ID NO: 3122; WAN024DY9; Start 182; Stop 206
gtttgtctacgattggcaacatttc

SEQ ID NO: 347348 - DNA, 25 bp, Artificial
  probe
  misc_feature (1)..(25): SEQ ID NO: 3122; WAN024DY9; Start 187; Stop 211
tctacgattggcaacatttctttgg

SEQ ID NO: 347349 - DNA, 25 bp, Artificial
  probe
  misc_feature (1)..(25): SEQ ID NO: 3122; WAN024DY9; Start 175; Stop 199
atagttggtttgtctacgattggca

SEQ ID NO: 347350 - DNA, 25 bp, Artificial
  probe
  misc_feature (1)..(25): SEQ ID NO: 3122; WAN024DY9; Start 106; Stop 130
tttgatttaccagtgacaactagaa

SEQ ID NO: 347351 - DNA, 25 bp, Artificial
  probe
  misc_feature (1)..(25): SEQ ID NO: 3122; WAN024DY9; Start 116; Stop 140
cagtgacaactagaatatcttcaat

SEQ ID NO: 347352 - DNA, 25 bp, Artificial
  probe
  misc_feature (1)..(25): SEQ ID NO: 3122; WAN024DY9; Start 107; Stop 131
ttgatttaccagtgacaactagaat

SEQ ID NO: 347353 - DNA, 25 bp, Artificial
  probe
  misc_feature (1)..(25): SEQ ID NO: 3122; WAN024DY9; Start 176; Stop 200
tagttggtttgtctacgattggcaa

SEQ ID NO: 347354 - DNA, 25 bp, Artificial
  probe
  misc_feature (1)..(25): SEQ ID NO: 3122; WAN024DY9; Start 48; Stop 72
ttctttgaggttatattccaattcg

SEQ ID NO: 347355 - DNA, 25 bp, Artificial
  probe
  misc_feature (1)..(25): SEQ ID NO: 3122; WAN024DY9; Start 181; Stop 205
ggtttgtctacgattggcaacattt

SEQ ID NO: 347356 - DNA, 25 bp, Artificial
  probe
  misc_feature (1)..(25): SEQ ID NO: 3122; WAN024DY9; Start 121; Stop 145
acaactagaatatcttcaatacctg

SEQ ID NO: 347357 - DNA, 25 bp, Artificial
  probe
  misc_feature (1)..(25): SEQ ID NO: 3122; WAN024DY9; Start 119; Stop 143
tgacaactagaatatcttcaatacc

SEQ ID NO: 347358 - DNA, 25 bp, Artificial
  probe
  misc_feature (1)..(25): SEQ ID NO: 3122; WAN024DY9; Start 108; Stop 132
tgatttaccagtgacaactagaata

SEQ ID NO: 347359 - DNA, 25 bp, Artificial
  probe
  misc_feature (1)..(25): SEQ ID NO: 3122; WAN024DY9; Start 111; Stop 135
tttaccagtgacaactagaatatct

SEQ ID NO: 347360 - DNA, 25 bp, Artificial
  probe
  misc_feature (1)..(25): SEQ ID NO: 3122; WAN024DY9; Start 266; Stop 290
ctgcctttctaacttttgatgtcat

SEQ ID NO: 347361 - DNA, 25 bp, Artificial
  probe
  misc_feature (1)..(25): SEQ ID NO: 3122; WAN024DY9; Start 120; Stop 144
gacaactagaatatcttcaatacct

SEQ ID NO: 347362 - DNA, 25 bp, Artificial
  probe
  misc_feature (1)..(25): SEQ ID NO: 3122; WAN024DY9; Start 49; Stop 73
tctttgaggttatattccaattcga

SEQ ID NO: 347363 - DNA, 25 bp, Artificial
  probe
  misc_feature (1)..(25): SEQ ID NO: 3122; WAN024DY9; Start 265; Stop 289
actgcctttctaacttttgatgtca

SEQ ID NO: 347364 - DNA, 25 bp, Artificial
  probe
  misc_feature (1)..(25): SEQ ID NO: 3122; WAN024DY9; Start 122; Stop 146
caactagaatatcttcaatacctga

SEQ ID NO: 347365 - DNA, 25 bp, Artificial
  probe
  misc_feature (1)..(25): SEQ ID NO: 3122; WAN024DY9; Start 164; Stop 188
cgataaactggatagttggtttgtc

SEQ ID NO: 347366 - DNA, 25 bp, Artificial
  probe
  misc_feature (1)..(25): SEQ ID NO: 3122; WAN024DY9; Start 162; Stop 186
cacgataaactggatagttggtttg

SEQ ID NO: 347367 - DNA, 25 bp, Artificial
  probe
  misc_feature (1)..(25): SEQ ID NO: 3123; WAN024BHH; Start 696; Stop 720
acaagagatgattcaagtggataca

SEQ ID NO: 347368 - DNA, 25 bp, Artificial
  probe
  misc_feature (1)..(25): SEQ ID NO: 3123; WAN024BHH; Start 697; Stop 721
caagagatgattcaagtggatacaa

SEQ ID NO: 347369 - DNA, 25 bp, Artificial
  probe
  misc_feature (1)..(25): SEQ ID NO: 3123; WAN024BHH; Start 1012; Stop 1036
tcttatgatgatgttgagttggaat

SEQ ID NO: 347370 - DNA, 25 bp, Artificial
  probe
  misc_feature (1)..(25): SEQ ID NO: 3123; WAN024BHH; Start 1011; Stop 1035
ttcttatgatgatgttgagttggaa

SEQ ID NO: 347371 - DNA, 25 bp, Artificial
  probe
  misc_feature (1)..(25): SEQ ID NO: 3123; WAN024BHH; Start 1013; Stop 1037
cttatgatgatgttgagttggaatt

SEQ ID NO: 347372 - DNA, 25 bp, Artificial
  probe
  misc_feature (1)..(25): SEQ ID NO: 3123; WAN024BHH; Start 98; Stop 122
ttatttgtaatgaatgcgtggagtt

SEQ ID NO: 347373 - DNA, 25 bp, Artificial
  probe
  misc_feature (1)..(25): SEQ ID NO: 3123; WAN024BHH; Start 97; Stop 121
tttatttgtaatgaatgcgtggagt

SEQ ID NO: 347374 - DNA, 25 bp, Artificial
  probe
  misc_feature (1)..(25): SEQ ID NO: 3123; WAN024BHH; Start 881; Stop 905
ttggtattatccctgagttgattgg

SEQ ID NO: 347375 - DNA, 25 bp, Artificial
  probe
  misc_feature (1)..(25): SEQ ID NO: 3123; WAN024BHH; Start 1017; Stop 1041
tgatgatgttgagttggaatttgac

SEQ ID NO: 347376 - DNA, 25 bp, Artificial
  probe
  misc_feature (1)..(25): SEQ ID NO: 3123; WAN024BHH; Start 1007; Stop 1031
tgctttcttatgatgatgttgagtt

SEQ ID NO: 347377 - DNA, 25 bp, Artificial
  probe
  misc_feature (1)..(25): SEQ ID NO: 3123; WAN024BHH; Start 1006; Stop 1030
ttgctttcttatgatgatgttgagt

SEQ ID NO: 347378 - DNA, 25 bp, Artificial
  probe
  misc_feature (1)..(25): SEQ ID NO: 3123; WAN024BHH; Start 1016; Stop 1040
atgatgatgttgagttggaatttga

SEQ ID NO: 347379 - DNA, 25 bp, Artificial
  probe
  misc_feature (1)..(25): SEQ ID NO: 3123; WAN024BHH; Start 1168; Stop 1192
aaattggttcgcatcactaaagaaa

SEQ ID NO: 347380 - DNA, 25 bp, Artificial
  probe
  misc_feature (1)..(25): SEQ ID NO: 3123; WAN024BHH; Start 1008; Stop 1032
gctttcttatgatgatgttgagttg

SEQ ID NO: 347381 - DNA, 25 bp, Artificial
  probe
  misc_feature (1)..(25): SEQ ID NO: 3123; WAN024BHH; Start 1167; Stop 1191
gaaattggttcgcatcactaaagaa

SEQ ID NO: 347382 - DNA, 25 bp, Artificial
  probe
  misc_feature (1)..(25): SEQ ID NO: 3123; WAN024BHH; Start 1048; Stop 1072
gcccttcaagagattgctaataaag

SEQ ID NO: 347383 - DNA, 25 bp, Artificial
  probe
  misc_feature (1)..(25): SEQ ID NO: 3123; WAN024BHH; Start 1018; Stop 1042
gatgatgttgagttggaatttgacg

SEQ ID NO: 347384 - DNA, 25 bp, Artificial
  probe
  misc_feature (1)..(25): SEQ ID NO: 3123; WAN024BHH; Start 880; Stop 904
tttggtattatccctgagttgattg

SEQ ID NO: 347385 - DNA, 25 bp, Artificial
  probe
  misc_feature (1)..(25): SEQ ID NO: 3123; WAN024BHH; Start 1169; Stop 1193
aattggttcgcatcactaaagaaac

SEQ ID NO: 347386 - DNA, 25 bp, Artificial
  probe
  misc_feature (1)..(25): SEQ ID NO: 3123; WAN024BHH; Start 551; Stop 575
atgaaattgacaagattgccaagaa

SEQ ID NO: 347387 - DNA, 25 bp, Artificial
  probe
  misc_feature (1)..(25): SEQ ID NO: 3123; WAN024BHH; Start 1019; Stop 1043
atgatgttgagttggaatttgacga

SEQ ID NO: 347388 - DNA, 25 bp, Artificial
  probe
  misc_feature (1)..(25): SEQ ID NO: 3123; WAN024BHH; Start 554; Stop 578
aaattgacaagattgccaagaagag

SEQ ID NO: 347389 - DNA, 25 bp, Artificial
  probe
  misc_feature (1)..(25): SEQ ID NO: 3123; WAN024BHH; Start 553; Stop 577
gaaattgacaagattgccaagaaga

SEQ ID NO: 347390 - DNA, 25 bp, Artificial
  probe
  misc_feature (1)..(25): SEQ ID NO: 3123; WAN024BHH; Start 550; Stop 574
gatgaaattgacaagattgccaaga

SEQ ID NO: 347391 - DNA, 25 bp, Artificial
  probe
  misc_feature (1)..(25): SEQ ID NO: 3123; WAN024BHH; Start 552; Stop 576
tgaaattgacaagattgccaagaag

SEQ ID NO: 347392 - DNA, 25 bp, Artificial
  probe
  misc_feature (1)..(25): SEQ ID NO: 3123; WAN024BHH; Start 1010; Stop 1034
tttcttatgatgatgttgagttgga

SEQ ID NO: 347393 - DNA, 25 bp, Artificial
  probe
  misc_feature (1)..(25): SEQ ID NO: 3123; WAN024BHH; Start 1170; Stop 1194
attggttcgcatcactaaagaaact

SEQ ID NO: 347394 - DNA, 25 bp, Artificial
  probe
  misc_feature (1)..(25): SEQ ID NO: 3123; WAN024BHH; Start 850; Stop 874
caagaaatcatcgctgaagacattc

SEQ ID NO: 347395 - DNA, 25 bp, Artificial
  probe
  misc_feature (1)..(25): SEQ ID NO: 3123; WAN024BHH; Start 1009; Stop 1033
ctttcttatgatgatgttgagttgg

SEQ ID NO: 347396 - DNA, 25 bp, Artificial
  probe
  misc_feature (1)..(25): SEQ ID NO: 3123; WAN024BHH; Start 549; Stop 573
ggatgaaattgacaagattgccaag

SEQ ID NO: 347397 - DNA, 25 bp, Artificial
  probe
  misc_feature (1)..(25): SEQ ID NO: 3123; WAN024BHH; Start 1208; Stop 1232
ataaaccgatcctagaaacagccta

SEQ ID NO: 347398 - DNA, 25 bp, Artificial
  probe
  misc_feature (1)..(25): SEQ ID NO: 3123; WAN024BHH; Start 698; Stop 722
aagagatgattcaagtggatacaaa

SEQ ID NO: 347399 - DNA, 25 bp, Artificial
  probe
  misc_feature (1)..(25): SEQ ID NO: 3123; WAN024BHH; Start 1166; Stop 1190
tgaaattggttcgcatcactaaaga

SEQ ID NO: 347400 - DNA, 25 bp, Artificial
  probe
  misc_feature (1)..(25): SEQ ID NO: 3124; WAN024FQW; Start 376; Stop 400
aagaatgtatccatacctattgcgg

SEQ ID NO: 347401 - DNA, 25 bp, Artificial
  probe
  misc_feature (1)..(25): SEQ ID NO: 3124; WAN024FQW; Start 382; Stop 406
gtatccatacctattgcggttatgt

SEQ ID NO: 347402 - DNA, 25 bp, Artificial
  probe
  misc_feature (1)..(25): SEQ ID NO: 3124; WAN024FQW; Start 381; Stop 405
tgtatccatacctattgcggttatg

SEQ ID NO: 347403 - DNA, 25 bp, Artificial
  probe
  misc_feature (1)..(25): SEQ ID NO: 3124; WAN024FQW; Start 383; Stop 407
tatccatacctattgcggttatgtt

SEQ ID NO: 347404 - DNA, 25 bp, Artificial
  probe
  misc_feature (1)..(25): SEQ ID NO: 3124; WAN024FQW; Start 379; Stop 403
aatgtatccatacctattgcggtta

SEQ ID NO: 347405 - DNA, 25 bp, Artificial
  probe
  misc_feature (1)..(25): SEQ ID NO: 3124; WAN024FQW; Start 380; Stop 404
atgtatccatacctattgcggttat

SEQ ID NO: 347406 - DNA, 25 bp, Artificial
  probe
  misc_feature (1)..(25): SEQ ID NO: 3124; WAN024FQW; Start 378; Stop 402
gaatgtatccatacctattgcggtt

SEQ ID NO: 347407 - DNA, 25 bp, Artificial
  probe
  misc_feature (1)..(25): SEQ ID NO: 3124; WAN024FQW; Start 451; Stop 475
atggctatgagagtaagagggataa

SEQ ID NO: 347408 - DNA, 25 bp, Artificial
  probe
  misc_feature (1)..(25): SEQ ID NO: 3124; WAN024FQW; Start 450; Stop 474
aatggctatgagagtaagagggata

SEQ ID NO: 347409 - DNA, 25 bp, Artificial
  probe
  misc_feature (1)..(25): SEQ ID NO: 3124; WAN024FQW; Start 394; Stop 418
attgcggttatgtttagattcttcc

SEQ ID NO: 347410 - DNA, 25 bp, Artificial
  probe
  misc_feature (1)..(25): SEQ ID NO: 3124; WAN024FQW; Start 671; Stop 695
tgggaggcttaatatggttgaaata

SEQ ID NO: 347411 - DNA, 25 bp, Artificial
  probe
  misc_feature (1)..(25): SEQ ID NO: 3124; WAN024FQW; Start 449; Stop 473
aaatggctatgagagtaagagggat

SEQ ID NO: 347412 - DNA, 25 bp, Artificial
  probe
  misc_feature (1)..(25): SEQ ID NO: 3124; WAN024FQW; Start 11; Stop 35
tttcttcaaatgctccctttaatcc

SEQ ID NO: 347413 - DNA, 25 bp, Artificial
  probe
  misc_feature (1)..(25): SEQ ID NO: 3124; WAN024FQW; Start 377; Stop 401
agaatgtatccatacctattgcggt

SEQ ID NO: 347414 - DNA, 25 bp, Artificial
  probe
  misc_feature (1)..(25): SEQ ID NO: 3124; WAN024FQW; Start 398; Stop 422
cggttatgtttagattcttcccatc

SEQ ID NO: 347415 - DNA, 25 bp, Artificial
  probe
  misc_feature (1)..(25): SEQ ID NO: 3124; WAN024FQW; Start 15; Stop 39
ttcaaatgctccctttaatcccaat

SEQ ID NO: 347416 - DNA, 25 bp, Artificial
  probe
  misc_feature (1)..(25): SEQ ID NO: 3124; WAN024FQW; Start 391; Stop 415
cctattgcggttatgtttagattct

SEQ ID NO: 347417 - DNA, 25 bp, Artificial
  probe
  misc_feature (1)..(25): SEQ ID NO: 3124; WAN024FQW; Start 670; Stop 694
gtgggaggcttaatatggttgaaat

SEQ ID NO: 347418 - DNA, 25 bp, Artificial
  probe
  misc_feature (1)..(25): SEQ ID NO: 3124; WAN024FQW; Start 665; Stop 689
ttattgtgggaggcttaatatggtt

SEQ ID NO: 347419 - DNA, 25 bp, Artificial
  probe
  misc_feature (1)..(25): SEQ ID NO: 3124; WAN024FQW; Start 661; Stop 685
ggacttattgtgggaggcttaatat

SEQ ID NO: 347420 - DNA, 25 bp, Artificial
  probe
  misc_feature (1)..(25): SEQ ID NO: 3124; WAN024FQW; Start 664; Stop 688
cttattgtgggaggcttaatatggt

SEQ ID NO: 347421 - DNA, 25 bp, Artificial
  probe
  misc_feature (1)..(25): SEQ ID NO: 3124; WAN024FQW; Start 663; Stop 687
acttattgtgggaggcttaatatgg

SEQ ID NO: 347422 - DNA, 25 bp, Artificial
  probe
  misc_feature (1)..(25): SEQ ID NO: 3124; WAN024FQW; Start 666; Stop 690
tattgtgggaggcttaatatggttg

SEQ ID NO: 347423 - DNA, 25 bp, Artificial
  probe
  misc_feature (1)..(25): SEQ ID NO: 3124; WAN024FQW; Start 672; Stop 696
gggaggcttaatatggttgaaataa

SEQ ID NO: 347424 - DNA, 25 bp, Artificial
  probe
  misc_feature (1)..(25): SEQ ID NO: 3124; WAN024FQW; Start 662; Stop 686
gacttattgtgggaggcttaatatg

SEQ ID NO: 347425 - DNA, 25 bp, Artificial
  probe
  misc_feature (1)..(25): SEQ ID NO: 3124; WAN024FQW; Start 12; Stop 36
ttcttcaaatgctccctttaatccc

SEQ ID NO: 347426 - DNA, 25 bp, Artificial
  probe
  misc_feature (1)..(25): SEQ ID NO: 3124; WAN024FQW; Start 515; Stop 539
tgccactactcattatatcatctaa

SEQ ID NO: 347427 - DNA, 25 bp, Artificial
  probe
  misc_feature (1)..(25): SEQ ID NO: 3124; WAN024FQW; Start 395; Stop 419
ttgcggttatgtttagattcttccc

SEQ ID NO: 347428 - DNA, 25 bp, Artificial
  probe
  misc_feature (1)..(25): SEQ ID NO: 3124; WAN024FQW; Start 16; Stop 40
tcaaatgctccctttaatcccaatc

SEQ ID NO: 347429 - DNA, 25 bp, Artificial
  probe
  misc_feature (1)..(25): SEQ ID NO: 3124; WAN024FQW; Start 57; Stop 81
agtcgtatttatcacaggcttaact

SEQ ID NO: 347430 - DNA, 25 bp, Artificial
  probe
  misc_feature (1)..(25): SEQ ID NO: 3124; WAN024FQW; Start 397; Stop 421
gcggttatgtttagattcttcccat

SEQ ID NO: 347431 - DNA, 25 bp, Artificial
  probe
  misc_feature (1)..(25): SEQ ID NO: 3124; WAN024FQW; Start 56; Stop 80
tagtcgtatttatcacaggcttaac

SEQ ID NO: 347432 - DNA, 25 bp, Artificial
  probe
  misc_feature (1)..(25): SEQ ID NO: 3124; WAN024FQW; Start 14; Stop 38
cttcaaatgctccctttaatcccaa

SEQ ID NO: 347433 - DNA, 25 bp, Artificial
  probe
  misc_feature (1)..(25): SEQ ID NO: 3125; WAN024F25; Start 96; Stop 120
tatcatccatctcaccgtctgtata

SEQ ID NO: 347434 - DNA, 25 bp, Artificial
  probe
  misc_feature (1)..(25): SEQ ID NO: 3125; WAN024F25; Start 95; Stop 119
atatcatccatctcaccgtctgtat

SEQ ID NO: 347435 - DNA, 25 bp, Artificial
  probe
  misc_feature (1)..(25): SEQ ID NO: 3125; WAN024F25; Start 110; Stop 134
ccgtctgtatagattggtgtatcaa

SEQ ID NO: 347436 - DNA, 25 bp, Artificial
  probe
  misc_feature (1)..(25): SEQ ID NO: 3125; WAN024F25; Start 97; Stop 121
atcatccatctcaccgtctgtatag

SEQ ID NO: 347437 - DNA, 25 bp, Artificial
  probe
  misc_feature (1)..(25): SEQ ID NO: 3125; WAN024F25; Start 135; Stop 159
agattacatccttgttctcgttgat

SEQ ID NO: 347438 - DNA, 25 bp, Artificial
  probe
  misc_feature (1)..(25): SEQ ID NO: 3125; WAN024F25; Start 134; Stop 158
aagattacatccttgttctcgttga

SEQ ID NO: 347439 - DNA, 25 bp, Artificial
  probe
  misc_feature (1)..(25): SEQ ID NO: 3125; WAN024F25; Start 136; Stop 160
gattacatccttgttctcgttgata

SEQ ID NO: 347440 - DNA, 25 bp, Artificial
  probe
  misc_feature (1)..(25): SEQ ID NO: 3125; WAN024F25; Start 98; Stop 122
tcatccatctcaccgtctgtataga

SEQ ID NO: 347441 - DNA, 25 bp, Artificial
  probe
  misc_feature (1)..(25): SEQ ID NO: 3125; WAN024F25; Start 137; Stop 161
attacatccttgttctcgttgatat

SEQ ID NO: 347442 - DNA, 25 bp, Artificial
  probe
  misc_feature (1)..(25): SEQ ID NO: 3125; WAN024F25; Start 109; Stop 133
accgtctgtatagattggtgtatca

SEQ ID NO: 347443 - DNA, 25 bp, Artificial
  probe
  misc_feature (1)..(25): SEQ ID NO: 3125; WAN024F25; Start 182; Stop 206
ccaccttcataatgataatgcttgg

SEQ ID NO: 347444 - DNA, 25 bp, Artificial
  probe
  misc_feature (1)..(25): SEQ ID NO: 3125; WAN024F25; Start 183; Stop 207
caccttcataatgataatgcttggt

SEQ ID NO: 347445 - DNA, 25 bp, Artificial
  probe
  misc_feature (1)..(25): SEQ ID NO: 3125; WAN024F25; Start 141; Stop 165
catccttgttctcgttgatatattc

SEQ ID NO: 347446 - DNA, 25 bp, Artificial
  probe
  misc_feature (1)..(25): SEQ ID NO: 3125; WAN024F25; Start 142; Stop 166
atccttgttctcgttgatatattca

SEQ ID NO: 347447 - DNA, 25 bp, Artificial
  probe
  misc_feature (1)..(25): SEQ ID NO: 3125; WAN024F25; Start 140; Stop 164
acatccttgttctcgttgatatatt

SEQ ID NO: 347448 - DNA, 25 bp, Artificial
  probe
  misc_feature (1)..(25): SEQ ID NO: 3125; WAN024F25; Start 138; Stop 162
ttacatccttgttctcgttgatata

SEQ ID NO: 347449 - DNA, 25 bp, Artificial
  probe
  misc_feature (1)..(25): SEQ ID NO: 3125; WAN024F25; Start 100; Stop 124
atccatctcaccgtctgtatagatt

SEQ ID NO: 347450 - DNA, 25 bp, Artificial
  probe
  misc_feature (1)..(25): SEQ ID NO: 3125; WAN024F25; Start 184; Stop 208
accttcataatgataatgcttggtt

SEQ ID NO: 347451 - DNA, 25 bp, Artificial
  probe
  misc_feature (1)..(25): SEQ ID NO: 3125; WAN024F25; Start 169; Stop 193
gtaactagcaatcccaccttcataa

SEQ ID NO: 347452 - DNA, 25 bp, Artificial
  probe
  misc_feature (1)..(25): SEQ ID NO: 3125; WAN024F25; Start 170; Stop 194
taactagcaatcccaccttcataat

SEQ ID NO: 347453 - DNA, 25 bp, Artificial
  probe
  misc_feature (1)..(25): SEQ ID NO: 3125; WAN024F25; Start 171; Stop 195
aactagcaatcccaccttcataatg

SEQ ID NO: 347454 - DNA, 25 bp, Artificial
  probe
  misc_feature (1)..(25): SEQ ID NO: 3125; WAN024F25; Start 94; Stop 118
gatatcatccatctcaccgtctgta

SEQ ID NO: 347455 - DNA, 25 bp, Artificial
  probe
  misc_feature (1)..(25): SEQ ID NO: 3125; WAN024F25; Start 99; Stop 123
catccatctcaccgtctgtatagat

SEQ ID NO: 347456 - DNA, 25 bp, Artificial
  probe
  misc_feature (1)..(25): SEQ ID NO: 3125; WAN024F25; Start 101; Stop 125
tccatctcaccgtctgtatagattg

SEQ ID NO: 347457 - DNA, 25 bp, Artificial
  probe
  misc_feature (1)..(25): SEQ ID NO: 3125; WAN024F25; Start 131; Stop 155
tcaaagattacatccttgttctcgt

SEQ ID NO: 347458 - DNA, 25 bp, Artificial
  probe
  misc_feature (1)..(25): SEQ ID NO: 3125; WAN024F25; Start 190; Stop 214
ataatgataatgcttggtttgttcc

SEQ ID NO: 347459 - DNA, 25 bp, Artificial
  probe
  misc_feature (1)..(25): SEQ ID NO: 3125; WAN024F25; Start 133; Stop 157
aaagattacatccttgttctcgttg

SEQ ID NO: 347460 - DNA, 25 bp, Artificial
  probe
  misc_feature (1)..(25): SEQ ID NO: 3125; WAN024F25; Start 132; Stop 156
caaagattacatccttgttctcgtt

SEQ ID NO: 347461 - DNA, 25 bp, Artificial
  probe
  misc_feature (1)..(25): SEQ ID NO: 3125; WAN024F25; Start 111; Stop 135
cgtctgtatagattggtgtatcaaa

SEQ ID NO: 347462 - DNA, 25 bp, Artificial
  probe
  misc_feature (1)..(25): SEQ ID NO: 3125; WAN024F25; Start 103; Stop 127
catctcaccgtctgtatagattggt

SEQ ID NO: 347463 - DNA, 25 bp, Artificial
  probe
  misc_feature (1)..(25): SEQ ID NO: 3125; WAN024F25; Start 181; Stop 205
cccaccttcataatgataatgcttg

SEQ ID NO: 347464 - DNA, 25 bp, Artificial
  probe
  misc_feature (1)..(25): SEQ ID NO: 3125; WAN024F25; Start 180; Stop 204
tcccaccttcataatgataatgctt

SEQ ID NO: 347465 - DNA, 25 bp, Artificial
  probe
  misc_feature (1)..(25): SEQ ID NO: 3125; WAN024F25; Start 179; Stop 203
atcccaccttcataatgataatgct

SEQ ID NO: 347466 - DNA, 25 bp, Artificial
  probe
  misc_feature (1)..(25): SEQ ID NO: 3126; WAN024D3P; Start 551; Stop 575
gccactatcctcaatcacttacaat

SEQ ID NO: 347467 - DNA, 25 bp, Artificial
  probe
  misc_feature (1)..(25): SEQ ID NO: 3126; WAN024D3P; Start 549; Stop 573
tagccactatcctcaatcacttaca

SEQ ID NO: 347468 - DNA, 25 bp, Artificial
  probe
  misc_feature (1)..(25): SEQ ID NO: 3126; WAN024D3P; Start 253; Stop 277
tactactggttaggaatcactggag

SEQ ID NO: 347469 - DNA, 25 bp, Artificial
  probe
  misc_feature (1)..(25): SEQ ID NO: 3126; WAN024D3P; Start 252; Stop 276
ctactactggttaggaatcactgga

SEQ ID NO: 347470 - DNA, 25 bp, Artificial
  probe
  misc_feature (1)..(25): SEQ ID NO: 3126; WAN024D3P; Start 550; Stop 574
agccactatcctcaatcacttacaa

SEQ ID NO: 347471 - DNA, 25 bp, Artificial
  probe
  misc_feature (1)..(25): SEQ ID NO: 3126; WAN024D3P; Start 552; Stop 576
ccactatcctcaatcacttacaatt

SEQ ID NO: 347472 - DNA, 25 bp, Artificial
  probe
  misc_feature (1)..(25): SEQ ID NO: 3126; WAN024D3P; Start 318; Stop 342
tcaatcctatctcatccaatctgaa

SEQ ID NO: 347473 - DNA, 25 bp, Artificial
  probe
  misc_feature (1)..(25): SEQ ID NO: 3126; WAN024D3P; Start 548; Stop 572
atagccactatcctcaatcacttac

SEQ ID NO: 347474 - DNA, 25 bp, Artificial
  probe
  misc_feature (1)..(25): SEQ ID NO: 3126; WAN024D3P; Start 317; Stop 341
atcaatcctatctcatccaatctga

SEQ ID NO: 347475 - DNA, 25 bp, Artificial
  probe
  misc_feature (1)..(25): SEQ ID NO: 3126; WAN024D3P; Start 558; Stop 582
tcctcaatcacttacaattcaagat

SEQ ID NO: 347476 - DNA, 25 bp, Artificial
  probe
  misc_feature (1)..(25): SEQ ID NO: 3126; WAN024D3P; Start 557; Stop 581
atcctcaatcacttacaattcaaga

SEQ ID NO: 347477 - DNA, 25 bp, Artificial
  probe
  misc_feature (1)..(25): SEQ ID NO: 3126; WAN024D3P; Start 316; Stop 340
gatcaatcctatctcatccaatctg

SEQ ID NO: 347478 - DNA, 25 bp, Artificial
  probe
  misc_feature (1)..(25): SEQ ID NO: 3126; WAN024D3P; Start 554; Stop 578
actatcctcaatcacttacaattca

SEQ ID NO: 347479 - DNA, 25 bp, Artificial
  probe
  misc_feature (1)..(25): SEQ ID NO: 3126; WAN024D3P; Start 596; Stop 620
tatccgttcacagaagctacttatc

SEQ ID NO: 347480 - DNA, 25 bp, Artificial
  probe
  misc_feature (1)..(25): SEQ ID NO: 3126; WAN024D3P; Start 595; Stop 619
ctatccgttcacagaagctacttat

SEQ ID NO: 347481 - DNA, 25 bp, Artificial
  probe
  misc_feature (1)..(25): SEQ ID NO: 3126; WAN024D3P; Start 553; Stop 577
cactatcctcaatcacttacaattc

SEQ ID NO: 347482 - DNA, 25 bp, Artificial
  probe
  misc_feature (1)..(25): SEQ ID NO: 3126; WAN024D3P; Start 594; Stop 618
actatccgttcacagaagctactta

SEQ ID NO: 347483 - DNA, 25 bp, Artificial
  probe
  misc_feature (1)..(25): SEQ ID NO: 3126; WAN024D3P; Start 409; Stop 433
tcaagtgaattagctcaactccata

SEQ ID NO: 347484 - DNA, 25 bp, Artificial
  probe
  misc_feature (1)..(25): SEQ ID NO: 3126; WAN024D3P; Start 408; Stop 432
atcaagtgaattagctcaactccat

SEQ ID NO: 347485 - DNA, 25 bp, Artificial
  probe
  misc_feature (1)..(25): SEQ ID NO: 3126; WAN024D3P; Start 407; Stop 431
aatcaagtgaattagctcaactcca

SEQ ID NO: 347486 - DNA, 25 bp, Artificial
  probe
  misc_feature (1)..(25): SEQ ID NO: 3126; WAN024D3P; Start 412; Stop 436
agtgaattagctcaactccatatca

SEQ ID NO: 347487 - DNA, 25 bp, Artificial
  probe
  misc_feature (1)..(25): SEQ ID NO: 3126; WAN024D3P; Start 501; Stop 525
tatttcatcaacccaccaactctat

SEQ ID NO: 347488 - DNA, 25 bp, Artificial
  probe
  misc_feature (1)..(25): SEQ ID NO: 3126; WAN024D3P; Start 500; Stop 524
atatttcatcaacccaccaactcta

SEQ ID NO: 347489 - DNA, 25 bp, Artificial
  probe
  misc_feature (1)..(25): SEQ ID NO: 3126; WAN024D3P; Start 502; Stop 526
atttcatcaacccaccaactctatc

SEQ ID NO: 347490 - DNA, 25 bp, Artificial
  probe
  misc_feature (1)..(25): SEQ ID NO: 3126; WAN024D3P; Start 643; Stop 667
accttatcacccaaagaatacctac

SEQ ID NO: 347491 - DNA, 25 bp, Artificial
  probe
  misc_feature (1)..(25): SEQ ID NO: 3126; WAN024D3P; Start 599; Stop 623
ccgttcacagaagctacttatcaag

SEQ ID NO: 347492 - DNA, 25 bp, Artificial
  probe
  misc_feature (1)..(25): SEQ ID NO: 3126; WAN024D3P; Start 597; Stop 621
atccgttcacagaagctacttatca

SEQ ID NO: 347493 - DNA, 25 bp, Artificial
  probe
  misc_feature (1)..(25): SEQ ID NO: 3126; WAN024D3P; Start 410; Stop 434
caagtgaattagctcaactccatat

SEQ ID NO: 347494 - DNA, 25 bp, Artificial
  probe
  misc_feature (1)..(25): SEQ ID NO: 3126; WAN024D3P; Start 713; Stop 737
aagagtccatcaaggtaattgcata

SEQ ID NO: 347495 - DNA, 25 bp, Artificial
  probe
  misc_feature (1)..(25): SEQ ID NO: 3126; WAN024D3P; Start 644; Stop 668
ccttatcacccaaagaatacctact

SEQ ID NO: 347496 - DNA, 25 bp, Artificial
  probe
  misc_feature (1)..(25): SEQ ID NO: 3126; WAN024D3P; Start 254; Stop 278
actactggttaggaatcactggagg

SEQ ID NO: 347497 - DNA, 25 bp, Artificial
  probe
  misc_feature (1)..(25): SEQ ID NO: 3126; WAN024D3P; Start 721; Stop 745
atcaaggtaattgcatactcggtag

SEQ ID NO: 347498 - DNA, 25 bp, Artificial
  probe
  misc_feature (1)..(25): SEQ ID NO: 3126; WAN024D3P; Start 714; Stop 738
agagtccatcaaggtaattgcatac

SEQ ID NO: 347499 - DNA, 25 bp, Artificial
  probe
  misc_feature (1)..(25): SEQ ID NO: 3127; WAN024CPQ; Start 156; Stop 180
taaccttgttagattgagttgcgat

SEQ ID NO: 347500 - DNA, 25 bp, Artificial
  probe
  misc_feature (1)..(25): SEQ ID NO: 3127; WAN024CPQ; Start 16; Stop 40
cttaacaggatctgcttcgtagaca

SEQ ID NO: 347501 - DNA, 25 bp, Artificial
  probe
  misc_feature (1)..(25): SEQ ID NO: 3127; WAN024CPQ; Start 17; Stop 41
ttaacaggatctgcttcgtagacac

SEQ ID NO: 347502 - DNA, 25 bp, Artificial
  probe
  misc_feature (1)..(25): SEQ ID NO: 3127; WAN024CPQ; Start 15; Stop 39
ccttaacaggatctgcttcgtagac

SEQ ID NO: 347503 - DNA, 25 bp, Artificial
  probe
  misc_feature (1)..(25): SEQ ID NO: 3127; WAN024CPQ; Start 96; Stop 120
cagcatttgggaagactttcttagc

SEQ ID NO: 347504 - DNA, 25 bp, Artificial
  probe
  misc_feature (1)..(25): SEQ ID NO: 3127; WAN024CPQ; Start 95; Stop 119
gcagcatttgggaagactttcttag

SEQ ID NO: 347505 - DNA, 25 bp, Artificial
  probe
  misc_feature (1)..(25): SEQ ID NO: 3127; WAN024CPQ; Start 14; Stop 38
gccttaacaggatctgcttcgtaga

SEQ ID NO: 347506 - DNA, 25 bp, Artificial
  probe
  misc_feature (1)..(25): SEQ ID NO: 3127; WAN024CPQ; Start 142; Stop 166
tgctacagtccagctaaccttgtta

SEQ ID NO: 347507 - DNA, 25 bp, Artificial
  probe
  misc_feature (1)..(25): SEQ ID NO: 3127; WAN024CPQ; Start 106; Stop 130
gaagactttcttagcccactcaagt

SEQ ID NO: 347508 - DNA, 25 bp, Artificial
  probe
  misc_feature (1)..(25): SEQ ID NO: 3127; WAN024CPQ; Start 105; Stop 129
ggaagactttcttagcccactcaag

SEQ ID NO: 347509 - DNA, 25 bp, Artificial
  probe
  misc_feature (1)..(25): SEQ ID NO: 3127; WAN024CPQ; Start 197; Stop 221
gcaagtcccatagctttagcagaag

SEQ ID NO: 347510 - DNA, 25 bp, Artificial
  probe
  misc_feature (1)..(25): SEQ ID NO: 3127; WAN024CPQ; Start 152; Stop 176
cagctaaccttgttagattgagttg

SEQ ID NO: 347511 - DNA, 25 bp, Artificial
  probe
  misc_feature (1)..(25): SEQ ID NO: 3127; WAN024CPQ; Start 97; Stop 121
agcatttgggaagactttcttagcc

SEQ ID NO: 347512 - DNA, 25 bp, Artificial
  probe
  misc_feature (1)..(25): SEQ ID NO: 3127; WAN024CPQ; Start 151; Stop 175
ccagctaaccttgttagattgagtt

SEQ ID NO: 347513 - DNA, 25 bp, Artificial
  probe
  misc_feature (1)..(25): SEQ ID NO: 3127; WAN024CPQ; Start 155; Stop 179
ctaaccttgttagattgagttgcga

SEQ ID NO: 347514 - DNA, 25 bp, Artificial
  probe
  misc_feature (1)..(25): SEQ ID NO: 3127; WAN024CPQ; Start 145; Stop 169
tacagtccagctaaccttgttagat

SEQ ID NO: 347515 - DNA, 25 bp, Artificial
  probe
  misc_feature (1)..(25): SEQ ID NO: 3127; WAN024CPQ; Start 149; Stop 173
gtccagctaaccttgttagattgag

SEQ ID NO: 347516 - DNA, 25 bp, Artificial
  probe
  misc_feature (1)..(25): SEQ ID NO: 3127; WAN024CPQ; Start 153; Stop 177
agctaaccttgttagattgagttgc

SEQ ID NO: 347517 - DNA, 25 bp, Artificial
  probe
  misc_feature (1)..(25): SEQ ID NO: 3127; WAN024CPQ; Start 18; Stop 42
taacaggatctgcttcgtagacacg

SEQ ID NO: 347518 - DNA, 25 bp, Artificial
  probe
  misc_feature (1)..(25): SEQ ID NO: 3127; WAN024CPQ; Start 150; Stop 174
tccagctaaccttgttagattgagt

SEQ ID NO: 347519 - DNA, 25 bp, Artificial
  probe
  misc_feature (1)..(25): SEQ ID NO: 3127; WAN024CPQ; Start 148; Stop 172
agtccagctaaccttgttagattga

SEQ ID NO: 347520 - DNA, 25 bp, Artificial
  probe
  misc_feature (1)..(25): SEQ ID NO: 3127; WAN024CPQ; Start 147; Stop 171
cagtccagctaaccttgttagattg

SEQ ID NO: 347521 - DNA, 25 bp, Artificial
  probe
  misc_feature (1)..(25): SEQ ID NO: 3127; WAN024CPQ; Start 144; Stop 168
ctacagtccagctaaccttgttaga

SEQ ID NO: 347522 - DNA, 25 bp, Artificial
  probe
  misc_feature (1)..(25): SEQ ID NO: 3127; WAN024CPQ; Start 146; Stop 170
acagtccagctaaccttgttagatt

SEQ ID NO: 347523 - DNA, 25 bp, Artificial
  probe
  misc_feature (1)..(25): SEQ ID NO: 3127; WAN024CPQ; Start 94; Stop 118
cgcagcatttgggaagactttctta

SEQ ID NO: 347524 - DNA, 25 bp, Artificial
  probe
  misc_feature (1)..(25): SEQ ID NO: 3127; WAN024CPQ; Start 154; Stop 178
gctaaccttgttagattgagttgcg

SEQ ID NO: 347525 - DNA, 25 bp, Artificial
  probe
  misc_feature (1)..(25): SEQ ID NO: 3127; WAN024CPQ; Start 141; Stop 165
ctgctacagtccagctaaccttgtt

SEQ ID NO: 347526 - DNA, 25 bp, Artificial
  probe
  misc_feature (1)..(25): SEQ ID NO: 3127; WAN024CPQ; Start 143; Stop 167
gctacagtccagctaaccttgttag

SEQ ID NO: 347527 - DNA, 25 bp, Artificial
  probe
  misc_feature (1)..(25): SEQ ID NO: 3127; WAN024CPQ; Start 98; Stop 122
gcatttgggaagactttcttagccc

SEQ ID NO: 347528 - DNA, 25 bp, Artificial
  probe
  misc_feature (1)..(25): SEQ ID NO: 3127; WAN024CPQ; Start 104; Stop 128
gggaagactttcttagcccactcaa

SEQ ID NO: 347529 - DNA, 25 bp, Artificial
  probe
  misc_feature (1)..(25): SEQ ID NO: 3127; WAN024CPQ; Start 196; Stop 220
ggcaagtcccatagctttagcagaa

SEQ ID NO: 347530 - DNA, 25 bp, Artificial
  probe
  misc_feature (1)..(25): SEQ ID NO: 3127; WAN024CPQ; Start 191; Stop 215
ttcatggcaagtcccatagctttag

SEQ ID NO: 347531 - DNA, 25 bp, Artificial
  probe
  misc_feature (1)..(25): SEQ ID NO: 3127; WAN024CPQ; Start 190; Stop 214
cttcatggcaagtcccatagcttta

SEQ ID NO: 347532 - DNA, 25 bp, Artificial
  probe
  misc_feature (1)..(25): SEQ ID NO: 3128; WAN024G89; Start 818; Stop 842
tccagattgaacaagacttgactag

SEQ ID NO: 347533 - DNA, 25 bp, Artificial
  probe
  misc_feature (1)..(25): SEQ ID NO: 3128; WAN024G89; Start 817; Stop 841
ttccagattgaacaagacttgacta

SEQ ID NO: 347534 - DNA, 25 bp, Artificial
  probe
  misc_feature (1)..(25): SEQ ID NO: 3128; WAN024G89; Start 819; Stop 843
ccagattgaacaagacttgactagc

SEQ ID NO: 347535 - DNA, 25 bp, Artificial
  probe
  misc_feature (1)..(25): SEQ ID NO: 3128; WAN024G89; Start 820; Stop 844
cagattgaacaagacttgactagct

SEQ ID NO: 347536 - DNA, 25 bp, Artificial
  probe
  misc_feature (1)..(25): SEQ ID NO: 3128; WAN024G89; Start 548; Stop 572
gcggtaaactccattatcaaatcaa

SEQ ID NO: 347537 - DNA, 25 bp, Artificial
  probe
  misc_feature (1)..(25): SEQ ID NO: 3128; WAN024G89; Start 275; Stop 299
agattgcggatgtatttgtaaatgg

SEQ ID NO: 347538 - DNA, 25 bp, Artificial
  probe
  misc_feature (1)..(25): SEQ ID NO: 3128; WAN024G89; Start 25; Stop 49
ggagaattggtaaatgtgttagagg

SEQ ID NO: 347539 - DNA, 25 bp, Artificial
  probe
  misc_feature (1)..(25): SEQ ID NO: 3128; WAN024G89; Start 24; Stop 48
gggagaattggtaaatgtgttagag

SEQ ID NO: 347540 - DNA, 25 bp, Artificial
  probe
  misc_feature (1)..(25): SEQ ID NO: 3128; WAN024G89; Start 760; Stop 784
ctgacttatggactgaaagaatggt

SEQ ID NO: 347541 - DNA, 25 bp, Artificial
  probe
  misc_feature (1)..(25): SEQ ID NO: 3128; WAN024G89; Start 721; Stop 745
aaagaacaagcagaagcctatcaaa

SEQ ID NO: 347542 - DNA, 25 bp, Artificial
  probe
  misc_feature (1)..(25): SEQ ID NO: 3128; WAN024G89; Start 259; Stop 283
ctttcagaacttaaacagattgcgg

SEQ ID NO: 347543 - DNA, 25 bp, Artificial
  probe
  misc_feature (1)..(25): SEQ ID NO: 3128; WAN024G89; Start 256; Stop 280
ccgctttcagaacttaaacagattg

SEQ ID NO: 347544 - DNA, 25 bp, Artificial
  probe
  misc_feature (1)..(25): SEQ ID NO: 3128; WAN024G89; Start 761; Stop 785
tgacttatggactgaaagaatggta

SEQ ID NO: 347545 - DNA, 25 bp, Artificial
  probe
  misc_feature (1)..(25): SEQ ID NO: 3128; WAN024G89; Start 274; Stop 298
cagattgcggatgtatttgtaaatg

SEQ ID NO: 347546 - DNA, 25 bp, Artificial
  probe
  misc_feature (1)..(25): SEQ ID NO: 3128; WAN024G89; Start 261; Stop 285
ttcagaacttaaacagattgcggat

SEQ ID NO: 347547 - DNA, 25 bp, Artificial
  probe
  misc_feature (1)..(25): SEQ ID NO: 3128; WAN024G89; Start 41; Stop 65
tgttagaggataaacttgagaagca

SEQ ID NO: 347548 - DNA, 25 bp, Artificial
  probe
  misc_feature (1)..(25): SEQ ID NO: 3128; WAN024G89; Start 40; Stop 64
gtgttagaggataaacttgagaagc

SEQ ID NO: 347549 - DNA, 25 bp, Artificial
  probe
  misc_feature (1)..(25): SEQ ID NO: 3128; WAN024G89; Start 718; Stop 742
atgaaagaacaagcagaagcctatc

SEQ ID NO: 347550 - DNA, 25 bp, Artificial
  probe
  misc_feature (1)..(25): SEQ ID NO: 3128; WAN024G89; Start 717; Stop 741
gatgaaagaacaagcagaagcctat

SEQ ID NO: 347551 - DNA, 25 bp, Artificial
  probe
  misc_feature (1)..(25): SEQ ID NO: 3128; WAN024G89; Start 260; Stop 284
tttcagaacttaaacagattgcgga

SEQ ID NO: 347552 - DNA, 25 bp, Artificial
  probe
  misc_feature (1)..(25): SEQ ID NO: 3128; WAN024G89; Start 759; Stop 783
cctgacttatggactgaaagaatgg

SEQ ID NO: 347553 - DNA, 25 bp, Artificial
  probe
  misc_feature (1)..(25): SEQ ID NO: 3128; WAN024G89; Start 281; Stop 305
cggatgtatttgtaaatggcaatct

SEQ ID NO: 347554 - DNA, 25 bp, Artificial
  probe
  misc_feature (1)..(25): SEQ ID NO: 3128; WAN024G89; Start 366; Stop 390
ctatcgtagtcagggttaccaagta

SEQ ID NO: 347555 - DNA, 25 bp, Artificial
  probe
  misc_feature (1)..(25): SEQ ID NO: 3128; WAN024G89; Start 720; Stop 744
gaaagaacaagcagaagcctatcaa

SEQ ID NO: 347556 - DNA, 25 bp, Artificial
  probe
  misc_feature (1)..(25): SEQ ID NO: 3128; WAN024G89; Start 258; Stop 282
gctttcagaacttaaacagattgcg

SEQ ID NO: 347557 - DNA, 25 bp, Artificial
  probe
  misc_feature (1)..(25): SEQ ID NO: 3128; WAN024G89; Start 257; Stop 281
cgctttcagaacttaaacagattgc

SEQ ID NO: 347558 - DNA, 25 bp, Artificial
  probe
  misc_feature (1)..(25): SEQ ID NO: 3128; WAN024G89; Start 276; Stop 300
gattgcggatgtatttgtaaatggc

SEQ ID NO: 347559 - DNA, 25 bp, Artificial
  probe
  misc_feature (1)..(25): SEQ ID NO: 3128; WAN024G89; Start 549; Stop 573
cggtaaactccattatcaaatcaag

SEQ ID NO: 347560 - DNA, 25 bp, Artificial
  probe
  misc_feature (1)..(25): SEQ ID NO: 3128; WAN024G89; Start 262; Stop 286
tcagaacttaaacagattgcggatg

SEQ ID NO: 347561 - DNA, 25 bp, Artificial
  probe
  misc_feature (1)..(25): SEQ ID NO: 3128; WAN024G89; Start 26; Stop 50
gagaattggtaaatgtgttagagga

SEQ ID NO: 347562 - DNA, 25 bp, Artificial
  probe
  misc_feature (1)..(25): SEQ ID NO: 3128; WAN024G89; Start 42; Stop 66
gttagaggataaacttgagaagcaa

SEQ ID NO: 347563 - DNA, 25 bp, Artificial
  probe
  misc_feature (1)..(25): SEQ ID NO: 3128; WAN024G89; Start 265; Stop 289
gaacttaaacagattgcggatgtat

SEQ ID NO: 347564 - DNA, 25 bp, Artificial
  probe
  misc_feature (1)..(25): SEQ ID NO: 3128; WAN024G89; Start 339; Stop 363
gaaagtccttaaagagcgaagtgag

SEQ ID NO: 347565 - DNA, 25 bp, Artificial
  probe
  misc_feature (1)..(25): SEQ ID NO: 3129; WAN024FQA; Start 136; Stop 160
cagttatgtgaagagtatgctaagc

SEQ ID NO: 347566 - DNA, 25 bp, Artificial
  probe
  misc_feature (1)..(25): SEQ ID NO: 3129; WAN024FQA; Start 133; Stop 157
cctcagttatgtgaagagtatgcta

SEQ ID NO: 347567 - DNA, 25 bp, Artificial
  probe
  misc_feature (1)..(25): SEQ ID NO: 3129; WAN024FQA; Start 135; Stop 159
tcagttatgtgaagagtatgctaag

SEQ ID NO: 347568 - DNA, 25 bp, Artificial
  probe
  misc_feature (1)..(25): SEQ ID NO: 3129; WAN024FQA; Start 134; Stop 158
ctcagttatgtgaagagtatgctaa

SEQ ID NO: 347569 - DNA, 25 bp, Artificial
  probe
  misc_feature (1)..(25): SEQ ID NO: 3129; WAN024FQA; Start 101; Stop 125
tccttgtaaatgatggttcaacaga

SEQ ID NO: 347570 - DNA, 25 bp, Artificial
  probe
  misc_feature (1)..(25): SEQ ID NO: 3129; WAN024FQA; Start 102; Stop 126
ccttgtaaatgatggttcaacagat

SEQ ID NO: 347571 - DNA, 25 bp, Artificial
  probe
  misc_feature (1)..(25): SEQ ID NO: 3129; WAN024FQA; Start 100; Stop 124
atccttgtaaatgatggttcaacag

SEQ ID NO: 347572 - DNA, 25 bp, Artificial
  probe
  misc_feature (1)..(25): SEQ ID NO: 3129; WAN024FQA; Start 99; Stop 123
aatccttgtaaatgatggttcaaca

SEQ ID NO: 347573 - DNA, 25 bp, Artificial
  probe
  misc_feature (1)..(25): SEQ ID NO: 3129; WAN024FQA; Start 591; Stop 615
aattgtgattagtccacttgaaaca

SEQ ID NO: 347574 - DNA, 25 bp, Artificial
  probe
  misc_feature (1)..(25): SEQ ID NO: 3129; WAN024FQA; Start 592; Stop 616
attgtgattagtccacttgaaacat

SEQ ID NO: 347575 - DNA, 25 bp, Artificial
  probe
  misc_feature (1)..(25): SEQ ID NO: 3129; WAN024FQA; Start 593; Stop 617
ttgtgattagtccacttgaaacata

SEQ ID NO: 347576 - DNA, 25 bp, Artificial
  probe
  misc_feature (1)..(25): SEQ ID NO: 3129; WAN024FQA; Start 98; Stop 122
taatccttgtaaatgatggttcaac

SEQ ID NO: 347577 - DNA, 25 bp, Artificial
  probe
  misc_feature (1)..(25): SEQ ID NO: 3129; WAN024FQA; Start 614; Stop 638
catataactattaccgtagagaagg

SEQ ID NO: 347578 - DNA, 25 bp, Artificial
  probe
  misc_feature (1)..(25): SEQ ID NO: 3129; WAN024FQA; Start 594; Stop 618
tgtgattagtccacttgaaacatat

SEQ ID NO: 347579 - DNA, 25 bp, Artificial
  probe
  misc_feature (1)..(25): SEQ ID NO: 3129; WAN024FQA; Start 590; Stop 614
aaattgtgattagtccacttgaaac

SEQ ID NO: 347580 - DNA, 25 bp, Artificial
  probe
  misc_feature (1)..(25): SEQ ID NO: 3129; WAN024FQA; Start 106; Stop 130
gtaaatgatggttcaacagataact

SEQ ID NO: 347581 - DNA, 25 bp, Artificial
  probe
  misc_feature (1)..(25): SEQ ID NO: 3129; WAN024FQA; Start 105; Stop 129
tgtaaatgatggttcaacagataac

SEQ ID NO: 347582 - DNA, 25 bp, Artificial
  probe
  misc_feature (1)..(25): SEQ ID NO: 3129; WAN024FQA; Start 623; Stop 647
attaccgtagagaaggtagtattgt

SEQ ID NO: 347583 - DNA, 25 bp, Artificial
  probe
  misc_feature (1)..(25): SEQ ID NO: 3129; WAN024FQA; Start 103; Stop 127
cttgtaaatgatggttcaacagata

SEQ ID NO: 347584 - DNA, 25 bp, Artificial
  probe
  misc_feature (1)..(25): SEQ ID NO: 3129; WAN024FQA; Start 107; Stop 131
taaatgatggttcaacagataactc

SEQ ID NO: 347585 - DNA, 25 bp, Artificial
  probe
  misc_feature (1)..(25): SEQ ID NO: 3129; WAN024FQA; Start 543; Stop 567
ctatgaagacttttatgtggtagcg

SEQ ID NO: 347586 - DNA, 25 bp, Artificial
  probe
  misc_feature (1)..(25): SEQ ID NO: 3129; WAN024FQA; Start 544; Stop 568
tatgaagacttttatgtggtagcgg

SEQ ID NO: 347587 - DNA, 25 bp, Artificial
  probe
  misc_feature (1)..(25): SEQ ID NO: 3129; WAN024FQA; Start 10; Stop 34
agtgttgttgttccggtttataatg

SEQ ID NO: 347588 - DNA, 25 bp, Artificial
  probe
  misc_feature (1)..(25): SEQ ID NO: 3129; WAN024FQA; Start 619; Stop 643
aactattaccgtagagaaggtagta

SEQ ID NO: 347589 - DNA, 25 bp, Artificial
  probe
  misc_feature (1)..(25): SEQ ID NO: 3129; WAN024FQA; Start 618; Stop 642
taactattaccgtagagaaggtagt

SEQ ID NO: 347590 - DNA, 25 bp, Artificial
  probe
  misc_feature (1)..(25): SEQ ID NO: 3129; WAN024FQA; Start 12; Stop 36
tgttgttgttccggtttataatgtt

SEQ ID NO: 347591 - DNA, 25 bp, Artificial
  probe
  misc_feature (1)..(25): SEQ ID NO: 3129; WAN024FQA; Start 11; Stop 35
gtgttgttgttccggtttataatgt

SEQ ID NO: 347592 - DNA, 25 bp, Artificial
  probe
  misc_feature (1)..(25): SEQ ID NO: 3129; WAN024FQA; Start 15; Stop 39
tgttgttccggtttataatgtttct

SEQ ID NO: 347593 - DNA, 25 bp, Artificial
  probe
  misc_feature (1)..(25): SEQ ID NO: 3129; WAN024FQA; Start 104; Stop 128
ttgtaaatgatggttcaacagataa

SEQ ID NO: 347594 - DNA, 25 bp, Artificial
  probe
  misc_feature (1)..(25): SEQ ID NO: 3129; WAN024FQA; Start 620; Stop 644
actattaccgtagagaaggtagtat

SEQ ID NO: 347595 - DNA, 25 bp, Artificial
  probe
  misc_feature (1)..(25): SEQ ID NO: 3129; WAN024FQA; Start 16; Stop 40
gttgttccggtttataatgtttctg

SEQ ID NO: 347596 - DNA, 25 bp, Artificial
  probe
  misc_feature (1)..(25): SEQ ID NO: 3129; WAN024FQA; Start 17; Stop 41
ttgttccggtttataatgtttctga

SEQ ID NO: 347597 - DNA, 25 bp, Artificial
  probe
  misc_feature (1)..(25): SEQ ID NO: 3129; WAN024FQA; Start 8; Stop 32
ttagtgttgttgttccggtttataa

SEQ ID NO: 347598 - DNA, 25 bp, Artificial
  probe
  misc_feature (1)..(25): SEQ ID NO: 3130; WAN024FAT; Start 229; Stop 253
gtagtaatcatgtccgtcaaggaac

SEQ ID NO: 347599 - DNA, 25 bp, Artificial
  probe
  misc_feature (1)..(25): SEQ ID NO: 3130; WAN024FAT; Start 224; Stop 248
aagctgtagtaatcatgtccgtcaa

SEQ ID NO: 347600 - DNA, 25 bp, Artificial
  probe
  misc_feature (1)..(25): SEQ ID NO: 3130; WAN024FAT; Start 228; Stop 252
tgtagtaatcatgtccgtcaaggaa

SEQ ID NO: 347601 - DNA, 25 bp, Artificial
  probe
  misc_feature (1)..(25): SEQ ID NO: 3130; WAN024FAT; Start 225; Stop 249
agctgtagtaatcatgtccgtcaag

SEQ ID NO: 347602 - DNA, 25 bp, Artificial
  probe
  misc_feature (1)..(25): SEQ ID NO: 3130; WAN024FAT; Start 227; Stop 251
ctgtagtaatcatgtccgtcaagga

SEQ ID NO: 347603 - DNA, 25 bp, Artificial
  probe
  misc_feature (1)..(25): SEQ ID NO: 3130; WAN024FAT; Start 230; Stop 254
tagtaatcatgtccgtcaaggaacc

SEQ ID NO: 347604 - DNA, 25 bp, Artificial
  probe
  misc_feature (1)..(25): SEQ ID NO: 3130; WAN024FAT; Start 223; Stop 247
caagctgtagtaatcatgtccgtca

SEQ ID NO: 347605 - DNA, 25 bp, Artificial
  probe
  misc_feature (1)..(25): SEQ ID NO: 3130; WAN024FAT; Start 226; Stop 250
gctgtagtaatcatgtccgtcaagg

SEQ ID NO: 347606 - DNA, 25 bp, Artificial
  probe
  misc_feature (1)..(25): SEQ ID NO: 3130; WAN024FAT; Start 406; Stop 430
tttgtgaccagtaaagaggaactcc

SEQ ID NO: 347607 - DNA, 25 bp, Artificial
  probe
  misc_feature (1)..(25): SEQ ID NO: 3130; WAN024FAT; Start 268; Stop 292
aatttgctggatcgtttcttggttc

SEQ ID NO: 347608 - DNA, 25 bp, Artificial
  probe
  misc_feature (1)..(25): SEQ ID NO: 3130; WAN024FAT; Start 400; Stop 424
tatgactttgtgaccagtaaagagg

SEQ ID NO: 347609 - DNA, 25 bp, Artificial
  probe
  misc_feature (1)..(25): SEQ ID NO: 3130; WAN024FAT; Start 440; Stop 464
taacaggcaaggttacggtctttat

SEQ ID NO: 347610 - DNA, 25 bp, Artificial
  probe
  misc_feature (1)..(25): SEQ ID NO: 3130; WAN024FAT; Start 439; Stop 463
ttaacaggcaaggttacggtcttta

SEQ ID NO: 347611 - DNA, 25 bp, Artificial
  probe
  misc_feature (1)..(25): SEQ ID NO: 3130; WAN024FAT; Start 405; Stop 429
ctttgtgaccagtaaagaggaactc

SEQ ID NO: 347612 - DNA, 25 bp, Artificial
  probe
  misc_feature (1)..(25): SEQ ID NO: 3130; WAN024FAT; Start 403; Stop 427
gactttgtgaccagtaaagaggaac

SEQ ID NO: 347613 - DNA, 25 bp, Artificial
  probe
  misc_feature (1)..(25): SEQ ID NO: 3130; WAN024FAT; Start 267; Stop 291
caatttgctggatcgtttcttggtt

SEQ ID NO: 347614 - DNA, 25 bp, Artificial
  probe
  misc_feature (1)..(25): SEQ ID NO: 3130; WAN024FAT; Start 441; Stop 465
aacaggcaaggttacggtctttatg

SEQ ID NO: 347615 - DNA, 25 bp, Artificial
  probe
  misc_feature (1)..(25): SEQ ID NO: 3130; WAN024FAT; Start 401; Stop 425
atgactttgtgaccagtaaagagga

SEQ ID NO: 347616 - DNA, 25 bp, Artificial
  probe
  misc_feature (1)..(25): SEQ ID NO: 3130; WAN024FAT; Start 404; Stop 428
actttgtgaccagtaaagaggaact

SEQ ID NO: 347617 - DNA, 25 bp, Artificial
  probe
  misc_feature (1)..(25): SEQ ID NO: 3130; WAN024FAT; Start 402; Stop 426
tgactttgtgaccagtaaagaggaa

SEQ ID NO: 347618 - DNA, 25 bp, Artificial
  probe
  misc_feature (1)..(25): SEQ ID NO: 3130; WAN024FAT; Start 233; Stop 257
taatcatgtccgtcaaggaacctga

SEQ ID NO: 347619 - DNA, 25 bp, Artificial
  probe
  misc_feature (1)..(25): SEQ ID NO: 3130; WAN024FAT; Start 232; Stop 256
gtaatcatgtccgtcaaggaacctg

SEQ ID NO: 347620 - DNA, 25 bp, Artificial
  probe
  misc_feature (1)..(25): SEQ ID NO: 3130; WAN024FAT; Start 231; Stop 255
agtaatcatgtccgtcaaggaacct

SEQ ID NO: 347621 - DNA, 25 bp, Artificial
  probe
  misc_feature (1)..(25): SEQ ID NO: 3130; WAN024FAT; Start 140; Stop 164
ccgaggaaaattcagaaggctatat

SEQ ID NO: 347622 - DNA, 25 bp, Artificial
  probe
  misc_feature (1)..(25): SEQ ID NO: 3130; WAN024FAT; Start 269; Stop 293
atttgctggatcgtttcttggttct

SEQ ID NO: 347623 - DNA, 25 bp, Artificial
  probe
  misc_feature (1)..(25): SEQ ID NO: 3130; WAN024FAT; Start 271; Stop 295
ttgctggatcgtttcttggttcttt

SEQ ID NO: 347624 - DNA, 25 bp, Artificial
  probe
  misc_feature (1)..(25): SEQ ID NO: 3130; WAN024FAT; Start 270; Stop 294
tttgctggatcgtttcttggttctt

SEQ ID NO: 347625 - DNA, 25 bp, Artificial
  probe
  misc_feature (1)..(25): SEQ ID NO: 3130; WAN024FAT; Start 249; Stop 273
ggaacctgattttaacagcaatttg

SEQ ID NO: 347626 - DNA, 25 bp, Artificial
  probe
  misc_feature (1)..(25): SEQ ID NO: 3130; WAN024FAT; Start 246; Stop 270
caaggaacctgattttaacagcaat

SEQ ID NO: 347627 - DNA, 25 bp, Artificial
  probe
  misc_feature (1)..(25): SEQ ID NO: 3130; WAN024FAT; Start 248; Stop 272
aggaacctgattttaacagcaattt

SEQ ID NO: 347628 - DNA, 25 bp, Artificial
  probe
  misc_feature (1)..(25): SEQ ID NO: 3130; WAN024FAT; Start 247; Stop 271
aaggaacctgattttaacagcaatt

SEQ ID NO: 347629 - DNA, 25 bp, Artificial
  probe
  misc_feature (1)..(25): SEQ ID NO: 3130; WAN024FAT; Start 245; Stop 269
tcaaggaacctgattttaacagcaa

SEQ ID NO: 347630 - DNA, 25 bp, Artificial
  probe
  misc_feature (1)..(25): SEQ ID NO: 3130; WAN024FAT; Start 407; Stop 431
ttgtgaccagtaaagaggaactcct

SEQ ID NO: 347631 - DNA, 25 bp, Artificial
  probe
  misc_feature (1)..(25): SEQ ID NO: 3131; WAN024DC4; Start 564; Stop 588
cctatatctctcgtgaagatgagtc

SEQ ID NO: 347632 - DNA, 25 bp, Artificial
  probe
  misc_feature (1)..(25): SEQ ID NO: 3131; WAN024DC4; Start 567; Stop 591
atatctctcgtgaagatgagtcaga

SEQ ID NO: 347633 - DNA, 25 bp, Artificial
  probe
  misc_feature (1)..(25): SEQ ID NO: 3131; WAN024DC4; Start 180; Stop 204
agaagatatttaccagcaactagca

SEQ ID NO: 347634 - DNA, 25 bp, Artificial
  probe
  misc_feature (1)..(25): SEQ ID NO: 3131; WAN024DC4; Start 181; Stop 205
gaagatatttaccagcaactagcag

SEQ ID NO: 347635 - DNA, 25 bp, Artificial
  probe
  misc_feature (1)..(25): SEQ ID NO: 3131; WAN024DC4; Start 566; Stop 590
tatatctctcgtgaagatgagtcag

SEQ ID NO: 347636 - DNA, 25 bp, Artificial
  probe
  misc_feature (1)..(25): SEQ ID NO: 3131; WAN024DC4; Start 565; Stop 589
ctatatctctcgtgaagatgagtca

SEQ ID NO: 347637 - DNA, 25 bp, Artificial
  probe
  misc_feature (1)..(25): SEQ ID NO: 3131; WAN024DC4; Start 220; Stop 244
cagtacatcattggacaggcagatt

SEQ ID NO: 347638 - DNA, 25 bp, Artificial
  probe
  misc_feature (1)..(25): SEQ ID NO: 3131; WAN024DC4; Start 572; Stop 596
tctcgtgaagatgagtcagaggtag

SEQ ID NO: 347639 - DNA, 25 bp, Artificial
  probe
  misc_feature (1)..(25): SEQ ID NO: 3131; WAN024DC4; Start 182; Stop 206
aagatatttaccagcaactagcagc

SEQ ID NO: 347640 - DNA, 25 bp, Artificial
  probe
  misc_feature (1)..(25): SEQ ID NO: 3131; WAN024DC4; Start 721; Stop 745
tgaaattggatacaagcaaggtcaa

SEQ ID NO: 347641 - DNA, 25 bp, Artificial
  probe
  misc_feature (1)..(25): SEQ ID NO: 3131; WAN024DC4; Start 720; Stop 744
ttgaaattggatacaagcaaggtca

SEQ ID NO: 347642 - DNA, 25 bp, Artificial
  probe
  misc_feature (1)..(25): SEQ ID NO: 3131; WAN024DC4; Start 179; Stop 203
tagaagatatttaccagcaactagc

SEQ ID NO: 347643 - DNA, 25 bp, Artificial
  probe
  misc_feature (1)..(25): SEQ ID NO: 3131; WAN024DC4; Start 176; Stop 200
ttgtagaagatatttaccagcaact

SEQ ID NO: 347644 - DNA, 25 bp, Artificial
  probe
  misc_feature (1)..(25): SEQ ID NO: 3131; WAN024DC4; Start 557; Stop 581
aatccaccctatatctctcgtgaag

SEQ ID NO: 347645 - DNA, 25 bp, Artificial
  probe
  misc_feature (1)..(25): SEQ ID NO: 3131; WAN024DC4; Start 556; Stop 580
caatccaccctatatctctcgtgaa

SEQ ID NO: 347646 - DNA, 25 bp, Artificial
  probe
  misc_feature (1)..(25): SEQ ID NO: 3131; WAN024DC4; Start 219; Stop 243
tcagtacatcattggacaggcagat

SEQ ID NO: 347647 - DNA, 25 bp, Artificial
  probe
  misc_feature (1)..(25): SEQ ID NO: 3131; WAN024DC4; Start 221; Stop 245
agtacatcattggacaggcagattt

SEQ ID NO: 347648 - DNA, 25 bp, Artificial
  probe
  misc_feature (1)..(25): SEQ ID NO: 3131; WAN024DC4; Start 573; Stop 597
ctcgtgaagatgagtcagaggtagg

SEQ ID NO: 347649 - DNA, 25 bp, Artificial
  probe
  misc_feature (1)..(25): SEQ ID NO: 3131; WAN024DC4; Start 177; Stop 201
tgtagaagatatttaccagcaacta

SEQ ID NO: 347650 - DNA, 25 bp, Artificial
  probe
  misc_feature (1)..(25): SEQ ID NO: 3131; WAN024DC4; Start 558; Stop 582
atccaccctatatctctcgtgaaga

SEQ ID NO: 347651 - DNA, 25 bp, Artificial
  probe
  misc_feature (1)..(25): SEQ ID NO: 3131; WAN024DC4; Start 568; Stop 592
tatctctcgtgaagatgagtcagag

SEQ ID NO: 347652 - DNA, 25 bp, Artificial
  probe
  misc_feature (1)..(25): SEQ ID NO: 3131; WAN024DC4; Start 175; Stop 199
tttgtagaagatatttaccagcaac

SEQ ID NO: 347653 - DNA, 25 bp, Artificial
  probe
  misc_feature (1)..(25): SEQ ID NO: 3131; WAN024DC4; Start 563; Stop 587
ccctatatctctcgtgaagatgagt

SEQ ID NO: 347654 - DNA, 25 bp, Artificial
  probe
  misc_feature (1)..(25): SEQ ID NO: 3131; WAN024DC4; Start 562; Stop 586
accctatatctctcgtgaagatgag

SEQ ID NO: 347655 - DNA, 25 bp, Artificial
  probe
  misc_feature (1)..(25): SEQ ID NO: 3131; WAN024DC4; Start 561; Stop 585
caccctatatctctcgtgaagatga

SEQ ID NO: 347656 - DNA, 25 bp, Artificial
  probe
  misc_feature (1)..(25): SEQ ID NO: 3131; WAN024DC4; Start 279; Stop 303
tttgattcctcgtccagaaacagag

SEQ ID NO: 347657 - DNA, 25 bp, Artificial
  probe
  misc_feature (1)..(25): SEQ ID NO: 3131; WAN024DC4; Start 256; Stop 280
catttaaaggtggatgaacgggttt

SEQ ID NO: 347658 - DNA, 25 bp, Artificial
  probe
  misc_feature (1)..(25): SEQ ID NO: 3131; WAN024DC4; Start 218; Stop 242
ctcagtacatcattggacaggcaga

SEQ ID NO: 347659 - DNA, 25 bp, Artificial
  probe
  misc_feature (1)..(25): SEQ ID NO: 3131; WAN024DC4; Start 81; Stop 105
cctctcttttgtctatcgtagtctg

SEQ ID NO: 347660 - DNA, 25 bp, Artificial
  probe
  misc_feature (1)..(25): SEQ ID NO: 3131; WAN024DC4; Start 82; Stop 106
ctctcttttgtctatcgtagtctga

SEQ ID NO: 347661 - DNA, 25 bp, Artificial
  probe
  misc_feature (1)..(25): SEQ ID NO: 3131; WAN024DC4; Start 178; Stop 202
gtagaagatatttaccagcaactag

SEQ ID NO: 347662 - DNA, 25 bp, Artificial
  probe
  misc_feature (1)..(25): SEQ ID NO: 3131; WAN024DC4; Start 83; Stop 107
tctcttttgtctatcgtagtctgaa

SEQ ID NO: 347663 - DNA, 25 bp, Artificial
  probe
  misc_feature (1)..(25): SEQ ID NO: 3131; WAN024DC4; Start 560; Stop 584
ccaccctatatctctcgtgaagatg

SEQ ID NO: 347664 - DNA, 25 bp, Artificial
  probe
  misc_feature (1)..(25): SEQ ID NO: 3132; WAN024A8V; Start 27; Stop 51
ctattgtatcaaaaccgaaaggagc

SEQ ID NO: 347665 - DNA, 25 bp, Artificial
  probe
  misc_feature (1)..(25): SEQ ID NO: 3132; WAN024A8V; Start 26; Stop 50
actattgtatcaaaaccgaaaggag

SEQ ID NO: 347666 - DNA, 25 bp, Artificial
  probe
  misc_feature (1)..(25): SEQ ID NO: 3132; WAN024A8V; Start 25; Stop 49
aactattgtatcaaaaccgaaagga

SEQ ID NO: 347667 - DNA, 25 bp, Artificial
  probe
  misc_feature (1)..(25): SEQ ID NO: 3132; WAN024A8V; Start 24; Stop 48
aaactattgtatcaaaaccgaaagg

SEQ ID NO: 347668 - DNA, 25 bp, Artificial
  probe
  misc_feature (1)..(25): SEQ ID NO: 3132; WAN024A8V; Start 28; Stop 52
tattgtatcaaaaccgaaaggagct

SEQ ID NO: 347669 - DNA, 25 bp, Artificial
  probe
  misc_feature (1)..(25): SEQ ID NO: 3132; WAN024A8V; Start 22; Stop 46
tgaaactattgtatcaaaaccgaaa

SEQ ID NO: 347670 - DNA, 25 bp, Artificial
  probe
  misc_feature (1)..(25): SEQ ID NO: 3132; WAN024A8V; Start 29; Stop 53
attgtatcaaaaccgaaaggagctt

SEQ ID NO: 347671 - DNA, 25 bp, Artificial
  probe
  misc_feature (1)..(25): SEQ ID NO: 3132; WAN024A8V; Start 23; Stop 47
gaaactattgtatcaaaaccgaaag

SEQ ID NO: 347672 - DNA, 25 bp, Artificial
  probe
  misc_feature (1)..(25): SEQ ID NO: 3132; WAN024A8V; Start 31; Stop 55
tgtatcaaaaccgaaaggagctttt

SEQ ID NO: 347673 - DNA, 25 bp, Artificial
  probe
  misc_feature (1)..(25): SEQ ID NO: 3132; WAN024A8V; Start 30; Stop 54
ttgtatcaaaaccgaaaggagcttt

SEQ ID NO: 347674 - DNA, 25 bp, Artificial
  probe
  misc_feature (1)..(25): SEQ ID NO: 3132; WAN024A8V; Start 4; Stop 28
aaagctcctctcaaattttgaaact

SEQ ID NO: 347675 - DNA, 25 bp, Artificial
  probe
  misc_feature (1)..(25): SEQ ID NO: 3132; WAN024A8V; Start 5; Stop 29
aagctcctctcaaattttgaaacta

SEQ ID NO: 347676 - DNA, 25 bp, Artificial
  probe
  misc_feature (1)..(25): SEQ ID NO: 3132; WAN024A8V; Start 21; Stop 45
ttgaaactattgtatcaaaaccgaa

SEQ ID NO: 347677 - DNA, 25 bp, Artificial
  probe
  misc_feature (1)..(25): SEQ ID NO: 3132; WAN024A8V; Start 6; Stop 30
agctcctctcaaattttgaaactat

SEQ ID NO: 347678 - DNA, 25 bp, Artificial
  probe
  misc_feature (1)..(25): SEQ ID NO: 3132; WAN024A8V; Start 3; Stop 27
taaagctcctctcaaattttgaaac

SEQ ID NO: 347679 - DNA, 25 bp, Artificial
  probe
  misc_feature (1)..(25): SEQ ID NO: 3132; WAN024A8V; Start 7; Stop 31
gctcctctcaaattttgaaactatt

SEQ ID NO: 347680 - DNA, 25 bp, Artificial
  probe
  misc_feature (1)..(25): SEQ ID NO: 3132; WAN024A8V; Start 2; Stop 26
ttaaagctcctctcaaattttgaaa

SEQ ID NO: 347681 - DNA, 25 bp, Artificial
  probe
  misc_feature (1)..(25): SEQ ID NO: 3132; WAN024A8V; Start 1; Stop 25
attaaagctcctctcaaattttgaa

SEQ ID NO: 347682 - DNA, 25 bp, Artificial
  probe
  misc_feature (1)..(25): SEQ ID NO: 3132; WAN024A8V; Start 9; Stop 33
tcctctcaaattttgaaactattgt

SEQ ID NO: 347683 - DNA, 25 bp, Artificial
  probe
  misc_feature (1)..(25): SEQ ID NO: 3132; WAN024A8V; Start 8; Stop 32
ctcctctcaaattttgaaactattg

SEQ ID NO: 347684 - DNA, 25 bp, Artificial
  probe
  misc_feature (1)..(25): SEQ ID NO: 3132; WAN024A8V; Start 10; Stop 34
cctctcaaattttgaaactattgta

SEQ ID NO: 347685 - DNA, 25 bp, Artificial
  probe
  misc_feature (1)..(25): SEQ ID NO: 3132; WAN024A8V; Start 20; Stop 44
tttgaaactattgtatcaaaaccga

SEQ ID NO: 347686 - DNA, 25 bp, Artificial
  probe
  misc_feature (1)..(25): SEQ ID NO: 3133; WAN024FRD; Start 396; Stop 420
caagttcaatgataatgatgcctgt

SEQ ID NO: 347687 - DNA, 25 bp, Artificial
  probe
  misc_feature (1)..(25): SEQ ID NO: 3133; WAN024FRD; Start 395; Stop 419
tcaagttcaatgataatgatgcctg

SEQ ID NO: 347688 - DNA, 25 bp, Artificial
  probe
  misc_feature (1)..(25): SEQ ID NO: 3133; WAN024FRD; Start 411; Stop 435
tgatgcctgtacttatgaattgatg

SEQ ID NO: 347689 - DNA, 25 bp, Artificial
  probe
  misc_feature (1)..(25): SEQ ID NO: 3133; WAN024FRD; Start 394; Stop 418
ttcaagttcaatgataatgatgcct

SEQ ID NO: 347690 - DNA, 25 bp, Artificial
  probe
  misc_feature (1)..(25): SEQ ID NO: 3133; WAN024FRD; Start 412; Stop 436
gatgcctgtacttatgaattgatga

SEQ ID NO: 347691 - DNA, 25 bp, Artificial
  probe
  misc_feature (1)..(25): SEQ ID NO: 3133; WAN024FRD; Start 451; Stop 475
cttccgtacaagagtaaggttatct

SEQ ID NO: 347692 - DNA, 25 bp, Artificial
  probe
  misc_feature (1)..(25): SEQ ID NO: 3133; WAN024FRD; Start 448; Stop 472
gaacttccgtacaagagtaaggtta

SEQ ID NO: 347693 - DNA, 25 bp, Artificial
  probe
  misc_feature (1)..(25): SEQ ID NO: 3133; WAN024FRD; Start 450; Stop 474
acttccgtacaagagtaaggttatc

SEQ ID NO: 347694 - DNA, 25 bp, Artificial
  probe
  misc_feature (1)..(25): SEQ ID NO: 3133; WAN024FRD; Start 397; Stop 421
aagttcaatgataatgatgcctgta

SEQ ID NO: 347695 - DNA, 25 bp, Artificial
  probe
  misc_feature (1)..(25): SEQ ID NO: 3133; WAN024FRD; Start 443; Stop 467
ttgaagaacttccgtacaagagtaa

SEQ ID NO: 347696 - DNA, 25 bp, Artificial
  probe
  misc_feature (1)..(25): SEQ ID NO: 3133; WAN024FRD; Start 449; Stop 473
aacttccgtacaagagtaaggttat

SEQ ID NO: 347697 - DNA, 25 bp, Artificial
  probe
  misc_feature (1)..(25): SEQ ID NO: 3133; WAN024FRD; Start 444; Stop 468
tgaagaacttccgtacaagagtaag

SEQ ID NO: 347698 - DNA, 25 bp, Artificial
  probe
  misc_feature (1)..(25): SEQ ID NO: 3133; WAN024FRD; Start 413; Stop 437
atgcctgtacttatgaattgatgaa

SEQ ID NO: 347699 - DNA, 25 bp, Artificial
  probe
  misc_feature (1)..(25): SEQ ID NO: 3133; WAN024FRD; Start 409; Stop 433
aatgatgcctgtacttatgaattga

SEQ ID NO: 347700 - DNA, 25 bp, Artificial
  probe
  misc_feature (1)..(25): SEQ ID NO: 3133; WAN024FRD; Start 399; Stop 423
gttcaatgataatgatgcctgtact

SEQ ID NO: 347701 - DNA, 25 bp, Artificial
  probe
  misc_feature (1)..(25): SEQ ID NO: 3133; WAN024FRD; Start 398; Stop 422
agttcaatgataatgatgcctgtac

SEQ ID NO: 347702 - DNA, 25 bp, Artificial
  probe
  misc_feature (1)..(25): SEQ ID NO: 3133; WAN024FRD; Start 445; Stop 469
gaagaacttccgtacaagagtaagg

SEQ ID NO: 347703 - DNA, 25 bp, Artificial
  probe
  misc_feature (1)..(25): SEQ ID NO: 3133; WAN024FRD; Start 580; Stop 604
aattgtgttacttggttgaataagg

SEQ ID NO: 347704 - DNA, 25 bp, Artificial
  probe
  misc_feature (1)..(25): SEQ ID NO: 3133; WAN024FRD; Start 410; Stop 434
atgatgcctgtacttatgaattgat

SEQ ID NO: 347705 - DNA, 25 bp, Artificial
  probe
  misc_feature (1)..(25): SEQ ID NO: 3133; WAN024FRD; Start 447; Stop 471
agaacttccgtacaagagtaaggtt

SEQ ID NO: 347706 - DNA, 25 bp, Artificial
  probe
  misc_feature (1)..(25): SEQ ID NO: 3133; WAN024FRD; Start 446; Stop 470
aagaacttccgtacaagagtaaggt

SEQ ID NO: 347707 - DNA, 25 bp, Artificial
  probe
  misc_feature (1)..(25): SEQ ID NO: 3133; WAN024FRD; Start 400; Stop 424
ttcaatgataatgatgcctgtactt

SEQ ID NO: 347708 - DNA, 25 bp, Artificial
  probe
  misc_feature (1)..(25): SEQ ID NO: 3133; WAN024FRD; Start 405; Stop 429
tgataatgatgcctgtacttatgaa

SEQ ID NO: 347709 - DNA, 25 bp, Artificial
  probe
  misc_feature (1)..(25): SEQ ID NO: 3133; WAN024FRD; Start 142; Stop 166
actccatttgtaggtatgtttgtct

SEQ ID NO: 347710 - DNA, 25 bp, Artificial
  probe
  misc_feature (1)..(25): SEQ ID NO: 3133; WAN024FRD; Start 317; Stop 341
tacattatgcagatgaggaagaagc

SEQ ID NO: 347711 - DNA, 25 bp, Artificial
  probe
  misc_feature (1)..(25): SEQ ID NO: 3133; WAN024FRD; Start 582; Stop 606
ttgtgttacttggttgaataagggt

SEQ ID NO: 347712 - DNA, 25 bp, Artificial
  probe
  misc_feature (1)..(25): SEQ ID NO: 3133; WAN024FRD; Start 581; Stop 605
attgtgttacttggttgaataaggg

SEQ ID NO: 347713 - DNA, 25 bp, Artificial
  probe
  misc_feature (1)..(25): SEQ ID NO: 3133; WAN024FRD; Start 490; Stop 514
tacagtggtttaccttccttagttc

SEQ ID NO: 347714 - DNA, 25 bp, Artificial
  probe
  misc_feature (1)..(25): SEQ ID NO: 3133; WAN024FRD; Start 401; Stop 425
tcaatgataatgatgcctgtactta

SEQ ID NO: 347715 - DNA, 25 bp, Artificial
  probe
  misc_feature (1)..(25): SEQ ID NO: 3133; WAN024FRD; Start 493; Stop 517
agtggtttaccttccttagttcatt

SEQ ID NO: 347716 - DNA, 25 bp, Artificial
  probe
  misc_feature (1)..(25): SEQ ID NO: 3133; WAN024FRD; Start 492; Stop 516
cagtggtttaccttccttagttcat

SEQ ID NO: 347717 - DNA, 25 bp, Artificial
  probe
  misc_feature (1)..(25): SEQ ID NO: 3133; WAN024FRD; Start 404; Stop 428
atgataatgatgcctgtacttatga

SEQ ID NO: 347718 - DNA, 25 bp, Artificial
  probe
  misc_feature (1)..(25): SEQ ID NO: 3133; WAN024FRD; Start 48; Stop 72
ccctagacgaagactcaagaataaa

SEQ ID NO: 347719 - DNA, 25 bp, Artificial
  probe
  misc_feature (1)..(25): SEQ ID NO: 3134; WAN024AOG; Start 27; Stop 51
agtcatctgttacattcataagaca

SEQ ID NO: 347720 - DNA, 25 bp, Artificial
  probe
  misc_feature (1)..(25): SEQ ID NO: 3134; WAN024AOG; Start 26; Stop 50
cagtcatctgttacattcataagac

SEQ ID NO: 347721 - DNA, 25 bp, Artificial
  probe
  misc_feature (1)..(25): SEQ ID NO: 3134; WAN024AOG; Start 30; Stop 54
catctgttacattcataagacaagt

SEQ ID NO: 347722 - DNA, 25 bp, Artificial
  probe
  misc_feature (1)..(25): SEQ ID NO: 3134; WAN024AOG; Start 28; Stop 52
gtcatctgttacattcataagacaa

SEQ ID NO: 347723 - DNA, 25 bp, Artificial
  probe
  misc_feature (1)..(25): SEQ ID NO: 3134; WAN024AOG; Start 29; Stop 53
tcatctgttacattcataagacaag

SEQ ID NO: 347724 - DNA, 25 bp, Artificial
  probe
  misc_feature (1)..(25): SEQ ID NO: 3134; WAN024AOG; Start 32; Stop 56
tctgttacattcataagacaagtat

SEQ ID NO: 347725 - DNA, 25 bp, Artificial
  probe
  misc_feature (1)..(25): SEQ ID NO: 3134; WAN024AOG; Start 31; Stop 55
atctgttacattcataagacaagta

SEQ ID NO: 347726 - DNA, 25 bp, Artificial
  probe
  misc_feature (1)..(25): SEQ ID NO: 3134; WAN024AOG; Start 25; Stop 49
acagtcatctgttacattcataaga

SEQ ID NO: 347727 - DNA, 25 bp, Artificial
  probe
  misc_feature (1)..(25): SEQ ID NO: 3134; WAN024AOG; Start 36; Stop 60
ttacattcataagacaagtatacca

SEQ ID NO: 347728 - DNA, 25 bp, Artificial
  probe
  misc_feature (1)..(25): SEQ ID NO: 3134; WAN024AOG; Start 35; Stop 59
gttacattcataagacaagtatacc

SEQ ID NO: 347729 - DNA, 25 bp, Artificial
  probe
  misc_feature (1)..(25): SEQ ID NO: 3134; WAN024AOG; Start 38; Stop 62
acattcataagacaagtataccata

SEQ ID NO: 347730 - DNA, 25 bp, Artificial
  probe
  misc_feature (1)..(25): SEQ ID NO: 3134; WAN024AOG; Start 37; Stop 61
tacattcataagacaagtataccat

SEQ ID NO: 347731 - DNA, 25 bp, Artificial
  probe
  misc_feature (1)..(25): SEQ ID NO: 3135; WAN0249E5; Start 52; Stop 76
gcctaataaatattacgcctttgtt

SEQ ID NO: 347732 - DNA, 25 bp, Artificial
  probe
  misc_feature (1)..(25): SEQ ID NO: 3135; WAN0249E5; Start 67; Stop 91
cgcctttgttacatttatatgtcgt

SEQ ID NO: 347733 - DNA, 25 bp, Artificial
  probe
  misc_feature (1)..(25): SEQ ID NO: 3135; WAN0249E5; Start 66; Stop 90
acgcctttgttacatttatatgtcg

SEQ ID NO: 347734 - DNA, 25 bp, Artificial
  probe
  misc_feature (1)..(25): SEQ ID NO: 3135; WAN0249E5; Start 68; Stop 92
gcctttgttacatttatatgtcgtt

SEQ ID NO: 347735 - DNA, 25 bp, Artificial
  probe
  misc_feature (1)..(25): SEQ ID NO: 3135; WAN0249E5; Start 63; Stop 87
attacgcctttgttacatttatatg

SEQ ID NO: 347736 - DNA, 25 bp, Artificial
  probe
  misc_feature (1)..(25): SEQ ID NO: 3135; WAN0249E5; Start 65; Stop 89
tacgcctttgttacatttatatgtc

SEQ ID NO: 347737 - DNA, 25 bp, Artificial
  probe
  misc_feature (1)..(25): SEQ ID NO: 3135; WAN0249E5; Start 64; Stop 88
ttacgcctttgttacatttatatgt

SEQ ID NO: 347738 - DNA, 25 bp, Artificial
  probe
  misc_feature (1)..(25): SEQ ID NO: 3135; WAN0249E5; Start 69; Stop 93
cctttgttacatttatatgtcgttc

SEQ ID NO: 347739 - DNA, 25 bp, Artificial
  probe
  misc_feature (1)..(25): SEQ ID NO: 3135; WAN0249E5; Start 60; Stop 84
aatattacgcctttgttacatttat

SEQ ID NO: 347740 - DNA, 25 bp, Artificial
  probe
  misc_feature (1)..(25): SEQ ID NO: 3135; WAN0249E5; Start 57; Stop 81
ataaatattacgcctttgttacatt

SEQ ID NO: 347741 - DNA, 25 bp, Artificial
  probe
  misc_feature (1)..(25): SEQ ID NO: 3135; WAN0249E5; Start 56; Stop 80
aataaatattacgcctttgttacat

SEQ ID NO: 347742 - DNA, 25 bp, Artificial
  probe
  misc_feature (1)..(25): SEQ ID NO: 3135; WAN0249E5; Start 59; Stop 83
aaatattacgcctttgttacattta

SEQ ID NO: 347743 - DNA, 25 bp, Artificial
  probe
  misc_feature (1)..(25): SEQ ID NO: 3135; WAN0249E5; Start 58; Stop 82
taaatattacgcctttgttacattt

SEQ ID NO: 347744 - DNA, 25 bp, Artificial
  probe
  misc_feature (1)..(25): SEQ ID NO: 3135; WAN0249E5; Start 53; Stop 77
cctaataaatattacgcctttgtta

SEQ ID NO: 347745 - DNA, 25 bp, Artificial
  probe
  misc_feature (1)..(25): SEQ ID NO: 3135; WAN0249E5; Start 51; Stop 75
ggcctaataaatattacgcctttgt

SEQ ID NO: 347746 - DNA, 25 bp, Artificial
  probe
  misc_feature (1)..(25): SEQ ID NO: 3135; WAN0249E5; Start 5; Stop 29
cgtagatactccttcttttaaagac

SEQ ID NO: 347747 - DNA, 25 bp, Artificial
  probe
  misc_feature (1)..(25): SEQ ID NO: 3135; WAN0249E5; Start 4; Stop 28
acgtagatactccttcttttaaaga

SEQ ID NO: 347748 - DNA, 25 bp, Artificial
  probe
  misc_feature (1)..(25): SEQ ID NO: 3135; WAN0249E5; Start 6; Stop 30
gtagatactccttcttttaaagaca

SEQ ID NO: 347749 - DNA, 25 bp, Artificial
  probe
  misc_feature (1)..(25): SEQ ID NO: 3135; WAN0249E5; Start 8; Stop 32
agatactccttcttttaaagacaat

SEQ ID NO: 347750 - DNA, 25 bp, Artificial
  probe
  misc_feature (1)..(25): SEQ ID NO: 3135; WAN0249E5; Start 3; Stop 27
tacgtagatactccttcttttaaag

SEQ ID NO: 347751 - DNA, 25 bp, Artificial
  probe
  misc_feature (1)..(25): SEQ ID NO: 3135; WAN0249E5; Start 12; Stop 36
actccttcttttaaagacaatacta

SEQ ID NO: 347752 - DNA, 25 bp, Artificial
  probe
  misc_feature (1)..(25): SEQ ID NO: 3135; WAN0249E5; Start 11; Stop 35
tactccttcttttaaagacaatact

SEQ ID NO: 347753 - DNA, 25 bp, Artificial
  probe
  misc_feature (1)..(25): SEQ ID NO: 3135; WAN0249E5; Start 7; Stop 31
tagatactccttcttttaaagacaa

SEQ ID NO: 347754 - DNA, 25 bp, Artificial
  probe
  misc_feature (1)..(25): SEQ ID NO: 3135; WAN0249E5; Start 2; Stop 26
ttacgtagatactccttcttttaaa

SEQ ID NO: 347755 - DNA, 25 bp, Artificial
  probe
  misc_feature (1)..(25): SEQ ID NO: 3135; WAN0249E5; Start 13; Stop 37
ctccttcttttaaagacaatactag

SEQ ID NO: 347756 - DNA, 25 bp, Artificial
  probe
  misc_feature (1)..(25): SEQ ID NO: 3135; WAN0249E5; Start 1; Stop 25
attacgtagatactccttcttttaa

SEQ ID NO: 347757 - DNA, 25 bp, Artificial
  probe
  misc_feature (1)..(25): SEQ ID NO: 3135; WAN0249E5; Start 14; Stop 38
tccttcttttaaagacaatactagt

SEQ ID NO: 347758 - DNA, 25 bp, Artificial
  probe
  misc_feature (1)..(25): SEQ ID NO: 3136; WAN0249TO; Start 162; Stop 186
tagtttgctagtgtgctctttgatt

SEQ ID NO: 347759 - DNA, 25 bp, Artificial
  probe
  misc_feature (1)..(25): SEQ ID NO: 3136; WAN0249TO; Start 163; Stop 187
agtttgctagtgtgctctttgattt

SEQ ID NO: 347760 - DNA, 25 bp, Artificial
  probe
  misc_feature (1)..(25): SEQ ID NO: 3136; WAN0249TO; Start 161; Stop 185
ctagtttgctagtgtgctctttgat

SEQ ID NO: 347761 - DNA, 25 bp, Artificial
  probe
  misc_feature (1)..(25): SEQ ID NO: 3136; WAN0249TO; Start 196; Stop 220
tataacacaaaaggtagcccatcag

SEQ ID NO: 347762 - DNA, 25 bp, Artificial
  probe
  misc_feature (1)..(25): SEQ ID NO: 3136; WAN0249TO; Start 194; Stop 218
agtataacacaaaaggtagcccatc

SEQ ID NO: 347763 - DNA, 25 bp, Artificial
  probe
  misc_feature (1)..(25): SEQ ID NO: 3136; WAN0249TO; Start 193; Stop 217
gagtataacacaaaaggtagcccat

SEQ ID NO: 347764 - DNA, 25 bp, Artificial
  probe
  misc_feature (1)..(25): SEQ ID NO: 3136; WAN0249TO; Start 195; Stop 219
gtataacacaaaaggtagcccatca

SEQ ID NO: 347765 - DNA, 25 bp, Artificial
  probe
  misc_feature (1)..(25): SEQ ID NO: 3136; WAN0249TO; Start 165; Stop 189
tttgctagtgtgctctttgattttc

SEQ ID NO: 347766 - DNA, 25 bp, Artificial
  probe
  misc_feature (1)..(25): SEQ ID NO: 3136; WAN0249TO; Start 191; Stop 215
ttgagtataacacaaaaggtagccc

SEQ ID NO: 347767 - DNA, 25 bp, Artificial
  probe
  misc_feature (1)..(25): SEQ ID NO: 3136; WAN0249TO; Start 164; Stop 188
gtttgctagtgtgctctttgatttt

SEQ ID NO: 347768 - DNA, 25 bp, Artificial
  probe
  misc_feature (1)..(25): SEQ ID NO: 3136; WAN0249TO; Start 190; Stop 214
attgagtataacacaaaaggtagcc

SEQ ID NO: 347769 - DNA, 25 bp, Artificial
  probe
  misc_feature (1)..(25): SEQ ID NO: 3136; WAN0249TO; Start 192; Stop 216
tgagtataacacaaaaggtagccca

SEQ ID NO: 347770 - DNA, 25 bp, Artificial
  probe
  misc_feature (1)..(25): SEQ ID NO: 3136; WAN0249TO; Start 170; Stop 194
tagtgtgctctttgattttcattga

SEQ ID NO: 347771 - DNA, 25 bp, Artificial
  probe
  misc_feature (1)..(25): SEQ ID NO: 3136; WAN0249TO; Start 171; Stop 195
agtgtgctctttgattttcattgag

SEQ ID NO: 347772 - DNA, 25 bp, Artificial
  probe
  misc_feature (1)..(25): SEQ ID NO: 3136; WAN0249TO; Start 172; Stop 196
gtgtgctctttgattttcattgagt

SEQ ID NO: 347773 - DNA, 25 bp, Artificial
  probe
  misc_feature (1)..(25): SEQ ID NO: 3136; WAN0249TO; Start 173; Stop 197
tgtgctctttgattttcattgagta

SEQ ID NO: 347774 - DNA, 25 bp, Artificial
  probe
  misc_feature (1)..(25): SEQ ID NO: 3136; WAN0249TO; Start 168; Stop 192
gctagtgtgctctttgattttcatt

SEQ ID NO: 347775 - DNA, 25 bp, Artificial
  probe
  misc_feature (1)..(25): SEQ ID NO: 3136; WAN0249TO; Start 169; Stop 193
ctagtgtgctctttgattttcattg

SEQ ID NO: 347776 - DNA, 25 bp, Artificial
  probe
  misc_feature (1)..(25): SEQ ID NO: 3136; WAN0249TO; Start 189; Stop 213
cattgagtataacacaaaaggtagc

SEQ ID NO: 347777 - DNA, 25 bp, Artificial
  probe
  misc_feature (1)..(25): SEQ ID NO: 3136; WAN0249TO; Start 167; Stop 191
tgctagtgtgctctttgattttcat

SEQ ID NO: 347778 - DNA, 25 bp, Artificial
  probe
  misc_feature (1)..(25): SEQ ID NO: 3136; WAN0249TO; Start 166; Stop 190
ttgctagtgtgctctttgattttca

SEQ ID NO: 347779 - DNA, 25 bp, Artificial
  probe
  misc_feature (1)..(25): SEQ ID NO: 3136; WAN0249TO; Start 174; Stop 198
gtgctctttgattttcattgagtat

SEQ ID NO: 347780 - DNA, 25 bp, Artificial
  probe
  misc_feature (1)..(25): SEQ ID NO: 3136; WAN0249TO; Start 186; Stop 210
tttcattgagtataacacaaaaggt

SEQ ID NO: 347781 - DNA, 25 bp, Artificial
  probe
  misc_feature (1)..(25): SEQ ID NO: 3136; WAN0249TO; Start 197; Stop 221
ataacacaaaaggtagcccatcagc

SEQ ID NO: 347782 - DNA, 25 bp, Artificial
  probe
  misc_feature (1)..(25): SEQ ID NO: 3136; WAN0249TO; Start 188; Stop 212
tcattgagtataacacaaaaggtag

SEQ ID NO: 347783 - DNA, 25 bp, Artificial
  probe
  misc_feature (1)..(25): SEQ ID NO: 3136; WAN0249TO; Start 187; Stop 211
ttcattgagtataacacaaaaggta

SEQ ID NO: 347784 - DNA, 25 bp, Artificial
  probe
  misc_feature (1)..(25): SEQ ID NO: 3136; WAN0249TO; Start 185; Stop 209
ttttcattgagtataacacaaaagg

SEQ ID NO: 347785 - DNA, 25 bp, Artificial
  probe
  misc_feature (1)..(25): SEQ ID NO: 3136; WAN0249TO; Start 182; Stop 206
tgattttcattgagtataacacaaa

SEQ ID NO: 347786 - DNA, 25 bp, Artificial
  probe
  misc_feature (1)..(25): SEQ ID NO: 3136; WAN0249TO; Start 181; Stop 205
ttgattttcattgagtataacacaa

SEQ ID NO: 347787 - DNA, 25 bp, Artificial
  probe
  misc_feature (1)..(25): SEQ ID NO: 3136; WAN0249TO; Start 180; Stop 204
tttgattttcattgagtataacaca

SEQ ID NO: 347788 - DNA, 25 bp, Artificial
  probe
  misc_feature (1)..(25): SEQ ID NO: 3136; WAN0249TO; Start 179; Stop 203
ctttgattttcattgagtataacac

SEQ ID NO: 347789 - DNA, 25 bp, Artificial
  probe
  misc_feature (1)..(25): SEQ ID NO: 3136; WAN0249TO; Start 178; Stop 202
tctttgattttcattgagtataaca

SEQ ID NO: 347790 - DNA, 25 bp, Artificial
  probe
  misc_feature (1)..(25): SEQ ID NO: 3136; WAN0249TO; Start 198; Stop 222
taacacaaaaggtagcccatcagct

SEQ ID NO: 347791 - DNA, 25 bp, Artificial
  probe
  misc_feature (1)..(25): SEQ ID NO: 3136; WAN0249TO; Start 199; Stop 223
aacacaaaaggtagcccatcagcta

SEQ ID NO: 347792 - DNA, 25 bp, Artificial
  probe
  misc_feature (1)..(25): SEQ ID NO: 3137; WAN024ALA; Start 12; Stop 36
tagcactattcttcatcacttaacc

SEQ ID NO: 347793 - DNA, 25 bp, Artificial
  probe
  misc_feature (1)..(25): SEQ ID NO: 3137; WAN024ALA; Start 8; Stop 32
ccaatagcactattcttcatcactt

SEQ ID NO: 347794 - DNA, 25 bp, Artificial
  probe
  misc_feature (1)..(25): SEQ ID NO: 3137; WAN024ALA; Start 14; Stop 38
gcactattcttcatcacttaaccct

SEQ ID NO: 347795 - DNA, 25 bp, Artificial
  probe
  misc_feature (1)..(25): SEQ ID NO: 3137; WAN024ALA; Start 13; Stop 37
agcactattcttcatcacttaaccc

SEQ ID NO: 347796 - DNA, 25 bp, Artificial
  probe
  misc_feature (1)..(25): SEQ ID NO: 3137; WAN024ALA; Start 16; Stop 40
actattcttcatcacttaaccctct

SEQ ID NO: 347797 - DNA, 25 bp, Artificial
  probe
  misc_feature (1)..(25): SEQ ID NO: 3137; WAN024ALA; Start 15; Stop 39
cactattcttcatcacttaaccctc

SEQ ID NO: 347798 - DNA, 25 bp, Artificial
  probe
  misc_feature (1)..(25): SEQ ID NO: 3137; WAN024ALA; Start 11; Stop 35
atagcactattcttcatcacttaac

SEQ ID NO: 347799 - DNA, 25 bp, Artificial
  probe
  misc_feature (1)..(25): SEQ ID NO: 3137; WAN024ALA; Start 5; Stop 29
ctcccaatagcactattcttcatca

SEQ ID NO: 347800 - DNA, 25 bp, Artificial
  probe
  misc_feature (1)..(25): SEQ ID NO: 3137; WAN024ALA; Start 4; Stop 28
actcccaatagcactattcttcatc

SEQ ID NO: 347801 - DNA, 25 bp, Artificial
  probe
  misc_feature (1)..(25): SEQ ID NO: 3137; WAN024ALA; Start 7; Stop 31
cccaatagcactattcttcatcact

SEQ ID NO: 347802 - DNA, 25 bp, Artificial
  probe
  misc_feature (1)..(25): SEQ ID NO: 3137; WAN024ALA; Start 6; Stop 30
tcccaatagcactattcttcatcac

SEQ ID NO: 347803 - DNA, 25 bp, Artificial
  probe
  misc_feature (1)..(25): SEQ ID NO: 3137; WAN024ALA; Start 17; Stop 41
ctattcttcatcacttaaccctctt

SEQ ID NO: 347804 - DNA, 25 bp, Artificial
  probe
  misc_feature (1)..(25): SEQ ID NO: 3137; WAN024ALA; Start 2; Stop 26
ttactcccaatagcactattcttca

SEQ ID NO: 347805 - DNA, 25 bp, Artificial
  probe
  misc_feature (1)..(25): SEQ ID NO: 3137; WAN024ALA; Start 3; Stop 27
tactcccaatagcactattcttcat

SEQ ID NO: 347806 - DNA, 25 bp, Artificial
  probe
  misc_feature (1)..(25): SEQ ID NO: 3137; WAN024ALA; Start 18; Stop 42
tattcttcatcacttaaccctcttt

SEQ ID NO: 347807 - DNA, 25 bp, Artificial
  probe
  misc_feature (1)..(25): SEQ ID NO: 3137; WAN024ALA; Start 9; Stop 33
caatagcactattcttcatcactta

SEQ ID NO: 347808 - DNA, 25 bp, Artificial
  probe
  misc_feature (1)..(25): SEQ ID NO: 3137; WAN024ALA; Start 1; Stop 25
attactcccaatagcactattcttc

SEQ ID NO: 347809 - DNA, 25 bp, Artificial
  probe
  misc_feature (1)..(25): SEQ ID NO: 3137; WAN024ALA; Start 10; Stop 34
aatagcactattcttcatcacttaa

SEQ ID NO: 347810 - DNA, 25 bp, Artificial
  probe
  misc_feature (1)..(25): SEQ ID NO: 3138; WAN024A6S; Start 44; Stop 68
aatagggcttacaatataagagagg

SEQ ID NO: 347811 - DNA, 25 bp, Artificial
  probe
  misc_feature (1)..(25): SEQ ID NO: 3138; WAN024A6S; Start 43; Stop 67
taatagggcttacaatataagagag

SEQ ID NO: 347812 - DNA, 25 bp, Artificial
  probe
  misc_feature (1)..(25): SEQ ID NO: 3139; WAN0249ET; Start 22; Stop 46
tacacaaagaataacacacttatgt

SEQ ID NO: 347813 - DNA, 25 bp, Artificial
  probe
  misc_feature (1)..(25): SEQ ID NO: 3139; WAN0249ET; Start 21; Stop 45
ctacacaaagaataacacacttatg

SEQ ID NO: 347814 - DNA, 25 bp, Artificial
  probe
  misc_feature (1)..(25): SEQ ID NO: 3139; WAN0249ET; Start 20; Stop 44
tctacacaaagaataacacacttat

SEQ ID NO: 347815 - DNA, 25 bp, Artificial
  probe
  misc_feature (1)..(25): SEQ ID NO: 3139; WAN0249ET; Start 19; Stop 43
atctacacaaagaataacacactta

SEQ ID NO: 347816 - DNA, 25 bp, Artificial
  probe
  misc_feature (1)..(25): SEQ ID NO: 3139; WAN0249ET; Start 18; Stop 42
tatctacacaaagaataacacactt

SEQ ID NO: 347817 - DNA, 25 bp, Artificial
  probe
  misc_feature (1)..(25): SEQ ID NO: 3139; WAN0249ET; Start 17; Stop 41
ttatctacacaaagaataacacact

SEQ ID NO: 347818 - DNA, 25 bp, Artificial
  probe
  misc_feature (1)..(25): SEQ ID NO: 3139; WAN0249ET; Start 16; Stop 40
tttatctacacaaagaataacacac

SEQ ID NO: 347819 - DNA, 25 bp, Artificial
  probe
  misc_feature (1)..(25): SEQ ID NO: 3139; WAN0249ET; Start 23; Stop 47
acacaaagaataacacacttatgtt

SEQ ID NO: 347820 - DNA, 25 bp, Artificial
  probe
  misc_feature (1)..(25): SEQ ID NO: 3139; WAN0249ET; Start 35; Stop 59
acacacttatgttaaccctatatga

SEQ ID NO: 347821 - DNA, 25 bp, Artificial
  probe
  misc_feature (1)..(25): SEQ ID NO: 3139; WAN0249ET; Start 37; Stop 61
acacttatgttaaccctatatgaac

SEQ ID NO: 347822 - DNA, 25 bp, Artificial
  probe
  misc_feature (1)..(25): SEQ ID NO: 3139; WAN0249ET; Start 36; Stop 60
cacacttatgttaaccctatatgaa

SEQ ID NO: 347823 - DNA, 25 bp, Artificial
  probe
  misc_feature (1)..(25): SEQ ID NO: 3139; WAN0249ET; Start 38; Stop 62
cacttatgttaaccctatatgaact

SEQ ID NO: 347824 - DNA, 25 bp, Artificial
  probe
  misc_feature (1)..(25): SEQ ID NO: 3139; WAN0249ET; Start 4; Stop 28
agtatcctttcttttatctacacaa

SEQ ID NO: 347825 - DNA, 25 bp, Artificial
  probe
  misc_feature (1)..(25): SEQ ID NO: 3139; WAN0249ET; Start 39; Stop 63
acttatgttaaccctatatgaactt

SEQ ID NO: 347826 - DNA, 25 bp, Artificial
  probe
  misc_feature (1)..(25): SEQ ID NO: 3139; WAN0249ET; Start 5; Stop 29
gtatcctttcttttatctacacaaa

SEQ ID NO: 347827 - DNA, 25 bp, Artificial
  probe
  misc_feature (1)..(25): SEQ ID NO: 3139; WAN0249ET; Start 34; Stop 58
aacacacttatgttaaccctatatg

SEQ ID NO: 347828 - DNA, 25 bp, Artificial
  probe
  misc_feature (1)..(25): SEQ ID NO: 3139; WAN0249ET; Start 29; Stop 53
agaataacacacttatgttaaccct

SEQ ID NO: 347829 - DNA, 25 bp, Artificial
  probe
  misc_feature (1)..(25): SEQ ID NO: 3139; WAN0249ET; Start 28; Stop 52
aagaataacacacttatgttaaccc

SEQ ID NO: 347830 - DNA, 25 bp, Artificial
  probe
  misc_feature (1)..(25): SEQ ID NO: 3139; WAN0249ET; Start 24; Stop 48
cacaaagaataacacacttatgtta

SEQ ID NO: 347831 - DNA, 25 bp, Artificial
  probe
  misc_feature (1)..(25): SEQ ID NO: 3139; WAN0249ET; Start 30; Stop 54
gaataacacacttatgttaacccta

SEQ ID NO: 347832 - DNA, 25 bp, Artificial
  probe
  misc_feature (1)..(25): SEQ ID NO: 3139; WAN0249ET; Start 25; Stop 49
acaaagaataacacacttatgttaa

SEQ ID NO: 347833 - DNA, 25 bp, Artificial
  probe
  misc_feature (1)..(25): SEQ ID NO: 3139; WAN0249ET; Start 31; Stop 55
aataacacacttatgttaaccctat

SEQ ID NO: 347834 - DNA, 25 bp, Artificial
  probe
  misc_feature (1)..(25): SEQ ID NO: 3139; WAN0249ET; Start 27; Stop 51
aaagaataacacacttatgttaacc

SEQ ID NO: 347835 - DNA, 25 bp, Artificial
  probe
  misc_feature (1)..(25): SEQ ID NO: 3139; WAN0249ET; Start 7; Stop 31
atcctttcttttatctacacaaaga

SEQ ID NO: 347836 - DNA, 25 bp, Artificial
  probe
  misc_feature (1)..(25): SEQ ID NO: 3139; WAN0249ET; Start 33; Stop 57
taacacacttatgttaaccctatat

SEQ ID NO: 347837 - DNA, 25 bp, Artificial
  probe
  misc_feature (1)..(25): SEQ ID NO: 3139; WAN0249ET; Start 32; Stop 56
ataacacacttatgttaaccctata

SEQ ID NO: 347838 - DNA, 25 bp, Artificial
  probe
  misc_feature (1)..(25): SEQ ID NO: 3139; WAN0249ET; Start 26; Stop 50
caaagaataacacacttatgttaac

SEQ ID NO: 347839 - DNA, 25 bp, Artificial
  probe
  misc_feature (1)..(25): SEQ ID NO: 3140; WAN0249DM; Start 19; Stop 43
tcagtataacatttgtagcggattt

SEQ ID NO: 347840 - DNA, 25 bp, Artificial
  probe
  misc_feature (1)..(25): SEQ ID NO: 3140; WAN0249DM; Start 20; Stop 44
cagtataacatttgtagcggatttt

SEQ ID NO: 347841 - DNA, 25 bp, Artificial
  probe
  misc_feature (1)..(25): SEQ ID NO: 3141; WAN024DBU; Start 334; Stop 358
atggagttaatcttatctgcgttga

SEQ ID NO: 347842 - DNA, 25 bp, Artificial
  probe
  misc_feature (1)..(25): SEQ ID NO: 3141; WAN024DBU; Start 335; Stop 359
tggagttaatcttatctgcgttgaa

SEQ ID NO: 347843 - DNA, 25 bp, Artificial
  probe
  misc_feature (1)..(25): SEQ ID NO: 3141; WAN024DBU; Start 795; Stop 819
aagcaggttgaacaagatgaatatc

SEQ ID NO: 347844 - DNA, 25 bp, Artificial
  probe
  misc_feature (1)..(25): SEQ ID NO: 3141; WAN024DBU; Start 336; Stop 360
ggagttaatcttatctgcgttgaag

SEQ ID NO: 347845 - DNA, 25 bp, Artificial
  probe
  misc_feature (1)..(25): SEQ ID NO: 3141; WAN024DBU; Start 333; Stop 357
tatggagttaatcttatctgcgttg

SEQ ID NO: 347846 - DNA, 25 bp, Artificial
  probe
  misc_feature (1)..(25): SEQ ID NO: 3141; WAN024DBU; Start 1137; Stop 1161
gcagaggtgattgtcaagatagtaa

SEQ ID NO: 347847 - DNA, 25 bp, Artificial
  probe
  misc_feature (1)..(25): SEQ ID NO: 3141; WAN024DBU; Start 794; Stop 818
taagcaggttgaacaagatgaatat

SEQ ID NO: 347848 - DNA, 25 bp, Artificial
  probe
  misc_feature (1)..(25): SEQ ID NO: 3141; WAN024DBU; Start 793; Stop 817
ataagcaggttgaacaagatgaata

SEQ ID NO: 347849 - DNA, 25 bp, Artificial
  probe
  misc_feature (1)..(25): SEQ ID NO: 3141; WAN024DBU; Start 792; Stop 816
tataagcaggttgaacaagatgaat

SEQ ID NO: 347850 - DNA, 25 bp, Artificial
  probe
  misc_feature (1)..(25): SEQ ID NO: 3141; WAN024DBU; Start 791; Stop 815
atataagcaggttgaacaagatgaa

SEQ ID NO: 347851 - DNA, 25 bp, Artificial
  probe
  misc_feature (1)..(25): SEQ ID NO: 3141; WAN024DBU; Start 790; Stop 814
aatataagcaggttgaacaagatga

SEQ ID NO: 347852 - DNA, 25 bp, Artificial
  probe
  misc_feature (1)..(25): SEQ ID NO: 3141; WAN024DBU; Start 788; Stop 812
tgaatataagcaggttgaacaagat

SEQ ID NO: 347853 - DNA, 25 bp, Artificial
  probe
  misc_feature (1)..(25): SEQ ID NO: 3141; WAN024DBU; Start 787; Stop 811
atgaatataagcaggttgaacaaga

SEQ ID NO: 347854 - DNA, 25 bp, Artificial
  probe
  misc_feature (1)..(25): SEQ ID NO: 3141; WAN024DBU; Start 1510; Stop 1534
atgatgtagagcgtaggcagttaat

SEQ ID NO: 347855 - DNA, 25 bp, Artificial
  probe
  misc_feature (1)..(25): SEQ ID NO: 3141; WAN024DBU; Start 789; Stop 813
gaatataagcaggttgaacaagatg

SEQ ID NO: 347856 - DNA, 25 bp, Artificial
  probe
  misc_feature (1)..(25): SEQ ID NO: 3141; WAN024DBU; Start 1139; Stop 1163
agaggtgattgtcaagatagtaagt

SEQ ID NO: 347857 - DNA, 25 bp, Artificial
  probe
  misc_feature (1)..(25): SEQ ID NO: 3141; WAN024DBU; Start 1509; Stop 1533
aatgatgtagagcgtaggcagttaa

SEQ ID NO: 347858 - DNA, 25 bp, Artificial
  probe
  misc_feature (1)..(25): SEQ ID NO: 3141; WAN024DBU; Start 1138; Stop 1162
cagaggtgattgtcaagatagtaag

SEQ ID NO: 347859 - DNA, 25 bp, Artificial
  probe
  misc_feature (1)..(25): SEQ ID NO: 3141; WAN024DBU; Start 1511; Stop 1535
tgatgtagagcgtaggcagttaatt

SEQ ID NO: 347860 - DNA, 25 bp, Artificial
  probe
  misc_feature (1)..(25): SEQ ID NO: 3141; WAN024DBU; Start 332; Stop 356
ttatggagttaatcttatctgcgtt

SEQ ID NO: 347861 - DNA, 25 bp, Artificial
  probe
  misc_feature (1)..(25): SEQ ID NO: 3141; WAN024DBU; Start 1655; Stop 1679
tgatgaacaagttgaatgtgtaagt

SEQ ID NO: 347862 - DNA, 25 bp, Artificial
  probe
  misc_feature (1)..(25): SEQ ID NO: 3141; WAN024DBU; Start 786; Stop 810
aatgaatataagcaggttgaacaag

SEQ ID NO: 347863 - DNA, 25 bp, Artificial
  probe
  misc_feature (1)..(25): SEQ ID NO: 3141; WAN024DBU; Start 1508; Stop 1532
gaatgatgtagagcgtaggcagtta

SEQ ID NO: 347864 - DNA, 25 bp, Artificial
  probe
  misc_feature (1)..(25): SEQ ID NO: 3141; WAN024DBU; Start 331; Stop 355
attatggagttaatcttatctgcgt

SEQ ID NO: 347865 - DNA, 25 bp, Artificial
  probe
  misc_feature (1)..(25): SEQ ID NO: 3141; WAN024DBU; Start 1656; Stop 1680
gatgaacaagttgaatgtgtaagtt

SEQ ID NO: 347866 - DNA, 25 bp, Artificial
  probe
  misc_feature (1)..(25): SEQ ID NO: 3141; WAN024DBU; Start 1147; Stop 1171
ttgtcaagatagtaagtaatccgaa

SEQ ID NO: 347867 - DNA, 25 bp, Artificial
  probe
  misc_feature (1)..(25): SEQ ID NO: 3141; WAN024DBU; Start 660; Stop 684
ccaagacagaatggtaagaatcctt

SEQ ID NO: 347868 - DNA, 25 bp, Artificial
  probe
  misc_feature (1)..(25): SEQ ID NO: 3141; WAN024DBU; Start 1654; Stop 1678
atgatgaacaagttgaatgtgtaag

SEQ ID NO: 347869 - DNA, 25 bp, Artificial
  probe
  misc_feature (1)..(25): SEQ ID NO: 3141; WAN024DBU; Start 44; Stop 68
atacctctatacacgagtatctacg

SEQ ID NO: 347870 - DNA, 25 bp, Artificial
  probe
  misc_feature (1)..(25): SEQ ID NO: 3141; WAN024DBU; Start 1146; Stop 1170
attgtcaagatagtaagtaatccga

SEQ ID NO: 347871 - DNA, 25 bp, Artificial
  probe
  misc_feature (1)..(25): SEQ ID NO: 3141; WAN024DBU; Start 1140; Stop 1164
gaggtgattgtcaagatagtaagta

SEQ ID NO: 347872 - DNA, 25 bp, Artificial
  probe
  misc_feature (1)..(25): SEQ ID NO: 3141; WAN024DBU; Start 513; Stop 537
tatggatataaacttgaagacggca

SEQ ID NO: 347873 - DNA, 25 bp, Artificial
  probe
  misc_feature (1)..(25): SEQ ID NO: 3141; WAN024DBU; Start 202; Stop 226
tacagttcaatcgaatgatggaaga

SEQ ID NO: 347874 - DNA, 25 bp, Artificial
  probe
  misc_feature (1)..(25): SEQ ID NO: 3143; WAN0249M5; Start 35; Stop 59
cctcatggagagaaagttctattag

SEQ ID NO: 347875 - DNA, 25 bp, Artificial
  probe
  misc_feature (1)..(25): SEQ ID NO: 3143; WAN0249M5; Start 34; Stop 58
tcctcatggagagaaagttctatta

SEQ ID NO: 347876 - DNA, 25 bp, Artificial
  probe
  misc_feature (1)..(25): SEQ ID NO: 3143; WAN0249M5; Start 36; Stop 60
ctcatggagagaaagttctattaga

SEQ ID NO: 347877 - DNA, 25 bp, Artificial
  probe
  misc_feature (1)..(25): SEQ ID NO: 3143; WAN0249M5; Start 14; Stop 38
aaaatcccaaaagaaccttctcctc

SEQ ID NO: 347878 - DNA, 25 bp, Artificial
  probe
  misc_feature (1)..(25): SEQ ID NO: 3143; WAN0249M5; Start 16; Stop 40
aatcccaaaagaaccttctcctcat

SEQ ID NO: 347879 - DNA, 25 bp, Artificial
  probe
  misc_feature (1)..(25): SEQ ID NO: 3143; WAN0249M5; Start 15; Stop 39
aaatcccaaaagaaccttctcctca

SEQ ID NO: 347880 - DNA, 25 bp, Artificial
  probe
  misc_feature (1)..(25): SEQ ID NO: 3143; WAN0249M5; Start 17; Stop 41
atcccaaaagaaccttctcctcatg

SEQ ID NO: 347881 - DNA, 25 bp, Artificial
  probe
  misc_feature (1)..(25): SEQ ID NO: 3143; WAN0249M5; Start 37; Stop 61
tcatggagagaaagttctattagaa

SEQ ID NO: 347882 - DNA, 25 bp, Artificial
  probe
  misc_feature (1)..(25): SEQ ID NO: 3143; WAN0249M5; Start 38; Stop 62
catggagagaaagttctattagaaa

SEQ ID NO: 347883 - DNA, 25 bp, Artificial
  probe
  misc_feature (1)..(25): SEQ ID NO: 3143; WAN0249M5; Start 33; Stop 57
ctcctcatggagagaaagttctatt

SEQ ID NO: 347884 - DNA, 25 bp, Artificial
  probe
  misc_feature (1)..(25): SEQ ID NO: 3143; WAN0249M5; Start 40; Stop 64
tggagagaaagttctattagaaatt

SEQ ID NO: 347885 - DNA, 25 bp, Artificial
  probe
  misc_feature (1)..(25): SEQ ID NO: 3143; WAN0249M5; Start 39; Stop 63
atggagagaaagttctattagaaat

SEQ ID NO: 347886 - DNA, 25 bp, Artificial
  probe
  misc_feature (1)..(25): SEQ ID NO: 3143; WAN0249M5; Start 19; Stop 43
cccaaaagaaccttctcctcatgga

SEQ ID NO: 347887 - DNA, 25 bp, Artificial
  probe
  misc_feature (1)..(25): SEQ ID NO: 3143; WAN0249M5; Start 18; Stop 42
tcccaaaagaaccttctcctcatgg

SEQ ID NO: 347888 - DNA, 25 bp, Artificial
  probe
  misc_feature (1)..(25): SEQ ID NO: 3143; WAN0249M5; Start 20; Stop 44
ccaaaagaaccttctcctcatggag

SEQ ID NO: 347889 - DNA, 25 bp, Artificial
  probe
  misc_feature (1)..(25): SEQ ID NO: 3144; WAN0249W7; Start 77; Stop 101
gagcctactcatcacactatacaaa

SEQ ID NO: 347890 - DNA, 25 bp, Artificial
  probe
  misc_feature (1)..(25): SEQ ID NO: 3144; WAN0249W7; Start 30; Stop 54
cgctctttagtatatcatatttgct

SEQ ID NO: 347891 - DNA, 25 bp, Artificial
  probe
  misc_feature (1)..(25): SEQ ID NO: 3144; WAN0249W7; Start 29; Stop 53
tcgctctttagtatatcatatttgc

SEQ ID NO: 347892 - DNA, 25 bp, Artificial
  probe
  misc_feature (1)..(25): SEQ ID NO: 3144; WAN0249W7; Start 16; Stop 40
tctactagaatactcgctctttagt

SEQ ID NO: 347893 - DNA, 25 bp, Artificial
  probe
  misc_feature (1)..(25): SEQ ID NO: 3144; WAN0249W7; Start 78; Stop 102
agcctactcatcacactatacaaaa

SEQ ID NO: 347894 - DNA, 25 bp, Artificial
  probe
  misc_feature (1)..(25): SEQ ID NO: 3144; WAN0249W7; Start 76; Stop 100
tgagcctactcatcacactatacaa

SEQ ID NO: 347895 - DNA, 25 bp, Artificial
  probe
  misc_feature (1)..(25): SEQ ID NO: 3144; WAN0249W7; Start 75; Stop 99
ctgagcctactcatcacactataca

SEQ ID NO: 347896 - DNA, 25 bp, Artificial
  probe
  misc_feature (1)..(25): SEQ ID NO: 3144; WAN0249W7; Start 116; Stop 140
aacgattttcagcctctttgatttt

SEQ ID NO: 347897 - DNA, 25 bp, Artificial
  probe
  misc_feature (1)..(25): SEQ ID NO: 3144; WAN0249W7; Start 74; Stop 98
cctgagcctactcatcacactatac

SEQ ID NO: 347898 - DNA, 25 bp, Artificial
  probe
  misc_feature (1)..(25): SEQ ID NO: 3144; WAN0249W7; Start 115; Stop 139
gaacgattttcagcctctttgattt

SEQ ID NO: 347899 - DNA, 25 bp, Artificial
  probe
  misc_feature (1)..(25): SEQ ID NO: 3144; WAN0249W7; Start 62; Stop 86
ttaaaacttgaacctgagcctactc

SEQ ID NO: 347900 - DNA, 25 bp, Artificial
  probe
  misc_feature (1)..(25): SEQ ID NO: 3144; WAN0249W7; Start 73; Stop 97
acctgagcctactcatcacactata

SEQ ID NO: 347901 - DNA, 25 bp, Artificial
  probe
  misc_feature (1)..(25): SEQ ID NO: 3144; WAN0249W7; Start 61; Stop 85
tttaaaacttgaacctgagcctact

SEQ ID NO: 347902 - DNA, 25 bp, Artificial
  probe
  misc_feature (1)..(25): SEQ ID NO: 3144; WAN0249W7; Start 114; Stop 138
ggaacgattttcagcctctttgatt

SEQ ID NO: 347903 - DNA, 25 bp, Artificial
  probe
  misc_feature (1)..(25): SEQ ID NO: 3144; WAN0249W7; Start 110; Stop 134
gataggaacgattttcagcctcttt

SEQ ID NO: 347904 - DNA, 25 bp, Artificial
  probe
  misc_feature (1)..(25): SEQ ID NO: 3144; WAN0249W7; Start 111; Stop 135
ataggaacgattttcagcctctttg

SEQ ID NO: 347905 - DNA, 25 bp, Artificial
  probe
  misc_feature (1)..(25): SEQ ID NO: 3144; WAN0249W7; Start 72; Stop 96
aacctgagcctactcatcacactat

SEQ ID NO: 347906 - DNA, 25 bp, Artificial
  probe
  misc_feature (1)..(25): SEQ ID NO: 3144; WAN0249W7; Start 15; Stop 39
ttctactagaatactcgctctttag

SEQ ID NO: 347907 - DNA, 25 bp, Artificial
  probe
  misc_feature (1)..(25): SEQ ID NO: 3144; WAN0249W7; Start 112; Stop 136
taggaacgattttcagcctctttga

SEQ ID NO: 347908 - DNA, 25 bp, Artificial
  probe
  misc_feature (1)..(25): SEQ ID NO: 3144; WAN0249W7; Start 28; Stop 52
ctcgctctttagtatatcatatttg

SEQ ID NO: 347909 - DNA, 25 bp, Artificial
  probe
  misc_feature (1)..(25): SEQ ID NO: 3144; WAN0249W7; Start 71; Stop 95
gaacctgagcctactcatcacacta

SEQ ID NO: 347910 - DNA, 25 bp, Artificial
  probe
  misc_feature (1)..(25): SEQ ID NO: 3144; WAN0249W7; Start 66; Stop 90
aacttgaacctgagcctactcatca

SEQ ID NO: 347911 - DNA, 25 bp, Artificial
  probe
  misc_feature (1)..(25): SEQ ID NO: 3144; WAN0249W7; Start 27; Stop 51
actcgctctttagtatatcatattt

SEQ ID NO: 347912 - DNA, 25 bp, Artificial
  probe
  misc_feature (1)..(25): SEQ ID NO: 3144; WAN0249W7; Start 113; Stop 137
aggaacgattttcagcctctttgat

SEQ ID NO: 347913 - DNA, 25 bp, Artificial
  probe
  misc_feature (1)..(25): SEQ ID NO: 3144; WAN0249W7; Start 8; Stop 32
gtcctaattctactagaatactcgc

SEQ ID NO: 347914 - DNA, 25 bp, Artificial
  probe
  misc_feature (1)..(25): SEQ ID NO: 3144; WAN0249W7; Start 9; Stop 33
tcctaattctactagaatactcgct

SEQ ID NO: 347915 - DNA, 25 bp, Artificial
  probe
  misc_feature (1)..(25): SEQ ID NO: 3144; WAN0249W7; Start 10; Stop 34
cctaattctactagaatactcgctc

SEQ ID NO: 347916 - DNA, 25 bp, Artificial
  probe
  misc_feature (1)..(25): SEQ ID NO: 3144; WAN0249W7; Start 31; Stop 55
gctctttagtatatcatatttgctt

SEQ ID NO: 347917 - DNA, 25 bp, Artificial
  probe
  misc_feature (1)..(25): SEQ ID NO: 3144; WAN0249W7; Start 109; Stop 133
cgataggaacgattttcagcctctt

SEQ ID NO: 347918 - DNA, 25 bp, Artificial
  probe
  misc_feature (1)..(25): SEQ ID NO: 3144; WAN0249W7; Start 65; Stop 89
aaacttgaacctgagcctactcatc

SEQ ID NO: 347919 - DNA, 25 bp, Artificial
  probe
  misc_feature (1)..(25): SEQ ID NO: 3144; WAN0249W7; Start 34; Stop 58
ctttagtatatcatatttgcttggt

SEQ ID NO: 347920 - DNA, 25 bp, Artificial
  probe
  misc_feature (1)..(25): SEQ ID NO: 3144; WAN0249W7; Start 17; Stop 41
ctactagaatactcgctctttagta

SEQ ID NO: 347921 - DNA, 25 bp, Artificial
  probe
  misc_feature (1)..(25): SEQ ID NO: 3144; WAN0249W7; Start 68; Stop 92
cttgaacctgagcctactcatcaca

SEQ ID NO: 347922 - DNA, 25 bp, Artificial
  probe
  misc_feature (1)..(25): SEQ ID NO: 3145; WAN024F2M-3; Start 1724; Stop 1748
gctgtcaacgaagaagaatacctta

SEQ ID NO: 347923 - DNA, 25 bp, Artificial
  probe
  misc_feature (1)..(25): SEQ ID NO: 3145; WAN024F2M-3; Start 334; Stop 358
aatcgttatgatgatggactctgga

SEQ ID NO: 347924 - DNA, 25 bp, Artificial
  probe
  misc_feature (1)..(25): SEQ ID NO: 3145; WAN024F2M-3; Start 333; Stop 357
caatcgttatgatgatggactctgg

SEQ ID NO: 347925 - DNA, 25 bp, Artificial
  probe
  misc_feature (1)..(25): SEQ ID NO: 3145; WAN024F2M-3; Start 753; Stop 777
atgaattgattacagaagacaaggc

SEQ ID NO: 347926 - DNA, 25 bp, Artificial
  probe
  misc_feature (1)..(25): SEQ ID NO: 3145; WAN024F2M-3; Start 1725; Stop 1749
ctgtcaacgaagaagaataccttaa

SEQ ID NO: 347927 - DNA, 25 bp, Artificial
  probe
  misc_feature (1)..(25): SEQ ID NO: 3145; WAN024F2M-3; Start 1729; Stop 1753
caacgaagaagaataccttaatcct

SEQ ID NO: 347928 - DNA, 25 bp, Artificial
  probe
  misc_feature (1)..(25): SEQ ID NO: 3145; WAN024F2M-3; Start 1728; Stop 1752
tcaacgaagaagaataccttaatcc

SEQ ID NO: 347929 - DNA, 25 bp, Artificial
  probe
  misc_feature (1)..(25): SEQ ID NO: 3145; WAN024F2M-3; Start 335; Stop 359
atcgttatgatgatggactctggag

SEQ ID NO: 347930 - DNA, 25 bp, Artificial
  probe
  misc_feature (1)..(25): SEQ ID NO: 3145; WAN024F2M-3; Start 1726; Stop 1750
tgtcaacgaagaagaataccttaat

SEQ ID NO: 347931 - DNA, 25 bp, Artificial
  probe
  misc_feature (1)..(25): SEQ ID NO: 3145; WAN024F2M-3; Start 754; Stop 778
tgaattgattacagaagacaaggcg

SEQ ID NO: 347932 - DNA, 25 bp, Artificial
  probe
  misc_feature (1)..(25): SEQ ID NO: 3145; WAN024F2M-3; Start 1722; Stop 1746
atgctgtcaacgaagaagaatacct

SEQ ID NO: 347933 - DNA, 25 bp, Artificial
  probe
  misc_feature (1)..(25): SEQ ID NO: 3145; WAN024F2M-3; Start 1655; Stop 1679
aatgttatcatcggtaagatcatcc

SEQ ID NO: 347934 - DNA, 25 bp, Artificial
  probe
  misc_feature (1)..(25): SEQ ID NO: 3145; WAN024F2M-3; Start 1727; Stop 1751
gtcaacgaagaagaataccttaatc

SEQ ID NO: 347935 - DNA, 25 bp, Artificial
  probe
  misc_feature (1)..(25): SEQ ID NO: 3145; WAN024F2M-3; Start 1089; Stop 1113
gacaagttactgctatcgaagaaga

SEQ ID NO: 347936 - DNA, 25 bp, Artificial
  probe
  misc_feature (1)..(25): SEQ ID NO: 3145; WAN024F2M-3; Start 1090; Stop 1114
acaagttactgctatcgaagaagat

SEQ ID NO: 347937 - DNA, 25 bp, Artificial
  probe
  misc_feature (1)..(25): SEQ ID NO: 3145; WAN024F2M-3; Start 1723; Stop 1747
tgctgtcaacgaagaagaatacctt

SEQ ID NO: 347938 - DNA, 25 bp, Artificial
  probe
  misc_feature (1)..(25): SEQ ID NO: 3145; WAN024F2M-3; Start 1091; Stop 1115
caagttactgctatcgaagaagatg

SEQ ID NO: 347939 - DNA, 25 bp, Artificial
  probe
  misc_feature (1)..(25): SEQ ID NO: 3145; WAN024F2M-3; Start 1092; Stop 1116
aagttactgctatcgaagaagatgc

SEQ ID NO: 347940 - DNA, 25 bp, Artificial
  probe
  misc_feature (1)..(25): SEQ ID NO: 3145; WAN024F2M-3; Start 1088; Stop 1112
ggacaagttactgctatcgaagaag

SEQ ID NO: 347941 - DNA, 25 bp, Artificial
  probe
  misc_feature (1)..(25): SEQ ID NO: 3145; WAN024F2M-3; Start 1762; Stop 1786
ggaagaaggaaatgaagaaacaaca

SEQ ID NO: 347942 - DNA, 25 bp, Artificial
  probe
  misc_feature (1)..(25): SEQ ID NO: 3145; WAN024F2M-3; Start 1759; Stop 1783
agaggaagaaggaaatgaagaaaca

SEQ ID NO: 347943 - DNA, 25 bp, Artificial
  probe
  misc_feature (1)..(25): SEQ ID NO: 3145; WAN024F2M-3; Start 752; Stop 776
aatgaattgattacagaagacaagg

SEQ ID NO: 347944 - DNA, 25 bp, Artificial
  probe
  misc_feature (1)..(25): SEQ ID NO: 3145; WAN024F2M-3; Start 1755; Stop 1779
cagtagaggaagaaggaaatgaaga

SEQ ID NO: 347945 - DNA, 25 bp, Artificial
  probe
  misc_feature (1)..(25): SEQ ID NO: 3145; WAN024F2M-3; Start 1761; Stop 1785
aggaagaaggaaatgaagaaacaac

SEQ ID NO: 347946 - DNA, 25 bp, Artificial
  probe
  misc_feature (1)..(25): SEQ ID NO: 3145; WAN024F2M-3; Start 1453; Stop 1477
caatgactttacagatgccaacaaa

SEQ ID NO: 347947 - DNA, 25 bp, Artificial
  probe
  misc_feature (1)..(25): SEQ ID NO: 3145; WAN024F2M-3; Start 1760; Stop 1784
gaggaagaaggaaatgaagaaacaa

SEQ ID NO: 347948 - DNA, 25 bp, Artificial
  probe
  misc_feature (1)..(25): SEQ ID NO: 3145; WAN024F2M-3; Start 1721; Stop 1745
catgctgtcaacgaagaagaatacc

SEQ ID NO: 347949 - DNA, 25 bp, Artificial
  probe
  misc_feature (1)..(25): SEQ ID NO: 3145; WAN024F2M-3; Start 1767; Stop 1791
aaggaaatgaagaaacaacagaagt

SEQ ID NO: 347950 - DNA, 25 bp, Artificial
  probe
  misc_feature (1)..(25): SEQ ID NO: 3145; WAN024F2M-3; Start 1082; Stop 1106
gttaaaggacaagttactgctatcg

SEQ ID NO: 347951 - DNA, 25 bp, Artificial
  probe
  misc_feature (1)..(25): SEQ ID NO: 3145; WAN024F2M-3; Start 1079; Stop 1103
gaggttaaaggacaagttactgcta

SEQ ID NO: 347952 - DNA, 25 bp, Artificial
  probe
  misc_feature (1)..(25): SEQ ID NO: 3145; WAN024F2M-3; Start 364; Stop 388
tggtaacatctcaaacttctcacag

SEQ ID NO: 347953 - DNA, 25 bp, Artificial
  probe
  misc_feature (1)..(25): SEQ ID NO: 3145; WAN024F2M-3; Start 1080; Stop 1104
aggttaaaggacaagttactgctat

SEQ ID NO: 347954 - DNA, 25 bp, Artificial
  probe
  misc_feature (1)..(25): SEQ ID NO: 3145; WAN024F2M-3; Start 1087; Stop 1111
aggacaagttactgctatcgaagaa

SEQ ID NO: 347955 - DNA, 25 bp, Artificial
  probe
  misc_feature (1)..(25): SEQ ID NO: 3146; WAN024A6Y; Start 91; Stop 115
ggaacagaatcctctcttgattgaa

SEQ ID NO: 347956 - DNA, 25 bp, Artificial
  probe
  misc_feature (1)..(25): SEQ ID NO: 3146; WAN024A6Y; Start 92; Stop 116
gaacagaatcctctcttgattgaag

SEQ ID NO: 347957 - DNA, 25 bp, Artificial
  probe
  misc_feature (1)..(25): SEQ ID NO: 3146; WAN024A6Y; Start 109; Stop 133
gattgaagacaagctagtcattagg

SEQ ID NO: 347958 - DNA, 25 bp, Artificial
  probe
  misc_feature (1)..(25): SEQ ID NO: 3146; WAN024A6Y; Start 122; Stop 146
ctagtcattaggctggtttgtcttt

SEQ ID NO: 347959 - DNA, 25 bp, Artificial
  probe
  misc_feature (1)..(25): SEQ ID NO: 3146; WAN024A6Y; Start 110; Stop 134
attgaagacaagctagtcattaggc

SEQ ID NO: 347960 - DNA, 25 bp, Artificial
  probe
  misc_feature (1)..(25): SEQ ID NO: 3146; WAN024A6Y; Start 95; Stop 119
cagaatcctctcttgattgaagaca

SEQ ID NO: 347961 - DNA, 25 bp, Artificial
  probe
  misc_feature (1)..(25): SEQ ID NO: 3146; WAN024A6Y; Start 94; Stop 118
acagaatcctctcttgattgaagac

SEQ ID NO: 347962 - DNA, 25 bp, Artificial
  probe
  misc_feature (1)..(25): SEQ ID NO: 3146; WAN024A6Y; Start 96; Stop 120
agaatcctctcttgattgaagacaa

SEQ ID NO: 347963 - DNA, 25 bp, Artificial
  probe
  misc_feature (1)..(25): SEQ ID NO: 3146; WAN024A6Y; Start 93; Stop 117
aacagaatcctctcttgattgaaga

SEQ ID NO: 347964 - DNA, 25 bp, Artificial
  probe
  misc_feature (1)..(25): SEQ ID NO: 3146; WAN024A6Y; Start 108; Stop 132
tgattgaagacaagctagtcattag

SEQ ID NO: 347965 - DNA, 25 bp, Artificial
  probe
  misc_feature (1)..(25): SEQ ID NO: 3146; WAN024A6Y; Start 107; Stop 131
ttgattgaagacaagctagtcatta

SEQ ID NO: 347966 - DNA, 25 bp, Artificial
  probe
  misc_feature (1)..(25): SEQ ID NO: 3146; WAN024A6Y; Start 111; Stop 135
ttgaagacaagctagtcattaggct

SEQ ID NO: 347967 - DNA, 25 bp, Artificial
  probe
  misc_feature (1)..(25): SEQ ID NO: 3146; WAN024A6Y; Start 97; Stop 121
gaatcctctcttgattgaagacaag

SEQ ID NO: 347968 - DNA, 25 bp, Artificial
  probe
  misc_feature (1)..(25): SEQ ID NO: 3146; WAN024A6Y; Start 121; Stop 145
gctagtcattaggctggtttgtctt

SEQ ID NO: 347969 - DNA, 25 bp, Artificial
  probe
  misc_feature (1)..(25): SEQ ID NO: 3146; WAN024A6Y; Start 98; Stop 122
aatcctctcttgattgaagacaagc

SEQ ID NO: 347970 - DNA, 25 bp, Artificial
  probe
  misc_feature (1)..(25): SEQ ID NO: 3146; WAN024A6Y; Start 90; Stop 114
gggaacagaatcctctcttgattga

SEQ ID NO: 347971 - DNA, 25 bp, Artificial
  probe
  misc_feature (1)..(25): SEQ ID NO: 3146; WAN024A6Y; Start 123; Stop 147
tagtcattaggctggtttgtctttt

SEQ ID NO: 347972 - DNA, 25 bp, Artificial
  probe
  misc_feature (1)..(25): SEQ ID NO: 3146; WAN024A6Y; Start 112; Stop 136
tgaagacaagctagtcattaggctg

SEQ ID NO: 347973 - DNA, 25 bp, Artificial
  probe
  misc_feature (1)..(25): SEQ ID NO: 3146; WAN024A6Y; Start 105; Stop 129
tcttgattgaagacaagctagtcat

SEQ ID NO: 347974 - DNA, 25 bp, Artificial
  probe
  misc_feature (1)..(25): SEQ ID NO: 3146; WAN024A6Y; Start 103; Stop 127
tctcttgattgaagacaagctagtc

SEQ ID NO: 347975 - DNA, 25 bp, Artificial
  probe
  misc_feature (1)..(25): SEQ ID NO: 3146; WAN024A6Y; Start 102; Stop 126
ctctcttgattgaagacaagctagt

SEQ ID NO: 347976 - DNA, 25 bp, Artificial
  probe
  misc_feature (1)..(25): SEQ ID NO: 3146; WAN024A6Y; Start 104; Stop 128
ctcttgattgaagacaagctagtca

SEQ ID NO: 347977 - DNA, 25 bp, Artificial
  probe
  misc_feature (1)..(25): SEQ ID NO: 3146; WAN024A6Y; Start 152; Stop 176
aactgtagtgggttgatataatagt

SEQ ID NO: 347978 - DNA, 25 bp, Artificial
  probe
  misc_feature (1)..(25): SEQ ID NO: 3146; WAN024A6Y; Start 106; Stop 130
cttgattgaagacaagctagtcatt

SEQ ID NO: 347979 - DNA, 25 bp, Artificial
  probe
  misc_feature (1)..(25): SEQ ID NO: 3146; WAN024A6Y; Start 101; Stop 125
cctctcttgattgaagacaagctag

SEQ ID NO: 347980 - DNA, 25 bp, Artificial
  probe
  misc_feature (1)..(25): SEQ ID NO: 3146; WAN024A6Y; Start 100; Stop 124
tcctctcttgattgaagacaagcta

SEQ ID NO: 347981 - DNA, 25 bp, Artificial
  probe
  misc_feature (1)..(25): SEQ ID NO: 3146; WAN024A6Y; Start 99; Stop 123
atcctctcttgattgaagacaagct

SEQ ID NO: 347982 - DNA, 25 bp, Artificial
  probe
  misc_feature (1)..(25): SEQ ID NO: 3146; WAN024A6Y; Start 113; Stop 137
gaagacaagctagtcattaggctgg

SEQ ID NO: 347983 - DNA, 25 bp, Artificial
  probe
  misc_feature (1)..(25): SEQ ID NO: 3146; WAN024A6Y; Start 153; Stop 177
actgtagtgggttgatataatagta

SEQ ID NO: 347984 - DNA, 25 bp, Artificial
  probe
  misc_feature (1)..(25): SEQ ID NO: 3146; WAN024A6Y; Start 115; Stop 139
agacaagctagtcattaggctggtt

SEQ ID NO: 347985 - DNA, 25 bp, Artificial
  probe
  misc_feature (1)..(25): SEQ ID NO: 3146; WAN024A6Y; Start 114; Stop 138
aagacaagctagtcattaggctggt

SEQ ID NO: 347986 - DNA, 25 bp, Artificial
  probe
  misc_feature (1)..(25): SEQ ID NO: 3146; WAN024A6Y; Start 119; Stop 143
aagctagtcattaggctggtttgtc

SEQ ID NO: 347987 - DNA, 25 bp, Artificial
  probe
  misc_feature (1)..(25): SEQ ID NO: 3146; WAN024A6Y; Start 116; Stop 140
gacaagctagtcattaggctggttt

SEQ ID NO: 347988 - DNA, 25 bp, Artificial
  probe
  misc_feature (1)..(25): SEQ ID NO: 3147; WAN024AFT; Start 101; Stop 125
accaactcttagaactgattcttca

SEQ ID NO: 347989 - DNA, 25 bp, Artificial
  probe
  misc_feature (1)..(25): SEQ ID NO: 3147; WAN024AFT; Start 100; Stop 124
aaccaactcttagaactgattcttc

SEQ ID NO: 347990 - DNA, 25 bp, Artificial
  probe
  misc_feature (1)..(25): SEQ ID NO: 3147; WAN024AFT; Start 102; Stop 126
ccaactcttagaactgattcttcat

SEQ ID NO: 347991 - DNA, 25 bp, Artificial
  probe
  misc_feature (1)..(25): SEQ ID NO: 3147; WAN024AFT; Start 103; Stop 127
caactcttagaactgattcttcatt

SEQ ID NO: 347992 - DNA, 25 bp, Artificial
  probe
  misc_feature (1)..(25): SEQ ID NO: 3147; WAN024AFT; Start 99; Stop 123
aaaccaactcttagaactgattctt

SEQ ID NO: 347993 - DNA, 25 bp, Artificial
  probe
  misc_feature (1)..(25): SEQ ID NO: 3147; WAN024AFT; Start 107; Stop 131
tcttagaactgattcttcatttcac

SEQ ID NO: 347994 - DNA, 25 bp, Artificial
  probe
  misc_feature (1)..(25): SEQ ID NO: 3147; WAN024AFT; Start 106; Stop 130
ctcttagaactgattcttcatttca

SEQ ID NO: 347995 - DNA, 25 bp, Artificial
  probe
  misc_feature (1)..(25): SEQ ID NO: 3147; WAN024AFT; Start 105; Stop 129
actcttagaactgattcttcatttc

SEQ ID NO: 347996 - DNA, 25 bp, Artificial
  probe
  misc_feature (1)..(25): SEQ ID NO: 3147; WAN024AFT; Start 104; Stop 128
aactcttagaactgattcttcattt

SEQ ID NO: 347997 - DNA, 25 bp, Artificial
  probe
  misc_feature (1)..(25): SEQ ID NO: 3147; WAN024AFT; Start 98; Stop 122
aaaaccaactcttagaactgattct

SEQ ID NO: 347998 - DNA, 25 bp, Artificial
  probe
  misc_feature (1)..(25): SEQ ID NO: 3148; WAN024ADK; Start 38; Stop 62
atccagttgtataggctaaaggttt

SEQ ID NO: 347999 - DNA, 25 bp, Artificial
  probe
  misc_feature (1)..(25): SEQ ID NO: 3148; WAN024ADK; Start 37; Stop 61
aatccagttgtataggctaaaggtt

SEQ ID NO: 348000 - DNA, 25 bp, Artificial
  probe
  misc_feature (1)..(25): SEQ ID NO: 3148; WAN024ADK; Start 36; Stop 60
aaatccagttgtataggctaaaggt

SEQ ID NO: 348001 - DNA, 25 bp, Artificial
  probe
  misc_feature (1)..(25): SEQ ID NO: 3148; WAN024ADK; Start 39; Stop 63
tccagttgtataggctaaaggtttt

SEQ ID NO: 348002 - DNA, 25 bp, Artificial
  probe
  misc_feature (1)..(25): SEQ ID NO: 3148; WAN024ADK; Start 55; Stop 79
aaaggttttatccaaaggtctgaga

SEQ ID NO: 348003 - DNA, 25 bp, Artificial
  probe
  misc_feature (1)..(25): SEQ ID NO: 3148; WAN024ADK; Start 35; Stop 59
aaaatccagttgtataggctaaagg

SEQ ID NO: 348004 - DNA, 25 bp, Artificial
  probe
  misc_feature (1)..(25): SEQ ID NO: 3148; WAN024ADK; Start 52; Stop 76
gctaaaggttttatccaaaggtctg

SEQ ID NO: 348005 - DNA, 25 bp, Artificial
  probe
  misc_feature (1)..(25): SEQ ID NO: 3148; WAN024ADK; Start 49; Stop 73
taggctaaaggttttatccaaaggt

SEQ ID NO: 348006 - DNA, 25 bp, Artificial
  probe
  misc_feature (1)..(25): SEQ ID NO: 3148; WAN024ADK; Start 51; Stop 75
ggctaaaggttttatccaaaggtct

SEQ ID NO: 348007 - DNA, 25 bp, Artificial
  probe
  misc_feature (1)..(25): SEQ ID NO: 3148; WAN024ADK; Start 50; Stop 74
aggctaaaggttttatccaaaggtc

SEQ ID NO: 348008 - DNA, 25 bp, Artificial
  probe
  misc_feature (1)..(25): SEQ ID NO: 3148; WAN024ADK; Start 48; Stop 72
ataggctaaaggttttatccaaagg

SEQ ID NO: 348009 - DNA, 25 bp, Artificial
  probe
  misc_feature (1)..(25): SEQ ID NO: 3148; WAN024ADK; Start 54; Stop 78
taaaggttttatccaaaggtctgag

SEQ ID NO: 348010 - DNA, 25 bp, Artificial
  probe
  misc_feature (1)..(25): SEQ ID NO: 3148; WAN024ADK; Start 53; Stop 77
ctaaaggttttatccaaaggtctga

SEQ ID NO: 348011 - DNA, 25 bp, Artificial
  probe
  misc_feature (1)..(25): SEQ ID NO: 3148; WAN024ADK; Start 40; Stop 64
ccagttgtataggctaaaggtttta

SEQ ID NO: 348012 - DNA, 25 bp, Artificial
  probe
  misc_feature (1)..(25): SEQ ID NO: 3148; WAN024ADK; Start 34; Stop 58
gaaaatccagttgtataggctaaag

SEQ ID NO: 348013 - DNA, 25 bp, Artificial
  probe
  misc_feature (1)..(25): SEQ ID NO: 3148; WAN024ADK; Start 31; Stop 55
gaggaaaatccagttgtataggcta

SEQ ID NO: 348014 - DNA, 25 bp, Artificial
  probe
  misc_feature (1)..(25): SEQ ID NO: 3148; WAN024ADK; Start 24; Stop 48
tttgagagaggaaaatccagttgta

SEQ ID NO: 348015 - DNA, 25 bp, Artificial
  probe
  misc_feature (1)..(25): SEQ ID NO: 3148; WAN024ADK; Start 22; Stop 46
cttttgagagaggaaaatccagttg

SEQ ID NO: 348016 - DNA, 25 bp, Artificial
  probe
  misc_feature (1)..(25): SEQ ID NO: 3148; WAN024ADK; Start 25; Stop 49
ttgagagaggaaaatccagttgtat

SEQ ID NO: 348017 - DNA, 25 bp, Artificial
  probe
  misc_feature (1)..(25): SEQ ID NO: 3148; WAN024ADK; Start 21; Stop 45
acttttgagagaggaaaatccagtt

SEQ ID NO: 348018 - DNA, 25 bp, Artificial
  probe
  misc_feature (1)..(25): SEQ ID NO: 3148; WAN024ADK; Start 20; Stop 44
tacttttgagagaggaaaatccagt

SEQ ID NO: 348019 - DNA, 25 bp, Artificial
  probe
  misc_feature (1)..(25): SEQ ID NO: 3148; WAN024ADK; Start 28; Stop 52
agagaggaaaatccagttgtatagg

SEQ ID NO: 348020 - DNA, 25 bp, Artificial
  probe
  misc_feature (1)..(25): SEQ ID NO: 3148; WAN024ADK; Start 23; Stop 47
ttttgagagaggaaaatccagttgt

SEQ ID NO: 348021 - DNA, 25 bp, Artificial
  probe
  misc_feature (1)..(25): SEQ ID NO: 3148; WAN024ADK; Start 32; Stop 56
aggaaaatccagttgtataggctaa

SEQ ID NO: 348022 - DNA, 25 bp, Artificial
  probe
  misc_feature (1)..(25): SEQ ID NO: 3148; WAN024ADK; Start 29; Stop 53
gagaggaaaatccagttgtataggc

SEQ ID NO: 348023 - DNA, 25 bp, Artificial
  probe
  misc_feature (1)..(25): SEQ ID NO: 3148; WAN024ADK; Start 45; Stop 69
tgtataggctaaaggttttatccaa

SEQ ID NO: 348024 - DNA, 25 bp, Artificial
  probe
  misc_feature (1)..(25): SEQ ID NO: 3148; WAN024ADK; Start 44; Stop 68
ttgtataggctaaaggttttatcca

SEQ ID NO: 348025 - DNA, 25 bp, Artificial
  probe
  misc_feature (1)..(25): SEQ ID NO: 3148; WAN024ADK; Start 26; Stop 50
tgagagaggaaaatccagttgtata

SEQ ID NO: 348026 - DNA, 25 bp, Artificial
  probe
  misc_feature (1)..(25): SEQ ID NO: 3148; WAN024ADK; Start 33; Stop 57
ggaaaatccagttgtataggctaaa

SEQ ID NO: 348027 - DNA, 25 bp, Artificial
  probe
  misc_feature (1)..(25): SEQ ID NO: 3148; WAN024ADK; Start 30; Stop 54
agaggaaaatccagttgtataggct

SEQ ID NO: 348028 - DNA, 25 bp, Artificial
  probe
  misc_feature (1)..(25): SEQ ID NO: 3148; WAN024ADK; Start 56; Stop 80
aaggttttatccaaaggtctgagac

SEQ ID NO: 348029 - DNA, 25 bp, Artificial
  probe
  misc_feature (1)..(25): SEQ ID NO: 3148; WAN024ADK; Start 58; Stop 82
ggttttatccaaaggtctgagacaa

SEQ ID NO: 348030 - DNA, 25 bp, Artificial
  probe
  misc_feature (1)..(25): SEQ ID NO: 3148; WAN024ADK; Start 43; Stop 67
gttgtataggctaaaggttttatcc

SEQ ID NO: 348031 - DNA, 25 bp, Artificial
  probe
  misc_feature (1)..(25): SEQ ID NO: 3149; WAN0249IJ; Start 3; Stop 27
tcctatcttaccaaatttcccttct

SEQ ID NO: 348032 - DNA, 25 bp, Artificial
  probe
  misc_feature (1)..(25): SEQ ID NO: 3149; WAN0249IJ; Start 2; Stop 26
ttcctatcttaccaaatttcccttc

SEQ ID NO: 348033 - DNA, 25 bp, Artificial
  probe
  misc_feature (1)..(25): SEQ ID NO: 3149; WAN0249IJ; Start 4; Stop 28
cctatcttaccaaatttcccttctt

SEQ ID NO: 348034 - DNA, 25 bp, Artificial
  probe
  misc_feature (1)..(25): SEQ ID NO: 3149; WAN0249IJ; Start 1; Stop 25
attcctatcttaccaaatttccctt

SEQ ID NO: 348035 - DNA, 25 bp, Artificial
  probe
  misc_feature (1)..(25): SEQ ID NO: 3149; WAN0249IJ; Start 5; Stop 29
ctatcttaccaaatttcccttcttt

SEQ ID NO: 348036 - DNA, 25 bp, Artificial
  probe
  misc_feature (1)..(25): SEQ ID NO: 3149; WAN0249IJ; Start 6; Stop 30
tatcttaccaaatttcccttctttt

SEQ ID NO: 348037 - DNA, 25 bp, Artificial
  probe
  misc_feature (1)..(25): SEQ ID NO: 3150; WAN024ADT; Start 33; Stop 57
tcataccctttaaatattaccgttt

SEQ ID NO: 348038 - DNA, 25 bp, Artificial
  probe
  misc_feature (1)..(25): SEQ ID NO: 3150; WAN024ADT; Start 34; Stop 58
cataccctttaaatattaccgtttc

SEQ ID NO: 348039 - DNA, 25 bp, Artificial
  probe
  misc_feature (1)..(25): SEQ ID NO: 3150; WAN024ADT; Start 32; Stop 56
atcataccctttaaatattaccgtt

SEQ ID NO: 348040 - DNA, 25 bp, Artificial
  probe
  misc_feature (1)..(25): SEQ ID NO: 3150; WAN024ADT; Start 11; Stop 35
tctccttctttctatagttctatca

SEQ ID NO: 348041 - DNA, 25 bp, Artificial
  probe
  misc_feature (1)..(25): SEQ ID NO: 3150; WAN024ADT; Start 17; Stop 41
tctttctatagttctatcataccct

SEQ ID NO: 348042 - DNA, 25 bp, Artificial
  probe
  misc_feature (1)..(25): SEQ ID NO: 3150; WAN024ADT; Start 31; Stop 55
tatcataccctttaaatattaccgt

SEQ ID NO: 348043 - DNA, 25 bp, Artificial
  probe
  misc_feature (1)..(25): SEQ ID NO: 3150; WAN024ADT; Start 7; Stop 31
aaattctccttctttctatagttct

SEQ ID NO: 348044 - DNA, 25 bp, Artificial
  probe
  misc_feature (1)..(25): SEQ ID NO: 3150; WAN024ADT; Start 12; Stop 36
ctccttctttctatagttctatcat

SEQ ID NO: 348045 - DNA, 25 bp, Artificial
  probe
  misc_feature (1)..(25): SEQ ID NO: 3150; WAN024ADT; Start 30; Stop 54
ctatcataccctttaaatattaccg

SEQ ID NO: 348046 - DNA, 25 bp, Artificial
  probe
  misc_feature (1)..(25): SEQ ID NO: 3150; WAN024ADT; Start 18; Stop 42
ctttctatagttctatcataccctt

SEQ ID NO: 348047 - DNA, 25 bp, Artificial
  probe
  misc_feature (1)..(25): SEQ ID NO: 3150; WAN024ADT; Start 16; Stop 40
ttctttctatagttctatcataccc

SEQ ID NO: 348048 - DNA, 25 bp, Artificial
  probe
  misc_feature (1)..(25): SEQ ID NO: 3150; WAN024ADT; Start 10; Stop 34
ttctccttctttctatagttctatc

SEQ ID NO: 348049 - DNA, 25 bp, Artificial
  probe
  misc_feature (1)..(25): SEQ ID NO: 3150; WAN024ADT; Start 4; Stop 28
cgaaaattctccttctttctatagt

SEQ ID NO: 348050 - DNA, 25 bp, Artificial
  probe
  misc_feature (1)..(25): SEQ ID NO: 3150; WAN024ADT; Start 3; Stop 27
tcgaaaattctccttctttctatag

SEQ ID NO: 348051 - DNA, 25 bp, Artificial
  probe
  misc_feature (1)..(25): SEQ ID NO: 3150; WAN024ADT; Start 1; Stop 25
attcgaaaattctccttctttctat

SEQ ID NO: 348052 - DNA, 25 bp, Artificial
  probe
  misc_feature (1)..(25): SEQ ID NO: 3150; WAN024ADT; Start 2; Stop 26
ttcgaaaattctccttctttctata

SEQ ID NO: 348053 - DNA, 25 bp, Artificial
  probe
  misc_feature (1)..(25): SEQ ID NO: 3151; WAN024AEW; Start 106; Stop 130
aatacagtatcagttgttaagtggt

SEQ ID NO: 348054 - DNA, 25 bp, Artificial
  probe
  misc_feature (1)..(25): SEQ ID NO: 3151; WAN024AEW; Start 105; Stop 129
gaatacagtatcagttgttaagtgg

SEQ ID NO: 348055 - DNA, 25 bp, Artificial
  probe
  misc_feature (1)..(25): SEQ ID NO: 3151; WAN024AEW; Start 99; Stop 123
ttcctagaatacagtatcagttgtt

SEQ ID NO: 348056 - DNA, 25 bp, Artificial
  probe
  misc_feature (1)..(25): SEQ ID NO: 3151; WAN024AEW; Start 1; Stop 25
attctaaagtgattgccatgctgag

SEQ ID NO: 348057 - DNA, 25 bp, Artificial
  probe
  misc_feature (1)..(25): SEQ ID NO: 3151; WAN024AEW; Start 104; Stop 128
agaatacagtatcagttgttaagtg

SEQ ID NO: 348058 - DNA, 25 bp, Artificial
  probe
  misc_feature (1)..(25): SEQ ID NO: 3151; WAN024AEW; Start 11; Stop 35
gattgccatgctgagactcatttaa

SEQ ID NO: 348059 - DNA, 25 bp, Artificial
  probe
  misc_feature (1)..(25): SEQ ID NO: 3151; WAN024AEW; Start 100; Stop 124
tcctagaatacagtatcagttgtta

SEQ ID NO: 348060 - DNA, 25 bp, Artificial
  probe
  misc_feature (1)..(25): SEQ ID NO: 3151; WAN024AEW; Start 12; Stop 36
attgccatgctgagactcatttaaa

SEQ ID NO: 348061 - DNA, 25 bp, Artificial
  probe
  misc_feature (1)..(25): SEQ ID NO: 3151; WAN024AEW; Start 75; Stop 99
tttattaggaagaatgtcatcgttt

SEQ ID NO: 348062 - DNA, 25 bp, Artificial
  probe
  misc_feature (1)..(25): SEQ ID NO: 3151; WAN024AEW; Start 2; Stop 26
ttctaaagtgattgccatgctgaga

SEQ ID NO: 348063 - DNA, 25 bp, Artificial
  probe
  misc_feature (1)..(25): SEQ ID NO: 3151; WAN024AEW; Start 10; Stop 34
tgattgccatgctgagactcattta

SEQ ID NO: 348064 - DNA, 25 bp, Artificial
  probe
  misc_feature (1)..(25): SEQ ID NO: 3151; WAN024AEW; Start 98; Stop 122
tttcctagaatacagtatcagttgt

SEQ ID NO: 348065 - DNA, 25 bp, Artificial
  probe
  misc_feature (1)..(25): SEQ ID NO: 3151; WAN024AEW; Start 101; Stop 125
cctagaatacagtatcagttgttaa

SEQ ID NO: 348066 - DNA, 25 bp, Artificial
  probe
  misc_feature (1)..(25): SEQ ID NO: 3151; WAN024AEW; Start 83; Stop 107
gaagaatgtcatcgttttcctagaa

SEQ ID NO: 348067 - DNA, 25 bp, Artificial
  probe
  misc_feature (1)..(25): SEQ ID NO: 3151; WAN024AEW; Start 3; Stop 27
tctaaagtgattgccatgctgagac

SEQ ID NO: 348068 - DNA, 25 bp, Artificial
  probe
  misc_feature (1)..(25): SEQ ID NO: 3151; WAN024AEW; Start 5; Stop 29
taaagtgattgccatgctgagactc

SEQ ID NO: 348069 - DNA, 25 bp, Artificial
  probe
  misc_feature (1)..(25): SEQ ID NO: 3151; WAN024AEW; Start 4; Stop 28
ctaaagtgattgccatgctgagact

SEQ ID NO: 348070 - DNA, 25 bp, Artificial
  probe
  misc_feature (1)..(25): SEQ ID NO: 3151; WAN024AEW; Start 89; Stop 113
tgtcatcgttttcctagaatacagt

SEQ ID NO: 348071 - DNA, 25 bp, Artificial
  probe
  misc_feature (1)..(25): SEQ ID NO: 3151; WAN024AEW; Start 84; Stop 108
aagaatgtcatcgttttcctagaat

SEQ ID NO: 348072 - DNA, 25 bp, Artificial
  probe
  misc_feature (1)..(25): SEQ ID NO: 3151; WAN024AEW; Start 95; Stop 119
cgttttcctagaatacagtatcagt

SEQ ID NO: 348073 - DNA, 25 bp, Artificial
  probe
  misc_feature (1)..(25): SEQ ID NO: 3151; WAN024AEW; Start 90; Stop 114
gtcatcgttttcctagaatacagta

SEQ ID NO: 348074 - DNA, 25 bp, Artificial
  probe
  misc_feature (1)..(25): SEQ ID NO: 3151; WAN024AEW; Start 88; Stop 112
atgtcatcgttttcctagaatacag

SEQ ID NO: 348075 - DNA, 25 bp, Artificial
  probe
  misc_feature (1)..(25): SEQ ID NO: 3151; WAN024AEW; Start 94; Stop 118
tcgttttcctagaatacagtatcag

SEQ ID NO: 348076 - DNA, 25 bp, Artificial
  probe
  misc_feature (1)..(25): SEQ ID NO: 3151; WAN024AEW; Start 73; Stop 97
gttttattaggaagaatgtcatcgt

SEQ ID NO: 348077 - DNA, 25 bp, Artificial
  probe
  misc_feature (1)..(25): SEQ ID NO: 3151; WAN024AEW; Start 86; Stop 110
gaatgtcatcgttttcctagaatac

SEQ ID NO: 348078 - DNA, 25 bp, Artificial
  probe
  misc_feature (1)..(25): SEQ ID NO: 3151; WAN024AEW; Start 8; Stop 32
agtgattgccatgctgagactcatt

SEQ ID NO: 348079 - DNA, 25 bp, Artificial
  probe
  misc_feature (1)..(25): SEQ ID NO: 3151; WAN024AEW; Start 7; Stop 31
aagtgattgccatgctgagactcat

SEQ ID NO: 348080 - DNA, 25 bp, Artificial
  probe
  misc_feature (1)..(25): SEQ ID NO: 3151; WAN024AEW; Start 85; Stop 109
agaatgtcatcgttttcctagaata

SEQ ID NO: 348081 - DNA, 25 bp, Artificial
  probe
  misc_feature (1)..(25): SEQ ID NO: 3151; WAN024AEW; Start 87; Stop 111
aatgtcatcgttttcctagaataca

SEQ ID NO: 348082 - DNA, 25 bp, Artificial
  probe
  misc_feature (1)..(25): SEQ ID NO: 3151; WAN024AEW; Start 15; Stop 39
gccatgctgagactcatttaaaatt

SEQ ID NO: 348083 - DNA, 25 bp, Artificial
  probe
  misc_feature (1)..(25): SEQ ID NO: 3151; WAN024AEW; Start 103; Stop 127
tagaatacagtatcagttgttaagt

SEQ ID NO: 348084 - DNA, 25 bp, Artificial
  probe
  misc_feature (1)..(25): SEQ ID NO: 3151; WAN024AEW; Start 72; Stop 96
agttttattaggaagaatgtcatcg

SEQ ID NO: 348085 - DNA, 25 bp, Artificial
  probe
  misc_feature (1)..(25): SEQ ID NO: 3151; WAN024AEW; Start 77; Stop 101
tattaggaagaatgtcatcgttttc

SEQ ID NO: 348086 - DNA, 25 bp, Artificial
  probe
  misc_feature (1)..(25): SEQ ID NO: 3152; WAN024A98; Start 89; Stop 113
tatggttaccgaacaagtctaatca

SEQ ID NO: 348087 - DNA, 25 bp, Artificial
  probe
  misc_feature (1)..(25): SEQ ID NO: 3152; WAN024A98; Start 90; Stop 114
atggttaccgaacaagtctaatcac

SEQ ID NO: 348088 - DNA, 25 bp, Artificial
  probe
  misc_feature (1)..(25): SEQ ID NO: 3152; WAN024A98; Start 95; Stop 119
taccgaacaagtctaatcactcctt

SEQ ID NO: 348089 - DNA, 25 bp, Artificial
  probe
  misc_feature (1)..(25): SEQ ID NO: 3152; WAN024A98; Start 94; Stop 118
ttaccgaacaagtctaatcactcct

SEQ ID NO: 348090 - DNA, 25 bp, Artificial
  probe
  misc_feature (1)..(25): SEQ ID NO: 3152; WAN024A98; Start 93; Stop 117
gttaccgaacaagtctaatcactcc

SEQ ID NO: 348091 - DNA, 25 bp, Artificial
  probe
  misc_feature (1)..(25): SEQ ID NO: 3152; WAN024A98; Start 88; Stop 112
ttatggttaccgaacaagtctaatc

SEQ ID NO: 348092 - DNA, 25 bp, Artificial
  probe
  misc_feature (1)..(25): SEQ ID NO: 3152; WAN024A98; Start 92; Stop 116
ggttaccgaacaagtctaatcactc

SEQ ID NO: 348093 - DNA, 25 bp, Artificial
  probe
  misc_feature (1)..(25): SEQ ID NO: 3152; WAN024A98; Start 167; Stop 191
agttcatagttaagcaacgatagaa

SEQ ID NO: 348094 - DNA, 25 bp, Artificial
  probe
  misc_feature (1)..(25): SEQ ID NO: 3152; WAN024A98; Start 166; Stop 190
aagttcatagttaagcaacgataga

SEQ ID NO: 348095 - DNA, 25 bp, Artificial
  probe
  misc_feature (1)..(25): SEQ ID NO: 3152; WAN024A98; Start 91; Stop 115
tggttaccgaacaagtctaatcact

SEQ ID NO: 348096 - DNA, 25 bp, Artificial
  probe
  misc_feature (1)..(25): SEQ ID NO: 3152; WAN024A98; Start 168; Stop 192
gttcatagttaagcaacgatagaat

SEQ ID NO: 348097 - DNA, 25 bp, Artificial
  probe
  misc_feature (1)..(25): SEQ ID NO: 3152; WAN024A98; Start 33; Stop 57
aagttctcaggagttagttgcattg

SEQ ID NO: 348098 - DNA, 25 bp, Artificial
  probe
  misc_feature (1)..(25): SEQ ID NO: 3152; WAN024A98; Start 163; Stop 187
gcaaagttcatagttaagcaacgat

SEQ ID NO: 348099 - DNA, 25 bp, Artificial
  probe
  misc_feature (1)..(25): SEQ ID NO: 3152; WAN024A98; Start 79; Stop 103
tatgacactttatggttaccgaaca

SEQ ID NO: 348100 - DNA, 25 bp, Artificial
  probe
  misc_feature (1)..(25): SEQ ID NO: 3152; WAN024A98; Start 78; Stop 102
gtatgacactttatggttaccgaac

SEQ ID NO: 348101 - DNA, 25 bp, Artificial
  probe
  misc_feature (1)..(25): SEQ ID NO: 3152; WAN024A98; Start 80; Stop 104
atgacactttatggttaccgaacaa

SEQ ID NO: 348102 - DNA, 25 bp, Artificial
  probe
  misc_feature (1)..(25): SEQ ID NO: 3152; WAN024A98; Start 77; Stop 101
agtatgacactttatggttaccgaa

SEQ ID NO: 348103 - DNA, 25 bp, Artificial
  probe
  misc_feature (1)..(25): SEQ ID NO: 3152; WAN024A98; Start 86; Stop 110
ctttatggttaccgaacaagtctaa

SEQ ID NO: 348104 - DNA, 25 bp, Artificial
  probe
  misc_feature (1)..(25): SEQ ID NO: 3152; WAN024A98; Start 81; Stop 105
tgacactttatggttaccgaacaag

SEQ ID NO: 348105 - DNA, 25 bp, Artificial
  probe
  misc_feature (1)..(25): SEQ ID NO: 3152; WAN024A98; Start 76; Stop 100
tagtatgacactttatggttaccga

SEQ ID NO: 348106 - DNA, 25 bp, Artificial
  probe
  misc_feature (1)..(25): SEQ ID NO: 3152; WAN024A98; Start 87; Stop 111
tttatggttaccgaacaagtctaat

SEQ ID NO: 348107 - DNA, 25 bp, Artificial
  probe
  misc_feature (1)..(25): SEQ ID NO: 3152; WAN024A98; Start 75; Stop 99
atagtatgacactttatggttaccg

SEQ ID NO: 348108 - DNA, 25 bp, Artificial
  probe
  misc_feature (1)..(25): SEQ ID NO: 3152; WAN024A98; Start 36; Stop 60
ttctcaggagttagttgcattgctt

SEQ ID NO: 348109 - DNA, 25 bp, Artificial
  probe
  misc_feature (1)..(25): SEQ ID NO: 3152; WAN024A98; Start 29; Stop 53
tttaaagttctcaggagttagttgc

SEQ ID NO: 348110 - DNA, 25 bp, Artificial
  probe
  misc_feature (1)..(25): SEQ ID NO: 3152; WAN024A98; Start 164; Stop 188
caaagttcatagttaagcaacgata

SEQ ID NO: 348111 - DNA, 25 bp, Artificial
  probe
  misc_feature (1)..(25): SEQ ID NO: 3152; WAN024A98; Start 174; Stop 198
agttaagcaacgatagaataaagtg

SEQ ID NO: 348112 - DNA, 25 bp, Artificial
  probe
  misc_feature (1)..(25): SEQ ID NO: 3152; WAN024A98; Start 165; Stop 189
aaagttcatagttaagcaacgatag

SEQ ID NO: 348113 - DNA, 25 bp, Artificial
  probe
  misc_feature (1)..(25): SEQ ID NO: 3152; WAN024A98; Start 31; Stop 55
taaagttctcaggagttagttgcat

SEQ ID NO: 348114 - DNA, 25 bp, Artificial
  probe
  misc_feature (1)..(25): SEQ ID NO: 3152; WAN024A98; Start 30; Stop 54
ttaaagttctcaggagttagttgca

SEQ ID NO: 348115 - DNA, 25 bp, Artificial
  probe
  misc_feature (1)..(25): SEQ ID NO: 3152; WAN024A98; Start 32; Stop 56
aaagttctcaggagttagttgcatt

SEQ ID NO: 348116 - DNA, 25 bp, Artificial
  probe
  misc_feature (1)..(25): SEQ ID NO: 3152; WAN024A98; Start 71; Stop 95
aagcatagtatgacactttatggtt

SEQ ID NO: 348117 - DNA, 25 bp, Artificial
  probe
  misc_feature (1)..(25): SEQ ID NO: 3152; WAN024A98; Start 12; Stop 36
tcggcaccaattagtaatttaaagt

SEQ ID NO: 348118 - DNA, 25 bp, Artificial
  probe
  misc_feature (1)..(25): SEQ ID NO: 3152; WAN024A98; Start 35; Stop 59
gttctcaggagttagttgcattgct

SEQ ID NO: 348119 - DNA, 25 bp, Artificial
  probe
  misc_feature (1)..(25): SEQ ID NO: 3153; WAN0249KZ; Start 41; Stop 65
tccagaaccagaaactcctttattt

SEQ ID NO: 348120 - DNA, 25 bp, Artificial
  probe
  misc_feature (1)..(25): SEQ ID NO: 3153; WAN0249KZ; Start 40; Stop 64
atccagaaccagaaactcctttatt

SEQ ID NO: 348121 - DNA, 25 bp, Artificial
  probe
  misc_feature (1)..(25): SEQ ID NO: 3153; WAN0249KZ; Start 39; Stop 63
aatccagaaccagaaactcctttat

SEQ ID NO: 348122 - DNA, 25 bp, Artificial
  probe
  misc_feature (1)..(25): SEQ ID NO: 3153; WAN0249KZ; Start 38; Stop 62
caatccagaaccagaaactccttta

SEQ ID NO: 348123 - DNA, 25 bp, Artificial
  probe
  misc_feature (1)..(25): SEQ ID NO: 3153; WAN0249KZ; Start 34; Stop 58
tttacaatccagaaccagaaactcc

SEQ ID NO: 348124 - DNA, 25 bp, Artificial
  probe
  misc_feature (1)..(25): SEQ ID NO: 3153; WAN0249KZ; Start 36; Stop 60
tacaatccagaaccagaaactcctt

SEQ ID NO: 348125 - DNA, 25 bp, Artificial
  probe
  misc_feature (1)..(25): SEQ ID NO: 3153; WAN0249KZ; Start 35; Stop 59
ttacaatccagaaccagaaactcct

SEQ ID NO: 348126 - DNA, 25 bp, Artificial
  probe
  misc_feature (1)..(25): SEQ ID NO: 3153; WAN0249KZ; Start 37; Stop 61
acaatccagaaccagaaactccttt

SEQ ID NO: 348127 - DNA, 25 bp, Artificial
  probe
  misc_feature (1)..(25): SEQ ID NO: 3153; WAN0249KZ; Start 42; Stop 66
ccagaaccagaaactcctttatttc

SEQ ID NO: 348128 - DNA, 25 bp, Artificial
  probe
  misc_feature (1)..(25): SEQ ID NO: 3153; WAN0249KZ; Start 33; Stop 57
ttttacaatccagaaccagaaactc

SEQ ID NO: 348129 - DNA, 25 bp, Artificial
  probe
  misc_feature (1)..(25): SEQ ID NO: 3153; WAN0249KZ; Start 6; Stop 30
actccttatcaattaaaacaactca

SEQ ID NO: 348130 - DNA, 25 bp, Artificial
  probe
  misc_feature (1)..(25): SEQ ID NO: 3153; WAN0249KZ; Start 7; Stop 31
ctccttatcaattaaaacaactcat

SEQ ID NO: 348131 - DNA, 25 bp, Artificial
  probe
  misc_feature (1)..(25): SEQ ID NO: 3153; WAN0249KZ; Start 8; Stop 32
tccttatcaattaaaacaactcatt

SEQ ID NO: 348132 - DNA, 25 bp, Artificial
  probe
  misc_feature (1)..(25): SEQ ID NO: 3153; WAN0249KZ; Start 5; Stop 29
tactccttatcaattaaaacaactc

SEQ ID NO: 348133 - DNA, 25 bp, Artificial
  probe
  misc_feature (1)..(25): SEQ ID NO: 3153; WAN0249KZ; Start 4; Stop 28
ctactccttatcaattaaaacaact

SEQ ID NO: 348134 - DNA, 25 bp, Artificial
  probe
  misc_feature (1)..(25): SEQ ID NO: 3153; WAN0249KZ; Start 3; Stop 27
tctactccttatcaattaaaacaac

SEQ ID NO: 348135 - DNA, 25 bp, Artificial
  probe
  misc_feature (1)..(25): SEQ ID NO: 3154; WAN024A3G; Start 101; Stop 125
caagacagatgttctagttccttct

SEQ ID NO: 348136 - DNA, 25 bp, Artificial
  probe
  misc_feature (1)..(25): SEQ ID NO: 3154; WAN024A3G; Start 100; Stop 124
acaagacagatgttctagttccttc

SEQ ID NO: 348137 - DNA, 25 bp, Artificial
  probe
  misc_feature (1)..(25): SEQ ID NO: 3154; WAN024A3G; Start 99; Stop 123
tacaagacagatgttctagttcctt

SEQ ID NO: 348138 - DNA, 25 bp, Artificial
  probe
  misc_feature (1)..(25): SEQ ID NO: 3154; WAN024A3G; Start 98; Stop 122
gtacaagacagatgttctagttcct

SEQ ID NO: 348139 - DNA, 25 bp, Artificial
  probe
  misc_feature (1)..(25): SEQ ID NO: 3154; WAN024A3G; Start 97; Stop 121
agtacaagacagatgttctagttcc

SEQ ID NO: 348140 - DNA, 25 bp, Artificial
  probe
  misc_feature (1)..(25): SEQ ID NO: 3154; WAN024A3G; Start 85; Stop 109
agcatattgattagtacaagacaga

SEQ ID NO: 348141 - DNA, 25 bp, Artificial
  probe
  misc_feature (1)..(25): SEQ ID NO: 3154; WAN024A3G; Start 380; Stop 404
gcatagttgtataaggaatgatgaa

SEQ ID NO: 348142 - DNA, 25 bp, Artificial
  probe
  misc_feature (1)..(25): SEQ ID NO: 3154; WAN024A3G; Start 102; Stop 126
aagacagatgttctagttccttctt

SEQ ID NO: 348143 - DNA, 25 bp, Artificial
  probe
  misc_feature (1)..(25): SEQ ID NO: 3154; WAN024A3G; Start 91; Stop 115
ttgattagtacaagacagatgttct

SEQ ID NO: 348144 - DNA, 25 bp, Artificial
  probe
  misc_feature (1)..(25): SEQ ID NO: 3154; WAN024A3G; Start 103; Stop 127
agacagatgttctagttccttcttt

SEQ ID NO: 348145 - DNA, 25 bp, Artificial
  probe
  misc_feature (1)..(25): SEQ ID NO: 3154; WAN024A3G; Start 96; Stop 120
tagtacaagacagatgttctagttc

SEQ ID NO: 348146 - DNA, 25 bp, Artificial
  probe
  misc_feature (1)..(25): SEQ ID NO: 3154; WAN024A3G; Start 228; Stop 252
atagtgtaatcctagctgttgttaa

SEQ ID NO: 348147 - DNA, 25 bp, Artificial
  probe
  misc_feature (1)..(25): SEQ ID NO: 3154; WAN024A3G; Start 226; Stop 250
ttatagtgtaatcctagctgttgtt

SEQ ID NO: 348148 - DNA, 25 bp, Artificial
  probe
  misc_feature (1)..(25): SEQ ID NO: 3154; WAN024A3G; Start 111; Stop 135
gttctagttccttctttaatctggt

SEQ ID NO: 348149 - DNA, 25 bp, Artificial
  probe
  misc_feature (1)..(25): SEQ ID NO: 3154; WAN024A3G; Start 110; Stop 134
tgttctagttccttctttaatctgg

SEQ ID NO: 348150 - DNA, 25 bp, Artificial
  probe
  misc_feature (1)..(25): SEQ ID NO: 3154; WAN024A3G; Start 116; Stop 140
agttccttctttaatctggtttagt

SEQ ID NO: 348151 - DNA, 25 bp, Artificial
  probe
  misc_feature (1)..(25): SEQ ID NO: 3154; WAN024A3G; Start 379; Stop 403
tgcatagttgtataaggaatgatga

SEQ ID NO: 348152 - DNA, 25 bp, Artificial
  probe
  misc_feature (1)..(25): SEQ ID NO: 3154; WAN024A3G; Start 95; Stop 119
ttagtacaagacagatgttctagtt

SEQ ID NO: 348153 - DNA, 25 bp, Artificial
  probe
  misc_feature (1)..(25): SEQ ID NO: 3154; WAN024A3G; Start 378; Stop 402
ctgcatagttgtataaggaatgatg

SEQ ID NO: 348154 - DNA, 25 bp, Artificial
  probe
  misc_feature (1)..(25): SEQ ID NO: 3154; WAN024A3G; Start 168; Stop 192
taactaagagggagctaatcgacta

SEQ ID NO: 348155 - DNA, 25 bp, Artificial
  probe
  misc_feature (1)..(25): SEQ ID NO: 3154; WAN024A3G; Start 86; Stop 110
gcatattgattagtacaagacagat

SEQ ID NO: 348156 - DNA, 25 bp, Artificial
  probe
  misc_feature (1)..(25): SEQ ID NO: 3154; WAN024A3G; Start 377; Stop 401
actgcatagttgtataaggaatgat

SEQ ID NO: 348157 - DNA, 25 bp, Artificial
  probe
  misc_feature (1)..(25): SEQ ID NO: 3154; WAN024A3G; Start 94; Stop 118
attagtacaagacagatgttctagt

SEQ ID NO: 348158 - DNA, 25 bp, Artificial
  probe
  misc_feature (1)..(25): SEQ ID NO: 3154; WAN024A3G; Start 92; Stop 116
tgattagtacaagacagatgttcta

SEQ ID NO: 348159 - DNA, 25 bp, Artificial
  probe
  misc_feature (1)..(25): SEQ ID NO: 3154; WAN024A3G; Start 104; Stop 128
gacagatgttctagttccttcttta

SEQ ID NO: 348160 - DNA, 25 bp, Artificial
  probe
  misc_feature (1)..(25): SEQ ID NO: 3154; WAN024A3G; Start 171; Stop 195
ctaagagggagctaatcgactagat

SEQ ID NO: 348161 - DNA, 25 bp, Artificial
  probe
  misc_feature (1)..(25): SEQ ID NO: 3154; WAN024A3G; Start 164; Stop 188
cttgtaactaagagggagctaatcg

SEQ ID NO: 348162 - DNA, 25 bp, Artificial
  probe
  misc_feature (1)..(25): SEQ ID NO: 3154; WAN024A3G; Start 165; Stop 189
ttgtaactaagagggagctaatcga

SEQ ID NO: 348163 - DNA, 25 bp, Artificial
  probe
  misc_feature (1)..(25): SEQ ID NO: 3154; WAN024A3G; Start 169; Stop 193
aactaagagggagctaatcgactag

SEQ ID NO: 348164 - DNA, 25 bp, Artificial
  probe
  misc_feature (1)..(25): SEQ ID NO: 3154; WAN024A3G; Start 90; Stop 114
attgattagtacaagacagatgttc

SEQ ID NO: 348165 - DNA, 25 bp, Artificial
  probe
  misc_feature (1)..(25): SEQ ID NO: 3154; WAN024A3G; Start 113; Stop 137
tctagttccttctttaatctggttt

SEQ ID NO: 348166 - DNA, 25 bp, Artificial
  probe
  misc_feature (1)..(25): SEQ ID NO: 3154; WAN024A3G; Start 112; Stop 136
ttctagttccttctttaatctggtt

SEQ ID NO: 348167 - DNA, 25 bp, Artificial
  probe
  misc_feature (1)..(25): SEQ ID NO: 3154; WAN024A3G; Start 167; Stop 191
gtaactaagagggagctaatcgact

SEQ ID NO: 348168 - DNA, 25 bp, Artificial
  probe
  misc_feature (1)..(25): SEQ ID NO: 3155; WAN024AJP; Start 108; Stop 132
tcgcctaccagtatctgttaatcat

SEQ ID NO: 348169 - DNA, 25 bp, Artificial
  probe
  misc_feature (1)..(25): SEQ ID NO: 3155; WAN024AJP; Start 107; Stop 131
ttcgcctaccagtatctgttaatca

SEQ ID NO: 348170 - DNA, 25 bp, Artificial
  probe
  misc_feature (1)..(25): SEQ ID NO: 3155; WAN024AJP; Start 106; Stop 130
tttcgcctaccagtatctgttaatc

SEQ ID NO: 348171 - DNA, 25 bp, Artificial
  probe
  misc_feature (1)..(25): SEQ ID NO: 3155; WAN024AJP; Start 105; Stop 129
ttttcgcctaccagtatctgttaat

SEQ ID NO: 348172 - DNA, 25 bp, Artificial
  probe
  misc_feature (1)..(25): SEQ ID NO: 3155; WAN024AJP; Start 12; Stop 36
tcattgtgtagtaattgaaaatgct

SEQ ID NO: 348173 - DNA, 25 bp, Artificial
  probe
  misc_feature (1)..(25): SEQ ID NO: 3155; WAN024AJP; Start 16; Stop 40
tgtgtagtaattgaaaatgcttaca

SEQ ID NO: 348174 - DNA, 25 bp, Artificial
  probe
  misc_feature (1)..(25): SEQ ID NO: 3155; WAN024AJP; Start 18; Stop 42
tgtagtaattgaaaatgcttacagt

SEQ ID NO: 348175 - DNA, 25 bp, Artificial
  probe
  misc_feature (1)..(25): SEQ ID NO: 3155; WAN024AJP; Start 13; Stop 37
cattgtgtagtaattgaaaatgctt

SEQ ID NO: 348176 - DNA, 25 bp, Artificial
  probe
  misc_feature (1)..(25): SEQ ID NO: 3155; WAN024AJP; Start 15; Stop 39
ttgtgtagtaattgaaaatgcttac

SEQ ID NO: 348177 - DNA, 25 bp, Artificial
  probe
  misc_feature (1)..(25): SEQ ID NO: 3155; WAN024AJP; Start 17; Stop 41
gtgtagtaattgaaaatgcttacag

SEQ ID NO: 348178 - DNA, 25 bp, Artificial
  probe
  misc_feature (1)..(25): SEQ ID NO: 3155; WAN024AJP; Start 14; Stop 38
attgtgtagtaattgaaaatgctta

SEQ ID NO: 348179 - DNA, 25 bp, Artificial
  probe
  misc_feature (1)..(25): SEQ ID NO: 3155; WAN024AJP; Start 11; Stop 35
ttcattgtgtagtaattgaaaatgc

SEQ ID NO: 348180 - DNA, 25 bp, Artificial
  probe
  misc_feature (1)..(25): SEQ ID NO: 3155; WAN024AJP; Start 24; Stop 48
aattgaaaatgcttacagtactagt

SEQ ID NO: 348181 - DNA, 25 bp, Artificial
  probe
  misc_feature (1)..(25): SEQ ID NO: 3155; WAN024AJP; Start 19; Stop 43
gtagtaattgaaaatgcttacagta

SEQ ID NO: 348182 - DNA, 25 bp, Artificial
  probe
  misc_feature (1)..(25): SEQ ID NO: 3155; WAN024AJP; Start 31; Stop 55
aatgcttacagtactagtatatcaa

SEQ ID NO: 348183 - DNA, 25 bp, Artificial
  probe
  misc_feature (1)..(25): SEQ ID NO: 3155; WAN024AJP; Start 20; Stop 44
tagtaattgaaaatgcttacagtac

SEQ ID NO: 348184 - DNA, 25 bp, Artificial
  probe
  misc_feature (1)..(25): SEQ ID NO: 3155; WAN024AJP; Start 21; Stop 45
agtaattgaaaatgcttacagtact

SEQ ID NO: 348185 - DNA, 25 bp, Artificial
  probe
  misc_feature (1)..(25): SEQ ID NO: 3155; WAN024AJP; Start 60; Stop 84
cattcacttatgcaaaggtttgcgt

SEQ ID NO: 348186 - DNA, 25 bp, Artificial
  probe
  misc_feature (1)..(25): SEQ ID NO: 3155; WAN024AJP; Start 32; Stop 56
atgcttacagtactagtatatcaaa

SEQ ID NO: 348187 - DNA, 25 bp, Artificial
  probe
  misc_feature (1)..(25): SEQ ID NO: 3155; WAN024AJP; Start 30; Stop 54
aaatgcttacagtactagtatatca

SEQ ID NO: 348188 - DNA, 25 bp, Artificial
  probe
  misc_feature (1)..(25): SEQ ID NO: 3155; WAN024AJP; Start 23; Stop 47
taattgaaaatgcttacagtactag

SEQ ID NO: 348189 - DNA, 25 bp, Artificial
  probe
  misc_feature (1)..(25): SEQ ID NO: 3155; WAN024AJP; Start 26; Stop 50
ttgaaaatgcttacagtactagtat

SEQ ID NO: 348190 - DNA, 25 bp, Artificial
  probe
  misc_feature (1)..(25): SEQ ID NO: 3155; WAN024AJP; Start 25; Stop 49
attgaaaatgcttacagtactagta

SEQ ID NO: 348191 - DNA, 25 bp, Artificial
  probe
  misc_feature (1)..(25): SEQ ID NO: 3155; WAN024AJP; Start 22; Stop 46
gtaattgaaaatgcttacagtacta

SEQ ID NO: 348192 - DNA, 25 bp, Artificial
  probe
  misc_feature (1)..(25): SEQ ID NO: 3155; WAN024AJP; Start 33; Stop 57
tgcttacagtactagtatatcaaaa

SEQ ID NO: 348193 - DNA, 25 bp, Artificial
  probe
  misc_feature (1)..(25): SEQ ID NO: 3155; WAN024AJP; Start 27; Stop 51
tgaaaatgcttacagtactagtata

SEQ ID NO: 348194 - DNA, 25 bp, Artificial
  probe
  misc_feature (1)..(25): SEQ ID NO: 3156; WAN0249VI; Start 2; Stop 26
ttctctctacctttctatgaacgaa

SEQ ID NO: 348195 - DNA, 25 bp, Artificial
  probe
  misc_feature (1)..(25): SEQ ID NO: 3156; WAN0249VI; Start 3; Stop 27
tctctctacctttctatgaacgaat

SEQ ID NO: 348196 - DNA, 25 bp, Artificial
  probe
  misc_feature (1)..(25): SEQ ID NO: 3156; WAN0249VI; Start 1; Stop 25
attctctctacctttctatgaacga

SEQ ID NO: 348197 - DNA, 25 bp, Artificial
  probe
  misc_feature (1)..(25): SEQ ID NO: 3156; WAN0249VI; Start 10; Stop 34
acctttctatgaacgaatagtcttc

SEQ ID NO: 348198 - DNA, 25 bp, Artificial
  probe
  misc_feature (1)..(25): SEQ ID NO: 3156; WAN0249VI; Start 11; Stop 35
cctttctatgaacgaatagtcttct

SEQ ID NO: 348199 - DNA, 25 bp, Artificial
  probe
  misc_feature (1)..(25): SEQ ID NO: 3156; WAN0249VI; Start 4; Stop 28
ctctctacctttctatgaacgaata

SEQ ID NO: 348200 - DNA, 25 bp, Artificial
  probe
  misc_feature (1)..(25): SEQ ID NO: 3156; WAN0249VI; Start 19; Stop 43
tgaacgaatagtcttctttacaatc

SEQ ID NO: 348201 - DNA, 25 bp, Artificial
  probe
  misc_feature (1)..(25): SEQ ID NO: 3156; WAN0249VI; Start 8; Stop 32
ctacctttctatgaacgaatagtct

SEQ ID NO: 348202 - DNA, 25 bp, Artificial
  probe
  misc_feature (1)..(25): SEQ ID NO: 3156; WAN0249VI; Start 7; Stop 31
tctacctttctatgaacgaatagtc

SEQ ID NO: 348203 - DNA, 25 bp, Artificial
  probe
  misc_feature (1)..(25): SEQ ID NO: 3156; WAN0249VI; Start 6; Stop 30
ctctacctttctatgaacgaatagt

SEQ ID NO: 348204 - DNA, 25 bp, Artificial
  probe
  misc_feature (1)..(25): SEQ ID NO: 3156; WAN0249VI; Start 5; Stop 29
tctctacctttctatgaacgaatag

SEQ ID NO: 348205 - DNA, 25 bp, Artificial
  probe
  misc_feature (1)..(25): SEQ ID NO: 3156; WAN0249VI; Start 20; Stop 44
gaacgaatagtcttctttacaatct

SEQ ID NO: 348206 - DNA, 25 bp, Artificial
  probe
  misc_feature (1)..(25): SEQ ID NO: 3156; WAN0249VI; Start 9; Stop 33
tacctttctatgaacgaatagtctt

SEQ ID NO: 348207 - DNA, 25 bp, Artificial
  probe
  misc_feature (1)..(25): SEQ ID NO: 3156; WAN0249VI; Start 50; Stop 74
ctatacaaaagcaagaggtggaatt

SEQ ID NO: 348208 - DNA, 25 bp, Artificial
  probe
  misc_feature (1)..(25): SEQ ID NO: 3156; WAN0249VI; Start 49; Stop 73
tctatacaaaagcaagaggtggaat

SEQ ID NO: 348209 - DNA, 25 bp, Artificial
  probe
  misc_feature (1)..(25): SEQ ID NO: 3156; WAN0249VI; Start 18; Stop 42
atgaacgaatagtcttctttacaat

SEQ ID NO: 348210 - DNA, 25 bp, Artificial
  probe
  misc_feature (1)..(25): SEQ ID NO: 3156; WAN0249VI; Start 51; Stop 75
tatacaaaagcaagaggtggaattt

SEQ ID NO: 348211 - DNA, 25 bp, Artificial
  probe
  misc_feature (1)..(25): SEQ ID NO: 3156; WAN0249VI; Start 12; Stop 36
ctttctatgaacgaatagtcttctt

SEQ ID NO: 348212 - DNA, 25 bp, Artificial
  probe
  misc_feature (1)..(25): SEQ ID NO: 3156; WAN0249VI; Start 16; Stop 40
ctatgaacgaatagtcttctttaca

SEQ ID NO: 348213 - DNA, 25 bp, Artificial
  probe
  misc_feature (1)..(25): SEQ ID NO: 3156; WAN0249VI; Start 53; Stop 77
tacaaaagcaagaggtggaattttc

SEQ ID NO: 348214 - DNA, 25 bp, Artificial
  probe
  misc_feature (1)..(25): SEQ ID NO: 3156; WAN0249VI; Start 17; Stop 41
tatgaacgaatagtcttctttacaa

SEQ ID NO: 348215 - DNA, 25 bp, Artificial
  probe
  misc_feature (1)..(25): SEQ ID NO: 3156; WAN0249VI; Start 52; Stop 76
atacaaaagcaagaggtggaatttt

SEQ ID NO: 348216 - DNA, 25 bp, Artificial
  probe
  misc_feature (1)..(25): SEQ ID NO: 3156; WAN0249VI; Start 55; Stop 79
caaaagcaagaggtggaattttctc

SEQ ID NO: 348217 - DNA, 25 bp, Artificial
  probe
  misc_feature (1)..(25): SEQ ID NO: 3156; WAN0249VI; Start 15; Stop 39
tctatgaacgaatagtcttctttac

SEQ ID NO: 348218 - DNA, 25 bp, Artificial
  probe
  misc_feature (1)..(25): SEQ ID NO: 3156; WAN0249VI; Start 13; Stop 37
tttctatgaacgaatagtcttcttt

SEQ ID NO: 348219 - DNA, 25 bp, Artificial
  probe
  misc_feature (1)..(25): SEQ ID NO: 3156; WAN0249VI; Start 54; Stop 78
acaaaagcaagaggtggaattttct

SEQ ID NO: 348220 - DNA, 25 bp, Artificial
  probe
  misc_feature (1)..(25): SEQ ID NO: 3156; WAN0249VI; Start 75; Stop 99
ttctctcccacctccctgtttctta

SEQ ID NO: 348221 - DNA, 25 bp, Artificial
  probe
  misc_feature (1)..(25): SEQ ID NO: 3156; WAN0249VI; Start 21; Stop 45
aacgaatagtcttctttacaatcta

SEQ ID NO: 348222 - DNA, 25 bp, Artificial
  probe
  misc_feature (1)..(25): SEQ ID NO: 3156; WAN0249VI; Start 22; Stop 46
acgaatagtcttctttacaatctat

SEQ ID NO: 348223 - DNA, 25 bp, Artificial
  probe
  misc_feature (1)..(25): SEQ ID NO: 3156; WAN0249VI; Start 14; Stop 38
ttctatgaacgaatagtcttcttta

SEQ ID NO: 348224 - DNA, 25 bp, Artificial
  probe
  misc_feature (1)..(25): SEQ ID NO: 3156; WAN0249VI; Start 74; Stop 98
tttctctcccacctccctgtttctt

SEQ ID NO: 348225 - DNA, 25 bp, Artificial
  probe
  misc_feature (1)..(25): SEQ ID NO: 3156; WAN0249VI; Start 71; Stop 95
aattttctctcccacctccctgttt

SEQ ID NO: 348226 - DNA, 25 bp, Artificial
  probe
  misc_feature (1)..(25): SEQ ID NO: 3156; WAN0249VI; Start 46; Stop 70
tactctatacaaaagcaagaggtgg

SEQ ID NO: 348227 - DNA, 25 bp, Artificial
  probe
  misc_feature (1)..(25): SEQ ID NO: 3157; WAN024AIM; Start 352; Stop 376
tagaggatgttctggtgtcttattc

SEQ ID NO: 348228 - DNA, 25 bp, Artificial
  probe
  misc_feature (1)..(25): SEQ ID NO: 3157; WAN024AIM; Start 348; Stop 372
ctattagaggatgttctggtgtctt

SEQ ID NO: 348229 - DNA, 25 bp, Artificial
  probe
  misc_feature (1)..(25): SEQ ID NO: 3157; WAN024AIM; Start 351; Stop 375
ttagaggatgttctggtgtcttatt

SEQ ID NO: 348230 - DNA, 25 bp, Artificial
  probe
  misc_feature (1)..(25): SEQ ID NO: 3157; WAN024AIM; Start 353; Stop 377
agaggatgttctggtgtcttattca

SEQ ID NO: 348231 - DNA, 25 bp, Artificial
  probe
  misc_feature (1)..(25): SEQ ID NO: 3157; WAN024AIM; Start 350; Stop 374
attagaggatgttctggtgtcttat

SEQ ID NO: 348232 - DNA, 25 bp, Artificial
  probe
  misc_feature (1)..(25): SEQ ID NO: 3157; WAN024AIM; Start 349; Stop 373
tattagaggatgttctggtgtctta

SEQ ID NO: 348233 - DNA, 25 bp, Artificial
  probe
  misc_feature (1)..(25): SEQ ID NO: 3157; WAN024AIM; Start 357; Stop 381
gatgttctggtgtcttattcacttg

SEQ ID NO: 348234 - DNA, 25 bp, Artificial
  probe
  misc_feature (1)..(25): SEQ ID NO: 3157; WAN024AIM; Start 358; Stop 382
atgttctggtgtcttattcacttgt

SEQ ID NO: 348235 - DNA, 25 bp, Artificial
  probe
  misc_feature (1)..(25): SEQ ID NO: 3157; WAN024AIM; Start 359; Stop 383
tgttctggtgtcttattcacttgtt

SEQ ID NO: 348236 - DNA, 25 bp, Artificial
  probe
  misc_feature (1)..(25): SEQ ID NO: 3157; WAN024AIM; Start 356; Stop 380
ggatgttctggtgtcttattcactt

SEQ ID NO: 348237 - DNA, 25 bp, Artificial
  probe
  misc_feature (1)..(25): SEQ ID NO: 3157; WAN024AIM; Start 347; Stop 371
cctattagaggatgttctggtgtct

SEQ ID NO: 348238 - DNA, 25 bp, Artificial
  probe
  misc_feature (1)..(25): SEQ ID NO: 3157; WAN024AIM; Start 354; Stop 378
gaggatgttctggtgtcttattcac

SEQ ID NO: 348239 - DNA, 25 bp, Artificial
  probe
  misc_feature (1)..(25): SEQ ID NO: 3157; WAN024AIM; Start 355; Stop 379
aggatgttctggtgtcttattcact

SEQ ID NO: 348240 - DNA, 25 bp, Artificial
  probe
  misc_feature (1)..(25): SEQ ID NO: 3157; WAN024AIM; Start 286; Stop 310
cgtcaactaggatagtatcttgctt

SEQ ID NO: 348241 - DNA, 25 bp, Artificial
  probe
  misc_feature (1)..(25): SEQ ID NO: 3157; WAN024AIM; Start 283; Stop 307
tagcgtcaactaggatagtatcttg

SEQ ID NO: 348242 - DNA, 25 bp, Artificial
  probe
  misc_feature (1)..(25): SEQ ID NO: 3157; WAN024AIM; Start 281; Stop 305
gttagcgtcaactaggatagtatct

SEQ ID NO: 348243 - DNA, 25 bp, Artificial
  probe
  misc_feature (1)..(25): SEQ ID NO: 3157; WAN024AIM; Start 263; Stop 287
taataagtgggataggaagttagcg

SEQ ID NO: 348244 - DNA, 25 bp, Artificial
  probe
  misc_feature (1)..(25): SEQ ID NO: 3157; WAN024AIM; Start 480; Stop 504
tttagagtttaaggaaagtagggct

SEQ ID NO: 348245 - DNA, 25 bp, Artificial
  probe
  misc_feature (1)..(25): SEQ ID NO: 3157; WAN024AIM; Start 479; Stop 503
gtttagagtttaaggaaagtagggc

SEQ ID NO: 348246 - DNA, 25 bp, Artificial
  probe
  misc_feature (1)..(25): SEQ ID NO: 3157; WAN024AIM; Start 282; Stop 306
ttagcgtcaactaggatagtatctt

SEQ ID NO: 348247 - DNA, 25 bp, Artificial
  probe
  misc_feature (1)..(25): SEQ ID NO: 3157; WAN024AIM; Start 264; Stop 288
aataagtgggataggaagttagcgt

SEQ ID NO: 348248 - DNA, 25 bp, Artificial
  probe
  misc_feature (1)..(25): SEQ ID NO: 3157; WAN024AIM; Start 483; Stop 507
agagtttaaggaaagtagggctagt

SEQ ID NO: 348249 - DNA, 25 bp, Artificial
  probe
  misc_feature (1)..(25): SEQ ID NO: 3157; WAN024AIM; Start 484; Stop 508
gagtttaaggaaagtagggctagta

SEQ ID NO: 348250 - DNA, 25 bp, Artificial
  probe
  misc_feature (1)..(25): SEQ ID NO: 3157; WAN024AIM; Start 481; Stop 505
ttagagtttaaggaaagtagggcta

SEQ ID NO: 348251 - DNA, 25 bp, Artificial
  probe
  misc_feature (1)..(25): SEQ ID NO: 3157; WAN024AIM; Start 482; Stop 506
tagagtttaaggaaagtagggctag

SEQ ID NO: 348252 - DNA, 25 bp, Artificial
  probe
  misc_feature (1)..(25): SEQ ID NO: 3157; WAN024AIM; Start 265; Stop 289
ataagtgggataggaagttagcgtc

SEQ ID NO: 348253 - DNA, 25 bp, Artificial
  probe
  misc_feature (1)..(25): SEQ ID NO: 3157; WAN024AIM; Start 285; Stop 309
gcgtcaactaggatagtatcttgct

SEQ ID NO: 348254 - DNA, 25 bp, Artificial
  probe
  misc_feature (1)..(25): SEQ ID NO: 3157; WAN024AIM; Start 284; Stop 308
agcgtcaactaggatagtatcttgc

SEQ ID NO: 348255 - DNA, 25 bp, Artificial
  probe
  misc_feature (1)..(25): SEQ ID NO: 3157; WAN024AIM; Start 490; Stop 514
aaggaaagtagggctagtatattgt

SEQ ID NO: 348256 - DNA, 25 bp, Artificial
  probe
  misc_feature (1)..(25): SEQ ID NO: 3157; WAN024AIM; Start 485; Stop 509
agtttaaggaaagtagggctagtat

SEQ ID NO: 348257 - DNA, 25 bp, Artificial
  probe
  misc_feature (1)..(25): SEQ ID NO: 3157; WAN024AIM; Start 202; Stop 226
gtactagaaattgacttggattccc

SEQ ID NO: 348258 - DNA, 25 bp, Artificial
  probe
  misc_feature (1)..(25): SEQ ID NO: 3157; WAN024AIM; Start 275; Stop 299
taggaagttagcgtcaactaggata

SEQ ID NO: 348259 - DNA, 25 bp, Artificial
  probe
  misc_feature (1)..(25): SEQ ID NO: 3157; WAN024AIM; Start 278; Stop 302
gaagttagcgtcaactaggatagta

SEQ ID NO: 348260 - DNA, 25 bp, Artificial
  probe
  misc_feature (1)..(25): SEQ ID NO: 3158; WAN024AQO; Start 34; Stop 58
ttactgatattgactatctttgacc

SEQ ID NO: 348261 - DNA, 25 bp, Artificial
  probe
  misc_feature (1)..(25): SEQ ID NO: 3159; WAN0249RY; Start 228; Stop 252
aacatatatatacggtaaggcgacg

SEQ ID NO: 348262 - DNA, 25 bp, Artificial
  probe
  misc_feature (1)..(25): SEQ ID NO: 3159; WAN0249RY; Start 231; Stop 255
atatatatacggtaaggcgacgctg

SEQ ID NO: 348263 - DNA, 25 bp, Artificial
  probe
  misc_feature (1)..(25): SEQ ID NO: 3159; WAN0249RY; Start 230; Stop 254
catatatatacggtaaggcgacgct

SEQ ID NO: 348264 - DNA, 25 bp, Artificial
  probe
  misc_feature (1)..(25): SEQ ID NO: 3159; WAN0249RY; Start 229; Stop 253
acatatatatacggtaaggcgacgc

SEQ ID NO: 348265 - DNA, 25 bp, Artificial
  probe
  misc_feature (1)..(25): SEQ ID NO: 3159; WAN0249RY; Start 227; Stop 251
taacatatatatacggtaaggcgac

SEQ ID NO: 348266 - DNA, 25 bp, Artificial
  probe
  misc_feature (1)..(25): SEQ ID NO: 3159; WAN0249RY; Start 226; Stop 250
gtaacatatatatacggtaaggcga

SEQ ID NO: 348267 - DNA, 25 bp, Artificial
  probe
  misc_feature (1)..(25): SEQ ID NO: 3159; WAN0249RY; Start 225; Stop 249
agtaacatatatatacggtaaggcg

SEQ ID NO: 348268 - DNA, 25 bp, Artificial
  probe
  misc_feature (1)..(25): SEQ ID NO: 3159; WAN0249RY; Start 232; Stop 256
tatatatacggtaaggcgacgctga

SEQ ID NO: 348269 - DNA, 25 bp, Artificial
  probe
  misc_feature (1)..(25): SEQ ID NO: 3159; WAN0249RY; Start 218; Stop 242
cgaagtcagtaacatatatatacgg

SEQ ID NO: 348270 - DNA, 25 bp, Artificial
  probe
  misc_feature (1)..(25): SEQ ID NO: 3159; WAN0249RY; Start 224; Stop 248
cagtaacatatatatacggtaaggc

SEQ ID NO: 348271 - DNA, 25 bp, Artificial
  probe
  misc_feature (1)..(25): SEQ ID NO: 3159; WAN0249RY; Start 150; Stop 174
tttgaggttgtggatgaaactgacg

SEQ ID NO: 348272 - DNA, 25 bp, Artificial
  probe
  misc_feature (1)..(25): SEQ ID NO: 3159; WAN0249RY; Start 233; Stop 257
atatatacggtaaggcgacgctgac

SEQ ID NO: 348273 - DNA, 25 bp, Artificial
  probe
  misc_feature (1)..(25): SEQ ID NO: 3159; WAN0249RY; Start 153; Stop 177
gaggttgtggatgaaactgacgaag

SEQ ID NO: 348274 - DNA, 25 bp, Artificial
  probe
  misc_feature (1)..(25): SEQ ID NO: 3159; WAN0249RY; Start 149; Stop 173
ttttgaggttgtggatgaaactgac

SEQ ID NO: 348275 - DNA, 25 bp, Artificial
  probe
  misc_feature (1)..(25): SEQ ID NO: 3159; WAN0249RY; Start 217; Stop 241
acgaagtcagtaacatatatatacg

SEQ ID NO: 348276 - DNA, 25 bp, Artificial
  probe
  misc_feature (1)..(25): SEQ ID NO: 3159; WAN0249RY; Start 198; Stop 222
gaggtggcagatagaactgacgaag

SEQ ID NO: 348277 - DNA, 25 bp, Artificial
  probe
  misc_feature (1)..(25): SEQ ID NO: 3159; WAN0249RY; Start 200; Stop 224
ggtggcagatagaactgacgaagtc

SEQ ID NO: 348278 - DNA, 25 bp, Artificial
  probe
  misc_feature (1)..(25): SEQ ID NO: 3159; WAN0249RY; Start 152; Stop 176
tgaggttgtggatgaaactgacgaa

SEQ ID NO: 348279 - DNA, 25 bp, Artificial
  probe
  misc_feature (1)..(25): SEQ ID NO: 3159; WAN0249RY; Start 151; Stop 175
ttgaggttgtggatgaaactgacga

SEQ ID NO: 348280 - DNA, 25 bp, Artificial
  probe
  misc_feature (1)..(25): SEQ ID NO: 3159; WAN0249RY; Start 155; Stop 179
ggttgtggatgaaactgacgaagtc

SEQ ID NO: 348281 - DNA, 25 bp, Artificial
  probe
  misc_feature (1)..(25): SEQ ID NO: 3159; WAN0249RY; Start 144; Stop 168
cactgttttgaggttgtggatgaaa

SEQ ID NO: 348282 - DNA, 25 bp, Artificial
  probe
  misc_feature (1)..(25): SEQ ID NO: 3159; WAN0249RY; Start 219; Stop 243
gaagtcagtaacatatatatacggt

SEQ ID NO: 348283 - DNA, 25 bp, Artificial
  probe
  misc_feature (1)..(25): SEQ ID NO: 3159; WAN0249RY; Start 154; Stop 178
aggttgtggatgaaactgacgaagt

SEQ ID NO: 348284 - DNA, 25 bp, Artificial
  probe
  misc_feature (1)..(25): SEQ ID NO: 3159; WAN0249RY; Start 194; Stop 218
ttttgaggtggcagatagaactgac

SEQ ID NO: 348285 - DNA, 25 bp, Artificial
  probe
  misc_feature (1)..(25): SEQ ID NO: 3159; WAN0249RY; Start 193; Stop 217
gttttgaggtggcagatagaactga

SEQ ID NO: 348286 - DNA, 25 bp, Artificial
  probe
  misc_feature (1)..(25): SEQ ID NO: 3159; WAN0249RY; Start 146; Stop 170
ctgttttgaggttgtggatgaaact

SEQ ID NO: 348287 - DNA, 25 bp, Artificial
  probe
  misc_feature (1)..(25): SEQ ID NO: 3159; WAN0249RY; Start 195; Stop 219
tttgaggtggcagatagaactgacg

SEQ ID NO: 348288 - DNA, 25 bp, Artificial
  probe
  misc_feature (1)..(25): SEQ ID NO: 3159; WAN0249RY; Start 148; Stop 172
gttttgaggttgtggatgaaactga

SEQ ID NO: 348289 - DNA, 25 bp, Artificial
  probe
  misc_feature (1)..(25): SEQ ID NO: 3159; WAN0249RY; Start 223; Stop 247
tcagtaacatatatatacggtaagg

SEQ ID NO: 348290 - DNA, 25 bp, Artificial
  probe
  misc_feature (1)..(25): SEQ ID NO: 3159; WAN0249RY; Start 147; Stop 171
tgttttgaggttgtggatgaaactg

SEQ ID NO: 348291 - DNA, 25 bp, Artificial
  probe
  misc_feature (1)..(25): SEQ ID NO: 3159; WAN0249RY; Start 145; Stop 169
actgttttgaggttgtggatgaaac

SEQ ID NO: 348292 - DNA, 25 bp, Artificial
  probe
  misc_feature (1)..(25): SEQ ID NO: 3159; WAN0249RY; Start 13; Stop 37
ccttttcactttatacgatctacta

SEQ ID NO: 348293 - DNA, 25 bp, Artificial
  probe
  misc_feature (1)..(25): SEQ ID NO: 3159; WAN0249RY; Start 192; Stop 216
cgttttgaggtggcagatagaactg

SEQ ID NO: 348294 - DNA, 25 bp, Artificial
  probe
  misc_feature (1)..(25): SEQ ID NO: 3160; WAN024AMN; Start 182; Stop 206
ggcaggcgacttattatcattctat

SEQ ID NO: 348295 - DNA, 25 bp, Artificial
  probe
  misc_feature (1)..(25): SEQ ID NO: 3160; WAN024AMN; Start 183; Stop 207
gcaggcgacttattatcattctata

SEQ ID NO: 348296 - DNA, 25 bp, Artificial
  probe
  misc_feature (1)..(25): SEQ ID NO: 3160; WAN024AMN; Start 181; Stop 205
cggcaggcgacttattatcattcta

SEQ ID NO: 348297 - DNA, 25 bp, Artificial
  probe
  misc_feature (1)..(25): SEQ ID NO: 3160; WAN024AMN; Start 198; Stop 222
tcattctataagcactttcagtcgg

SEQ ID NO: 348298 - DNA, 25 bp, Artificial
  probe
  misc_feature (1)..(25): SEQ ID NO: 3160; WAN024AMN; Start 197; Stop 221
atcattctataagcactttcagtcg

SEQ ID NO: 348299 - DNA, 25 bp, Artificial
  probe
  misc_feature (1)..(25): SEQ ID NO: 3160; WAN024AMN; Start 199; Stop 223
cattctataagcactttcagtcggg

SEQ ID NO: 348300 - DNA, 25 bp, Artificial
  probe
  misc_feature (1)..(25): SEQ ID NO: 3160; WAN024AMN; Start 184; Stop 208
caggcgacttattatcattctataa

SEQ ID NO: 348301 - DNA, 25 bp, Artificial
  probe
  misc_feature (1)..(25): SEQ ID NO: 3160; WAN024AMN; Start 200; Stop 224
attctataagcactttcagtcgggc

SEQ ID NO: 348302 - DNA, 25 bp, Artificial
  probe
  misc_feature (1)..(25): SEQ ID NO: 3160; WAN024AMN; Start 279; Stop 303
aaatatctacatcagccgttcaaaa

SEQ ID NO: 348303 - DNA, 25 bp, Artificial
  probe
  misc_feature (1)..(25): SEQ ID NO: 3160; WAN024AMN; Start 278; Stop 302
aaaatatctacatcagccgttcaaa

SEQ ID NO: 348304 - DNA, 25 bp, Artificial
  probe
  misc_feature (1)..(25): SEQ ID NO: 3160; WAN024AMN; Start 179; Stop 203
ttcggcaggcgacttattatcattc

SEQ ID NO: 348305 - DNA, 25 bp, Artificial
  probe
  misc_feature (1)..(25): SEQ ID NO: 3160; WAN024AMN; Start 186; Stop 210
ggcgacttattatcattctataagc

SEQ ID NO: 348306 - DNA, 25 bp, Artificial
  probe
  misc_feature (1)..(25): SEQ ID NO: 3160; WAN024AMN; Start 277; Stop 301
taaaatatctacatcagccgttcaa

SEQ ID NO: 348307 - DNA, 25 bp, Artificial
  probe
  misc_feature (1)..(25): SEQ ID NO: 3160; WAN024AMN; Start 276; Stop 300
ataaaatatctacatcagccgttca

SEQ ID NO: 348308 - DNA, 25 bp, Artificial
  probe
  misc_feature (1)..(25): SEQ ID NO: 3160; WAN024AMN; Start 196; Stop 220
tatcattctataagcactttcagtc

SEQ ID NO: 348309 - DNA, 25 bp, Artificial
  probe
  misc_feature (1)..(25): SEQ ID NO: 3160; WAN024AMN; Start 187; Stop 211
gcgacttattatcattctataagca

SEQ ID NO: 348310 - DNA, 25 bp, Artificial
  probe
  misc_feature (1)..(25): SEQ ID NO: 3160; WAN024AMN; Start 180; Stop 204
tcggcaggcgacttattatcattct

SEQ ID NO: 348311 - DNA, 25 bp, Artificial
  probe
  misc_feature (1)..(25): SEQ ID NO: 3160; WAN024AMN; Start 273; Stop 297
agtataaaatatctacatcagccgt

SEQ ID NO: 348312 - DNA, 25 bp, Artificial
  probe
  misc_feature (1)..(25): SEQ ID NO: 3160; WAN024AMN; Start 195; Stop 219
ttatcattctataagcactttcagt

SEQ ID NO: 348313 - DNA, 25 bp, Artificial
  probe
  misc_feature (1)..(25): SEQ ID NO: 3160; WAN024AMN; Start 178; Stop 202
tttcggcaggcgacttattatcatt

SEQ ID NO: 348314 - DNA, 25 bp, Artificial
  probe
  misc_feature (1)..(25): SEQ ID NO: 3160; WAN024AMN; Start 274; Stop 298
gtataaaatatctacatcagccgtt

SEQ ID NO: 348315 - DNA, 25 bp, Artificial
  probe
  misc_feature (1)..(25): SEQ ID NO: 3160; WAN024AMN; Start 275; Stop 299
tataaaatatctacatcagccgttc

SEQ ID NO: 348316 - DNA, 25 bp, Artificial
  probe
  misc_feature (1)..(25): SEQ ID NO: 3160; WAN024AMN; Start 272; Stop 296
aagtataaaatatctacatcagccg

SEQ ID NO: 348317 - DNA, 25 bp, Artificial
  probe
  misc_feature (1)..(25): SEQ ID NO: 3160; WAN024AMN; Start 185; Stop 209
aggcgacttattatcattctataag

SEQ ID NO: 348318 - DNA, 25 bp, Artificial
  probe
  misc_feature (1)..(25): SEQ ID NO: 3160; WAN024AMN; Start 201; Stop 225
ttctataagcactttcagtcgggct

SEQ ID NO: 348319 - DNA, 25 bp, Artificial
  probe
  misc_feature (1)..(25): SEQ ID NO: 3160; WAN024AMN; Start 92; Stop 116
ctctgctaaattgttgaaaataagt

SEQ ID NO: 348320 - DNA, 25 bp, Artificial
  probe
  misc_feature (1)..(25): SEQ ID NO: 3160; WAN024AMN; Start 91; Stop 115
actctgctaaattgttgaaaataag

SEQ ID NO: 348321 - DNA, 25 bp, Artificial
  probe
  misc_feature (1)..(25): SEQ ID NO: 3160; WAN024AMN; Start 194; Stop 218
attatcattctataagcactttcag

SEQ ID NO: 348322 - DNA, 25 bp, Artificial
  probe
  misc_feature (1)..(25): SEQ ID NO: 3160; WAN024AMN; Start 188; Stop 212
cgacttattatcattctataagcac

SEQ ID NO: 348323 - DNA, 25 bp, Artificial
  probe
  misc_feature (1)..(25): SEQ ID NO: 3160; WAN024AMN; Start 96; Stop 120
gctaaattgttgaaaataagtatgc

SEQ ID NO: 348324 - DNA, 25 bp, Artificial
  probe
  misc_feature (1)..(25): SEQ ID NO: 3160; WAN024AMN; Start 87; Stop 111
aaatactctgctaaattgttgaaaa

SEQ ID NO: 348325 - DNA, 25 bp, Artificial
  probe
  misc_feature (1)..(25): SEQ ID NO: 3160; WAN024AMN; Start 86; Stop 110
aaaatactctgctaaattgttgaaa

SEQ ID NO: 348326 - DNA, 25 bp, Artificial
  probe
  misc_feature (1)..(25): SEQ ID NO: 3160; WAN024AMN; Start 202; Stop 226
tctataagcactttcagtcgggctg

SEQ ID NO: 348327 - DNA, 25 bp, Artificial
  probe
  misc_feature (1)..(25): SEQ ID NO: 3161; WAN0249X4; Start 5; Stop 29
acattgattattaagagtgtcacaa

SEQ ID NO: 348328 - DNA, 25 bp, Artificial
  probe
  misc_feature (1)..(25): SEQ ID NO: 3161; WAN0249X4; Start 6; Stop 30
cattgattattaagagtgtcacaat

SEQ ID NO: 348329 - DNA, 25 bp, Artificial
  probe
  misc_feature (1)..(25): SEQ ID NO: 3161; WAN0249X4; Start 4; Stop 28
gacattgattattaagagtgtcaca

SEQ ID NO: 348330 - DNA, 25 bp, Artificial
  probe
  misc_feature (1)..(25): SEQ ID NO: 3161; WAN0249X4; Start 7; Stop 31
attgattattaagagtgtcacaatt

SEQ ID NO: 348331 - DNA, 25 bp, Artificial
  probe
  misc_feature (1)..(25): SEQ ID NO: 3161; WAN0249X4; Start 1; Stop 25
attgacattgattattaagagtgtc

SEQ ID NO: 348332 - DNA, 25 bp, Artificial
  probe
  misc_feature (1)..(25): SEQ ID NO: 3161; WAN0249X4; Start 39; Stop 63
ctaaaataattacaacaagagaggt

SEQ ID NO: 348333 - DNA, 25 bp, Artificial
  probe
  misc_feature (1)..(25): SEQ ID NO: 3161; WAN0249X4; Start 38; Stop 62
actaaaataattacaacaagagagg

SEQ ID NO: 348334 - DNA, 25 bp, Artificial
  probe
  misc_feature (1)..(25): SEQ ID NO: 3162; WAN024AH4; Start 3; Stop 27
tggcctcccttcttttatatcaata

SEQ ID NO: 348335 - DNA, 25 bp, Artificial
  probe
  misc_feature (1)..(25): SEQ ID NO: 3162; WAN024AH4; Start 2; Stop 26
ttggcctcccttcttttatatcaat

SEQ ID NO: 348336 - DNA, 25 bp, Artificial
  probe
  misc_feature (1)..(25): SEQ ID NO: 3162; WAN024AH4; Start 1; Stop 25
attggcctcccttcttttatatcaa

SEQ ID NO: 348337 - DNA, 25 bp, Artificial
  probe
  misc_feature (1)..(25): SEQ ID NO: 3162; WAN024AH4; Start 5; Stop 29
gcctcccttcttttatatcaatatt

SEQ ID NO: 348338 - DNA, 25 bp, Artificial
  probe
  misc_feature (1)..(25): SEQ ID NO: 3162; WAN024AH4; Start 4; Stop 28
ggcctcccttcttttatatcaatat

SEQ ID NO: 348339 - DNA, 25 bp, Artificial
  probe
  misc_feature (1)..(25): SEQ ID NO: 3163; WAN024AIH; Start 5; Stop 29
acttctcctctctttacttgttagt

SEQ ID NO: 348340 - DNA, 25 bp, Artificial
  probe
  misc_feature (1)..(25): SEQ ID NO: 3163; WAN024AIH; Start 2; Stop 26
tttacttctcctctctttacttgtt

SEQ ID NO: 348341 - DNA, 25 bp, Artificial
  probe
  misc_feature (1)..(25): SEQ ID NO: 3163; WAN024AIH; Start 4; Stop 28
tacttctcctctctttacttgttag

SEQ ID NO: 348342 - DNA, 25 bp, Artificial
  probe
  misc_feature (1)..(25): SEQ ID NO: 3163; WAN024AIH; Start 1; Stop 25
atttacttctcctctctttacttgt

SEQ ID NO: 348343 - DNA, 25 bp, Artificial
  probe
  misc_feature (1)..(25): SEQ ID NO: 3163; WAN024AIH; Start 3; Stop 27
ttacttctcctctctttacttgtta

SEQ ID NO: 348344 - DNA, 25 bp, Artificial
  probe
  misc_feature (1)..(25): SEQ ID NO: 3163; WAN024AIH; Start 42; Stop 66
accaagaaatatcaagcaaaatcgt

SEQ ID NO: 348345 - DNA, 25 bp, Artificial
  probe
  misc_feature (1)..(25): SEQ ID NO: 3163; WAN024AIH; Start 41; Stop 65
caccaagaaatatcaagcaaaatcg

SEQ ID NO: 348346 - DNA, 25 bp, Artificial
  probe
  misc_feature (1)..(25): SEQ ID NO: 3163; WAN024AIH; Start 40; Stop 64
acaccaagaaatatcaagcaaaatc

SEQ ID NO: 348347 - DNA, 25 bp, Artificial
  probe
  misc_feature (1)..(25): SEQ ID NO: 3163; WAN024AIH; Start 38; Stop 62
aaacaccaagaaatatcaagcaaaa

SEQ ID NO: 348348 - DNA, 25 bp, Artificial
  probe
  misc_feature (1)..(25): SEQ ID NO: 3163; WAN024AIH; Start 37; Stop 61
aaaacaccaagaaatatcaagcaaa

SEQ ID NO: 348349 - DNA, 25 bp, Artificial
  probe
  misc_feature (1)..(25): SEQ ID NO: 3163; WAN024AIH; Start 6; Stop 30
cttctcctctctttacttgttagta

SEQ ID NO: 348350 - DNA, 25 bp, Artificial
  probe
  misc_feature (1)..(25): SEQ ID NO: 3163; WAN024AIH; Start 43; Stop 67
ccaagaaatatcaagcaaaatcgta

SEQ ID NO: 348351 - DNA, 25 bp, Artificial
  probe
  misc_feature (1)..(25): SEQ ID NO: 3163; WAN024AIH; Start 39; Stop 63
aacaccaagaaatatcaagcaaaat

SEQ ID NO: 348352 - DNA, 25 bp, Artificial
  probe
  misc_feature (1)..(25): SEQ ID NO: 3163; WAN024AIH; Start 50; Stop 74
atatcaagcaaaatcgtaattccac

SEQ ID NO: 348353 - DNA, 25 bp, Artificial
  probe
  misc_feature (1)..(25): SEQ ID NO: 3163; WAN024AIH; Start 36; Stop 60
taaaacaccaagaaatatcaagcaa

SEQ ID NO: 348354 - DNA, 25 bp, Artificial
  probe
  misc_feature (1)..(25): SEQ ID NO: 3163; WAN024AIH; Start 35; Stop 59
ataaaacaccaagaaatatcaagca

SEQ ID NO: 348355 - DNA, 25 bp, Artificial
  probe
  misc_feature (1)..(25): SEQ ID NO: 3163; WAN024AIH; Start 49; Stop 73
aatatcaagcaaaatcgtaattcca

SEQ ID NO: 348356 - DNA, 25 bp, Artificial
  probe
  misc_feature (1)..(25): SEQ ID NO: 3163; WAN024AIH; Start 44; Stop 68
caagaaatatcaagcaaaatcgtaa

SEQ ID NO: 348357 - DNA, 25 bp, Artificial
  probe
  misc_feature (1)..(25): SEQ ID NO: 3163; WAN024AIH; Start 48; Stop 72
aaatatcaagcaaaatcgtaattcc

SEQ ID NO: 348358 - DNA, 25 bp, Artificial
  probe
  misc_feature (1)..(25): SEQ ID NO: 3163; WAN024AIH; Start 34; Stop 58
aataaaacaccaagaaatatcaagc

SEQ ID NO: 348359 - DNA, 25 bp, Artificial
  probe
  misc_feature (1)..(25): SEQ ID NO: 3163; WAN024AIH; Start 45; Stop 69
aagaaatatcaagcaaaatcgtaat

SEQ ID NO: 348360 - DNA, 25 bp, Artificial
  probe
  misc_feature (1)..(25): SEQ ID NO: 3163; WAN024AIH; Start 46; Stop 70
agaaatatcaagcaaaatcgtaatt

SEQ ID NO: 348361 - DNA, 25 bp, Artificial
  probe
  misc_feature (1)..(25): SEQ ID NO: 3163; WAN024AIH; Start 47; Stop 71
gaaatatcaagcaaaatcgtaattc

SEQ ID NO: 348362 - DNA, 25 bp, Artificial
  probe
  misc_feature (1)..(25): SEQ ID NO: 3163; WAN024AIH; Start 7; Stop 31
ttctcctctctttacttgttagtaa

SEQ ID NO: 348363 - DNA, 25 bp, Artificial
  probe
  misc_feature (1)..(25): SEQ ID NO: 3163; WAN024AIH; Start 8; Stop 32
tctcctctctttacttgttagtaat

SEQ ID NO: 348364 - DNA, 25 bp, Artificial
  probe
  misc_feature (1)..(25): SEQ ID NO: 3163; WAN024AIH; Start 9; Stop 33
ctcctctctttacttgttagtaatt

SEQ ID NO: 348365 - DNA, 25 bp, Artificial
  probe
  misc_feature (1)..(25): SEQ ID NO: 3164; WAN024AKK; Start 20; Stop 44
agtataccacgattaggagtctgaa

SEQ ID NO: 348366 - DNA, 25 bp, Artificial
  probe
  misc_feature (1)..(25): SEQ ID NO: 3164; WAN024AKK; Start 19; Stop 43
tagtataccacgattaggagtctga

SEQ ID NO: 348367 - DNA, 25 bp, Artificial
  probe
  misc_feature (1)..(25): SEQ ID NO: 3164; WAN024AKK; Start 18; Stop 42
ctagtataccacgattaggagtctg

SEQ ID NO: 348368 - DNA, 25 bp, Artificial
  probe
  misc_feature (1)..(25): SEQ ID NO: 3164; WAN024AKK; Start 11; Stop 35
tactgacctagtataccacgattag

SEQ ID NO: 348369 - DNA, 25 bp, Artificial
  probe
  misc_feature (1)..(25): SEQ ID NO: 3164; WAN024AKK; Start 21; Stop 45
gtataccacgattaggagtctgaaa

SEQ ID NO: 348370 - DNA, 25 bp, Artificial
  probe
  misc_feature (1)..(25): SEQ ID NO: 3164; WAN024AKK; Start 17; Stop 41
cctagtataccacgattaggagtct

SEQ ID NO: 348371 - DNA, 25 bp, Artificial
  probe
  misc_feature (1)..(25): SEQ ID NO: 3164; WAN024AKK; Start 16; Stop 40
acctagtataccacgattaggagtc

SEQ ID NO: 348372 - DNA, 25 bp, Artificial
  probe
  misc_feature (1)..(25): SEQ ID NO: 3164; WAN024AKK; Start 15; Stop 39
gacctagtataccacgattaggagt

SEQ ID NO: 348373 - DNA, 25 bp, Artificial
  probe
  misc_feature (1)..(25): SEQ ID NO: 3164; WAN024AKK; Start 14; Stop 38
tgacctagtataccacgattaggag

SEQ ID NO: 348374 - DNA, 25 bp, Artificial
  probe
  misc_feature (1)..(25): SEQ ID NO: 3164; WAN024AKK; Start 13; Stop 37
ctgacctagtataccacgattagga

SEQ ID NO: 348375 - DNA, 25 bp, Artificial
  probe
  misc_feature (1)..(25): SEQ ID NO: 3164; WAN024AKK; Start 12; Stop 36
actgacctagtataccacgattagg

SEQ ID NO: 348376 - DNA, 25 bp, Artificial
  probe
  misc_feature (1)..(25): SEQ ID NO: 3164; WAN024AKK; Start 22; Stop 46
tataccacgattaggagtctgaaaa

SEQ ID NO: 348377 - DNA, 25 bp, Artificial
  probe
  misc_feature (1)..(25): SEQ ID NO: 3164; WAN024AKK; Start 105; Stop 129
aaaataaaactctcctacccagtcc

SEQ ID NO: 348378 - DNA, 25 bp, Artificial
  probe
  misc_feature (1)..(25): SEQ ID NO: 3164; WAN024AKK; Start 106; Stop 130
aaataaaactctcctacccagtcca

SEQ ID NO: 348379 - DNA, 25 bp, Artificial
  probe
  misc_feature (1)..(25): SEQ ID NO: 3164; WAN024AKK; Start 124; Stop 148
cagtccacaccaagtaggagaaatg

SEQ ID NO: 348380 - DNA, 25 bp, Artificial
  probe
  misc_feature (1)..(25): SEQ ID NO: 3164; WAN024AKK; Start 107; Stop 131
aataaaactctcctacccagtccac

SEQ ID NO: 348381 - DNA, 25 bp, Artificial
  probe
  misc_feature (1)..(25): SEQ ID NO: 3164; WAN024AKK; Start 131; Stop 155
caccaagtaggagaaatgcaaaatt

SEQ ID NO: 348382 - DNA, 25 bp, Artificial
  probe
  misc_feature (1)..(25): SEQ ID NO: 3164; WAN024AKK; Start 9; Stop 33
aatactgacctagtataccacgatt

SEQ ID NO: 348383 - DNA, 25 bp, Artificial
  probe
  misc_feature (1)..(25): SEQ ID NO: 3164; WAN024AKK; Start 128; Stop 152
ccacaccaagtaggagaaatgcaaa

SEQ ID NO: 348384 - DNA, 25 bp, Artificial
  probe
  misc_feature (1)..(25): SEQ ID NO: 3164; WAN024AKK; Start 130; Stop 154
acaccaagtaggagaaatgcaaaat

SEQ ID NO: 348385 - DNA, 25 bp, Artificial
  probe
  misc_feature (1)..(25): SEQ ID NO: 3164; WAN024AKK; Start 108; Stop 132
ataaaactctcctacccagtccaca

SEQ ID NO: 348386 - DNA, 25 bp, Artificial
  probe
  misc_feature (1)..(25): SEQ ID NO: 3164; WAN024AKK; Start 123; Stop 147
ccagtccacaccaagtaggagaaat

SEQ ID NO: 348387 - DNA, 25 bp, Artificial
  probe
  misc_feature (1)..(25): SEQ ID NO: 3164; WAN024AKK; Start 10; Stop 34
atactgacctagtataccacgatta

SEQ ID NO: 348388 - DNA, 25 bp, Artificial
  probe
  misc_feature (1)..(25): SEQ ID NO: 3164; WAN024AKK; Start 129; Stop 153
cacaccaagtaggagaaatgcaaaa

SEQ ID NO: 348389 - DNA, 25 bp, Artificial
  probe
  misc_feature (1)..(25): SEQ ID NO: 3164; WAN024AKK; Start 109; Stop 133
taaaactctcctacccagtccacac

SEQ ID NO: 348390 - DNA, 25 bp, Artificial
  probe
  misc_feature (1)..(25): SEQ ID NO: 3164; WAN024AKK; Start 125; Stop 149
agtccacaccaagtaggagaaatgc

SEQ ID NO: 348391 - DNA, 25 bp, Artificial
  probe
  misc_feature (1)..(25): SEQ ID NO: 3164; WAN024AKK; Start 8; Stop 32
aaatactgacctagtataccacgat

SEQ ID NO: 348392 - DNA, 25 bp, Artificial
  probe
  misc_feature (1)..(25): SEQ ID NO: 3164; WAN024AKK; Start 127; Stop 151
tccacaccaagtaggagaaatgcaa

SEQ ID NO: 348393 - DNA, 25 bp, Artificial
  probe
  misc_feature (1)..(25): SEQ ID NO: 3164; WAN024AKK; Start 126; Stop 150
gtccacaccaagtaggagaaatgca

SEQ ID NO: 348394 - DNA, 25 bp, Artificial
  probe
  misc_feature (1)..(25): SEQ ID NO: 3164; WAN024AKK; Start 7; Stop 31
aaaatactgacctagtataccacga

SEQ ID NO: 348395 - DNA, 25 bp, Artificial
  probe
  misc_feature (1)..(25): SEQ ID NO: 3164; WAN024AKK; Start 6; Stop 30
taaaatactgacctagtataccacg

SEQ ID NO: 348396 - DNA, 25 bp, Artificial
  probe
  misc_feature (1)..(25): SEQ ID NO: 3164; WAN024AKK; Start 5; Stop 29
ataaaatactgacctagtataccac

SEQ ID NO: 348397 - DNA, 25 bp, Artificial
  probe
  misc_feature (1)..(25): SEQ ID NO: 3165; WAN024A9Z; Start 221; Stop 245
tttcatcattgccacttatctgttt

SEQ ID NO: 348398 - DNA, 25 bp, Artificial
  probe
  misc_feature (1)..(25): SEQ ID NO: 3165; WAN024A9Z; Start 34; Stop 58
ttctttccatactaacctccatcaa

SEQ ID NO: 348399 - DNA, 25 bp, Artificial
  probe
  misc_feature (1)..(25): SEQ ID NO: 3165; WAN024A9Z; Start 33; Stop 57
tttctttccatactaacctccatca

SEQ ID NO: 348400 - DNA, 25 bp, Artificial
  probe
  misc_feature (1)..(25): SEQ ID NO: 3165; WAN024A9Z; Start 35; Stop 59
tctttccatactaacctccatcaaa

SEQ ID NO: 348401 - DNA, 25 bp, Artificial
  probe
  misc_feature (1)..(25): SEQ ID NO: 3165; WAN024A9Z; Start 194; Stop 218
caaattctaaatagcattcagccca

SEQ ID NO: 348402 - DNA, 25 bp, Artificial
  probe
  misc_feature (1)..(25): SEQ ID NO: 3165; WAN024A9Z; Start 193; Stop 217
tcaaattctaaatagcattcagccc

SEQ ID NO: 348403 - DNA, 25 bp, Artificial
  probe
  misc_feature (1)..(25): SEQ ID NO: 3165; WAN024A9Z; Start 1; Stop 25
atttcacttatctaaacaagcgacg

SEQ ID NO: 348404 - DNA, 25 bp, Artificial
  probe
  misc_feature (1)..(25): SEQ ID NO: 3165; WAN024A9Z; Start 195; Stop 219
aaattctaaatagcattcagcccaa

SEQ ID NO: 348405 - DNA, 25 bp, Artificial
  probe
  misc_feature (1)..(25): SEQ ID NO: 3165; WAN024A9Z; Start 197; Stop 221
attctaaatagcattcagcccaatt

SEQ ID NO: 348406 - DNA, 25 bp, Artificial
  probe
  misc_feature (1)..(25): SEQ ID NO: 3165; WAN024A9Z; Start 196; Stop 220
aattctaaatagcattcagcccaat

SEQ ID NO: 348407 - DNA, 25 bp, Artificial
  probe
  misc_feature (1)..(25): SEQ ID NO: 3165; WAN024A9Z; Start 192; Stop 216
ttcaaattctaaatagcattcagcc

SEQ ID NO: 348408 - DNA, 25 bp, Artificial
  probe
  misc_feature (1)..(25): SEQ ID NO: 3165; WAN024A9Z; Start 198; Stop 222
ttctaaatagcattcagcccaattt

SEQ ID NO: 348409 - DNA, 25 bp, Artificial
  probe
  misc_feature (1)..(25): SEQ ID NO: 3165; WAN024A9Z; Start 146; Stop 170
caataacgagatgcactgtaaggtg

SEQ ID NO: 348410 - DNA, 25 bp, Artificial
  probe
  misc_feature (1)..(25): SEQ ID NO: 3165; WAN024A9Z; Start 244; Stop 268
tttcagctaccacagactctctaaa

SEQ ID NO: 348411 - DNA, 25 bp, Artificial
  probe
  misc_feature (1)..(25): SEQ ID NO: 3165; WAN024A9Z; Start 147; Stop 171
aataacgagatgcactgtaaggtgt

SEQ ID NO: 348412 - DNA, 25 bp, Artificial
  probe
  misc_feature (1)..(25): SEQ ID NO: 3165; WAN024A9Z; Start 105; Stop 129
accacctcaattatagggaatttcc

SEQ ID NO: 348413 - DNA, 25 bp, Artificial
  probe
  misc_feature (1)..(25): SEQ ID NO: 3165; WAN024A9Z; Start 104; Stop 128
taccacctcaattatagggaatttc

SEQ ID NO: 348414 - DNA, 25 bp, Artificial
  probe
  misc_feature (1)..(25): SEQ ID NO: 3165; WAN024A9Z; Start 103; Stop 127
gtaccacctcaattatagggaattt

SEQ ID NO: 348415 - DNA, 25 bp, Artificial
  probe
  misc_feature (1)..(25): SEQ ID NO: 3165; WAN024A9Z; Start 224; Stop 248
catcattgccacttatctgttttca

SEQ ID NO: 348416 - DNA, 25 bp, Artificial
  probe
  misc_feature (1)..(25): SEQ ID NO: 3165; WAN024A9Z; Start 223; Stop 247
tcatcattgccacttatctgttttc

SEQ ID NO: 348417 - DNA, 25 bp, Artificial
  probe
  misc_feature (1)..(25): SEQ ID NO: 3165; WAN024A9Z; Start 2; Stop 26
tttcacttatctaaacaagcgacgc

SEQ ID NO: 348418 - DNA, 25 bp, Artificial
  probe
  misc_feature (1)..(25): SEQ ID NO: 3165; WAN024A9Z; Start 222; Stop 246
ttcatcattgccacttatctgtttt

SEQ ID NO: 348419 - DNA, 25 bp, Artificial
  probe
  misc_feature (1)..(25): SEQ ID NO: 3165; WAN024A9Z; Start 220; Stop 244
ttttcatcattgccacttatctgtt

SEQ ID NO: 348420 - DNA, 25 bp, Artificial
  probe
  misc_feature (1)..(25): SEQ ID NO: 3165; WAN024A9Z; Start 219; Stop 243
attttcatcattgccacttatctgt

SEQ ID NO: 348421 - DNA, 25 bp, Artificial
  probe
  misc_feature (1)..(25): SEQ ID NO: 3165; WAN024A9Z; Start 191; Stop 215
tttcaaattctaaatagcattcagc

SEQ ID NO: 348422 - DNA, 25 bp, Artificial
  probe
  misc_feature (1)..(25): SEQ ID NO: 3165; WAN024A9Z; Start 148; Stop 172
ataacgagatgcactgtaaggtgtg

SEQ ID NO: 348423 - DNA, 25 bp, Artificial
  probe
  misc_feature (1)..(25): SEQ ID NO: 3165; WAN024A9Z; Start 203; Stop 227
aatagcattcagcccaattttcatc

SEQ ID NO: 348424 - DNA, 25 bp, Artificial
  probe
  misc_feature (1)..(25): SEQ ID NO: 3165; WAN024A9Z; Start 26; Stop 50
ccatcgttttctttccatactaacc

SEQ ID NO: 348425 - DNA, 25 bp, Artificial
  probe
  misc_feature (1)..(25): SEQ ID NO: 3165; WAN024A9Z; Start 29; Stop 53
tcgttttctttccatactaacctcc

SEQ ID NO: 348426 - DNA, 25 bp, Artificial
  probe
  misc_feature (1)..(25): SEQ ID NO: 3165; WAN024A9Z; Start 25; Stop 49
gccatcgttttctttccatactaac

SEQ ID NO: 348427 - DNA, 25 bp, Artificial
  probe
  misc_feature (1)..(25): SEQ ID NO: 3165; WAN024A9Z; Start 36; Stop 60
ctttccatactaacctccatcaaaa

SEQ ID NO: 348428 - DNA, 25 bp, Artificial
  probe
  misc_feature (1)..(25): SEQ ID NO: 3165; WAN024A9Z; Start 30; Stop 54
cgttttctttccatactaacctcca

SEQ ID NO: 348429 - DNA, 25 bp, Artificial
  probe
  misc_feature (1)..(25): SEQ ID NO: 3165; WAN024A9Z; Start 27; Stop 51
catcgttttctttccatactaacct

SEQ ID NO: 348430 - DNA, 25 bp, Artificial
  probe
  misc_feature (1)..(25): SEQ ID NO: 3167; WAN0249DO; Start 3; Stop 27
ttcctccttgtaaacaaattagact

SEQ ID NO: 348431 - DNA, 25 bp, Artificial
  probe
  misc_feature (1)..(25): SEQ ID NO: 3167; WAN0249DO; Start 2; Stop 26
tttcctccttgtaaacaaattagac

SEQ ID NO: 348432 - DNA, 25 bp, Artificial
  probe
  misc_feature (1)..(25): SEQ ID NO: 3167; WAN0249DO; Start 4; Stop 28
tcctccttgtaaacaaattagacta

SEQ ID NO: 348433 - DNA, 25 bp, Artificial
  probe
  misc_feature (1)..(25): SEQ ID NO: 3167; WAN0249DO; Start 125; Stop 149
actaagtttaaagaatggaaagcaa

SEQ ID NO: 348434 - DNA, 25 bp, Artificial
  probe
  misc_feature (1)..(25): SEQ ID NO: 3167; WAN0249DO; Start 124; Stop 148
aactaagtttaaagaatggaaagca

SEQ ID NO: 348435 - DNA, 25 bp, Artificial
  probe
  misc_feature (1)..(25): SEQ ID NO: 3167; WAN0249DO; Start 5; Stop 29
cctccttgtaaacaaattagactat

SEQ ID NO: 348436 - DNA, 25 bp, Artificial
  probe
  misc_feature (1)..(25): SEQ ID NO: 3167; WAN0249DO; Start 1; Stop 25
atttcctccttgtaaacaaattaga

SEQ ID NO: 348437 - DNA, 25 bp, Artificial
  probe
  misc_feature (1)..(25): SEQ ID NO: 3167; WAN0249DO; Start 128; Stop 152
aagtttaaagaatggaaagcaattt

SEQ ID NO: 348438 - DNA, 25 bp, Artificial
  probe
  misc_feature (1)..(25): SEQ ID NO: 3167; WAN0249DO; Start 126; Stop 150
ctaagtttaaagaatggaaagcaat

SEQ ID NO: 348439 - DNA, 25 bp, Artificial
  probe
  misc_feature (1)..(25): SEQ ID NO: 3167; WAN0249DO; Start 127; Stop 151
taagtttaaagaatggaaagcaatt

SEQ ID NO: 348440 - DNA, 25 bp, Artificial
  probe
  misc_feature (1)..(25): SEQ ID NO: 3167; WAN0249DO; Start 119; Stop 143
ggagaaactaagtttaaagaatgga

SEQ ID NO: 348441 - DNA, 25 bp, Artificial
  probe
  misc_feature (1)..(25): SEQ ID NO: 3167; WAN0249DO; Start 118; Stop 142
aggagaaactaagtttaaagaatgg

SEQ ID NO: 348442 - DNA, 25 bp, Artificial
  probe
  misc_feature (1)..(25): SEQ ID NO: 3167; WAN0249DO; Start 129; Stop 153
agtttaaagaatggaaagcaattta

SEQ ID NO: 348443 - DNA, 25 bp, Artificial
  probe
  misc_feature (1)..(25): SEQ ID NO: 3167; WAN0249DO; Start 123; Stop 147
aaactaagtttaaagaatggaaagc

SEQ ID NO: 348444 - DNA, 25 bp, Artificial
  probe
  misc_feature (1)..(25): SEQ ID NO: 3167; WAN0249DO; Start 120; Stop 144
gagaaactaagtttaaagaatggaa

SEQ ID NO: 348445 - DNA, 25 bp, Artificial
  probe
  misc_feature (1)..(25): SEQ ID NO: 3167; WAN0249DO; Start 117; Stop 141
aaggagaaactaagtttaaagaatg

SEQ ID NO: 348446 - DNA, 25 bp, Artificial
  probe
  misc_feature (1)..(25): SEQ ID NO: 3167; WAN0249DO; Start 130; Stop 154
gtttaaagaatggaaagcaatttaa

SEQ ID NO: 348447 - DNA, 25 bp, Artificial
  probe
  misc_feature (1)..(25): SEQ ID NO: 3167; WAN0249DO; Start 121; Stop 145
agaaactaagtttaaagaatggaaa

SEQ ID NO: 348448 - DNA, 25 bp, Artificial
  probe
  misc_feature (1)..(25): SEQ ID NO: 3167; WAN0249DO; Start 115; Stop 139
aaaaggagaaactaagtttaaagaa

SEQ ID NO: 348449 - DNA, 25 bp, Artificial
  probe
  misc_feature (1)..(25): SEQ ID NO: 3168; WAN024ASQ; Start 52; Stop 76
ggataaagtgctaaccctctaacta

SEQ ID NO: 348450 - DNA, 25 bp, Artificial
  probe
  misc_feature (1)..(25): SEQ ID NO: 3168; WAN024ASQ; Start 55; Stop 79
taaagtgctaaccctctaactaagg

SEQ ID NO: 348451 - DNA, 25 bp, Artificial
  probe
  misc_feature (1)..(25): SEQ ID NO: 3168; WAN024ASQ; Start 54; Stop 78
ataaagtgctaaccctctaactaag

SEQ ID NO: 348452 - DNA, 25 bp, Artificial
  probe
  misc_feature (1)..(25): SEQ ID NO: 3168; WAN024ASQ; Start 53; Stop 77
gataaagtgctaaccctctaactaa

SEQ ID NO: 348453 - DNA, 25 bp, Artificial
  probe
  misc_feature (1)..(25): SEQ ID NO: 3168; WAN024ASQ; Start 6; Stop 30
tcattctccgttttcatttcaatcc

SEQ ID NO: 348454 - DNA, 25 bp, Artificial
  probe
  misc_feature (1)..(25): SEQ ID NO: 3168; WAN024ASQ; Start 11; Stop 35
ctccgttttcatttcaatccctaat

SEQ ID NO: 348455 - DNA, 25 bp, Artificial
  probe
  misc_feature (1)..(25): SEQ ID NO: 3168; WAN024ASQ; Start 10; Stop 34
tctccgttttcatttcaatccctaa

SEQ ID NO: 348456 - DNA, 25 bp, Artificial
  probe
  misc_feature (1)..(25): SEQ ID NO: 3168; WAN024ASQ; Start 9; Stop 33
ttctccgttttcatttcaatcccta

SEQ ID NO: 348457 - DNA, 25 bp, Artificial
  probe
  misc_feature (1)..(25): SEQ ID NO: 3168; WAN024ASQ; Start 3; Stop 27
ttctcattctccgttttcatttcaa

SEQ ID NO: 348458 - DNA, 25 bp, Artificial
  probe
  misc_feature (1)..(25): SEQ ID NO: 3168; WAN024ASQ; Start 2; Stop 26
tttctcattctccgttttcatttca

SEQ ID NO: 348459 - DNA, 25 bp, Artificial
  probe
  misc_feature (1)..(25): SEQ ID NO: 3168; WAN024ASQ; Start 4; Stop 28
tctcattctccgttttcatttcaat

SEQ ID NO: 348460 - DNA, 25 bp, Artificial
  probe
  misc_feature (1)..(25): SEQ ID NO: 3168; WAN024ASQ; Start 8; Stop 32
attctccgttttcatttcaatccct

SEQ ID NO: 348461 - DNA, 25 bp, Artificial
  probe
  misc_feature (1)..(25): SEQ ID NO: 3168; WAN024ASQ; Start 7; Stop 31
cattctccgttttcatttcaatccc

SEQ ID NO: 348462 - DNA, 25 bp, Artificial
  probe
  misc_feature (1)..(25): SEQ ID NO: 3168; WAN024ASQ; Start 5; Stop 29
ctcattctccgttttcatttcaatc

SEQ ID NO: 348463 - DNA, 25 bp, Artificial
  probe
  misc_feature (1)..(25): SEQ ID NO: 3168; WAN024ASQ; Start 12; Stop 36
tccgttttcatttcaatccctaata

SEQ ID NO: 348464 - DNA, 25 bp, Artificial
  probe
  misc_feature (1)..(25): SEQ ID NO: 3168; WAN024ASQ; Start 1; Stop 25
atttctcattctccgttttcatttc

SEQ ID NO: 348465 - DNA, 25 bp, Artificial
  probe
  misc_feature (1)..(25): SEQ ID NO: 3168; WAN024ASQ; Start 51; Stop 75
gggataaagtgctaaccctctaact

SEQ ID NO: 348466 - DNA, 25 bp, Artificial
  probe
  misc_feature (1)..(25): SEQ ID NO: 3168; WAN024ASQ; Start 13; Stop 37
ccgttttcatttcaatccctaatat

SEQ ID NO: 348467 - DNA, 25 bp, Artificial
  probe
  misc_feature (1)..(25): SEQ ID NO: 3168; WAN024ASQ; Start 14; Stop 38
cgttttcatttcaatccctaatatt

SEQ ID NO: 348468 - DNA, 25 bp, Artificial
  probe
  misc_feature (1)..(25): SEQ ID NO: 3169; WAN024A5C; Start 33; Stop 57
ctatatcttgtgtgtaatggacgca

SEQ ID NO: 348469 - DNA, 25 bp, Artificial
  probe
  misc_feature (1)..(25): SEQ ID NO: 3169; WAN024A5C; Start 32; Stop 56
actatatcttgtgtgtaatggacgc

SEQ ID NO: 348470 - DNA, 25 bp, Artificial
  probe
  misc_feature (1)..(25): SEQ ID NO: 3169; WAN024A5C; Start 31; Stop 55
aactatatcttgtgtgtaatggacg

SEQ ID NO: 348471 - DNA, 25 bp, Artificial
  probe
  misc_feature (1)..(25): SEQ ID NO: 3169; WAN024A5C; Start 34; Stop 58
tatatcttgtgtgtaatggacgcac

SEQ ID NO: 348472 - DNA, 25 bp, Artificial
  probe
  misc_feature (1)..(25): SEQ ID NO: 3169; WAN024A5C; Start 82; Stop 106
gaagattcctcaagattgacaaaga

SEQ ID NO: 348473 - DNA, 25 bp, Artificial
  probe
  misc_feature (1)..(25): SEQ ID NO: 3169; WAN024A5C; Start 89; Stop 113
cctcaagattgacaaagataggaga

SEQ ID NO: 348474 - DNA, 25 bp, Artificial
  probe
  misc_feature (1)..(25): SEQ ID NO: 3169; WAN024A5C; Start 61; Stop 85
aaatacagtttatccgctgaggaag

SEQ ID NO: 348475 - DNA, 25 bp, Artificial
  probe
  misc_feature (1)..(25): SEQ ID NO: 3169; WAN024A5C; Start 83; Stop 107
aagattcctcaagattgacaaagat

SEQ ID NO: 348476 - DNA, 25 bp, Artificial
  probe
  misc_feature (1)..(25): SEQ ID NO: 3169; WAN024A5C; Start 90; Stop 114
ctcaagattgacaaagataggagaa

SEQ ID NO: 348477 - DNA, 25 bp, Artificial
  probe
  misc_feature (1)..(25): SEQ ID NO: 3169; WAN024A5C; Start 63; Stop 87
atacagtttatccgctgaggaagat

SEQ ID NO: 348478 - DNA, 25 bp, Artificial
  probe
  misc_feature (1)..(25): SEQ ID NO: 3169; WAN024A5C; Start 64; Stop 88
tacagtttatccgctgaggaagatt

SEQ ID NO: 348479 - DNA, 25 bp, Artificial
  probe
  misc_feature (1)..(25): SEQ ID NO: 3169; WAN024A5C; Start 62; Stop 86
aatacagtttatccgctgaggaaga

SEQ ID NO: 348480 - DNA, 25 bp, Artificial
  probe
  misc_feature (1)..(25): SEQ ID NO: 3169; WAN024A5C; Start 86; Stop 110
attcctcaagattgacaaagatagg

SEQ ID NO: 348481 - DNA, 25 bp, Artificial
  probe
  misc_feature (1)..(25): SEQ ID NO: 3169; WAN024A5C; Start 81; Stop 105
ggaagattcctcaagattgacaaag

SEQ ID NO: 348482 - DNA, 25 bp, Artificial
  probe
  misc_feature (1)..(25): SEQ ID NO: 3169; WAN024A5C; Start 91; Stop 115
tcaagattgacaaagataggagaat

SEQ ID NO: 348483 - DNA, 25 bp, Artificial
  probe
  misc_feature (1)..(25): SEQ ID NO: 3169; WAN024A5C; Start 84; Stop 108
agattcctcaagattgacaaagata

SEQ ID NO: 348484 - DNA, 25 bp, Artificial
  probe
  misc_feature (1)..(25): SEQ ID NO: 3169; WAN024A5C; Start 30; Stop 54
aaactatatcttgtgtgtaatggac

SEQ ID NO: 348485 - DNA, 25 bp, Artificial
  probe
  misc_feature (1)..(25): SEQ ID NO: 3169; WAN024A5C; Start 85; Stop 109
gattcctcaagattgacaaagatag

SEQ ID NO: 348486 - DNA, 25 bp, Artificial
  probe
  misc_feature (1)..(25): SEQ ID NO: 3169; WAN024A5C; Start 65; Stop 89
acagtttatccgctgaggaagattc

SEQ ID NO: 348487 - DNA, 25 bp, Artificial
  probe
  misc_feature (1)..(25): SEQ ID NO: 3169; WAN024A5C; Start 23; Stop 47
atttggtaaactatatcttgtgtgt

SEQ ID NO: 348488 - DNA, 25 bp, Artificial
  probe
  misc_feature (1)..(25): SEQ ID NO: 3169; WAN024A5C; Start 92; Stop 116
caagattgacaaagataggagaata

SEQ ID NO: 348489 - DNA, 25 bp, Artificial
  probe
  misc_feature (1)..(25): SEQ ID NO: 3169; WAN024A5C; Start 25; Stop 49
ttggtaaactatatcttgtgtgtaa

SEQ ID NO: 348490 - DNA, 25 bp, Artificial
  probe
  misc_feature (1)..(25): SEQ ID NO: 3169; WAN024A5C; Start 24; Stop 48
tttggtaaactatatcttgtgtgta

SEQ ID NO: 348491 - DNA, 25 bp, Artificial
  probe
  misc_feature (1)..(25): SEQ ID NO: 3169; WAN024A5C; Start 60; Stop 84
aaaatacagtttatccgctgaggaa

SEQ ID NO: 348492 - DNA, 25 bp, Artificial
  probe
  misc_feature (1)..(25): SEQ ID NO: 3169; WAN024A5C; Start 26; Stop 50
tggtaaactatatcttgtgtgtaat

SEQ ID NO: 348493 - DNA, 25 bp, Artificial
  probe
  misc_feature (1)..(25): SEQ ID NO: 3169; WAN024A5C; Start 94; Stop 118
agattgacaaagataggagaataaa

SEQ ID NO: 348494 - DNA, 25 bp, Artificial
  probe
  misc_feature (1)..(25): SEQ ID NO: 3169; WAN024A5C; Start 93; Stop 117
aagattgacaaagataggagaataa

SEQ ID NO: 348495 - DNA, 25 bp, Artificial
  probe
  misc_feature (1)..(25): SEQ ID NO: 3169; WAN024A5C; Start 66; Stop 90
cagtttatccgctgaggaagattcc

SEQ ID NO: 348496 - DNA, 25 bp, Artificial
  probe
  misc_feature (1)..(25): SEQ ID NO: 3169; WAN024A5C; Start 28; Stop 52
gtaaactatatcttgtgtgtaatgg

SEQ ID NO: 348497 - DNA, 25 bp, Artificial
  probe
  misc_feature (1)..(25): SEQ ID NO: 3169; WAN024A5C; Start 27; Stop 51
ggtaaactatatcttgtgtgtaatg

SEQ ID NO: 348498 - DNA, 25 bp, Artificial
  probe
  misc_feature (1)..(25): SEQ ID NO: 3169; WAN024A5C; Start 22; Stop 46
aatttggtaaactatatcttgtgtg

SEQ ID NO: 348499 - DNA, 25 bp, Artificial
  probe
  misc_feature (1)..(25): SEQ ID NO: 3169; WAN024A5C; Start 29; Stop 53
taaactatatcttgtgtgtaatgga

SEQ ID NO: 348500 - DNA, 25 bp, Artificial
  probe
  misc_feature (1)..(25): SEQ ID NO: 3169; WAN024A5C; Start 88; Stop 112
tcctcaagattgacaaagataggag

SEQ ID NO: 348501 - DNA, 25 bp, Artificial
  probe
  misc_feature (1)..(25): SEQ ID NO: 3170; WAN024AKX; Start 49; Stop 73
caagaatagtggataggaatggcta

SEQ ID NO: 348502 - DNA, 25 bp, Artificial
  probe
  misc_feature (1)..(25): SEQ ID NO: 3170; WAN024AKX; Start 48; Stop 72
tcaagaatagtggataggaatggct

SEQ ID NO: 348503 - DNA, 25 bp, Artificial
  probe
  misc_feature (1)..(25): SEQ ID NO: 3170; WAN024AKX; Start 47; Stop 71
ttcaagaatagtggataggaatggc

SEQ ID NO: 348504 - DNA, 25 bp, Artificial
  probe
  misc_feature (1)..(25): SEQ ID NO: 3170; WAN024AKX; Start 50; Stop 74
aagaatagtggataggaatggctat

SEQ ID NO: 348505 - DNA, 25 bp, Artificial
  probe
  misc_feature (1)..(25): SEQ ID NO: 3170; WAN024AKX; Start 87; Stop 111
aataaatccgaaagcagtggtgaaa

SEQ ID NO: 348506 - DNA, 25 bp, Artificial
  probe
  misc_feature (1)..(25): SEQ ID NO: 3170; WAN024AKX; Start 86; Stop 110
aaataaatccgaaagcagtggtgaa

SEQ ID NO: 348507 - DNA, 25 bp, Artificial
  probe
  misc_feature (1)..(25): SEQ ID NO: 3170; WAN024AKX; Start 46; Stop 70
attcaagaatagtggataggaatgg

SEQ ID NO: 348508 - DNA, 25 bp, Artificial
  probe
  misc_feature (1)..(25): SEQ ID NO: 3170; WAN024AKX; Start 56; Stop 80
agtggataggaatggctatttaaca

SEQ ID NO: 348509 - DNA, 25 bp, Artificial
  probe
  misc_feature (1)..(25): SEQ ID NO: 3170; WAN024AKX; Start 57; Stop 81
gtggataggaatggctatttaacaa

SEQ ID NO: 348510 - DNA, 25 bp, Artificial
  probe
  misc_feature (1)..(25): SEQ ID NO: 3170; WAN024AKX; Start 58; Stop 82
tggataggaatggctatttaacaat

SEQ ID NO: 348511 - DNA, 25 bp, Artificial
  probe
  misc_feature (1)..(25): SEQ ID NO: 3170; WAN024AKX; Start 55; Stop 79
tagtggataggaatggctatttaac

SEQ ID NO: 348512 - DNA, 25 bp, Artificial
  probe
  misc_feature (1)..(25): SEQ ID NO: 3170; WAN024AKX; Start 51; Stop 75
agaatagtggataggaatggctatt

SEQ ID NO: 348513 - DNA, 25 bp, Artificial
  probe
  misc_feature (1)..(25): SEQ ID NO: 3170; WAN024AKX; Start 27; Stop 51
gattgcatcttgtgtttctattcaa

SEQ ID NO: 348514 - DNA, 25 bp, Artificial
  probe
  misc_feature (1)..(25): SEQ ID NO: 3170; WAN024AKX; Start 59; Stop 83
ggataggaatggctatttaacaatt

SEQ ID NO: 348515 - DNA, 25 bp, Artificial
  probe
  misc_feature (1)..(25): SEQ ID NO: 3170; WAN024AKX; Start 82; Stop 106
ttcaaaataaatccgaaagcagtgg

SEQ ID NO: 348516 - DNA, 25 bp, Artificial
  probe
  misc_feature (1)..(25): SEQ ID NO: 3170; WAN024AKX; Start 54; Stop 78
atagtggataggaatggctatttaa

SEQ ID NO: 348517 - DNA, 25 bp, Artificial
  probe
  misc_feature (1)..(25): SEQ ID NO: 3170; WAN024AKX; Start 89; Stop 113
taaatccgaaagcagtggtgaaaat

SEQ ID NO: 348518 - DNA, 25 bp, Artificial
  probe
  misc_feature (1)..(25): SEQ ID NO: 3170; WAN024AKX; Start 88; Stop 112
ataaatccgaaagcagtggtgaaaa

SEQ ID NO: 348519 - DNA, 25 bp, Artificial
  probe
  misc_feature (1)..(25): SEQ ID NO: 3170; WAN024AKX; Start 85; Stop 109
aaaataaatccgaaagcagtggtga

SEQ ID NO: 348520 - DNA, 25 bp, Artificial
  probe
  misc_feature (1)..(25): SEQ ID NO: 3170; WAN024AKX; Start 84; Stop 108
caaaataaatccgaaagcagtggtg

SEQ ID NO: 348521 - DNA, 25 bp, Artificial
  probe
  misc_feature (1)..(25): SEQ ID NO: 3170; WAN024AKX; Start 83; Stop 107
tcaaaataaatccgaaagcagtggt

SEQ ID NO: 348522 - DNA, 25 bp, Artificial
  probe
  misc_feature (1)..(25): SEQ ID NO: 3170; WAN024AKX; Start 81; Stop 105
attcaaaataaatccgaaagcagtg

SEQ ID NO: 348523 - DNA, 25 bp, Artificial
  probe
  misc_feature (1)..(25): SEQ ID NO: 3170; WAN024AKX; Start 63; Stop 87
aggaatggctatttaacaattcaaa

SEQ ID NO: 348524 - DNA, 25 bp, Artificial
  probe
  misc_feature (1)..(25): SEQ ID NO: 3170; WAN024AKX; Start 78; Stop 102
acaattcaaaataaatccgaaagca

SEQ ID NO: 348525 - DNA, 25 bp, Artificial
  probe
  misc_feature (1)..(25): SEQ ID NO: 3170; WAN024AKX; Start 80; Stop 104
aattcaaaataaatccgaaagcagt

SEQ ID NO: 348526 - DNA, 25 bp, Artificial
  probe
  misc_feature (1)..(25): SEQ ID NO: 3170; WAN024AKX; Start 26; Stop 50
agattgcatcttgtgtttctattca

SEQ ID NO: 348527 - DNA, 25 bp, Artificial
  probe
  misc_feature (1)..(25): SEQ ID NO: 3170; WAN024AKX; Start 79; Stop 103
caattcaaaataaatccgaaagcag

SEQ ID NO: 348528 - DNA, 25 bp, Artificial
  probe
  misc_feature (1)..(25): SEQ ID NO: 3170; WAN024AKX; Start 90; Stop 114
aaatccgaaagcagtggtgaaaatc

SEQ ID NO: 348529 - DNA, 25 bp, Artificial
  probe
  misc_feature (1)..(25): SEQ ID NO: 3170; WAN024AKX; Start 45; Stop 69
tattcaagaatagtggataggaatg

SEQ ID NO: 348530 - DNA, 25 bp, Artificial
  probe
  misc_feature (1)..(25): SEQ ID NO: 3170; WAN024AKX; Start 77; Stop 101
aacaattcaaaataaatccgaaagc

SEQ ID NO: 348531 - DNA, 25 bp, Artificial
  probe
  misc_feature (1)..(25): SEQ ID NO: 3170; WAN024AKX; Start 62; Stop 86
taggaatggctatttaacaattcaa

SEQ ID NO: 348532 - DNA, 25 bp, Artificial
  probe
  misc_feature (1)..(25): SEQ ID NO: 3170; WAN024AKX; Start 52; Stop 76
gaatagtggataggaatggctattt

SEQ ID NO: 348533 - DNA, 25 bp, Artificial
  probe
  misc_feature (1)..(25): SEQ ID NO: 3170; WAN024AKX; Start 61; Stop 85
ataggaatggctatttaacaattca

SEQ ID NO: 348534 - DNA, 25 bp, Artificial
  probe
  misc_feature (1)..(25): SEQ ID NO: 3171; WAN0249DG; Start 4; Stop 28
tgcctccatatgtttgaattactga

SEQ ID NO: 348535 - DNA, 25 bp, Artificial
  probe
  misc_feature (1)..(25): SEQ ID NO: 3171; WAN0249DG; Start 3; Stop 27
ttgcctccatatgtttgaattactg

SEQ ID NO: 348536 - DNA, 25 bp, Artificial
  probe
  misc_feature (1)..(25): SEQ ID NO: 3171; WAN0249DG; Start 5; Stop 29
gcctccatatgtttgaattactgaa

SEQ ID NO: 348537 - DNA, 25 bp, Artificial
  probe
  misc_feature (1)..(25): SEQ ID NO: 3171; WAN0249DG; Start 2; Stop 26
tttgcctccatatgtttgaattact

SEQ ID NO: 348538 - DNA, 25 bp, Artificial
  probe
  misc_feature (1)..(25): SEQ ID NO: 3171; WAN0249DG; Start 24; Stop 48
actgaaagtataaactgactagctt

SEQ ID NO: 348539 - DNA, 25 bp, Artificial
  probe
  misc_feature (1)..(25): SEQ ID NO: 3171; WAN0249DG; Start 1; Stop 25
atttgcctccatatgtttgaattac

SEQ ID NO: 348540 - DNA, 25 bp, Artificial
  probe
  misc_feature (1)..(25): SEQ ID NO: 3171; WAN0249DG; Start 83; Stop 107
tgtggataactcttttgaaattgtg

SEQ ID NO: 348541 - DNA, 25 bp, Artificial
  probe
  misc_feature (1)..(25): SEQ ID NO: 3171; WAN0249DG; Start 84; Stop 108
gtggataactcttttgaaattgtga

SEQ ID NO: 348542 - DNA, 25 bp, Artificial
  probe
  misc_feature (1)..(25): SEQ ID NO: 3171; WAN0249DG; Start 82; Stop 106
ctgtggataactcttttgaaattgt

SEQ ID NO: 348543 - DNA, 25 bp, Artificial
  probe
  misc_feature (1)..(25): SEQ ID NO: 3171; WAN0249DG; Start 81; Stop 105
actgtggataactcttttgaaattg

SEQ ID NO: 348544 - DNA, 25 bp, Artificial
  probe
  misc_feature (1)..(25): SEQ ID NO: 3171; WAN0249DG; Start 6; Stop 30
cctccatatgtttgaattactgaaa

SEQ ID NO: 348545 - DNA, 25 bp, Artificial
  probe
  misc_feature (1)..(25): SEQ ID NO: 3171; WAN0249DG; Start 79; Stop 103
aaactgtggataactcttttgaaat

SEQ ID NO: 348546 - DNA, 25 bp, Artificial
  probe
  misc_feature (1)..(25): SEQ ID NO: 3171; WAN0249DG; Start 80; Stop 104
aactgtggataactcttttgaaatt

SEQ ID NO: 348547 - DNA, 25 bp, Artificial
  probe
  misc_feature (1)..(25): SEQ ID NO: 3171; WAN0249DG; Start 85; Stop 109
tggataactcttttgaaattgtgat

SEQ ID NO: 348548 - DNA, 25 bp, Artificial
  probe
  misc_feature (1)..(25): SEQ ID NO: 3171; WAN0249DG; Start 22; Stop 46
ttactgaaagtataaactgactagc

SEQ ID NO: 348549 - DNA, 25 bp, Artificial
  probe
  misc_feature (1)..(25): SEQ ID NO: 3171; WAN0249DG; Start 23; Stop 47
tactgaaagtataaactgactagct

SEQ ID NO: 348550 - DNA, 25 bp, Artificial
  probe
  misc_feature (1)..(25): SEQ ID NO: 3171; WAN0249DG; Start 25; Stop 49
ctgaaagtataaactgactagctta

SEQ ID NO: 348551 - DNA, 25 bp, Artificial
  probe
  misc_feature (1)..(25): SEQ ID NO: 3171; WAN0249DG; Start 8; Stop 32
tccatatgtttgaattactgaaagt

SEQ ID NO: 348552 - DNA, 25 bp, Artificial
  probe
  misc_feature (1)..(25): SEQ ID NO: 3171; WAN0249DG; Start 77; Stop 101
acaaactgtggataactcttttgaa

SEQ ID NO: 348553 - DNA, 25 bp, Artificial
  probe
  misc_feature (1)..(25): SEQ ID NO: 3171; WAN0249DG; Start 7; Stop 31
ctccatatgtttgaattactgaaag

SEQ ID NO: 348554 - DNA, 25 bp, Artificial
  probe
  misc_feature (1)..(25): SEQ ID NO: 3171; WAN0249DG; Start 86; Stop 110
ggataactcttttgaaattgtgatt

SEQ ID NO: 348555 - DNA, 25 bp, Artificial
  probe
  misc_feature (1)..(25): SEQ ID NO: 3171; WAN0249DG; Start 78; Stop 102
caaactgtggataactcttttgaaa

SEQ ID NO: 348556 - DNA, 25 bp, Artificial
  probe
  misc_feature (1)..(25): SEQ ID NO: 3171; WAN0249DG; Start 26; Stop 50
tgaaagtataaactgactagcttaa

SEQ ID NO: 348557 - DNA, 25 bp, Artificial
  probe
  misc_feature (1)..(25): SEQ ID NO: 3171; WAN0249DG; Start 73; Stop 97
ttacacaaactgtggataactcttt

SEQ ID NO: 348558 - DNA, 25 bp, Artificial
  probe
  misc_feature (1)..(25): SEQ ID NO: 3171; WAN0249DG; Start 72; Stop 96
tttacacaaactgtggataactctt

SEQ ID NO: 348559 - DNA, 25 bp, Artificial
  probe
  misc_feature (1)..(25): SEQ ID NO: 3171; WAN0249DG; Start 18; Stop 42
tgaattactgaaagtataaactgac

SEQ ID NO: 348560 - DNA, 25 bp, Artificial
  probe
  misc_feature (1)..(25): SEQ ID NO: 3171; WAN0249DG; Start 91; Stop 115
actcttttgaaattgtgattttctt

SEQ ID NO: 348561 - DNA, 25 bp, Artificial
  probe
  misc_feature (1)..(25): SEQ ID NO: 3171; WAN0249DG; Start 90; Stop 114
aactcttttgaaattgtgattttct

SEQ ID NO: 348562 - DNA, 25 bp, Artificial
  probe
  misc_feature (1)..(25): SEQ ID NO: 3171; WAN0249DG; Start 56; Stop 80
acttaaacacaaaagttttacacaa

SEQ ID NO: 348563 - DNA, 25 bp, Artificial
  probe
  misc_feature (1)..(25): SEQ ID NO: 3171; WAN0249DG; Start 76; Stop 100
cacaaactgtggataactcttttga

SEQ ID NO: 348564 - DNA, 25 bp, Artificial
  probe
  misc_feature (1)..(25): SEQ ID NO: 3171; WAN0249DG; Start 75; Stop 99
acacaaactgtggataactcttttg

SEQ ID NO: 348565 - DNA, 25 bp, Artificial
  probe
  misc_feature (1)..(25): SEQ ID NO: 3171; WAN0249DG; Start 9; Stop 33
ccatatgtttgaattactgaaagta

SEQ ID NO: 348566 - DNA, 25 bp, Artificial
  probe
  misc_feature (1)..(25): SEQ ID NO: 3171; WAN0249DG; Start 58; Stop 82
ttaaacacaaaagttttacacaaac

SEQ ID NO: 348567 - DNA, 25 bp, Artificial
  probe
  misc_feature (1)..(25): SEQ ID NO: 3172; WAN024AR4; Start 67; Stop 91
ttctgaatgcaatgttctatctgtt

SEQ ID NO: 348568 - DNA, 25 bp, Artificial
  probe
  misc_feature (1)..(25): SEQ ID NO: 3172; WAN024AR4; Start 66; Stop 90
attctgaatgcaatgttctatctgt

SEQ ID NO: 348569 - DNA, 25 bp, Artificial
  probe
  misc_feature (1)..(25): SEQ ID NO: 3172; WAN024AR4; Start 68; Stop 92
tctgaatgcaatgttctatctgtta

SEQ ID NO: 348570 - DNA, 25 bp, Artificial
  probe
  misc_feature (1)..(25): SEQ ID NO: 3172; WAN024AR4; Start 69; Stop 93
ctgaatgcaatgttctatctgttat

SEQ ID NO: 348571 - DNA, 25 bp, Artificial
  probe
  misc_feature (1)..(25): SEQ ID NO: 3172; WAN024AR4; Start 65; Stop 89
tattctgaatgcaatgttctatctg

SEQ ID NO: 348572 - DNA, 25 bp, Artificial
  probe
  misc_feature (1)..(25): SEQ ID NO: 3172; WAN024AR4; Start 2; Stop 26
tttgttttcctccttttatggtagc

SEQ ID NO: 348573 - DNA, 25 bp, Artificial
  probe
  misc_feature (1)..(25): SEQ ID NO: 3172; WAN024AR4; Start 3; Stop 27
ttgttttcctccttttatggtagca

SEQ ID NO: 348574 - DNA, 25 bp, Artificial
  probe
  misc_feature (1)..(25): SEQ ID NO: 3172; WAN024AR4; Start 64; Stop 88
ttattctgaatgcaatgttctatct

SEQ ID NO: 348575 - DNA, 25 bp, Artificial
  probe
  misc_feature (1)..(25): SEQ ID NO: 3172; WAN024AR4; Start 4; Stop 28
tgttttcctccttttatggtagcat

SEQ ID NO: 348576 - DNA, 25 bp, Artificial
  probe
  misc_feature (1)..(25): SEQ ID NO: 3172; WAN024AR4; Start 70; Stop 94
tgaatgcaatgttctatctgttata

SEQ ID NO: 348577 - DNA, 25 bp, Artificial
  probe
  misc_feature (1)..(25): SEQ ID NO: 3172; WAN024AR4; Start 60; Stop 84
ttcattattctgaatgcaatgttct

SEQ ID NO: 348578 - DNA, 25 bp, Artificial
  probe
  misc_feature (1)..(25): SEQ ID NO: 3172; WAN024AR4; Start 73; Stop 97
atgcaatgttctatctgttatatct

SEQ ID NO: 348579 - DNA, 25 bp, Artificial
  probe
  misc_feature (1)..(25): SEQ ID NO: 3172; WAN024AR4; Start 61; Stop 85
tcattattctgaatgcaatgttcta

SEQ ID NO: 348580 - DNA, 25 bp, Artificial
  probe
  misc_feature (1)..(25): SEQ ID NO: 3172; WAN024AR4; Start 1; Stop 25
atttgttttcctccttttatggtag

SEQ ID NO: 348581 - DNA, 25 bp, Artificial
  probe
  misc_feature (1)..(25): SEQ ID NO: 3172; WAN024AR4; Start 5; Stop 29
gttttcctccttttatggtagcata

SEQ ID NO: 348582 - DNA, 25 bp, Artificial
  probe
  misc_feature (1)..(25): SEQ ID NO: 3172; WAN024AR4; Start 63; Stop 87
attattctgaatgcaatgttctatc

SEQ ID NO: 348583 - DNA, 25 bp, Artificial
  probe
  misc_feature (1)..(25): SEQ ID NO: 3172; WAN024AR4; Start 74; Stop 98
tgcaatgttctatctgttatatcta

SEQ ID NO: 348584 - DNA, 25 bp, Artificial
  probe
  misc_feature (1)..(25): SEQ ID NO: 3172; WAN024AR4; Start 72; Stop 96
aatgcaatgttctatctgttatatc

SEQ ID NO: 348585 - DNA, 25 bp, Artificial
  probe
  misc_feature (1)..(25): SEQ ID NO: 3172; WAN024AR4; Start 71; Stop 95
gaatgcaatgttctatctgttatat

SEQ ID NO: 348586 - DNA, 25 bp, Artificial
  probe
  misc_feature (1)..(25): SEQ ID NO: 3172; WAN024AR4; Start 62; Stop 86
cattattctgaatgcaatgttctat

SEQ ID NO: 348587 - DNA, 25 bp, Artificial
  probe
  misc_feature (1)..(25): SEQ ID NO: 3172; WAN024AR4; Start 59; Stop 83
tttcattattctgaatgcaatgttc

SEQ ID NO: 348588 - DNA, 25 bp, Artificial
  probe
  misc_feature (1)..(25): SEQ ID NO: 3172; WAN024AR4; Start 6; Stop 30
ttttcctccttttatggtagcataa

SEQ ID NO: 348589 - DNA, 25 bp, Artificial
  probe
  misc_feature (1)..(25): SEQ ID NO: 3172; WAN024AR4; Start 58; Stop 82
ttttcattattctgaatgcaatgtt

SEQ ID NO: 348590 - DNA, 25 bp, Artificial
  probe
  misc_feature (1)..(25): SEQ ID NO: 3173; WAN024A5R; Start 25; Stop 49
ctggcgtcttttaacgtcttgtgtt

SEQ ID NO: 348591 - DNA, 25 bp, Artificial
  probe
  misc_feature (1)..(25): SEQ ID NO: 3173; WAN024A5R; Start 21; Stop 45
ctcactggcgtcttttaacgtcttg

SEQ ID NO: 348592 - DNA, 25 bp, Artificial
  probe
  misc_feature (1)..(25): SEQ ID NO: 3173; WAN024A5R; Start 23; Stop 47
cactggcgtcttttaacgtcttgtg

SEQ ID NO: 348593 - DNA, 25 bp, Artificial
  probe
  misc_feature (1)..(25): SEQ ID NO: 3173; WAN024A5R; Start 22; Stop 46
tcactggcgtcttttaacgtcttgt

SEQ ID NO: 348594 - DNA, 25 bp, Artificial
  probe
  misc_feature (1)..(25): SEQ ID NO: 3174; WAN0249YM; Start 39; Stop 63
ttcgcctatgaaaatagccttctag

SEQ ID NO: 348595 - DNA, 25 bp, Artificial
  probe
  misc_feature (1)..(25): SEQ ID NO: 3174; WAN0249YM; Start 38; Stop 62
tttcgcctatgaaaatagccttcta

SEQ ID NO: 348596 - DNA, 25 bp, Artificial
  probe
  misc_feature (1)..(25): SEQ ID NO: 3174; WAN0249YM; Start 42; Stop 66
gcctatgaaaatagccttctaggaa

SEQ ID NO: 348597 - DNA, 25 bp, Artificial
  probe
  misc_feature (1)..(25): SEQ ID NO: 3174; WAN0249YM; Start 68; Stop 92
acttttctcctagaaggctggattt

SEQ ID NO: 348598 - DNA, 25 bp, Artificial
  probe
  misc_feature (1)..(25): SEQ ID NO: 3174; WAN0249YM; Start 67; Stop 91
gacttttctcctagaaggctggatt

SEQ ID NO: 348599 - DNA, 25 bp, Artificial
  probe
  misc_feature (1)..(25): SEQ ID NO: 3174; WAN0249YM; Start 52; Stop 76
atagccttctaggaagacttttctc

SEQ ID NO: 348600 - DNA, 25 bp, Artificial
  probe
  misc_feature (1)..(25): SEQ ID NO: 3174; WAN0249YM; Start 47; Stop 71
tgaaaatagccttctaggaagactt

SEQ ID NO: 348601 - DNA, 25 bp, Artificial
  probe
  misc_feature (1)..(25): SEQ ID NO: 3174; WAN0249YM; Start 46; Stop 70
atgaaaatagccttctaggaagact

SEQ ID NO: 348602 - DNA, 25 bp, Artificial
  probe
  misc_feature (1)..(25): SEQ ID NO: 3174; WAN0249YM; Start 51; Stop 75
aatagccttctaggaagacttttct

SEQ ID NO: 348603 - DNA, 25 bp, Artificial
  probe
  misc_feature (1)..(25): SEQ ID NO: 3174; WAN0249YM; Start 53; Stop 77
tagccttctaggaagacttttctcc

SEQ ID NO: 348604 - DNA, 25 bp, Artificial
  probe
  misc_feature (1)..(25): SEQ ID NO: 3174; WAN0249YM; Start 50; Stop 74
aaatagccttctaggaagacttttc

SEQ ID NO: 348605 - DNA, 25 bp, Artificial
  probe
  misc_feature (1)..(25): SEQ ID NO: 3174; WAN0249YM; Start 48; Stop 72
gaaaatagccttctaggaagacttt

SEQ ID NO: 348606 - DNA, 25 bp, Artificial
  probe
  misc_feature (1)..(25): SEQ ID NO: 3174; WAN0249YM; Start 43; Stop 67
cctatgaaaatagccttctaggaag

SEQ ID NO: 348607 - DNA, 25 bp, Artificial
  probe
  misc_feature (1)..(25): SEQ ID NO: 3174; WAN0249YM; Start 41; Stop 65
cgcctatgaaaatagccttctagga

SEQ ID NO: 348608 - DNA, 25 bp, Artificial
  probe
  misc_feature (1)..(25): SEQ ID NO: 3174; WAN0249YM; Start 40; Stop 64
tcgcctatgaaaatagccttctagg

SEQ ID NO: 348609 - DNA, 25 bp, Artificial
  probe
  misc_feature (1)..(25): SEQ ID NO: 3174; WAN0249YM; Start 64; Stop 88
gaagacttttctcctagaaggctgg

SEQ ID NO: 348610 - DNA, 25 bp, Artificial
  probe
  misc_feature (1)..(25): SEQ ID NO: 3174; WAN0249YM; Start 63; Stop 87
ggaagacttttctcctagaaggctg

SEQ ID NO: 348611 - DNA, 25 bp, Artificial
  probe
  misc_feature (1)..(25): SEQ ID NO: 3174; WAN0249YM; Start 66; Stop 90
agacttttctcctagaaggctggat

SEQ ID NO: 348612 - DNA, 25 bp, Artificial
  probe
  misc_feature (1)..(25): SEQ ID NO: 3174; WAN0249YM; Start 49; Stop 73
aaaatagccttctaggaagactttt

SEQ ID NO: 348613 - DNA, 25 bp, Artificial
  probe
  misc_feature (1)..(25): SEQ ID NO: 3174; WAN0249YM; Start 65; Stop 89
aagacttttctcctagaaggctgga

SEQ ID NO: 348614 - DNA, 25 bp, Artificial
  probe
  misc_feature (1)..(25): SEQ ID NO: 3174; WAN0249YM; Start 45; Stop 69
tatgaaaatagccttctaggaagac

SEQ ID NO: 348615 - DNA, 25 bp, Artificial
  probe
  misc_feature (1)..(25): SEQ ID NO: 3174; WAN0249YM; Start 26; Stop 50
attataccatattttcgcctatgaa

SEQ ID NO: 348616 - DNA, 25 bp, Artificial
  probe
  misc_feature (1)..(25): SEQ ID NO: 3174; WAN0249YM; Start 44; Stop 68
ctatgaaaatagccttctaggaaga

SEQ ID NO: 348617 - DNA, 25 bp, Artificial
  probe
  misc_feature (1)..(25): SEQ ID NO: 3174; WAN0249YM; Start 27; Stop 51
ttataccatattttcgcctatgaaa

SEQ ID NO: 348618 - DNA, 25 bp, Artificial
  probe
  misc_feature (1)..(25): SEQ ID NO: 3174; WAN0249YM; Start 25; Stop 49
tattataccatattttcgcctatga

SEQ ID NO: 348619 - DNA, 25 bp, Artificial
  probe
  misc_feature (1)..(25): SEQ ID NO: 3174; WAN0249YM; Start 37; Stop 61
ttttcgcctatgaaaatagccttct

SEQ ID NO: 348620 - DNA, 25 bp, Artificial
  probe
  misc_feature (1)..(25): SEQ ID NO: 3174; WAN0249YM; Start 62; Stop 86
aggaagacttttctcctagaaggct

SEQ ID NO: 348621 - DNA, 25 bp, Artificial
  probe
  misc_feature (1)..(25): SEQ ID NO: 3174; WAN0249YM; Start 54; Stop 78
agccttctaggaagacttttctcct

SEQ ID NO: 348622 - DNA, 25 bp, Artificial
  probe
  misc_feature (1)..(25): SEQ ID NO: 3174; WAN0249YM; Start 28; Stop 52
tataccatattttcgcctatgaaaa

SEQ ID NO: 348623 - DNA, 25 bp, Artificial
  probe
  misc_feature (1)..(25): SEQ ID NO: 3175; WAN0249IS; Start 221; Stop 245
gagggatttggaaagaaagggattt

SEQ ID NO: 348624 - DNA, 25 bp, Artificial
  probe
  misc_feature (1)..(25): SEQ ID NO: 3175; WAN0249IS; Start 215; Stop 239
ttggaagagggatttggaaagaaag

SEQ ID NO: 348625 - DNA, 25 bp, Artificial
  probe
  misc_feature (1)..(25): SEQ ID NO: 3175; WAN0249IS; Start 199; Stop 223
tatttcacaaacttgcttggaagag

SEQ ID NO: 348626 - DNA, 25 bp, Artificial
  probe
  misc_feature (1)..(25): SEQ ID NO: 3175; WAN0249IS; Start 198; Stop 222
ttatttcacaaacttgcttggaaga

SEQ ID NO: 348627 - DNA, 25 bp, Artificial
  probe
  misc_feature (1)..(25): SEQ ID NO: 3175; WAN0249IS; Start 214; Stop 238
cttggaagagggatttggaaagaaa

SEQ ID NO: 348628 - DNA, 25 bp, Artificial
  probe
  misc_feature (1)..(25): SEQ ID NO: 3175; WAN0249IS; Start 197; Stop 221
tttatttcacaaacttgcttggaag

SEQ ID NO: 348629 - DNA, 25 bp, Artificial
  probe
  misc_feature (1)..(25): SEQ ID NO: 3175; WAN0249IS; Start 63; Stop 87
acgcattatttcaactttgtaaaca

SEQ ID NO: 348630 - DNA, 25 bp, Artificial
  probe
  misc_feature (1)..(25): SEQ ID NO: 3175; WAN0249IS; Start 220; Stop 244
agagggatttggaaagaaagggatt

SEQ ID NO: 348631 - DNA, 25 bp, Artificial
  probe
  misc_feature (1)..(25): SEQ ID NO: 3175; WAN0249IS; Start 219; Stop 243
aagagggatttggaaagaaagggat

SEQ ID NO: 348632 - DNA, 25 bp, Artificial
  probe
  misc_feature (1)..(25): SEQ ID NO: 3175; WAN0249IS; Start 64; Stop 88
cgcattatttcaactttgtaaacag

SEQ ID NO: 348633 - DNA, 25 bp, Artificial
  probe
  misc_feature (1)..(25): SEQ ID NO: 3175; WAN0249IS; Start 62; Stop 86
aacgcattatttcaactttgtaaac

SEQ ID NO: 348634 - DNA, 25 bp, Artificial
  probe
  misc_feature (1)..(25): SEQ ID NO: 3175; WAN0249IS; Start 218; Stop 242
gaagagggatttggaaagaaaggga

SEQ ID NO: 348635 - DNA, 25 bp, Artificial
  probe
  misc_feature (1)..(25): SEQ ID NO: 3175; WAN0249IS; Start 200; Stop 224
atttcacaaacttgcttggaagagg

SEQ ID NO: 348636 - DNA, 25 bp, Artificial
  probe
  misc_feature (1)..(25): SEQ ID NO: 3175; WAN0249IS; Start 216; Stop 240
tggaagagggatttggaaagaaagg

SEQ ID NO: 348637 - DNA, 25 bp, Artificial
  probe
  misc_feature (1)..(25): SEQ ID NO: 3175; WAN0249IS; Start 217; Stop 241
ggaagagggatttggaaagaaaggg

SEQ ID NO: 348638 - DNA, 25 bp, Artificial
  probe
  misc_feature (1)..(25): SEQ ID NO: 3175; WAN0249IS; Start 213; Stop 237
gcttggaagagggatttggaaagaa

SEQ ID NO: 348639 - DNA, 25 bp, Artificial
  probe
  misc_feature (1)..(25): SEQ ID NO: 3175; WAN0249IS; Start 205; Stop 229
acaaacttgcttggaagagggattt

SEQ ID NO: 348640 - DNA, 25 bp, Artificial
  probe
  misc_feature (1)..(25): SEQ ID NO: 3175; WAN0249IS; Start 7; Stop 31
ctccatagctttcaaggaacgatat

SEQ ID NO: 348641 - DNA, 25 bp, Artificial
  probe
  misc_feature (1)..(25): SEQ ID NO: 3175; WAN0249IS; Start 65; Stop 89
gcattatttcaactttgtaaacagt

SEQ ID NO: 348642 - DNA, 25 bp, Artificial
  probe
  misc_feature (1)..(25): SEQ ID NO: 3175; WAN0249IS; Start 211; Stop 235
ttgcttggaagagggatttggaaag

SEQ ID NO: 348643 - DNA, 25 bp, Artificial
  probe
  misc_feature (1)..(25): SEQ ID NO: 3175; WAN0249IS; Start 210; Stop 234
cttgcttggaagagggatttggaaa

SEQ ID NO: 348644 - DNA, 25 bp, Artificial
  probe
  misc_feature (1)..(25): SEQ ID NO: 3175; WAN0249IS; Start 8; Stop 32
tccatagctttcaaggaacgatatc

SEQ ID NO: 348645 - DNA, 25 bp, Artificial
  probe
  misc_feature (1)..(25): SEQ ID NO: 3175; WAN0249IS; Start 207; Stop 231
aaacttgcttggaagagggatttgg

SEQ ID NO: 348646 - DNA, 25 bp, Artificial
  probe
  misc_feature (1)..(25): SEQ ID NO: 3175; WAN0249IS; Start 61; Stop 85
taacgcattatttcaactttgtaaa

SEQ ID NO: 348647 - DNA, 25 bp, Artificial
  probe
  misc_feature (1)..(25): SEQ ID NO: 3175; WAN0249IS; Start 154; Stop 178
caggttttatctttgaagtttgtga

SEQ ID NO: 348648 - DNA, 25 bp, Artificial
  probe
  misc_feature (1)..(25): SEQ ID NO: 3175; WAN0249IS; Start 204; Stop 228
cacaaacttgcttggaagagggatt

SEQ ID NO: 348649 - DNA, 25 bp, Artificial
  probe
  misc_feature (1)..(25): SEQ ID NO: 3175; WAN0249IS; Start 196; Stop 220
ttttatttcacaaacttgcttggaa

SEQ ID NO: 348650 - DNA, 25 bp, Artificial
  probe
  misc_feature (1)..(25): SEQ ID NO: 3175; WAN0249IS; Start 9; Stop 33
ccatagctttcaaggaacgatatcc

SEQ ID NO: 348651 - DNA, 25 bp, Artificial
  probe
  misc_feature (1)..(25): SEQ ID NO: 3175; WAN0249IS; Start 6; Stop 30
cctccatagctttcaaggaacgata

SEQ ID NO: 348652 - DNA, 25 bp, Artificial
  probe
  misc_feature (1)..(25): SEQ ID NO: 3175; WAN0249IS; Start 201; Stop 225
tttcacaaacttgcttggaagaggg

SEQ ID NO: 348653 - DNA, 25 bp, Artificial
  probe
  misc_feature (1)..(25): SEQ ID NO: 3175; WAN0249IS; Start 153; Stop 177
tcaggttttatctttgaagtttgtg

SEQ ID NO: 348654 - DNA, 25 bp, Artificial
  probe
  misc_feature (1)..(25): SEQ ID NO: 3175; WAN0249IS; Start 60; Stop 84
ataacgcattatttcaactttgtaa

SEQ ID NO: 348655 - DNA, 25 bp, Artificial
  probe
  misc_feature (1)..(25): SEQ ID NO: 3175; WAN0249IS; Start 155; Stop 179
aggttttatctttgaagtttgtgaa

SEQ ID NO: 348656 - DNA, 25 bp, Artificial
  probe
  misc_feature (1)..(25): SEQ ID NO: 3176; WAN024AMC; Start 4; Stop 28
ttctccaaatctggtataatgtagc

SEQ ID NO: 348657 - DNA, 25 bp, Artificial
  probe
  misc_feature (1)..(25): SEQ ID NO: 3176; WAN024AMC; Start 42; Stop 66
aattcagtacagtagaggtagattt

SEQ ID NO: 348658 - DNA, 25 bp, Artificial
  probe
  misc_feature (1)..(25): SEQ ID NO: 3176; WAN024AMC; Start 41; Stop 65
aaattcagtacagtagaggtagatt

SEQ ID NO: 348659 - DNA, 25 bp, Artificial
  probe
  misc_feature (1)..(25): SEQ ID NO: 3176; WAN024AMC; Start 5; Stop 29
tctccaaatctggtataatgtagct

SEQ ID NO: 348660 - DNA, 25 bp, Artificial
  probe
  misc_feature (1)..(25): SEQ ID NO: 3176; WAN024AMC; Start 39; Stop 63
caaaattcagtacagtagaggtaga

SEQ ID NO: 348661 - DNA, 25 bp, Artificial
  probe
  misc_feature (1)..(25): SEQ ID NO: 3176; WAN024AMC; Start 38; Stop 62
tcaaaattcagtacagtagaggtag

SEQ ID NO: 348662 - DNA, 25 bp, Artificial
  probe
  misc_feature (1)..(25): SEQ ID NO: 3176; WAN024AMC; Start 3; Stop 27
tttctccaaatctggtataatgtag

SEQ ID NO: 348663 - DNA, 25 bp, Artificial
  probe
  misc_feature (1)..(25): SEQ ID NO: 3176; WAN024AMC; Start 36; Stop 60
tatcaaaattcagtacagtagaggt

SEQ ID NO: 348664 - DNA, 25 bp, Artificial
  probe
  misc_feature (1)..(25): SEQ ID NO: 3176; WAN024AMC; Start 37; Stop 61
atcaaaattcagtacagtagaggta

SEQ ID NO: 348665 - DNA, 25 bp, Artificial
  probe
  misc_feature (1)..(25): SEQ ID NO: 3176; WAN024AMC; Start 43; Stop 67
attcagtacagtagaggtagatttt

SEQ ID NO: 348666 - DNA, 25 bp, Artificial
  probe
  misc_feature (1)..(25): SEQ ID NO: 3176; WAN024AMC; Start 40; Stop 64
aaaattcagtacagtagaggtagat

SEQ ID NO: 348667 - DNA, 25 bp, Artificial
  probe
  misc_feature (1)..(25): SEQ ID NO: 3176; WAN024AMC; Start 6; Stop 30
ctccaaatctggtataatgtagcta

SEQ ID NO: 348668 - DNA, 25 bp, Artificial
  probe
  misc_feature (1)..(25): SEQ ID NO: 3176; WAN024AMC; Start 7; Stop 31
tccaaatctggtataatgtagctat

SEQ ID NO: 348669 - DNA, 25 bp, Artificial
  probe
  misc_feature (1)..(25): SEQ ID NO: 3176; WAN024AMC; Start 35; Stop 59
atatcaaaattcagtacagtagagg

SEQ ID NO: 348670 - DNA, 25 bp, Artificial
  probe
  misc_feature (1)..(25): SEQ ID NO: 3176; WAN024AMC; Start 1; Stop 25
attttctccaaatctggtataatgt

SEQ ID NO: 348671 - DNA, 25 bp, Artificial
  probe
  misc_feature (1)..(25): SEQ ID NO: 3176; WAN024AMC; Start 2; Stop 26
ttttctccaaatctggtataatgta

SEQ ID NO: 348672 - DNA, 25 bp, Artificial
  probe
  misc_feature (1)..(25): SEQ ID NO: 3176; WAN024AMC; Start 8; Stop 32
ccaaatctggtataatgtagctata

SEQ ID NO: 348673 - DNA, 25 bp, Artificial
  probe
  misc_feature (1)..(25): SEQ ID NO: 3177; WAN024AKH; Start 57; Stop 81
gtgagaagatgagtaggttggtaat

SEQ ID NO: 348674 - DNA, 25 bp, Artificial
  probe
  misc_feature (1)..(25): SEQ ID NO: 3177; WAN024AKH; Start 58; Stop 82
tgagaagatgagtaggttggtaatt

SEQ ID NO: 348675 - DNA, 25 bp, Artificial
  probe
  misc_feature (1)..(25): SEQ ID NO: 3177; WAN024AKH; Start 56; Stop 80
ggtgagaagatgagtaggttggtaa

SEQ ID NO: 348676 - DNA, 25 bp, Artificial
  probe
  misc_feature (1)..(25): SEQ ID NO: 3177; WAN024AKH; Start 55; Stop 79
tggtgagaagatgagtaggttggta

SEQ ID NO: 348677 - DNA, 25 bp, Artificial
  probe
  misc_feature (1)..(25): SEQ ID NO: 3177; WAN024AKH; Start 52; Stop 76
ctctggtgagaagatgagtaggttg

SEQ ID NO: 348678 - DNA, 25 bp, Artificial
  probe
  misc_feature (1)..(25): SEQ ID NO: 3177; WAN024AKH; Start 59; Stop 83
gagaagatgagtaggttggtaattt

SEQ ID NO: 348679 - DNA, 25 bp, Artificial
  probe
  misc_feature (1)..(25): SEQ ID NO: 3177; WAN024AKH; Start 53; Stop 77
tctggtgagaagatgagtaggttgg

SEQ ID NO: 348680 - DNA, 25 bp, Artificial
  probe
  misc_feature (1)..(25): SEQ ID NO: 3177; WAN024AKH; Start 54; Stop 78
ctggtgagaagatgagtaggttggt

SEQ ID NO: 348681 - DNA, 25 bp, Artificial
  probe
  misc_feature (1)..(25): SEQ ID NO: 3177; WAN024AKH; Start 51; Stop 75
cctctggtgagaagatgagtaggtt

SEQ ID NO: 348682 - DNA, 25 bp, Artificial
  probe
  misc_feature (1)..(25): SEQ ID NO: 3177; WAN024AKH; Start 60; Stop 84
agaagatgagtaggttggtaattta

SEQ ID NO: 348683 - DNA, 25 bp, Artificial
  probe
  misc_feature (1)..(25): SEQ ID NO: 3177; WAN024AKH; Start 61; Stop 85
gaagatgagtaggttggtaatttaa

SEQ ID NO: 348684 - DNA, 25 bp, Artificial
  probe
  misc_feature (1)..(25): SEQ ID NO: 3177; WAN024AKH; Start 33; Stop 57
gatcaaagttaataccgccctctgg

SEQ ID NO: 348685 - DNA, 25 bp, Artificial
  probe
  misc_feature (1)..(25): SEQ ID NO: 3177; WAN024AKH; Start 29; Stop 53
ttatgatcaaagttaataccgccct

SEQ ID NO: 348686 - DNA, 25 bp, Artificial
  probe
  misc_feature (1)..(25): SEQ ID NO: 3177; WAN024AKH; Start 30; Stop 54
tatgatcaaagttaataccgccctc

SEQ ID NO: 348687 - DNA, 25 bp, Artificial
  probe
  misc_feature (1)..(25): SEQ ID NO: 3177; WAN024AKH; Start 28; Stop 52
tttatgatcaaagttaataccgccc

SEQ ID NO: 348688 - DNA, 25 bp, Artificial
  probe
  misc_feature (1)..(25): SEQ ID NO: 3177; WAN024AKH; Start 63; Stop 87
agatgagtaggttggtaatttaaac

SEQ ID NO: 348689 - DNA, 25 bp, Artificial
  probe
  misc_feature (1)..(25): SEQ ID NO: 3177; WAN024AKH; Start 64; Stop 88
gatgagtaggttggtaatttaaact

SEQ ID NO: 348690 - DNA, 25 bp, Artificial
  probe
  misc_feature (1)..(25): SEQ ID NO: 3177; WAN024AKH; Start 12; Stop 36
agagggagtatccgattttatgatc

SEQ ID NO: 348691 - DNA, 25 bp, Artificial
  probe
  misc_feature (1)..(25): SEQ ID NO: 3177; WAN024AKH; Start 31; Stop 55
atgatcaaagttaataccgccctct

SEQ ID NO: 348692 - DNA, 25 bp, Artificial
  probe
  misc_feature (1)..(25): SEQ ID NO: 3177; WAN024AKH; Start 11; Stop 35
tagagggagtatccgattttatgat

SEQ ID NO: 348693 - DNA, 25 bp, Artificial
  probe
  misc_feature (1)..(25): SEQ ID NO: 3177; WAN024AKH; Start 10; Stop 34
atagagggagtatccgattttatga

SEQ ID NO: 348694 - DNA, 25 bp, Artificial
  probe
  misc_feature (1)..(25): SEQ ID NO: 3177; WAN024AKH; Start 9; Stop 33
gatagagggagtatccgattttatg

SEQ ID NO: 348695 - DNA, 25 bp, Artificial
  probe
  misc_feature (1)..(25): SEQ ID NO: 3177; WAN024AKH; Start 34; Stop 58
atcaaagttaataccgccctctggt

SEQ ID NO: 348696 - DNA, 25 bp, Artificial
  probe
  misc_feature (1)..(25): SEQ ID NO: 3177; WAN024AKH; Start 62; Stop 86
aagatgagtaggttggtaatttaaa

SEQ ID NO: 348697 - DNA, 25 bp, Artificial
  probe
  misc_feature (1)..(25): SEQ ID NO: 3177; WAN024AKH; Start 32; Stop 56
tgatcaaagttaataccgccctctg

SEQ ID NO: 348698 - DNA, 25 bp, Artificial
  probe
  misc_feature (1)..(25): SEQ ID NO: 3177; WAN024AKH; Start 37; Stop 61
aaagttaataccgccctctggtgag

SEQ ID NO: 348699 - DNA, 25 bp, Artificial
  probe
  misc_feature (1)..(25): SEQ ID NO: 3177; WAN024AKH; Start 50; Stop 74
ccctctggtgagaagatgagtaggt

SEQ ID NO: 348700 - DNA, 25 bp, Artificial
  probe
  misc_feature (1)..(25): SEQ ID NO: 3177; WAN024AKH; Start 66; Stop 90
tgagtaggttggtaatttaaactat

SEQ ID NO: 348701 - DNA, 25 bp, Artificial
  probe
  misc_feature (1)..(25): SEQ ID NO: 3177; WAN024AKH; Start 65; Stop 89
atgagtaggttggtaatttaaacta

SEQ ID NO: 348702 - DNA, 25 bp, Artificial
  probe
  misc_feature (1)..(25): SEQ ID NO: 3177; WAN024AKH; Start 42; Stop 66
taataccgccctctggtgagaagat

SEQ ID NO: 348703 - DNA, 25 bp, Artificial
  probe
  misc_feature (1)..(25): SEQ ID NO: 3177; WAN024AKH; Start 36; Stop 60
caaagttaataccgccctctggtga

SEQ ID NO: 348704 - DNA, 25 bp, Artificial
  probe
  misc_feature (1)..(25): SEQ ID NO: 3177; WAN024AKH; Start 35; Stop 59
tcaaagttaataccgccctctggtg

SEQ ID NO: 348705 - DNA, 25 bp, Artificial
  probe
  misc_feature (1)..(25): SEQ ID NO: 3177; WAN024AKH; Start 40; Stop 64
gttaataccgccctctggtgagaag

SEQ ID NO: 348706 - DNA, 25 bp, Artificial
  probe
  misc_feature (1)..(25): SEQ ID NO: 3178; WAN024ACX; Start 75; Stop 99
aaagacctagtcctgcccattattt

SEQ ID NO: 348707 - DNA, 25 bp, Artificial
  probe
  misc_feature (1)..(25): SEQ ID NO: 3178; WAN024ACX; Start 74; Stop 98
caaagacctagtcctgcccattatt

SEQ ID NO: 348708 - DNA, 25 bp, Artificial
  probe
  misc_feature (1)..(25): SEQ ID NO: 3178; WAN024ACX; Start 32; Stop 56
actgtaaaaccttctcaaacatcct

SEQ ID NO: 348709 - DNA, 25 bp, Artificial
  probe
  misc_feature (1)..(25): SEQ ID NO: 3178; WAN024ACX; Start 33; Stop 57
ctgtaaaaccttctcaaacatcctt

SEQ ID NO: 348710 - DNA, 25 bp, Artificial
  probe
  misc_feature (1)..(25): SEQ ID NO: 3178; WAN024ACX; Start 34; Stop 58
tgtaaaaccttctcaaacatccttt

SEQ ID NO: 348711 - DNA, 25 bp, Artificial
  probe
  misc_feature (1)..(25): SEQ ID NO: 3178; WAN024ACX; Start 31; Stop 55
tactgtaaaaccttctcaaacatcc

SEQ ID NO: 348712 - DNA, 25 bp, Artificial
  probe
  misc_feature (1)..(25): SEQ ID NO: 3178; WAN024ACX; Start 76; Stop 100
aagacctagtcctgcccattatttt

SEQ ID NO: 348713 - DNA, 25 bp, Artificial
  probe
  misc_feature (1)..(25): SEQ ID NO: 3178; WAN024ACX; Start 35; Stop 59
gtaaaaccttctcaaacatccttta

SEQ ID NO: 348714 - DNA, 25 bp, Artificial
  probe
  misc_feature (1)..(25): SEQ ID NO: 3178; WAN024ACX; Start 77; Stop 101
agacctagtcctgcccattattttc

SEQ ID NO: 348715 - DNA, 25 bp, Artificial
  probe
  misc_feature (1)..(25): SEQ ID NO: 3178; WAN024ACX; Start 30; Stop 54
ttactgtaaaaccttctcaaacatc

SEQ ID NO: 348716 - DNA, 25 bp, Artificial
  probe
  misc_feature (1)..(25): SEQ ID NO: 3178; WAN024ACX; Start 36; Stop 60
taaaaccttctcaaacatcctttaa

SEQ ID NO: 348717 - DNA, 25 bp, Artificial
  probe
  misc_feature (1)..(25): SEQ ID NO: 3178; WAN024ACX; Start 38; Stop 62
aaaccttctcaaacatcctttaaaa

SEQ ID NO: 348718 - DNA, 25 bp, Artificial
  probe
  misc_feature (1)..(25): SEQ ID NO: 3178; WAN024ACX; Start 37; Stop 61
aaaaccttctcaaacatcctttaaa

SEQ ID NO: 348719 - DNA, 25 bp, Artificial
  probe
  misc_feature (1)..(25): SEQ ID NO: 3178; WAN024ACX; Start 29; Stop 53
tttactgtaaaaccttctcaaacat

SEQ ID NO: 348720 - DNA, 25 bp, Artificial
  probe
  misc_feature (1)..(25): SEQ ID NO: 3178; WAN024ACX; Start 73; Stop 97
gcaaagacctagtcctgcccattat

SEQ ID NO: 348721 - DNA, 25 bp, Artificial
  probe
  misc_feature (1)..(25): SEQ ID NO: 3178; WAN024ACX; Start 28; Stop 52
ttttactgtaaaaccttctcaaaca

SEQ ID NO: 348722 - DNA, 25 bp, Artificial
  probe
  misc_feature (1)..(25): SEQ ID NO: 3178; WAN024ACX; Start 27; Stop 51
cttttactgtaaaaccttctcaaac

SEQ ID NO: 348723 - DNA, 25 bp, Artificial
  probe
  misc_feature (1)..(25): SEQ ID NO: 3178; WAN024ACX; Start 26; Stop 50
tcttttactgtaaaaccttctcaaa

SEQ ID NO: 348724 - DNA, 25 bp, Artificial
  probe
  misc_feature (1)..(25): SEQ ID NO: 3178; WAN024ACX; Start 25; Stop 49
ttcttttactgtaaaaccttctcaa

SEQ ID NO: 348725 - DNA, 25 bp, Artificial
  probe
  misc_feature (1)..(25): SEQ ID NO: 3178; WAN024ACX; Start 24; Stop 48
tttcttttactgtaaaaccttctca

SEQ ID NO: 348726 - DNA, 25 bp, Artificial
  probe
  misc_feature (1)..(25): SEQ ID NO: 3178; WAN024ACX; Start 66; Stop 90
aaaagaggcaaagacctagtcctgc

SEQ ID NO: 348727 - DNA, 25 bp, Artificial
  probe
  misc_feature (1)..(25): SEQ ID NO: 3178; WAN024ACX; Start 23; Stop 47
ttttcttttactgtaaaaccttctc

SEQ ID NO: 348728 - DNA, 25 bp, Artificial
  probe
  misc_feature (1)..(25): SEQ ID NO: 3178; WAN024ACX; Start 22; Stop 46
attttcttttactgtaaaaccttct

SEQ ID NO: 348729 - DNA, 25 bp, Artificial
  probe
  misc_feature (1)..(25): SEQ ID NO: 3179; WAN024ABI; Start 51; Stop 75
aaatttagaaatggacgtgaagcaa

SEQ ID NO: 348730 - DNA, 25 bp, Artificial
  probe
  misc_feature (1)..(25): SEQ ID NO: 3179; WAN024ABI; Start 52; Stop 76
aatttagaaatggacgtgaagcaag

SEQ ID NO: 348731 - DNA, 25 bp, Artificial
  probe
  misc_feature (1)..(25): SEQ ID NO: 3179; WAN024ABI; Start 53; Stop 77
atttagaaatggacgtgaagcaaga

SEQ ID NO: 348732 - DNA, 25 bp, Artificial
  probe
  misc_feature (1)..(25): SEQ ID NO: 3179; WAN024ABI; Start 55; Stop 79
ttagaaatggacgtgaagcaagaaa

SEQ ID NO: 348733 - DNA, 25 bp, Artificial
  probe
  misc_feature (1)..(25): SEQ ID NO: 3179; WAN024ABI; Start 54; Stop 78
tttagaaatggacgtgaagcaagaa

SEQ ID NO: 348734 - DNA, 25 bp, Artificial
  probe
  misc_feature (1)..(25): SEQ ID NO: 3179; WAN024ABI; Start 56; Stop 80
tagaaatggacgtgaagcaagaaac

SEQ ID NO: 348735 - DNA, 25 bp, Artificial
  probe
  misc_feature (1)..(25): SEQ ID NO: 3179; WAN024ABI; Start 50; Stop 74
aaaatttagaaatggacgtgaagca

SEQ ID NO: 348736 - DNA, 25 bp, Artificial
  probe
  misc_feature (1)..(25): SEQ ID NO: 3179; WAN024ABI; Start 4; Stop 28
ttgccgtttaaagcttaagaaaatt

SEQ ID NO: 348737 - DNA, 25 bp, Artificial
  probe
  misc_feature (1)..(25): SEQ ID NO: 3179; WAN024ABI; Start 3; Stop 27
tttgccgtttaaagcttaagaaaat

SEQ ID NO: 348738 - DNA, 25 bp, Artificial
  probe
  misc_feature (1)..(25): SEQ ID NO: 3179; WAN024ABI; Start 1; Stop 25
attttgccgtttaaagcttaagaaa

SEQ ID NO: 348739 - DNA, 25 bp, Artificial
  probe
  misc_feature (1)..(25): SEQ ID NO: 3179; WAN024ABI; Start 2; Stop 26
ttttgccgtttaaagcttaagaaaa

SEQ ID NO: 348740 - DNA, 25 bp, Artificial
  probe
  misc_feature (1)..(25): SEQ ID NO: 3179; WAN024ABI; Start 5; Stop 29
tgccgtttaaagcttaagaaaatta

SEQ ID NO: 348741 - DNA, 25 bp, Artificial
  probe
  misc_feature (1)..(25): SEQ ID NO: 3179; WAN024ABI; Start 6; Stop 30
gccgtttaaagcttaagaaaattat

SEQ ID NO: 348742 - DNA, 25 bp, Artificial
  probe
  misc_feature (1)..(25): SEQ ID NO: 3179; WAN024ABI; Start 7; Stop 31
ccgtttaaagcttaagaaaattatg

SEQ ID NO: 348743 - DNA, 25 bp, Artificial
  probe
  misc_feature (1)..(25): SEQ ID NO: 3180; WAN0249VQ; Start 46; Stop 70
tacttttagaggagctgtttgactt

SEQ ID NO: 348744 - DNA, 25 bp, Artificial
  probe
  misc_feature (1)..(25): SEQ ID NO: 3180; WAN0249VQ; Start 45; Stop 69
gtacttttagaggagctgtttgact

SEQ ID NO: 348745 - DNA, 25 bp, Artificial
  probe
  misc_feature (1)..(25): SEQ ID NO: 3180; WAN0249VQ; Start 5; Stop 29
tggtattctcctatttataggtcga

SEQ ID NO: 348746 - DNA, 25 bp, Artificial
  probe
  misc_feature (1)..(25): SEQ ID NO: 3180; WAN0249VQ; Start 4; Stop 28
ttggtattctcctatttataggtcg

SEQ ID NO: 348747 - DNA, 25 bp, Artificial
  probe
  misc_feature (1)..(25): SEQ ID NO: 3180; WAN0249VQ; Start 44; Stop 68
agtacttttagaggagctgtttgac

SEQ ID NO: 348748 - DNA, 25 bp, Artificial
  probe
  misc_feature (1)..(25): SEQ ID NO: 3180; WAN0249VQ; Start 3; Stop 27
tttggtattctcctatttataggtc

SEQ ID NO: 348749 - DNA, 25 bp, Artificial
  probe
  misc_feature (1)..(25): SEQ ID NO: 3180; WAN0249VQ; Start 2; Stop 26
ttttggtattctcctatttataggt

SEQ ID NO: 348750 - DNA, 25 bp, Artificial
  probe
  misc_feature (1)..(25): SEQ ID NO: 3181; WAN024AJ6; Start 31; Stop 55
ggaaagaccacaacgattaatattc

SEQ ID NO: 348751 - DNA, 25 bp, Artificial
  probe
  misc_feature (1)..(25): SEQ ID NO: 3181; WAN024AJ6; Start 26; Stop 50
gttctggaaagaccacaacgattaa

SEQ ID NO: 348752 - DNA, 25 bp, Artificial
  probe
  misc_feature (1)..(25): SEQ ID NO: 3181; WAN024AJ6; Start 28; Stop 52
tctggaaagaccacaacgattaata

SEQ ID NO: 348753 - DNA, 25 bp, Artificial
  probe
  misc_feature (1)..(25): SEQ ID NO: 3181; WAN024AJ6; Start 27; Stop 51
ttctggaaagaccacaacgattaat

SEQ ID NO: 348754 - DNA, 25 bp, Artificial
  probe
  misc_feature (1)..(25): SEQ ID NO: 3181; WAN024AJ6; Start 29; Stop 53
ctggaaagaccacaacgattaatat

SEQ ID NO: 348755 - DNA, 25 bp, Artificial
  probe
  misc_feature (1)..(25): SEQ ID NO: 3181; WAN024AJ6; Start 30; Stop 54
tggaaagaccacaacgattaatatt

SEQ ID NO: 348756 - DNA, 25 bp, Artificial
  probe
  misc_feature (1)..(25): SEQ ID NO: 3181; WAN024AJ6; Start 25; Stop 49
ggttctggaaagaccacaacgatta

SEQ ID NO: 348757 - DNA, 25 bp, Artificial
  probe
  misc_feature (1)..(25): SEQ ID NO: 3181; WAN024AJ6; Start 20; Stop 44
catctggttctggaaagaccacaac

SEQ ID NO: 348758 - DNA, 25 bp, Artificial
  probe
  misc_feature (1)..(25): SEQ ID NO: 3181; WAN024AJ6; Start 24; Stop 48
tggttctggaaagaccacaacgatt

SEQ ID NO: 348759 - DNA, 25 bp, Artificial
  probe
  misc_feature (1)..(25): SEQ ID NO: 3181; WAN024AJ6; Start 19; Stop 43
ccatctggttctggaaagaccacaa

SEQ ID NO: 348760 - DNA, 25 bp, Artificial
  probe
  misc_feature (1)..(25): SEQ ID NO: 3181; WAN024AJ6; Start 23; Stop 47
ctggttctggaaagaccacaacgat

SEQ ID NO: 348761 - DNA, 25 bp, Artificial
  probe
  misc_feature (1)..(25): SEQ ID NO: 3181; WAN024AJ6; Start 21; Stop 45
atctggttctggaaagaccacaacg

SEQ ID NO: 348762 - DNA, 25 bp, Artificial
  probe
  misc_feature (1)..(25): SEQ ID NO: 3182; WAN0249X7; Start 109; Stop 133
gagtggcttttgatttgattaggag

SEQ ID NO: 348763 - DNA, 25 bp, Artificial
  probe
  misc_feature (1)..(25): SEQ ID NO: 3182; WAN0249X7; Start 111; Stop 135
gtggcttttgatttgattaggagat

SEQ ID NO: 348764 - DNA, 25 bp, Artificial
  probe
  misc_feature (1)..(25): SEQ ID NO: 3182; WAN0249X7; Start 110; Stop 134
agtggcttttgatttgattaggaga

SEQ ID NO: 348765 - DNA, 25 bp, Artificial
  probe
  misc_feature (1)..(25): SEQ ID NO: 3182; WAN0249X7; Start 108; Stop 132
agagtggcttttgatttgattagga

SEQ ID NO: 348766 - DNA, 25 bp, Artificial
  probe
  misc_feature (1)..(25): SEQ ID NO: 3182; WAN0249X7; Start 104; Stop 128
ttgtagagtggcttttgatttgatt

SEQ ID NO: 348767 - DNA, 25 bp, Artificial
  probe
  misc_feature (1)..(25): SEQ ID NO: 3182; WAN0249X7; Start 103; Stop 127
attgtagagtggcttttgatttgat

SEQ ID NO: 348768 - DNA, 25 bp, Artificial
  probe
  misc_feature (1)..(25): SEQ ID NO: 3182; WAN0249X7; Start 107; Stop 131
tagagtggcttttgatttgattagg

SEQ ID NO: 348769 - DNA, 25 bp, Artificial
  probe
  misc_feature (1)..(25): SEQ ID NO: 3182; WAN0249X7; Start 112; Stop 136
tggcttttgatttgattaggagatt

SEQ ID NO: 348770 - DNA, 25 bp, Artificial
  probe
  misc_feature (1)..(25): SEQ ID NO: 3182; WAN0249X7; Start 105; Stop 129
tgtagagtggcttttgatttgatta

SEQ ID NO: 348771 - DNA, 25 bp, Artificial
  probe
  misc_feature (1)..(25): SEQ ID NO: 3182; WAN0249X7; Start 102; Stop 126
tattgtagagtggcttttgatttga

SEQ ID NO: 348772 - DNA, 25 bp, Artificial
  probe
  misc_feature (1)..(25): SEQ ID NO: 3182; WAN0249X7; Start 5; Stop 29
ttttgtttcactaggattttagccc

SEQ ID NO: 348773 - DNA, 25 bp, Artificial
  probe
  misc_feature (1)..(25): SEQ ID NO: 3182; WAN0249X7; Start 113; Stop 137
ggcttttgatttgattaggagattc

SEQ ID NO: 348774 - DNA, 25 bp, Artificial
  probe
  misc_feature (1)..(25): SEQ ID NO: 3182; WAN0249X7; Start 101; Stop 125
ctattgtagagtggcttttgatttg

SEQ ID NO: 348775 - DNA, 25 bp, Artificial
  probe
  misc_feature (1)..(25): SEQ ID NO: 3182; WAN0249X7; Start 78; Stop 102
aaatggacaatcttaaagttactct

SEQ ID NO: 348776 - DNA, 25 bp, Artificial
  probe
  misc_feature (1)..(25): SEQ ID NO: 3182; WAN0249X7; Start 106; Stop 130
gtagagtggcttttgatttgattag

SEQ ID NO: 348777 - DNA, 25 bp, Artificial
  probe
  misc_feature (1)..(25): SEQ ID NO: 3182; WAN0249X7; Start 6; Stop 30
tttgtttcactaggattttagcccg

SEQ ID NO: 348778 - DNA, 25 bp, Artificial
  probe
  misc_feature (1)..(25): SEQ ID NO: 3182; WAN0249X7; Start 114; Stop 138
gcttttgatttgattaggagattct

SEQ ID NO: 348779 - DNA, 25 bp, Artificial
  probe
  misc_feature (1)..(25): SEQ ID NO: 3182; WAN0249X7; Start 7; Stop 31
ttgtttcactaggattttagcccga

SEQ ID NO: 348780 - DNA, 25 bp, Artificial
  probe
  misc_feature (1)..(25): SEQ ID NO: 3182; WAN0249X7; Start 8; Stop 32
tgtttcactaggattttagcccgag

SEQ ID NO: 348781 - DNA, 25 bp, Artificial
  probe
  misc_feature (1)..(25): SEQ ID NO: 3182; WAN0249X7; Start 100; Stop 124
tctattgtagagtggcttttgattt

SEQ ID NO: 348782 - DNA, 25 bp, Artificial
  probe
  misc_feature (1)..(25): SEQ ID NO: 3182; WAN0249X7; Start 81; Stop 105
tggacaatcttaaagttactctatt

SEQ ID NO: 348783 - DNA, 25 bp, Artificial
  probe
  misc_feature (1)..(25): SEQ ID NO: 3182; WAN0249X7; Start 79; Stop 103
aatggacaatcttaaagttactcta

SEQ ID NO: 348784 - DNA, 25 bp, Artificial
  probe
  misc_feature (1)..(25): SEQ ID NO: 3182; WAN0249X7; Start 80; Stop 104
atggacaatcttaaagttactctat

SEQ ID NO: 348785 - DNA, 25 bp, Artificial
  probe
  misc_feature (1)..(25): SEQ ID NO: 3182; WAN0249X7; Start 67; Stop 91
tcattgagtataaatggacaatctt

SEQ ID NO: 348786 - DNA, 25 bp, Artificial
  probe
  misc_feature (1)..(25): SEQ ID NO: 3182; WAN0249X7; Start 66; Stop 90
ttcattgagtataaatggacaatct

SEQ ID NO: 348787 - DNA, 25 bp, Artificial
  probe
  misc_feature (1)..(25): SEQ ID NO: 3182; WAN0249X7; Start 77; Stop 101
taaatggacaatcttaaagttactc

SEQ ID NO: 348788 - DNA, 25 bp, Artificial
  probe
  misc_feature (1)..(25): SEQ ID NO: 3182; WAN0249X7; Start 9; Stop 33
gtttcactaggattttagcccgagc

SEQ ID NO: 348789 - DNA, 25 bp, Artificial
  probe
  misc_feature (1)..(25): SEQ ID NO: 3182; WAN0249X7; Start 65; Stop 89
tttcattgagtataaatggacaatc

SEQ ID NO: 348790 - DNA, 25 bp, Artificial
  probe
  misc_feature (1)..(25): SEQ ID NO: 3182; WAN0249X7; Start 82; Stop 106
ggacaatcttaaagttactctattg

SEQ ID NO: 348791 - DNA, 25 bp, Artificial
  probe
  misc_feature (1)..(25): SEQ ID NO: 3182; WAN0249X7; Start 115; Stop 139
cttttgatttgattaggagattctt

SEQ ID NO: 348792 - DNA, 25 bp, Artificial
  probe
  misc_feature (1)..(25): SEQ ID NO: 3182; WAN0249X7; Start 10; Stop 34
tttcactaggattttagcccgagct

SEQ ID NO: 348793 - DNA, 25 bp, Artificial
  probe
  misc_feature (1)..(25): SEQ ID NO: 3182; WAN0249X7; Start 99; Stop 123
ctctattgtagagtggcttttgatt

SEQ ID NO: 348794 - DNA, 25 bp, Artificial
  probe
  misc_feature (1)..(25): SEQ ID NO: 3182; WAN0249X7; Start 64; Stop 88
ttttcattgagtataaatggacaat

SEQ ID NO: 348795 - DNA, 25 bp, Artificial
  probe
  misc_feature (1)..(25): SEQ ID NO: 3183; WAN0249IZ; Start 16; Stop 40
taagggtggacttggtataataaag

SEQ ID NO: 348796 - DNA, 25 bp, Artificial
  probe
  misc_feature (1)..(25): SEQ ID NO: 3183; WAN0249IZ; Start 15; Stop 39
ttaagggtggacttggtataataaa

SEQ ID NO: 348797 - DNA, 25 bp, Artificial
  probe
  misc_feature (1)..(25): SEQ ID NO: 3183; WAN0249IZ; Start 6; Stop 30
ttatctaacttaagggtggacttgg

SEQ ID NO: 348798 - DNA, 25 bp, Artificial
  probe
  misc_feature (1)..(25): SEQ ID NO: 3183; WAN0249IZ; Start 55; Stop 79
agtggaaacgaggaaaagtcattat

SEQ ID NO: 348799 - DNA, 25 bp, Artificial
  probe
  misc_feature (1)..(25): SEQ ID NO: 3183; WAN0249IZ; Start 9; Stop 33
tctaacttaagggtggacttggtat

SEQ ID NO: 348800 - DNA, 25 bp, Artificial
  probe
  misc_feature (1)..(25): SEQ ID NO: 3183; WAN0249IZ; Start 8; Stop 32
atctaacttaagggtggacttggta

SEQ ID NO: 348801 - DNA, 25 bp, Artificial
  probe
  misc_feature (1)..(25): SEQ ID NO: 3183; WAN0249IZ; Start 7; Stop 31
tatctaacttaagggtggacttggt

SEQ ID NO: 348802 - DNA, 25 bp, Artificial
  probe
  misc_feature (1)..(25): SEQ ID NO: 3183; WAN0249IZ; Start 64; Stop 88
gaggaaaagtcattatgccaagaaa

SEQ ID NO: 348803 - DNA, 25 bp, Artificial
  probe
  misc_feature (1)..(25): SEQ ID NO: 3183; WAN0249IZ; Start 12; Stop 36
aacttaagggtggacttggtataat

SEQ ID NO: 348804 - DNA, 25 bp, Artificial
  probe
  misc_feature (1)..(25): SEQ ID NO: 3183; WAN0249IZ; Start 56; Stop 80
gtggaaacgaggaaaagtcattatg

SEQ ID NO: 348805 - DNA, 25 bp, Artificial
  probe
  misc_feature (1)..(25): SEQ ID NO: 3183; WAN0249IZ; Start 54; Stop 78
aagtggaaacgaggaaaagtcatta

SEQ ID NO: 348806 - DNA, 25 bp, Artificial
  probe
  misc_feature (1)..(25): SEQ ID NO: 3183; WAN0249IZ; Start 53; Stop 77
taagtggaaacgaggaaaagtcatt

SEQ ID NO: 348807 - DNA, 25 bp, Artificial
  probe
  misc_feature (1)..(25): SEQ ID NO: 3183; WAN0249IZ; Start 10; Stop 34
ctaacttaagggtggacttggtata

SEQ ID NO: 348808 - DNA, 25 bp, Artificial
  probe
  misc_feature (1)..(25): SEQ ID NO: 3183; WAN0249IZ; Start 65; Stop 89
aggaaaagtcattatgccaagaaaa

SEQ ID NO: 348809 - DNA, 25 bp, Artificial
  probe
  misc_feature (1)..(25): SEQ ID NO: 3183; WAN0249IZ; Start 52; Stop 76
ttaagtggaaacgaggaaaagtcat

SEQ ID NO: 348810 - DNA, 25 bp, Artificial
  probe
  misc_feature (1)..(25): SEQ ID NO: 3183; WAN0249IZ; Start 51; Stop 75
attaagtggaaacgaggaaaagtca

SEQ ID NO: 348811 - DNA, 25 bp, Artificial
  probe
  misc_feature (1)..(25): SEQ ID NO: 3183; WAN0249IZ; Start 50; Stop 74
aattaagtggaaacgaggaaaagtc

SEQ ID NO: 348812 - DNA, 25 bp, Artificial
  probe
  misc_feature (1)..(25): SEQ ID NO: 3183; WAN0249IZ; Start 46; Stop 70
acaaaattaagtggaaacgaggaaa

SEQ ID NO: 348813 - DNA, 25 bp, Artificial
  probe
  misc_feature (1)..(25): SEQ ID NO: 3183; WAN0249IZ; Start 49; Stop 73
aaattaagtggaaacgaggaaaagt

SEQ ID NO: 348814 - DNA, 25 bp, Artificial
  probe
  misc_feature (1)..(25): SEQ ID NO: 3183; WAN0249IZ; Start 11; Stop 35
taacttaagggtggacttggtataa

SEQ ID NO: 348815 - DNA, 25 bp, Artificial
  probe
  misc_feature (1)..(25): SEQ ID NO: 3183; WAN0249IZ; Start 13; Stop 37
acttaagggtggacttggtataata

SEQ ID NO: 348816 - DNA, 25 bp, Artificial
  probe
  misc_feature (1)..(25): SEQ ID NO: 3183; WAN0249IZ; Start 60; Stop 84
aaacgaggaaaagtcattatgccaa

SEQ ID NO: 348817 - DNA, 25 bp, Artificial
  probe
  misc_feature (1)..(25): SEQ ID NO: 3183; WAN0249IZ; Start 17; Stop 41
aagggtggacttggtataataaagt

SEQ ID NO: 348818 - DNA, 25 bp, Artificial
  probe
  misc_feature (1)..(25): SEQ ID NO: 3183; WAN0249IZ; Start 47; Stop 71
caaaattaagtggaaacgaggaaaa

SEQ ID NO: 348819 - DNA, 25 bp, Artificial
  probe
  misc_feature (1)..(25): SEQ ID NO: 3183; WAN0249IZ; Start 98; Stop 122
taaagccttcaaactctctgctgta

SEQ ID NO: 348820 - DNA, 25 bp, Artificial
  probe
  misc_feature (1)..(25): SEQ ID NO: 3183; WAN0249IZ; Start 96; Stop 120
gataaagccttcaaactctctgctg

SEQ ID NO: 348821 - DNA, 25 bp, Artificial
  probe
  misc_feature (1)..(25): SEQ ID NO: 3183; WAN0249IZ; Start 63; Stop 87
cgaggaaaagtcattatgccaagaa

SEQ ID NO: 348822 - DNA, 25 bp, Artificial
  probe
  misc_feature (1)..(25): SEQ ID NO: 3183; WAN0249IZ; Start 48; Stop 72
aaaattaagtggaaacgaggaaaag

SEQ ID NO: 348823 - DNA, 25 bp, Artificial
  probe
  misc_feature (1)..(25): SEQ ID NO: 3183; WAN0249IZ; Start 61; Stop 85
aacgaggaaaagtcattatgccaag

SEQ ID NO: 348824 - DNA, 25 bp, Artificial
  probe
  misc_feature (1)..(25): SEQ ID NO: 3183; WAN0249IZ; Start 59; Stop 83
gaaacgaggaaaagtcattatgcca

SEQ ID NO: 348825 - DNA, 25 bp, Artificial
  probe
  misc_feature (1)..(25): SEQ ID NO: 3183; WAN0249IZ; Start 57; Stop 81
tggaaacgaggaaaagtcattatgc

SEQ ID NO: 348826 - DNA, 25 bp, Artificial
  probe
  misc_feature (1)..(25): SEQ ID NO: 3183; WAN0249IZ; Start 18; Stop 42
agggtggacttggtataataaagta

SEQ ID NO: 348827 - DNA, 25 bp, Artificial
  probe
  misc_feature (1)..(25): SEQ ID NO: 3183; WAN0249IZ; Start 5; Stop 29
attatctaacttaagggtggacttg

SEQ ID NO: 348828 - DNA, 25 bp, Artificial
  probe
  misc_feature (1)..(25): SEQ ID NO: 3185; WAN0249V5; Start 8; Stop 32
tttggtgggattgtaaatggatact

SEQ ID NO: 348829 - DNA, 25 bp, Artificial
  probe
  misc_feature (1)..(25): SEQ ID NO: 3185; WAN0249V5; Start 7; Stop 31
gtttggtgggattgtaaatggatac

SEQ ID NO: 348830 - DNA, 25 bp, Artificial
  probe
  misc_feature (1)..(25): SEQ ID NO: 3185; WAN0249V5; Start 9; Stop 33
ttggtgggattgtaaatggatacta

SEQ ID NO: 348831 - DNA, 25 bp, Artificial
  probe
  misc_feature (1)..(25): SEQ ID NO: 3185; WAN0249V5; Start 6; Stop 30
ggtttggtgggattgtaaatggata

SEQ ID NO: 348832 - DNA, 25 bp, Artificial
  probe
  misc_feature (1)..(25): SEQ ID NO: 3185; WAN0249V5; Start 10; Stop 34
tggtgggattgtaaatggatactag

SEQ ID NO: 348833 - DNA, 25 bp, Artificial
  probe
  misc_feature (1)..(25): SEQ ID NO: 3185; WAN0249V5; Start 11; Stop 35
ggtgggattgtaaatggatactaga

SEQ ID NO: 348834 - DNA, 25 bp, Artificial
  probe
  misc_feature (1)..(25): SEQ ID NO: 3185; WAN0249V5; Start 12; Stop 36
gtgggattgtaaatggatactagaa

SEQ ID NO: 348835 - DNA, 25 bp, Artificial
  probe
  misc_feature (1)..(25): SEQ ID NO: 3185; WAN0249V5; Start 13; Stop 37
tgggattgtaaatggatactagaag

SEQ ID NO: 348836 - DNA, 25 bp, Artificial
  probe
  misc_feature (1)..(25): SEQ ID NO: 3185; WAN0249V5; Start 5; Stop 29
tggtttggtgggattgtaaatggat

SEQ ID NO: 348837 - DNA, 25 bp, Artificial
  probe
  misc_feature (1)..(25): SEQ ID NO: 3185; WAN0249V5; Start 4; Stop 28
atggtttggtgggattgtaaatgga

SEQ ID NO: 348838 - DNA, 25 bp, Artificial
  probe
  misc_feature (1)..(25): SEQ ID NO: 3185; WAN0249V5; Start 14; Stop 38
gggattgtaaatggatactagaagt

SEQ ID NO: 348839 - DNA, 25 bp, Artificial
  probe
  misc_feature (1)..(25): SEQ ID NO: 3185; WAN0249V5; Start 47; Stop 71
acgcttgaaatatgatataatggtt

SEQ ID NO: 348840 - DNA, 25 bp, Artificial
  probe
  misc_feature (1)..(25): SEQ ID NO: 3185; WAN0249V5; Start 46; Stop 70
aacgcttgaaatatgatataatggt

SEQ ID NO: 348841 - DNA, 25 bp, Artificial
  probe
  misc_feature (1)..(25): SEQ ID NO: 3185; WAN0249V5; Start 3; Stop 27
catggtttggtgggattgtaaatgg

SEQ ID NO: 348842 - DNA, 25 bp, Artificial
  probe
  misc_feature (1)..(25): SEQ ID NO: 3185; WAN0249V5; Start 48; Stop 72
cgcttgaaatatgatataatggttt

SEQ ID NO: 348843 - DNA, 25 bp, Artificial
  probe
  misc_feature (1)..(25): SEQ ID NO: 3185; WAN0249V5; Start 45; Stop 69
aaacgcttgaaatatgatataatgg

SEQ ID NO: 348844 - DNA, 25 bp, Artificial
  probe
  misc_feature (1)..(25): SEQ ID NO: 3185; WAN0249V5; Start 15; Stop 39
ggattgtaaatggatactagaagtt

SEQ ID NO: 348845 - DNA, 25 bp, Artificial
  probe
  misc_feature (1)..(25): SEQ ID NO: 3185; WAN0249V5; Start 39; Stop 63
ttttgaaaacgcttgaaatatgata

SEQ ID NO: 348846 - DNA, 25 bp, Artificial
  probe
  misc_feature (1)..(25): SEQ ID NO: 3185; WAN0249V5; Start 40; Stop 64
tttgaaaacgcttgaaatatgatat

SEQ ID NO: 348847 - DNA, 25 bp, Artificial
  probe
  misc_feature (1)..(25): SEQ ID NO: 3185; WAN0249V5; Start 42; Stop 66
tgaaaacgcttgaaatatgatataa

SEQ ID NO: 348848 - DNA, 25 bp, Artificial
  probe
  misc_feature (1)..(25): SEQ ID NO: 3185; WAN0249V5; Start 41; Stop 65
ttgaaaacgcttgaaatatgatata

SEQ ID NO: 348849 - DNA, 25 bp, Artificial
  probe
  misc_feature (1)..(25): SEQ ID NO: 3186; WAN024CS8-3; Start 959; Stop 983
ttatagttggcaggaatcggaagat

SEQ ID NO: 348850 - DNA, 25 bp, Artificial
  probe
  misc_feature (1)..(25): SEQ ID NO: 3186; WAN024CS8-3; Start 1232; Stop 1256
ttcagacttatatcgtcaggttgga

SEQ ID NO: 348851 - DNA, 25 bp, Artificial
  probe
  misc_feature (1)..(25): SEQ ID NO: 3186; WAN024CS8-3; Start 1183; Stop 1207
ccttcttacaggcagatgatagtaa

SEQ ID NO: 348852 - DNA, 25 bp, Artificial
  probe
  misc_feature (1)..(25): SEQ ID NO: 3186; WAN024CS8-3; Start 1235; Stop 1259
agacttatatcgtcaggttggacag

SEQ ID NO: 348853 - DNA, 25 bp, Artificial
  probe
  misc_feature (1)..(25): SEQ ID NO: 3186; WAN024CS8-3; Start 1233; Stop 1257
tcagacttatatcgtcaggttggac

SEQ ID NO: 348854 - DNA, 25 bp, Artificial
  probe
  misc_feature (1)..(25): SEQ ID NO: 3186; WAN024CS8-3; Start 601; Stop 625
ccaacagtgattacttaatagatgc

SEQ ID NO: 348855 - DNA, 25 bp, Artificial
  probe
  misc_feature (1)..(25): SEQ ID NO: 3186; WAN024CS8-3; Start 1238; Stop 1262
cttatatcgtcaggttggacaggaa

SEQ ID NO: 348856 - DNA, 25 bp, Artificial
  probe
  misc_feature (1)..(25): SEQ ID NO: 3186; WAN024CS8-3; Start 1234; Stop 1258
cagacttatatcgtcaggttggaca

SEQ ID NO: 348857 - DNA, 25 bp, Artificial
  probe
  misc_feature (1)..(25): SEQ ID NO: 3186; WAN024CS8-3; Start 956; Stop 980
tatttatagttggcaggaatcggaa

SEQ ID NO: 348858 - DNA, 25 bp, Artificial
  probe
  misc_feature (1)..(25): SEQ ID NO: 3186; WAN024CS8-3; Start 936; Stop 960
ggaagtttgtttggagatgctattt

SEQ ID NO: 348859 - DNA, 25 bp, Artificial
  probe
  misc_feature (1)..(25): SEQ ID NO: 3186; WAN024CS8-3; Start 920; Stop 944
atttgtgaaagagttgggaagtttg

SEQ ID NO: 348860 - DNA, 25 bp, Artificial
  probe
  misc_feature (1)..(25): SEQ ID NO: 3186; WAN024CS8-3; Start 955; Stop 979
ctatttatagttggcaggaatcgga

SEQ ID NO: 348861 - DNA, 25 bp, Artificial
  probe
  misc_feature (1)..(25): SEQ ID NO: 3186; WAN024CS8-3; Start 918; Stop 942
gaatttgtgaaagagttgggaagtt

SEQ ID NO: 348862 - DNA, 25 bp, Artificial
  probe
  misc_feature (1)..(25): SEQ ID NO: 3186; WAN024CS8-3; Start 916; Stop 940
ttgaatttgtgaaagagttgggaag

SEQ ID NO: 348863 - DNA, 25 bp, Artificial
  probe
  misc_feature (1)..(25): SEQ ID NO: 3186; WAN024CS8-3; Start 957; Stop 981
atttatagttggcaggaatcggaag

SEQ ID NO: 348864 - DNA, 25 bp, Artificial
  probe
  misc_feature (1)..(25): SEQ ID NO: 3186; WAN024CS8-3; Start 919; Stop 943
aatttgtgaaagagttgggaagttt

SEQ ID NO: 348865 - DNA, 25 bp, Artificial
  probe
  misc_feature (1)..(25): SEQ ID NO: 3186; WAN024CS8-3; Start 915; Stop 939
tttgaatttgtgaaagagttgggaa

SEQ ID NO: 348866 - DNA, 25 bp, Artificial
  probe
  misc_feature (1)..(25): SEQ ID NO: 3186; WAN024CS8-3; Start 914; Stop 938
atttgaatttgtgaaagagttggga

SEQ ID NO: 348867 - DNA, 25 bp, Artificial
  probe
  misc_feature (1)..(25): SEQ ID NO: 3186; WAN024CS8-3; Start 945; Stop 969
tttggagatgctatttatagttggc

SEQ ID NO: 348868 - DNA, 25 bp, Artificial
  probe
  misc_feature (1)..(25): SEQ ID NO: 3186; WAN024CS8-3; Start 924; Stop 948
gtgaaagagttgggaagtttgtttg

SEQ ID NO: 348869 - DNA, 25 bp, Artificial
  probe
  misc_feature (1)..(25): SEQ ID NO: 3186; WAN024CS8-3; Start 960; Stop 984
tatagttggcaggaatcggaagatt

SEQ ID NO: 348870 - DNA, 25 bp, Artificial
  probe
  misc_feature (1)..(25): SEQ ID NO: 3186; WAN024CS8-3; Start 1517; Stop 1541
agaggagaaattgaatgaaatcgtt

SEQ ID NO: 348871 - DNA, 25 bp, Artificial
  probe
  misc_feature (1)..(25): SEQ ID NO: 3186; WAN024CS8-3; Start 917; Stop 941
tgaatttgtgaaagagttgggaagt

SEQ ID NO: 348872 - DNA, 25 bp, Artificial
  probe
  misc_feature (1)..(25): SEQ ID NO: 3186; WAN024CS8-3; Start 811; Stop 835
agaattatctgaaacttcctctgct

SEQ ID NO: 348873 - DNA, 25 bp, Artificial
  probe
  misc_feature (1)..(25): SEQ ID NO: 3186; WAN024CS8-3; Start 923; Stop 947
tgtgaaagagttgggaagtttgttt

SEQ ID NO: 348874 - DNA, 25 bp, Artificial
  probe
  misc_feature (1)..(25): SEQ ID NO: 3186; WAN024CS8-3; Start 922; Stop 946
ttgtgaaagagttgggaagtttgtt

SEQ ID NO: 348875 - DNA, 25 bp, Artificial
  probe
  misc_feature (1)..(25): SEQ ID NO: 3186; WAN024CS8-3; Start 921; Stop 945
tttgtgaaagagttgggaagtttgt

SEQ ID NO: 348876 - DNA, 25 bp, Artificial
  probe
  misc_feature (1)..(25): SEQ ID NO: 3186; WAN024CS8-3; Start 806; Stop 830
acctgagaattatctgaaacttcct

SEQ ID NO: 348877 - DNA, 25 bp, Artificial
  probe
  misc_feature (1)..(25): SEQ ID NO: 3186; WAN024CS8-3; Start 1236; Stop 1260
gacttatatcgtcaggttggacagg

SEQ ID NO: 348878 - DNA, 25 bp, Artificial
  probe
  misc_feature (1)..(25): SEQ ID NO: 3186; WAN024CS8-3; Start 935; Stop 959
gggaagtttgtttggagatgctatt

SEQ ID NO: 348879 - DNA, 25 bp, Artificial
  probe
  misc_feature (1)..(25): SEQ ID NO: 3186; WAN024CS8-3; Start 1332; Stop 1356
gcacaagaaataagagaagcagttg

SEQ ID NO: 348880 - DNA, 25 bp, Artificial
  probe
  misc_feature (1)..(25): SEQ ID NO: 3186; WAN024CS8-3; Start 816; Stop 840
tatctgaaacttcctctgctagaac

SEQ ID NO: 348881 - DNA, 25 bp, Artificial
  probe
  misc_feature (1)..(25): SEQ ID NO: 3186; WAN024CS8-3; Start 958; Stop 982
tttatagttggcaggaatcggaaga

SEQ ID NO: 348882 - DNA, 25 bp, Artificial
  probe
  misc_feature (1)..(25): SEQ ID NO: 3187; WAN0249Y6; Start 60; Stop 84
cggcttttgtgctataattgctata

SEQ ID NO: 348883 - DNA, 25 bp, Artificial
  probe
  misc_feature (1)..(25): SEQ ID NO: 3187; WAN0249Y6; Start 53; Stop 77
cagttatcggcttttgtgctataat

SEQ ID NO: 348884 - DNA, 25 bp, Artificial
  probe
  misc_feature (1)..(25): SEQ ID NO: 3187; WAN0249Y6; Start 56; Stop 80
ttatcggcttttgtgctataattgc

SEQ ID NO: 348885 - DNA, 25 bp, Artificial
  probe
  misc_feature (1)..(25): SEQ ID NO: 3187; WAN0249Y6; Start 59; Stop 83
tcggcttttgtgctataattgctat

SEQ ID NO: 348886 - DNA, 25 bp, Artificial
  probe
  misc_feature (1)..(25): SEQ ID NO: 3187; WAN0249Y6; Start 58; Stop 82
atcggcttttgtgctataattgcta

SEQ ID NO: 348887 - DNA, 25 bp, Artificial
  probe
  misc_feature (1)..(25): SEQ ID NO: 3187; WAN0249Y6; Start 57; Stop 81
tatcggcttttgtgctataattgct

SEQ ID NO: 348888 - DNA, 25 bp, Artificial
  probe
  misc_feature (1)..(25): SEQ ID NO: 3187; WAN0249Y6; Start 55; Stop 79
gttatcggcttttgtgctataattg

SEQ ID NO: 348889 - DNA, 25 bp, Artificial
  probe
  misc_feature (1)..(25): SEQ ID NO: 3187; WAN0249Y6; Start 54; Stop 78
agttatcggcttttgtgctataatt

SEQ ID NO: 348890 - DNA, 25 bp, Artificial
  probe
  misc_feature (1)..(25): SEQ ID NO: 3187; WAN0249Y6; Start 61; Stop 85
ggcttttgtgctataattgctataa

SEQ ID NO: 348891 - DNA, 25 bp, Artificial
  probe
  misc_feature (1)..(25): SEQ ID NO: 3187; WAN0249Y6; Start 36; Stop 60
ttgagggaaagggtttgcagttatc

SEQ ID NO: 348892 - DNA, 25 bp, Artificial
  probe
  misc_feature (1)..(25): SEQ ID NO: 3187; WAN0249Y6; Start 27; Stop 51
ttgctacagttgagggaaagggttt

SEQ ID NO: 348893 - DNA, 25 bp, Artificial
  probe
  misc_feature (1)..(25): SEQ ID NO: 3187; WAN0249Y6; Start 26; Stop 50
tttgctacagttgagggaaagggtt

SEQ ID NO: 348894 - DNA, 25 bp, Artificial
  probe
  misc_feature (1)..(25): SEQ ID NO: 3187; WAN0249Y6; Start 35; Stop 59
gttgagggaaagggtttgcagttat

SEQ ID NO: 348895 - DNA, 25 bp, Artificial
  probe
  misc_feature (1)..(25): SEQ ID NO: 3187; WAN0249Y6; Start 28; Stop 52
tgctacagttgagggaaagggtttg

SEQ ID NO: 348896 - DNA, 25 bp, Artificial
  probe
  misc_feature (1)..(25): SEQ ID NO: 3187; WAN0249Y6; Start 62; Stop 86
gcttttgtgctataattgctataat

SEQ ID NO: 348897 - DNA, 25 bp, Artificial
  probe
  misc_feature (1)..(25): SEQ ID NO: 3187; WAN0249Y6; Start 34; Stop 58
agttgagggaaagggtttgcagtta

SEQ ID NO: 348898 - DNA, 25 bp, Artificial
  probe
  misc_feature (1)..(25): SEQ ID NO: 3187; WAN0249Y6; Start 52; Stop 76
gcagttatcggcttttgtgctataa

SEQ ID NO: 348899 - DNA, 25 bp, Artificial
  probe
  misc_feature (1)..(25): SEQ ID NO: 3187; WAN0249Y6; Start 25; Stop 49
ttttgctacagttgagggaaagggt

SEQ ID NO: 348900 - DNA, 25 bp, Artificial
  probe
  misc_feature (1)..(25): SEQ ID NO: 3187; WAN0249Y6; Start 31; Stop 55
tacagttgagggaaagggtttgcag

SEQ ID NO: 348901 - DNA, 25 bp, Artificial
  probe
  misc_feature (1)..(25): SEQ ID NO: 3187; WAN0249Y6; Start 30; Stop 54
ctacagttgagggaaagggtttgca

SEQ ID NO: 348902 - DNA, 25 bp, Artificial
  probe
  misc_feature (1)..(25): SEQ ID NO: 3187; WAN0249Y6; Start 37; Stop 61
tgagggaaagggtttgcagttatcg

SEQ ID NO: 348903 - DNA, 25 bp, Artificial
  probe
  misc_feature (1)..(25): SEQ ID NO: 3187; WAN0249Y6; Start 42; Stop 66
gaaagggtttgcagttatcggcttt

SEQ ID NO: 348904 - DNA, 25 bp, Artificial
  probe
  misc_feature (1)..(25): SEQ ID NO: 3187; WAN0249Y6; Start 51; Stop 75
tgcagttatcggcttttgtgctata

SEQ ID NO: 348905 - DNA, 25 bp, Artificial
  probe
  misc_feature (1)..(25): SEQ ID NO: 3187; WAN0249Y6; Start 44; Stop 68
aagggtttgcagttatcggcttttg

SEQ ID NO: 348906 - DNA, 25 bp, Artificial
  probe
  misc_feature (1)..(25): SEQ ID NO: 3187; WAN0249Y6; Start 43; Stop 67
aaagggtttgcagttatcggctttt

SEQ ID NO: 348907 - DNA, 25 bp, Artificial
  probe
  misc_feature (1)..(25): SEQ ID NO: 3187; WAN0249Y6; Start 50; Stop 74
ttgcagttatcggcttttgtgctat

SEQ ID NO: 348908 - DNA, 25 bp, Artificial
  probe
  misc_feature (1)..(25): SEQ ID NO: 3187; WAN0249Y6; Start 49; Stop 73
tttgcagttatcggcttttgtgcta

SEQ ID NO: 348909 - DNA, 25 bp, Artificial
  probe
  misc_feature (1)..(25): SEQ ID NO: 3187; WAN0249Y6; Start 48; Stop 72
gtttgcagttatcggcttttgtgct

SEQ ID NO: 348910 - DNA, 25 bp, Artificial
  probe
  misc_feature (1)..(25): SEQ ID NO: 3188; WAN0249SM; Start 151; Stop 175
tggtgaggtgctggtgatagaaatt

SEQ ID NO: 348911 - DNA, 25 bp, Artificial
  probe
  misc_feature (1)..(25): SEQ ID NO: 3188; WAN0249SM; Start 152; Stop 176
ggtgaggtgctggtgatagaaattt

SEQ ID NO: 348912 - DNA, 25 bp, Artificial
  probe
  misc_feature (1)..(25): SEQ ID NO: 3188; WAN0249SM; Start 31; Stop 55
aggatggtctagtattatatagtca

SEQ ID NO: 348913 - DNA, 25 bp, Artificial
  probe
  misc_feature (1)..(25): SEQ ID NO: 3188; WAN0249SM; Start 52; Stop 76
gtcattaaataaagacctcctaact

SEQ ID NO: 348914 - DNA, 25 bp, Artificial
  probe
  misc_feature (1)..(25): SEQ ID NO: 3188; WAN0249SM; Start 51; Stop 75
agtcattaaataaagacctcctaac

SEQ ID NO: 348915 - DNA, 25 bp, Artificial
  probe
  misc_feature (1)..(25): SEQ ID NO: 3188; WAN0249SM; Start 19; Stop 43
aagcaaaatttaaggatggtctagt

SEQ ID NO: 348916 - DNA, 25 bp, Artificial
  probe
  misc_feature (1)..(25): SEQ ID NO: 3188; WAN0249SM; Start 150; Stop 174
gtggtgaggtgctggtgatagaaat

SEQ ID NO: 348917 - DNA, 25 bp, Artificial
  probe
  misc_feature (1)..(25): SEQ ID NO: 3188; WAN0249SM; Start 153; Stop 177
gtgaggtgctggtgatagaaatttt

SEQ ID NO: 348918 - DNA, 25 bp, Artificial
  probe
  misc_feature (1)..(25): SEQ ID NO: 3188; WAN0249SM; Start 53; Stop 77
tcattaaataaagacctcctaactt

SEQ ID NO: 348919 - DNA, 25 bp, Artificial
  probe
  misc_feature (1)..(25): SEQ ID NO: 3188; WAN0249SM; Start 20; Stop 44
agcaaaatttaaggatggtctagta

SEQ ID NO: 348920 - DNA, 25 bp, Artificial
  probe
  misc_feature (1)..(25): SEQ ID NO: 3188; WAN0249SM; Start 21; Stop 45
gcaaaatttaaggatggtctagtat

SEQ ID NO: 348921 - DNA, 25 bp, Artificial
  probe
  misc_feature (1)..(25): SEQ ID NO: 3188; WAN0249SM; Start 18; Stop 42
taagcaaaatttaaggatggtctag

SEQ ID NO: 348922 - DNA, 25 bp, Artificial
  probe
  misc_feature (1)..(25): SEQ ID NO: 3188; WAN0249SM; Start 101; Stop 125
tttcatcacaatctcctaatgaagc

SEQ ID NO: 348923 - DNA, 25 bp, Artificial
  probe
  misc_feature (1)..(25): SEQ ID NO: 3188; WAN0249SM; Start 17; Stop 41
ttaagcaaaatttaaggatggtcta

SEQ ID NO: 348924 - DNA, 25 bp, Artificial
  probe
  misc_feature (1)..(25): SEQ ID NO: 3188; WAN0249SM; Start 54; Stop 78
cattaaataaagacctcctaacttt

SEQ ID NO: 348925 - DNA, 25 bp, Artificial
  probe
  misc_feature (1)..(25): SEQ ID NO: 3188; WAN0249SM; Start 16; Stop 40
cttaagcaaaatttaaggatggtct

SEQ ID NO: 348926 - DNA, 25 bp, Artificial
  probe
  misc_feature (1)..(25): SEQ ID NO: 3188; WAN0249SM; Start 15; Stop 39
tcttaagcaaaatttaaggatggtc

SEQ ID NO: 348927 - DNA, 25 bp, Artificial
  probe
  misc_feature (1)..(25): SEQ ID NO: 3188; WAN0249SM; Start 14; Stop 38
ttcttaagcaaaatttaaggatggt

SEQ ID NO: 348928 - DNA, 25 bp, Artificial
  probe
  misc_feature (1)..(25): SEQ ID NO: 3188; WAN0249SM; Start 22; Stop 46
caaaatttaaggatggtctagtatt

SEQ ID NO: 348929 - DNA, 25 bp, Artificial
  probe
  misc_feature (1)..(25): SEQ ID NO: 3188; WAN0249SM; Start 13; Stop 37
tttcttaagcaaaatttaaggatgg

SEQ ID NO: 348930 - DNA, 25 bp, Artificial
  probe
  misc_feature (1)..(25): SEQ ID NO: 3188; WAN0249SM; Start 100; Stop 124
ttttcatcacaatctcctaatgaag

SEQ ID NO: 348931 - DNA, 25 bp, Artificial
  probe
  misc_feature (1)..(25): SEQ ID NO: 3188; WAN0249SM; Start 12; Stop 36
ttttcttaagcaaaatttaaggatg

SEQ ID NO: 348932 - DNA, 25 bp, Artificial
  probe
  misc_feature (1)..(25): SEQ ID NO: 3189; WAN024ANF; Start 45; Stop 69
cgatgatattgcagtatatctgagg

SEQ ID NO: 348933 - DNA, 25 bp, Artificial
  probe
  misc_feature (1)..(25): SEQ ID NO: 3189; WAN024ANF; Start 44; Stop 68
acgatgatattgcagtatatctgag

SEQ ID NO: 348934 - DNA, 25 bp, Artificial
  probe
  misc_feature (1)..(25): SEQ ID NO: 3189; WAN024ANF; Start 49; Stop 73
gatattgcagtatatctgaggtagg

SEQ ID NO: 348935 - DNA, 25 bp, Artificial
  probe
  misc_feature (1)..(25): SEQ ID NO: 3189; WAN024ANF; Start 46; Stop 70
gatgatattgcagtatatctgaggt

SEQ ID NO: 348936 - DNA, 25 bp, Artificial
  probe
  misc_feature (1)..(25): SEQ ID NO: 3189; WAN024ANF; Start 40; Stop 64
gcatacgatgatattgcagtatatc

SEQ ID NO: 348937 - DNA, 25 bp, Artificial
  probe
  misc_feature (1)..(25): SEQ ID NO: 3189; WAN024ANF; Start 48; Stop 72
tgatattgcagtatatctgaggtag

SEQ ID NO: 348938 - DNA, 25 bp, Artificial
  probe
  misc_feature (1)..(25): SEQ ID NO: 3189; WAN024ANF; Start 43; Stop 67
tacgatgatattgcagtatatctga

SEQ ID NO: 348939 - DNA, 25 bp, Artificial
  probe
  misc_feature (1)..(25): SEQ ID NO: 3189; WAN024ANF; Start 47; Stop 71
atgatattgcagtatatctgaggta

SEQ ID NO: 348940 - DNA, 25 bp, Artificial
  probe
  misc_feature (1)..(25): SEQ ID NO: 3189; WAN024ANF; Start 42; Stop 66
atacgatgatattgcagtatatctg

SEQ ID NO: 348941 - DNA, 25 bp, Artificial
  probe
  misc_feature (1)..(25): SEQ ID NO: 3189; WAN024ANF; Start 41; Stop 65
catacgatgatattgcagtatatct

SEQ ID NO: 348942 - DNA, 25 bp, Artificial
  probe
  misc_feature (1)..(25): SEQ ID NO: 3190; WAN024D3Y-3; Start 86; Stop 110
gatgatatgaccattactgccaacg

SEQ ID NO: 348943 - DNA, 25 bp, Artificial
  probe
  misc_feature (1)..(25): SEQ ID NO: 3190; WAN024D3Y-3; Start 85; Stop 109
cgatgatatgaccattactgccaac

SEQ ID NO: 348944 - DNA, 25 bp, Artificial
  probe
  misc_feature (1)..(25): SEQ ID NO: 3190; WAN024D3Y-3; Start 830; Stop 854
acaccattcaatcaactagcttcta

SEQ ID NO: 348945 - DNA, 25 bp, Artificial
  probe
  misc_feature (1)..(25): SEQ ID NO: 3190; WAN024D3Y-3; Start 831; Stop 855
caccattcaatcaactagcttctac

SEQ ID NO: 348946 - DNA, 25 bp, Artificial
  probe
  misc_feature (1)..(25): SEQ ID NO: 3190; WAN024D3Y-3; Start 832; Stop 856
accattcaatcaactagcttctacc

SEQ ID NO: 348947 - DNA, 25 bp, Artificial
  probe
  misc_feature (1)..(25): SEQ ID NO: 3190; WAN024D3Y-3; Start 829; Stop 853
aacaccattcaatcaactagcttct

SEQ ID NO: 348948 - DNA, 25 bp, Artificial
  probe
  misc_feature (1)..(25): SEQ ID NO: 3190; WAN024D3Y-3; Start 203; Stop 227
gcagaagtaacagagctaattgaat

SEQ ID NO: 348949 - DNA, 25 bp, Artificial
  probe
  misc_feature (1)..(25): SEQ ID NO: 3190; WAN024D3Y-3; Start 207; Stop 231
aagtaacagagctaattgaatacgc

SEQ ID NO: 348950 - DNA, 25 bp, Artificial
  probe
  misc_feature (1)..(25): SEQ ID NO: 3190; WAN024D3Y-3; Start 81; Stop 105
tactcgatgatatgaccattactgc

SEQ ID NO: 348951 - DNA, 25 bp, Artificial
  probe
  misc_feature (1)..(25): SEQ ID NO: 3190; WAN024D3Y-3; Start 202; Stop 226
ggcagaagtaacagagctaattgaa

SEQ ID NO: 348952 - DNA, 25 bp, Artificial
  probe
  misc_feature (1)..(25): SEQ ID NO: 3190; WAN024D3Y-3; Start 193; Stop 217
actaacacaggcagaagtaacagag

SEQ ID NO: 348953 - DNA, 25 bp, Artificial
  probe
  misc_feature (1)..(25): SEQ ID NO: 3190; WAN024D3Y-3; Start 192; Stop 216
cactaacacaggcagaagtaacaga

SEQ ID NO: 348954 - DNA, 25 bp, Artificial
  probe
  misc_feature (1)..(25): SEQ ID NO: 3190; WAN024D3Y-3; Start 224; Stop 248
gaatacgctaaatctaaggacatcg

SEQ ID NO: 348955 - DNA, 25 bp, Artificial
  probe
  misc_feature (1)..(25): SEQ ID NO: 3190; WAN024D3Y-3; Start 225; Stop 249
aatacgctaaatctaaggacatcgg

SEQ ID NO: 348956 - DNA, 25 bp, Artificial
  probe
  misc_feature (1)..(25): SEQ ID NO: 3190; WAN024D3Y-3; Start 746; Stop 770
aacggtgactggtactacattcttg

SEQ ID NO: 348957 - DNA, 25 bp, Artificial
  probe
  misc_feature (1)..(25): SEQ ID NO: 3190; WAN024D3Y-3; Start 745; Stop 769
caacggtgactggtactacattctt

SEQ ID NO: 348958 - DNA, 25 bp, Artificial
  probe
  misc_feature (1)..(25): SEQ ID NO: 3190; WAN024D3Y-3; Start 201; Stop 225
aggcagaagtaacagagctaattga

SEQ ID NO: 348959 - DNA, 25 bp, Artificial
  probe
  misc_feature (1)..(25): SEQ ID NO: 3190; WAN024D3Y-3; Start 200; Stop 224
caggcagaagtaacagagctaattg

SEQ ID NO: 348960 - DNA, 25 bp, Artificial
  probe
  misc_feature (1)..(25): SEQ ID NO: 3190; WAN024D3Y-3; Start 80; Stop 104
ctactcgatgatatgaccattactg

SEQ ID NO: 348961 - DNA, 25 bp, Artificial
  probe
  misc_feature (1)..(25): SEQ ID NO: 3190; WAN024D3Y-3; Start 199; Stop 223
acaggcagaagtaacagagctaatt

SEQ ID NO: 348962 - DNA, 25 bp, Artificial
  probe
  misc_feature (1)..(25): SEQ ID NO: 3190; WAN024D3Y-3; Start 79; Stop 103
tctactcgatgatatgaccattact

SEQ ID NO: 348963 - DNA, 25 bp, Artificial
  probe
  misc_feature (1)..(25): SEQ ID NO: 3190; WAN024D3Y-3; Start 226; Stop 250
atacgctaaatctaaggacatcggt

SEQ ID NO: 348964 - DNA, 25 bp, Artificial
  probe
  misc_feature (1)..(25): SEQ ID NO: 3190; WAN024D3Y-3; Start 223; Stop 247
tgaatacgctaaatctaaggacatc

SEQ ID NO: 348965 - DNA, 25 bp, Artificial
  probe
  misc_feature (1)..(25): SEQ ID NO: 3190; WAN024D3Y-3; Start 206; Stop 230
gaagtaacagagctaattgaatacg

SEQ ID NO: 348966 - DNA, 25 bp, Artificial
  probe
  misc_feature (1)..(25): SEQ ID NO: 3190; WAN024D3Y-3; Start 84; Stop 108
tcgatgatatgaccattactgccaa

SEQ ID NO: 348967 - DNA, 25 bp, Artificial
  probe
  misc_feature (1)..(25): SEQ ID NO: 3190; WAN024D3Y-3; Start 194; Stop 218
ctaacacaggcagaagtaacagagc

SEQ ID NO: 348968 - DNA, 25 bp, Artificial
  probe
  misc_feature (1)..(25): SEQ ID NO: 3190; WAN024D3Y-3; Start 78; Stop 102
ttctactcgatgatatgaccattac

SEQ ID NO: 348969 - DNA, 25 bp, Artificial
  probe
  misc_feature (1)..(25): SEQ ID NO: 3190; WAN024D3Y-3; Start 749; Stop 773
ggtgactggtactacattcttggtc

SEQ ID NO: 348970 - DNA, 25 bp, Artificial
  probe
  misc_feature (1)..(25): SEQ ID NO: 3190; WAN024D3Y-3; Start 232; Stop 256
taaatctaaggacatcggtctcatc

SEQ ID NO: 348971 - DNA, 25 bp, Artificial
  probe
  misc_feature (1)..(25): SEQ ID NO: 3190; WAN024D3Y-3; Start 231; Stop 255
ctaaatctaaggacatcggtctcat

SEQ ID NO: 348972 - DNA, 25 bp, Artificial
  probe
  misc_feature (1)..(25): SEQ ID NO: 3190; WAN024D3Y-3; Start 198; Stop 222
cacaggcagaagtaacagagctaat

SEQ ID NO: 348973 - DNA, 25 bp, Artificial
  probe
  misc_feature (1)..(25): SEQ ID NO: 3190; WAN024D3Y-3; Start 83; Stop 107
ctcgatgatatgaccattactgcca

SEQ ID NO: 348974 - DNA, 25 bp, Artificial
  probe
  misc_feature (1)..(25): SEQ ID NO: 3190; WAN024D3Y-3; Start 82; Stop 106
actcgatgatatgaccattactgcc

SEQ ID NO: 348975 - DNA, 25 bp, Artificial
  probe
  misc_feature (1)..(25): SEQ ID NO: 3191; WAN024AOT; Start 81; Stop 105
cgcagaataaatgagacgatagatg

SEQ ID NO: 348976 - DNA, 25 bp, Artificial
  probe
  misc_feature (1)..(25): SEQ ID NO: 3191; WAN024AOT; Start 105; Stop 129
ggcggtttatatcaaatagagcaaa

SEQ ID NO: 348977 - DNA, 25 bp, Artificial
  probe
  misc_feature (1)..(25): SEQ ID NO: 3191; WAN024AOT; Start 83; Stop 107
cagaataaatgagacgatagatggc

SEQ ID NO: 348978 - DNA, 25 bp, Artificial
  probe
  misc_feature (1)..(25): SEQ ID NO: 3191; WAN024AOT; Start 82; Stop 106
gcagaataaatgagacgatagatgg

SEQ ID NO: 348979 - DNA, 25 bp, Artificial
  probe
  misc_feature (1)..(25): SEQ ID NO: 3191; WAN024AOT; Start 103; Stop 127
atggcggtttatatcaaatagagca

SEQ ID NO: 348980 - DNA, 25 bp, Artificial
  probe
  misc_feature (1)..(25): SEQ ID NO: 3191; WAN024AOT; Start 102; Stop 126
gatggcggtttatatcaaatagagc

SEQ ID NO: 348981 - DNA, 25 bp, Artificial
  probe
  misc_feature (1)..(25): SEQ ID NO: 3191; WAN024AOT; Start 84; Stop 108
agaataaatgagacgatagatggcg

SEQ ID NO: 348982 - DNA, 25 bp, Artificial
  probe
  misc_feature (1)..(25): SEQ ID NO: 3191; WAN024AOT; Start 104; Stop 128
tggcggtttatatcaaatagagcaa

SEQ ID NO: 348983 - DNA, 25 bp, Artificial
  probe
  misc_feature (1)..(25): SEQ ID NO: 3191; WAN024AOT; Start 91; Stop 115
atgagacgatagatggcggtttata

SEQ ID NO: 348984 - DNA, 25 bp, Artificial
  probe
  misc_feature (1)..(25): SEQ ID NO: 3191; WAN024AOT; Start 92; Stop 116
tgagacgatagatggcggtttatat

SEQ ID NO: 348985 - DNA, 25 bp, Artificial
  probe
  misc_feature (1)..(25): SEQ ID NO: 3191; WAN024AOT; Start 85; Stop 109
gaataaatgagacgatagatggcgg

SEQ ID NO: 348986 - DNA, 25 bp, Artificial
  probe
  misc_feature (1)..(25): SEQ ID NO: 3191; WAN024AOT; Start 101; Stop 125
agatggcggtttatatcaaatagag

SEQ ID NO: 348987 - DNA, 25 bp, Artificial
  probe
  misc_feature (1)..(25): SEQ ID NO: 3191; WAN024AOT; Start 96; Stop 120
acgatagatggcggtttatatcaaa

SEQ ID NO: 348988 - DNA, 25 bp, Artificial
  probe
  misc_feature (1)..(25): SEQ ID NO: 3191; WAN024AOT; Start 90; Stop 114
aatgagacgatagatggcggtttat

SEQ ID NO: 348989 - DNA, 25 bp, Artificial
  probe
  misc_feature (1)..(25): SEQ ID NO: 3191; WAN024AOT; Start 87; Stop 111
ataaatgagacgatagatggcggtt

SEQ ID NO: 348990 - DNA, 25 bp, Artificial
  probe
  misc_feature (1)..(25): SEQ ID NO: 3191; WAN024AOT; Start 86; Stop 110
aataaatgagacgatagatggcggt

SEQ ID NO: 348991 - DNA, 25 bp, Artificial
  probe
  misc_feature (1)..(25): SEQ ID NO: 3191; WAN024AOT; Start 106; Stop 130
gcggtttatatcaaatagagcaaat

SEQ ID NO: 348992 - DNA, 25 bp, Artificial
  probe
  misc_feature (1)..(25): SEQ ID NO: 3191; WAN024AOT; Start 95; Stop 119
gacgatagatggcggtttatatcaa

SEQ ID NO: 348993 - DNA, 25 bp, Artificial
  probe
  misc_feature (1)..(25): SEQ ID NO: 3191; WAN024AOT; Start 97; Stop 121
cgatagatggcggtttatatcaaat

SEQ ID NO: 348994 - DNA, 25 bp, Artificial
  probe
  misc_feature (1)..(25): SEQ ID NO: 3191; WAN024AOT; Start 93; Stop 117
gagacgatagatggcggtttatatc

SEQ ID NO: 348995 - DNA, 25 bp, Artificial
  probe
  misc_feature (1)..(25): SEQ ID NO: 3191; WAN024AOT; Start 89; Stop 113
aaatgagacgatagatggcggttta

SEQ ID NO: 348996 - DNA, 25 bp, Artificial
  probe
  misc_feature (1)..(25): SEQ ID NO: 3191; WAN024AOT; Start 88; Stop 112
taaatgagacgatagatggcggttt

SEQ ID NO: 348997 - DNA, 25 bp, Artificial
  probe
  misc_feature (1)..(25): SEQ ID NO: 3191; WAN024AOT; Start 94; Stop 118
agacgatagatggcggtttatatca

SEQ ID NO: 348998 - DNA, 25 bp, Artificial
  probe
  misc_feature (1)..(25): SEQ ID NO: 3191; WAN024AOT; Start 70; Stop 94
aaggtcctcttcgcagaataaatga

SEQ ID NO: 348999 - DNA, 25 bp, Artificial
  probe
  misc_feature (1)..(25): SEQ ID NO: 3191; WAN024AOT; Start 73; Stop 97
gtcctcttcgcagaataaatgagac

SEQ ID NO: 349000 - DNA, 25 bp, Artificial
  probe
  misc_feature (1)..(25): SEQ ID NO: 3191; WAN024AOT; Start 58; Stop 82
tatcctatattgaaggtcctcttcg

SEQ ID NO: 349001 - DNA, 25 bp, Artificial
  probe
  misc_feature (1)..(25): SEQ ID NO: 3191; WAN024AOT; Start 100; Stop 124
tagatggcggtttatatcaaataga

SEQ ID NO: 349002 - DNA, 25 bp, Artificial
  probe
  misc_feature (1)..(25): SEQ ID NO: 3191; WAN024AOT; Start 54; Stop 78
gctttatcctatattgaaggtcctc

SEQ ID NO: 349003 - DNA, 25 bp, Artificial
  probe
  misc_feature (1)..(25): SEQ ID NO: 3191; WAN024AOT; Start 65; Stop 89
tattgaaggtcctcttcgcagaata

SEQ ID NO: 349004 - DNA, 25 bp, Artificial
  probe
  misc_feature (1)..(25): SEQ ID NO: 3191; WAN024AOT; Start 63; Stop 87
tatattgaaggtcctcttcgcagaa

SEQ ID NO: 349005 - DNA, 25 bp, Artificial
  probe
  misc_feature (1)..(25): SEQ ID NO: 3191; WAN024AOT; Start 72; Stop 96
ggtcctcttcgcagaataaatgaga

SEQ ID NO: 349006 - DNA, 25 bp, Artificial
  probe
  misc_feature (1)..(25): SEQ ID NO: 3191; WAN024AOT; Start 62; Stop 86
ctatattgaaggtcctcttcgcaga

SEQ ID NO: 349007 - DNA, 25 bp, Artificial
  probe
  misc_feature (1)..(25): SEQ ID NO: 3191; WAN024AOT; Start 59; Stop 83
atcctatattgaaggtcctcttcgc

SEQ ID NO: 349008 - DNA, 25 bp, Artificial
  probe
  misc_feature (1)..(25): SEQ ID NO: 3192; WAN024G53-3; Start 1054; Stop 1078
ctaatggagcgataggagtagtaga

SEQ ID NO: 349009 - DNA, 25 bp, Artificial
  probe
  misc_feature (1)..(25): SEQ ID NO: 3192; WAN024G53-3; Start 65; Stop 89
ctatgctattggactaactcaggac

SEQ ID NO: 349010 - DNA, 25 bp, Artificial
  probe
  misc_feature (1)..(25): SEQ ID NO: 3192; WAN024G53-3; Start 64; Stop 88
tctatgctattggactaactcagga

SEQ ID NO: 349011 - DNA, 25 bp, Artificial
  probe
  misc_feature (1)..(25): SEQ ID NO: 3192; WAN024G53-3; Start 759; Stop 783
ttacagttgcctaatgaagattcct

SEQ ID NO: 349012 - DNA, 25 bp, Artificial
  probe
  misc_feature (1)..(25): SEQ ID NO: 3192; WAN024G53-3; Start 1055; Stop 1079
taatggagcgataggagtagtagac

SEQ ID NO: 349013 - DNA, 25 bp, Artificial
  probe
  misc_feature (1)..(25): SEQ ID NO: 3192; WAN024G53-3; Start 66; Stop 90
tatgctattggactaactcaggaca

SEQ ID NO: 349014 - DNA, 25 bp, Artificial
  probe
  misc_feature (1)..(25): SEQ ID NO: 3192; WAN024G53-3; Start 985; Stop 1009
ttattcaattagacaatggacgcag

SEQ ID NO: 349015 - DNA, 25 bp, Artificial
  probe
  misc_feature (1)..(25): SEQ ID NO: 3192; WAN024G53-3; Start 760; Stop 784
tacagttgcctaatgaagattcctt

SEQ ID NO: 349016 - DNA, 25 bp, Artificial
  probe
  misc_feature (1)..(25): SEQ ID NO: 3192; WAN024G53-3; Start 758; Stop 782
cttacagttgcctaatgaagattcc

SEQ ID NO: 349017 - DNA, 25 bp, Artificial
  probe
  misc_feature (1)..(25): SEQ ID NO: 3192; WAN024G53-3; Start 757; Stop 781
ccttacagttgcctaatgaagattc

SEQ ID NO: 349018 - DNA, 25 bp, Artificial
  probe
  misc_feature (1)..(25): SEQ ID NO: 3192; WAN024G53-3; Start 986; Stop 1010
tattcaattagacaatggacgcagt

SEQ ID NO: 349019 - DNA, 25 bp, Artificial
  probe
  misc_feature (1)..(25): SEQ ID NO: 3192; WAN024G53-3; Start 1382; Stop 1406
cctactggactacaatgcctatctt

SEQ ID NO: 349020 - DNA, 25 bp, Artificial
  probe
  misc_feature (1)..(25): SEQ ID NO: 3192; WAN024G53-3; Start 1132; Stop 1156
attctcagttaccaacctatcttgc

SEQ ID NO: 349021 - DNA, 25 bp, Artificial
  probe
  misc_feature (1)..(25): SEQ ID NO: 3192; WAN024G53-3; Start 1127; Stop 1151
gctcaattctcagttaccaacctat

SEQ ID NO: 349022 - DNA, 25 bp, Artificial
  probe
  misc_feature (1)..(25): SEQ ID NO: 3192; WAN024G53-3; Start 1129; Stop 1153
tcaattctcagttaccaacctatct

SEQ ID NO: 349023 - DNA, 25 bp, Artificial
  probe
  misc_feature (1)..(25): SEQ ID NO: 3192; WAN024G53-3; Start 756; Stop 780
gccttacagttgcctaatgaagatt

SEQ ID NO: 349024 - DNA, 25 bp, Artificial
  probe
  misc_feature (1)..(25): SEQ ID NO: 3192; WAN024G53-3; Start 343; Stop 367
ggagagagaagaggatgaatcacaa

SEQ ID NO: 349025 - DNA, 25 bp, Artificial
  probe
  misc_feature (1)..(25): SEQ ID NO: 3192; WAN024G53-3; Start 1344; Stop 1368
aacaaggctaatcaactgacagatg

SEQ ID NO: 349026 - DNA, 25 bp, Artificial
  probe
  misc_feature (1)..(25): SEQ ID NO: 3192; WAN024G53-3; Start 1128; Stop 1152
ctcaattctcagttaccaacctatc

SEQ ID NO: 349027 - DNA, 25 bp, Artificial
  probe
  misc_feature (1)..(25): SEQ ID NO: 3192; WAN024G53-3; Start 1350; Stop 1374
gctaatcaactgacagatgaggaat

SEQ ID NO: 349028 - DNA, 25 bp, Artificial
  probe
  misc_feature (1)..(25): SEQ ID NO: 3192; WAN024G53-3; Start 1442; Stop 1466
gttcgccatcaatccttatactgaa

SEQ ID NO: 349029 - DNA, 25 bp, Artificial
  probe
  misc_feature (1)..(25): SEQ ID NO: 3192; WAN024G53-3; Start 1133; Stop 1157
ttctcagttaccaacctatcttgct

SEQ ID NO: 349030 - DNA, 25 bp, Artificial
  probe
  misc_feature (1)..(25): SEQ ID NO: 3192; WAN024G53-3; Start 67; Stop 91
atgctattggactaactcaggacaa

SEQ ID NO: 349031 - DNA, 25 bp, Artificial
  probe
  misc_feature (1)..(25): SEQ ID NO: 3192; WAN024G53-3; Start 1130; Stop 1154
caattctcagttaccaacctatctt

SEQ ID NO: 349032 - DNA, 25 bp, Artificial
  probe
  misc_feature (1)..(25): SEQ ID NO: 3192; WAN024G53-3; Start 63; Stop 87
gtctatgctattggactaactcagg

SEQ ID NO: 349033 - DNA, 25 bp, Artificial
  probe
  misc_feature (1)..(25): SEQ ID NO: 3192; WAN024G53-3; Start 1131; Stop 1155
aattctcagttaccaacctatcttg

SEQ ID NO: 349034 - DNA, 25 bp, Artificial
  probe
  misc_feature (1)..(25): SEQ ID NO: 3192; WAN024G53-3; Start 1057; Stop 1081
atggagcgataggagtagtagacta

SEQ ID NO: 349035 - DNA, 25 bp, Artificial
  probe
  misc_feature (1)..(25): SEQ ID NO: 3192; WAN024G53-3; Start 987; Stop 1011
attcaattagacaatggacgcagtg

SEQ ID NO: 349036 - DNA, 25 bp, Artificial
  probe
  misc_feature (1)..(25): SEQ ID NO: 3192; WAN024G53-3; Start 62; Stop 86
tgtctatgctattggactaactcag

SEQ ID NO: 349037 - DNA, 25 bp, Artificial
  probe
  misc_feature (1)..(25): SEQ ID NO: 3192; WAN024G53-3; Start 1351; Stop 1375
ctaatcaactgacagatgaggaatt

SEQ ID NO: 349038 - DNA, 25 bp, Artificial
  probe
  misc_feature (1)..(25): SEQ ID NO: 3192; WAN024G53-3; Start 1346; Stop 1370
caaggctaatcaactgacagatgag

SEQ ID NO: 349039 - DNA, 25 bp, Artificial
  probe
  misc_feature (1)..(25): SEQ ID NO: 3192; WAN024G53-3; Start 299; Stop 323
ggaatctgcctatcttcaagagttg

SEQ ID NO: 349040 - DNA, 25 bp, Artificial
  probe
  misc_feature (1)..(25): SEQ ID NO: 3192; WAN024G53-3; Start 61; Stop 85
ttgtctatgctattggactaactca

SEQ ID NO: 349041 - DNA, 25 bp, Artificial
  probe
  misc_feature (1)..(25): SEQ ID NO: 3193; WAN0249DX; Start 20; Stop 44
ctgttttcactggagttcttttcat

SEQ ID NO: 349042 - DNA, 25 bp, Artificial
  probe
  misc_feature (1)..(25): SEQ ID NO: 3193; WAN0249DX; Start 26; Stop 50
tcactggagttcttttcattgtttt

SEQ ID NO: 349043 - DNA, 25 bp, Artificial
  probe
  misc_feature (1)..(25): SEQ ID NO: 3193; WAN0249DX; Start 25; Stop 49
ttcactggagttcttttcattgttt

SEQ ID NO: 349044 - DNA, 25 bp, Artificial
  probe
  misc_feature (1)..(25): SEQ ID NO: 3193; WAN0249DX; Start 24; Stop 48
tttcactggagttcttttcattgtt

SEQ ID NO: 349045 - DNA, 25 bp, Artificial
  probe
  misc_feature (1)..(25): SEQ ID NO: 3193; WAN0249DX; Start 23; Stop 47
ttttcactggagttcttttcattgt

SEQ ID NO: 349046 - DNA, 25 bp, Artificial
  probe
  misc_feature (1)..(25): SEQ ID NO: 3193; WAN0249DX; Start 21; Stop 45
tgttttcactggagttcttttcatt

SEQ ID NO: 349047 - DNA, 25 bp, Artificial
  probe
  misc_feature (1)..(25): SEQ ID NO: 3193; WAN0249DX; Start 22; Stop 46
gttttcactggagttcttttcattg

SEQ ID NO: 349048 - DNA, 25 bp, Artificial
  probe
  misc_feature (1)..(25): SEQ ID NO: 3193; WAN0249DX; Start 19; Stop 43
cctgttttcactggagttcttttca

SEQ ID NO: 349049 - DNA, 25 bp, Artificial
  probe
  misc_feature (1)..(25): SEQ ID NO: 3193; WAN0249DX; Start 8; Stop 32
gtaaaagaactcctgttttcactgg

SEQ ID NO: 349050 - DNA, 25 bp, Artificial
  probe
  misc_feature (1)..(25): SEQ ID NO: 3193; WAN0249DX; Start 7; Stop 31
tgtaaaagaactcctgttttcactg

SEQ ID NO: 349051 - DNA, 25 bp, Artificial
  probe
  misc_feature (1)..(25): SEQ ID NO: 3193; WAN0249DX; Start 9; Stop 33
taaaagaactcctgttttcactgga

SEQ ID NO: 349052 - DNA, 25 bp, Artificial
  probe
  misc_feature (1)..(25): SEQ ID NO: 3193; WAN0249DX; Start 6; Stop 30
ttgtaaaagaactcctgttttcact

SEQ ID NO: 349053 - DNA, 25 bp, Artificial
  probe
  misc_feature (1)..(25): SEQ ID NO: 3193; WAN0249DX; Start 18; Stop 42
tcctgttttcactggagttcttttc

SEQ ID NO: 349054 - DNA, 25 bp, Artificial
  probe
  misc_feature (1)..(25): SEQ ID NO: 3193; WAN0249DX; Start 5; Stop 29
attgtaaaagaactcctgttttcac

SEQ ID NO: 349055 - DNA, 25 bp, Artificial
  probe
  misc_feature (1)..(25): SEQ ID NO: 3193; WAN0249DX; Start 4; Stop 28
cattgtaaaagaactcctgttttca

SEQ ID NO: 349056 - DNA, 25 bp, Artificial
  probe
  misc_feature (1)..(25): SEQ ID NO: 3193; WAN0249DX; Start 3; Stop 27
acattgtaaaagaactcctgttttc

SEQ ID NO: 349057 - DNA, 25 bp, Artificial
  probe
  misc_feature (1)..(25): SEQ ID NO: 3193; WAN0249DX; Start 1; Stop 25
caacattgtaaaagaactcctgttt

SEQ ID NO: 349058 - DNA, 25 bp, Artificial
  probe
  misc_feature (1)..(25): SEQ ID NO: 3193; WAN0249DX; Start 2; Stop 26
aacattgtaaaagaactcctgtttt

SEQ ID NO: 349059 - DNA, 25 bp, Artificial
  probe
  misc_feature (1)..(25): SEQ ID NO: 3193; WAN0249DX; Start 17; Stop 41
ctcctgttttcactggagttctttt

SEQ ID NO: 349060 - DNA, 25 bp, Artificial
  probe
  misc_feature (1)..(25): SEQ ID NO: 3193; WAN0249DX; Start 10; Stop 34
aaaagaactcctgttttcactggag

SEQ ID NO: 349061 - DNA, 25 bp, Artificial
  probe
  misc_feature (1)..(25): SEQ ID NO: 3194; WAN024GL9-3; Start 78; Stop 102
tacagaaggtggagaaggtattgaa

SEQ ID NO: 349062 - DNA, 25 bp, Artificial
  probe
  misc_feature (1)..(25): SEQ ID NO: 3194; WAN024GL9-3; Start 79; Stop 103
acagaaggtggagaaggtattgaag

SEQ ID NO: 349063 - DNA, 25 bp, Artificial
  probe
  misc_feature (1)..(25): SEQ ID NO: 3194; WAN024GL9-3; Start 76; Stop 100
gatacagaaggtggagaaggtattg

SEQ ID NO: 349064 - DNA, 25 bp, Artificial
  probe
  misc_feature (1)..(25): SEQ ID NO: 3194; WAN024GL9-3; Start 75; Stop 99
agatacagaaggtggagaaggtatt

SEQ ID NO: 349065 - DNA, 25 bp, Artificial
  probe
  misc_feature (1)..(25): SEQ ID NO: 3194; WAN024GL9-3; Start 77; Stop 101
atacagaaggtggagaaggtattga

SEQ ID NO: 349066 - DNA, 25 bp, Artificial
  probe
  misc_feature (1)..(25): SEQ ID NO: 3194; WAN024GL9-3; Start 1890; Stop 1914
tgatctctcttatgcttctattgtg

SEQ ID NO: 349067 - DNA, 25 bp, Artificial
  probe
  misc_feature (1)..(25): SEQ ID NO: 3194; WAN024GL9-3; Start 74; Stop 98
cagatacagaaggtggagaaggtat

SEQ ID NO: 349068 - DNA, 25 bp, Artificial
  probe
  misc_feature (1)..(25): SEQ ID NO: 3194; WAN024GL9-3; Start 80; Stop 104
cagaaggtggagaaggtattgaagg

SEQ ID NO: 349069 - DNA, 25 bp, Artificial
  probe
  misc_feature (1)..(25): SEQ ID NO: 3194; WAN024GL9-3; Start 1891; Stop 1915
gatctctcttatgcttctattgtga

SEQ ID NO: 349070 - DNA, 25 bp, Artificial
  probe
  misc_feature (1)..(25): SEQ ID NO: 3194; WAN024GL9-3; Start 1885; Stop 1909
gatgttgatctctcttatgcttcta

SEQ ID NO: 349071 - DNA, 25 bp, Artificial
  probe
  misc_feature (1)..(25): SEQ ID NO: 3194; WAN024GL9-3; Start 1892; Stop 1916
atctctcttatgcttctattgtgaa

SEQ ID NO: 349072 - DNA, 25 bp, Artificial
  probe
  misc_feature (1)..(25): SEQ ID NO: 3194; WAN024GL9-3; Start 81; Stop 105
agaaggtggagaaggtattgaaggt

SEQ ID NO: 349073 - DNA, 25 bp, Artificial
  probe
  misc_feature (1)..(25): SEQ ID NO: 3194; WAN024GL9-3; Start 2021; Stop 2045
ttacagcacctcactttactcatta

SEQ ID NO: 349074 - DNA, 25 bp, Artificial
  probe
  misc_feature (1)..(25): SEQ ID NO: 3194; WAN024GL9-3; Start 2029; Stop 2053
cctcactttactcattatgcctttg

SEQ ID NO: 349075 - DNA, 25 bp, Artificial
  probe
  misc_feature (1)..(25): SEQ ID NO: 3194; WAN024GL9-3; Start 2028; Stop 2052
acctcactttactcattatgccttt

SEQ ID NO: 349076 - DNA, 25 bp, Artificial
  probe
  misc_feature (1)..(25): SEQ ID NO: 3194; WAN024GL9-3; Start 2020; Stop 2044
tttacagcacctcactttactcatt

SEQ ID NO: 349077 - DNA, 25 bp, Artificial
  probe
  misc_feature (1)..(25): SEQ ID NO: 3194; WAN024GL9-3; Start 2022; Stop 2046
tacagcacctcactttactcattat

SEQ ID NO: 349078 - DNA, 25 bp, Artificial
  probe
  misc_feature (1)..(25): SEQ ID NO: 3194; WAN024GL9-3; Start 2017; Stop 2041
atctttacagcacctcactttactc

SEQ ID NO: 349079 - DNA, 25 bp, Artificial
  probe
  misc_feature (1)..(25): SEQ ID NO: 3194; WAN024GL9-3; Start 2016; Stop 2040
tatctttacagcacctcactttact

SEQ ID NO: 349080 - DNA, 25 bp, Artificial
  probe
  misc_feature (1)..(25): SEQ ID NO: 3194; WAN024GL9-3; Start 2030; Stop 2054
ctcactttactcattatgcctttgt

SEQ ID NO: 349081 - DNA, 25 bp, Artificial
  probe
  misc_feature (1)..(25): SEQ ID NO: 3194; WAN024GL9-3; Start 2019; Stop 2043
ctttacagcacctcactttactcat

SEQ ID NO: 349082 - DNA, 25 bp, Artificial
  probe
  misc_feature (1)..(25): SEQ ID NO: 3194; WAN024GL9-3; Start 2027; Stop 2051
cacctcactttactcattatgcctt

SEQ ID NO: 349083 - DNA, 25 bp, Artificial
  probe
  misc_feature (1)..(25): SEQ ID NO: 3194; WAN024GL9-3; Start 2023; Stop 2047
acagcacctcactttactcattatg

SEQ ID NO: 349084 - DNA, 25 bp, Artificial
  probe
  misc_feature (1)..(25): SEQ ID NO: 3194; WAN024GL9-3; Start 1889; Stop 1913
ttgatctctcttatgcttctattgt

SEQ ID NO: 349085 - DNA, 25 bp, Artificial
  probe
  misc_feature (1)..(25): SEQ ID NO: 3194; WAN024GL9-3; Start 1887; Stop 1911
tgttgatctctcttatgcttctatt

SEQ ID NO: 349086 - DNA, 25 bp, Artificial
  probe
  misc_feature (1)..(25): SEQ ID NO: 3194; WAN024GL9-3; Start 2031; Stop 2055
tcactttactcattatgcctttgtt

SEQ ID NO: 349087 - DNA, 25 bp, Artificial
  probe
  misc_feature (1)..(25): SEQ ID NO: 3194; WAN024GL9-3; Start 2015; Stop 2039
ttatctttacagcacctcactttac

SEQ ID NO: 349088 - DNA, 25 bp, Artificial
  probe
  misc_feature (1)..(25): SEQ ID NO: 3194; WAN024GL9-3; Start 2014; Stop 2038
gttatctttacagcacctcacttta

SEQ ID NO: 349089 - DNA, 25 bp, Artificial
  probe
  misc_feature (1)..(25): SEQ ID NO: 3194; WAN024GL9-3; Start 1888; Stop 1912
gttgatctctcttatgcttctattg

SEQ ID NO: 349090 - DNA, 25 bp, Artificial
  probe
  misc_feature (1)..(25): SEQ ID NO: 3194; WAN024GL9-3; Start 588; Stop 612
taatccaaattctcaaactccactc

SEQ ID NO: 349091 - DNA, 25 bp, Artificial
  probe
  misc_feature (1)..(25): SEQ ID NO: 3194; WAN024GL9-3; Start 1886; Stop 1910
atgttgatctctcttatgcttctat

SEQ ID NO: 349092 - DNA, 25 bp, Artificial
  probe
  misc_feature (1)..(25): SEQ ID NO: 3194; WAN024GL9-3; Start 1884; Stop 1908
agatgttgatctctcttatgcttct

SEQ ID NO: 349093 - DNA, 25 bp, Artificial
  probe
  misc_feature (1)..(25): SEQ ID NO: 3194; WAN024GL9-3; Start 2018; Stop 2042
tctttacagcacctcactttactca

SEQ ID NO: 349094 - DNA, 25 bp, Artificial
  probe
  misc_feature (1)..(25): SEQ ID NO: 3195; WAN0249FK; Start 13; Stop 37
cgacaataggacaattcacctctaa

SEQ ID NO: 349095 - DNA, 25 bp, Artificial
  probe
  misc_feature (1)..(25): SEQ ID NO: 3195; WAN0249FK; Start 12; Stop 36
acgacaataggacaattcacctcta

SEQ ID NO: 349096 - DNA, 25 bp, Artificial
  probe
  misc_feature (1)..(25): SEQ ID NO: 3195; WAN0249FK; Start 14; Stop 38
gacaataggacaattcacctctaat

SEQ ID NO: 349097 - DNA, 25 bp, Artificial
  probe
  misc_feature (1)..(25): SEQ ID NO: 3195; WAN0249FK; Start 15; Stop 39
acaataggacaattcacctctaatt

SEQ ID NO: 349098 - DNA, 25 bp, Artificial
  probe
  misc_feature (1)..(25): SEQ ID NO: 3195; WAN0249FK; Start 11; Stop 35
gacgacaataggacaattcacctct

SEQ ID NO: 349099 - DNA, 25 bp, Artificial
  probe
  misc_feature (1)..(25): SEQ ID NO: 3195; WAN0249FK; Start 21; Stop 45
ggacaattcacctctaattattgac

SEQ ID NO: 349100 - DNA, 25 bp, Artificial
  probe
  misc_feature (1)..(25): SEQ ID NO: 3195; WAN0249FK; Start 20; Stop 44
aggacaattcacctctaattattga

SEQ ID NO: 349101 - DNA, 25 bp, Artificial
  probe
  misc_feature (1)..(25): SEQ ID NO: 3195; WAN0249FK; Start 22; Stop 46
gacaattcacctctaattattgaca

SEQ ID NO: 349102 - DNA, 25 bp, Artificial
  probe
  misc_feature (1)..(25): SEQ ID NO: 3195; WAN0249FK; Start 16; Stop 40
caataggacaattcacctctaatta

SEQ ID NO: 349103 - DNA, 25 bp, Artificial
  probe
  misc_feature (1)..(25): SEQ ID NO: 3195; WAN0249FK; Start 30; Stop 54
acctctaattattgacatttcagga

SEQ ID NO: 349104 - DNA, 25 bp, Artificial
  probe
  misc_feature (1)..(25): SEQ ID NO: 3195; WAN0249FK; Start 29; Stop 53
cacctctaattattgacatttcagg

SEQ ID NO: 349105 - DNA, 25 bp, Artificial
  probe
  misc_feature (1)..(25): SEQ ID NO: 3195; WAN0249FK; Start 28; Stop 52
tcacctctaattattgacatttcag

SEQ ID NO: 349106 - DNA, 25 bp, Artificial
  probe
  misc_feature (1)..(25): SEQ ID NO: 3195; WAN0249FK; Start 75; Stop 99
acagccttctttaaatgtgctataa

SEQ ID NO: 349107 - DNA, 25 bp, Artificial
  probe
  misc_feature (1)..(25): SEQ ID NO: 3195; WAN0249FK; Start 23; Stop 47
acaattcacctctaattattgacat

SEQ ID NO: 349108 - DNA, 25 bp, Artificial
  probe
  misc_feature (1)..(25): SEQ ID NO: 3195; WAN0249FK; Start 19; Stop 43
taggacaattcacctctaattattg

SEQ ID NO: 349109 - DNA, 25 bp, Artificial
  probe
  misc_feature (1)..(25): SEQ ID NO: 3195; WAN0249FK; Start 31; Stop 55
cctctaattattgacatttcaggaa

SEQ ID NO: 349110 - DNA, 25 bp, Artificial
  probe
  misc_feature (1)..(25): SEQ ID NO: 3195; WAN0249FK; Start 27; Stop 51
ttcacctctaattattgacatttca

SEQ ID NO: 349111 - DNA, 25 bp, Artificial
  probe
  misc_feature (1)..(25): SEQ ID NO: 3195; WAN0249FK; Start 78; Stop 102
gccttctttaaatgtgctataatac

SEQ ID NO: 349112 - DNA, 25 bp, Artificial
  probe
  misc_feature (1)..(25): SEQ ID NO: 3195; WAN0249FK; Start 76; Stop 100
cagccttctttaaatgtgctataat

SEQ ID NO: 349113 - DNA, 25 bp, Artificial
  probe
  misc_feature (1)..(25): SEQ ID NO: 3195; WAN0249FK; Start 18; Stop 42
ataggacaattcacctctaattatt

SEQ ID NO: 349114 - DNA, 25 bp, Artificial
  probe
  misc_feature (1)..(25): SEQ ID NO: 3195; WAN0249FK; Start 17; Stop 41
aataggacaattcacctctaattat

SEQ ID NO: 349115 - DNA, 25 bp, Artificial
  probe
  misc_feature (1)..(25): SEQ ID NO: 3195; WAN0249FK; Start 24; Stop 48
caattcacctctaattattgacatt

SEQ ID NO: 349116 - DNA, 25 bp, Artificial
  probe
  misc_feature (1)..(25): SEQ ID NO: 3195; WAN0249FK; Start 74; Stop 98
cacagccttctttaaatgtgctata

SEQ ID NO: 349117 - DNA, 25 bp, Artificial
  probe
  misc_feature (1)..(25): SEQ ID NO: 3195; WAN0249FK; Start 32; Stop 56
ctctaattattgacatttcaggaaa

SEQ ID NO: 349118 - DNA, 25 bp, Artificial
  probe
  misc_feature (1)..(25): SEQ ID NO: 3195; WAN0249FK; Start 26; Stop 50
attcacctctaattattgacatttc

SEQ ID NO: 349119 - DNA, 25 bp, Artificial
  probe
  misc_feature (1)..(25): SEQ ID NO: 3195; WAN0249FK; Start 77; Stop 101
agccttctttaaatgtgctataata

SEQ ID NO: 349120 - DNA, 25 bp, Artificial
  probe
  misc_feature (1)..(25): SEQ ID NO: 3195; WAN0249FK; Start 68; Stop 92
aaacggcacagccttctttaaatgt

SEQ ID NO: 349121 - DNA, 25 bp, Artificial
  probe
  misc_feature (1)..(25): SEQ ID NO: 3195; WAN0249FK; Start 67; Stop 91
aaaacggcacagccttctttaaatg

SEQ ID NO: 349122 - DNA, 25 bp, Artificial
  probe
  misc_feature (1)..(25): SEQ ID NO: 3195; WAN0249FK; Start 69; Stop 93
aacggcacagccttctttaaatgtg

SEQ ID NO: 349123 - DNA, 25 bp, Artificial
  probe
  misc_feature (1)..(25): SEQ ID NO: 3196; WAN0249PU; Start 25; Stop 49
agtaaactatccagcaaatctttct

SEQ ID NO: 349124 - DNA, 25 bp, Artificial
  probe
  misc_feature (1)..(25): SEQ ID NO: 3196; WAN0249PU; Start 24; Stop 48
aagtaaactatccagcaaatctttc

SEQ ID NO: 349125 - DNA, 25 bp, Artificial
  probe
  misc_feature (1)..(25): SEQ ID NO: 3196; WAN0249PU; Start 26; Stop 50
gtaaactatccagcaaatctttcta

SEQ ID NO: 349126 - DNA, 25 bp, Artificial
  probe
  misc_feature (1)..(25): SEQ ID NO: 3196; WAN0249PU; Start 28; Stop 52
aaactatccagcaaatctttctatt

SEQ ID NO: 349127 - DNA, 25 bp, Artificial
  probe
  misc_feature (1)..(25): SEQ ID NO: 3196; WAN0249PU; Start 16; Stop 40
cgaaatttaagtaaactatccagca

SEQ ID NO: 349128 - DNA, 25 bp, Artificial
  probe
  misc_feature (1)..(25): SEQ ID NO: 3196; WAN0249PU; Start 15; Stop 39
tcgaaatttaagtaaactatccagc

SEQ ID NO: 349129 - DNA, 25 bp, Artificial
  probe
  misc_feature (1)..(25): SEQ ID NO: 3196; WAN0249PU; Start 21; Stop 45
tttaagtaaactatccagcaaatct

SEQ ID NO: 349130 - DNA, 25 bp, Artificial
  probe
  misc_feature (1)..(25): SEQ ID NO: 3196; WAN0249PU; Start 23; Stop 47
taagtaaactatccagcaaatcttt

SEQ ID NO: 349131 - DNA, 25 bp, Artificial
  probe
  misc_feature (1)..(25): SEQ ID NO: 3196; WAN0249PU; Start 22; Stop 46
ttaagtaaactatccagcaaatctt

SEQ ID NO: 349132 - DNA, 25 bp, Artificial
  probe
  misc_feature (1)..(25): SEQ ID NO: 3196; WAN0249PU; Start 3; Stop 27
agatgatgacaatcgaaatttaagt

SEQ ID NO: 349133 - DNA, 25 bp, Artificial
  probe
  misc_feature (1)..(25): SEQ ID NO: 3196; WAN0249PU; Start 29; Stop 53
aactatccagcaaatctttctatta

SEQ ID NO: 349134 - DNA, 25 bp, Artificial
  probe
  misc_feature (1)..(25): SEQ ID NO: 3196; WAN0249PU; Start 27; Stop 51
taaactatccagcaaatctttctat

SEQ ID NO: 349135 - DNA, 25 bp, Artificial
  probe
  misc_feature (1)..(25): SEQ ID NO: 3196; WAN0249PU; Start 55; Stop 79
aaaaggcatcctatcaaggttttca

SEQ ID NO: 349136 - DNA, 25 bp, Artificial
  probe
  misc_feature (1)..(25): SEQ ID NO: 3196; WAN0249PU; Start 56; Stop 80
aaaggcatcctatcaaggttttcac

SEQ ID NO: 349137 - DNA, 25 bp, Artificial
  probe
  misc_feature (1)..(25): SEQ ID NO: 3196; WAN0249PU; Start 1; Stop 25
caagatgatgacaatcgaaatttaa

SEQ ID NO: 349138 - DNA, 25 bp, Artificial
  probe
  misc_feature (1)..(25): SEQ ID NO: 3196; WAN0249PU; Start 2; Stop 26
aagatgatgacaatcgaaatttaag

SEQ ID NO: 349139 - DNA, 25 bp, Artificial
  probe
  misc_feature (1)..(25): SEQ ID NO: 3196; WAN0249PU; Start 57; Stop 81
aaggcatcctatcaaggttttcaca

SEQ ID NO: 349140 - DNA, 25 bp, Artificial
  probe
  misc_feature (1)..(25): SEQ ID NO: 3196; WAN0249PU; Start 20; Stop 44
atttaagtaaactatccagcaaatc

SEQ ID NO: 349141 - DNA, 25 bp, Artificial
  probe
  misc_feature (1)..(25): SEQ ID NO: 3196; WAN0249PU; Start 17; Stop 41
gaaatttaagtaaactatccagcaa

SEQ ID NO: 349142 - DNA, 25 bp, Artificial
  probe
  misc_feature (1)..(25): SEQ ID NO: 3196; WAN0249PU; Start 58; Stop 82
aggcatcctatcaaggttttcacac

SEQ ID NO: 349143 - DNA, 25 bp, Artificial
  probe
  misc_feature (1)..(25): SEQ ID NO: 3196; WAN0249PU; Start 4; Stop 28
gatgatgacaatcgaaatttaagta

SEQ ID NO: 349144 - DNA, 25 bp, Artificial
  probe
  misc_feature (1)..(25): SEQ ID NO: 3196; WAN0249PU; Start 19; Stop 43
aatttaagtaaactatccagcaaat

SEQ ID NO: 349145 - DNA, 25 bp, Artificial
  probe
  misc_feature (1)..(25): SEQ ID NO: 3196; WAN0249PU; Start 8; Stop 32
atgacaatcgaaatttaagtaaact

SEQ ID NO: 349146 - DNA, 25 bp, Artificial
  probe
  misc_feature (1)..(25): SEQ ID NO: 3196; WAN0249PU; Start 6; Stop 30
tgatgacaatcgaaatttaagtaaa

SEQ ID NO: 349147 - DNA, 25 bp, Artificial
  probe
  misc_feature (1)..(25): SEQ ID NO: 3196; WAN0249PU; Start 7; Stop 31
gatgacaatcgaaatttaagtaaac

SEQ ID NO: 349148 - DNA, 25 bp, Artificial
  probe
  misc_feature (1)..(25): SEQ ID NO: 3196; WAN0249PU; Start 18; Stop 42
aaatttaagtaaactatccagcaaa

SEQ ID NO: 349149 - DNA, 25 bp, Artificial
  probe
  misc_feature (1)..(25): SEQ ID NO: 3196; WAN0249PU; Start 5; Stop 29
atgatgacaatcgaaatttaagtaa

SEQ ID NO: 349150 - DNA, 25 bp, Artificial
  probe
  misc_feature (1)..(25): SEQ ID NO: 3196; WAN0249PU; Start 14; Stop 38
atcgaaatttaagtaaactatccag

SEQ ID NO: 349151 - DNA, 25 bp, Artificial
  probe
  misc_feature (1)..(25): SEQ ID NO: 3196; WAN0249PU; Start 9; Stop 33
tgacaatcgaaatttaagtaaacta

SEQ ID NO: 349152 - DNA, 25 bp, Artificial
  probe
  misc_feature (1)..(25): SEQ ID NO: 3197; WAN024D9O; Start 15; Stop 39
cggagatgaataatggtcttgtcaa

SEQ ID NO: 349153 - DNA, 25 bp, Artificial
  probe
  misc_feature (1)..(25): SEQ ID NO: 3197; WAN024D9O; Start 11; Stop 35
ttgacggagatgaataatggtcttg

SEQ ID NO: 349154 - DNA, 25 bp, Artificial
  probe
  misc_feature (1)..(25): SEQ ID NO: 3197; WAN024D9O; Start 14; Stop 38
acggagatgaataatggtcttgtca

SEQ ID NO: 349155 - DNA, 25 bp, Artificial
  probe
  misc_feature (1)..(25): SEQ ID NO: 3197; WAN024D9O; Start 13; Stop 37
gacggagatgaataatggtcttgtc

SEQ ID NO: 349156 - DNA, 25 bp, Artificial
  probe
  misc_feature (1)..(25): SEQ ID NO: 3197; WAN024D9O; Start 12; Stop 36
tgacggagatgaataatggtcttgt

SEQ ID NO: 349157 - DNA, 25 bp, Artificial
  probe
  misc_feature (1)..(25): SEQ ID NO: 3197; WAN024D9O; Start 255; Stop 279
catatttctcgcttgggattgtatc

SEQ ID NO: 349158 - DNA, 25 bp, Artificial
  probe
  misc_feature (1)..(25): SEQ ID NO: 3197; WAN024D9O; Start 245; Stop 269
gattgcttcacatatttctcgcttg

SEQ ID NO: 349159 - DNA, 25 bp, Artificial
  probe
  misc_feature (1)..(25): SEQ ID NO: 3197; WAN024D9O; Start 256; Stop 280
atatttctcgcttgggattgtatcg

SEQ ID NO: 349160 - DNA, 25 bp, Artificial
  probe
  misc_feature (1)..(25): SEQ ID NO: 3197; WAN024D9O; Start 250; Stop 274
cttcacatatttctcgcttgggatt

SEQ ID NO: 349161 - DNA, 25 bp, Artificial
  probe
  misc_feature (1)..(25): SEQ ID NO: 3197; WAN024D9O; Start 50; Stop 74
acgaaaggtgctagaagaaatcatt

SEQ ID NO: 349162 - DNA, 25 bp, Artificial
  probe
  misc_feature (1)..(25): SEQ ID NO: 3197; WAN024D9O; Start 244; Stop 268
agattgcttcacatatttctcgctt

SEQ ID NO: 349163 - DNA, 25 bp, Artificial
  probe
  misc_feature (1)..(25): SEQ ID NO: 3197; WAN024D9O; Start 251; Stop 275
ttcacatatttctcgcttgggattg

SEQ ID NO: 349164 - DNA, 25 bp, Artificial
  probe
  misc_feature (1)..(25): SEQ ID NO: 3197; WAN024D9O; Start 7; Stop 31
ctatttgacggagatgaataatggt

SEQ ID NO: 349165 - DNA, 25 bp, Artificial
  probe
  misc_feature (1)..(25): SEQ ID NO: 3197; WAN024D9O; Start 6; Stop 30
actatttgacggagatgaataatgg

SEQ ID NO: 349166 - DNA, 25 bp, Artificial
  probe
  misc_feature (1)..(25): SEQ ID NO: 3197; WAN024D9O; Start 16; Stop 40
ggagatgaataatggtcttgtcaaa

SEQ ID NO: 349167 - DNA, 25 bp, Artificial
  probe
  misc_feature (1)..(25): SEQ ID NO: 3197; WAN024D9O; Start 617; Stop 641
tgaccagtacccacaattatatgat

SEQ ID NO: 349168 - DNA, 25 bp, Artificial
  probe
  misc_feature (1)..(25): SEQ ID NO: 3197; WAN024D9O; Start 4; Stop 28
ggactatttgacggagatgaataat

SEQ ID NO: 349169 - DNA, 25 bp, Artificial
  probe
  misc_feature (1)..(25): SEQ ID NO: 3197; WAN024D9O; Start 254; Stop 278
acatatttctcgcttgggattgtat

SEQ ID NO: 349170 - DNA, 25 bp, Artificial
  probe
  misc_feature (1)..(25): SEQ ID NO: 3197; WAN024D9O; Start 10; Stop 34
tttgacggagatgaataatggtctt

SEQ ID NO: 349171 - DNA, 25 bp, Artificial
  probe
  misc_feature (1)..(25): SEQ ID NO: 3197; WAN024D9O; Start 9; Stop 33
atttgacggagatgaataatggtct

SEQ ID NO: 349172 - DNA, 25 bp, Artificial
  probe
  misc_feature (1)..(25): SEQ ID NO: 3197; WAN024D9O; Start 253; Stop 277
cacatatttctcgcttgggattgta

SEQ ID NO: 349173 - DNA, 25 bp, Artificial
  probe
  misc_feature (1)..(25): SEQ ID NO: 3197; WAN024D9O; Start 246; Stop 270
attgcttcacatatttctcgcttgg

SEQ ID NO: 349174 - DNA, 25 bp, Artificial
  probe
  misc_feature (1)..(25): SEQ ID NO: 3197; WAN024D9O; Start 618; Stop 642
gaccagtacccacaattatatgatt

SEQ ID NO: 349175 - DNA, 25 bp, Artificial
  probe
  misc_feature (1)..(25): SEQ ID NO: 3197; WAN024D9O; Start 264; Stop 288
cgcttgggattgtatcggaataaag

SEQ ID NO: 349176 - DNA, 25 bp, Artificial
  probe
  misc_feature (1)..(25): SEQ ID NO: 3197; WAN024D9O; Start 8; Stop 32
tatttgacggagatgaataatggtc

SEQ ID NO: 349177 - DNA, 25 bp, Artificial
  probe
  misc_feature (1)..(25): SEQ ID NO: 3197; WAN024D9O; Start 263; Stop 287
tcgcttgggattgtatcggaataaa

SEQ ID NO: 349178 - DNA, 25 bp, Artificial
  probe
  misc_feature (1)..(25): SEQ ID NO: 3197; WAN024D9O; Start 268; Stop 292
tgggattgtatcggaataaagctaa

SEQ ID NO: 349179 - DNA, 25 bp, Artificial
  probe
  misc_feature (1)..(25): SEQ ID NO: 3197; WAN024D9O; Start 267; Stop 291
ttgggattgtatcggaataaagcta

SEQ ID NO: 349180 - DNA, 25 bp, Artificial
  probe
  misc_feature (1)..(25): SEQ ID NO: 3197; WAN024D9O; Start 616; Stop 640
gtgaccagtacccacaattatatga

SEQ ID NO: 349181 - DNA, 25 bp, Artificial
  probe
  misc_feature (1)..(25): SEQ ID NO: 3197; WAN024D9O; Start 5; Stop 29
gactatttgacggagatgaataatg

SEQ ID NO: 349182 - DNA, 25 bp, Artificial
  probe
  misc_feature (1)..(25): SEQ ID NO: 3197; WAN024D9O; Start 619; Stop 643
accagtacccacaattatatgattt

SEQ ID NO: 349183 - DNA, 25 bp, Artificial
  probe
  misc_feature (1)..(25): SEQ ID NO: 3197; WAN024D9O; Start 269; Stop 293
gggattgtatcggaataaagctaaa

SEQ ID NO: 349184 - DNA, 25 bp, Artificial
  probe
  misc_feature (1)..(25): SEQ ID NO: 3197; WAN024D9O; Start 266; Stop 290
cttgggattgtatcggaataaagct

SEQ ID NO: 349185 - DNA, 25 bp, Artificial
  probe
  misc_feature (1)..(25): SEQ ID NO: 3198; WAN024AML; Start 1; Stop 25
caaggttctaggtcttcagattgat

SEQ ID NO: 349186 - DNA, 25 bp, Artificial
  probe
  misc_feature (1)..(25): SEQ ID NO: 3198; WAN024AML; Start 2; Stop 26
aaggttctaggtcttcagattgatt

SEQ ID NO: 349187 - DNA, 25 bp, Artificial
  probe
  misc_feature (1)..(25): SEQ ID NO: 3198; WAN024AML; Start 69; Stop 93
gtcttgacattctcttctaagggtg

SEQ ID NO: 349188 - DNA, 25 bp, Artificial
  probe
  misc_feature (1)..(25): SEQ ID NO: 3198; WAN024AML; Start 71; Stop 95
cttgacattctcttctaagggtgta
